United States Patent Application Publication US 2020/0095579 A1 - sequence listing, part 14

SEQ ID NO: 207564 - DNA, 20 bp, Artificial Sequence
  Description of Artificial Sequence: Synthetic oligonucleotide
  Target: LAMA2; (-) strand; PAM type: YTN; PAM sequence: TTA
gtcttgctagcggtctatca

SEQ ID NO: 207565 - DNA, 20 bp, Artificial Sequence
  Description of Artificial Sequence: Synthetic oligonucleotide
  Target: LAMA2; (-) strand; PAM type: YTN; PAM sequence: TTA
ttagtcttgctagcggtcta

SEQ ID NO: 207566 - DNA, 20 bp, Artificial Sequence
  Description of Artificial Sequence: Synthetic oligonucleotide
  Target: LAMA2; (-) strand; PAM type: YTN; PAM sequence: TTT
attagtcttgctagcggtct

SEQ ID NO: 207567 - DNA, 20 bp, Artificial Sequence
  Description of Artificial Sequence: Synthetic oligonucleotide
  Target: LAMA2; (-) strand; PAM type: YTN; PAM sequence: CTT
tattagtcttgctagcggtc

SEQ ID NO: 207568 - DNA, 20 bp, Artificial Sequence
  Description of Artificial Sequence: Synthetic oligonucleotide
  Target: LAMA2; (-) strand; PAM type: YTN; PAM sequence: TTC
tttattagtcttgctagcgg

SEQ ID NO: 207569 - DNA, 20 bp, Artificial Sequence
  Description of Artificial Sequence: Synthetic oligonucleotide
  Target: LAMA2; (-) strand; PAM type: YTN; PAM sequence: TTT
ctttattagtcttgctagcg

SEQ ID NO: 207570 - DNA, 20 bp, Artificial Sequence
  Description of Artificial Sequence: Synthetic oligonucleotide
  Target: LAMA2; (-) strand; PAM type: YTN; PAM sequence: TTT
tctttattagtcttgctagc

SEQ ID NO: 207571 - DNA, 20 bp, Artificial Sequence
  Description of Artificial Sequence: Synthetic oligonucleotide
  Target: LAMA2; (-) strand; PAM type: YTN; PAM sequence: TTT
ttctttattagtcttgctag

SEQ ID NO: 207572 - DNA, 20 bp, Artificial Sequence
  Description of Artificial Sequence: Synthetic oligonucleotide
  Target: LAMA2; (-) strand; PAM type: YTN; PAM sequence: TTT
tttctttattagtcttgcta

SEQ ID NO: 207573 - DNA, 20 bp, Artificial Sequence
  Description of Artificial Sequence: Synthetic oligonucleotide
  Target: LAMA2; (-) strand; PAM type: YTN; PAM sequence: TTT
ttttctttattagtcttgct

SEQ ID NO: 207574 - DNA, 20 bp, Artificial Sequence
  Description of Artificial Sequence: Synthetic oligonucleotide
  Target: LAMA2; (-) strand; PAM type: YTN; PAM sequence: CTT
tttttctttattagtcttgc

SEQ ID NO: 207575 - DNA, 20 bp, Artificial Sequence
  Description of Artificial Sequence: Synthetic oligonucleotide
  Target: LAMA2; (-) strand; PAM type: YTN; PAM sequence: CTC
tttttttctttattagtctt

SEQ ID NO: 207576 - DNA, 20 bp, Artificial Sequence
  Description of Artificial Sequence: Synthetic oligonucleotide
  Target: LAMA2; (-) strand; PAM type: YTN; PAM sequence: CTC
tctttttttctttattagtc

SEQ ID NO: 207577 - DNA, 20 bp, Artificial Sequence
  Description of Artificial Sequence: Synthetic oligonucleotide
  Target: LAMA2; (-) strand; PAM type: YTN; PAM sequence: TTC
tctctttttttctttattag

SEQ ID NO: 207578 - DNA, 20 bp, Artificial Sequence
  Description of Artificial Sequence: Synthetic oligonucleotide
  Target: LAMA2; (-) strand; PAM type: YTN; PAM sequence: CTT
ctctctttttttctttatta

SEQ ID NO: 207579 - DNA, 20 bp, Artificial Sequence
  Description of Artificial Sequence: Synthetic oligonucleotide
  Target: LAMA2; (-) strand; PAM type: YTN; PAM sequence: TTC
ttctctctttttttctttat

SEQ ID NO: 207580 - DNA, 20 bp, Artificial Sequence
  Description of Artificial Sequence: Synthetic oligonucleotide
  Target: LAMA2; (-) strand; PAM type: YTN; PAM sequence: TTG
attcttctctctttttttct

SEQ ID NO: 207581 - DNA, 20 bp, Artificial Sequence
  Description of Artificial Sequence: Synthetic oligonucleotide
  Target: LAMA2; (-) strand; PAM type: YTN; PAM sequence: TTT
gattcttctctctttttttc

SEQ ID NO: 207582 - DNA, 20 bp, Artificial Sequence
  Description of Artificial Sequence: Synthetic oligonucleotide
  Target: LAMA2; (-) strand; PAM type: YTN; PAM sequence: CTA
tttgattcttctctcttttt

SEQ ID NO: 207583 - DNA, 20 bp, Artificial Sequence
  Description of Artificial Sequence: Synthetic oligonucleotide
  Target: LAMA2; (-) strand; PAM type: YTN; PAM sequence: TTG
tgtctatttgattcttctct

SEQ ID NO: 207584 - DNA, 20 bp, Artificial Sequence
  Description of Artificial Sequence: Synthetic oligonucleotide
  Target: LAMA2; (-) strand; PAM type: YTN; PAM sequence: TTA
ttgtgtctatttgattcttc

SEQ ID NO: 207585 - DNA, 20 bp, Artificial Sequence
  Description of Artificial Sequence: Synthetic oligonucleotide
  Target: LAMA2; (-) strand; PAM type: YTN; PAM sequence: TTT
attgtgtctatttgattctt

SEQ ID NO: 207586 - DNA, 20 bp, Artificial Sequence
  Description of Artificial Sequence: Synthetic oligonucleotide
  Target: LAMA2; (-) strand; PAM type: YTN; PAM sequence: TTT
tattgtgtctatttgattct

SEQ ID NO: 207587 - DNA, 20 bp, Artificial Sequence
  Description of Artificial Sequence: Synthetic oligonucleotide
  Target: LAMA2; (-) strand; PAM type: YTN; PAM sequence: TTT
ttattgtgtctatttgattc

SEQ ID NO: 207588 - DNA, 20 bp, Artificial Sequence
  Description of Artificial Sequence: Synthetic oligonucleotide
  Target: LAMA2; (-) strand; PAM type: YTN; PAM sequence: TTT
tttattgtgtctatttgatt

SEQ ID NO: 207589 - DNA, 20 bp, Artificial Sequence
  Description of Artificial Sequence: Synthetic oligonucleotide
  Target: LAMA2; (-) strand; PAM type: YTN; PAM sequence: TTA
tcattttttattgtgtctat

SEQ ID NO: 207590 - DNA, 20 bp, Artificial Sequence
  Description of Artificial Sequence: Synthetic oligonucleotide
  Target: LAMA2; (-) strand; PAM type: YTN; PAM sequence: TTT
atcattttttattgtgtcta

SEQ ID NO: 207591 - DNA, 20 bp, Artificial Sequence
  Description of Artificial Sequence: Synthetic oligonucleotide
  Target: LAMA2; (-) strand; PAM type: YTN; PAM sequence: CTT
tatcattttttattgtgtct

SEQ ID NO: 207592 - DNA, 20 bp, Artificial Sequence
  Description of Artificial Sequence: Synthetic oligonucleotide
  Target: LAMA2; (-) strand; PAM type: YTN; PAM sequence: CTG
tgggatcggtggtgatatcc

SEQ ID NO: 207593 - DNA, 20 bp, Artificial Sequence
  Description of Artificial Sequence: Synthetic oligonucleotide
  Target: LAMA2; (-) strand; PAM type: YTN; PAM sequence: TTC
tgtgggatcggtggtgatat

SEQ ID NO: 207594 - DNA, 20 bp, Artificial Sequence
  Description of Artificial Sequence: Synthetic oligonucleotide
  Target: LAMA2; (-) strand; PAM type: YTN; PAM sequence: TTT
ctgtgggatcggtggtgata

SEQ ID NO: 207595 - DNA, 20 bp, Artificial Sequence
  Description of Artificial Sequence: Synthetic oligonucleotide
  Target: LAMA2; (-) strand; PAM type: YTN; PAM sequence: TTG
tatttctgtgggatcggtgg

SEQ ID NO: 207596 - DNA, 20 bp, Artificial Sequence
  Description of Artificial Sequence: Synthetic oligonucleotide
  Target: LAMA2; (-) strand; PAM type: YTN; PAM sequence: TTT
gtatttctgtgggatcggtg

SEQ ID NO: 207597 - DNA, 20 bp, Artificial Sequence
  Description of Artificial Sequence: Synthetic oligonucleotide
  Target: LAMA2; (-) strand; PAM type: YTN; PAM sequence: CTG
atggtagtttgtatttctgt

SEQ ID NO: 207598 - DNA, 20 bp, Artificial Sequence
  Description of Artificial Sequence: Synthetic oligonucleotide
  Target: LAMA2; (-) strand; PAM type: YTN; PAM sequence: CTC
tgatggtagtttgtatttct

SEQ ID NO: 207599 - DNA, 20 bp, Artificial Sequence
  Description of Artificial Sequence: Synthetic oligonucleotide
  Target: LAMA2; (-) strand; PAM type: YTN; PAM sequence: TTC
tctgatggtagtttgtattt

SEQ ID NO: 207600 - DNA, 20 bp, Artificial Sequence
  Description of Artificial Sequence: Synthetic oligonucleotide
  Target: LAMA2; (-) strand; PAM type: YTN; PAM sequence: TTG
tagtattctctgatggtagt

SEQ ID NO: 207601 - DNA, 20 bp, Artificial Sequence
  Description of Artificial Sequence: Synthetic oligonucleotide
  Target: LAMA2; (-) strand; PAM type: YTN; PAM sequence: TTT
gtagtattctctgatggtag

SEQ ID NO: 207602 - DNA, 20 bp, Artificial Sequence
  Description of Artificial Sequence: Synthetic oligonucleotide
  Target: LAMA2; (-) strand; PAM type: YTN; PAM sequence: TTG
cgtagaggtgtttgtagtat

SEQ ID NO: 207603 - DNA, 20 bp, Artificial Sequence
  Description of Artificial Sequence: Synthetic oligonucleotide
  Target: LAMA2; (-) strand; PAM type: YTN; PAM sequence: TTT
gcgtagaggtgtttgtagta

SEQ ID NO: 207604 - DNA, 20 bp, Artificial Sequence
  Description of Artificial Sequence: Synthetic oligonucleotide
  Target: LAMA2; (-) strand; PAM type: YTN; PAM sequence: TTA
tttgcgtagaggtgtttgta

SEQ ID NO: 207605 - DNA, 20 bp, Artificial Sequence
  Description of Artificial Sequence: Synthetic oligonucleotide
  Target: LAMA2; (-) strand; PAM type: YTN; PAM sequence: TTT
atttgcgtagaggtgtttgt

SEQ ID NO: 207606 - DNA, 20 bp, Artificial Sequence
  Description of Artificial Sequence: Synthetic oligonucleotide
  Target: LAMA2; (-) strand; PAM type: YTN; PAM sequence: CTA
gtttatttgcgtagaggtgt

SEQ ID NO: 207607 - DNA, 20 bp, Artificial Sequence
  Description of Artificial Sequence: Synthetic oligonucleotide
  Target: LAMA2; (-) strand; PAM type: YTN; PAM sequence: TTC
tagtttatttgcgtagaggt

SEQ ID NO: 207608 - DNA, 20 bp, Artificial Sequence
  Description of Artificial Sequence: Synthetic oligonucleotide
  Target: LAMA2; (-) strand; PAM type: YTN; PAM sequence: TTT
ctagtttatttgcgtagagg

SEQ ID NO: 207609 - DNA, 20 bp, Artificial Sequence
  Description of Artificial Sequence: Synthetic oligonucleotide
  Target: LAMA2; (-) strand; PAM type: YTN; PAM sequence: TTT
tctagtttatttgcgtagag

SEQ ID NO: 207610 - DNA, 20 bp, Artificial Sequence
  Description of Artificial Sequence: Synthetic oligonucleotide
  Target: LAMA2; (-) strand; PAM type: YTN; PAM sequence: CTA
gattttctagtttatttgcg

SEQ ID NO: 207611 - DNA, 20 bp, Artificial Sequence
  Description of Artificial Sequence: Synthetic oligonucleotide
  Target: LAMA2; (-) strand; PAM type: YTN; PAM sequence: TTC
tagattttctagtttatttg

SEQ ID NO: 207612 - DNA, 20 bp, Artificial Sequence
  Description of Artificial Sequence: Synthetic oligonucleotide
  Target: LAMA2; (-) strand; PAM type: YTN; PAM sequence: CTT
ctagattttctagtttattt

SEQ ID NO: 207613 - DNA, 20 bp, Artificial Sequence
  Description of Artificial Sequence: Synthetic oligonucleotide
  Target: LAMA2; (-) strand; PAM type: YTN; PAM sequence: TTC
ttctagattttctagtttat

SEQ ID NO: 207614 - DNA, 20 bp, Artificial Sequence
  Description of Artificial Sequence: Synthetic oligonucleotide
  Target: LAMA2; (-) strand; PAM type: YTN; PAM sequence: TTT
cttctagattttctagttta

SEQ ID NO: 207615 - DNA, 20 bp, Artificial Sequence
  Description of Artificial Sequence: Synthetic oligonucleotide
  Target: LAMA2; (-) strand; PAM type: YTN; PAM sequence: TTG
ggagagtgtatgtgtcgagg

SEQ ID NO: 207616 - DNA, 20 bp, Artificial Sequence
  Description of Artificial Sequence: Synthetic oligonucleotide
  Target: LAMA2; (-) strand; PAM type: YTN; PAM sequence: CTT
gggagagtgtatgtgtcgag

SEQ ID NO: 207617 - DNA, 20 bp, Artificial Sequence
  Description of Artificial Sequence: Synthetic oligonucleotide
  Target: LAMA2; (-) strand; PAM type: YTN; PAM sequence: TTA
gtcttgggagagtgtatgtg

SEQ ID NO: 207618 - DNA, 20 bp, Artificial Sequence
  Description of Artificial Sequence: Synthetic oligonucleotide
  Target: LAMA2; (-) strand; PAM type: YTN; PAM sequence: TTT
agtcttgggagagtgtatgt

SEQ ID NO: 207619 - DNA, 20 bp, Artificial Sequence
  Description of Artificial Sequence: Synthetic oligonucleotide
  Target: LAMA2; (-) strand; PAM type: YTN; PAM sequence: CTG
gtttagtcttgggagagtgt

SEQ ID NO: 207620 - DNA, 20 bp, Artificial Sequence
  Description of Artificial Sequence: Synthetic oligonucleotide
  Target: LAMA2; (-) strand; PAM type: YTN; PAM sequence: TTC
ctggtttagtcttgggagag

SEQ ID NO: 207621 - DNA, 20 bp, Artificial Sequence
  Description of Artificial Sequence: Synthetic oligonucleotide
  Target: LAMA2; (-) strand; PAM type: YTN; PAM sequence: CTT
cctggtttagtcttgggaga

SEQ ID NO: 207622 - DNA, 20 bp, Artificial Sequence
  Description of Artificial Sequence: Synthetic oligonucleotide
  Target: LAMA2; (-) strand; PAM type: YTN; PAM sequence: TTC
ttcctggtttagtcttggga

SEQ ID NO: 207623 - DNA, 20 bp, Artificial Sequence
  Description of Artificial Sequence: Synthetic oligonucleotide
  Target: LAMA2; (-) strand; PAM type: YTN; PAM sequence: CTT
cttcctggtttagtcttggg

SEQ ID NO: 207624 - DNA, 20 bp, Artificial Sequence
  Description of Artificial Sequence: Synthetic oligonucleotide
  Target: LAMA2; (-) strand; PAM type: YTN; PAM sequence: TTC
aacttcttcctggtttagtc

SEQ ID NO: 207625 - DNA, 20 bp, Artificial Sequence
  Description of Artificial Sequence: Synthetic oligonucleotide
  Target: LAMA2; (-) strand; PAM type: YTN; PAM sequence: TTC
agagattcaacttcttcctg

SEQ ID NO: 207626 - DNA, 20 bp, Artificial Sequence
  Description of Artificial Sequence: Synthetic oligonucleotide
  Target: LAMA2; (-) strand; PAM type: YTN; PAM sequence: TTG
gtcgattcagagattcaact

SEQ ID NO: 207627 - DNA, 20 bp, Artificial Sequence
  Description of Artificial Sequence: Synthetic oligonucleotide
  Target: LAMA2; (-) strand; PAM type: YTN; PAM sequence: TTA
ttggtcgattcagagattca

SEQ ID NO: 207628 - DNA, 20 bp, Artificial Sequence
  Description of Artificial Sequence: Synthetic oligonucleotide
  Target: LAMA2; (-) strand; PAM type: YTN; PAM sequence: CTG
ttattggtcgattcagagat

SEQ ID NO: 207629 - DNA, 20 bp, Artificial Sequence
  Description of Artificial Sequence: Synthetic oligonucleotide
  Target: LAMA2; (-) strand; PAM type: YTN; PAM sequence: TTC
agagcctgttattggtcgat

SEQ ID NO: 207630 - DNA, 20 bp, Artificial Sequence
  Description of Artificial Sequence: Synthetic oligonucleotide
  Target: LAMA2; (-) strand; PAM type: YTN; PAM sequence: TTT
cagagcctgttattggtcga

SEQ ID NO: 207631 - DNA, 20 bp, Artificial Sequence
  Description of Artificial Sequence: Synthetic oligonucleotide
  Target: LAMA2; (-) strand; PAM type: YTN; PAM sequence: TTG
ccacaatttcagagcctgtt

SEQ ID NO: 207632 - DNA, 20 bp, Artificial Sequence
  Description of Artificial Sequence: Synthetic oligonucleotide
  Target: LAMA2; (-) strand; PAM type: YTN; PAM sequence: TTA
ttgccacaatttcagagcct

SEQ ID NO: 207633 - DNA, 20 bp, Artificial Sequence
  Description of Artificial Sequence: Synthetic oligonucleotide
  Target: LAMA2; (-) strand; PAM type: YTN; PAM sequence: TTG
attattgccacaatttcaga

SEQ ID NO: 207634 - DNA, 20 bp, Artificial Sequence
  Description of Artificial Sequence: Synthetic oligonucleotide
  Target: LAMA2; (-) strand; PAM type: YTN; PAM sequence: CTA
ttgattattgccacaatttc

SEQ ID NO: 207635 - DNA, 20 bp, Artificial Sequence
  Description of Artificial Sequence: Synthetic oligonucleotide
  Target: LAMA2; (-) strand; PAM type: YTN; PAM sequence: TTG
gtaaactattgattattgcc

SEQ ID NO: 207636 - DNA, 20 bp, Artificial Sequence
  Description of Artificial Sequence: Synthetic oligonucleotide
  Target: LAMA2; (-) strand; PAM type: YTN; PAM sequence: TTG
gttggtaaactattgattat

SEQ ID NO: 207637 - DNA, 20 bp, Artificial Sequence
  Description of Artificial Sequence: Synthetic oligonucleotide
  Target: LAMA2; (-) strand; PAM type: YTN; PAM sequence: TTT
ggttggtaaactattgatta

SEQ ID NO: 207638 - DNA, 20 bp, Artificial Sequence
  Description of Artificial Sequence: Synthetic oligonucleotide
  Target: LAMA2; (-) strand; PAM type: YTN; PAM sequence: TTT
tggttggtaaactattgatt

SEQ ID NO: 207639 - DNA, 20 bp, Artificial Sequence
  Description of Artificial Sequence: Synthetic oligonucleotide
  Target: LAMA2; (-) strand; PAM type: YTN; PAM sequence: TTT
ttggttggtaaactattgat

SEQ ID NO: 207640 - DNA, 20 bp, Artificial Sequence
  Description of Artificial Sequence: Synthetic oligonucleotide
  Target: LAMA2; (-) strand; PAM type: YTN; PAM sequence: CTT
tttggttggtaaactattga

SEQ ID NO: 207641 - DNA, 20 bp, Artificial Sequence
  Description of Artificial Sequence: Synthetic oligonucleotide
  Target: LAMA2; (-) strand; PAM type: YTN; PAM sequence: CTC
tttttggttggtaaactatt

SEQ ID NO: 207642 - DNA, 20 bp, Artificial Sequence
  Description of Artificial Sequence: Synthetic oligonucleotide
  Target: LAMA2; (-) strand; PAM type: YTN; PAM sequence: CTG
gactctttttggttggtaaa

SEQ ID NO: 207643 - DNA, 20 bp, Artificial Sequence
  Description of Artificial Sequence: Synthetic oligonucleotide
  Target: LAMA2; (-) strand; PAM type: YTN; PAM sequence: CTG
gtcctggactctttttggtt

SEQ ID NO: 207644 - DNA, 20 bp, Artificial Sequence
  Description of Artificial Sequence: Synthetic oligonucleotide
  Target: LAMA2; (-) strand; PAM type: YTN; PAM sequence: CTG
tgaatccatctggtcctgga

SEQ ID NO: 207645 - DNA, 20 bp, Artificial Sequence
  Description of Artificial Sequence: Synthetic oligonucleotide
  Target: LAMA2; (-) strand; PAM type: YTN; PAM sequence: TTC
ggctgtgaatccatctggtc

SEQ ID NO: 207646 - DNA, 20 bp, Artificial Sequence
  Description of Artificial Sequence: Synthetic oligonucleotide
  Target: LAMA2; (-) strand; PAM type: YTN; PAM sequence: CTG
gtagaattcggctgtgaatc

SEQ ID NO: 207647 - DNA, 20 bp, Artificial Sequence
  Description of Artificial Sequence: Synthetic oligonucleotide
  Target: LAMA2; (-) strand; PAM type: YTN; PAM sequence: CTC
tggtagaattcggctgtgaa

SEQ ID NO: 207648 - DNA, 20 bp, Artificial Sequence
  Description of Artificial Sequence: Synthetic oligonucleotide
  Target: LAMA2; (-) strand; PAM type: YTN; PAM sequence: TTG
tacctctggtagaattcggc

SEQ ID NO: 207649 - DNA, 20 bp, Artificial Sequence
  Description of Artificial Sequence: Synthetic oligonucleotide
  Target: LAMA2; (-) strand; PAM type: YTN; PAM sequence: CTT
gtacctctggtagaattcgg

SEQ ID NO: 207650 - DNA, 20 bp, Artificial Sequence
  Description of Artificial Sequence: Synthetic oligonucleotide
  Target: LAMA2; (-) strand; PAM type: YTN; PAM sequence: CTC
cttgtacctctggtagaatt

SEQ ID NO: 207651 - DNA, 20 bp, Artificial Sequence
  Description of Artificial Sequence: Synthetic oligonucleotide
  Target: LAMA2; (-) strand; PAM type: YTN; PAM sequence: TTC
ctccttgtacctctggtaga

SEQ ID NO: 207652 - DNA, 20 bp, Artificial Sequence
  Description of Artificial Sequence: Synthetic oligonucleotide
  Target: LAMA2; (-) strand; PAM type: YTN; PAM sequence: TTC
agaaggaatggtaccagttc

SEQ ID NO: 207653 - DNA, 20 bp, Artificial Sequence
  Description of Artificial Sequence: Synthetic oligonucleotide
  Target: LAMA2; (-) strand; PAM type: YTN; PAM sequence: TTT
cagaaggaatggtaccagtt

SEQ ID NO: 207654 - DNA, 20 bp, Artificial Sequence
  Description of Artificial Sequence: Synthetic oligonucleotide
  Target: LAMA2; (-) strand; PAM type: YTN; PAM sequence: TTG
gaatagtttcagaaggaatg

SEQ ID NO: 207655 - DNA, 20 bp, Artificial Sequence
  Description of Artificial Sequence: Synthetic oligonucleotide
  Target: LAMA2; (-) strand; PAM type: YTN; PAM sequence: TTG
attggaatagtttcagaagg

SEQ ID NO: 207656 - DNA, 20 bp, Artificial Sequence
  Description of Artificial Sequence: Synthetic oligonucleotide
  Target: LAMA2; (-) strand; PAM type: YTN; PAM sequence: CTA
ttgattggaatagtttcaga

SEQ ID NO: 207657 - DNA, 20 bp, Artificial Sequence
  Description of Artificial Sequence: Synthetic oligonucleotide
  Target: LAMA2; (-) strand; PAM type: YTN; PAM sequence: TTC
tattgattggaatagtttca

SEQ ID NO: 207658 - DNA, 20 bp, Artificial Sequence
  Description of Artificial Sequence: Synthetic oligonucleotide
  Target: LAMA2; (-) strand; PAM type: YTN; PAM sequence: TTT
ctattgattggaatagtttc

SEQ ID NO: 207659 - DNA, 20 bp, Artificial Sequence
  Description of Artificial Sequence: Synthetic oligonucleotide
  Target: LAMA2; (-) strand; PAM type: YTN; PAM sequence: TTT
tctattgattggaatagttt

SEQ ID NO: 207660 - DNA, 20 bp, Artificial Sequence
  Description of Artificial Sequence: Synthetic oligonucleotide
  Target: LAMA2; (-) strand; PAM type: YTN; PAM sequence: TTT
ttctattgattggaatagtt

SEQ ID NO: 207661 - DNA, 20 bp, Artificial Sequence
  Description of Artificial Sequence: Synthetic oligonucleotide
  Target: LAMA2; (-) strand; PAM type: YTN; PAM sequence: CTT
tttctattgattggaatagt

SEQ ID NO: 207662 - DNA, 20 bp, Artificial Sequence
  Description of Artificial Sequence: Synthetic oligonucleotide
  Target: LAMA2; (-) strand; PAM type: YTN; PAM sequence: CTC
tttttctattgattggaata

SEQ ID NO: 207663 - DNA, 20 bp, Artificial Sequence
  Description of Artificial Sequence: Synthetic oligonucleotide
  Target: LAMA2; (-) strand; PAM type: YTN; PAM sequence: TTC
cctctttttctattgattgg

SEQ ID NO: 207664 - DNA, 20 bp, Artificial Sequence
  Description of Artificial Sequence: Synthetic oligonucleotide
  Target: LAMA2; (-) strand; PAM type: YTN; PAM sequence: TTA
gggaggattccctctttttc

SEQ ID NO: 207665 - DNA, 20 bp, Artificial Sequence
  Description of Artificial Sequence: Synthetic oligonucleotide
  Target: LAMA2; (-) strand; PAM type: YTN; PAM sequence: CTC
ataaaatgagttagggagga

SEQ ID NO: 207666 - DNA, 20 bp, Artificial Sequence
  Description of Artificial Sequence: Synthetic oligonucleotide
  Target: LAMA2; (-) strand; PAM type: YTN; PAM sequence: CTG
gcctcataaaatgagttagg

SEQ ID NO: 207667 - DNA, 20 bp, Artificial Sequence
  Description of Artificial Sequence: Synthetic oligonucleotide
  Target: LAMA2; (-) strand; PAM type: YTN; PAM sequence: TTG
gtatcagaatgatgctggcc

SEQ ID NO: 207668 - DNA, 20 bp, Artificial Sequence
  Description of Artificial Sequence: Synthetic oligonucleotide
  Target: LAMA2; (-) strand; PAM type: YTN; PAM sequence: TTT
ggtatcagaatgatgctggc

SEQ ID NO: 207669 - DNA, 20 bp, Artificial Sequence
  Description of Artificial Sequence: Synthetic oligonucleotide
  Target: LAMA2; (-) strand; PAM type: YTN; PAM sequence: CTT
tggtatcagaatgatgctgg

SEQ ID NO: 207670 - DNA, 20 bp, Artificial Sequence
  Description of Artificial Sequence: Synthetic oligonucleotide
  Target: LAMA2; (-) strand; PAM type: YTN; PAM sequence: CTG
cccggctttggtatcagaat

SEQ ID NO: 207671 - DNA, 20 bp, Artificial Sequence
  Description of Artificial Sequence: Synthetic oligonucleotide
  Target: LAMA2; (-) strand; PAM type: YTN; PAM sequence: CTC
tgcccggctttggtatcaga

SEQ ID NO: 207672 - DNA, 20 bp, Artificial Sequence
  Description of Artificial Sequence: Synthetic oligonucleotide
  Target: LAMA2; (-) strand; PAM type: YTN; PAM sequence: TTG
tgtctctgcccggctttggt

SEQ ID NO: 207673 - DNA, 20 bp, Artificial Sequence
  Description of Artificial Sequence: Synthetic oligonucleotide
  Target: LAMA2; (-) strand; PAM type: YTN; PAM sequence: TTG
gttgtgtctctgcccggctt

SEQ ID NO: 207674 - DNA, 20 bp, Artificial Sequence
  Description of Artificial Sequence: Synthetic oligonucleotide
  Target: LAMA2; (-) strand; PAM type: YTN; PAM sequence: TTT
ggttgtgtctctgcccggct

SEQ ID NO: 207675 - DNA, 20 bp, Artificial Sequence
  Description of Artificial Sequence: Synthetic oligonucleotide
  Target: LAMA2; (-) strand; PAM type: YTN; PAM sequence: TTT
tggttgtgtctctgcccggc

SEQ ID NO: 207676 - DNA, 20 bp, Artificial Sequence
  Description of Artificial Sequence: Synthetic oligonucleotide
  Target: LAMA2; (-) strand; PAM type: YTN; PAM sequence: TTT
ttggttgtgtctctgcccgg

SEQ ID NO: 207677 - DNA, 20 bp, Artificial Sequence
  Description of Artificial Sequence: Synthetic oligonucleotide
  Target: LAMA2; (-) strand; PAM type: YTN; PAM sequence: TTT
tttggttgtgtctctgcccg

SEQ ID NO: 207678 - DNA, 20 bp, Artificial Sequence
  Description of Artificial Sequence: Synthetic oligonucleotide
  Target: LAMA2; (-) strand; PAM type: YTN; PAM sequence: CTT
ttttggttgtgtctctgccc

SEQ ID NO: 207679 - DNA, 20 bp, Artificial Sequence
  Description of Artificial Sequence: Synthetic oligonucleotide
  Target: LAMA2; (-) strand; PAM type: YTN; PAM sequence: CTC
ttttttggttgtgtctctgc

SEQ ID NO: 207680 - DNA, 20 bp, Artificial Sequence
  Description of Artificial Sequence: Synthetic oligonucleotide
  Target: LAMA2; (-) strand; PAM type: YTN; PAM sequence: TTC
tcttttttggttgtgtctct

SEQ ID NO: 207681 - DNA, 20 bp, Artificial Sequence
  Description of Artificial Sequence: Synthetic oligonucleotide
  Target: LAMA2; (-) strand; PAM type: YTN; PAM sequence: CTA
aaattctcttttttggttgt

SEQ ID NO: 207682 - DNA, 20 bp, Artificial Sequence
  Description of Artificial Sequence: Synthetic oligonucleotide
  Target: LAMA2; (-) strand; PAM type: YTN; PAM sequence: TTG
gtctaaaattctcttttttg

SEQ ID NO: 207683 - DNA, 20 bp, Artificial Sequence
  Description of Artificial Sequence: Synthetic oligonucleotide
  Target: LAMA2; (-) strand; PAM type: YTN; PAM sequence: TTC
atcaaggatattggtctaaa

SEQ ID NO: 207684 - DNA, 20 bp, Artificial Sequence
  Description of Artificial Sequence: Synthetic oligonucleotide
  Target: LAMA2; (-) strand; PAM type: YTN; PAM sequence: TTG
catcaatgttcatcaaggat

SEQ ID NO: 207685 - DNA, 20 bp, Artificial Sequence
  Description of Artificial Sequence: Synthetic oligonucleotide
  Target: LAMA2; (-) strand; PAM type: YTN; PAM sequence: TTT
gcatcaatgttcatcaagga

SEQ ID NO: 207686 - DNA, 20 bp, Artificial Sequence
  Description of Artificial Sequence: Synthetic oligonucleotide
  Target: LAMA2; (-) strand; PAM type: YTN; PAM sequence: TTT
tgcatcaatgttcatcaagg

SEQ ID NO: 207687 - DNA, 20 bp, Artificial Sequence
  Description of Artificial Sequence: Synthetic oligonucleotide
  Target: LAMA2; (-) strand; PAM type: YTN; PAM sequence: TTT
ttgcatcaatgttcatcaag

SEQ ID NO: 207688 - DNA, 20 bp, Artificial Sequence
  Description of Artificial Sequence: Synthetic oligonucleotide
  Target: LAMA2; (-) strand; PAM type: YTN; PAM sequence: TTG
aggatttttgcatcaatgtt

SEQ ID NO: 207689 - DNA, 20 bp, Artificial Sequence
  Description of Artificial Sequence: Synthetic oligonucleotide
  Target: LAMA2; (-) strand; PAM type: YTN; PAM sequence: TTA
ttgaggatttttgcatcaat

SEQ ID NO: 207690 - DNA, 20 bp, Artificial Sequence
  Description of Artificial Sequence: Synthetic oligonucleotide
  Target: LAMA2; (-) strand; PAM type: YTN; PAM sequence: TTT
attgaggatttttgcatcaa

SEQ ID NO: 207691 - DNA, 20 bp, Artificial Sequence
  Description of Artificial Sequence: Synthetic oligonucleotide
  Target: LAMA2; (-) strand; PAM type: YTN; PAM sequence: TTT
tattgaggatttttgcatca

SEQ ID NO: 207692 - DNA, 20 bp, Artificial Sequence
  Description of Artificial Sequence: Synthetic oligonucleotide
  Target: LAMA2; (-) strand; PAM type: YTN; PAM sequence: TTG
ccagtattttattgaggatt

SEQ ID NO: 207693 - DNA, 20 bp, Artificial Sequence
  Description of Artificial Sequence: Synthetic oligonucleotide
  Target: LAMA2; (-) strand; PAM type: YTN; PAM sequence: TTT
gccagtattttattgaggat

SEQ ID NO: 207694 - DNA, 20 bp, Artificial Sequence
  Description of Artificial Sequence: Synthetic oligonucleotide
  Target: LAMA2; (-) strand; PAM type: YTN; PAM sequence: TTC
ggtttgccagtattttattg

SEQ ID NO: 207695 - DNA, 20 bp, Artificial Sequence
  Description of Artificial Sequence: Synthetic oligonucleotide
  Target: LAMA2; (-) strand; PAM type: YTN; PAM sequence: CTG
gattcggtttgccagtattt

SEQ ID NO: 207696 - DNA, 20 bp, Artificial Sequence
  Description of Artificial Sequence: Synthetic oligonucleotide
  Target: LAMA2; (-) strand; PAM type: YTN; PAM sequence: CTG
ctggattcggtttgccagta

SEQ ID NO: 207697 - DNA, 20 bp, Artificial Sequence
  Description of Artificial Sequence: Synthetic oligonucleotide
  Target: LAMA2; (-) strand; PAM type: YTN; PAM sequence: TTG
atgtgctgctggattcggtt

SEQ ID NO: 207698 - DNA, 20 bp, Artificial Sequence
  Description of Artificial Sequence: Synthetic oligonucleotide
  Target: LAMA2; (-) strand; PAM type: YTN; PAM sequence: TTT
gatgtgctgctggattcggt

SEQ ID NO: 207699 - DNA, 20 bp, Artificial Sequence
  Description of Artificial Sequence: Synthetic oligonucleotide
  Target: LAMA2; (-) strand; PAM type: YTN; PAM sequence: TTT
tgatgtgctgctggattcgg

SEQ ID NO: 207700 - DNA, 20 bp, Artificial Sequence
  Description of Artificial Sequence: Synthetic oligonucleotide
  Target: LAMA2; (-) strand; PAM type: YTN; PAM sequence: TTT
ttgatgtgctgctggattcg

SEQ ID NO: 207701 - DNA, 20 bp, Artificial Sequence
  Description of Artificial Sequence: Synthetic oligonucleotide
  Target: LAMA2; (-) strand; PAM type: YTN; PAM sequence: CTT
tttgatgtgctgctggattc

SEQ ID NO: 207702 - DNA, 20 bp, Artificial Sequence
  Description of Artificial Sequence: Synthetic oligonucleotide
  Target: LAMA2; (-) strand; PAM type: YTN; PAM sequence: TTG
atcatggtggataagctttt

SEQ ID NO: 207703 - DNA, 20 bp, Artificial Sequence
  Description of Artificial Sequence: Synthetic oligonucleotide
  Target: LAMA2; (-) strand; PAM type: YTN; PAM sequence: CTT
gatcatggtggataagcttt

SEQ ID NO: 207704 - DNA, 20 bp, Artificial Sequence
  Description of Artificial Sequence: Synthetic oligonucleotide
  Target: LAMA2; (-) strand; PAM type: YTN; PAM sequence: TTG
catcccagggatgaagccca

SEQ ID NO: 207705 - DNA, 20 bp, Artificial Sequence
  Description of Artificial Sequence: Synthetic oligonucleotide
  Target: LAMA2; (-) strand; PAM type: YTN; PAM sequence: CTT
gcatcccagggatgaagccc

SEQ ID NO: 207706 - DNA, 20 bp, Artificial Sequence
  Description of Artificial Sequence: Synthetic oligonucleotide
  Target: LAMA2; (-) strand; PAM type: YTN; PAM sequence: TTG
aaccagccttgcatcccagg

SEQ ID NO: 207707 - DNA, 20 bp, Artificial Sequence
  Description of Artificial Sequence: Synthetic oligonucleotide
  Target: LAMA2; (-) strand; PAM type: YTN; PAM sequence: TTG
cgtatattgaaccagccttg

SEQ ID NO: 207708 - DNA, 20 bp, Artificial Sequence
  Description of Artificial Sequence: Synthetic oligonucleotide
  Target: LAMA2; (-) strand; PAM type: YTN; PAM sequence: TTT
gcgtatattgaaccagcctt

SEQ ID NO: 207709 - DNA, 20 bp, Artificial Sequence
  Description of Artificial Sequence: Synthetic oligonucleotide
  Target: LAMA2; (-) strand; PAM type: YTN; PAM sequence: TTG
atttgcgtatattgaaccag

SEQ ID NO: 207710 - DNA, 20 bp, Artificial Sequence
  Description of Artificial Sequence: Synthetic oligonucleotide
  Target: LAMA2; (-) strand; PAM type: YTN; PAM sequence: TTA
ttgatttgcgtatattgaac

SEQ ID NO: 207711 - DNA, 20 bp, Artificial Sequence
  Description of Artificial Sequence: Synthetic oligonucleotide
  Target: LAMA2; (-) strand; PAM type: YTN; PAM sequence: TTT
attgatttgcgtatattgaa

SEQ ID NO: 207712 - DNA, 20 bp, Artificial Sequence
  Description of Artificial Sequence: Synthetic oligonucleotide
  Target: LAMA2; (-) strand; PAM type: YTN; PAM sequence: TTA
catttattgatttgcgtata

SEQ ID NO: 207713 - DNA, 20 bp, Artificial Sequence
  Description of Artificial Sequence: Synthetic oligonucleotide
  Target: LAMA2; (-) strand; PAM type: YTN; PAM sequence: CTG
gattacatttattgatttgc

SEQ ID NO: 207714 - DNA, 20 bp, Artificial Sequence
  Description of Artificial Sequence: Synthetic oligonucleotide
  Target: LAMA2; (-) strand; PAM type: YTN; PAM sequence: TTA
tatgctggattacatttatt

SEQ ID NO: 207715 - DNA, 20 bp, Artificial Sequence
  Description of Artificial Sequence: Synthetic oligonucleotide
  Target: LAMA2; (-) strand; PAM type: YTN; PAM sequence: TTT
atatgctggattacatttat

SEQ ID NO: 207716 - DNA, 20 bp, Artificial Sequence
  Description of Artificial Sequence: Synthetic oligonucleotide
  Target: LAMA2; (-) strand; PAM type: YTN; PAM sequence: CTG
tttatatgctggattacatt

SEQ ID NO: 207717 - DNA, 20 bp, Artificial Sequence
  Description of Artificial Sequence: Synthetic oligonucleotide
  Target: LAMA2; (-) strand; PAM type: YTN; PAM sequence: CTC
tgtttatatgctggattaca

SEQ ID NO: 207718 - DNA, 20 bp, Artificial Sequence
  Description of Artificial Sequence: Synthetic oligonucleotide
  Target: LAMA2; (-) strand; PAM type: YTN; PAM sequence: TTG
gctctgtttatatgctggat

SEQ ID NO: 207719 - DNA, 20 bp, Artificial Sequence
  Description of Artificial Sequence: Synthetic oligonucleotide
  Target: LAMA2; (-) strand; PAM type: YTN; PAM sequence: TTT
ggctctgtttatatgctgga

SEQ ID NO: 207720 - DNA, 20 bp, Artificial Sequence
  Description of Artificial Sequence: Synthetic oligonucleotide
  Target: LAMA2; (-) strand; PAM type: YTN; PAM sequence: CTT
tggctctgtttatatgctgg

SEQ ID NO: 207721 - DNA, 20 bp, Artificial Sequence
  Description of Artificial Sequence: Synthetic oligonucleotide
  Target: LAMA2; (-) strand; PAM type: YTN; PAM sequence: TTG
tctttggctctgtttatatg

SEQ ID NO: 207722 - DNA, 20 bp, Artificial Sequence
  Description of Artificial Sequence: Synthetic oligonucleotide
  Target: LAMA2; (-) strand; PAM type: YTN; PAM sequence: TTT
gtctttggctctgtttatat

SEQ ID NO: 207723 - DNA, 20 bp, Artificial Sequence
  Description of Artificial Sequence: Synthetic oligonucleotide
  Target: LAMA2; (-) strand; PAM type: YTN; PAM sequence: TTT
tgtctttggctctgtttata

SEQ ID NO: 207724 - DNA, 20 bp, Artificial Sequence
  Description of Artificial Sequence: Synthetic oligonucleotide
  Target: LAMA2; (-) strand; PAM type: YTN; PAM sequence: TTT
ttgtctttggctctgtttat

SEQ ID NO: 207725 - DNA, 20 bp, Artificial Sequence
  Description of Artificial Sequence: Synthetic oligonucleotide
  Target: LAMA2; (-) strand; PAM type: YTN; PAM sequence: TTG
agataatcatgtggtttttg

SEQ ID NO: 207726 - DNA, 20 bp, Artificial Sequence
  Description of Artificial Sequence: Synthetic oligonucleotide
  Target: LAMA2; (-) strand; PAM type: YTN; PAM sequence: CTA
ttgagataatcatgtggttt

SEQ ID NO: 207727 - DNA, 20 bp, Artificial Sequence
  Description of Artificial Sequence: Synthetic oligonucleotide
  Target: LAMA2; (-) strand; PAM type: YTN; PAM sequence: CTG
catctattgagataatcatg

SEQ ID NO: 207728 - DNA, 20 bp, Artificial Sequence
  Description of Artificial Sequence: Synthetic oligonucleotide
  Target: LAMA2; (-) strand; PAM type: YTN; PAM sequence: TTC
tgcatctattgagataatca

SEQ ID NO: 207729 - DNA, 20 bp, Artificial Sequence
  Description of Artificial Sequence: Synthetic oligonucleotide
  Target: LAMA2; (-) strand; PAM type: YTN; PAM sequence: TTT
ctgcatctattgagataatc

SEQ ID NO: 207730 - DNA, 20 bp, Artificial Sequence
  Description of Artificial Sequence: Synthetic oligonucleotide
  Target: LAMA2; (-) strand; PAM type: YTN; PAM sequence: TTT
tctgcatctattgagataat

SEQ ID NO: 207731 - DNA, 20 bp, Artificial Sequence
  Description of Artificial Sequence: Synthetic oligonucleotide
  Target: LAMA2; (-) strand; PAM type: YTN; PAM sequence: TTT
ttctgcatctattgagataa

SEQ ID NO: 207732 - DNA, 20 bp, Artificial Sequence
  Description of Artificial Sequence: Synthetic oligonucleotide
  Target: LAMA2; (-) strand; PAM type: YTN; PAM sequence: CTT
tttctgcatctattgagata

SEQ ID NO: 207733 - DNA, 20 bp, Artificial Sequence
  Description of Artificial Sequence: Synthetic oligonucleotide
  Target: LAMA2; (-) strand; PAM type: YTN; PAM sequence: TTG
tcaaaggctttttctgcatc

SEQ ID NO: 207734 - DNA, 20 bp, Artificial Sequence
  Description of Artificial Sequence: Synthetic oligonucleotide
  Target: LAMA2; (-) strand; PAM type: YTN; PAM sequence: TTT
gtcaaaggctttttctgcat

SEQ ID NO: 207735 - DNA, 20 bp, Artificial Sequence
  Description of Artificial Sequence: Synthetic oligonucleotide
  Target: LAMA2; (-) strand; PAM type: YTN; PAM sequence: TTT
tgtcaaaggctttttctgca

SEQ ID NO: 207736 - DNA, 20 bp, Artificial Sequence
  Description of Artificial Sequence: Synthetic oligonucleotide
  Target: LAMA2; (-) strand; PAM type: YTN; PAM sequence: TTG
aattttgtcaaaggcttttt

SEQ ID NO: 207737 - DNA, 20 bp, Artificial Sequence
  Description of Artificial Sequence: Synthetic oligonucleotide
  Target: LAMA2; (-) strand; PAM type: YTN; PAM sequence: TTG
ttgaattttgtcaaaggctt

SEQ ID NO: 207738 - DNA, 20 bp, Artificial Sequence
  Description of Artificial Sequence: Synthetic oligonucleotide
  Target: LAMA2; (-) strand; PAM type: YTN; PAM sequence: TTA
gcatgaagggttgttgaatt

SEQ ID NO: 207739 - DNA, 20 bp, Artificial Sequence
  Description of Artificial Sequence: Synthetic oligonucleotide
  Target: LAMA2; (-) strand; PAM type: YTN; PAM sequence: TTT
agcatgaagggttgttgaat

SEQ ID NO: 207740 - DNA, 20 bp, Artificial Sequence
  Description of Artificial Sequence: Synthetic oligonucleotide
  Target: LAMA2; (-) strand; PAM type: YTN; PAM sequence: TTT
tagcatgaagggttgttgaa

SEQ ID NO: 207741 - DNA, 20 bp, Artificial Sequence
  Description of Artificial Sequence: Synthetic oligonucleotide
  Target: LAMA2; (-) strand; PAM type: YTN; PAM sequence: TTT
ttagcatgaagggttgttga

SEQ ID NO: 207742 - DNA, 20 bp, Artificial Sequence
  Description of Artificial Sequence: Synthetic oligonucleotide
  Target: LAMA2; (-) strand; PAM type: YTN; PAM sequence: TTG
agagtttttagcatgaaggg

SEQ ID NO: 207743 - DNA, 20 bp, Artificial Sequence
  Description of Artificial Sequence: Synthetic oligonucleotide
  Target: LAMA2; (-) strand; PAM type: YTN; PAM sequence: TTA
ttgagagtttttagcatgaa

SEQ ID NO: 207744 - DNA, 20 bp, Artificial Sequence
  Description of Artificial Sequence: Synthetic oligonucleotide
  Target: LAMA2; (-) strand; PAM type: YTN; PAM sequence: TTT
attgagagtttttagcatga

SEQ ID NO: 207745 - DNA, 20 bp, Artificial Sequence
  Description of Artificial Sequence: Synthetic oligonucleotide
  Target: LAMA2; (-) strand; PAM type: YTN; PAM sequence: CTA
atttattgagagtttttagc

SEQ ID NO: 207746 - DNA, 20 bp, Artificial Sequence
  Description of Artificial Sequence: Synthetic oligonucleotide
  Target: LAMA2; (-) strand; PAM type: YTN; PAM sequence: TTG
aaatacatcccatcaatacc

SEQ ID NO: 207747 - DNA, 20 bp, Artificial Sequence
  Description of Artificial Sequence: Synthetic oligonucleotide
  Target: LAMA2; (-) strand; PAM type: YTN; PAM sequence: TTT
gaaatacatcccatcaatac

SEQ ID NO: 207748 - DNA, 20 bp, Artificial Sequence
  Description of Artificial Sequence: Synthetic oligonucleotide
  Target: LAMA2; (-) strand; PAM type: YTN; PAM sequence: TTT
tgaaatacatcccatcaata

SEQ ID NO: 207749 - DNA, 20 bp, Artificial Sequence
  Description of Artificial Sequence: Synthetic oligonucleotide
  Target: LAMA2; (-) strand; PAM type: YTN; PAM sequence: TTA
ttttgaaatacatcccatca

SEQ ID NO: 207750 - DNA, 20 bp, Artificial Sequence
  Description of Artificial Sequence: Synthetic oligonucleotide
  Target: LAMA2; (-) strand; PAM type: YTN; PAM sequence: TTA
ttattttgaaatacatccca

SEQ ID NO: 207751 - DNA, 20 bp, Artificial Sequence
  Description of Artificial Sequence: Synthetic oligonucleotide
  Target: LAMA2; (-) strand; PAM type: YTN; PAM sequence: CTT
attattttgaaatacatccc

SEQ ID NO: 207752 - DNA, 20 bp, Artificial Sequence
  Description of Artificial Sequence: Synthetic oligonucleotide
  Target: LAMA2; (-) strand; PAM type: YTN; PAM sequence: CTC
ttattattttgaaatacatc

SEQ ID NO: 207753 - DNA, 20 bp, Artificial Sequence
  Description of Artificial Sequence: Synthetic oligonucleotide
  Target: LAMA2; (-) strand; PAM type: YTN; PAM sequence: TTG
tcatagatagctcttattat

SEQ ID NO: 207754 - DNA, 20 bp, Artificial Sequence
  Description of Artificial Sequence: Synthetic oligonucleotide
  Target: LAMA2; (-) strand; PAM type: YTN; PAM sequence: TTT
gtcatagatagctcttatta

SEQ ID NO: 207755 - DNA, 20 bp, Artificial Sequence
  Description of Artificial Sequence: Synthetic oligonucleotide
  Target: LAMA2; (-) strand; PAM type: YTN; PAM sequence: CTG
tgggtttgtcatagatagct

SEQ ID NO: 207756 - DNA, 20 bp, Artificial Sequence
  Description of Artificial Sequence: Synthetic oligonucleotide
  Target: LAMA2; (-) strand; PAM type: YTN; PAM sequence: TTG
gctgtgggtttgtcatagat

SEQ ID NO: 207757 - DNA, 20 bp, Artificial Sequence
  Description of Artificial Sequence: Synthetic oligonucleotide
  Target: LAMA2; (-) strand; PAM type: YTN; PAM sequence: TTC
agtatgatattggctgtggg

SEQ ID NO: 207758 - DNA, 20 bp, Artificial Sequence
  Description of Artificial Sequence: Synthetic oligonucleotide
  Target: LAMA2; (-) strand; PAM type: YTN; PAM sequence: TTG
cccattcagtatgatattgg

SEQ ID NO: 207759 - DNA, 20 bp, Artificial Sequence
  Description of Artificial Sequence: Synthetic oligonucleotide
  Target: LAMA2; (-) strand; PAM type: YTN; PAM sequence: TTT
gcccattcagtatgatattg

SEQ ID NO: 207760 - DNA, 20 bp, Artificial Sequence
  Description of Artificial Sequence: Synthetic oligonucleotide
  Target: LAMA2; (-) strand; PAM type: YTN; PAM sequence: TTT
tgcccattcagtatgatatt

SEQ ID NO: 207761 - DNA, 20 bp, Artificial Sequence
  Description of Artificial Sequence: Synthetic oligonucleotide
  Target: LAMA2; (-) strand; PAM type: YTN; PAM sequence: TTT
ttgcccattcagtatgatat

SEQ ID NO: 207762 - DNA, 20 bp, Artificial Sequence
  Description of Artificial Sequence: Synthetic oligonucleotide
  Target: LAMA2; (-) strand; PAM type: YTN; PAM sequence: TTC
cagtttttgcccattcagta

SEQ ID NO: 207763 - DNA, 20 bp, Artificial Sequence
  Description of Artificial Sequence: Synthetic oligonucleotide
  Target: LAMA2; (-) strand; PAM type: YTN; PAM sequence: CTT
ccagtttttgcccattcagt

SEQ ID NO: 207764 - DNA, 20 bp, Artificial Sequence
  Description of Artificial Sequence: Synthetic oligonucleotide
  Target: LAMA2; (-) strand; PAM type: YTN; PAM sequence: TTC
aaagggaatgcttccagttt

SEQ ID NO: 207765 - DNA, 20 bp, Artificial Sequence
  Description of Artificial Sequence: Synthetic oligonucleotide
  Target: LAMA2; (-) strand; PAM type: YTN; PAM sequence: TTT
caaagggaatgcttccagtt

SEQ ID NO: 207766 - DNA, 20 bp, Artificial Sequence
  Description of Artificial Sequence: Synthetic oligonucleotide
  Target: LAMA2; (-) strand; PAM type: YTN; PAM sequence: TTT
tcaaagggaatgcttccagt

SEQ ID NO: 207767 - DNA, 20 bp, Artificial Sequence
  Description of Artificial Sequence: Synthetic oligonucleotide
  Target: LAMA2; (-) strand; PAM type: YTN; PAM sequence: TTG
tgccagttttcaaagggaat

SEQ ID NO: 207768 - DNA, 20 bp, Artificial Sequence
  Description of Artificial Sequence: Synthetic oligonucleotide
  Target: LAMA2; (-) strand; PAM type: YTN; PAM sequence: CTT
gtgccagttttcaaagggaa

SEQ ID NO: 207769 - DNA, 20 bp, Artificial Sequence
  Description of Artificial Sequence: Synthetic oligonucleotide
  Target: LAMA2; (-) strand; PAM type: YTN; PAM sequence: CTG
tcttgtgccagttttcaaag

SEQ ID NO: 207770 - DNA, 20 bp, Artificial Sequence
  Description of Artificial Sequence: Synthetic oligonucleotide
  Target: LAMA2; (-) strand; PAM type: YTN; PAM sequence: TTG
aataggagcggtgagagagg

SEQ ID NO: 207771 - DNA, 20 bp, Artificial Sequence
  Description of Artificial Sequence: Synthetic oligonucleotide
  Target: LAMA2; (-) strand; PAM type: YTN; PAM sequence: CTA
tgttgaataggagcggtgag

SEQ ID NO: 207772 - DNA, 20 bp, Artificial Sequence
  Description of Artificial Sequence: Synthetic oligonucleotide
  Target: LAMA2; (-) strand; PAM type: YTN; PAM sequence: TTC
caacactatgttgaatagga

SEQ ID NO: 207773 - DNA, 20 bp, Artificial Sequence
  Description of Artificial Sequence: Synthetic oligonucleotide
  Target: LAMA2; (-) strand; PAM type: YTN; PAM sequence: CTT
ccaacactatgttgaatagg

SEQ ID NO: 207774 - DNA, 20 bp, Artificial Sequence
  Description of Artificial Sequence: Synthetic oligonucleotide
  Target: LAMA2; (-) strand; PAM type: YTN; PAM sequence: CTG
gccagaacttccaacactat

SEQ ID NO: 207775 - DNA, 20 bp, Artificial Sequence
  Description of Artificial Sequence: Synthetic oligonucleotide
  Target: LAMA2; (-) strand; PAM type: YTN; PAM sequence: TTG
ccctggccagaacttccaac

SEQ ID NO: 207776 - DNA, 20 bp, Artificial Sequence
  Description of Artificial Sequence: Synthetic oligonucleotide
  Target: LAMA2; (-) strand; PAM type: YTN; PAM sequence: CTG
attgccctggccagaacttc

SEQ ID NO: 207777 - DNA, 20 bp, Artificial Sequence
  Description of Artificial Sequence: Synthetic oligonucleotide
  Target: LAMA2; (-) strand; PAM type: YTN; PAM sequence: CTG
cctgattgccctggccagaa

SEQ ID NO: 207778 - DNA, 20 bp, Artificial Sequence
  Description of Artificial Sequence: Synthetic oligonucleotide
  Target: LAMA2; (-) strand; PAM type: YTN; PAM sequence: CTC
ctgcctgattgccctggcca

SEQ ID NO: 207779 - DNA, 20 bp, Artificial Sequence
  Description of Artificial Sequence: Synthetic oligonucleotide
  Target: LAMA2; (-) strand; PAM type: YTN; PAM sequence: TTC
tcctgcctgattgccctggc

SEQ ID NO: 207780 - DNA, 20 bp, Artificial Sequence
  Description of Artificial Sequence: Synthetic oligonucleotide
  Target: LAMA2; (-) strand; PAM type: YTN; PAM sequence: CTT
ctcctgcctgattgccctgg

SEQ ID NO: 207781 - DNA, 20 bp, Artificial Sequence
  Description of Artificial Sequence: Synthetic oligonucleotide
  Target: LAMA2; (-) strand; PAM type: YTN; PAM sequence: TTC
cttctcctgcctgattgccc

SEQ ID NO: 207782 - DNA, 20 bp, Artificial Sequence
  Description of Artificial Sequence: Synthetic oligonucleotide
  Target: LAMA2; (-) strand; PAM type: YTN; PAM sequence: TTT
ccttctcctgcctgattgcc

SEQ ID NO: 207783 - DNA, 20 bp, Artificial Sequence
  Description of Artificial Sequence: Synthetic oligonucleotide
  Target: LAMA2; (-) strand; PAM type: YTN; PAM sequence: TTA
tttccttctcctgcctgatt

SEQ ID NO: 207784 - DNA, 20 bp, Artificial Sequence
  Description of Artificial Sequence: Synthetic oligonucleotide
  Target: LAMA2; (-) strand; PAM type: YTN; PAM sequence: TTT
atttccttctcctgcctgat

SEQ ID NO: 207785 - DNA, 20 bp, Artificial Sequence
  Description of Artificial Sequence: Synthetic oligonucleotide
  Target: LAMA2; (-) strand; PAM type: YTN; PAM sequence: CTT
tatttccttctcctgcctga

SEQ ID NO: 207786 - DNA, 20 bp, Artificial Sequence
  Description of Artificial Sequence: Synthetic oligonucleotide
  Target: LAMA2; (-) strand; PAM type: YTN; PAM sequence: TTG
aataccctttatttccttct

SEQ ID NO: 207787 - DNA, 20 bp, Artificial Sequence
  Description of Artificial Sequence: Synthetic oligonucleotide
  Target: LAMA2; (-) strand; PAM type: YTN; PAM sequence: CTA
attgaataccctttatttcc

SEQ ID NO: 207788 - DNA, 20 bp, Artificial Sequence
  Description of Artificial Sequence: Synthetic oligonucleotide
  Target: LAMA2; (-) strand; PAM type: YTN; PAM sequence: TTC
ctaattgaataccctttatt

SEQ ID NO: 207789 - DNA, 20 bp, Artificial Sequence
  Description of Artificial Sequence: Synthetic oligonucleotide
  Target: LAMA2; (-) strand; PAM type: YTN; PAM sequence: TTT
cctaattgaataccctttat

SEQ ID NO: 207790 - DNA, 20 bp, Artificial Sequence
  Description of Artificial Sequence: Synthetic oligonucleotide
  Target: LAMA2; (-) strand; PAM type: YTN; PAM sequence: TTT
tcctaattgaatacccttta

SEQ ID NO: 207791 - DNA, 20 bp, Artificial Sequence
  Description of Artificial Sequence: Synthetic oligonucleotide
  Target: LAMA2; (-) strand; PAM type: YTN; PAM sequence: CTT
ttcctaattgaatacccttt

SEQ ID NO: 207792 - DNA, 20 bp, Artificial Sequence
  Description of Artificial Sequence: Synthetic oligonucleotide
  Target: LAMA2; (-) strand; PAM type: YTN; PAM sequence: CTC
ttttcctaattgaataccct

SEQ ID NO: 207793 - DNA, 20 bp, Artificial Sequence
  Description of Artificial Sequence: Synthetic oligonucleotide
  Target: LAMA2; (-) strand; PAM type: YTN; PAM sequence: TTC
ctcttttcctaattgaatac

SEQ ID NO: 207794 - DNA, 20 bp, Artificial Sequence
  Description of Artificial Sequence: Synthetic oligonucleotide
  Target: LAMA2; (-) strand; PAM type: YTN; PAM sequence: CTT
cctcttttcctaattgaata

SEQ ID NO: 207795 - DNA, 20 bp, Artificial Sequence
  Description of Artificial Sequence: Synthetic oligonucleotide
  Target: LAMA2; (-) strand; PAM type: YTN; PAM sequence: TTG
acttcctcttttcctaattg

SEQ ID NO: 207796 - DNA, 20 bp, Artificial Sequence
  Description of Artificial Sequence: Synthetic oligonucleotide
  Target: LAMA2; (-) strand; PAM type: YTN; PAM sequence: TTT
gacttcctcttttcctaatt

SEQ ID NO: 207797 - DNA, 20 bp, Artificial Sequence
  Description of Artificial Sequence: Synthetic oligonucleotide
  Target: LAMA2; (-) strand; PAM type: YTN; PAM sequence: CTG
caaacagggacaatttgact

SEQ ID NO: 207798 - DNA, 20 bp, Artificial Sequence
  Description of Artificial Sequence: Synthetic oligonucleotide
  Target: LAMA2; (-) strand; PAM type: YTN; PAM sequence: CTA
gataaacaatcatgtcgtct

SEQ ID NO: 207799 - DNA, 20 bp, Artificial Sequence
  Description of Artificial Sequence: Synthetic oligonucleotide
  Target: LAMA2; (-) strand; PAM type: YTN; PAM sequence: TTC
tagataaacaatcatgtcgt

SEQ ID NO: 207800 - DNA, 20 bp, Artificial Sequence
  Description of Artificial Sequence: Synthetic oligonucleotide
  Target: LAMA2; (-) strand; PAM type: YTN; PAM sequence: TTT
ctagataaacaatcatgtcg

SEQ ID NO: 207801 - DNA, 20 bp, Artificial Sequence
  Description of Artificial Sequence: Synthetic oligonucleotide
  Target: LAMA2; (-) strand; PAM type: YTN; PAM sequence: TTT
tctagataaacaatcatgtc

SEQ ID NO: 207802 - DNA, 20 bp, Artificial Sequence
  Description of Artificial Sequence: Synthetic oligonucleotide
  Target: LAMA2; (-) strand; PAM type: YTN; PAM sequence: CTG
agacgatggggttttctaga

SEQ ID NO: 207803 - DNA, 20 bp, Artificial Sequence
  Description of Artificial Sequence: Synthetic oligonucleotide
  Target: LAMA2; (-) strand; PAM type: YTN; PAM sequence: TTG
ggctgagacgatggggtttt

SEQ ID NO: 207804 - DNA, 20 bp, Artificial Sequence
  Description of Artificial Sequence: Synthetic oligonucleotide
  Target: LAMA2; (-) strand; PAM type: YTN; PAM sequence: TTT
gggctgagacgatggggttt

SEQ ID NO: 207805 - DNA, 20 bp, Artificial Sequence
  Description of Artificial Sequence: Synthetic oligonucleotide
  Target: LAMA2; (-) strand; PAM type: YTN; PAM sequence: TTT
tgggctgagacgatggggtt

SEQ ID NO: 207806 - DNA, 20 bp, Artificial Sequence
  Description of Artificial Sequence: Synthetic oligonucleotide
  Target: LAMA2; (-) strand; PAM type: YTN; PAM sequence: TTA
aggagattttgggctgagac

SEQ ID NO: 207807 - DNA, 20 bp, Artificial Sequence
  Description of Artificial Sequence: Synthetic oligonucleotide
  Target: LAMA2; (-) strand; PAM type: YTN; PAM sequence: CTT
aaggagattttgggctgaga

SEQ ID NO: 207808 - DNA, 20 bp, Artificial Sequence
  Description of Artificial Sequence: Synthetic oligonucleotide
  Target: LAMA2; (-) strand; PAM type: YTN; PAM sequence: TTA
tcagcttaaggagattttgg

SEQ ID NO: 207809 - DNA, 20 bp, Artificial Sequence
  Description of Artificial Sequence: Synthetic oligonucleotide
  Target: LAMA2; (-) strand; PAM type: YTN; PAM sequence: CTT
atcagcttaaggagattttg

SEQ ID NO: 207810 - DNA, 20 bp, Artificial Sequence
  Description of Artificial Sequence: Synthetic oligonucleotide
  Target: LAMA2; (-) strand; PAM type: YTN; PAM sequence: TTG
cttatcagcttaaggagatt

SEQ ID NO: 207811 - DNA, 20 bp, Artificial Sequence
  Description of Artificial Sequence: Synthetic oligonucleotide
  Target: LAMA2; (-) strand; PAM type: YTN; PAM sequence: CTG
aagttgcttatcagcttaag

SEQ ID NO: 207812 - DNA, 20 bp, Artificial Sequence
  Description of Artificial Sequence: Synthetic oligonucleotide
  Target: LAMA2; (-) strand; PAM type: YTN; PAM sequence: TTG
ctgaagttgcttatcagctt

SEQ ID NO: 207813 - DNA, 20 bp, Artificial Sequence
  Description of Artificial Sequence: Synthetic oligonucleotide
  Target: LAMA2; (-) strand; PAM type: YTN; PAM sequence: TTT
gctgaagttgcttatcagct

SEQ ID NO: 207814 - DNA, 20 bp, Artificial Sequence
  Description of Artificial Sequence: Synthetic oligonucleotide
  Target: LAMA2; (-) strand; PAM type: YTN; PAM sequence: CTT
tgctgaagttgcttatcagc

SEQ ID NO: 207815 - DNA, 20 bp, Artificial Sequence
  Description of Artificial Sequence: Synthetic oligonucleotide
  Target: LAMA2; (-) strand; PAM type: YTN; PAM sequence: CTG
agactttgctgaagttgctt

SEQ ID NO: 207816 - DNA, 20 bp, Artificial Sequence
  Description of Artificial Sequence: Synthetic oligonucleotide
  Target: LAMA2; (-) strand; PAM type: YTN; PAM sequence: TTG
tatcctgagactttgctgaa

SEQ ID NO: 207817 - DNA, 20 bp, Artificial Sequence
  Description of Artificial Sequence: Synthetic oligonucleotide
  Target: LAMA2; (-) strand; PAM type: YTN; PAM sequence: TTT
gtatcctgagactttgctga

SEQ ID NO: 207818 - DNA, 20 bp, Artificial Sequence
  Description of Artificial Sequence: Synthetic oligonucleotide
  Target: LAMA2; (-) strand; PAM type: YTN; PAM sequence: TTT
tgtatcctgagactttgctg

SEQ ID NO: 207819 - DNA, 20 bp, Artificial Sequence
  Description of Artificial Sequence: Synthetic oligonucleotide
  Target: LAMA2; (-) strand; PAM type: YTN; PAM sequence: TTG
attttgtatcctgagacttt

SEQ ID NO: 207820 - DNA, 20 bp, Artificial Sequence
  Description of Artificial Sequence: Synthetic oligonucleotide
  Target: LAMA2; (-) strand; PAM type: YTN; PAM sequence: TTG
tacattgattttgtatcctg

SEQ ID NO: 207821 - DNA, 20 bp, Artificial Sequence
  Description of Artificial Sequence: Synthetic oligonucleotide
  Target: LAMA2; (-) strand; PAM type: YTN; PAM sequence: TTT
gtacattgattttgtatcct

SEQ ID NO: 207822 - DNA, 20 bp, Artificial Sequence
  Description of Artificial Sequence: Synthetic oligonucleotide
  Target: LAMA2; (-) strand; PAM type: YTN; PAM sequence: TTT
tgtacattgattttgtatcc

SEQ ID NO: 207823 - DNA, 20 bp, Artificial Sequence
  Description of Artificial Sequence: Synthetic oligonucleotide
  Target: LAMA2; (-) strand; PAM type: YTN; PAM sequence: TTT
ttgtacattgattttgtatc

SEQ ID NO: 207824 - DNA, 20 bp, Artificial Sequence
  Description of Artificial Sequence: Synthetic oligonucleotide
  Target: LAMA2; (-) strand; PAM type: YTN; PAM sequence: TTG
tgatttttgtacattgattt

SEQ ID NO: 207825 - DNA, 20 bp, Artificial Sequence
  Description of Artificial Sequence: Synthetic oligonucleotide
  Target: LAMA2; (-) strand; PAM type: YTN; PAM sequence: TTT
gtgatttttgtacattgatt

SEQ ID NO: 207826 - DNA, 20 bp, Artificial Sequence
  Description of Artificial Sequence: Synthetic oligonucleotide
  Target: LAMA2; (-) strand; PAM type: YTN; PAM sequence: TTG
gtgtataagaatgtttgtga

SEQ ID NO: 207827 - DNA, 20 bp, Artificial Sequence
  Description of Artificial Sequence: Synthetic oligonucleotide
  Target: LAMA2; (-) strand; PAM type: YTN; PAM sequence: TTG
ttggtgtataagaatgtttg

SEQ ID NO: 207828 - DNA, 20 bp, Artificial Sequence
  Description of Artificial Sequence: Synthetic oligonucleotide
  Target: LAMA2; (-) strand; PAM type: YTN; PAM sequence: CTG
ttgttggtgtataagaatgt

SEQ ID NO: 207829 - DNA, 20 bp, Artificial Sequence
  Description of Artificial Sequence: Synthetic oligonucleotide
  Target: LAMA2; (-) strand; PAM type: YTN; PAM sequence: TTG
tctgttgttggtgtataaga

SEQ ID NO: 207830 - DNA, 20 bp, Artificial Sequence
  Description of Artificial Sequence: Synthetic oligonucleotide
  Target: LAMA2; (-) strand; PAM type: YTN; PAM sequence: TTT
gtctgttgttggtgtataag

SEQ ID NO: 207831 - DNA, 20 bp, Artificial Sequence
  Description of Artificial Sequence: Synthetic oligonucleotide
  Target: LAMA2; (-) strand; PAM type: YTN; PAM sequence: CTG
tttgtctgttgttggtgtat

SEQ ID NO: 207832 - DNA, 20 bp, Artificial Sequence
  Description of Artificial Sequence: Synthetic oligonucleotide
  Target: LAMA2; (-) strand; PAM type: YTN; PAM sequence: CTC
tgtttgtctgttgttggtgt

SEQ ID NO: 207833 - DNA, 20 bp, Artificial Sequence
  Description of Artificial Sequence: Synthetic oligonucleotide
  Target: LAMA2; (-) strand; PAM type: YTN; PAM sequence: CTC
tctgtttgtctgttgttggt

SEQ ID NO: 207834 - DNA, 20 bp, Artificial Sequence
  Description of Artificial Sequence: Synthetic oligonucleotide
  Target: LAMA2; (-) strand; PAM type: YTN; PAM sequence: TTG
gctctctgtttgtctgttgt

SEQ ID NO: 207835 - DNA, 20 bp, Artificial Sequence
  Description of Artificial Sequence: Synthetic oligonucleotide
  Target: LAMA2; (-) strand; PAM type: YTN; PAM sequence: TTT
ggctctctgtttgtctgttg

SEQ ID NO: 207836 - DNA, 20 bp, Artificial Sequence
  Description of Artificial Sequence: Synthetic oligonucleotide
  Target: LAMA2; (-) strand; PAM type: YTN; PAM sequence: TTC
acccatgatttggctctctg

SEQ ID NO: 207837 - DNA, 20 bp, Artificial Sequence
  Description of Artificial Sequence: Synthetic oligonucleotide
  Target: LAMA2; (-) strand; PAM type: YTN; PAM sequence: TTG
tgaatgggagttcacccatg

SEQ ID NO: 207838 - DNA, 20 bp, Artificial Sequence
  Description of Artificial Sequence: Synthetic oligonucleotide
  Target: LAMA2; (-) strand; PAM type: YTN; PAM sequence: TTG
aagcaattgtgaatgggagt

SEQ ID NO: 207839 - DNA, 20 bp, Artificial Sequence
  Description of Artificial Sequence: Synthetic oligonucleotide
  Target: LAMA2; (-) strand; PAM type: YTN; PAM sequence: TTT
gaagcaattgtgaatgggag

SEQ ID NO: 207840 - DNA, 20 bp, Artificial Sequence
  Description of Artificial Sequence: Synthetic oligonucleotide
  Target: LAMA2; (-) strand; PAM type: YTN; PAM sequence: CTT
tgaagcaattgtgaatggga

SEQ ID NO: 207841 - DNA, 20 bp, Artificial Sequence
  Description of Artificial Sequence: Synthetic oligonucleotide
  Target: LAMA2; (-) strand; PAM type: YTN; PAM sequence: CTC
tttgaagcaattgtgaatgg

SEQ ID NO: 207842 - DNA, 20 bp, Artificial Sequence
  Description of Artificial Sequence: Synthetic oligonucleotide
  Target: LAMA2; (-) strand; PAM type: YTN; PAM sequence: TTC
tctttgaagcaattgtgaat

SEQ ID NO: 207843 - DNA, 20 bp, Artificial Sequence
  Description of Artificial Sequence: Synthetic oligonucleotide
  Target: LAMA2; (-) strand; PAM type: YTN; PAM sequence: TTA
ttctctttgaagcaattgtg

SEQ ID NO: 207844 - DNA, 20 bp, Artificial Sequence
  Description of Artificial Sequence: Synthetic oligonucleotide
  Target: LAMA2; (-) strand; PAM type: YTN; PAM sequence: TTT
attctctttgaagcaattgt

SEQ ID NO: 207845 - DNA, 20 bp, Artificial Sequence
  Description of Artificial Sequence: Synthetic oligonucleotide
  Target: LAMA2; (-) strand; PAM type: YTN; PAM sequence: TTT
tattctctttgaagcaattg

SEQ ID NO: 207846 - DNA, 20 bp, Artificial Sequence
  Description of Artificial Sequence: Synthetic oligonucleotide
  Target: LAMA2; (-) strand; PAM type: YTN; PAM sequence: CTA
ggtattttattctctttgaa

SEQ ID NO: 207847 - DNA, 20 bp, Artificial Sequence
  Description of Artificial Sequence: Synthetic oligonucleotide
  Target: LAMA2; (-) strand; PAM type: YTN; PAM sequence: TTC
ctaggtattttattctcttt

SEQ ID NO: 207848 - DNA, 20 bp, Artificial Sequence
  Description of Artificial Sequence: Synthetic oligonucleotide
  Target: LAMA2; (-) strand; PAM type: YTN; PAM sequence: TTG
gattcctaggtattttattc

SEQ ID NO: 207849 - DNA, 20 bp, Artificial Sequence
  Description of Artificial Sequence: Synthetic oligonucleotide
  Target: LAMA2; (-) strand; PAM type: YTN; PAM sequence: TTG
taagttggattcctaggtat

SEQ ID NO: 207850 - DNA, 20 bp, Artificial Sequence
  Description of Artificial Sequence: Synthetic oligonucleotide
  Target: LAMA2; (-) strand; PAM type: YTN; PAM sequence: CTT
gtaagttggattcctaggta

SEQ ID NO: 207851 - DNA, 20 bp, Artificial Sequence
  Description of Artificial Sequence: Synthetic oligonucleotide
  Target: LAMA2; (-) strand; PAM type: YTN; PAM sequence: TTC
acatcccttgtaagttggat

SEQ ID NO: 207852 - DNA, 20 bp, Artificial Sequence
  Description of Artificial Sequence: Synthetic oligonucleotide
  Target: LAMA2; (-) strand; PAM type: YTN; PAM sequence: CTT
cacatcccttgtaagttgga

SEQ ID NO: 207853 - DNA, 20 bp, Artificial Sequence
  Description of Artificial Sequence: Synthetic oligonucleotide
  Target: LAMA2; (-) strand; PAM type: YTN; PAM sequence: TTG
aagaggtccttcacatccct

SEQ ID NO: 207854 - DNA, 20 bp, Artificial Sequence
  Description of Artificial Sequence: Synthetic oligonucleotide
  Target: LAMA2; (-) strand; PAM type: YTN; PAM sequence: CTT
gaagaggtccttcacatccc

SEQ ID NO: 207855 - DNA, 20 bp, Artificial Sequence
  Description of Artificial Sequence: Synthetic oligonucleotide
  Target: LAMA2; (-) strand; PAM type: YTN; PAM sequence: CTC
cttgaagaggtccttcacat

SEQ ID NO: 207856 - DNA, 20 bp, Artificial Sequence
  Description of Artificial Sequence: Synthetic oligonucleotide
  Target: LAMA2; (-) strand; PAM type: YTN; PAM sequence: TTC
tccttgaagaggtccttcac

SEQ ID NO: 207857 - DNA, 20 bp, Artificial Sequence
  Description of Artificial Sequence: Synthetic oligonucleotide
  Target: LAMA2; (-) strand; PAM type: YTN; PAM sequence: TTG
tagttctccttgaagaggtc

SEQ ID NO: 207858 - DNA, 20 bp, Artificial Sequence
  Description of Artificial Sequence: Synthetic oligonucleotide
  Target: LAMA2; (-) strand; PAM type: YTN; PAM sequence: TTT
gtagttctccttgaagaggt

SEQ ID NO: 207859 - DNA, 20 bp, Artificial Sequence
  Description of Artificial Sequence: Synthetic oligonucleotide
  Target: LAMA2; (-) strand; PAM type: YTN; PAM sequence: TTG
agcagtggtttgtagttctc

SEQ ID NO: 207860 - DNA, 20 bp, Artificial Sequence
  Description of Artificial Sequence: Synthetic oligonucleotide
  Target: LAMA2; (-) strand; PAM type: YTN; PAM sequence: CTT
gagcagtggtttgtagttct

SEQ ID NO: 207861 - DNA, 20 bp, Artificial Sequence
  Description of Artificial Sequence: Synthetic oligonucleotide
  Target: LAMA2; (-) strand; PAM type: YTN; PAM sequence: TTC
cttgagcagtggtttgtagt

SEQ ID NO: 207862 - DNA, 20 bp, Artificial Sequence
  Description of Artificial Sequence: Synthetic oligonucleotide
  Target: LAMA2; (-) strand; PAM type: YTN; PAM sequence: TTT
ccttgagcagtggtttgtag

SEQ ID NO: 207863 - DNA, 20 bp, Artificial Sequence
  Description of Artificial Sequence: Synthetic oligonucleotide
  Target: LAMA2; (-) strand; PAM type: YTN; PAM sequence: TTA
tttccttgagcagtggtttg

SEQ ID NO: 207864 - DNA, 20 bp, Artificial Sequence
  Description of Artificial Sequence: Synthetic oligonucleotide
  Target: LAMA2; (-) strand; PAM type: YTN; PAM sequence: TTT
atttccttgagcagtggttt

SEQ ID NO: 207865 - DNA, 20 bp, Artificial Sequence
  Description of Artificial Sequence: Synthetic oligonucleotide
  Target: LAMA2; (-) strand; PAM type: YTN; PAM sequence: TTT
tatttccttgagcagtggtt

SEQ ID NO: 207866 - DNA, 20 bp, Artificial Sequence
  Description of Artificial Sequence: Synthetic oligonucleotide
  Target: LAMA2; (-) strand; PAM type: YTN; PAM sequence: CTT
ttatttccttgagcagtggt

SEQ ID NO: 207867 - DNA, 20 bp, Artificial Sequence
  Description of Artificial Sequence: Synthetic oligonucleotide
  Target: LAMA2; (-) strand; PAM type: YTN; PAM sequence: CTC
ttttatttccttgagcagtg

SEQ ID NO: 207868 - DNA, 20 bp, Artificial Sequence
  Description of Artificial Sequence: Synthetic oligonucleotide
  Target: LAMA2; (-) strand; PAM type: YTN; PAM sequence: CTC
ctcttttatttccttgagca

SEQ ID NO: 207869 - DNA, 20 bp, Artificial Sequence
  Description of Artificial Sequence: Synthetic oligonucleotide
  Target: LAMA2; (-) strand; PAM type: YTN; PAM sequence: TTG
tctcctcttttatttccttg

SEQ ID NO: 207870 - DNA, 20 bp, Artificial Sequence
  Description of Artificial Sequence: Synthetic oligonucleotide
  Target: LAMA2; (-) strand; PAM type: YTN; PAM sequence: TTT
gtctcctcttttatttcctt

SEQ ID NO: 207871 - DNA, 20 bp, Artificial Sequence
  Description of Artificial Sequence: Synthetic oligonucleotide
  Target: LAMA2; (-) strand; PAM type: YTN; PAM sequence: TTA
tttgtctcctcttttatttc

SEQ ID NO: 207872 - DNA, 20 bp, Artificial Sequence
  Description of Artificial Sequence: Synthetic oligonucleotide
  Target: LAMA2; (-) strand; PAM type: YTN; PAM sequence: TTT
atttgtctcctcttttattt

SEQ ID NO: 207873 - DNA, 20 bp, Artificial Sequence
  Description of Artificial Sequence: Synthetic oligonucleotide
  Target: LAMA2; (-) strand; PAM type: YTN; PAM sequence: TTC
catttatttgtctcctcttt

SEQ ID NO: 207874 - DNA, 20 bp, Artificial Sequence
  Description of Artificial Sequence: Synthetic oligonucleotide
  Target: LAMA2; (-) strand; PAM type: YTN; PAM sequence: CTT
ccatttatttgtctcctctt

SEQ ID NO: 207875 - DNA, 20 bp, Artificial Sequence
  Description of Artificial Sequence: Synthetic oligonucleotide
  Target: LAMA2; (-) strand; PAM type: YTN; PAM sequence: TTC
ttccatttatttgtctcctc

SEQ ID NO: 207876 - DNA, 20 bp, Artificial Sequence
  Description of Artificial Sequence: Synthetic oligonucleotide
  Target: LAMA2; (-) strand; PAM type: YTN; PAM sequence: CTA
cccatgagcatggaatgttc

SEQ ID NO: 207877 - DNA, 20 bp, Artificial Sequence
  Description of Artificial Sequence: Synthetic oligonucleotide
  Target: LAMA2; (-) strand; PAM type: YTN; PAM sequence: TTC
ctacccatgagcatggaatg

SEQ ID NO: 207878 - DNA, 20 bp, Artificial Sequence
  Description of Artificial Sequence: Synthetic oligonucleotide
  Target: LAMA2; (-) strand; PAM type: YTN; PAM sequence: CTT
cctacccatgagcatggaat

SEQ ID NO: 207879 - DNA, 20 bp, Artificial Sequence
  Description of Artificial Sequence: Synthetic oligonucleotide
  Target: LAMA2; (-) strand; PAM type: YTN; PAM sequence: TTC
ttcctacccatgagcatgga

SEQ ID NO: 207880 - DNA, 20 bp, Artificial Sequence
  Description of Artificial Sequence: Synthetic oligonucleotide
  Target: LAMA2; (-) strand; PAM type: YTN; PAM sequence: TTG
attcttcctacccatgagca

SEQ ID NO: 207881 - DNA, 20 bp, Artificial Sequence
  Description of Artificial Sequence: Synthetic oligonucleotide
  Target: LAMA2; (-) strand; PAM type: YTN; PAM sequence: TTC
acgatattgattcttcctac

SEQ ID NO: 207882 - DNA, 20 bp, Artificial Sequence
  Description of Artificial Sequence: Synthetic oligonucleotide
  Target: LAMA2; (-) strand; PAM type: YTN; PAM sequence: TTT
cacgatattgattcttccta

SEQ ID NO: 207883 - DNA, 20 bp, Artificial Sequence
  Description of Artificial Sequence: Synthetic oligonucleotide
  Target: LAMA2; (-) strand; PAM type: YTN; PAM sequence: TTT
tcacgatattgattcttcct

SEQ ID NO: 207884 - DNA, 20 bp, Artificial Sequence
  Description of Artificial Sequence: Synthetic oligonucleotide
  Target: LAMA2; (-) strand; PAM type: YTN; PAM sequence: TTG
ggcagtatggccattttcac

SEQ ID NO: 207885 - DNA, 20 bp, Artificial Sequence
  Description of Artificial Sequence: Synthetic oligonucleotide
  Target: LAMA2; (-) strand; PAM type: YTN; PAM sequence: CTT
gggcagtatggccattttca

SEQ ID NO: 207886 - DNA, 20 bp, Artificial Sequence
  Description of Artificial Sequence: Synthetic oligonucleotide
  Target: LAMA2; (-) strand; PAM type: YTN; PAM sequence: TTA
ccttgggcagtatggccatt

SEQ ID NO: 207887 - DNA, 20 bp, Artificial Sequence
  Description of Artificial Sequence: Synthetic oligonucleotide
  Target: LAMA2; (-) strand; PAM type: YTN; PAM sequence: CTG
taaattaccttgggcagtat

SEQ ID NO: 207888 - DNA, 20 bp, Artificial Sequence
  Description of Artificial Sequence: Synthetic oligonucleotide
  Target: LAMA2; (-) strand; PAM type: YTN; PAM sequence: TTG
aatctgtaaattaccttggg

SEQ ID NO: 207889 - DNA, 20 bp, Artificial Sequence
  Description of Artificial Sequence: Synthetic oligonucleotide
  Target: LAMA2; (-) strand; PAM type: YTN; PAM sequence: TTG
atggggatggcattgaatct

SEQ ID NO: 207890 - DNA, 20 bp, Artificial Sequence
  Description of Artificial Sequence: Synthetic oligonucleotide
  Target: LAMA2; (-) strand; PAM type: YTN; PAM sequence: CTT
gatggggatggcattgaatc

SEQ ID NO: 207891 - DNA, 20 bp, Artificial Sequence
  Description of Artificial Sequence: Synthetic oligonucleotide
  Target: LAMA2; (-) strand; PAM type: YTN; PAM sequence: TTG
gtagcttgatggggatggca

SEQ ID NO: 207892 - DNA, 20 bp, Artificial Sequence
  Description of Artificial Sequence: Synthetic oligonucleotide
  Target: LAMA2; (-) strand; PAM type: YTN; PAM sequence: CTG
tgaagaaagtcattggtagc

SEQ ID NO: 207893 - DNA, 20 bp, Artificial Sequence
  Description of Artificial Sequence: Synthetic oligonucleotide
  Target: LAMA2; (-) strand; PAM type: YTN; PAM sequence: TTC
tgtgaagaaagtcattggta

SEQ ID NO: 207894 - DNA, 20 bp, Artificial Sequence
  Description of Artificial Sequence: Synthetic oligonucleotide
  Target: LAMA2; (-) strand; PAM type: YTN; PAM sequence: TTC
caattctgtgaagaaagtca

SEQ ID NO: 207895 - DNA, 20 bp, Artificial Sequence
  Description of Artificial Sequence: Synthetic oligonucleotide
  Target: LAMA2; (-) strand; PAM type: YTN; PAM sequence: TTT
ccaattctgtgaagaaagtc

SEQ ID NO: 207896 - DNA, 20 bp, Artificial Sequence
  Description of Artificial Sequence: Synthetic oligonucleotide
  Target: LAMA2; (-) strand; PAM type: YTN; PAM sequence: TTT
tccaattctgtgaagaaagt

SEQ ID NO: 207897 - DNA, 20 bp, Artificial Sequence
  Description of Artificial Sequence: Synthetic oligonucleotide
  Target: LAMA2; (-) strand; PAM type: YTN; PAM sequence: TTT
ttccaattctgtgaagaaag

SEQ ID NO: 207898 - DNA, 20 bp, Artificial Sequence
  Description of Artificial Sequence: Synthetic oligonucleotide
  Target: LAMA2; (-) strand; PAM type: YTN; PAM sequence: TTT
tttccaattctgtgaagaaa

SEQ ID NO: 207899 - DNA, 20 bp, Artificial Sequence
  Description of Artificial Sequence: Synthetic oligonucleotide
  Target: LAMA2; (-) strand; PAM type: YTN; PAM sequence: TTA
aagtagttttttccaattct

SEQ ID NO: 207900 - DNA, 20 bp, Artificial Sequence
  Description of Artificial Sequence: Synthetic oligonucleotide
  Target: LAMA2; (-) strand; PAM type: YTN; PAM sequence: TTT
aaagtagttttttccaattc

SEQ ID NO: 207901 - DNA, 20 bp, Artificial Sequence
  Description of Artificial Sequence: Synthetic oligonucleotide
  Target: LAMA2; (-) strand; PAM type: YTN; PAM sequence: CTT
taaagtagttttttccaatt

SEQ ID NO: 207902 - DNA, 20 bp, Artificial Sequence
  Description of Artificial Sequence: Synthetic oligonucleotide
  Target: LAMA2; (-) strand; PAM type: YTN; PAM sequence: TTC
catatgaactttaaagtagt

SEQ ID NO: 207903 - DNA, 20 bp, Artificial Sequence
  Description of Artificial Sequence: Synthetic oligonucleotide
  Target: LAMA2; (-) strand; PAM type: YTN; PAM sequence: TTG
gttccatatgaactttaaag

SEQ ID NO: 207904 - DNA, 20 bp, Artificial Sequence
  Description of Artificial Sequence: Synthetic oligonucleotide
  Target: LAMA2; (-) strand; PAM type: YTN; PAM sequence: TTT
ggttccatatgaactttaaa

SEQ ID NO: 207905 - DNA, 20 bp, Artificial Sequence
  Description of Artificial Sequence: Synthetic oligonucleotide
  Target: LAMA2; (-) strand; PAM type: YTN; PAM sequence: TTT
tggttccatatgaactttaa

SEQ ID NO: 207906 - DNA, 20 bp, Artificial Sequence
  Description of Artificial Sequence: Synthetic oligonucleotide
  Target: LAMA2; (-) strand; PAM type: YTN; PAM sequence: TTT
ttggttccatatgaacttta

SEQ ID NO: 207907 - DNA, 20 bp, Artificial Sequence
  Description of Artificial Sequence: Synthetic oligonucleotide
  Target: LAMA2; (-) strand; PAM type: YTN; PAM sequence: TTT
tttggttccatatgaacttt

SEQ ID NO: 207908 - DNA, 20 bp, Artificial Sequence
  Description of Artificial Sequence: Synthetic oligonucleotide
  Target: LAMA2; (-) strand; PAM type: YTN; PAM sequence: CTT
ttttggttccatatgaactt

SEQ ID NO: 207909 - DNA, 20 bp, Artificial Sequence
  Description of Artificial Sequence: Synthetic oligonucleotide
  Target: LAMA2; (-) strand; PAM type: YTN; PAM sequence: CTC
ttttttggttccatatgaac

SEQ ID NO: 207910 - DNA, 20 bp, Artificial Sequence
  Description of Artificial Sequence: Synthetic oligonucleotide
  Target: LAMA2; (-) strand; PAM type: YTN; PAM sequence: TTG
gcaatgcaggctcttttttg

SEQ ID NO: 207911 - DNA, 20 bp, Artificial Sequence
  Description of Artificial Sequence: Synthetic oligonucleotide
  Target: LAMA2; (-) strand; PAM type: YTN; PAM sequence: CTT
ggcaatgcaggctctttttt

SEQ ID NO: 207912 - DNA, 20 bp, Artificial Sequence
  Description of Artificial Sequence: Synthetic oligonucleotide
  Target: LAMA2; (-) strand; PAM type: YTN; PAM sequence: TTG
acttggcaatgcaggctctt

SEQ ID NO: 207913 - DNA, 20 bp, Artificial Sequence
  Description of Artificial Sequence: Synthetic oligonucleotide
  Target: LAMA2; (-) strand; PAM type: YTN; PAM sequence: TTA
ggattgacttggcaatgcag

SEQ ID NO: 207914 - DNA, 20 bp, Artificial Sequence
  Description of Artificial Sequence: Synthetic oligonucleotide
  Target: LAMA2; (-) strand; PAM type: YTN; PAM sequence: CTT
aggattgacttggcaatgca

SEQ ID NO: 207915 - DNA, 20 bp, Artificial Sequence
  Description of Artificial Sequence: Synthetic oligonucleotide
  Target: LAMA2; (-) strand; PAM type: YTN; PAM sequence: TTG
gcttaggattgacttggcaa

SEQ ID NO: 207916 - DNA, 20 bp, Artificial Sequence
  Description of Artificial Sequence: Synthetic oligonucleotide
  Target: LAMA2; (-) strand; PAM type: YTN; PAM sequence: TTT
ggcttaggattgacttggca

SEQ ID NO: 207917 - DNA, 20 bp, Artificial Sequence
  Description of Artificial Sequence: Synthetic oligonucleotide
  Target: LAMA2; (-) strand; PAM type: YTN; PAM sequence: TTT
tggcttaggattgacttggc

SEQ ID NO: 207918 - DNA, 20 bp, Artificial Sequence
  Description of Artificial Sequence: Synthetic oligonucleotide
  Target: LAMA2; (-) strand; PAM type: YTN; PAM sequence: CTT
ttggcttaggattgacttgg

SEQ ID NO: 207919 - DNA, 20 bp, Artificial Sequence
  Description of Artificial Sequence: Synthetic oligonucleotide
  Target: LAMA2; (-) strand; PAM type: YTN; PAM sequence: TTC
ttttggcttaggattgactt

SEQ ID NO: 207920 - DNA, 20 bp, Artificial Sequence
  Description of Artificial Sequence: Synthetic oligonucleotide
  Target: LAMA2; (-) strand; PAM type: YTN; PAM sequence: TTG
ttcttttggcttaggattga

SEQ ID NO: 207921 - DNA, 20 bp, Artificial Sequence
  Description of Artificial Sequence: Synthetic oligonucleotide
  Target: LAMA2; (-) strand; PAM type: YTN; PAM sequence: TTT
gttcttttggcttaggattg

SEQ ID NO: 207922 - DNA, 20 bp, Artificial Sequence
  Description of Artificial Sequence: Synthetic oligonucleotide
  Target: LAMA2; (-) strand; PAM type: YTN; PAM sequence: CTT
tgttcttttggcttaggatt

SEQ ID NO: 207923 - DNA, 20 bp, Artificial Sequence
  Description of Artificial Sequence: Synthetic oligonucleotide
  Target: LAMA2; (-) strand; PAM type: YTN; PAM sequence: CTC
cagctttgttcttttggctt

SEQ ID NO: 207924 - DNA, 20 bp, Artificial Sequence
  Description of Artificial Sequence: Synthetic oligonucleotide
  Target: LAMA2; (-) strand; PAM type: YTN; PAM sequence: TTG
aagtcaggtagtgtgatgcc

SEQ ID NO: 207925 - DNA, 20 bp, Artificial Sequence
  Description of Artificial Sequence: Synthetic oligonucleotide
  Target: LAMA2; (-) strand; PAM type: YTN; PAM sequence: TTT
gaagtcaggtagtgtgatgc

SEQ ID NO: 207926 - DNA, 20 bp, Artificial Sequence
  Description of Artificial Sequence: Synthetic oligonucleotide
  Target: LAMA2; (-) strand; PAM type: YTN; PAM sequence: TTG
tagtatagtttgaagtcagg

SEQ ID NO: 207927 - DNA, 20 bp, Artificial Sequence
  Description of Artificial Sequence: Synthetic oligonucleotide
  Target: LAMA2; (-) strand; PAM type: YTN; PAM sequence: CTT
gtagtatagtttgaagtcag

SEQ ID NO: 207928 - DNA, 20 bp, Artificial Sequence
  Description of Artificial Sequence: Synthetic oligonucleotide
  Target: LAMA2; (-) strand; PAM type: YTN; PAM sequence: CTG
tagccttgtagtatagtttg

SEQ ID NO: 207929 - DNA, 20 bp, Artificial Sequence
  Description of Artificial Sequence: Synthetic oligonucleotide
  Target: LAMA2; (-) strand; PAM type: YTN; PAM sequence: TTA
ctgtagccttgtagtatagt

SEQ ID NO: 207930 - DNA, 20 bp, Artificial Sequence
  Description of Artificial Sequence: Synthetic oligonucleotide
  Target: LAMA2; (-) strand; PAM type: YTN; PAM sequence: TTG
gttactgtagccttgtagta

SEQ ID NO: 207931 - DNA, 20 bp, Artificial Sequence
  Description of Artificial Sequence: Synthetic oligonucleotide
  Target: LAMA2; (-) strand; PAM type: YTN; PAM sequence: TTT
ggttactgtagccttgtagt

SEQ ID NO: 207932 - DNA, 20 bp, Artificial Sequence
  Description of Artificial Sequence: Synthetic oligonucleotide
  Target: LAMA2; (-) strand; PAM type: YTN; PAM sequence: TTT
tggttactgtagccttgtag

SEQ ID NO: 207933 - DNA, 20 bp, Artificial Sequence
  Description of Artificial Sequence: Synthetic oligonucleotide
  Target: LAMA2; (-) strand; PAM type: YTN; PAM sequence: CTG
ttttggttactgtagccttg

SEQ ID NO: 207934 - DNA, 20 bp, Artificial Sequence
  Description of Artificial Sequence: Synthetic oligonucleotide
  Target: LAMA2; (-) strand; PAM type: YTN; PAM sequence: TTG
taccagtaccatgctgtttt

SEQ ID NO: 207935 - DNA, 20 bp, Artificial Sequence
  Description of Artificial Sequence: Synthetic oligonucleotide
  Target: LAMA2; (-) strand; PAM type: YTN; PAM sequence: TTT
gtaccagtaccatgctgttt

SEQ ID NO: 207936 - DNA, 20 bp, Artificial Sequence
  Description of Artificial Sequence: Synthetic oligonucleotide
  Target: LAMA2; (-) strand; PAM type: YTN; PAM sequence: TTT
tgtaccagtaccatgctgtt

SEQ ID NO: 207937 - DNA, 20 bp, Artificial Sequence
  Description of Artificial Sequence: Synthetic oligonucleotide
  Target: LAMA2; (-) strand; PAM type: YTN; PAM sequence: TTT
ttgtaccagtaccatgctgt

SEQ ID NO: 207938 - DNA, 20 bp, Artificial Sequence
  Description of Artificial Sequence: Synthetic oligonucleotide
  Target: LAMA2; (-) strand; PAM type: YTN; PAM sequence: CTG
tttttgtaccagtaccatgc

SEQ ID NO: 207939 - DNA, 20 bp, Artificial Sequence
  Description of Artificial Sequence: Synthetic oligonucleotide
  Target: LAMA2; (-) strand; PAM type: YTN; PAM sequence: CTC
tgtttttgtaccagtaccat

SEQ ID NO: 207940 - DNA, 20 bp, Artificial Sequence
  Description of Artificial Sequence: Synthetic oligonucleotide
  Target: LAMA2; (-) strand; PAM type: YTN; PAM sequence: CTA
tatctctgtttttgtaccag

SEQ ID NO: 207941 - DNA, 20 bp, Artificial Sequence
  Description of Artificial Sequence: Synthetic oligonucleotide
  Target: LAMA2; (-) strand; PAM type: YTN; PAM sequence: TTG
atctatatctctgtttttgt

SEQ ID NO: 207942 - DNA, 20 bp, Artificial Sequence
  Description of Artificial Sequence: Synthetic oligonucleotide
  Target: LAMA2; (-) strand; PAM type: YTN; PAM sequence: TTC
cattgatctatatctctgtt

SEQ ID NO: 207943 - DNA, 20 bp, Artificial Sequence
  Description of Artificial Sequence: Synthetic oligonucleotide
  Target: LAMA2; (-) strand; PAM type: YTN; PAM sequence: CTG
ttccattgatctatatctct

SEQ ID NO: 207944 - DNA, 20 bp, Artificial Sequence
  Description of Artificial Sequence: Synthetic oligonucleotide
  Target: LAMA2; (-) strand; PAM type: YTN; PAM sequence: TTC
tgttccattgatctatatct

SEQ ID NO: 207945 - DNA, 20 bp, Artificial Sequence
  Description of Artificial Sequence: Synthetic oligonucleotide
  Target: LAMA2; (-) strand; PAM type: YTN; PAM sequence: CTG
ttctgttccattgatctata

SEQ ID NO: 207946 - DNA, 20 bp, Artificial Sequence
  Description of Artificial Sequence: Synthetic oligonucleotide
  Target: LAMA2; (-) strand; PAM type: YTN; PAM sequence: CTC
tgttctgttccattgatcta

SEQ ID NO: 207947 - DNA, 20 bp, Artificial Sequence
  Description of Artificial Sequence: Synthetic oligonucleotide
  Target: LAMA2; (-) strand; PAM type: YTN; PAM sequence: CTG
agggctctgttctgttccat

SEQ ID NO: 207948 - DNA, 20 bp, Artificial Sequence
  Description of Artificial Sequence: Synthetic oligonucleotide
  Target: LAMA2; (-) strand; PAM type: YTN; PAM sequence: TTC
tgagggctctgttctgttcc

SEQ ID NO: 207949 - DNA, 20 bp, Artificial Sequence
  Description of Artificial Sequence: Synthetic oligonucleotide
  Target: LAMA2; (-) strand; PAM type: YTN; PAM sequence: TTT
ctgagggctctgttctgttc

SEQ ID NO: 207950 - DNA, 20 bp, Artificial Sequence
  Description of Artificial Sequence: Synthetic oligonucleotide
  Target: LAMA2; (-) strand; PAM type: YTN; PAM sequence: TTA
tttctgagggctctgttctg

SEQ ID NO: 207951 - DNA, 20 bp, Artificial Sequence
  Description of Artificial Sequence: Synthetic oligonucleotide
  Target: LAMA2; (-) strand; PAM type: YTN; PAM sequence: TTG
tagatatgcggcattatttc

SEQ ID NO: 207952 - DNA, 20 bp, Artificial Sequence
  Description of Artificial Sequence: Synthetic oligonucleotide
  Target: LAMA2; (-) strand; PAM type: YTN; PAM sequence: TTG
tcaaagatcagatagttgta

SEQ ID NO: 207953 - DNA, 20 bp, Artificial Sequence
  Description of Artificial Sequence: Synthetic oligonucleotide
  Target: LAMA2; (-) strand; PAM type: YTN; PAM sequence: TTT
gtcaaagatcagatagttgt

SEQ ID NO: 207954 - DNA, 20 bp, Artificial Sequence
  Description of Artificial Sequence: Synthetic oligonucleotide
  Target: LAMA2; (-) strand; PAM type: YTN; PAM sequence: CTC
aggtttgtcaaagatcagat

SEQ ID NO: 207955 - DNA, 20 bp, Artificial Sequence
  Description of Artificial Sequence: Synthetic oligonucleotide
  Target: LAMA2; (-) strand; PAM type: YTN; PAM sequence: TTC
tcaggtttgtcaaagatcag

SEQ ID NO: 207956 - DNA, 20 bp, Artificial Sequence
  Description of Artificial Sequence: Synthetic oligonucleotide
  Target: LAMA2; (-) strand; PAM type: YTN; PAM sequence: TTT
ctcaggtttgtcaaagatca

SEQ ID NO: 207957 - DNA, 20 bp, Artificial Sequence
  Description of Artificial Sequence: Synthetic oligonucleotide
  Target: LAMA2; (-) strand; PAM type: YTN; PAM sequence: TTT
tctcaggtttgtcaaagatc

SEQ ID NO: 207958 - DNA, 20 bp, Artificial Sequence
  Description of Artificial Sequence: Synthetic oligonucleotide
  Target: LAMA2; (-) strand; PAM type: YTN; PAM sequence: TTT
ttctcaggtttgtcaaagat

SEQ ID NO: 207959 - DNA, 20 bp, Artificial Sequence
  Description of Artificial Sequence: Synthetic oligonucleotide
  Target: LAMA2; (-) strand; PAM type: YTN; PAM sequence: TTG
tttttctcaggtttgtcaaa

SEQ ID NO: 207960 - DNA, 20 bp, Artificial Sequence
  Description of Artificial Sequence: Synthetic oligonucleotide
  Target: LAMA2; (-) strand; PAM type: YTN; PAM sequence: CTT
gtttttctcaggtttgtcaa

SEQ ID NO: 207961 - DNA, 20 bp, Artificial Sequence
  Description of Artificial Sequence: Synthetic oligonucleotide
  Target: LAMA2; (-) strand; PAM type: YTN; PAM sequence: TTG
cttgtttttctcaggtttgt

SEQ ID NO: 207962 - DNA, 20 bp, Artificial Sequence
  Description of Artificial Sequence: Synthetic oligonucleotide
  Target: LAMA2; (-) strand; PAM type: YTN; PAM sequence: TTC
cccattgcttgtttttctca

SEQ ID NO: 207963 - DNA, 20 bp, Artificial Sequence
  Description of Artificial Sequence: Synthetic oligonucleotide
  Target: LAMA2; (-) strand; PAM type: YTN; PAM sequence: TTT
ccccattgcttgtttttctc

SEQ ID NO: 207964 - DNA, 20 bp, Artificial Sequence
  Description of Artificial Sequence: Synthetic oligonucleotide
  Target: LAMA2; (-) strand; PAM type: YTN; PAM sequence: CTT
tccccattgcttgtttttct

SEQ ID NO: 207965 - DNA, 20 bp, Artificial Sequence
  Description of Artificial Sequence: Synthetic oligonucleotide
  Target: LAMA2; (-) strand; PAM type: YTN; PAM sequence: TTA
aatagggaatcctttcccca

SEQ ID NO: 207966 - DNA, 20 bp, Artificial Sequence
  Description of Artificial Sequence: Synthetic oligonucleotide
  Target: LAMA2; (-) strand; PAM type: YTN; PAM sequence: TTA
ttaaatagggaatcctttcc

SEQ ID NO: 207967 - DNA, 20 bp, Artificial Sequence
  Description of Artificial Sequence: Synthetic oligonucleotide
  Target: LAMA2; (-) strand; PAM type: YTN; PAM sequence: TTT
attaaatagggaatcctttc

SEQ ID NO: 207968 - DNA, 20 bp, Artificial Sequence
  Description of Artificial Sequence: Synthetic oligonucleotide
  Target: LAMA2; (-) strand; PAM type: YTN; PAM sequence: TTC
ccagcaccatttattaaata

SEQ ID NO: 207969 - DNA, 20 bp, Artificial Sequence
  Description of Artificial Sequence: Synthetic oligonucleotide
  Target: LAMA2; (-) strand; PAM type: YTN; PAM sequence: TTT
cccagcaccatttattaaat

SEQ ID NO: 207970 - DNA, 20 bp, Artificial Sequence
  Description of Artificial Sequence: Synthetic oligonucleotide
  Target: LAMA2; (-) strand; PAM type: YTN; PAM sequence: TTT
tcccagcaccatttattaaa

SEQ ID NO: 207971 - DNA, 20 bp, Artificial Sequence
  Description of Artificial Sequence: Synthetic oligonucleotide
  Target: LAMA2; (-) strand; PAM type: YTN; PAM sequence: CTA
gccagttttcccagcaccat

SEQ ID NO: 207972 - DNA, 20 bp, Artificial Sequence
  Description of Artificial Sequence: Synthetic oligonucleotide
  Target: LAMA2; (-) strand; PAM type: YTN; PAM sequence: CTA
catatggctagccagttttc

SEQ ID NO: 207973 - DNA, 20 bp, Artificial Sequence
  Description of Artificial Sequence: Synthetic oligonucleotide
  Target: LAMA2; (-) strand; PAM type: YTN; PAM sequence: TTC
tacatatggctagccagttt

SEQ ID NO: 207974 - DNA, 20 bp, Artificial Sequence
  Description of Artificial Sequence: Synthetic oligonucleotide
  Target: LAMA2; (-) strand; PAM type: YTN; PAM sequence: TTT
ctacatatggctagccagtt

SEQ ID NO: 207975 - DNA, 20 bp, Artificial Sequence
  Description of Artificial Sequence: Synthetic oligonucleotide
  Target: LAMA2; (-) strand; PAM type: YTN; PAM sequence: CTT
tctacatatggctagccagt

SEQ ID NO: 207976 - DNA, 20 bp, Artificial Sequence
  Description of Artificial Sequence: Synthetic oligonucleotide
  Target: LAMA2; (-) strand; PAM type: YTN; PAM sequence: TTC
agctttctacatatggctag

SEQ ID NO: 207977 - DNA, 20 bp, Artificial Sequence
  Description of Artificial Sequence: Synthetic oligonucleotide
  Target: LAMA2; (-) strand; PAM type: YTN; PAM sequence: TTT
cagctttctacatatggcta

SEQ ID NO: 207978 - DNA, 20 bp, Artificial Sequence
  Description of Artificial Sequence: Synthetic oligonucleotide
  Target: LAMA2; (-) strand; PAM type: YTN; PAM sequence: TTG
tataaggtgtaaggaaggga

SEQ ID NO: 207979 - DNA, 20 bp, Artificial Sequence
  Description of Artificial Sequence: Synthetic oligonucleotide
  Target: LAMA2; (-) strand; PAM type: YTN; PAM sequence: TTT
gtataaggtgtaaggaaggg

SEQ ID NO: 207980 - DNA, 20 bp, Artificial Sequence
  Description of Artificial Sequence: Synthetic oligonucleotide
  Target: LAMA2; (-) strand; PAM type: YTN; PAM sequence: TTT
tgtataaggtgtaaggaagg

SEQ ID NO: 207981 - DNA, 20 bp, Artificial Sequence
  Description of Artificial Sequence: Synthetic oligonucleotide
  Target: LAMA2; (-) strand; PAM type: YTN; PAM sequence: TTT
ttgtataaggtgtaaggaag

SEQ ID NO: 207982 - DNA, 20 bp, Artificial Sequence
  Description of Artificial Sequence: Synthetic oligonucleotide
  Target: LAMA2; (-) strand; PAM type: YTN; PAM sequence: TTG
atttttgtataaggtgtaag

SEQ ID NO: 207983 - DNA, 20 bp, Artificial Sequence
  Description of Artificial Sequence: Synthetic oligonucleotide
  Target: LAMA2; (-) strand; PAM type: YTN; PAM sequence: TTG
aattgatttttgtataaggt

SEQ ID NO: 207984 - DNA, 20 bp, Artificial Sequence
  Description of Artificial Sequence: Synthetic oligonucleotide
  Target: LAMA2; (-) strand; PAM type: YTN; PAM sequence: CTT
gaattgatttttgtataagg

SEQ ID NO: 207985 - DNA, 20 bp, Artificial Sequence
  Description of Artificial Sequence: Synthetic oligonucleotide
  Target: LAMA2; (-) strand; PAM type: YTN; PAM sequence: TTA
atccatcttgaattgatttt

SEQ ID NO: 207986 - DNA, 20 bp, Artificial Sequence
  Description of Artificial Sequence: Synthetic oligonucleotide
  Target: LAMA2; (-) strand; PAM type: YTN; PAM sequence: TTT
aatccatcttgaattgattt

SEQ ID NO: 207987 - DNA, 20 bp, Artificial Sequence
  Description of Artificial Sequence: Synthetic oligonucleotide
  Target: LAMA2; (-) strand; PAM type: YTN; PAM sequence: CTT
taatccatcttgaattgatt

SEQ ID NO: 207988 - DNA, 20 bp, Artificial Sequence
  Description of Artificial Sequence: Synthetic oligonucleotide
  Target: LAMA2; (-) strand; PAM type: YTN; PAM sequence: TTA
aatctttaatccatcttgaa

SEQ ID NO: 207989 - DNA, 20 bp, Artificial Sequence
  Description of Artificial Sequence: Synthetic oligonucleotide
  Target: LAMA2; (-) strand; PAM type: YTN; PAM sequence: TTT
aaatctttaatccatcttga

SEQ ID NO: 207990 - DNA, 20 bp, Artificial Sequence
  Description of Artificial Sequence: Synthetic oligonucleotide
  Target: LAMA2; (-) strand; PAM type: YTN; PAM sequence: TTA
acgtttaaatctttaatcca

SEQ ID NO: 207991 - DNA, 20 bp, Artificial Sequence
  Description of Artificial Sequence: Synthetic oligonucleotide
  Target: LAMA2; (-) strand; PAM type: YTN; PAM sequence: TTT
aacgtttaaatctttaatcc

SEQ ID NO: 207992 - DNA, 20 bp, Artificial Sequence
  Description of Artificial Sequence: Synthetic oligonucleotide
  Target: LAMA2; (-) strand; PAM type: YTN; PAM sequence: TTA
ggtttaacgtttaaatcttt

SEQ ID NO: 207993 - DNA, 20 bp, Artificial Sequence
  Description of Artificial Sequence: Synthetic oligonucleotide
  Target: LAMA2; (-) strand; PAM type: YTN; PAM sequence: TTT
aggtttaacgtttaaatctt

SEQ ID NO: 207994 - DNA, 20 bp, Artificial Sequence
  Description of Artificial Sequence: Synthetic oligonucleotide
  Target: LAMA2; (-) strand; PAM type: YTN; PAM sequence: TTT
taggtttaacgtttaaatct

SEQ ID NO: 207995 - DNA, 20 bp, Artificial Sequence
  Description of Artificial Sequence: Synthetic oligonucleotide
  Target: LAMA2; (-) strand; PAM type: YTN; PAM sequence: TTA
tggttttaggtttaacgttt

SEQ ID NO: 207996 - DNA, 20 bp, Artificial Sequence
  Description of Artificial Sequence: Synthetic oligonucleotide
  Target: LAMA2; (-) strand; PAM type: YTN; PAM sequence: TTT
atggttttaggtttaacgtt

SEQ ID NO: 207997 - DNA, 20 bp, Artificial Sequence
  Description of Artificial Sequence: Synthetic oligonucleotide
  Target: LAMA2; (-) strand; PAM type: YTN; PAM sequence: TTT
tatggttttaggtttaacgt

SEQ ID NO: 207998 - DNA, 20 bp, Artificial Sequence
  Description of Artificial Sequence: Synthetic oligonucleotide
  Target: LAMA2; (-) strand; PAM type: YTN; PAM sequence: TTT
ttatggttttaggtttaacg

SEQ ID NO: 207999 - DNA, 20 bp, Artificial Sequence
  Description of Artificial Sequence: Synthetic oligonucleotide
  Target: LAMA2; (-) strand; PAM type: YTN; PAM sequence: CTA
gggtttttatggttttaggt

SEQ ID NO: 208000 - DNA, 20 bp, Artificial Sequence
  Description of Artificial Sequence: Synthetic oligonucleotide
  Target: LAMA2; (-) strand; PAM type: YTN; PAM sequence: TTC
tagggtttttatggttttag

SEQ ID NO: 208001 - DNA, 20 bp, Artificial Sequence
  Description of Artificial Sequence: Synthetic oligonucleotide
  Target: LAMA2; (-) strand; PAM type: YTN; PAM sequence: CTT
ctagggtttttatggtttta

SEQ ID NO: 208002 - DNA, 20 bp, Artificial Sequence
  Description of Artificial Sequence: Synthetic oligonucleotide
  Target: LAMA2; (-) strand; PAM type: YTN; PAM sequence: TTC
ttctagggtttttatggttt

SEQ ID NO: 208003 - DNA, 20 bp, Artificial Sequence
  Description of Artificial Sequence: Synthetic oligonucleotide
  Target: LAMA2; (-) strand; PAM type: YTN; PAM sequence: TTT
cttctagggtttttatggtt

SEQ ID NO: 208004 - DNA, 20 bp, Artificial Sequence
  Description of Artificial Sequence: Synthetic oligonucleotide
  Target: LAMA2; (-) strand; PAM type: YTN; PAM sequence: TTT
tcttctagggtttttatggt

SEQ ID NO: 208005 - DNA, 20 bp, Artificial Sequence
  Description of Artificial Sequence: Synthetic oligonucleotide
  Target: LAMA2; (-) strand; PAM type: YTN; PAM sequence: CTA
ggttttcttctagggttttt

SEQ ID NO: 208006 - DNA, 20 bp, Artificial Sequence
  Description of Artificial Sequence: Synthetic oligonucleotide
  Target: LAMA2; (-) strand; PAM type: YTN; PAM sequence: CTG
aatggtaatgcctaggtttt

SEQ ID NO: 208007 - DNA, 20 bp, Artificial Sequence
  Description of Artificial Sequence: Synthetic oligonucleotide
  Target: LAMA2; (-) strand; PAM type: YTN; PAM sequence: CTA
tgtcctgaatggtaatgcct

SEQ ID NO: 208008 - DNA, 20 bp, Artificial Sequence
  Description of Artificial Sequence: Synthetic oligonucleotide
  Target: LAMA2; (-) strand; PAM type: YTN; PAM sequence: TTG
cccacgcctatgtcctgaat

SEQ ID NO: 208009 - DNA, 20 bp, Artificial Sequence
  Description of Artificial Sequence: Synthetic oligonucleotide
  Target: LAMA2; (-) strand; PAM type: YTN; PAM sequence: CTT
gcccacgcctatgtcctgaa

SEQ ID NO: 208010 - DNA, 20 bp, Artificial Sequence
  Description of Artificial Sequence: Synthetic oligonucleotide
  Target: LAMA2; (-) strand; PAM type: YTN; PAM sequence: TTG
gacatgaagtccttgcccac

SEQ ID NO: 208011 - DNA, 20 bp, Artificial Sequence
  Description of Artificial Sequence: Synthetic oligonucleotide
  Target: LAMA2; (-) strand; PAM type: YTN; PAM sequence: TTT
ggacatgaagtccttgccca

SEQ ID NO: 208012 - DNA, 20 bp, Artificial Sequence
  Description of Artificial Sequence: Synthetic oligonucleotide
  Target: LAMA2; (-) strand; PAM type: YTN; PAM sequence: TTT
tggacatgaagtccttgccc

SEQ ID NO: 208013 - DNA, 20 bp, Artificial Sequence
  Description of Artificial Sequence: Synthetic oligonucleotide
  Target: LAMA2; (-) strand; PAM type: YTN; PAM sequence: TTG
gtgttttggacatgaagtcc

SEQ ID NO: 208014 - DNA, 20 bp, Artificial Sequence
  Description of Artificial Sequence: Synthetic oligonucleotide
  Target: LAMA2; (-) strand; PAM type: YTN; PAM sequence: TTT
ggtgttttggacatgaagtc

SEQ ID NO: 208015 - DNA, 20 bp, Artificial Sequence
  Description of Artificial Sequence: Synthetic oligonucleotide
  Target: LAMA2; (-) strand; PAM type: YTN; PAM sequence: TTT
tggtgttttggacatgaagt

SEQ ID NO: 208016 - DNA, 20 bp, Artificial Sequence
  Description of Artificial Sequence: Synthetic oligonucleotide
  Target: LAMA2; (-) strand; PAM type: YTN; PAM sequence: CTT
ttggtgttttggacatgaag

SEQ ID NO: 208017 - DNA, 20 bp, Artificial Sequence
  Description of Artificial Sequence: Synthetic oligonucleotide
  Target: LAMA2; (-) strand; PAM type: YTN; PAM sequence: TTG
cttttggtgttttggacatg

SEQ ID NO: 208018 - DNA, 20 bp, Artificial Sequence
  Description of Artificial Sequence: Synthetic oligonucleotide
  Target: LAMA2; (-) strand; PAM type: YTN; PAM sequence: TTG
ccattgcttttggtgttttg

SEQ ID NO: 208019 - DNA, 20 bp, Artificial Sequence
  Description of Artificial Sequence: Synthetic oligonucleotide
  Target: LAMA2; (-) strand; PAM type: YTN; PAM sequence: TTG
ttgccattgcttttggtgtt

SEQ ID NO: 208020 - DNA, 20 bp, Artificial Sequence
  Description of Artificial Sequence: Synthetic oligonucleotide
  Target: LAMA2; (-) strand; PAM type: YTN; PAM sequence: TTT
gttgccattgcttttggtgt

SEQ ID NO: 208021 - DNA, 20 bp, Artificial Sequence
  Description of Artificial Sequence: Synthetic oligonucleotide
  Target: LAMA2; (-) strand; PAM type: YTN; PAM sequence: TTT
tgttgccattgcttttggtg

SEQ ID NO: 208022 - DNA, 20 bp, Artificial Sequence
  Description of Artificial Sequence: Synthetic oligonucleotide
  Target: LAMA2; (-) strand; PAM type: YTN; PAM sequence: CTT
ttgttgccattgcttttggt

SEQ ID NO: 208023 - DNA, 20 bp, Artificial Sequence
  Description of Artificial Sequence: Synthetic oligonucleotide
  Target: LAMA2; (-) strand; PAM type: YTN; PAM sequence: TTG
tcttttgttgccattgcttt

SEQ ID NO: 208024 - DNA, 20 bp, Artificial Sequence
  Description of Artificial Sequence: Synthetic oligonucleotide
  Target: LAMA2; (-) strand; PAM type: YTN; PAM sequence: TTT
gtcttttgttgccattgctt

SEQ ID NO: 208025 - DNA, 20 bp, Artificial Sequence
  Description of Artificial Sequence: Synthetic oligonucleotide
  Target: LAMA2; (-) strand; PAM type: YTN; PAM sequence: TTT
tgtcttttgttgccattgct

SEQ ID NO: 208026 - DNA, 20 bp, Artificial Sequence
  Description of Artificial Sequence: Synthetic oligonucleotide
  Target: LAMA2; (-) strand; PAM type: YTN; PAM sequence: TTG
tcaattttgtcttttgttgc

SEQ ID NO: 208027 - DNA, 20 bp, Artificial Sequence
  Description of Artificial Sequence: Synthetic oligonucleotide
  Target: LAMA2; (-) strand; PAM type: YTN; PAM sequence: TTT
gtcaattttgtcttttgttg

SEQ ID NO: 208028 - DNA, 20 bp, Artificial Sequence
  Description of Artificial Sequence: Synthetic oligonucleotide
  Target: LAMA2; (-) strand; PAM type: YTN; PAM sequence: TTA
gatcccatttgtcaattttg

SEQ ID NO: 208029 - DNA, 20 bp, Artificial Sequence
  Description of Artificial Sequence: Synthetic oligonucleotide
  Target: LAMA2; (-) strand; PAM type: YTN; PAM sequence: TTA
attagatcccatttgtcaat

SEQ ID NO: 208030 - DNA, 20 bp, Artificial Sequence
  Description of Artificial Sequence: Synthetic oligonucleotide
  Target: LAMA2; (-) strand; PAM type: YTN; PAM sequence: TTT
aattagatcccatttgtcaa

SEQ ID NO: 208031 - DNA, 20 bp, Artificial Sequence
  Description of Artificial Sequence: Synthetic oligonucleotide
  Target: LAMA2; (-) strand; PAM type: YTN; PAM sequence: TTA
gtttaattagatcccatttg

SEQ ID NO: 208032 - DNA, 20 bp, Artificial Sequence
  Description of Artificial Sequence: Synthetic oligonucleotide
  Target: LAMA2; (-) strand; PAM type: YTN; PAM sequence: TTT
agtttaattagatcccattt

SEQ ID NO: 208033 - DNA, 20 bp, Artificial Sequence
  Description of Artificial Sequence: Synthetic oligonucleotide
  Target: LAMA2; (-) strand; PAM type: YTN; PAM sequence: CTT
tagtttaattagatcccatt

SEQ ID NO: 208034 - DNA, 20 bp, Artificial Sequence
  Description of Artificial Sequence: Synthetic oligonucleotide
  Target: LAMA2; (-) strand; PAM type: YTN; PAM sequence: CTC
tttagtttaattagatccca

SEQ ID NO: 208035 - DNA, 20 bp, Artificial Sequence
  Description of Artificial Sequence: Synthetic oligonucleotide
  Target: LAMA2; (-) strand; PAM type: YTN; PAM sequence: CTG
tgcagaagctctttagttta

SEQ ID NO: 208036 - DNA, 20 bp, Artificial Sequence
  Description of Artificial Sequence: Synthetic oligonucleotide
  Target: LAMA2; (-) strand; PAM type: YTN; PAM sequence: TTG
ctgtgcagaagctctttagt

SEQ ID NO: 208037 - DNA, 20 bp, Artificial Sequence
  Description of Artificial Sequence: Synthetic oligonucleotide
  Target: LAMA2; (-) strand; PAM type: YTN; PAM sequence: TTT
gctgtgcagaagctctttag

SEQ ID NO: 208038 - DNA, 20 bp, Artificial Sequence
  Description of Artificial Sequence: Synthetic oligonucleotide
  Target: LAMA2; (-) strand; PAM type: YTN; PAM sequence: TTT
tgctgtgcagaagctcttta

SEQ ID NO: 208039 - DNA, 20 bp, Artificial Sequence
  Description of Artificial Sequence: Synthetic oligonucleotide
  Target: LAMA2; (-) strand; PAM type: YTN; PAM sequence: CTT
ttgctgtgcagaagctcttt

SEQ ID NO: 208040 - DNA, 20 bp, Artificial Sequence
  Description of Artificial Sequence: Synthetic oligonucleotide
  Target: LAMA2; (-) strand; PAM type: YTN; PAM sequence: TTC
ttttgctgtgcagaagctct

SEQ ID NO: 208041 - DNA, 20 bp, Artificial Sequence
  Description of Artificial Sequence: Synthetic oligonucleotide
  Target: LAMA2; (-) strand; PAM type: YTN; PAM sequence: TTT
cttttgctgtgcagaagctc

SEQ ID NO: 208042 - DNA, 20 bp, Artificial Sequence
  Description of Artificial Sequence: Synthetic oligonucleotide
  Target: LAMA2; (-) strand; PAM type: YTN; PAM sequence: CTG
atggtagtttcttttgctgt

SEQ ID NO: 208043 - DNA, 20 bp, Artificial Sequence
  Description of Artificial Sequence: Synthetic oligonucleotide
  Target: LAMA2; (-) strand; PAM type: YTN; PAM sequence: CTC
tgatggtagtttcttttgct

SEQ ID NO: 208044 - DNA, 20 bp, Artificial Sequence
  Description of Artificial Sequence: Synthetic oligonucleotide
  Target: LAMA2; (-) strand; PAM type: YTN; PAM sequence: TTC
actctgatggtagtttcttt

SEQ ID NO: 208045 - DNA, 20 bp, Artificial Sequence
  Description of Artificial Sequence: Synthetic oligonucleotide
  Target: LAMA2; (-) strand; PAM type: YTN; PAM sequence: CTG
ttcactctgatggtagtttc

SEQ ID NO: 208046 - DNA, 20 bp, Artificial Sequence
  Description of Artificial Sequence: Synthetic oligonucleotide
  Target: LAMA2; (-) strand; PAM type: YTN; PAM sequence: TTG
cctgttcactctgatggtag

SEQ ID NO: 208047 - DNA, 20 bp, Artificial Sequence
  Description of Artificial Sequence: Synthetic oligonucleotide
  Target: LAMA2; (-) strand; PAM type: YTN; PAM sequence: TTG
taggttgcctgttcactctg

SEQ ID NO: 208048 - DNA, 20 bp, Artificial Sequence
  Description of Artificial Sequence: Synthetic oligonucleotide
  Target: LAMA2; (-) strand; PAM type: YTN; PAM sequence: CTC
ccatgttgtaggttgcctgt

SEQ ID NO: 208049 - DNA, 20 bp, Artificial Sequence
  Description of Artificial Sequence: Synthetic oligonucleotide
  Target: LAMA2; (-) strand; PAM type: YTN; PAM sequence: TTC
tcccatgttgtaggttgcct

SEQ ID NO: 208050 - DNA, 20 bp, Artificial Sequence
  Description of Artificial Sequence: Synthetic oligonucleotide
  Target: LAMA2; (-) strand; PAM type: YTN; PAM sequence: TTT
ctcccatgttgtaggttgcc

SEQ ID NO: 208051 - DNA, 20 bp, Artificial Sequence
  Description of Artificial Sequence: Synthetic oligonucleotide
  Target: LAMA2; (-) strand; PAM type: YTN; PAM sequence: TTT
tctcccatgttgtaggttgc

SEQ ID NO: 208052 - DNA, 20 bp, Artificial Sequence
  Description of Artificial Sequence: Synthetic oligonucleotide
  Target: LAMA2; (-) strand; PAM type: YTN; PAM sequence: TTG
caaaaattttctcccatgtt

SEQ ID NO: 208053 - DNA, 20 bp, Artificial Sequence
  Description of Artificial Sequence: Synthetic oligonucleotide
  Target: LAMA2; (-) strand; PAM type: YTN; PAM sequence: TTG
tcagatgagtaggttgcaaa

SEQ ID NO: 208054 - DNA, 20 bp, Artificial Sequence
  Description of Artificial Sequence: Synthetic oligonucleotide
  Target: LAMA2; (-) strand; PAM type: YTN; PAM sequence: TTT
gtcagatgagtaggttgcaa

SEQ ID NO: 208055 - DNA, 20 bp, Artificial Sequence
  Description of Artificial Sequence: Synthetic oligonucleotide
  Target: LAMA2; (-) strand; PAM type: YTN; PAM sequence: CTT
tgtcagatgagtaggttgca

SEQ ID NO: 208056 - DNA, 20 bp, Artificial Sequence
  Description of Artificial Sequence: Synthetic oligonucleotide
  Target: LAMA2; (-) strand; PAM type: YTN; PAM sequence: TTA
gccctttgtcagatgagtag

SEQ ID NO: 208057 - DNA, 20 bp, Artificial Sequence
  Description of Artificial Sequence: Synthetic oligonucleotide
  Target: LAMA2; (-) strand; PAM type: YTN; PAM sequence: CTG
gatattagccctttgtcaga

SEQ ID NO: 208058 - DNA, 20 bp, Artificial Sequence
  Description of Artificial Sequence: Synthetic oligonucleotide
  Target: LAMA2; (-) strand; PAM type: YTN; PAM sequence: TTC
tggatattagccctttgtca

SEQ ID NO: 208059 - DNA, 20 bp, Artificial Sequence
  Description of Artificial Sequence: Synthetic oligonucleotide
  Target: LAMA2; (-) strand; PAM type: YTN; PAM sequence: TTG
tagattctggatattagccc

SEQ ID NO: 208060 - DNA, 20 bp, Artificial Sequence
  Description of Artificial Sequence: Synthetic oligonucleotide
  Target: LAMA2; (-) strand; PAM type: YTN; PAM sequence: TTC
attgtagattctggatatta

SEQ ID NO: 208061 - DNA, 20 bp, Artificial Sequence
  Description of Artificial Sequence: Synthetic oligonucleotide
  Target: LAMA2; (-) strand; PAM type: YTN; PAM sequence: TTG
agttcattgtagattctgga

SEQ ID NO: 208062 - DNA, 20 bp, Artificial Sequence
  Description of Artificial Sequence: Synthetic oligonucleotide
  Target: LAMA2; (-) strand; PAM type: YTN; PAM sequence: TTT
gagttcattgtagattctgg

SEQ ID NO: 208063 - DNA, 20 bp, Artificial Sequence
  Description of Artificial Sequence: Synthetic oligonucleotide
  Target: LAMA2; (-) strand; PAM type: YTN; PAM sequence: TTG
tttgagttcattgtagattc

SEQ ID NO: 208064 - DNA, 20 bp, Artificial Sequence
  Description of Artificial Sequence: Synthetic oligonucleotide
  Target: LAMA2; (-) strand; PAM type: YTN; PAM sequence: TTT
gtttgagttcattgtagatt

SEQ ID NO: 208065 - DNA, 20 bp, Artificial Sequence
  Description of Artificial Sequence: Synthetic oligonucleotide
  Target: LAMA2; (-) strand; PAM type: YTN; PAM sequence: TTG
taaatttgtttgagttcatt

SEQ ID NO: 208066 - DNA, 20 bp, Artificial Sequence
  Description of Artificial Sequence: Synthetic oligonucleotide
  Target: LAMA2; (-) strand; PAM type: YTN; PAM sequence: CTT
gtaaatttgtttgagttcat

SEQ ID NO: 208067 - DNA, 20 bp, Artificial Sequence
  Description of Artificial Sequence: Synthetic oligonucleotide
  Target: LAMA2; (-) strand; PAM type: YTN; PAM sequence: TTC
ttgtaaatttgtttgagttc

SEQ ID NO: 208068 - DNA, 20 bp, Artificial Sequence
  Description of Artificial Sequence: Synthetic oligonucleotide
  Target: LAMA2; (-) strand; PAM type: YTN; PAM sequence: TTT
cttgtaaatttgtttgagtt

SEQ ID NO: 208069 - DNA, 20 bp, Artificial Sequence
  Description of Artificial Sequence: Synthetic oligonucleotide
  Target: LAMA2; (-) strand; PAM type: YTN; PAM sequence: TTT
tcttgtaaatttgtttgagt

SEQ ID NO: 208070 - DNA, 20 bp, Artificial Sequence
  Description of Artificial Sequence: Synthetic oligonucleotide
  Target: LAMA2; (-) strand; PAM type: YTN; PAM sequence: TTT
ttcttgtaaatttgtttgag

SEQ ID NO: 208071 - DNA, 20 bp, Artificial Sequence
  Description of Artificial Sequence: Synthetic oligonucleotide
  Target: LAMA2; (-) strand; PAM type: YTN; PAM sequence: TTT
tttcttgtaaatttgtttga

SEQ ID NO: 208072 - DNA, 20 bp, Artificial Sequence
  Description of Artificial Sequence: Synthetic oligonucleotide
  Target: LAMA2; (-) strand; PAM type: YTN; PAM sequence: TTT
ttttcttgtaaatttgtttg

SEQ ID NO: 208073 - DNA, 20 bp, Artificial Sequence
  Description of Artificial Sequence: Synthetic oligonucleotide
  Target: LAMA2; (-) strand; PAM type: YTN; PAM sequence: TTG
tttttttcttgtaaatttgt

SEQ ID NO: 208074 - DNA, 20 bp, Artificial Sequence
  Description of Artificial Sequence: Synthetic oligonucleotide
  Target: LAMA2; (-) strand; PAM type: YTN; PAM sequence: TTT
gtttttttcttgtaaatttg

SEQ ID NO: 208075 - DNA, 20 bp, Artificial Sequence
  Description of Artificial Sequence: Synthetic oligonucleotide
  Target: LAMA2; (-) strand; PAM type: YTN; PAM sequence: TTG
tttgtttttttcttgtaaat

SEQ ID NO: 208076 - DNA, 20 bp, Artificial Sequence
  Description of Artificial Sequence: Synthetic oligonucleotide
  Target: LAMA2; (-) strand; PAM type: YTN; PAM sequence: TTG
atggggttgtttgttttttt

SEQ ID NO: 208077 - DNA, 20 bp, Artificial Sequence
  Description of Artificial Sequence: Synthetic oligonucleotide
  Target: LAMA2; (-) strand; PAM type: YTN; PAM sequence: TTT
gatggggttgtttgtttttt

SEQ ID NO: 208078 - DNA, 20 bp, Artificial Sequence
  Description of Artificial Sequence: Synthetic oligonucleotide
  Target: LAMA2; (-) strand; PAM type: YTN; PAM sequence: TTT
tgatggggttgtttgttttt

SEQ ID NO: 208079 - DNA, 20 bp, Artificial Sequence
  Description of Artificial Sequence: Synthetic oligonucleotide
  Target: LAMA2; (-) strand; PAM type: YTN; PAM sequence: TTT
ttgatggggttgtttgtttt

SEQ ID NO: 208080 - DNA, 20 bp, Artificial Sequence
  Description of Artificial Sequence: Synthetic oligonucleotide
  Target: LAMA2; (-) strand; PAM type: YTN; PAM sequence: CTT
tttgatggggttgtttgttt

SEQ ID NO: 208081 - DNA, 20 bp, Artificial Sequence
  Description of Artificial Sequence: Synthetic oligonucleotide
  Target: LAMA2; (-) strand; PAM type: YTN; PAM sequence: TTC
gcccactttttgatggggtt

SEQ ID NO: 208082 - DNA, 20 bp, Artificial Sequence
  Description of Artificial Sequence: Synthetic oligonucleotide
  Target: LAMA2; (-) strand; PAM type: YTN; PAM sequence: CTT
cgcccactttttgatggggt

SEQ ID NO: 208083 - DNA, 20 bp, Artificial Sequence
  Description of Artificial Sequence: Synthetic oligonucleotide
  Target: LAMA2; (-) strand; PAM type: YTN; PAM sequence: TTC
atgtccttcgcccacttttt

SEQ ID NO: 208084 - DNA, 20 bp, Artificial Sequence
  Description of Artificial Sequence: Synthetic oligonucleotide
  Target: LAMA2; (-) strand; PAM type: YTN; PAM sequence: CTG
ttcatgtccttcgcccactt

SEQ ID NO: 208085 - DNA, 20 bp, Artificial Sequence
  Description of Artificial Sequence: Synthetic oligonucleotide
  Target: LAMA2; (-) strand; PAM type: YTN; PAM sequence: TTG
agaagtgtctgttcatgtcc

SEQ ID NO: 208086 - DNA, 20 bp, Artificial Sequence
  Description of Artificial Sequence: Synthetic oligonucleotide
  Target: LAMA2; (-) strand; PAM type: YTN; PAM sequence: TTT
gagaagtgtctgttcatgtc

SEQ ID NO: 208087 - DNA, 20 bp, Artificial Sequence
  Description of Artificial Sequence: Synthetic oligonucleotide
  Target: LAMA2; (-) strand; PAM type: YTN; PAM sequence: TTT
tgagaagtgtctgttcatgt

SEQ ID NO: 208088 - DNA, 20 bp, Artificial Sequence
  Description of Artificial Sequence: Synthetic oligonucleotide
  Target: LAMA2; (-) strand; PAM type: YTN; PAM sequence: CTT
ttgagaagtgtctgttcatg

SEQ ID NO: 208089 - DNA, 20 bp, Artificial Sequence
  Description of Artificial Sequence: Synthetic oligonucleotide
  Target: LAMA2; (-) strand; PAM type: YTN; PAM sequence: TTC
ttttgagaagtgtctgttca

SEQ ID NO: 208090 - DNA, 20 bp, Artificial Sequence
  Description of Artificial Sequence: Synthetic oligonucleotide
  Target: LAMA2; (-) strand; PAM type: YTN; PAM sequence: CTT
cttttgagaagtgtctgttc

SEQ ID NO: 208091 - DNA, 20 bp, Artificial Sequence
  Description of Artificial Sequence: Synthetic oligonucleotide
  Target: LAMA2; (-) strand; PAM type: YTN; PAM sequence: CTG
cataaatgtcttcttttgag

SEQ ID NO: 208092 - DNA, 20 bp, Artificial Sequence
  Description of Artificial Sequence: Synthetic oligonucleotide
  Target: LAMA2; (-) strand; PAM type: YTN; PAM sequence: TTG
gctgcataaatgtcttcttt

SEQ ID NO: 208093 - DNA, 20 bp, Artificial Sequence
  Description of Artificial Sequence: Synthetic oligonucleotide
  Target: LAMA2; (-) strand; PAM type: YTN; PAM sequence: TTT
ggctgcataaatgtcttctt

SEQ ID NO: 208094 - DNA, 20 bp, Artificial Sequence
  Description of Artificial Sequence: Synthetic oligonucleotide
  Target: LAMA2; (-) strand; PAM type: YTN; PAM sequence: TTT
tggctgcataaatgtcttct

SEQ ID NO: 208095 - DNA, 20 bp, Artificial Sequence
  Description of Artificial Sequence: Synthetic oligonucleotide
  Target: LAMA2; (-) strand; PAM type: YTN; PAM sequence: TTT
ttggctgcataaatgtcttc

SEQ ID NO: 208096 - DNA, 20 bp, Artificial Sequence
  Description of Artificial Sequence: Synthetic oligonucleotide
  Target: LAMA2; (-) strand; PAM type: YTN; PAM sequence: TTT
tttggctgcataaatgtctt

SEQ ID NO: 208097 - DNA, 20 bp, Artificial Sequence
  Description of Artificial Sequence: Synthetic oligonucleotide
  Target: LAMA2; (-) strand; PAM type: YTN; PAM sequence: TTC
atgtgttttttggctgcata

SEQ ID NO: 208098 - DNA, 20 bp, Artificial Sequence
  Description of Artificial Sequence: Synthetic oligonucleotide
  Target: LAMA2; (-) strand; PAM type: YTN; PAM sequence: CTT
catgtgttttttggctgcat

SEQ ID NO: 208099 - DNA, 20 bp, Artificial Sequence
  Description of Artificial Sequence: Synthetic oligonucleotide
  Target: LAMA2; (-) strand; PAM type: YTN; PAM sequence: TTC
ttcatgtgttttttggctgc

SEQ ID NO: 208100 - DNA, 20 bp, Artificial Sequence
  Description of Artificial Sequence: Synthetic oligonucleotide
  Target: LAMA2; (-) strand; PAM type: YTN; PAM sequence: TTT
cttcatgtgttttttggctg

SEQ ID NO: 208101 - DNA, 20 bp, Artificial Sequence
  Description of Artificial Sequence: Synthetic oligonucleotide
  Target: LAMA2; (-) strand; PAM type: YTN; PAM sequence: CTG
atggccagtgatgatgagca

SEQ ID NO: 208102 - DNA, 20 bp, Artificial Sequence
  Description of Artificial Sequence: Synthetic oligonucleotide
  Target: LAMA2; (-) strand; PAM type: YTN; PAM sequence: CTC
tgatggccagtgatgatgag

SEQ ID NO: 208103 - DNA, 20 bp, Artificial Sequence
  Description of Artificial Sequence: Synthetic oligonucleotide
  Target: LAMA2; (-) strand; PAM type: YTN; PAM sequence: TTC
tctgatggccagtgatgatg

SEQ ID NO: 208104 - DNA, 20 bp, Artificial Sequence
  Description of Artificial Sequence: Synthetic oligonucleotide
  Target: LAMA2; (-) strand; PAM type: YTN; PAM sequence: TTT
ctctgatggccagtgatgat

SEQ ID NO: 208105 - DNA, 20 bp, Artificial Sequence
  Description of Artificial Sequence: Synthetic oligonucleotide
  Target: LAMA2; (-) strand; PAM type: YTN; PAM sequence: TTG
catttctctgatggccagtg

SEQ ID NO: 208106 - DNA, 20 bp, Artificial Sequence
  Description of Artificial Sequence: Synthetic oligonucleotide
  Target: LAMA2; (-) strand; PAM type: YTN; PAM sequence: TTT
gcatttctctgatggccagt

SEQ ID NO: 208107 - DNA, 20 bp, Artificial Sequence
  Description of Artificial Sequence: Synthetic oligonucleotide
  Target: LAMA2; (-) strand; PAM type: YTN; PAM sequence: TTG
atttgcatttctctgatggc

SEQ ID NO: 208108 - DNA, 20 bp, Artificial Sequence
  Description of Artificial Sequence: Synthetic oligonucleotide
  Target: LAMA2; (-) strand; PAM type: YTN; PAM sequence: TTT
gatttgcatttctctgatgg

SEQ ID NO: 208109 - DNA, 20 bp, Artificial Sequence
  Description of Artificial Sequence: Synthetic oligonucleotide
  Target: LAMA2; (-) strand; PAM type: YTN; PAM sequence: TTT
tgatttgcatttctctgatg

SEQ ID NO: 208110 - DNA, 20 bp, Artificial Sequence
  Description of Artificial Sequence: Synthetic oligonucleotide
  Target: LAMA2; (-) strand; PAM type: YTN; PAM sequence: CTC
atagtggttttgatttgcat

SEQ ID NO: 208111 - DNA, 20 bp, Artificial Sequence
  Description of Artificial Sequence: Synthetic oligonucleotide
  Target: LAMA2; (-) strand; PAM type: YTN; PAM sequence: CTG
gtgtgagatgatatctcata

SEQ ID NO: 208112 - DNA, 20 bp, Artificial Sequence
  Description of Artificial Sequence: Synthetic oligonucleotide
  Target: LAMA2; (-) strand; PAM type: YTN; PAM sequence: CTA
actggtgtgagatgatatct

SEQ ID NO: 208113 - DNA, 20 bp, Artificial Sequence
  Description of Artificial Sequence: Synthetic oligonucleotide
  Target: LAMA2; (-) strand; PAM type: YTN; PAM sequence: TTC
taactggtgtgagatgatat

SEQ ID NO: 208114 - DNA, 20 bp, Artificial Sequence
  Description of Artificial Sequence: Synthetic oligonucleotide
  Target: LAMA2; (-) strand; PAM type: YTN; PAM sequence: TTG
ccattctaactggtgtgaga

SEQ ID NO: 208115 - DNA, 20 bp, Artificial Sequence
  Description of Artificial Sequence: Synthetic oligonucleotide
  Target: LAMA2; (-) strand; PAM type: YTN; PAM sequence: TTA
atgattgccattctaactgg

SEQ ID NO: 208116 - DNA, 20 bp, Artificial Sequence
  Description of Artificial Sequence: Synthetic oligonucleotide
  Target: LAMA2; (-) strand; PAM type: YTN; PAM sequence: TTT
aatgattgccattctaactg

SEQ ID NO: 208117 - DNA, 20 bp, Artificial Sequence
  Description of Artificial Sequence: Synthetic oligonucleotide
  Target: LAMA2; (-) strand; PAM type: YTN; PAM sequence: TTT
taatgattgccattctaact

SEQ ID NO: 208118 - DNA, 20 bp, Artificial Sequence
  Description of Artificial Sequence: Synthetic oligonucleotide
  Target: LAMA2; (-) strand; PAM type: YTN; PAM sequence: TTT
ttaatgattgccattctaac

SEQ ID NO: 208119 - DNA, 20 bp, Artificial Sequence
  Description of Artificial Sequence: Synthetic oligonucleotide
  Target: LAMA2; (-) strand; PAM type: YTN; PAM sequence: CTT
tttaatgattgccattctaa

SEQ ID NO: 208120 - DNA, 20 bp, Artificial Sequence
  Description of Artificial Sequence: Synthetic oligonucleotide
  Target: LAMA2; (-) strand; PAM type: YTN; PAM sequence: CTG
actttttaatgattgccatt

SEQ ID NO: 208121 - DNA, 20 bp, Artificial Sequence
  Description of Artificial Sequence: Synthetic oligonucleotide
  Target: LAMA2; (-) strand; PAM type: YTN; PAM sequence: TTC
ctgactttttaatgattgcc

SEQ ID NO: 208122 - DNA, 20 bp, Artificial Sequence
  Description of Artificial Sequence: Synthetic oligonucleotide
  Target: LAMA2; (-) strand; PAM type: YTN; PAM sequence: TTT
cctgactttttaatgattgc

SEQ ID NO: 208123 - DNA, 20 bp, Artificial Sequence
  Description of Artificial Sequence: Synthetic oligonucleotide
  Target: LAMA2; (-) strand; PAM type: YTN; PAM sequence: TTG
tttcctgactttttaatgat

SEQ ID NO: 208124 - DNA, 20 bp, Artificial Sequence
  Description of Artificial Sequence: Synthetic oligonucleotide
  Target: LAMA2; (-) strand; PAM type: YTN; PAM sequence: CTG
ttgtttcctgactttttaat

SEQ ID NO: 208125 - DNA, 20 bp, Artificial Sequence
  Description of Artificial Sequence: Synthetic oligonucleotide
  Target: LAMA2; (-) strand; PAM type: YTN; PAM sequence: CTC
cagcacctgttgtttcctga

SEQ ID NO: 208126 - DNA, 20 bp, Artificial Sequence
  Description of Artificial Sequence: Synthetic oligonucleotide
  Target: LAMA2; (-) strand; PAM type: YTN; PAM sequence: CTC
tccagcacctgttgtttcct

SEQ ID NO: 208127 - DNA, 20 bp, Artificial Sequence
  Description of Artificial Sequence: Synthetic oligonucleotide
  Target: LAMA2; (-) strand; PAM type: YTN; PAM sequence: CTC
cacatcctctccagcacctg

SEQ ID NO: 208128 - DNA, 20 bp, Artificial Sequence
  Description of Artificial Sequence: Synthetic oligonucleotide
  Target: LAMA2; (-) strand; PAM type: YTN; PAM sequence: TTC
tccacatcctctccagcacc

SEQ ID NO: 208129 - DNA, 20 bp, Artificial Sequence
  Description of Artificial Sequence: Synthetic oligonucleotide
  Target: LAMA2; (-) strand; PAM type: YTN; PAM sequence: TTT
ctccacatcctctccagcac

SEQ ID NO: 208130 - DNA, 20 bp, Artificial Sequence
  Description of Artificial Sequence: Synthetic oligonucleotide
  Target: LAMA2; (-) strand; PAM type: YTN; PAM sequence: CTA
tttctccacatcctctccag

SEQ ID NO: 208131 - DNA, 20 bp, Artificial Sequence
  Description of Artificial Sequence: Synthetic oligonucleotide
  Target: LAMA2; (-) strand; PAM type: YTN; PAM sequence: TTC
ctatttctccacatcctctc

SEQ ID NO: 208132 - DNA, 20 bp, Artificial Sequence
  Description of Artificial Sequence: Synthetic oligonucleotide
  Target: LAMA2; (-) strand; PAM type: YTN; PAM sequence: TTA
cagtcccaccaacagtgtaa

SEQ ID NO: 208133 - DNA, 20 bp, Artificial Sequence
  Description of Artificial Sequence: Synthetic oligonucleotide
  Target: LAMA2; (-) strand; PAM type: YTN; PAM sequence: TTT
acagtcccaccaacagtgta

SEQ ID NO: 208134 - DNA, 20 bp, Artificial Sequence
  Description of Artificial Sequence: Synthetic oligonucleotide
  Target: LAMA2; (-) strand; PAM type: YTN; PAM sequence: CTA
gtttacagtcccaccaacag

SEQ ID NO: 208135 - DNA, 20 bp, Artificial Sequence
  Description of Artificial Sequence: Synthetic oligonucleotide
  Target: LAMA2; (-) strand; PAM type: YTN; PAM sequence: TTG
aactagtttacagtcccacc

SEQ ID NO: 208136 - DNA, 20 bp, Artificial Sequence
  Description of Artificial Sequence: Synthetic oligonucleotide
  Target: LAMA2; (-) strand; PAM type: YTN; PAM sequence: TTC
cacaatggttgaactagttt

SEQ ID NO: 208137 - DNA, 20 bp, Artificial Sequence
  Description of Artificial Sequence: Synthetic oligonucleotide
  Target: LAMA2; (-) strand; PAM type: YTN; PAM sequence: CTT
ccacaatggttgaactagtt

SEQ ID NO: 208138 - DNA, 20 bp, Artificial Sequence
  Description of Artificial Sequence: Synthetic oligonucleotide
  Target: LAMA2; (-) strand; PAM type: YTN; PAM sequence: CTG
acttccacaatggttgaact

SEQ ID NO: 208139 - DNA, 20 bp, Artificial Sequence
  Description of Artificial Sequence: Synthetic oligonucleotide
  Target: LAMA2; (-) strand; PAM type: YTN; PAM sequence: CTG
aggaatcgccacactgactt

SEQ ID NO: 208140 - DNA, 20 bp, Artificial Sequence
  Description of Artificial Sequence: Synthetic oligonucleotide
  Target: LAMA2; (-) strand; PAM type: YTN; PAM sequence: CTA
gatccctgaggaatcgccac

SEQ ID NO: 208141 - DNA, 20 bp, Artificial Sequence
  Description of Artificial Sequence: Synthetic oligonucleotide
  Target: LAMA2; (-) strand; PAM type: YTN; PAM sequence: TTC
tagatccctgaggaatcgcc

SEQ ID NO: 208142 - DNA, 20 bp, Artificial Sequence
  Description of Artificial Sequence: Synthetic oligonucleotide
  Target: LAMA2; (-) strand; PAM type: YTN; PAM sequence: CTA
gttctagatccctgaggaat

SEQ ID NO: 208143 - DNA, 20 bp, Artificial Sequence
  Description of Artificial Sequence: Synthetic oligonucleotide
  Target: LAMA2; (-) strand; PAM type: YTN; PAM sequence: TTC
tagttctagatccctgagga

SEQ ID NO: 208144 - DNA, 20 bp, Artificial Sequence
  Description of Artificial Sequence: Synthetic oligonucleotide
  Target: LAMA2; (-) strand; PAM type: YTN; PAM sequence: TTT
ctagttctagatccctgagg

SEQ ID NO: 208145 - DNA, 20 bp, Artificial Sequence
  Description of Artificial Sequence: Synthetic oligonucleotide
  Target: LAMA2; (-) strand; PAM type: YTN; PAM sequence: CTG
ggtcaaatggtatttctagt

SEQ ID NO: 208146 - DNA, 20 bp, Artificial Sequence
  Description of Artificial Sequence: Synthetic oligonucleotide
  Target: LAMA2; (-) strand; PAM type: YTN; PAM sequence: TTG
ggtatatacccagtaatggg

SEQ ID NO: 208147 - DNA, 20 bp, Artificial Sequence
  Description of Artificial Sequence: Synthetic oligonucleotide
  Target: LAMA2; (-) strand; PAM type: YTN; PAM sequence: TTT
gggtatatacccagtaatgg

SEQ ID NO: 208148 - DNA, 20 bp, Artificial Sequence
  Description of Artificial Sequence: Synthetic oligonucleotide
  Target: LAMA2; (-) strand; PAM type: YTN; PAM sequence: CTC
atttgggtatatacccagta

SEQ ID NO: 208149 - DNA, 20 bp, Artificial Sequence
  Description of Artificial Sequence: Synthetic oligonucleotide
  Target: LAMA2; (-) strand; PAM type: YTN; PAM sequence: TTA
tactcatttgggtatatacc

SEQ ID NO: 208150 - DNA, 20 bp, Artificial Sequence
  Description of Artificial Sequence: Synthetic oligonucleotide
  Target: LAMA2; (-) strand; PAM type: YTN; PAM sequence: TTT
atactcatttgggtatatac

SEQ ID NO: 208151 - DNA, 20 bp, Artificial Sequence
  Description of Artificial Sequence: Synthetic oligonucleotide
  Target: LAMA2; (-) strand; PAM type: YTN; PAM sequence: TTA
tagcagcatgatttatactc

SEQ ID NO: 208152 - DNA, 20 bp, Artificial Sequence
  Description of Artificial Sequence: Synthetic oligonucleotide
  Target: LAMA2; (-) strand; PAM type: YTN; PAM sequence: TTT
atagcagcatgatttatact

SEQ ID NO: 208153 - DNA, 20 bp, Artificial Sequence
  Description of Artificial Sequence: Synthetic oligonucleotide
  Target: LAMA2; (-) strand; PAM type: YTN; PAM sequence: CTT
tatagcagcatgatttatac

SEQ ID NO: 208154 - DNA, 20 bp, Artificial Sequence
  Description of Artificial Sequence: Synthetic oligonucleotide
  Target: LAMA2; (-) strand; PAM type: YTN; PAM sequence: TTG
tgaatagtgccgcaataaac

SEQ ID NO: 208155 - DNA, 20 bp, Artificial Sequence
  Description of Artificial Sequence: Synthetic oligonucleotide
  Target: LAMA2; (-) strand; PAM type: YTN; PAM sequence: CTA
ttgtgaatagtgccgcaata

SEQ ID NO: 208156 - DNA, 20 bp, Artificial Sequence
  Description of Artificial Sequence: Synthetic oligonucleotide
  Target: LAMA2; (-) strand; PAM type: YTN; PAM sequence: TTG
ctattgtgaatagtgccgca

SEQ ID NO: 208157 - DNA, 20 bp, Artificial Sequence
  Description of Artificial Sequence: Synthetic oligonucleotide
  Target: LAMA2; (-) strand; PAM type: YTN; PAM sequence: TTT
gctattgtgaatagtgccgc

SEQ ID NO: 208158 - DNA, 20 bp, Artificial Sequence
  Description of Artificial Sequence: Synthetic oligonucleotide
  Target: LAMA2; (-) strand; PAM type: YTN; PAM sequence: CTT
tgctattgtgaatagtgccg

SEQ ID NO: 208159 - DNA, 20 bp, Artificial Sequence
  Description of Artificial Sequence: Synthetic oligonucleotide
  Target: LAMA2; (-) strand; PAM type: YTN; PAM sequence: TTC
caagtctttgctattgtgaa

SEQ ID NO: 208160 - DNA, 20 bp, Artificial Sequence
  Description of Artificial Sequence: Synthetic oligonucleotide
  Target: LAMA2; (-) strand; PAM type: YTN; PAM sequence: TTG
gttccaagtctttgctattg

SEQ ID NO: 208161 - DNA, 20 bp, Artificial Sequence
  Description of Artificial Sequence: Synthetic oligonucleotide
  Target: LAMA2; (-) strand; PAM type: YTN; PAM sequence: TTG
ggttggttccaagtctttgc

SEQ ID NO: 208162 - DNA, 20 bp, Artificial Sequence
  Description of Artificial Sequence: Synthetic oligonucleotide
  Target: LAMA2; (-) strand; PAM type: YTN; PAM sequence: TTT
gggttggttccaagtctttg

SEQ ID NO: 208163 - DNA, 20 bp, Artificial Sequence
  Description of Artificial Sequence: Synthetic oligonucleotide
  Target: LAMA2; (-) strand; PAM type: YTN; PAM sequence: TTG
gacatttgggttggttccaa

SEQ ID NO: 208164 - DNA, 20 bp, Artificial Sequence
  Description of Artificial Sequence: Synthetic oligonucleotide
  Target: LAMA2; (-) strand; PAM type: YTN; PAM sequence: TTG
ttggacatttgggttggttc

SEQ ID NO: 208165 - DNA, 20 bp, Artificial Sequence
  Description of Artificial Sequence: Synthetic oligonucleotide
  Target: LAMA2; (-) strand; PAM type: YTN; PAM sequence: CTA
tcattgttggacatttgggt

SEQ ID NO: 208166 - DNA, 20 bp, Artificial Sequence
  Description of Artificial Sequence: Synthetic oligonucleotide
  Target: LAMA2; (-) strand; PAM type: YTN; PAM sequence: TTA
atccagtctatcattgttgg

SEQ ID NO: 208167 - DNA, 20 bp, Artificial Sequence
  Description of Artificial Sequence: Synthetic oligonucleotide
  Target: LAMA2; (-) strand; PAM type: YTN; PAM sequence: CTT
aatccagtctatcattgttg

SEQ ID NO: 208168 - DNA, 20 bp, Artificial Sequence
  Description of Artificial Sequence: Synthetic oligonucleotide
  Target: LAMA2; (-) strand; PAM type: YTN; PAM sequence: TTC
ttaatccagtctatcattgt

SEQ ID NO: 208169 - DNA, 20 bp, Artificial Sequence
  Description of Artificial Sequence: Synthetic oligonucleotide
  Target: LAMA2; (-) strand; PAM type: YTN; PAM sequence: TTT
cttaatccagtctatcattg

SEQ ID NO: 208170 - DNA, 20 bp, Artificial Sequence
  Description of Artificial Sequence: Synthetic oligonucleotide
  Target: LAMA2; (-) strand; PAM type: YTN; PAM sequence: TTT
tcttaatccagtctatcatt

SEQ ID NO: 208171 - DNA, 20 bp, Artificial Sequence
  Description of Artificial Sequence: Synthetic oligonucleotide
  Target: LAMA2; (-) strand; PAM type: YTN; PAM sequence: TTC
catggtgtatatgtgccaca

SEQ ID NO: 208172 - DNA, 20 bp, Artificial Sequence
  Description of Artificial Sequence: Synthetic oligonucleotide
  Target: LAMA2; (-) strand; PAM type: YTN; PAM sequence: CTG
catagtattccatggtgtat

SEQ ID NO: 208173 - DNA, 20 bp, Artificial Sequence
  Description of Artificial Sequence: Synthetic oligonucleotide
  Target: LAMA2; (-) strand; PAM type: YTN; PAM sequence: TTA
tggctgcatagtattccatg

SEQ ID NO: 208174 - DNA, 20 bp, Artificial Sequence
  Description of Artificial Sequence: Synthetic oligonucleotide
  Target: LAMA2; (-) strand; PAM type: YTN; PAM sequence: TTT
atggctgcatagtattccat

SEQ ID NO: 208175 - DNA, 20 bp, Artificial Sequence
  Description of Artificial Sequence: Synthetic oligonucleotide
  Target: LAMA2; (-) strand; PAM type: YTN; PAM sequence: TTT
tatggctgcatagtattcca

SEQ ID NO: 208176 - DNA, 20 bp, Artificial Sequence
  Description of Artificial Sequence: Synthetic oligonucleotide
  Target: LAMA2; (-) strand; PAM type: YTN; PAM sequence: TTT
ttatggctgcatagtattcc

SEQ ID NO: 208177 - DNA, 20 bp, Artificial Sequence
  Description of Artificial Sequence: Synthetic oligonucleotide
  Target: LAMA2; (-) strand; PAM type: YTN; PAM sequence: TTT
tttatggctgcatagtattc

SEQ ID NO: 208178 - DNA, 20 bp, Artificial Sequence
  Description of Artificial Sequence: Synthetic oligonucleotide
  Target: LAMA2; (-) strand; PAM type: YTN; PAM sequence: CTC
atcattttttatggctgcat

SEQ ID NO: 208179 - DNA, 20 bp, Artificial Sequence
  Description of Artificial Sequence: Synthetic oligonucleotide
  Target: LAMA2; (-) strand; PAM type: YTN; PAM sequence: CTA
caaaggatatgaactcatca

SEQ ID NO: 208180 - DNA, 20 bp, Artificial Sequence
  Description of Artificial Sequence: Synthetic oligonucleotide
  Target: LAMA2; (-) strand; PAM type: YTN; PAM sequence: TTC
atccatgtccctacaaagga

SEQ ID NO: 208181 - DNA, 20 bp, Artificial Sequence
  Description of Artificial Sequence: Synthetic oligonucleotide
  Target: LAMA2; (-) strand; PAM type: YTN; PAM sequence: TTT
catccatgtccctacaaagg

SEQ ID NO: 208182 - DNA, 20 bp, Artificial Sequence
  Description of Artificial Sequence: Synthetic oligonucleotide
  Target: LAMA2; (-) strand; PAM type: YTN; PAM sequence: TTC
caatttcatccatgtcccta

SEQ ID NO: 208183 - DNA, 20 bp, Artificial Sequence
  Description of Artificial Sequence: Synthetic oligonucleotide
  Target: LAMA2; (-) strand; PAM type: YTN; PAM sequence: TTT
ccaatttcatccatgtccct

SEQ ID NO: 208184 - DNA, 20 bp, Artificial Sequence
  Description of Artificial Sequence: Synthetic oligonucleotide
  Target: LAMA2; (-) strand; PAM type: YTN; PAM sequence: CTG
agaatgatggtttccaattt

SEQ ID NO: 208185 - DNA, 20 bp, Artificial Sequence
  Description of Artificial Sequence: Synthetic oligonucleotide
  Target: LAMA2; (-) strand; PAM type: YTN; PAM sequence: TTA
ctgagaatgatggtttccaa

SEQ ID NO: 208186 - DNA, 20 bp, Artificial Sequence
  Description of Artificial Sequence: Synthetic oligonucleotide
  Target: LAMA2; (-) strand; PAM type: YTN; PAM sequence: TTT
actgagaatgatggtttcca

SEQ ID NO: 208187 - DNA, 20 bp, Artificial Sequence
  Description of Artificial Sequence: Synthetic oligonucleotide
  Target: LAMA2; (-) strand; PAM type: YTN; PAM sequence: TTG
cgatagtttactgagaatga

SEQ ID NO: 208188 - DNA, 20 bp, Artificial Sequence
  Description of Artificial Sequence: Synthetic oligonucleotide
  Target: LAMA2; (-) strand; PAM type: YTN; PAM sequence: CTT
gcgatagtttactgagaatg

SEQ ID NO: 208189 - DNA, 20 bp, Artificial Sequence
  Description of Artificial Sequence: Synthetic oligonucleotide
  Target: LAMA2; (-) strand; PAM type: YTN; PAM sequence: TTC
ttgcgatagtttactgagaa

SEQ ID NO: 208190 - DNA, 20 bp, Artificial Sequence
  Description of Artificial Sequence: Synthetic oligonucleotide
  Target: LAMA2; (-) strand; PAM type: YTN; PAM sequence: TTG
ttcttgcgatagtttactga

SEQ ID NO: 208191 - DNA, 20 bp, Artificial Sequence
  Description of Artificial Sequence: Synthetic oligonucleotide
  Target: LAMA2; (-) strand; PAM type: YTN; PAM sequence: TTT
gttcttgcgatagtttactg

SEQ ID NO: 208192 - DNA, 20 bp, Artificial Sequence
  Description of Artificial Sequence: Synthetic oligonucleotide
  Target: LAMA2; (-) strand; PAM type: YTN; PAM sequence: TTT
tgttcttgcgatagtttact

SEQ ID NO: 208193 - DNA, 20 bp, Artificial Sequence
  Description of Artificial Sequence: Synthetic oligonucleotide
  Target: LAMA2; (-) strand; PAM type: YTN; PAM sequence: TTT
ttgttcttgcgatagtttac

SEQ ID NO: 208194 - DNA, 20 bp, Artificial Sequence
  Description of Artificial Sequence: Synthetic oligonucleotide
  Target: LAMA2; (-) strand; PAM type: YTN; PAM sequence: TTT
tttgttcttgcgatagttta

SEQ ID NO: 208195 - DNA, 20 bp, Artificial Sequence
  Description of Artificial Sequence: Synthetic oligonucleotide
  Target: LAMA2; (-) strand; PAM type: YTN; PAM sequence: TTG
gttttttgttcttgcgatag

SEQ ID NO: 208196 - DNA, 20 bp, Artificial Sequence
  Description of Artificial Sequence: Synthetic oligonucleotide
  Target: LAMA2; (-) strand; PAM type: YTN; PAM sequence: TTT
ggttttttgttcttgcgata

SEQ ID NO: 208197 - DNA, 20 bp, Artificial Sequence
  Description of Artificial Sequence: Synthetic oligonucleotide
  Target: LAMA2; (-) strand; PAM type: YTN; PAM sequence: CTA
tgagtgagaatatgcggtgt

SEQ ID NO: 208198 - DNA, 20 bp, Artificial Sequence
  Description of Artificial Sequence: Synthetic oligonucleotide
  Target: LAMA2; (-) strand; PAM type: YTN; PAM sequence: TTC
ccacctatgagtgagaatat

SEQ ID NO: 208199 - DNA, 20 bp, Artificial Sequence
  Description of Artificial Sequence: Synthetic oligonucleotide
  Target: LAMA2; (-) strand; PAM type: YTN; PAM sequence: TTC
aattcccacctatgagtgag

SEQ ID NO: 208200 - DNA, 20 bp, Artificial Sequence
  Description of Artificial Sequence: Synthetic oligonucleotide
  Target: LAMA2; (-) strand; PAM type: YTN; PAM sequence: TTG
ttcaattcccacctatgagt

SEQ ID NO: 208201 - DNA, 20 bp, Artificial Sequence
  Description of Artificial Sequence: Synthetic oligonucleotide
  Target: LAMA2; (-) strand; PAM type: YTN; PAM sequence: CTC
attgttcaattcccacctat

SEQ ID NO: 208202 - DNA, 20 bp, Artificial Sequence
  Description of Artificial Sequence: Synthetic oligonucleotide
  Target: LAMA2; (-) strand; PAM type: YTN; PAM sequence: CTG
tgtccatgtgatctcattgt

SEQ ID NO: 208203 - DNA, 20 bp, Artificial Sequence
  Description of Artificial Sequence: Synthetic oligonucleotide
  Target: LAMA2; (-) strand; PAM type: YTN; PAM sequence: TTC
ctgtgtccatgtgatctcat

SEQ ID NO: 208204 - DNA, 20 bp, Artificial Sequence
  Description of Artificial Sequence: Synthetic oligonucleotide
  Target: LAMA2; (-) strand; PAM type: YTN; PAM sequence: CTT
cctgtgtccatgtgatctca

SEQ ID NO: 208205 - DNA, 20 bp, Artificial Sequence
  Description of Artificial Sequence: Synthetic oligonucleotide
  Target: LAMA2; (-) strand; PAM type: YTN; PAM sequence: TTC
cccttcctgtgtccatgtga

SEQ ID NO: 208206 - DNA, 20 bp, Artificial Sequence
  Description of Artificial Sequence: Synthetic oligonucleotide
  Target: LAMA2; (-) strand; PAM type: YTN; PAM sequence: CTC
ccccgaccccaccacagtcc

SEQ ID NO: 208207 - DNA, 20 bp, Artificial Sequence
  Description of Artificial Sequence: Synthetic oligonucleotide
  Target: LAMA2; (-) strand; PAM type: YTN; PAM sequence: CTC
ccccctcccccgaccccacc

SEQ ID NO: 208208 - DNA, 20 bp, Artificial Sequence
  Description of Artificial Sequence: Synthetic oligonucleotide
  Target: LAMA2; (-) strand; PAM type: YTN; PAM sequence: CTA
tccctcccccctcccccgac

SEQ ID NO: 208209 - DNA, 20 bp, Artificial Sequence
  Description of Artificial Sequence: Synthetic oligonucleotide
  Target: LAMA2; (-) strand; PAM type: YTN; PAM sequence: CTC
ccaatgctatccctcccccc

SEQ ID NO: 208210 - DNA, 20 bp, Artificial Sequence
  Description of Artificial Sequence: Synthetic oligonucleotide
  Target: LAMA2; (-) strand; PAM type: YTN; PAM sequence: TTA
ggtatatctcccaatgctat

SEQ ID NO: 208211 - DNA, 20 bp, Artificial Sequence
  Description of Artificial Sequence: Synthetic oligonucleotide
  Target: LAMA2; (-) strand; PAM type: YTN; PAM sequence: CTA
gcattaggtatatctcccaa

SEQ ID NO: 208212 - DNA, 20 bp, Artificial Sequence
  Description of Artificial Sequence: Synthetic oligonucleotide
  Target: LAMA2; (-) strand; PAM type: YTN; PAM sequence: CTA
atgtgtcatctagcattagg

SEQ ID NO: 208213 - DNA, 20 bp, Artificial Sequence
  Description of Artificial Sequence: Synthetic oligonucleotide
  Target: LAMA2; (-) strand; PAM type: YTN; PAM sequence: CTG
cacccactaatgtgtcatct

SEQ ID NO: 208214 - DNA, 20 bp, Artificial Sequence
  Description of Artificial Sequence: Synthetic oligonucleotide
  Target: LAMA2; (-) strand; PAM type: YTN; PAM sequence: CTG
gtgcgctgcacccactaatg

SEQ ID NO: 208215 - DNA, 20 bp, Artificial Sequence
  Description of Artificial Sequence: Synthetic oligonucleotide
  Target: LAMA2; (-) strand; PAM type: YTN; PAM sequence: TTA
catatgtatacatgtgccat

SEQ ID NO: 208216 - DNA, 20 bp, Artificial Sequence
  Description of Artificial Sequence: Synthetic oligonucleotide
  Target: LAMA2; (-) strand; PAM type: YTN; PAM sequence: TTA
gttacatatgtatacatgtg

SEQ ID NO: 208217 - DNA, 20 bp, Artificial Sequence
  Description of Artificial Sequence: Synthetic oligonucleotide
  Target: LAMA2; (-) strand; PAM type: YTN; PAM sequence: TTG
tgcaggttagttacatatgt

SEQ ID NO: 208218 - DNA, 20 bp, Artificial Sequence
  Description of Artificial Sequence: Synthetic oligonucleotide
  Target: LAMA2; (-) strand; PAM type: YTN; PAM sequence: TTA
gggtacatgtgcacattgtg

SEQ ID NO: 208219 - DNA, 20 bp, Artificial Sequence
  Description of Artificial Sequence: Synthetic oligonucleotide
  Target: LAMA2; (-) strand; PAM type: YTN; PAM sequence: TTT
agggtacatgtgcacattgt

SEQ ID NO: 208220 - DNA, 20 bp, Artificial Sequence
  Description of Artificial Sequence: Synthetic oligonucleotide
  Target: LAMA2; (-) strand; PAM type: YTN; PAM sequence: TTT
tagggtacatgtgcacattg

SEQ ID NO: 208221 - DNA, 20 bp, Artificial Sequence
  Description of Artificial Sequence: Synthetic oligonucleotide
  Target: LAMA2; (-) strand; PAM type: YTN; PAM sequence: CTA
agttttagggtacatgtgca

SEQ ID NO: 208222 - DNA, 20 bp, Artificial Sequence
  Description of Artificial Sequence: Synthetic oligonucleotide
  Target: LAMA2; (-) strand; PAM type: YTN; PAM sequence: CTC
taagttttagggtacatgtg

SEQ ID NO: 208223 - DNA, 20 bp, Artificial Sequence
  Description of Artificial Sequence: Synthetic oligonucleotide
  Target: LAMA2; (-) strand; PAM type: YTN; PAM sequence: TTA
tactctaagttttagggtac

SEQ ID NO: 208224 - DNA, 20 bp, Artificial Sequence
  Description of Artificial Sequence: Synthetic oligonucleotide
  Target: LAMA2; (-) strand; PAM type: YTN; PAM sequence: TTA
ttatactctaagttttaggg

SEQ ID NO: 208225 - DNA, 20 bp, Artificial Sequence
  Description of Artificial Sequence: Synthetic oligonucleotide
  Target: LAMA2; (-) strand; PAM type: YTN; PAM sequence: TTA
ttattatactctaagtttta

SEQ ID NO: 208226 - DNA, 20 bp, Artificial Sequence
  Description of Artificial Sequence: Synthetic oligonucleotide
  Target: LAMA2; (-) strand; PAM type: YTN; PAM sequence: TTT
attattatactctaagtttt

SEQ ID NO: 208227 - DNA, 20 bp, Artificial Sequence
  Description of Artificial Sequence: Synthetic oligonucleotide
  Target: LAMA2; (-) strand; PAM type: YTN; PAM sequence: TTT
tattattatactctaagttt

SEQ ID NO: 208228 - DNA, 20 bp, Artificial Sequence
  Description of Artificial Sequence: Synthetic oligonucleotide
  Target: LAMA2; (-) strand; PAM type: YTN; PAM sequence: TTT
ttattattatactctaagtt

SEQ ID NO: 208229 - DNA, 20 bp, Artificial Sequence
  Description of Artificial Sequence: Synthetic oligonucleotide
  Target: LAMA2; (-) strand; PAM type: YTN; PAM sequence: TTT
tttattattatactctaagt

SEQ ID NO: 208230 - DNA, 20 bp, Artificial Sequence
  Description of Artificial Sequence: Synthetic oligonucleotide
  Target: LAMA2; (-) strand; PAM type: YTN; PAM sequence: TTT
ttttattattatactctaag

SEQ ID NO: 208231 - DNA, 20 bp, Artificial Sequence
  Description of Artificial Sequence: Synthetic oligonucleotide
  Target: LAMA2; (-) strand; PAM type: YTN; PAM sequence: TTT
tttttattattatactctaa

SEQ ID NO: 208232 - DNA, 20 bp, Artificial Sequence
  Description of Artificial Sequence: Synthetic oligonucleotide
  Target: LAMA2; (-) strand; PAM type: YTN; PAM sequence: TTT
ttttttattattatactcta

SEQ ID NO: 208233 - DNA, 20 bp, Artificial Sequence
  Description of Artificial Sequence: Synthetic oligonucleotide
  Target: LAMA2; (-) strand; PAM type: YTN; PAM sequence: TTT
tttttttattattatactct

SEQ ID NO: 208234 - DNA, 20 bp, Artificial Sequence
  Description of Artificial Sequence: Synthetic oligonucleotide
  Target: LAMA2; (-) strand; PAM type: YTN; PAM sequence: TTT
ttttttttattattatactc

SEQ ID NO: 208235 - DNA, 20 bp, Artificial Sequence
  Description of Artificial Sequence: Synthetic oligonucleotide
  Target: LAMA2; (-) strand; PAM type: YTN; PAM sequence: TTT
tttttttttattattatact

SEQ ID NO: 208236 - DNA, 20 bp, Artificial Sequence
  Description of Artificial Sequence: Synthetic oligonucleotide
  Target: LAMA2; (-) strand; PAM type: YTN; PAM sequence: TTT
ttttttttttattattatac

SEQ ID NO: 208237 - DNA, 20 bp, Artificial Sequence
  Description of Artificial Sequence: Synthetic oligonucleotide
  Target: LAMA2; (-) strand; PAM type: YTN; PAM sequence: TTT
tttttttttttattattata

SEQ ID NO: 208238 - DNA, 20 bp, Artificial Sequence
  Description of Artificial Sequence: Synthetic oligonucleotide
  Target: LAMA2; (-) strand; PAM type: YTN; PAM sequence: TTT
ttttttttttttattattat

SEQ ID NO: 208239 - DNA, 20 bp, Artificial Sequence
  Description of Artificial Sequence: Synthetic oligonucleotide
  Target: LAMA2; (-) strand; PAM type: YTN; PAM sequence: TTT
tttttttttttttattatta

SEQ ID NO: 208240 - DNA, 20 bp, Artificial Sequence
  Description of Artificial Sequence: Synthetic oligonucleotide
  Target: LAMA2; (-) strand; PAM type: YTN; PAM sequence: TTT
ttttttttttttttattatt

SEQ ID NO: 208241 - DNA, 20 bp, Artificial Sequence
  Description of Artificial Sequence: Synthetic oligonucleotide
  Target: LAMA2; (-) strand; PAM type: YTN; PAM sequence: TTT
tttttttttttttttattat

SEQ ID NO: 208242 - DNA, 20 bp, Artificial Sequence
  Description of Artificial Sequence: Synthetic oligonucleotide
  Target: LAMA2; (-) strand; PAM type: YTN; PAM sequence: TTT
ttttttttttttttttatta

SEQ ID NO: 208243 - DNA, 20 bp, Artificial Sequence
  Description of Artificial Sequence: Synthetic oligonucleotide
  Target: LAMA2; (-) strand; PAM type: YTN; PAM sequence: TTT
tttttttttttttttttatt

SEQ ID NO: 208244 - DNA, 20 bp, Artificial Sequence
  Description of Artificial Sequence: Synthetic oligonucleotide
  Target: LAMA2; (-) strand; PAM type: YTN; PAM sequence: TTT
ttttttttttttttttttat

SEQ ID NO: 208245 - DNA, 20 bp, Artificial Sequence
  Description of Artificial Sequence: Synthetic oligonucleotide
  Target: LAMA2; (-) strand; PAM type: YTN; PAM sequence: TTT
ttttttttttttttttttta

SEQ ID NO: 208246 - DNA, 20 bp, Artificial Sequence
  Description of Artificial Sequence: Synthetic oligonucleotide
  Target: LAMA2; (-) strand; PAM type: YTN; PAM sequence: TTT
tttttttttttttttttttt

SEQ ID NO: 208247 - DNA, 20 bp, Artificial Sequence
  Description of Artificial Sequence: Synthetic oligonucleotide
  Target: LAMA2; (-) strand; PAM type: YTN; PAM sequence: TTT
tttttttttttttttttttt

SEQ ID NO: 208248 - DNA, 20 bp, Artificial Sequence
  Description of Artificial Sequence: Synthetic oligonucleotide
  Target: LAMA2; (-) strand; PAM type: YTN; PAM sequence: CTT
tttttttttttttttttttt

SEQ ID NO: 208249 - DNA, 20 bp, Artificial Sequence
  Description of Artificial Sequence: Synthetic oligonucleotide
  Target: LAMA2; (-) strand; PAM type: YTN; PAM sequence: TTC
tttttttttttttttttttt

SEQ ID NO: 208250 - DNA, 20 bp, Artificial Sequence
  Description of Artificial Sequence: Synthetic oligonucleotide
  Target: LAMA2; (-) strand; PAM type: YTN; PAM sequence: CTT
cttttttttttttttttttt

SEQ ID NO: 208251 - DNA, 20 bp, Artificial Sequence
  Description of Artificial Sequence: Synthetic oligonucleotide
  Target: LAMA2; (-) strand; PAM type: YTN; PAM sequence: TTG
tcatcatacttctttttttt

SEQ ID NO: 208252 - DNA, 20 bp, Artificial Sequence
  Description of Artificial Sequence: Synthetic oligonucleotide
  Target: LAMA2; (-) strand; PAM type: YTN; PAM sequence: TTT
gtcatcatacttcttttttt

SEQ ID NO: 208253 - DNA, 20 bp, Artificial Sequence
  Description of Artificial Sequence: Synthetic oligonucleotide
  Target: LAMA2; (-) strand; PAM type: YTN; PAM sequence: TTA
aggaaaatgaccatttgtca

SEQ ID NO: 208254 - DNA, 20 bp, Artificial Sequence
  Description of Artificial Sequence: Synthetic oligonucleotide
  Target: LAMA2; (-) strand; PAM type: YTN; PAM sequence: TTT
aaggaaaatgaccatttgtc

SEQ ID NO: 208255 - DNA, 20 bp, Artificial Sequence
  Description of Artificial Sequence: Synthetic oligonucleotide
  Target: LAMA2; (-) strand; PAM type: YTN; PAM sequence: TTT
taaggaaaatgaccatttgt

SEQ ID NO: 208256 - DNA, 20 bp, Artificial Sequence
  Description of Artificial Sequence: Synthetic oligonucleotide
  Target: LAMA2; (-) strand; PAM type: YTN; PAM sequence: TTA
ttttaaggaaaatgaccatt

SEQ ID NO: 208257 - DNA, 20 bp, Artificial Sequence
  Description of Artificial Sequence: Synthetic oligonucleotide
  Target: LAMA2; (-) strand; PAM type: YTN; PAM sequence: TTT
attttaaggaaaatgaccat

SEQ ID NO: 208258 - DNA, 20 bp, Artificial Sequence
  Description of Artificial Sequence: Synthetic oligonucleotide
  Target: LAMA2; (-) strand; PAM type: YTN; PAM sequence: TTT
tattttaaggaaaatgacca

SEQ ID NO: 208259 - DNA, 20 bp, Artificial Sequence
  Description of Artificial Sequence: Synthetic oligonucleotide
  Target: LAMA2; (-) strand; PAM type: YTN; PAM sequence: TTC
ccagaagtacatataggtgc

SEQ ID NO: 208260 - DNA, 20 bp, Artificial Sequence
  Description of Artificial Sequence: Synthetic oligonucleotide
  Target: LAMA2; (-) strand; PAM type: YTN; PAM sequence: TTT
cccagaagtacatataggtg

SEQ ID NO: 208261 - DNA, 20 bp, Artificial Sequence
  Description of Artificial Sequence: Synthetic oligonucleotide
  Target: LAMA2; (-) strand; PAM type: YTN; PAM sequence: CTA
aatttcccagaagtacatat

SEQ ID NO: 208262 - DNA, 20 bp, Artificial Sequence
  Description of Artificial Sequence: Synthetic oligonucleotide
  Target: LAMA2; (-) strand; PAM type: YTN; PAM sequence: CTG
gctaaatttcccagaagtac

SEQ ID NO: 208263 - DNA, 20 bp, Artificial Sequence
  Description of Artificial Sequence: Synthetic oligonucleotide
  Target: LAMA2; (-) strand; PAM type: YTN; PAM sequence: TTG
tggaaatacatgctggctaa

SEQ ID NO: 208264 - DNA, 20 bp, Artificial Sequence
  Description of Artificial Sequence: Synthetic oligonucleotide
  Target: LAMA2; (-) strand; PAM type: YTN; PAM sequence: CTG
tattgtggaaatacatgctg

SEQ ID NO: 208265 - DNA, 20 bp, Artificial Sequence
  Description of Artificial Sequence: Synthetic oligonucleotide
  Target: LAMA2; (-) strand; PAM type: YTN; PAM sequence: CTA
tccctgtattgtggaaatac

SEQ ID NO: 208266 - DNA, 20 bp, Artificial Sequence
  Description of Artificial Sequence: Synthetic oligonucleotide
  Target: LAMA2; (-) strand; PAM type: YTN; PAM sequence: TTA
gcagtccacagaacaaaaac

SEQ ID NO: 208267 - DNA, 20 bp, Artificial Sequence
  Description of Artificial Sequence: Synthetic oligonucleotide
  Target: LAMA2; (-) strand; PAM type: YTN; PAM sequence: TTT
agcagtccacagaacaaaaa

SEQ ID NO: 208268 - DNA, 20 bp, Artificial Sequence
  Description of Artificial Sequence: Synthetic oligonucleotide
  Target: LAMA2; (-) strand; PAM type: YTN; PAM sequence: CTG
tgatcatttagcagtccaca

SEQ ID NO: 208269 - DNA, 20 bp, Artificial Sequence
  Description of Artificial Sequence: Synthetic oligonucleotide
  Target: LAMA2; (-) strand; PAM type: YTN; PAM sequence: TTA
ggctgtgatcatttagcagt

SEQ ID NO: 208270 - DNA, 20 bp, Artificial Sequence
  Description of Artificial Sequence: Synthetic oligonucleotide
  Target: LAMA2; (-) strand; PAM type: YTN; PAM sequence: CTG
agaaggcaatacattaggct

SEQ ID NO: 208271 - DNA, 20 bp, Artificial Sequence
  Description of Artificial Sequence: Synthetic oligonucleotide
  Target: LAMA2; (-) strand; PAM type: YTN; PAM sequence: TTA
ctgagaaggcaatacattag

SEQ ID NO: 208272 - DNA, 20 bp, Artificial Sequence
  Description of Artificial Sequence: Synthetic oligonucleotide
  Target: LAMA2; (-) strand; PAM type: YTN; PAM sequence: TTT
actgagaaggcaatacatta

SEQ ID NO: 208273 - DNA, 20 bp, Artificial Sequence
  Description of Artificial Sequence: Synthetic oligonucleotide
  Target: LAMA2; (-) strand; PAM type: YTN; PAM sequence: TTA
agtcaacgtgtgtttactga

SEQ ID NO: 208274 - DNA, 20 bp, Artificial Sequence
  Description of Artificial Sequence: Synthetic oligonucleotide
  Target: LAMA2; (-) strand; PAM type: YTN; PAM sequence: TTT
aagtcaacgtgtgtttactg

SEQ ID NO: 208275 - DNA, 20 bp, Artificial Sequence
  Description of Artificial Sequence: Synthetic oligonucleotide
  Target: LAMA2; (-) strand; PAM type: YTN; PAM sequence: CTG
atttaagtcaacgtgtgttt

SEQ ID NO: 208276 - DNA, 20 bp, Artificial Sequence
  Description of Artificial Sequence: Synthetic oligonucleotide
  Target: LAMA2; (-) strand; PAM type: YTN; PAM sequence: TTA
cccaactgatttaagtcaac

SEQ ID NO: 208277 - DNA, 20 bp, Artificial Sequence
  Description of Artificial Sequence: Synthetic oligonucleotide
  Target: LAMA2; (-) strand; PAM type: YTN; PAM sequence: TTT
acccaactgatttaagtcaa

SEQ ID NO: 208278 - DNA, 20 bp, Artificial Sequence
  Description of Artificial Sequence: Synthetic oligonucleotide
  Target: LAMA2; (-) strand; PAM type: YTN; PAM sequence: TTA
caatttacccaactgattta

SEQ ID NO: 208279 - DNA, 20 bp, Artificial Sequence
  Description of Artificial Sequence: Synthetic oligonucleotide
  Target: LAMA2; (-) strand; PAM type: YTN; PAM sequence: TTT
acaatttacccaactgattt

SEQ ID NO: 208280 - DNA, 20 bp, Artificial Sequence
  Description of Artificial Sequence: Synthetic oligonucleotide
  Target: LAMA2; (-) strand; PAM type: YTN; PAM sequence: TTG
agtttacaatttacccaact

SEQ ID NO: 208281 - DNA, 20 bp, Artificial Sequence
  Description of Artificial Sequence: Synthetic oligonucleotide
  Target: LAMA2; (-) strand; PAM type: YTN; PAM sequence: CTA
aagtcaaagtaaggaattga

SEQ ID NO: 208282 - DNA, 20 bp, Artificial Sequence
  Description of Artificial Sequence: Synthetic oligonucleotide
  Target: LAMA2; (-) strand; PAM type: YTN; PAM sequence: TTG
caaactaaagtcaaagtaag

SEQ ID NO: 208283 - DNA, 20 bp, Artificial Sequence
  Description of Artificial Sequence: Synthetic oligonucleotide
  Target: LAMA2; (-) strand; PAM type: YTN; PAM sequence: TTT
gcaaactaaagtcaaagtaa

SEQ ID NO: 208284 - DNA, 20 bp, Artificial Sequence
  Description of Artificial Sequence: Synthetic oligonucleotide
  Target: LAMA2; (-) strand; PAM type: YTN; PAM sequence: TTA
atttgcaaactaaagtcaaa

SEQ ID NO: 208285 - DNA, 20 bp, Artificial Sequence
  Description of Artificial Sequence: Synthetic oligonucleotide
  Target: LAMA2; (-) strand; PAM type: YTN; PAM sequence: CTT
aatttgcaaactaaagtcaa

SEQ ID NO: 208286 - DNA, 20 bp, Artificial Sequence
  Description of Artificial Sequence: Synthetic oligonucleotide
  Target: LAMA2; (-) strand; PAM type: YTN; PAM sequence: TTC
ttaatttgcaaactaaagtc

SEQ ID NO: 208287 - DNA, 20 bp, Artificial Sequence
  Description of Artificial Sequence: Synthetic oligonucleotide
  Target: LAMA2; (-) strand; PAM type: YTN; PAM sequence: CTA
ttcttaatttgcaaactaaa

SEQ ID NO: 208288 - DNA, 20 bp, Artificial Sequence
  Description of Artificial Sequence: Synthetic oligonucleotide
  Target: LAMA2; (-) strand; PAM type: YTN; PAM sequence: CTG
aaaataagaaaagtacacta

SEQ ID NO: 208289 - DNA, 20 bp, Artificial Sequence
  Description of Artificial Sequence: Synthetic oligonucleotide
  Target: LAMA2; (-) strand; PAM type: YTN; PAM sequence: TTA
taaataaggcctgaaaataa

SEQ ID NO: 208290 - DNA, 20 bp, Artificial Sequence
  Description of Artificial Sequence: Synthetic oligonucleotide
  Target: LAMA2; (-) strand; PAM type: YTN; PAM sequence: TTA
ggaattataaataaggcctg

SEQ ID NO: 208291 - DNA, 20 bp, Artificial Sequence
  Description of Artificial Sequence: Synthetic oligonucleotide
  Target: LAMA2; (-) strand; PAM type: YTN; PAM sequence: CTG
taacataatagtgtatagca

SEQ ID NO: 208292 - DNA, 20 bp, Artificial Sequence
  Description of Artificial Sequence: Synthetic oligonucleotide
  Target: LAMA2; (-) strand; PAM type: YTN; PAM sequence: TTA
gaaagtgtcaaaatacaagt

SEQ ID NO: 208293 - DNA, 20 bp, Artificial Sequence
  Description of Artificial Sequence: Synthetic oligonucleotide
  Target: LAMA2; (-) strand; PAM type: YTN; PAM sequence: TTG
acaataattagaaagtgtca

SEQ ID NO: 208294 - DNA, 20 bp, Artificial Sequence
  Description of Artificial Sequence: Synthetic oligonucleotide
  Target: LAMA2; (-) strand; PAM type: YTN; PAM sequence: TTT
gacaataattagaaagtgtc

SEQ ID NO: 208295 - DNA, 20 bp, Artificial Sequence
  Description of Artificial Sequence: Synthetic oligonucleotide
  Target: LAMA2; (-) strand; PAM type: YTN; PAM sequence: TTA
taatttgacaataattagaa

SEQ ID NO: 208296 - DNA, 20 bp, Artificial Sequence
  Description of Artificial Sequence: Synthetic oligonucleotide
  Target: LAMA2; (-) strand; PAM type: YTN; PAM sequence: TTT
ataatttgacaataattaga

SEQ ID NO: 208297 - DNA, 20 bp, Artificial Sequence
  Description of Artificial Sequence: Synthetic oligonucleotide
  Target: LAMA2; (-) strand; PAM type: YTN; PAM sequence: TTA
gtagtatttataatttgaca

SEQ ID NO: 208298 - DNA, 20 bp, Artificial Sequence
  Description of Artificial Sequence: Synthetic oligonucleotide
  Target: LAMA2; (-) strand; PAM type: YTN; PAM sequence: TTA
attagtagtatttataattt

SEQ ID NO: 208299 - DNA, 20 bp, Artificial Sequence
  Description of Artificial Sequence: Synthetic oligonucleotide
  Target: LAMA2; (-) strand; PAM type: YTN; PAM sequence: TTA
tgaagaatcaaggatatatt

SEQ ID NO: 208300 - DNA, 20 bp, Artificial Sequence
  Description of Artificial Sequence: Synthetic oligonucleotide
  Target: LAMA2; (-) strand; PAM type: YTN; PAM sequence: TTA
atagaatattatgaagaatc

SEQ ID NO: 208301 - DNA, 20 bp, Artificial Sequence
  Description of Artificial Sequence: Synthetic oligonucleotide
  Target: LAMA2; (-) strand; PAM type: YTN; PAM sequence: CTG
gttaatagaatattatgaag

SEQ ID NO: 208302 - DNA, 20 bp, Artificial Sequence
  Description of Artificial Sequence: Synthetic oligonucleotide
  Target: LAMA2; (-) strand; PAM type: YTN; PAM sequence: TTA
agtgctggttaatagaatat

SEQ ID NO: 208303 - DNA, 20 bp, Artificial Sequence
  Description of Artificial Sequence: Synthetic oligonucleotide
  Target: LAMA2; (-) strand; PAM type: YTN; PAM sequence: TTA
tgaaaaaggtgttaagtgct

SEQ ID NO: 208304 - DNA, 20 bp, Artificial Sequence
  Description of Artificial Sequence: Synthetic oligonucleotide
  Target: LAMA2; (-) strand; PAM type: YTN; PAM sequence: TTT
atgaaaaaggtgttaagtgc

SEQ ID NO: 208305 - DNA, 20 bp, Artificial Sequence
  Description of Artificial Sequence: Synthetic oligonucleotide
  Target: LAMA2; (-) strand; PAM type: YTN; PAM sequence: TTT
tatgaaaaaggtgttaagtg

SEQ ID NO: 208306 - DNA, 20 bp, Artificial Sequence
  Description of Artificial Sequence: Synthetic oligonucleotide
  Target: LAMA2; (-) strand; PAM type: YTN; PAM sequence: CTG
aaaagtgttttatgaaaaag

SEQ ID NO: 208307 - DNA, 20 bp, Artificial Sequence
  Description of Artificial Sequence: Synthetic oligonucleotide
  Target: LAMA2; (-) strand; PAM type: YTN; PAM sequence: CTA
tatatatatcctgaaaagtg

SEQ ID NO: 208308 - DNA, 20 bp, Artificial Sequence
  Description of Artificial Sequence: Synthetic oligonucleotide
  Target: LAMA2; (-) strand; PAM type: YTN; PAM sequence: CTA
actatatatatatcctgaaa

SEQ ID NO: 208309 - DNA, 20 bp, Artificial Sequence
  Description of Artificial Sequence: Synthetic oligonucleotide
  Target: LAMA2; (-) strand; PAM type: YTN; PAM sequence: TTG
aaatcaagatgaaatagtgt

SEQ ID NO: 208310 - DNA, 20 bp, Artificial Sequence
  Description of Artificial Sequence: Synthetic oligonucleotide
  Target: LAMA2; (-) strand; PAM type: YTN; PAM sequence: TTG
cataaattgaaatcaagatg

SEQ ID NO: 208311 - DNA, 20 bp, Artificial Sequence
  Description of Artificial Sequence: Synthetic oligonucleotide
  Target: LAMA2; (-) strand; PAM type: YTN; PAM sequence: TTC
ggattgcataaattgaaatc

SEQ ID NO: 208312 - DNA, 20 bp, Artificial Sequence
  Description of Artificial Sequence: Synthetic oligonucleotide
  Target: LAMA2; (-) strand; PAM type: YTN; PAM sequence: TTG
aaaattcggattgcataaat

SEQ ID NO: 208313 - DNA, 20 bp, Artificial Sequence
  Description of Artificial Sequence: Synthetic oligonucleotide
  Target: LAMA2; (-) strand; PAM type: YTN; PAM sequence: CTT
gaaaattcggattgcataaa

SEQ ID NO: 208314 - DNA, 20 bp, Artificial Sequence
  Description of Artificial Sequence: Synthetic oligonucleotide
  Target: LAMA2; (-) strand; PAM type: YTN; PAM sequence: TTA
cttgaaaattcggattgcat

SEQ ID NO: 208315 - DNA, 20 bp, Artificial Sequence
  Description of Artificial Sequence: Synthetic oligonucleotide
  Target: LAMA2; (-) strand; PAM type: YTN; PAM sequence: TTT
acttgaaaattcggattgca

SEQ ID NO: 208316 - DNA, 20 bp, Artificial Sequence
  Description of Artificial Sequence: Synthetic oligonucleotide
  Target: LAMA2; (-) strand; PAM type: YTN; PAM sequence: TTT
tacttgaaaattcggattgc

SEQ ID NO: 208317 - DNA, 20 bp, Artificial Sequence
  Description of Artificial Sequence: Synthetic oligonucleotide
  Target: LAMA2; (-) strand; PAM type: YTN; PAM sequence: TTC
catgaggttttacttgaaaa

SEQ ID NO: 208318 - DNA, 20 bp, Artificial Sequence
  Description of Artificial Sequence: Synthetic oligonucleotide
  Target: LAMA2; (-) strand; PAM type: YTN; PAM sequence: CTG
ataattccatgaggttttac

SEQ ID NO: 208319 - DNA, 20 bp, Artificial Sequence
  Description of Artificial Sequence: Synthetic oligonucleotide
  Target: LAMA2; (-) strand; PAM type: YTN; PAM sequence: TTA
gtgatgaatctgataattcc

SEQ ID NO: 208320 - DNA, 20 bp, Artificial Sequence
  Description of Artificial Sequence: Synthetic oligonucleotide
  Target: LAMA2; (-) strand; PAM type: YTN; PAM sequence: TTG
aaagttagtgatgaatctga

SEQ ID NO: 208321 - DNA, 20 bp, Artificial Sequence
  Description of Artificial Sequence: Synthetic oligonucleotide
  Target: LAMA2; (-) strand; PAM type: YTN; PAM sequence: TTT
gaaagttagtgatgaatctg

SEQ ID NO: 208322 - DNA, 20 bp, Artificial Sequence
  Description of Artificial Sequence: Synthetic oligonucleotide
  Target: LAMA2; (-) strand; PAM type: YTN; PAM sequence: TTT
tgaaagttagtgatgaatct

SEQ ID NO: 208323 - DNA, 20 bp, Artificial Sequence
  Description of Artificial Sequence: Synthetic oligonucleotide
  Target: LAMA2; (-) strand; PAM type: YTN; PAM sequence: TTA
taaaagttttgaaagttagt

SEQ ID NO: 208324 - DNA, 20 bp, Artificial Sequence
  Description of Artificial Sequence: Synthetic oligonucleotide
  Target: LAMA2; (-) strand; PAM type: YTN; PAM sequence: CTC
agcagatgtgttataaaagt

SEQ ID NO: 208325 - DNA, 20 bp, Artificial Sequence
  Description of Artificial Sequence: Synthetic oligonucleotide
  Target: LAMA2; (-) strand; PAM type: YTN; PAM sequence: CTG
aaaactcagcagatgtgtta

SEQ ID NO: 208326 - DNA, 20 bp, Artificial Sequence
  Description of Artificial Sequence: Synthetic oligonucleotide
  Target: LAMA2; (-) strand; PAM type: YTN; PAM sequence: TTC
cagaatgaatgtctgaaaac

SEQ ID NO: 208327 - DNA, 20 bp, Artificial Sequence
  Description of Artificial Sequence: Synthetic oligonucleotide
  Target: LAMA2; (-) strand; PAM type: YTN; PAM sequence: TTT
ccagaatgaatgtctgaaaa

SEQ ID NO: 208328 - DNA, 20 bp, Artificial Sequence
  Description of Artificial Sequence: Synthetic oligonucleotide
  Target: LAMA2; (-) strand; PAM type: YTN; PAM sequence: CTT
tccagaatgaatgtctgaaa

SEQ ID NO: 208329 - DNA, 20 bp, Artificial Sequence
  Description of Artificial Sequence: Synthetic oligonucleotide
  Target: LAMA2; (-) strand; PAM type: YTN; PAM sequence: TTC
tttccagaatgaatgtctga

SEQ ID NO: 208330 - DNA, 20 bp, Artificial Sequence
  Description of Artificial Sequence: Synthetic oligonucleotide
  Target: LAMA2; (-) strand; PAM type: YTN; PAM sequence: TTT
ctttccagaatgaatgtctg

SEQ ID NO: 208331 - DNA, 20 bp, Artificial Sequence
  Description of Artificial Sequence: Synthetic oligonucleotide
  Target: LAMA2; (-) strand; PAM type: YTN; PAM sequence: TTT
tctttccagaatgaatgtct

SEQ ID NO: 208332 - DNA, 20 bp, Artificial Sequence
  Description of Artificial Sequence: Synthetic oligonucleotide
  Target: LAMA2; (-) strand; PAM type: YTN; PAM sequence: TTT
ttctttccagaatgaatgtc

SEQ ID NO: 208333 - DNA, 20 bp, Artificial Sequence
  Description of Artificial Sequence: Synthetic oligonucleotide
  Target: LAMA2; (-) strand; PAM type: YTN; PAM sequence: TTT
tttctttccagaatgaatgt

SEQ ID NO: 208334 - DNA, 20 bp, Artificial Sequence
  Description of Artificial Sequence: Synthetic oligonucleotide
  Target: LAMA2; (-) strand; PAM type: YTN; PAM sequence: TTC
cagcatgttttttctttcca

SEQ ID NO: 208335 - DNA, 20 bp, Artificial Sequence
  Description of Artificial Sequence: Synthetic oligonucleotide
  Target: LAMA2; (-) strand; PAM type: YTN; PAM sequence: TTT
ccagcatgttttttctttcc

SEQ ID NO: 208336 - DNA, 20 bp, Artificial Sequence
  Description of Artificial Sequence: Synthetic oligonucleotide
  Target: LAMA2; (-) strand; PAM type: YTN; PAM sequence: CTT
tccagcatgttttttctttc

SEQ ID NO: 208337 - DNA, 20 bp, Artificial Sequence
  Description of Artificial Sequence: Synthetic oligonucleotide
  Target: LAMA2; (-) strand; PAM type: YTN; PAM sequence: TTC
tttccagcatgttttttctt

SEQ ID NO: 208338 - DNA, 20 bp, Artificial Sequence
  Description of Artificial Sequence: Synthetic oligonucleotide
  Target: LAMA2; (-) strand; PAM type: YTN; PAM sequence: TTT
ctttccagcatgttttttct

SEQ ID NO: 208339 - DNA, 20 bp, Artificial Sequence
  Description of Artificial Sequence: Synthetic oligonucleotide
  Target: LAMA2; (-) strand; PAM type: YTN; PAM sequence: TTT
tctttccagcatgttttttc

SEQ ID NO: 208340 - DNA, 20 bp, Artificial Sequence
  Description of Artificial Sequence: Synthetic oligonucleotide
  Target: LAMA2; (-) strand; PAM type: YTN; PAM sequence: TTT
ttctttccagcatgtttttt

SEQ ID NO: 208341 - DNA, 20 bp, Artificial Sequence
  Description of Artificial Sequence: Synthetic oligonucleotide
  Target: LAMA2; (-) strand; PAM type: YTN; PAM sequence: TTA
gagtaagtaaaatttttctt

SEQ ID NO: 208342 - DNA, 20 bp, Artificial Sequence
  Description of Artificial Sequence: Synthetic oligonucleotide
  Target: LAMA2; (-) strand; PAM type: YTN; PAM sequence: TTA
aaataaaacacattagagta

SEQ ID NO: 208343 - DNA, 20 bp, Artificial Sequence
  Description of Artificial Sequence: Synthetic oligonucleotide
  Target: LAMA2; (-) strand; PAM type: YTN; PAM sequence: TTT
aaaataaaacacattagagt

SEQ ID NO: 208344 - DNA, 20 bp, Artificial Sequence
  Description of Artificial Sequence: Synthetic oligonucleotide
  Target: LAMA2; (-) strand; PAM type: YTN; PAM sequence: TTA
tttaaaataaaacacattag

SEQ ID NO: 208345 - DNA, 20 bp, Artificial Sequence
  Description of Artificial Sequence: Synthetic oligonucleotide
  Target: LAMA2; (-) strand; PAM type: YTN; PAM sequence: TTT
atttaaaataaaacacatta

SEQ ID NO: 208346 - DNA, 20 bp, Artificial Sequence
  Description of Artificial Sequence: Synthetic oligonucleotide
  Target: LAMA2; (-) strand; PAM type: YTN; PAM sequence: TTT
tatttaaaataaaacacatt

SEQ ID NO: 208347 - DNA, 20 bp, Artificial Sequence
  Description of Artificial Sequence: Synthetic oligonucleotide
  Target: LAMA2; (-) strand; PAM type: YTN; PAM sequence: TTT
ttatttaaaataaaacacat

SEQ ID NO: 208348 - DNA, 20 bp, Artificial Sequence
  Description of Artificial Sequence: Synthetic oligonucleotide
  Target: LAMA2; (-) strand; PAM type: YTN; PAM sequence: CTT
tttatttaaaataaaacaca

SEQ ID NO: 208349 - DNA, 20 bp, Artificial Sequence
  Description of Artificial Sequence: Synthetic oligonucleotide
  Target: LAMA2; (-) strand; PAM type: YTN; PAM sequence: CTA
taggactttttatttaaaat

SEQ ID NO: 208350 - DNA, 20 bp, Artificial Sequence
  Description of Artificial Sequence: Synthetic oligonucleotide
  Target: LAMA2; (-) strand; PAM type: YTN; PAM sequence: TTC
agaaaaaaaaagaggacagt

SEQ ID NO: 208351 - DNA, 20 bp, Artificial Sequence
  Description of Artificial Sequence: Synthetic oligonucleotide
  Target: LAMA2; (-) strand; PAM type: YTN; PAM sequence: TTT
cagaaaaaaaaagaggacag

SEQ ID NO: 208352 - DNA, 20 bp, Artificial Sequence
  Description of Artificial Sequence: Synthetic oligonucleotide
  Target: LAMA2; (-) strand; PAM type: YTN; PAM sequence: TTT
tcagaaaaaaaaagaggaca

SEQ ID NO: 208353 - DNA, 20 bp, Artificial Sequence
  Description of Artificial Sequence: Synthetic oligonucleotide
  Target: LAMA2; (-) strand; PAM type: YTN; PAM sequence: TTT
ttcagaaaaaaaaagaggac

SEQ ID NO: 208354 - DNA, 20 bp, Artificial Sequence
  Description of Artificial Sequence: Synthetic oligonucleotide
  Target: LAMA2; (-) strand; PAM type: YTN; PAM sequence: TTA
atgtttttcagaaaaaaaaa

SEQ ID NO: 208355 - DNA, 20 bp, Artificial Sequence
  Description of Artificial Sequence: Synthetic oligonucleotide
  Target: LAMA2; (-) strand; PAM type: YTN; PAM sequence: CTT
aatgtttttcagaaaaaaaa

SEQ ID NO: 208356 - DNA, 20 bp, Artificial Sequence
  Description of Artificial Sequence: Synthetic oligonucleotide
  Target: LAMA2; (-) strand; PAM type: YTN; PAM sequence: TTG
ggaaagaaaccttaatgttt

SEQ ID NO: 208357 - DNA, 20 bp, Artificial Sequence
  Description of Artificial Sequence: Synthetic oligonucleotide
  Target: LAMA2; (-) strand; PAM type: YTN; PAM sequence: TTT
gggaaagaaaccttaatgtt

SEQ ID NO: 208358 - DNA, 20 bp, Artificial Sequence
  Description of Artificial Sequence: Synthetic oligonucleotide
  Target: LAMA2; (-) strand; PAM type: YTN; PAM sequence: CTT
tgggaaagaaaccttaatgt

SEQ ID NO: 208359 - DNA, 20 bp, Artificial Sequence
  Description of Artificial Sequence: Synthetic oligonucleotide
  Target: LAMA2; (-) strand; PAM type: YTN; PAM sequence: CTA
ataagctttgggaaagaaac

SEQ ID NO: 208360 - DNA, 20 bp, Artificial Sequence
  Description of Artificial Sequence: Synthetic oligonucleotide
  Target: LAMA2; (-) strand; PAM type: YTN; PAM sequence: TTA
actaataagctttgggaaag

SEQ ID NO: 208361 - DNA, 20 bp, Artificial Sequence
  Description of Artificial Sequence: Synthetic oligonucleotide
  Target: LAMA2; (-) strand; PAM type: YTN; PAM sequence: CTG
acaattaactaataagcttt

SEQ ID NO: 208362 - DNA, 20 bp, Artificial Sequence
  Description of Artificial Sequence: Synthetic oligonucleotide
  Target: LAMA2; (-) strand; PAM type: YTN; PAM sequence: TTA
cataaaaactgacaattaac

SEQ ID NO: 208363 - DNA, 20 bp, Artificial Sequence
  Description of Artificial Sequence: Synthetic oligonucleotide
  Target: LAMA2; (-) strand; PAM type: YTN; PAM sequence: CTT
acataaaaactgacaattaa

SEQ ID NO: 208364 - DNA, 20 bp, Artificial Sequence
  Description of Artificial Sequence: Synthetic oligonucleotide
  Target: LAMA2; (-) strand; PAM type: YTN; PAM sequence: CTC
atgggcttacataaaaactg

SEQ ID NO: 208365 - DNA, 20 bp, Artificial Sequence
  Description of Artificial Sequence: Synthetic oligonucleotide
  Target: LAMA2; (-) strand; PAM type: YTN; PAM sequence: CTA
acctcatgggcttacataaa

SEQ ID NO: 208366 - DNA, 20 bp, Artificial Sequence
  Description of Artificial Sequence: Synthetic oligonucleotide
  Target: LAMA2; (-) strand; PAM type: YTN; PAM sequence: TTA
tataggtctaacctcatggg

SEQ ID NO: 208367 - DNA, 20 bp, Artificial Sequence
  Description of Artificial Sequence: Synthetic oligonucleotide
  Target: LAMA2; (-) strand; PAM type: YTN; PAM sequence: CTT
atataggtctaacctcatgg

SEQ ID NO: 208368 - DNA, 20 bp, Artificial Sequence
  Description of Artificial Sequence: Synthetic oligonucleotide
  Target: LAMA2; (-) strand; PAM type: YTN; PAM sequence: CTG
ccttatataggtctaacctc

SEQ ID NO: 208369 - DNA, 20 bp, Artificial Sequence
  Description of Artificial Sequence: Synthetic oligonucleotide
  Target: LAMA2; (-) strand; PAM type: YTN; PAM sequence: TTA
ctgccttatataggtctaac

SEQ ID NO: 208370 - DNA, 20 bp, Artificial Sequence
  Description of Artificial Sequence: Synthetic oligonucleotide
  Target: LAMA2; (-) strand; PAM type: YTN; PAM sequence: TTA
aaaattactgccttatatag

SEQ ID NO: 208371 - DNA, 20 bp, Artificial Sequence
  Description of Artificial Sequence: Synthetic oligonucleotide
  Target: LAMA2; (-) strand; PAM type: YTN; PAM sequence: CTA
ataaagaagaaggaagaaaa

SEQ ID NO: 208372 - DNA, 20 bp, Artificial Sequence
  Description of Artificial Sequence: Synthetic oligonucleotide
  Target: LAMA2; (-) strand; PAM type: YTN; PAM sequence: TTA
aaaactaataaagaagaagg

SEQ ID NO: 208373 - DNA, 20 bp, Artificial Sequence
  Description of Artificial Sequence: Synthetic oligonucleotide
  Target: LAMA2; (-) strand; PAM type: YTN; PAM sequence: TTT
aaaaactaataaagaagaag

SEQ ID NO: 208374 - DNA, 20 bp, Artificial Sequence
  Description of Artificial Sequence: Synthetic oligonucleotide
  Target: LAMA2; (-) strand; PAM type: YTN; PAM sequence: CTA
taaaaagagatatgcatatt

SEQ ID NO: 208375 - DNA, 20 bp, Artificial Sequence
  Description of Artificial Sequence: Synthetic oligonucleotide
  Target: LAMA2; (-) strand; PAM type: YTN; PAM sequence: CTC
ctataaaaagagatatgcat

SEQ ID NO: 208376 - DNA, 20 bp, Artificial Sequence
  Description of Artificial Sequence: Synthetic oligonucleotide
  Target: LAMA2; (-) strand; PAM type: YTN; PAM sequence: TTC
tcctataaaaagagatatgc

SEQ ID NO: 208377 - DNA, 20 bp, Artificial Sequence
  Description of Artificial Sequence: Synthetic oligonucleotide
  Target: LAMA2; (-) strand; PAM type: YTN; PAM sequence: TTT
ctcctataaaaagagatatg

SEQ ID NO: 208378 - DNA, 20 bp, Artificial Sequence
  Description of Artificial Sequence: Synthetic oligonucleotide
  Target: LAMA2; (-) strand; PAM type: YTN; PAM sequence: CTT
tctcctataaaaagagatat

SEQ ID NO: 208379 - DNA, 20 bp, Artificial Sequence
  Description of Artificial Sequence: Synthetic oligonucleotide
  Target: LAMA2; (-) strand; PAM type: YTN; PAM sequence: TTA
tccatcctttctcctataaa

SEQ ID NO: 208380 - DNA, 20 bp, Artificial Sequence
  Description of Artificial Sequence: Synthetic oligonucleotide
  Target: LAMA2; (-) strand; PAM type: YTN; PAM sequence: CTG
caatcattatccatcctttc

SEQ ID NO: 208381 - DNA, 20 bp, Artificial Sequence
  Description of Artificial Sequence: Synthetic oligonucleotide
  Target: LAMA2; (-) strand; PAM type: YTN; PAM sequence: TTA
gagtggtcagagaatgctgc

SEQ ID NO: 208382 - DNA, 20 bp, Artificial Sequence
  Description of Artificial Sequence: Synthetic oligonucleotide
  Target: LAMA2; (-) strand; PAM type: YTN; PAM sequence: CTA
gggtgagatattagagtggt

SEQ ID NO: 208383 - DNA, 20 bp, Artificial Sequence
  Description of Artificial Sequence: Synthetic oligonucleotide
  Target: LAMA2; (-) strand; PAM type: YTN; PAM sequence: TTC
tagggtgagatattagagtg

SEQ ID NO: 208384 - DNA, 20 bp, Artificial Sequence
  Description of Artificial Sequence: Synthetic oligonucleotide
  Target: LAMA2; (-) strand; PAM type: YTN; PAM sequence: TTT
ctagggtgagatattagagt

SEQ ID NO: 208385 - DNA, 20 bp, Artificial Sequence
  Description of Artificial Sequence: Synthetic oligonucleotide
  Target: LAMA2; (-) strand; PAM type: YTN; PAM sequence: TTA
aaatttctagggtgagatat

SEQ ID NO: 208386 - DNA, 20 bp, Artificial Sequence
  Description of Artificial Sequence: Synthetic oligonucleotide
  Target: LAMA2; (-) strand; PAM type: YTN; PAM sequence: TTA
ttaaaatttctagggtgaga

SEQ ID NO: 208387 - DNA, 20 bp, Artificial Sequence
  Description of Artificial Sequence: Synthetic oligonucleotide
  Target: LAMA2; (-) strand; PAM type: YTN; PAM sequence: TTT
attaaaatttctagggtgag

SEQ ID NO: 208388 - DNA, 20 bp, Artificial Sequence
  Description of Artificial Sequence: Synthetic oligonucleotide
  Target: LAMA2; (-) strand; PAM type: YTN; PAM sequence: TTA
gtaaatcatttattaaaatt

SEQ ID NO: 208389 - DNA, 20 bp, Artificial Sequence
  Description of Artificial Sequence: Synthetic oligonucleotide
  Target: LAMA2; (-) strand; PAM type: YTN; PAM sequence: CTG
atgagaatgttagtaaatca

SEQ ID NO: 208390 - DNA, 20 bp, Artificial Sequence
  Description of Artificial Sequence: Synthetic oligonucleotide
  Target: LAMA2; (-) strand; PAM type: YTN; PAM sequence: TTA
taataaaaagcctgatgaga

SEQ ID NO: 208391 - DNA, 20 bp, Artificial Sequence
  Description of Artificial Sequence: Synthetic oligonucleotide
  Target: LAMA2; (-) strand; PAM type: YTN; PAM sequence: TTT
ataataaaaagcctgatgag

SEQ ID NO: 208392 - DNA, 20 bp, Artificial Sequence
  Description of Artificial Sequence: Synthetic oligonucleotide
  Target: LAMA2; (-) strand; PAM type: YTN; PAM sequence: TTT
tataataaaaagcctgatga

SEQ ID NO: 208393 - DNA, 20 bp, Artificial Sequence
  Description of Artificial Sequence: Synthetic oligonucleotide
  Target: LAMA2; (-) strand; PAM type: YTN; PAM sequence: TTA
ttttataataaaaagcctga

SEQ ID NO: 208394 - DNA, 20 bp, Artificial Sequence
  Description of Artificial Sequence: Synthetic oligonucleotide
  Target: LAMA2; (-) strand; PAM type: YTN; PAM sequence: TTG
atattattttataataaaaa

SEQ ID NO: 208395 - DNA, 20 bp, Artificial Sequence
  Description of Artificial Sequence: Synthetic oligonucleotide
  Target: LAMA2; (-) strand; PAM type: YTN; PAM sequence: TTT
gatattattttataataaaa

SEQ ID NO: 208396 - DNA, 20 bp, Artificial Sequence
  Description of Artificial Sequence: Synthetic oligonucleotide
  Target: LAMA2; (-) strand; PAM type: YTN; PAM sequence: CTT
tgatattattttataataaa

SEQ ID NO: 208397 - DNA, 20 bp, Artificial Sequence
  Description of Artificial Sequence: Synthetic oligonucleotide
  Target: LAMA2; (-) strand; PAM type: YTN; PAM sequence: TTC
tttgatattattttataata

SEQ ID NO: 208398 - DNA, 20 bp, Artificial Sequence
  Description of Artificial Sequence: Synthetic oligonucleotide
  Target: LAMA2; (-) strand; PAM type: YTN; PAM sequence: TTT
ctttgatattattttataat

SEQ ID NO: 208399 - DNA, 20 bp, Artificial Sequence
  Description of Artificial Sequence: Synthetic oligonucleotide
  Target: LAMA2; (-) strand; PAM type: YTN; PAM sequence: TTT
tctttgatattattttataa

SEQ ID NO: 208400 - DNA, 20 bp, Artificial Sequence
  Description of Artificial Sequence: Synthetic oligonucleotide
  Target: LAMA2; (-) strand; PAM type: YTN; PAM sequence: TTA
aaaagcaggttttctttgat

SEQ ID NO: 208401 - DNA, 20 bp, Artificial Sequence
  Description of Artificial Sequence: Synthetic oligonucleotide
  Target: LAMA2; (-) strand; PAM type: YTN; PAM sequence: TTT
aaaaagcaggttttctttga

SEQ ID NO: 208402 - DNA, 20 bp, Artificial Sequence
  Description of Artificial Sequence: Synthetic oligonucleotide
  Target: LAMA2; (-) strand; PAM type: YTN; PAM sequence: TTT
taaaaagcaggttttctttg

SEQ ID NO: 208403 - DNA, 20 bp, Artificial Sequence
  Description of Artificial Sequence: Synthetic oligonucleotide
  Target: LAMA2; (-) strand; PAM type: YTN; PAM sequence: TTT
ttaaaaagcaggttttcttt

SEQ ID NO: 208404 - DNA, 20 bp, Artificial Sequence
  Description of Artificial Sequence: Synthetic oligonucleotide
  Target: LAMA2; (-) strand; PAM type: YTN; PAM sequence: TTT
tttaaaaagcaggttttctt

SEQ ID NO: 208405 - DNA, 20 bp, Artificial Sequence
  Description of Artificial Sequence: Synthetic oligonucleotide
  Target: LAMA2; (-) strand; PAM type: YTN; PAM sequence: TTT
ttttaaaaagcaggttttct

SEQ ID NO: 208406 - DNA, 20 bp, Artificial Sequence
  Description of Artificial Sequence: Synthetic oligonucleotide
  Target: LAMA2; (-) strand; PAM type: YTN; PAM sequence: TTG
gtaaaatacaagtatcaaga

SEQ ID NO: 208407 - DNA, 20 bp, Artificial Sequence
  Description of Artificial Sequence: Synthetic oligonucleotide
  Target: LAMA2; (-) strand; PAM type: YTN; PAM sequence: TTT
ggtaaaatacaagtatcaag

SEQ ID NO: 208408 - DNA, 20 bp, Artificial Sequence
  Description of Artificial Sequence: Synthetic oligonucleotide
  Target: LAMA2; (-) strand; PAM type: YTN; PAM sequence: CTA
tacccatgaatttggtaaaa

SEQ ID NO: 208409 - DNA, 20 bp, Artificial Sequence
  Description of Artificial Sequence: Synthetic oligonucleotide
  Target: LAMA2; (-) strand; PAM type: YTN; PAM sequence: TTA
tctatacccatgaatttggt

SEQ ID NO: 208410 - DNA, 20 bp, Artificial Sequence
  Description of Artificial Sequence: Synthetic oligonucleotide
  Target: LAMA2; (-) strand; PAM type: YTN; PAM sequence: TTG
aaagtaatgagaaatcaaaa

SEQ ID NO: 208411 - DNA, 20 bp, Artificial Sequence
  Description of Artificial Sequence: Synthetic oligonucleotide
  Target: LAMA2; (-) strand; PAM type: YTN; PAM sequence: CTT
gaaagtaatgagaaatcaaa

SEQ ID NO: 208412 - DNA, 20 bp, Artificial Sequence
  Description of Artificial Sequence: Synthetic oligonucleotide
  Target: LAMA2; (-) strand; PAM type: YTN; PAM sequence: TTA
catgaagaagatacttgaaa

SEQ ID NO: 208413 - DNA, 20 bp, Artificial Sequence
  Description of Artificial Sequence: Synthetic oligonucleotide
  Target: LAMA2; (-) strand; PAM type: YTN; PAM sequence: TTT
acatgaagaagatacttgaa

SEQ ID NO: 208414 - DNA, 20 bp, Artificial Sequence
  Description of Artificial Sequence: Synthetic oligonucleotide
  Target: LAMA2; (-) strand; PAM type: YTN; PAM sequence: TTT
tacatgaagaagatacttga

SEQ ID NO: 208415 - DNA, 20 bp, Artificial Sequence
  Description of Artificial Sequence: Synthetic oligonucleotide
  Target: LAMA2; (-) strand; PAM type: YTN; PAM sequence: TTA
aaattttacatgaagaagat

SEQ ID NO: 208416 - DNA, 20 bp, Artificial Sequence
  Description of Artificial Sequence: Synthetic oligonucleotide
  Target: LAMA2; (-) strand; PAM type: YTN; PAM sequence: TTG
attaaaattttacatgaaga

SEQ ID NO: 208417 - DNA, 20 bp, Artificial Sequence
  Description of Artificial Sequence: Synthetic oligonucleotide
  Target: LAMA2; (-) strand; PAM type: YTN; PAM sequence: TTT
gattaaaattttacatgaag

SEQ ID NO: 208418 - DNA, 20 bp, Artificial Sequence
  Description of Artificial Sequence: Synthetic oligonucleotide
  Target: LAMA2; (-) strand; PAM type: YTN; PAM sequence: CTG
aaatttgattaaaattttac

SEQ ID NO: 208419 - DNA, 20 bp, Artificial Sequence
  Description of Artificial Sequence: Synthetic oligonucleotide
  Target: LAMA2; (-) strand; PAM type: YTN; PAM sequence: TTA
agcatgggatctgaaatttg

SEQ ID NO: 208420 - DNA, 20 bp, Artificial Sequence
  Description of Artificial Sequence: Synthetic oligonucleotide
  Target: LAMA2; (-) strand; PAM type: YTN; PAM sequence: TTA
tgtgttaagcatgggatctg

SEQ ID NO: 208421 - DNA, 20 bp, Artificial Sequence
  Description of Artificial Sequence: Synthetic oligonucleotide
  Target: LAMA2; (-) strand; PAM type: YTN; PAM sequence: TTT
atgtgttaagcatgggatct

SEQ ID NO: 208422 - DNA, 20 bp, Artificial Sequence
  Description of Artificial Sequence: Synthetic oligonucleotide
  Target: LAMA2; (-) strand; PAM type: YTN; PAM sequence: TTT
tatgtgttaagcatgggatc

SEQ ID NO: 208423 - DNA, 20 bp, Artificial Sequence
  Description of Artificial Sequence: Synthetic oligonucleotide
  Target: LAMA2; (-) strand; PAM type: YTN; PAM sequence: TTT
ttatgtgttaagcatgggat

SEQ ID NO: 208424 - DNA, 20 bp, Artificial Sequence
  Description of Artificial Sequence: Synthetic oligonucleotide
  Target: LAMA2; (-) strand; PAM type: YTN; PAM sequence: TTA
atttttatgtgttaagcatg

SEQ ID NO: 208425 - DNA, 20 bp, Artificial Sequence
  Description of Artificial Sequence: Synthetic oligonucleotide
  Target: LAMA2; (-) strand; PAM type: YTN; PAM sequence: TTA
ttaatttttatgtgttaagc

SEQ ID NO: 208426 - DNA, 20 bp, Artificial Sequence
  Description of Artificial Sequence: Synthetic oligonucleotide
  Target: LAMA2; (-) strand; PAM type: YTN; PAM sequence: TTT
attaatttttatgtgttaag

SEQ ID NO: 208427 - DNA, 20 bp, Artificial Sequence
  Description of Artificial Sequence: Synthetic oligonucleotide
  Target: LAMA2; (-) strand; PAM type: YTN; PAM sequence: CTC
aacatcaatttattaatttt

SEQ ID NO: 208428 - DNA, 20 bp, Artificial Sequence
  Description of Artificial Sequence: Synthetic oligonucleotide
  Target: LAMA2; (-) strand; PAM type: YTN; PAM sequence: TTC
agtataaaataatgtgatag

SEQ ID NO: 208429 - DNA, 20 bp, Artificial Sequence
  Description of Artificial Sequence: Synthetic oligonucleotide
  Target: LAMA2; (-) strand; PAM type: YTN; PAM sequence: TTT
cagtataaaataatgtgata

SEQ ID NO: 208430 - DNA, 20 bp, Artificial Sequence
  Description of Artificial Sequence: Synthetic oligonucleotide
  Target: LAMA2; (-) strand; PAM type: YTN; PAM sequence: TTT
tcagtataaaataatgtgat

SEQ ID NO: 208431 - DNA, 20 bp, Artificial Sequence
  Description of Artificial Sequence: Synthetic oligonucleotide
  Target: LAMA2; (-) strand; PAM type: YTN; PAM sequence: CTT
ttcagtataaaataatgtga

SEQ ID NO: 208432 - DNA, 20 bp, Artificial Sequence
  Description of Artificial Sequence: Synthetic oligonucleotide
  Target: LAMA2; (-) strand; PAM type: YTN; PAM sequence: TTG
aacaacttttcagtataaaa

SEQ ID NO: 208433 - DNA, 20 bp, Artificial Sequence
  Description of Artificial Sequence: Synthetic oligonucleotide
  Target: LAMA2; (-) strand; PAM type: YTN; PAM sequence: TTA
gaataattgaacaacttttc

SEQ ID NO: 208434 - DNA, 20 bp, Artificial Sequence
  Description of Artificial Sequence: Synthetic oligonucleotide
  Target: LAMA2; (-) strand; PAM type: YTN; PAM sequence: TTT
agaataattgaacaactttt

SEQ ID NO: 208435 - DNA, 20 bp, Artificial Sequence
  Description of Artificial Sequence: Synthetic oligonucleotide
  Target: LAMA2; (-) strand; PAM type: YTN; PAM sequence: CTT
tagaataattgaacaacttt

SEQ ID NO: 208436 - DNA, 20 bp, Artificial Sequence
  Description of Artificial Sequence: Synthetic oligonucleotide
  Target: LAMA2; (-) strand; PAM type: YTN; PAM sequence: TTA
atatatagaactttagaata

SEQ ID NO: 208437 - DNA, 20 bp, Artificial Sequence
  Description of Artificial Sequence: Synthetic oligonucleotide
  Target: LAMA2; (-) strand; PAM type: YTN; PAM sequence: TTG
gattaatatatagaacttta

SEQ ID NO: 208438 - DNA, 20 bp, Artificial Sequence
  Description of Artificial Sequence: Synthetic oligonucleotide
  Target: LAMA2; (-) strand; PAM type: YTN; PAM sequence: TTT
ggattaatatatagaacttt

SEQ ID NO: 208439 - DNA, 20 bp, Artificial Sequence
  Description of Artificial Sequence: Synthetic oligonucleotide
  Target: LAMA2; (-) strand; PAM type: YTN; PAM sequence: CTT
tggattaatatatagaactt

SEQ ID NO: 208440 - DNA, 20 bp, Artificial Sequence
  Description of Artificial Sequence: Synthetic oligonucleotide
  Target: LAMA2; (-) strand; PAM type: YTN; PAM sequence: TTC
ccccaagtagagacggcttt

SEQ ID NO: 208441 - DNA, 20 bp, Artificial Sequence
  Description of Artificial Sequence: Synthetic oligonucleotide
  Target: LAMA2; (-) strand; PAM type: YTN; PAM sequence: TTT
cccccaagtagagacggctt

SEQ ID NO: 208442 - DNA, 20 bp, Artificial Sequence
  Description of Artificial Sequence: Synthetic oligonucleotide
  Target: LAMA2; (-) strand; PAM type: YTN; PAM sequence: TTT
tcccccaagtagagacggct

SEQ ID NO: 208443 - DNA, 20 bp, Artificial Sequence
  Description of Artificial Sequence: Synthetic oligonucleotide
  Target: LAMA2; (-) strand; PAM type: YTN; PAM sequence: TTT
ttcccccaagtagagacggc

SEQ ID NO: 208444 - DNA, 20 bp, Artificial Sequence
  Description of Artificial Sequence: Synthetic oligonucleotide
  Target: LAMA2; (-) strand; PAM type: YTN; PAM sequence: TTA
tacacacacatacacacaca

SEQ ID NO: 208445 - DNA, 20 bp, Artificial Sequence
  Description of Artificial Sequence: Synthetic oligonucleotide
  Target: LAMA2; (-) strand; PAM type: YTN; PAM sequence: CTC
atagatagatagatccaaaa

SEQ ID NO: 208446 - DNA, 20 bp, Artificial Sequence
  Description of Artificial Sequence: Synthetic oligonucleotide
  Target: LAMA2; (-) strand; PAM type: YTN; PAM sequence: TTG
taataaggcagtcatcctca

SEQ ID NO: 208447 - DNA, 20 bp, Artificial Sequence
  Description of Artificial Sequence: Synthetic oligonucleotide
  Target: LAMA2; (-) strand; PAM type: YTN; PAM sequence: CTT
gtaataaggcagtcatcctc

SEQ ID NO: 208448 - DNA, 20 bp, Artificial Sequence
  Description of Artificial Sequence: Synthetic oligonucleotide
  Target: LAMA2; (-) strand; PAM type: YTN; PAM sequence: CTG
aaacttgtaataaggcagtc

SEQ ID NO: 208449 - DNA, 20 bp, Artificial Sequence
  Description of Artificial Sequence: Synthetic oligonucleotide
  Target: LAMA2; (-) strand; PAM type: YTN; PAM sequence: TTG
tactgaaacttgtaataagg

SEQ ID NO: 208450 - DNA, 20 bp, Artificial Sequence
  Description of Artificial Sequence: Synthetic oligonucleotide
  Target: LAMA2; (-) strand; PAM type: YTN; PAM sequence: TTA
tatatataaaaatatatata

SEQ ID NO: 208451 - DNA, 20 bp, Artificial Sequence
  Description of Artificial Sequence: Synthetic oligonucleotide
  Target: LAMA2; (-) strand; PAM type: YTN; PAM sequence: TTT
atatatataaaaatatatat

SEQ ID NO: 208452 - DNA, 20 bp, Artificial Sequence
  Description of Artificial Sequence: Synthetic oligonucleotide
  Target: LAMA2; (-) strand; PAM type: YTN; PAM sequence: TTA
taggtagataggtaaataga

SEQ ID NO: 208453 - DNA, 20 bp, Artificial Sequence
  Description of Artificial Sequence: Synthetic oligonucleotide
  Target: LAMA2; (-) strand; PAM type: YTN; PAM sequence: TTT
ataggtagataggtaaatag

SEQ ID NO: 208454 - DNA, 20 bp, Artificial Sequence
  Description of Artificial Sequence: Synthetic oligonucleotide
  Target: LAMA2; (-) strand; PAM type: YTN; PAM sequence: CTG
aagtttataggtagataggt

SEQ ID NO: 208455 - DNA, 20 bp, Artificial Sequence
  Description of Artificial Sequence: Synthetic oligonucleotide
  Target: LAMA2; (-) strand; PAM type: YTN; PAM sequence: TTA
cccaaacaaaaaatgctgaa

SEQ ID NO: 208456 - DNA, 20 bp, Artificial Sequence
  Description of Artificial Sequence: Synthetic oligonucleotide
  Target: LAMA2; (-) strand; PAM type: YTN; PAM sequence: TTA
attacccaaacaaaaaatgc

SEQ ID NO: 208457 - DNA, 20 bp, Artificial Sequence
  Description of Artificial Sequence: Synthetic oligonucleotide
  Target: LAMA2; (-) strand; PAM type: YTN; PAM sequence: TTC
aaaatattaattacccaaac

SEQ ID NO: 208458 - DNA, 20 bp, Artificial Sequence
  Description of Artificial Sequence: Synthetic oligonucleotide
  Target: LAMA2; (-) strand; PAM type: YTN; PAM sequence: CTT
caaaatattaattacccaaa

SEQ ID NO: 208459 - DNA, 20 bp, Artificial Sequence
  Description of Artificial Sequence: Synthetic oligonucleotide
  Target: LAMA2; (-) strand; PAM type: YTN; PAM sequence: TTC
caaacaagaaggaaaacaag

SEQ ID NO: 208460 - DNA, 20 bp, Artificial Sequence
  Description of Artificial Sequence: Synthetic oligonucleotide
  Target: LAMA2; (-) strand; PAM type: YTN; PAM sequence: CTC
aaacagatcattccaaacaa

SEQ ID NO: 208461 - DNA, 20 bp, Artificial Sequence
  Description of Artificial Sequence: Synthetic oligonucleotide
  Target: LAMA2; (-) strand; PAM type: YTN; PAM sequence: TTA
aaaacacagtctcaaacaga

SEQ ID NO: 208462 - DNA, 20 bp, Artificial Sequence
  Description of Artificial Sequence: Synthetic oligonucleotide
  Target: LAMA2; (-) strand; PAM type: YTN; PAM sequence: TTG
ttaaaaacacagtctcaaac

SEQ ID NO: 208463 - DNA, 20 bp, Artificial Sequence
  Description of Artificial Sequence: Synthetic oligonucleotide
  Target: LAMA2; (-) strand; PAM type: YTN; PAM sequence: TTT
gttaaaaacacagtctcaaa

SEQ ID NO: 208464 - DNA, 20 bp, Artificial Sequence
  Description of Artificial Sequence: Synthetic oligonucleotide
  Target: LAMA2; (-) strand; PAM type: YTN; PAM sequence: TTT
tgttaaaaacacagtctcaa

SEQ ID NO: 208465 - DNA, 20 bp, Artificial Sequence
  Description of Artificial Sequence: Synthetic oligonucleotide
  Target: LAMA2; (-) strand; PAM type: YTN; PAM sequence: CTT
ttgttaaaaacacagtctca

SEQ ID NO: 208466 - DNA, 20 bp, Artificial Sequence
  Description of Artificial Sequence: Synthetic oligonucleotide
  Target: LAMA2; (-) strand; PAM type: YTN; PAM sequence: TTA
catatacttttgttaaaaac

SEQ ID NO: 208467 - DNA, 20 bp, Artificial Sequence
  Description of Artificial Sequence: Synthetic oligonucleotide
  Target: LAMA2; (-) strand; PAM type: YTN; PAM sequence: CTT
acatatacttttgttaaaaa

SEQ ID NO: 208468 - DNA, 20 bp, Artificial Sequence
  Description of Artificial Sequence: Synthetic oligonucleotide
  Target: LAMA2; (-) strand; PAM type: YTN; PAM sequence: TTA
agtatatcaaacttacatat

SEQ ID NO: 208469 - DNA, 20 bp, Artificial Sequence
  Description of Artificial Sequence: Synthetic oligonucleotide
  Target: LAMA2; (-) strand; PAM type: YTN; PAM sequence: TTA
gcgaaaaataaggttaagta

SEQ ID NO: 208470 - DNA, 20 bp, Artificial Sequence
  Description of Artificial Sequence: Synthetic oligonucleotide
  Target: LAMA2; (-) strand; PAM type: YTN; PAM sequence: TTT
agcgaaaaataaggttaagt

SEQ ID NO: 208471 - DNA, 20 bp, Artificial Sequence
  Description of Artificial Sequence: Synthetic oligonucleotide
  Target: LAMA2; (-) strand; PAM type: YTN; PAM sequence: TTG
tttagcgaaaaataaggtta

SEQ ID NO: 208472 - DNA, 20 bp, Artificial Sequence
  Description of Artificial Sequence: Synthetic oligonucleotide
  Target: LAMA2; (-) strand; PAM type: YTN; PAM sequence: TTG
ttgtttagcgaaaaataagg

SEQ ID NO: 208473 - DNA, 20 bp, Artificial Sequence
  Description of Artificial Sequence: Synthetic oligonucleotide
  Target: LAMA2; (-) strand; PAM type: YTN; PAM sequence: TTG
ttgttgtttagcgaaaaata

SEQ ID NO: 208474 - DNA, 20 bp, Artificial Sequence
  Description of Artificial Sequence: Synthetic oligonucleotide
  Target: LAMA2; (-) strand; PAM type: YTN; PAM sequence: CTT
gttgttgtttagcgaaaaat

SEQ ID NO: 208475 - DNA, 20 bp, Artificial Sequence
  Description of Artificial Sequence: Synthetic oligonucleotide
  Target: LAMA2; (-) strand; PAM type: YTN; PAM sequence: TTC
ttgttgttgtttagcgaaaa

SEQ ID NO: 208476 - DNA, 20 bp, Artificial Sequence
  Description of Artificial Sequence: Synthetic oligonucleotide
  Target: LAMA2; (-) strand; PAM type: YTN; PAM sequence: TTT
cttgttgttgtttagcgaaa

SEQ ID NO: 208477 - DNA, 20 bp, Artificial Sequence
  Description of Artificial Sequence: Synthetic oligonucleotide
  Target: LAMA2; (-) strand; PAM type: YTN; PAM sequence: CTT
tcttgttgttgtttagcgaa

SEQ ID NO: 208478 - DNA, 20 bp, Artificial Sequence
  Description of Artificial Sequence: Synthetic oligonucleotide
  Target: LAMA2; (-) strand; PAM type: YTN; PAM sequence: TTA
gggggtctttcttgttgttg

SEQ ID NO: 208479 - DNA, 20 bp, Artificial Sequence
  Description of Artificial Sequence: Synthetic oligonucleotide
  Target: LAMA2; (-) strand; PAM type: YTN; PAM sequence: TTC
aaaattagggggtctttctt

SEQ ID NO: 208480 - DNA, 20 bp, Artificial Sequence
  Description of Artificial Sequence: Synthetic oligonucleotide
  Target: LAMA2; (-) strand; PAM type: YTN; PAM sequence: TTT
caaaattagggggtctttct

SEQ ID NO: 208481 - DNA, 20 bp, Artificial Sequence
  Description of Artificial Sequence: Synthetic oligonucleotide
  Target: LAMA2; (-) strand; PAM type: YTN; PAM sequence: TTT
tcaaaattagggggtctttc

SEQ ID NO: 208482 - DNA, 20 bp, Artificial Sequence
  Description of Artificial Sequence: Synthetic oligonucleotide
  Target: LAMA2; (-) strand; PAM type: YTN; PAM sequence: CTT
ttcaaaattagggggtcttt

SEQ ID NO: 208483 - DNA, 20 bp, Artificial Sequence
  Description of Artificial Sequence: Synthetic oligonucleotide
  Target: LAMA2; (-) strand; PAM type: YTN; PAM sequence: TTG
atggacacttttcaaaatta

SEQ ID NO: 208484 - DNA, 20 bp, Artificial Sequence
  Description of Artificial Sequence: Synthetic oligonucleotide
  Target: LAMA2; (-) strand; PAM type: YTN; PAM sequence: CTG
ccaaacagtgatattgatgg

SEQ ID NO: 208485 - DNA, 20 bp, Artificial Sequence
  Description of Artificial Sequence: Synthetic oligonucleotide
  Target: LAMA2; (-) strand; PAM type: YTN; PAM sequence: TTA
tgataaactgccaaacagtg

SEQ ID NO: 208486 - DNA, 20 bp, Artificial Sequence
  Description of Artificial Sequence: Synthetic oligonucleotide
  Target: LAMA2; (-) strand; PAM type: YTN; PAM sequence: TTT
atgataaactgccaaacagt

SEQ ID NO: 208487 - DNA, 20 bp, Artificial Sequence
  Description of Artificial Sequence: Synthetic oligonucleotide
  Target: LAMA2; (-) strand; PAM type: YTN; PAM sequence: CTT
tatgataaactgccaaacag

SEQ ID NO: 208488 - DNA, 20 bp, Artificial Sequence
  Description of Artificial Sequence: Synthetic oligonucleotide
  Target: LAMA2; (-) strand; PAM type: YTN; PAM sequence: TTG
aatctttatgataaactgcc

SEQ ID NO: 208489 - DNA, 20 bp, Artificial Sequence
  Description of Artificial Sequence: Synthetic oligonucleotide
  Target: LAMA2; (-) strand; PAM type: YTN; PAM sequence: CTG
attgaatctttatgataaac

SEQ ID NO: 208490 - DNA, 20 bp, Artificial Sequence
  Description of Artificial Sequence: Synthetic oligonucleotide
  Target: LAMA2; (-) strand; PAM type: YTN; PAM sequence: CTG
tatactgattgaatctttat

SEQ ID NO: 208491 - DNA, 20 bp, Artificial Sequence
  Description of Artificial Sequence: Synthetic oligonucleotide
  Target: LAMA2; (-) strand; PAM type: YTN; PAM sequence: TTA
ctgtatactgattgaatctt

SEQ ID NO: 208492 - DNA, 20 bp, Artificial Sequence
  Description of Artificial Sequence: Synthetic oligonucleotide
  Target: LAMA2; (-) strand; PAM type: YTN; PAM sequence: TTT
actgtatactgattgaatct

SEQ ID NO: 208493 - DNA, 20 bp, Artificial Sequence
  Description of Artificial Sequence: Synthetic oligonucleotide
  Target: LAMA2; (-) strand; PAM type: YTN; PAM sequence: TTA
tagatttactgtatactgat

SEQ ID NO: 208494 - DNA, 20 bp, Artificial Sequence
  Description of Artificial Sequence: Synthetic oligonucleotide
  Target: LAMA2; (-) strand; PAM type: YTN; PAM sequence: TTC
aattatagatttactgtata

SEQ ID NO: 208495 - DNA, 20 bp, Artificial Sequence
  Description of Artificial Sequence: Synthetic oligonucleotide
  Target: LAMA2; (-) strand; PAM type: YTN; PAM sequence: TTA
ttcaattatagatttactgt

SEQ ID NO: 208496 - DNA, 20 bp, Artificial Sequence
  Description of Artificial Sequence: Synthetic oligonucleotide
  Target: LAMA2; (-) strand; PAM type: YTN; PAM sequence: TTT
attcaattatagatttactg

SEQ ID NO: 208497 - DNA, 20 bp, Artificial Sequence
  Description of Artificial Sequence: Synthetic oligonucleotide
  Target: LAMA2; (-) strand; PAM type: YTN; PAM sequence: TTA
tttattcaattatagattta

SEQ ID NO: 208498 - DNA, 20 bp, Artificial Sequence
  Description of Artificial Sequence: Synthetic oligonucleotide
  Target: LAMA2; (-) strand; PAM type: YTN; PAM sequence: CTA
acattatttattcaattata

SEQ ID NO: 208499 - DNA, 20 bp, Artificial Sequence
  Description of Artificial Sequence: Synthetic oligonucleotide
  Target: LAMA2; (-) strand; PAM type: YTN; PAM sequence: TTC
taacattatttattcaatta

SEQ ID NO: 208500 - DNA, 20 bp, Artificial Sequence
  Description of Artificial Sequence: Synthetic oligonucleotide
  Target: LAMA2; (-) strand; PAM type: YTN; PAM sequence: CTT
ctaacattatttattcaatt

SEQ ID NO: 208501 - DNA, 20 bp, Artificial Sequence
  Description of Artificial Sequence: Synthetic oligonucleotide
  Target: LAMA2; (-) strand; PAM type: YTN; PAM sequence: TTG
cttctaacattatttattca

SEQ ID NO: 208502 - DNA, 20 bp, Artificial Sequence
  Description of Artificial Sequence: Synthetic oligonucleotide
  Target: LAMA2; (-) strand; PAM type: YTN; PAM sequence: TTT
gcttctaacattatttattc

SEQ ID NO: 208503 - DNA, 20 bp, Artificial Sequence
  Description of Artificial Sequence: Synthetic oligonucleotide
  Target: LAMA2; (-) strand; PAM type: YTN; PAM sequence: CTG
tgatatttgcttctaacatt

SEQ ID NO: 208504 - DNA, 20 bp, Artificial Sequence
  Description of Artificial Sequence: Synthetic oligonucleotide
  Target: LAMA2; (-) strand; PAM type: YTN; PAM sequence: CTA
gcctgtgatatttgcttcta

SEQ ID NO: 208505 - DNA, 20 bp, Artificial Sequence
  Description of Artificial Sequence: Synthetic oligonucleotide
  Target: LAMA2; (-) strand; PAM type: YTN; PAM sequence: CTG
atcctagcctgtgatatttg

SEQ ID NO: 208506 - DNA, 20 bp, Artificial Sequence
  Description of Artificial Sequence: Synthetic oligonucleotide
  Target: LAMA2; (-) strand; PAM type: YTN; PAM sequence: TTA
agctgatcctagcctgtgat

SEQ ID NO: 208507 - DNA, 20 bp, Artificial Sequence
  Description of Artificial Sequence: Synthetic oligonucleotide
  Target: LAMA2; (-) strand; PAM type: YTN; PAM sequence: CTT
aagctgatcctagcctgtga

SEQ ID NO: 208508 - DNA, 20 bp, Artificial Sequence
  Description of Artificial Sequence: Synthetic oligonucleotide
  Target: LAMA2; (-) strand; PAM type: YTN; PAM sequence: TTC
ttaagctgatcctagcctgt

SEQ ID NO: 208509 - DNA, 20 bp, Artificial Sequence
  Description of Artificial Sequence: Synthetic oligonucleotide
  Target: LAMA2; (-) strand; PAM type: YTN; PAM sequence: TTT
cttaagctgatcctagcctg

SEQ ID NO: 208510 - DNA, 20 bp, Artificial Sequence
  Description of Artificial Sequence: Synthetic oligonucleotide
  Target: LAMA2; (-) strand; PAM type: YTN; PAM sequence: TTG
gagatttcttaagctgatcc

SEQ ID NO: 208511 - DNA, 20 bp, Artificial Sequence
  Description of Artificial Sequence: Synthetic oligonucleotide
  Target: LAMA2; (-) strand; PAM type: YTN; PAM sequence: TTT
ggagatttcttaagctgatc

SEQ ID NO: 208512 - DNA, 20 bp, Artificial Sequence
  Description of Artificial Sequence: Synthetic oligonucleotide
  Target: LAMA2; (-) strand; PAM type: YTN; PAM sequence: TTT
tggagatttcttaagctgat

SEQ ID NO: 208513 - DNA, 20 bp, Artificial Sequence
  Description of Artificial Sequence: Synthetic oligonucleotide
  Target: LAMA2; (-) strand; PAM type: YTN; PAM sequence: CTC
acattttggagatttcttaa

SEQ ID NO: 208514 - DNA, 20 bp, Artificial Sequence
  Description of Artificial Sequence: Synthetic oligonucleotide
  Target: LAMA2; (-) strand; PAM type: YTN; PAM sequence: TTA
tgtaggctcacattttggag

SEQ ID NO: 208515 - DNA, 20 bp, Artificial Sequence
  Description of Artificial Sequence: Synthetic oligonucleotide
  Target: LAMA2; (-) strand; PAM type: YTN; PAM sequence: CTC
aattatgtaggctcacattt

SEQ ID NO: 208516 - DNA, 20 bp, Artificial Sequence
  Description of Artificial Sequence: Synthetic oligonucleotide
  Target: LAMA2; (-) strand; PAM type: YTN; PAM sequence: TTG
gtctcaattatgtaggctca

SEQ ID NO: 208517 - DNA, 20 bp, Artificial Sequence
  Description of Artificial Sequence: Synthetic oligonucleotide
  Target: LAMA2; (-) strand; PAM type: YTN; PAM sequence: CTT
ggtctcaattatgtaggctc

SEQ ID NO: 208518 - DNA, 20 bp, Artificial Sequence
  Description of Artificial Sequence: Synthetic oligonucleotide
  Target: LAMA2; (-) strand; PAM type: YTN; PAM sequence: TTA
acaccaaatgaaatgtcact

SEQ ID NO: 208519 - DNA, 20 bp, Artificial Sequence
  Description of Artificial Sequence: Synthetic oligonucleotide
  Target: LAMA2; (-) strand; PAM type: YTN; PAM sequence: TTA
catagtatatgttaacacca

SEQ ID NO: 208520 - DNA, 20 bp, Artificial Sequence
  Description of Artificial Sequence: Synthetic oligonucleotide
  Target: LAMA2; (-) strand; PAM type: YTN; PAM sequence: TTT
acatagtatatgttaacacc

SEQ ID NO: 208521 - DNA, 20 bp, Artificial Sequence
  Description of Artificial Sequence: Synthetic oligonucleotide
  Target: LAMA2; (-) strand; PAM type: YTN; PAM sequence: TTT
tacatagtatatgttaacac

SEQ ID NO: 208522 - DNA, 20 bp, Artificial Sequence
  Description of Artificial Sequence: Synthetic oligonucleotide
  Target: LAMA2; (-) strand; PAM type: YTN; PAM sequence: TTT
ttacatagtatatgttaaca

SEQ ID NO: 208523 - DNA, 20 bp, Artificial Sequence
  Description of Artificial Sequence: Synthetic oligonucleotide
  Target: LAMA2; (-) strand; PAM type: YTN; PAM sequence: CTG
aaaatataataccattttta

SEQ ID NO: 208524 - DNA, 20 bp, Artificial Sequence
  Description of Artificial Sequence: Synthetic oligonucleotide
  Target: LAMA2; (-) strand; PAM type: YTN; PAM sequence: TTA
aaacactgaaaatataatac

SEQ ID NO: 208525 - DNA, 20 bp, Artificial Sequence
  Description of Artificial Sequence: Synthetic oligonucleotide
  Target: LAMA2; (-) strand; PAM type: YTN; PAM sequence: TTC
cattaaaacactgaaaatat

SEQ ID NO: 208526 - DNA, 20 bp, Artificial Sequence
  Description of Artificial Sequence: Synthetic oligonucleotide
  Target: LAMA2; (-) strand; PAM type: YTN; PAM sequence: TTT
ccattaaaacactgaaaata

SEQ ID NO: 208527 - DNA, 20 bp, Artificial Sequence
  Description of Artificial Sequence: Synthetic oligonucleotide
  Target: LAMA2; (-) strand; PAM type: YTN; PAM sequence: TTA
aaatttccattaaaacactg

SEQ ID NO: 208528 - DNA, 20 bp, Artificial Sequence
  Description of Artificial Sequence: Synthetic oligonucleotide
  Target: LAMA2; (-) strand; PAM type: YTN; PAM sequence: CTA
tcagaaagcatgttaaaatt

SEQ ID NO: 208529 - DNA, 20 bp, Artificial Sequence
  Description of Artificial Sequence: Synthetic oligonucleotide
  Target: LAMA2; (-) strand; PAM type: YTN; PAM sequence: TTA
aactatcagaaagcatgtta

SEQ ID NO: 208530 - DNA, 20 bp, Artificial Sequence
  Description of Artificial Sequence: Synthetic oligonucleotide
  Target: LAMA2; (-) strand; PAM type: YTN; PAM sequence: TTA
aaagatattaaactatcaga

SEQ ID NO: 208531 - DNA, 20 bp, Artificial Sequence
  Description of Artificial Sequence: Synthetic oligonucleotide
  Target: LAMA2; (-) strand; PAM type: YTN; PAM sequence: TTG
gcacaagttaaaagatatta

SEQ ID NO: 208532 - DNA, 20 bp, Artificial Sequence
  Description of Artificial Sequence: Synthetic oligonucleotide
  Target: LAMA2; (-) strand; PAM type: YTN; PAM sequence: CTA
ttggcacaagttaaaagata

SEQ ID NO: 208533 - DNA, 20 bp, Artificial Sequence
  Description of Artificial Sequence: Synthetic oligonucleotide
  Target: LAMA2; (-) strand; PAM type: YTN; PAM sequence: CTA
aaacaatctattggcacaag

SEQ ID NO: 208534 - DNA, 20 bp, Artificial Sequence
  Description of Artificial Sequence: Synthetic oligonucleotide
  Target: LAMA2; (-) strand; PAM type: YTN; PAM sequence: TTG
ctaaaacaatctattggcac

SEQ ID NO: 208535 - DNA, 20 bp, Artificial Sequence
  Description of Artificial Sequence: Synthetic oligonucleotide
  Target: LAMA2; (-) strand; PAM type: YTN; PAM sequence: CTT
gctaaaacaatctattggca

SEQ ID NO: 208536 - DNA, 20 bp, Artificial Sequence
  Description of Artificial Sequence: Synthetic oligonucleotide
  Target: LAMA2; (-) strand; PAM type: YTN; PAM sequence: TTC
ttgctaaaacaatctattgg

SEQ ID NO: 208537 - DNA, 20 bp, Artificial Sequence
  Description of Artificial Sequence: Synthetic oligonucleotide
  Target: LAMA2; (-) strand; PAM type: YTN; PAM sequence: TTT
cttgctaaaacaatctattg

SEQ ID NO: 208538 - DNA, 20 bp, Artificial Sequence
  Description of Artificial Sequence: Synthetic oligonucleotide
  Target: LAMA2; (-) strand; PAM type: YTN; PAM sequence: CTC
atttcttgctaaaacaatct

SEQ ID NO: 208539 - DNA, 20 bp, Artificial Sequence
  Description of Artificial Sequence: Synthetic oligonucleotide
  Target: LAMA2; (-) strand; PAM type: YTN; PAM sequence: TTA
tcactcatttcttgctaaaa

SEQ ID NO: 208540 - DNA, 20 bp, Artificial Sequence
  Description of Artificial Sequence: Synthetic oligonucleotide
  Target: LAMA2; (-) strand; PAM type: YTN; PAM sequence: TTA
agattatcactcatttcttg

SEQ ID NO: 208541 - DNA, 20 bp, Artificial Sequence
  Description of Artificial Sequence: Synthetic oligonucleotide
  Target: LAMA2; (-) strand; PAM type: YTN; PAM sequence: TTG
aatcgggtaaaagaaaataa

SEQ ID NO: 208542 - DNA, 20 bp, Artificial Sequence
  Description of Artificial Sequence: Synthetic oligonucleotide
  Target: LAMA2; (-) strand; PAM type: YTN; PAM sequence: TTT
gaatcgggtaaaagaaaata

SEQ ID NO: 208543 - DNA, 20 bp, Artificial Sequence
  Description of Artificial Sequence: Synthetic oligonucleotide
  Target: LAMA2; (-) strand; PAM type: YTN; PAM sequence: CTA
agatcaaggcaagaatgttt

SEQ ID NO: 208544 - DNA, 20 bp, Artificial Sequence
  Description of Artificial Sequence: Synthetic oligonucleotide
  Target: LAMA2; (-) strand; PAM type: YTN; PAM sequence: CTC
taagatcaaggcaagaatgt

SEQ ID NO: 208545 - DNA, 20 bp, Artificial Sequence
  Description of Artificial Sequence: Synthetic oligonucleotide
  Target: LAMA2; (-) strand; PAM type: YTN; PAM sequence: CTC
cagcctctaagatcaaggca

SEQ ID NO: 208546 - DNA, 20 bp, Artificial Sequence
  Description of Artificial Sequence: Synthetic oligonucleotide
  Target: LAMA2; (-) strand; PAM type: YTN; PAM sequence: TTC
tccagcctctaagatcaagg

SEQ ID NO: 208547 - DNA, 20 bp, Artificial Sequence
  Description of Artificial Sequence: Synthetic oligonucleotide
  Target: LAMA2; (-) strand; PAM type: YTN; PAM sequence: CTA
ttctccagcctctaagatca

SEQ ID NO: 208548 - DNA, 20 bp, Artificial Sequence
  Description of Artificial Sequence: Synthetic oligonucleotide
  Target: LAMA2; (-) strand; PAM type: YTN; PAM sequence: CTG
cctattctccagcctctaag

SEQ ID NO: 208549 - DNA, 20 bp, Artificial Sequence
  Description of Artificial Sequence: Synthetic oligonucleotide
  Target: LAMA2; (-) strand; PAM type: YTN; PAM sequence: CTG
aggaaagaacggaagagatg

SEQ ID NO: 208550 - DNA, 20 bp, Artificial Sequence
  Description of Artificial Sequence: Synthetic oligonucleotide
  Target: LAMA2; (-) strand; PAM type: YTN; PAM sequence: CTA
aggctgaggaaagaacggaa

SEQ ID NO: 208551 - DNA, 20 bp, Artificial Sequence
  Description of Artificial Sequence: Synthetic oligonucleotide
  Target: LAMA2; (-) strand; PAM type: YTN; PAM sequence: TTC
actaaggctgaggaaagaac

SEQ ID NO: 208552 - DNA, 20 bp, Artificial Sequence
  Description of Artificial Sequence: Synthetic oligonucleotide
  Target: LAMA2; (-) strand; PAM type: YTN; PAM sequence: CTT
cactaaggctgaggaaagaa

SEQ ID NO: 208553 - DNA, 20 bp, Artificial Sequence
  Description of Artificial Sequence: Synthetic oligonucleotide
  Target: LAMA2; (-) strand; PAM type: YTN; PAM sequence: CTC
atggtgtggataaatgggtg

SEQ ID NO: 208554 - DNA, 20 bp, Artificial Sequence
  Description of Artificial Sequence: Synthetic oligonucleotide
  Target: LAMA2; (-) strand; PAM type: YTN; PAM sequence: CTG
agtggatgatccacagtatg

SEQ ID NO: 208555 - DNA, 20 bp, Artificial Sequence
  Description of Artificial Sequence: Synthetic oligonucleotide
  Target: LAMA2; (-) strand; PAM type: YTN; PAM sequence: TTG
gtggctgagtggatgatcca

SEQ ID NO: 208556 - DNA, 20 bp, Artificial Sequence
  Description of Artificial Sequence: Synthetic oligonucleotide
  Target: LAMA2; (-) strand; PAM type: YTN; PAM sequence: CTG
caggagttggtggctgagtg

SEQ ID NO: 208557 - DNA, 20 bp, Artificial Sequence
  Description of Artificial Sequence: Synthetic oligonucleotide
  Target: LAMA2; (-) strand; PAM type: YTN; PAM sequence: TTG
gaaagaggcagcacctgcag

SEQ ID NO: 208558 - DNA, 20 bp, Artificial Sequence
  Description of Artificial Sequence: Synthetic oligonucleotide
  Target: LAMA2; (-) strand; PAM type: YTN; PAM sequence: CTG
taaaattggaaagaggcagc

SEQ ID NO: 208559 - DNA, 20 bp, Artificial Sequence
  Description of Artificial Sequence: Synthetic oligonucleotide
  Target: LAMA2; (-) strand; PAM type: YTN; PAM sequence: CTG
aatgaaggcagtggctgtaa

SEQ ID NO: 208560 - DNA, 20 bp, Artificial Sequence
  Description of Artificial Sequence: Synthetic oligonucleotide
  Target: LAMA2; (-) strand; PAM type: YTN; PAM sequence: TTC
tgaatgaaggcagtggctgt

SEQ ID NO: 208561 - DNA, 20 bp, Artificial Sequence
  Description of Artificial Sequence: Synthetic oligonucleotide
  Target: LAMA2; (-) strand; PAM type: YTN; PAM sequence: TTA
gattctgaatgaaggcagtg

SEQ ID NO: 208562 - DNA, 20 bp, Artificial Sequence
  Description of Artificial Sequence: Synthetic oligonucleotide
  Target: LAMA2; (-) strand; PAM type: YTN; PAM sequence: TTT
agattctgaatgaaggcagt

SEQ ID NO: 208563 - DNA, 20 bp, Artificial Sequence
  Description of Artificial Sequence: Synthetic oligonucleotide
  Target: LAMA2; (-) strand; PAM type: YTN; PAM sequence: TTC
agaaatcaagggcagaaata

SEQ ID NO: 208564 - DNA, 20 bp, Artificial Sequence
  Description of Artificial Sequence: Synthetic oligonucleotide
  Target: LAMA2; (-) strand; PAM type: YTN; PAM sequence: CTG
cagaggcagttcagaaatca

SEQ ID NO: 208565 - DNA, 20 bp, Artificial Sequence
  Description of Artificial Sequence: Synthetic oligonucleotide
  Target: LAMA2; (-) strand; PAM type: YTN; PAM sequence: CTA
actgcagaggcagttcagaa

SEQ ID NO: 208566 - DNA, 20 bp, Artificial Sequence
  Description of Artificial Sequence: Synthetic oligonucleotide
  Target: LAMA2; (-) strand; PAM type: YTN; PAM sequence: TTA
agcaggaatgacagatgaaa

SEQ ID NO: 208567 - DNA, 20 bp, Artificial Sequence
  Description of Artificial Sequence: Synthetic oligonucleotide
  Target: LAMA2; (-) strand; PAM type: YTN; PAM sequence: CTA
ggagagtattaagcaggaat

SEQ ID NO: 208568 - DNA, 20 bp, Artificial Sequence
  Description of Artificial Sequence: Synthetic oligonucleotide
  Target: LAMA2; (-) strand; PAM type: YTN; PAM sequence: CTG
gacacgatggagagccctag

SEQ ID NO: 208569 - DNA, 20 bp, Artificial Sequence
  Description of Artificial Sequence: Synthetic oligonucleotide
  Target: LAMA2; (-) strand; PAM type: YTN; PAM sequence: TTA
tactggacacgatggagagc

SEQ ID NO: 208570 - DNA, 20 bp, Artificial Sequence
  Description of Artificial Sequence: Synthetic oligonucleotide
  Target: LAMA2; (-) strand; PAM type: YTN; PAM sequence: TTT
atactggacacgatggagag

SEQ ID NO: 208571 - DNA, 20 bp, Artificial Sequence
  Description of Artificial Sequence: Synthetic oligonucleotide
  Target: LAMA2; (-) strand; PAM type: YTN; PAM sequence: TTT
tatactggacacgatggaga

SEQ ID NO: 208572 - DNA, 20 bp, Artificial Sequence
  Description of Artificial Sequence: Synthetic oligonucleotide
  Target: LAMA2; (-) strand; PAM type: YTN; PAM sequence: TTC
agtacgattttatactggac

SEQ ID NO: 208573 - DNA, 20 bp, Artificial Sequence
  Description of Artificial Sequence: Synthetic oligonucleotide
  Target: LAMA2; (-) strand; PAM type: YTN; PAM sequence: TTT
cagtacgattttatactgga

SEQ ID NO: 208574 - DNA, 20 bp, Artificial Sequence
  Description of Artificial Sequence: Synthetic oligonucleotide
  Target: LAMA2; (-) strand; PAM type: YTN; PAM sequence: TTA
caagtttcagtacgatttta

SEQ ID NO: 208575 - DNA, 20 bp, Artificial Sequence
  Description of Artificial Sequence: Synthetic oligonucleotide
  Target: LAMA2; (-) strand; PAM type: YTN; PAM sequence: CTG
attacaagtttcagtacgat

SEQ ID NO: 208576 - DNA, 20 bp, Artificial Sequence
  Description of Artificial Sequence: Synthetic oligonucleotide
  Target: LAMA2; (-) strand; PAM type: YTN; PAM sequence: TTC
ctgattacaagtttcagtac

SEQ ID NO: 208577 - DNA, 20 bp, Artificial Sequence
  Description of Artificial Sequence: Synthetic oligonucleotide
  Target: LAMA2; (-) strand; PAM type: YTN; PAM sequence: CTT
cctgattacaagtttcagta

SEQ ID NO: 208578 - DNA, 20 bp, Artificial Sequence
  Description of Artificial Sequence: Synthetic oligonucleotide
  Target: LAMA2; (-) strand; PAM type: YTN; PAM sequence: TTA
caaaggggatgtcttcctga

SEQ ID NO: 208579 - DNA, 20 bp, Artificial Sequence
  Description of Artificial Sequence: Synthetic oligonucleotide
  Target: LAMA2; (-) strand; PAM type: YTN; PAM sequence: CTG
attacaaaggggatgtcttc

SEQ ID NO: 208580 - DNA, 20 bp, Artificial Sequence
  Description of Artificial Sequence: Synthetic oligonucleotide
  Target: LAMA2; (-) strand; PAM type: YTN; PAM sequence: CTG
gtgatggagatctgattaca

SEQ ID NO: 208581 - DNA, 20 bp, Artificial Sequence
  Description of Artificial Sequence: Synthetic oligonucleotide
  Target: LAMA2; (-) strand; PAM type: YTN; PAM sequence: TTG
gactggtgatggagatctga

SEQ ID NO: 208582 - DNA, 20 bp, Artificial Sequence
  Description of Artificial Sequence: Synthetic oligonucleotide
  Target: LAMA2; (-) strand; PAM type: YTN; PAM sequence: CTG
cagagtccagcatgacagga

SEQ ID NO: 208583 - DNA, 20 bp, Artificial Sequence
  Description of Artificial Sequence: Synthetic oligonucleotide
  Target: LAMA2; (-) strand; PAM type: YTN; PAM sequence: CTG
cccagcaactgcagagtcca

SEQ ID NO: 208584 - DNA, 20 bp, Artificial Sequence
  Description of Artificial Sequence: Synthetic oligonucleotide
  Target: LAMA2; (-) strand; PAM type: YTN; PAM sequence: CTG
caggaaagcatgcgggtaca

SEQ ID NO: 208585 - DNA, 20 bp, Artificial Sequence
  Description of Artificial Sequence: Synthetic oligonucleotide
  Target: LAMA2; (-) strand; PAM type: YTN; PAM sequence: TTA
ggagaagagagtcagatggg

SEQ ID NO: 208586 - DNA, 20 bp, Artificial Sequence
  Description of Artificial Sequence: Synthetic oligonucleotide
  Target: LAMA2; (-) strand; PAM type: YTN; PAM sequence: TTT
aggagaagagagtcagatgg

SEQ ID NO: 208587 - DNA, 20 bp, Artificial Sequence
  Description of Artificial Sequence: Synthetic oligonucleotide
  Target: LAMA2; (-) strand; PAM type: YTN; PAM sequence: TTA
cccatgcaaatatggtgagg

SEQ ID NO: 208588 - DNA, 20 bp, Artificial Sequence
  Description of Artificial Sequence: Synthetic oligonucleotide
  Target: LAMA2; (-) strand; PAM type: YTN; PAM sequence: TTA
aaaggtgaggacatgttacc

SEQ ID NO: 208589 - DNA, 20 bp, Artificial Sequence
  Description of Artificial Sequence: Synthetic oligonucleotide
  Target: LAMA2; (-) strand; PAM type: YTN; PAM sequence: CTT
aaaaggtgaggacatgttac

SEQ ID NO: 208590 - DNA, 20 bp, Artificial Sequence
  Description of Artificial Sequence: Synthetic oligonucleotide
  Target: LAMA2; (-) strand; PAM type: YTN; PAM sequence: TTC
ttaaaaggtgaggacatgtt

SEQ ID NO: 208591 - DNA, 20 bp, Artificial Sequence
  Description of Artificial Sequence: Synthetic oligonucleotide
  Target: LAMA2; (-) strand; PAM type: YTN; PAM sequence: TTC
aggaaattcttaaaaggtga

SEQ ID NO: 208592 - DNA, 20 bp, Artificial Sequence
  Description of Artificial Sequence: Synthetic oligonucleotide
  Target: LAMA2; (-) strand; PAM type: YTN; PAM sequence: CTT
caggaaattcttaaaaggtg

SEQ ID NO: 208593 - DNA, 20 bp, Artificial Sequence
  Description of Artificial Sequence: Synthetic oligonucleotide
  Target: LAMA2; (-) strand; PAM type: YTN; PAM sequence: TTC
aggaatcaggatgtcaggga

SEQ ID NO: 208594 - DNA, 20 bp, Artificial Sequence
  Description of Artificial Sequence: Synthetic oligonucleotide
  Target: LAMA2; (-) strand; PAM type: YTN; PAM sequence: TTG
ttcaggaatcaggatgtcag

SEQ ID NO: 208595 - DNA, 20 bp, Artificial Sequence
  Description of Artificial Sequence: Synthetic oligonucleotide
  Target: LAMA2; (-) strand; PAM type: YTN; PAM sequence: TTG
tgagcacaaaggggtggttg

SEQ ID NO: 208596 - DNA, 20 bp, Artificial Sequence
  Description of Artificial Sequence: Synthetic oligonucleotide
  Target: LAMA2; (-) strand; PAM type: YTN; PAM sequence: TTT
gtgagcacaaaggggtggtt

SEQ ID NO: 208597 - DNA, 20 bp, Artificial Sequence
  Description of Artificial Sequence: Synthetic oligonucleotide
  Target: LAMA2; (-) strand; PAM type: YTN; PAM sequence: CTT
tgtgagcacaaaggggtggt

SEQ ID NO: 208598 - DNA, 20 bp, Artificial Sequence
  Description of Artificial Sequence: Synthetic oligonucleotide
  Target: LAMA2; (-) strand; PAM type: YTN; PAM sequence: CTA
caaagacctttgtgagcaca

SEQ ID NO: 208599 - DNA, 20 bp, Artificial Sequence
  Description of Artificial Sequence: Synthetic oligonucleotide
  Target: LAMA2; (-) strand; PAM type: YTN; PAM sequence: CTG
tatgataaataatgtaacta

SEQ ID NO: 208600 - DNA, 20 bp, Artificial Sequence
  Description of Artificial Sequence: Synthetic oligonucleotide
  Target: LAMA2; (-) strand; PAM type: YTN; PAM sequence: TTC
agtggaaacactgtatgata

SEQ ID NO: 208601 - DNA, 20 bp, Artificial Sequence
  Description of Artificial Sequence: Synthetic oligonucleotide
  Target: LAMA2; (-) strand; PAM type: YTN; PAM sequence: TTT
cagtggaaacactgtatgat

SEQ ID NO: 208602 - DNA, 20 bp, Artificial Sequence
  Description of Artificial Sequence: Synthetic oligonucleotide
  Target: LAMA2; (-) strand; PAM type: YTN; PAM sequence: CTT
tcagtggaaacactgtatga

SEQ ID NO: 208603 - DNA, 20 bp, Artificial Sequence
  Description of Artificial Sequence: Synthetic oligonucleotide
  Target: LAMA2; (-) strand; PAM type: YTN; PAM sequence: TTA
aactttcagtggaaacactg

SEQ ID NO: 208604 - DNA, 20 bp, Artificial Sequence
  Description of Artificial Sequence: Synthetic oligonucleotide
  Target: LAMA2; (-) strand; PAM type: YTN; PAM sequence: CTT
aaactttcagtggaaacact

SEQ ID NO: 208605 - DNA, 20 bp, Artificial Sequence
  Description of Artificial Sequence: Synthetic oligonucleotide
  Target: LAMA2; (-) strand; PAM type: YTN; PAM sequence: CTC
aggagccacgatggggaaca

SEQ ID NO: 208606 - DNA, 20 bp, Artificial Sequence
  Description of Artificial Sequence: Synthetic oligonucleotide
  Target: LAMA2; (-) strand; PAM type: YTN; PAM sequence: CTA
ctcaggagccacgatgggga

SEQ ID NO: 208607 - DNA, 20 bp, Artificial Sequence
  Description of Artificial Sequence: Synthetic oligonucleotide
  Target: LAMA2; (-) strand; PAM type: YTN; PAM sequence: CTG
catagctactcaggagccac

SEQ ID NO: 208608 - DNA, 20 bp, Artificial Sequence
  Description of Artificial Sequence: Synthetic oligonucleotide
  Target: LAMA2; (-) strand; PAM type: YTN; PAM sequence: CTC
tgcatagctactcaggagcc

SEQ ID NO: 208609 - DNA, 20 bp, Artificial Sequence
  Description of Artificial Sequence: Synthetic oligonucleotide
  Target: LAMA2; (-) strand; PAM type: YTN; PAM sequence: CTA
cgccctctgcatagctactc

SEQ ID NO: 208610 - DNA, 20 bp, Artificial Sequence
  Description of Artificial Sequence: Synthetic oligonucleotide
  Target: LAMA2; (-) strand; PAM type: YTN; PAM sequence: TTC
ccctacgccctctgcatagc

SEQ ID NO: 208611 - DNA, 20 bp, Artificial Sequence
  Description of Artificial Sequence: Synthetic oligonucleotide
  Target: LAMA2; (-) strand; PAM type: YTN; PAM sequence: CTT
cccctacgccctctgcatag

SEQ ID NO: 208612 - DNA, 20 bp, Artificial Sequence
  Description of Artificial Sequence: Synthetic oligonucleotide
  Target: LAMA2; (-) strand; PAM type: YTN; PAM sequence: TTG
cttcccctacgccctctgca

SEQ ID NO: 208613 - DNA, 20 bp, Artificial Sequence
  Description of Artificial Sequence: Synthetic oligonucleotide
  Target: LAMA2; (-) strand; PAM type: YTN; PAM sequence: TTC
accagattgcttcccctacg

SEQ ID NO: 208614 - DNA, 20 bp, Artificial Sequence
  Description of Artificial Sequence: Synthetic oligonucleotide
  Target: LAMA2; (-) strand; PAM type: YTN; PAM sequence: TTT
caccagattgcttcccctac

SEQ ID NO: 208615 - DNA, 20 bp, Artificial Sequence
  Description of Artificial Sequence: Synthetic oligonucleotide
  Target: LAMA2; (-) strand; PAM type: YTN; PAM sequence: TTG
gcccagtttcaccagattgc

SEQ ID NO: 208616 - DNA, 20 bp, Artificial Sequence
  Description of Artificial Sequence: Synthetic oligonucleotide
  Target: LAMA2; (-) strand; PAM type: YTN; PAM sequence: CTT
ggcccagtttcaccagattg

SEQ ID NO: 208617 - DNA, 20 bp, Artificial Sequence
  Description of Artificial Sequence: Synthetic oligonucleotide
  Target: LAMA2; (-) strand; PAM type: YTN; PAM sequence: CTC
cttggcccagtttcaccaga

SEQ ID NO: 208618 - DNA, 20 bp, Artificial Sequence
  Description of Artificial Sequence: Synthetic oligonucleotide
  Target: LAMA2; (-) strand; PAM type: YTN; PAM sequence: TTA
gagacaagtctccttggccc

SEQ ID NO: 208619 - DNA, 20 bp, Artificial Sequence
  Description of Artificial Sequence: Synthetic oligonucleotide
  Target: LAMA2; (-) strand; PAM type: YTN; PAM sequence: CTT
agagacaagtctccttggcc

SEQ ID NO: 208620 - DNA, 20 bp, Artificial Sequence
  Description of Artificial Sequence: Synthetic oligonucleotide
  Target: LAMA2; (-) strand; PAM type: YTN; PAM sequence: CTG
ccaatgtagcttagagacaa

SEQ ID NO: 208621 - DNA, 20 bp, Artificial Sequence
  Description of Artificial Sequence: Synthetic oligonucleotide
  Target: LAMA2; (-) strand; PAM type: YTN; PAM sequence: CTC
tgccaatgtagcttagagac

SEQ ID NO: 208622 - DNA, 20 bp, Artificial Sequence
  Description of Artificial Sequence: Synthetic oligonucleotide
  Target: LAMA2; (-) strand; PAM type: YTN; PAM sequence: TTG
ctctgccaatgtagcttaga

SEQ ID NO: 208623 - DNA, 20 bp, Artificial Sequence
  Description of Artificial Sequence: Synthetic oligonucleotide
  Target: LAMA2; (-) strand; PAM type: YTN; PAM sequence: CTA
agtaaaacattgctctgcca

SEQ ID NO: 208624 - DNA, 20 bp, Artificial Sequence
  Description of Artificial Sequence: Synthetic oligonucleotide
  Target: LAMA2; (-) strand; PAM type: YTN; PAM sequence: TTA
aatagatataatctaagtaa

SEQ ID NO: 208625 - DNA, 20 bp, Artificial Sequence
  Description of Artificial Sequence: Synthetic oligonucleotide
  Target: LAMA2; (-) strand; PAM type: YTN; PAM sequence: CTT
aaatagatataatctaagta

SEQ ID NO: 208626 - DNA, 20 bp, Artificial Sequence
  Description of Artificial Sequence: Synthetic oligonucleotide
  Target: LAMA2; (-) strand; PAM type: YTN; PAM sequence: CTA
aatccatcttaaatagatat

SEQ ID NO: 208627 - DNA, 20 bp, Artificial Sequence
  Description of Artificial Sequence: Synthetic oligonucleotide
  Target: LAMA2; (-) strand; PAM type: YTN; PAM sequence: CTC
cctaaatccatcttaaatag

SEQ ID NO: 208628 - DNA, 20 bp, Artificial Sequence
  Description of Artificial Sequence: Synthetic oligonucleotide
  Target: LAMA2; (-) strand; PAM type: YTN; PAM sequence: CTG
agcctccctaaatccatctt

SEQ ID NO: 208629 - DNA, 20 bp, Artificial Sequence
  Description of Artificial Sequence: Synthetic oligonucleotide
  Target: LAMA2; (-) strand; PAM type: YTN; PAM sequence: CTC
cctgagcctccctaaatcca

SEQ ID NO: 208630 - DNA, 20 bp, Artificial Sequence
  Description of Artificial Sequence: Synthetic oligonucleotide
  Target: LAMA2; (-) strand; PAM type: YTN; PAM sequence: CTC
caataatctccctgagcctc

SEQ ID NO: 208631 - DNA, 20 bp, Artificial Sequence
  Description of Artificial Sequence: Synthetic oligonucleotide
  Target: LAMA2; (-) strand; PAM type: YTN; PAM sequence: CTC
tccaataatctccctgagcc

SEQ ID NO: 208632 - DNA, 20 bp, Artificial Sequence
  Description of Artificial Sequence: Synthetic oligonucleotide
  Target: LAMA2; (-) strand; PAM type: YTN; PAM sequence: CTC
tctccaataatctccctgag

SEQ ID NO: 208633 - DNA, 20 bp, Artificial Sequence
  Description of Artificial Sequence: Synthetic oligonucleotide
  Target: LAMA2; (-) strand; PAM type: YTN; PAM sequence: TTC
ccctctctccaataatctcc

SEQ ID NO: 208634 - DNA, 20 bp, Artificial Sequence
  Description of Artificial Sequence: Synthetic oligonucleotide
  Target: LAMA2; (-) strand; PAM type: YTN; PAM sequence: TTT
cccctctctccaataatctc

SEQ ID NO: 208635 - DNA, 20 bp, Artificial Sequence
  Description of Artificial Sequence: Synthetic oligonucleotide
  Target: LAMA2; (-) strand; PAM type: YTN; PAM sequence: CTC
atatttcccctctctccaat

SEQ ID NO: 208636 - DNA, 20 bp, Artificial Sequence
  Description of Artificial Sequence: Synthetic oligonucleotide
  Target: LAMA2; (-) strand; PAM type: YTN; PAM sequence: CTC
tcatatttcccctctctcca

SEQ ID NO: 208637 - DNA, 20 bp, Artificial Sequence
  Description of Artificial Sequence: Synthetic oligonucleotide
  Target: LAMA2; (-) strand; PAM type: YTN; PAM sequence: TTA
gggtctctcatatttcccct

SEQ ID NO: 208638 - DNA, 20 bp, Artificial Sequence
  Description of Artificial Sequence: Synthetic oligonucleotide
  Target: LAMA2; (-) strand; PAM type: YTN; PAM sequence: CTT
agggtctctcatatttcccc

SEQ ID NO: 208639 - DNA, 20 bp, Artificial Sequence
  Description of Artificial Sequence: Synthetic oligonucleotide
  Target: LAMA2; (-) strand; PAM type: YTN; PAM sequence: CTG
ccaagaggtgcttagggtct

SEQ ID NO: 208640 - DNA, 20 bp, Artificial Sequence
  Description of Artificial Sequence: Synthetic oligonucleotide
  Target: LAMA2; (-) strand; PAM type: YTN; PAM sequence: CTC
cacagtagaggaaacacagc

SEQ ID NO: 208641 - DNA, 20 bp, Artificial Sequence
  Description of Artificial Sequence: Synthetic oligonucleotide
  Target: LAMA2; (-) strand; PAM type: YTN; PAM sequence: CTC
actccacagtagaggaaaca

SEQ ID NO: 208642 - DNA, 20 bp, Artificial Sequence
  Description of Artificial Sequence: Synthetic oligonucleotide
  Target: LAMA2; (-) strand; PAM type: YTN; PAM sequence: TTC
caggagctcactccacagta

SEQ ID NO: 208643 - DNA, 20 bp, Artificial Sequence
  Description of Artificial Sequence: Synthetic oligonucleotide
  Target: LAMA2; (-) strand; PAM type: YTN; PAM sequence: TTT
ccaggagctcactccacagt

SEQ ID NO: 208644 - DNA, 20 bp, Artificial Sequence
  Description of Artificial Sequence: Synthetic oligonucleotide
  Target: LAMA2; (-) strand; PAM type: YTN; PAM sequence: TTT
tccaggagctcactccacag

SEQ ID NO: 208645 - DNA, 20 bp, Artificial Sequence
  Description of Artificial Sequence: Synthetic oligonucleotide
  Target: LAMA2; (-) strand; PAM type: YTN; PAM sequence: CTG
ttttccaggagctcactcca

SEQ ID NO: 208646 - DNA, 20 bp, Artificial Sequence
  Description of Artificial Sequence: Synthetic oligonucleotide
  Target: LAMA2; (-) strand; PAM type: YTN; PAM sequence: CTC
aggaaacacacagatgacag

SEQ ID NO: 208647 - DNA, 20 bp, Artificial Sequence
  Description of Artificial Sequence: Synthetic oligonucleotide
  Target: LAMA2; (-) strand; PAM type: YTN; PAM sequence: CTA
tgtggtgctcaggaaacaca

SEQ ID NO: 208648 - DNA, 20 bp, Artificial Sequence
  Description of Artificial Sequence: Synthetic oligonucleotide
  Target: LAMA2; (-) strand; PAM type: YTN; PAM sequence: CTG
gcacacactatgtggtgctc

SEQ ID NO: 208649 - DNA, 20 bp, Artificial Sequence
  Description of Artificial Sequence: Synthetic oligonucleotide
  Target: LAMA2; (-) strand; PAM type: YTN; PAM sequence: CTA
tctggcacacactatgtggt

SEQ ID NO: 208650 - DNA, 20 bp, Artificial Sequence
  Description of Artificial Sequence: Synthetic oligonucleotide
  Target: LAMA2; (-) strand; PAM type: YTN; PAM sequence: CTA
tgtagcaggcatacaatcta

SEQ ID NO: 208651 - DNA, 20 bp, Artificial Sequence
  Description of Artificial Sequence: Synthetic oligonucleotide
  Target: LAMA2; (-) strand; PAM type: YTN; PAM sequence: CTA
ctatgtagcaggcatacaat

SEQ ID NO: 208652 - DNA, 20 bp, Artificial Sequence
  Description of Artificial Sequence: Synthetic oligonucleotide
  Target: LAMA2; (-) strand; PAM type: YTN; PAM sequence: TTA
agagcctactatgtagcagg

SEQ ID NO: 208653 - DNA, 20 bp, Artificial Sequence
  Description of Artificial Sequence: Synthetic oligonucleotide
  Target: LAMA2; (-) strand; PAM type: YTN; PAM sequence: TTA
ttaagagcctactatgtagc

SEQ ID NO: 208654 - DNA, 20 bp, Artificial Sequence
  Description of Artificial Sequence: Synthetic oligonucleotide
  Target: LAMA2; (-) strand; PAM type: YTN; PAM sequence: TTT
attaagagcctactatgtag

SEQ ID NO: 208655 - DNA, 20 bp, Artificial Sequence
  Description of Artificial Sequence: Synthetic oligonucleotide
  Target: LAMA2; (-) strand; PAM type: YTN; PAM sequence: TTA
tttattaagagcctactatg

SEQ ID NO: 208656 - DNA, 20 bp, Artificial Sequence
  Description of Artificial Sequence: Synthetic oligonucleotide
  Target: LAMA2; (-) strand; PAM type: YTN; PAM sequence: CTT
atttattaagagcctactat

SEQ ID NO: 208657 - DNA, 20 bp, Artificial Sequence
  Description of Artificial Sequence: Synthetic oligonucleotide
  Target: LAMA2; (-) strand; PAM type: YTN; PAM sequence: TTC
ttatttattaagagcctact

SEQ ID NO: 208658 - DNA, 20 bp, Artificial Sequence
  Description of Artificial Sequence: Synthetic oligonucleotide
  Target: LAMA2; (-) strand; PAM type: YTN; PAM sequence: CTT
cttatttattaagagcctac

SEQ ID NO: 208659 - DNA, 20 bp, Artificial Sequence
  Description of Artificial Sequence: Synthetic oligonucleotide
  Target: LAMA2; (-) strand; PAM type: YTN; PAM sequence: TTC
acttcttatttattaagagc

SEQ ID NO: 208660 - DNA, 20 bp, Artificial Sequence
  Description of Artificial Sequence: Synthetic oligonucleotide
  Target: LAMA2; (-) strand; PAM type: YTN; PAM sequence: CTC
aattcacttcttatttatta

SEQ ID NO: 208661 - DNA, 20 bp, Artificial Sequence
  Description of Artificial Sequence: Synthetic oligonucleotide
  Target: LAMA2; (-) strand; PAM type: YTN; PAM sequence: CTA
gaatcctcaattcacttctt

SEQ ID NO: 208662 - DNA, 20 bp, Artificial Sequence
  Description of Artificial Sequence: Synthetic oligonucleotide
  Target: LAMA2; (-) strand; PAM type: YTN; PAM sequence: TTA
atatgggaagatgaatagca

SEQ ID NO: 208663 - DNA, 20 bp, Artificial Sequence
  Description of Artificial Sequence: Synthetic oligonucleotide
  Target: LAMA2; (-) strand; PAM type: YTN; PAM sequence: TTT
aatatgggaagatgaatagc

SEQ ID NO: 208664 - DNA, 20 bp, Artificial Sequence
  Description of Artificial Sequence: Synthetic oligonucleotide
  Target: LAMA2; (-) strand; PAM type: YTN; PAM sequence: TTG
aaagcaatttaatatgggaa

SEQ ID NO: 208665 - DNA, 20 bp, Artificial Sequence
  Description of Artificial Sequence: Synthetic oligonucleotide
  Target: LAMA2; (-) strand; PAM type: YTN; PAM sequence: TTT
gaaagcaatttaatatggga

SEQ ID NO: 208666 - DNA, 20 bp, Artificial Sequence
  Description of Artificial Sequence: Synthetic oligonucleotide
  Target: LAMA2; (-) strand; PAM type: YTN; PAM sequence: TTT
tgaaagcaatttaatatggg

SEQ ID NO: 208667 - DNA, 20 bp, Artificial Sequence
  Description of Artificial Sequence: Synthetic oligonucleotide
  Target: LAMA2; (-) strand; PAM type: YTN; PAM sequence: TTA
cattttgaaagcaatttaat

SEQ ID NO: 208668 - DNA, 20 bp, Artificial Sequence
  Description of Artificial Sequence: Synthetic oligonucleotide
  Target: LAMA2; (-) strand; PAM type: YTN; PAM sequence: TTT
acattttgaaagcaatttaa

SEQ ID NO: 208669 - DNA, 20 bp, Artificial Sequence
  Description of Artificial Sequence: Synthetic oligonucleotide
  Target: LAMA2; (-) strand; PAM type: YTN; PAM sequence: TTC
agtgccacagaggatttaca

SEQ ID NO: 208670 - DNA, 20 bp, Artificial Sequence
  Description of Artificial Sequence: Synthetic oligonucleotide
  Target: LAMA2; (-) strand; PAM type: YTN; PAM sequence: CTT
cagtgccacagaggatttac

SEQ ID NO: 208671 - DNA, 20 bp, Artificial Sequence
  Description of Artificial Sequence: Synthetic oligonucleotide
  Target: LAMA2; (-) strand; PAM type: YTN; PAM sequence: TTA
aatagacttcagtgccacag

SEQ ID NO: 208672 - DNA, 20 bp, Artificial Sequence
  Description of Artificial Sequence: Synthetic oligonucleotide
  Target: LAMA2; (-) strand; PAM type: YTN; PAM sequence: TTT
aaatagacttcagtgccaca

SEQ ID NO: 208673 - DNA, 20 bp, Artificial Sequence
  Description of Artificial Sequence: Synthetic oligonucleotide
  Target: LAMA2; (-) strand; PAM type: YTN; PAM sequence: TTT
taaatagacttcagtgccac

SEQ ID NO: 208674 - DNA, 20 bp, Artificial Sequence
  Description of Artificial Sequence: Synthetic oligonucleotide
  Target: LAMA2; (-) strand; PAM type: YTN; PAM sequence: TTG
gcagaagagcatattttaaa

SEQ ID NO: 208675 - DNA, 20 bp, Artificial Sequence
  Description of Artificial Sequence: Synthetic oligonucleotide
  Target: LAMA2; (-) strand; PAM type: YTN; PAM sequence: TTT
ggcagaagagcatattttaa

SEQ ID NO: 208676 - DNA, 20 bp, Artificial Sequence
  Description of Artificial Sequence: Synthetic oligonucleotide
  Target: LAMA2; (-) strand; PAM type: YTN; PAM sequence: TTA
tttggcagaagagcatattt

SEQ ID NO: 208677 - DNA, 20 bp, Artificial Sequence
  Description of Artificial Sequence: Synthetic oligonucleotide
  Target: LAMA2; (-) strand; PAM type: YTN; PAM sequence: TTT
atttggcagaagagcatatt

SEQ ID NO: 208678 - DNA, 20 bp, Artificial Sequence
  Description of Artificial Sequence: Synthetic oligonucleotide
  Target: LAMA2; (-) strand; PAM type: YTN; PAM sequence: TTT
tatttggcagaagagcatat

SEQ ID NO: 208679 - DNA, 20 bp, Artificial Sequence
  Description of Artificial Sequence: Synthetic oligonucleotide
  Target: LAMA2; (-) strand; PAM type: YTN; PAM sequence: CTG
gaggagacattttatttggc

SEQ ID NO: 208680 - DNA, 20 bp, Artificial Sequence
  Description of Artificial Sequence: Synthetic oligonucleotide
  Target: LAMA2; (-) strand; PAM type: YTN; PAM sequence: CTC
aaatcacctggaggagacat

SEQ ID NO: 208681 - DNA, 20 bp, Artificial Sequence
  Description of Artificial Sequence: Synthetic oligonucleotide
  Target: LAMA2; (-) strand; PAM type: YTN; PAM sequence: TTC
ctcaaatcacctggaggaga

SEQ ID NO: 208682 - DNA, 20 bp, Artificial Sequence
  Description of Artificial Sequence: Synthetic oligonucleotide
  Target: LAMA2; (-) strand; PAM type: YTN; PAM sequence: CTT
cctcaaatcacctggaggag

SEQ ID NO: 208683 - DNA, 20 bp, Artificial Sequence
  Description of Artificial Sequence: Synthetic oligonucleotide
  Target: LAMA2; (-) strand; PAM type: YTN; PAM sequence: TTG
agcccacatgtcttcctcaa

SEQ ID NO: 208684 - DNA, 20 bp, Artificial Sequence
  Description of Artificial Sequence: Synthetic oligonucleotide
  Target: LAMA2; (-) strand; PAM type: YTN; PAM sequence: TTT
gagcccacatgtcttcctca

SEQ ID NO: 208685 - DNA, 20 bp, Artificial Sequence
  Description of Artificial Sequence: Synthetic oligonucleotide
  Target: LAMA2; (-) strand; PAM type: YTN; PAM sequence: TTA
tttgagcccacatgtcttcc

SEQ ID NO: 208686 - DNA, 20 bp, Artificial Sequence
  Description of Artificial Sequence: Synthetic oligonucleotide
  Target: LAMA2; (-) strand; PAM type: YTN; PAM sequence: CTT
atttgagcccacatgtcttc

SEQ ID NO: 208687 - DNA, 20 bp, Artificial Sequence
  Description of Artificial Sequence: Synthetic oligonucleotide
  Target: LAMA2; (-) strand; PAM type: YTN; PAM sequence: TTA
atcttatttgagcccacatg

SEQ ID NO: 208688 - DNA, 20 bp, Artificial Sequence
  Description of Artificial Sequence: Synthetic oligonucleotide
  Target: LAMA2; (-) strand; PAM type: YTN; PAM sequence: TTT
aatcttatttgagcccacat

SEQ ID NO: 208689 - DNA, 20 bp, Artificial Sequence
  Description of Artificial Sequence: Synthetic oligonucleotide
  Target: LAMA2; (-) strand; PAM type: YTN; PAM sequence: TTG
gtttaatcttatttgagccc

SEQ ID NO: 208690 - DNA, 20 bp, Artificial Sequence
  Description of Artificial Sequence: Synthetic oligonucleotide
  Target: LAMA2; (-) strand; PAM type: YTN; PAM sequence: TTT
ggtttaatcttatttgagcc

SEQ ID NO: 208691 - DNA, 20 bp, Artificial Sequence
  Description of Artificial Sequence: Synthetic oligonucleotide
  Target: LAMA2; (-) strand; PAM type: YTN; PAM sequence: TTA
catgtacatgacaatggttt

SEQ ID NO: 208692 - DNA, 20 bp, Artificial Sequence
  Description of Artificial Sequence: Synthetic oligonucleotide
  Target: LAMA2; (-) strand; PAM type: YTN; PAM sequence: TTT
acatgtacatgacaatggtt

SEQ ID NO: 208693 - DNA, 20 bp, Artificial Sequence
  Description of Artificial Sequence: Synthetic oligonucleotide
  Target: LAMA2; (-) strand; PAM type: YTN; PAM sequence: CTC
atgcaatatttacatgtaca

SEQ ID NO: 208694 - DNA, 20 bp, Artificial Sequence
  Description of Artificial Sequence: Synthetic oligonucleotide
  Target: LAMA2; (-) strand; PAM type: YTN; PAM sequence: TTA
ctcatgcaatatttacatgt

SEQ ID NO: 208695 - DNA, 20 bp, Artificial Sequence
  Description of Artificial Sequence: Synthetic oligonucleotide
  Target: LAMA2; (-) strand; PAM type: YTN; PAM sequence: CTA
gttactcatgcaatatttac

SEQ ID NO: 208696 - DNA, 20 bp, Artificial Sequence
  Description of Artificial Sequence: Synthetic oligonucleotide
  Target: LAMA2; (-) strand; PAM type: YTN; PAM sequence: TTA
gtgaagaaaatgtaagacta

SEQ ID NO: 208697 - DNA, 20 bp, Artificial Sequence
  Description of Artificial Sequence: Synthetic oligonucleotide
  Target: LAMA2; (-) strand; PAM type: YTN; PAM sequence: TTA
gaataaatccccattagtga

SEQ ID NO: 208698 - DNA, 20 bp, Artificial Sequence
  Description of Artificial Sequence: Synthetic oligonucleotide
  Target: LAMA2; (-) strand; PAM type: YTN; PAM sequence: CTT
agaataaatccccattagtg

SEQ ID NO: 208699 - DNA, 20 bp, Artificial Sequence
  Description of Artificial Sequence: Synthetic oligonucleotide
  Target: LAMA2; (-) strand; PAM type: YTN; PAM sequence: TTC
cttagaataaatccccatta

SEQ ID NO: 208700 - DNA, 20 bp, Artificial Sequence
  Description of Artificial Sequence: Synthetic oligonucleotide
  Target: LAMA2; (-) strand; PAM type: YTN; PAM sequence: CTG
aacaaaaaagttccttagaa

SEQ ID NO: 208701 - DNA, 20 bp, Artificial Sequence
  Description of Artificial Sequence: Synthetic oligonucleotide
  Target: LAMA2; (-) strand; PAM type: YTN; PAM sequence: TTC
atcagaaaatactgaacaaa

SEQ ID NO: 208702 - DNA, 20 bp, Artificial Sequence
  Description of Artificial Sequence: Synthetic oligonucleotide
  Target: LAMA2; (-) strand; PAM type: YTN; PAM sequence: CTT
catcagaaaatactgaacaa

SEQ ID NO: 208703 - DNA, 20 bp, Artificial Sequence
  Description of Artificial Sequence: Synthetic oligonucleotide
  Target: LAMA2; (-) strand; PAM type: YTN; PAM sequence: TTC
cttcatcagaaaatactgaa

SEQ ID NO: 208704 - DNA, 20 bp, Artificial Sequence
  Description of Artificial Sequence: Synthetic oligonucleotide
  Target: LAMA2; (-) strand; PAM type: YTN; PAM sequence: CTA
ttccttcatcagaaaatact

SEQ ID NO: 208705 - DNA, 20 bp, Artificial Sequence
  Description of Artificial Sequence: Synthetic oligonucleotide
  Target: LAMA2; (-) strand; PAM type: YTN; PAM sequence: CTG
actattccttcatcagaaaa

SEQ ID NO: 208706 - DNA, 20 bp, Artificial Sequence
  Description of Artificial Sequence: Synthetic oligonucleotide
  Target: LAMA2; (-) strand; PAM type: YTN; PAM sequence: TTC
tgactattccttcatcagaa

SEQ ID NO: 208707 - DNA, 20 bp, Artificial Sequence
  Description of Artificial Sequence: Synthetic oligonucleotide
  Target: LAMA2; (-) strand; PAM type: YTN; PAM sequence: TTT
ctgactattccttcatcaga

SEQ ID NO: 208708 - DNA, 20 bp, Artificial Sequence
  Description of Artificial Sequence: Synthetic oligonucleotide
  Target: LAMA2; (-) strand; PAM type: YTN; PAM sequence: TTG
atatttctgactattccttc

SEQ ID NO: 208709 - DNA, 20 bp, Artificial Sequence
  Description of Artificial Sequence: Synthetic oligonucleotide
  Target: LAMA2; (-) strand; PAM type: YTN; PAM sequence: TTT
gatatttctgactattcctt

SEQ ID NO: 208710 - DNA, 20 bp, Artificial Sequence
  Description of Artificial Sequence: Synthetic oligonucleotide
  Target: LAMA2; (-) strand; PAM type: YTN; PAM sequence: TTT
tgatatttctgactattcct

SEQ ID NO: 208711 - DNA, 20 bp, Artificial Sequence
  Description of Artificial Sequence: Synthetic oligonucleotide
  Target: LAMA2; (-) strand; PAM type: YTN; PAM sequence: CTA
aaatggagtaagaaggattt

SEQ ID NO: 208712 - DNA, 20 bp, Artificial Sequence
  Description of Artificial Sequence: Synthetic oligonucleotide
  Target: LAMA2; (-) strand; PAM type: YTN; PAM sequence: TTA
ggaaaaaaatggcagcctaa

SEQ ID NO: 208713 - DNA, 20 bp, Artificial Sequence
  Description of Artificial Sequence: Synthetic oligonucleotide
  Target: LAMA2; (-) strand; PAM type: YTN; PAM sequence: CTT
aggaaaaaaatggcagccta

SEQ ID NO: 208714 - DNA, 20 bp, Artificial Sequence
  Description of Artificial Sequence: Synthetic oligonucleotide
  Target: LAMA2; (-) strand; PAM type: YTN; PAM sequence: CTC
ttaggaaaaaaatggcagcc

SEQ ID NO: 208715 - DNA, 20 bp, Artificial Sequence
  Description of Artificial Sequence: Synthetic oligonucleotide
  Target: LAMA2; (-) strand; PAM type: YTN; PAM sequence: CTC
aatgtataacagctcttagg

SEQ ID NO: 208716 - DNA, 20 bp, Artificial Sequence
  Description of Artificial Sequence: Synthetic oligonucleotide
  Target: LAMA2; (-) strand; PAM type: YTN; PAM sequence: TTA
ggtatgctcaatgtataaca

SEQ ID NO: 208717 - DNA, 20 bp, Artificial Sequence
  Description of Artificial Sequence: Synthetic oligonucleotide
  Target: LAMA2; (-) strand; PAM type: YTN; PAM sequence: TTT
aggtatgctcaatgtataac

SEQ ID NO: 208718 - DNA, 20 bp, Artificial Sequence
  Description of Artificial Sequence: Synthetic oligonucleotide
  Target: LAMA2; (-) strand; PAM type: YTN; PAM sequence: TTC
agaaaggcaatttaggtatg

SEQ ID NO: 208719 - DNA, 20 bp, Artificial Sequence
  Description of Artificial Sequence: Synthetic oligonucleotide
  Target: LAMA2; (-) strand; PAM type: YTN; PAM sequence: TTT
cagaaaggcaatttaggtat

SEQ ID NO: 208720 - DNA, 20 bp, Artificial Sequence
  Description of Artificial Sequence: Synthetic oligonucleotide
  Target: LAMA2; (-) strand; PAM type: YTN; PAM sequence: CTG
tatttcagaaaggcaattta

SEQ ID NO: 208721 - DNA, 20 bp, Artificial Sequence
  Description of Artificial Sequence: Synthetic oligonucleotide
  Target: LAMA2; (-) strand; PAM type: YTN; PAM sequence: TTC
ctgtatttcagaaaggcaat

SEQ ID NO: 208722 - DNA, 20 bp, Artificial Sequence
  Description of Artificial Sequence: Synthetic oligonucleotide
  Target: LAMA2; (-) strand; PAM type: YTN; PAM sequence: CTG
acaatacagtgtgttcctgt

SEQ ID NO: 208723 - DNA, 20 bp, Artificial Sequence
  Description of Artificial Sequence: Synthetic oligonucleotide
  Target: LAMA2; (-) strand; PAM type: YTN; PAM sequence: TTA
ctgacaatacagtgtgttcc

SEQ ID NO: 208724 - DNA, 20 bp, Artificial Sequence
  Description of Artificial Sequence: Synthetic oligonucleotide
  Target: LAMA2; (-) strand; PAM type: YTN; PAM sequence: TTT
actgacaatacagtgtgttc

SEQ ID NO: 208725 - DNA, 20 bp, Artificial Sequence
  Description of Artificial Sequence: Synthetic oligonucleotide
  Target: LAMA2; (-) strand; PAM type: YTN; PAM sequence: TTT
tactgacaatacagtgtgtt

SEQ ID NO: 208726 - DNA, 20 bp, Artificial Sequence
  Description of Artificial Sequence: Synthetic oligonucleotide
  Target: LAMA2; (-) strand; PAM type: YTN; PAM sequence: CTA
atcaacacagaccattttac

SEQ ID NO: 208727 - DNA, 20 bp, Artificial Sequence
  Description of Artificial Sequence: Synthetic oligonucleotide
  Target: LAMA2; (-) strand; PAM type: YTN; PAM sequence: CTG
atgaatcaagtacaccccaa

SEQ ID NO: 208728 - DNA, 20 bp, Artificial Sequence
  Description of Artificial Sequence: Synthetic oligonucleotide
  Target: LAMA2; (-) strand; PAM type: YTN; PAM sequence: CTC
catcatctgatgaatcaagt

SEQ ID NO: 208729 - DNA, 20 bp, Artificial Sequence
  Description of Artificial Sequence: Synthetic oligonucleotide
  Target: LAMA2; (-) strand; PAM type: YTN; PAM sequence: TTG
catgaaacgccagcaggatc

SEQ ID NO: 208730 - DNA, 20 bp, Artificial Sequence
  Description of Artificial Sequence: Synthetic oligonucleotide
  Target: LAMA2; (-) strand; PAM type: YTN; PAM sequence: CTG
ggaagccaataaagcccaca

SEQ ID NO: 208731 - DNA, 20 bp, Artificial Sequence
  Description of Artificial Sequence: Synthetic oligonucleotide
  Target: LAMA2; (-) strand; PAM type: YTN; PAM sequence: CTG
ctgggaagccaataaagccc

SEQ ID NO: 208732 - DNA, 20 bp, Artificial Sequence
  Description of Artificial Sequence: Synthetic oligonucleotide
  Target: LAMA2; (-) strand; PAM type: YTN; PAM sequence: TTG
tgtcagtgtcgctgctggga

SEQ ID NO: 208733 - DNA, 20 bp, Artificial Sequence
  Description of Artificial Sequence: Synthetic oligonucleotide
  Target: LAMA2; (-) strand; PAM type: YTN; PAM sequence: TTT
gtgtcagtgtcgctgctggg

SEQ ID NO: 208734 - DNA, 20 bp, Artificial Sequence
  Description of Artificial Sequence: Synthetic oligonucleotide
  Target: LAMA2; (-) strand; PAM type: YTN; PAM sequence: CTG
acaatttgtgtcagtgtcgc

SEQ ID NO: 208735 - DNA, 20 bp, Artificial Sequence
  Description of Artificial Sequence: Synthetic oligonucleotide
  Target: LAMA2; (-) strand; PAM type: YTN; PAM sequence: CTG
cccataaaatctgacaattt

SEQ ID NO: 208736 - DNA, 20 bp, Artificial Sequence
  Description of Artificial Sequence: Synthetic oligonucleotide
  Target: LAMA2; (-) strand; PAM type: YTN; PAM sequence: TTA
aaactgcccataaaatctga

SEQ ID NO: 208737 - DNA, 20 bp, Artificial Sequence
  Description of Artificial Sequence: Synthetic oligonucleotide
  Target: LAMA2; (-) strand; PAM type: YTN; PAM sequence: TTT
aaaactgcccataaaatctg

SEQ ID NO: 208738 - DNA, 20 bp, Artificial Sequence
  Description of Artificial Sequence: Synthetic oligonucleotide
  Target: LAMA2; (-) strand; PAM type: YTN; PAM sequence: TTA
ggtttaaaactgcccataaa

SEQ ID NO: 208739 - DNA, 20 bp, Artificial Sequence
  Description of Artificial Sequence: Synthetic oligonucleotide
  Target: LAMA2; (-) strand; PAM type: YTN; PAM sequence: TTC
attaggtttaaaactgccca

SEQ ID NO: 208740 - DNA, 20 bp, Artificial Sequence
  Description of Artificial Sequence: Synthetic oligonucleotide
  Target: LAMA2; (-) strand; PAM type: YTN; PAM sequence: TTT
cattaggtttaaaactgccc

SEQ ID NO: 208741 - DNA, 20 bp, Artificial Sequence
  Description of Artificial Sequence: Synthetic oligonucleotide
  Target: LAMA2; (-) strand; PAM type: YTN; PAM sequence: CTC
aaggatgtatttcattaggt

SEQ ID NO: 208742 - DNA, 20 bp, Artificial Sequence
  Description of Artificial Sequence: Synthetic oligonucleotide
  Target: LAMA2; (-) strand; PAM type: YTN; PAM sequence: TTC
tcaaggatgtatttcattag

SEQ ID NO: 208743 - DNA, 20 bp, Artificial Sequence
  Description of Artificial Sequence: Synthetic oligonucleotide
  Target: LAMA2; (-) strand; PAM type: YTN; PAM sequence: CTT
ctcaaggatgtatttcatta

SEQ ID NO: 208744 - DNA, 20 bp, Artificial Sequence
  Description of Artificial Sequence: Synthetic oligonucleotide
  Target: LAMA2; (-) strand; PAM type: YTN; PAM sequence: CTA
aaatggtgaaggaagcttct

SEQ ID NO: 208745 - DNA, 20 bp, Artificial Sequence
  Description of Artificial Sequence: Synthetic oligonucleotide
  Target: LAMA2; (-) strand; PAM type: YTN; PAM sequence: CTA
ctaaaatggtgaaggaagct

SEQ ID NO: 208746 - DNA, 20 bp, Artificial Sequence
  Description of Artificial Sequence: Synthetic oligonucleotide
  Target: LAMA2; (-) strand; PAM type: YTN; PAM sequence: TTG
tacagctactaaaatggtga

SEQ ID NO: 208747 - DNA, 20 bp, Artificial Sequence
  Description of Artificial Sequence: Synthetic oligonucleotide
  Target: LAMA2; (-) strand; PAM type: YTN; PAM sequence: TTC
aaattgtacagctactaaaa

SEQ ID NO: 208748 - DNA, 20 bp, Artificial Sequence
  Description of Artificial Sequence: Synthetic oligonucleotide
  Target: LAMA2; (-) strand; PAM type: YTN; PAM sequence: TTT
caaattgtacagctactaaa

SEQ ID NO: 208749 - DNA, 20 bp, Artificial Sequence
  Description of Artificial Sequence: Synthetic oligonucleotide
  Target: LAMA2; (-) strand; PAM type: YTN; PAM sequence: CTT
tcaaattgtacagctactaa

SEQ ID NO: 208750 - DNA, 20 bp, Artificial Sequence
  Description of Artificial Sequence: Synthetic oligonucleotide
  Target: LAMA2; (-) strand; PAM type: YTN; PAM sequence: TTC
tttcaaattgtacagctact

SEQ ID NO: 208751 - DNA, 20 bp, Artificial Sequence
  Description of Artificial Sequence: Synthetic oligonucleotide
  Target: LAMA2; (-) strand; PAM type: YTN; PAM sequence: TTT
ctttcaaattgtacagctac

SEQ ID NO: 208752 - DNA, 20 bp, Artificial Sequence
  Description of Artificial Sequence: Synthetic oligonucleotide
  Target: LAMA2; (-) strand; PAM type: YTN; PAM sequence: TTT
tctttcaaattgtacagcta

SEQ ID NO: 208753 - DNA, 20 bp, Artificial Sequence
  Description of Artificial Sequence: Synthetic oligonucleotide
  Target: LAMA2; (-) strand; PAM type: YTN; PAM sequence: TTT
ttctttcaaattgtacagct

SEQ ID NO: 208754 - DNA, 20 bp, Artificial Sequence
  Description of Artificial Sequence: Synthetic oligonucleotide
  Target: LAMA2; (-) strand; PAM type: YTN; PAM sequence: TTT
tttctttcaaattgtacagc

SEQ ID NO: 208755 - DNA, 20 bp, Artificial Sequence
  Description of Artificial Sequence: Synthetic oligonucleotide
  Target: LAMA2; (-) strand; PAM type: YTN; PAM sequence: CTT
ttttctttcaaattgtacag

SEQ ID NO: 208756 - DNA, 20 bp, Artificial Sequence
  Description of Artificial Sequence: Synthetic oligonucleotide
  Target: LAMA2; (-) strand; PAM type: YTN; PAM sequence: TTG
acttttttctttcaaattgt

SEQ ID NO: 208757 - DNA, 20 bp, Artificial Sequence
  Description of Artificial Sequence: Synthetic oligonucleotide
  Target: LAMA2; (-) strand; PAM type: YTN; PAM sequence: CTG
tgtggtgtacattgactttt

SEQ ID NO: 208758 - DNA, 20 bp, Artificial Sequence
  Description of Artificial Sequence: Synthetic oligonucleotide
  Target: LAMA2; (-) strand; PAM type: YTN; PAM sequence: CTA
ccctgtgtggtgtacattga

SEQ ID NO: 208759 - DNA, 20 bp, Artificial Sequence
  Description of Artificial Sequence: Synthetic oligonucleotide
  Target: LAMA2; (-) strand; PAM type: YTN; PAM sequence: TTC
aatagtgaactaccctgtgt

SEQ ID NO: 208760 - DNA, 20 bp, Artificial Sequence
  Description of Artificial Sequence: Synthetic oligonucleotide
  Target: LAMA2; (-) strand; PAM type: YTN; PAM sequence: TTT
caatagtgaactaccctgtg

SEQ ID NO: 208761 - DNA, 20 bp, Artificial Sequence
  Description of Artificial Sequence: Synthetic oligonucleotide
  Target: LAMA2; (-) strand; PAM type: YTN; PAM sequence: CTC
catgatttcaatagtgaact

SEQ ID NO: 208762 - DNA, 20 bp, Artificial Sequence
  Description of Artificial Sequence: Synthetic oligonucleotide
  Target: LAMA2; (-) strand; PAM type: YTN; PAM sequence: TTG
tcctccatgatttcaatagt

SEQ ID NO: 208763 - DNA, 20 bp, Artificial Sequence
  Description of Artificial Sequence: Synthetic oligonucleotide
  Target: LAMA2; (-) strand; PAM type: YTN; PAM sequence: TTG
tcattgtcctccatgatttc

SEQ ID NO: 208764 - DNA, 20 bp, Artificial Sequence
  Description of Artificial Sequence: Synthetic oligonucleotide
  Target: LAMA2; (-) strand; PAM type: YTN; PAM sequence: TTC
aagagcaaaataagcgtgtt

SEQ ID NO: 208765 - DNA, 20 bp, Artificial Sequence
  Description of Artificial Sequence: Synthetic oligonucleotide
  Target: LAMA2; (-) strand; PAM type: YTN; PAM sequence: TTA
atgacagcatgttcaagagc

SEQ ID NO: 208766 - DNA, 20 bp, Artificial Sequence
  Description of Artificial Sequence: Synthetic oligonucleotide
  Target: LAMA2; (-) strand; PAM type: YTN; PAM sequence: TTG
tgcagttaatgacagcatgt

SEQ ID NO: 208767 - DNA, 20 bp, Artificial Sequence
  Description of Artificial Sequence: Synthetic oligonucleotide
  Target: LAMA2; (-) strand; PAM type: YTN; PAM sequence: CTG
aggcagcatcagtatcccat

SEQ ID NO: 208768 - DNA, 20 bp, Artificial Sequence
  Description of Artificial Sequence: Synthetic oligonucleotide
  Target: LAMA2; (-) strand; PAM type: YTN; PAM sequence: CTC
tgaggcagcatcagtatccc

SEQ ID NO: 208769 - DNA, 20 bp, Artificial Sequence
  Description of Artificial Sequence: Synthetic oligonucleotide
  Target: LAMA2; (-) strand; PAM type: YTN; PAM sequence: TTA
ataccagcctctgaggcagc

SEQ ID NO: 208770 - DNA, 20 bp, Artificial Sequence
  Description of Artificial Sequence: Synthetic oligonucleotide
  Target: LAMA2; (-) strand; PAM type: YTN; PAM sequence: TTG
gcacaaagattaataccagc

SEQ ID NO: 208771 - DNA, 20 bp, Artificial Sequence
  Description of Artificial Sequence: Synthetic oligonucleotide
  Target: LAMA2; (-) strand; PAM type: YTN; PAM sequence: TTT
ggcacaaagattaataccag

SEQ ID NO: 208772 - DNA, 20 bp, Artificial Sequence
  Description of Artificial Sequence: Synthetic oligonucleotide
  Target: LAMA2; (-) strand; PAM type: YTN; PAM sequence: CTG
caaggtttggcacaaagatt

SEQ ID NO: 208773 - DNA, 20 bp, Artificial Sequence
  Description of Artificial Sequence: Synthetic oligonucleotide
  Target: LAMA2; (-) strand; PAM type: YTN; PAM sequence: TTC
tgcaaggtttggcacaaaga

SEQ ID NO: 208774 - DNA, 20 bp, Artificial Sequence
  Description of Artificial Sequence: Synthetic oligonucleotide
  Target: LAMA2; (-) strand; PAM type: YTN; PAM sequence: TTT
ctgcaaggtttggcacaaag

SEQ ID NO: 208775 - DNA, 20 bp, Artificial Sequence
  Description of Artificial Sequence: Synthetic oligonucleotide
  Target: LAMA2; (-) strand; PAM type: YTN; PAM sequence: TTA
cgtcagtaaatgcacacaga

SEQ ID NO: 208776 - DNA, 20 bp, Artificial Sequence
  Description of Artificial Sequence: Synthetic oligonucleotide
  Target: LAMA2; (-) strand; PAM type: YTN; PAM sequence: CTT
acgtcagtaaatgcacacag

SEQ ID NO: 208777 - DNA, 20 bp, Artificial Sequence
  Description of Artificial Sequence: Synthetic oligonucleotide
  Target: LAMA2; (-) strand; PAM type: YTN; PAM sequence: TTA
agatcaaagagatggagagc

SEQ ID NO: 208778 - DNA, 20 bp, Artificial Sequence
  Description of Artificial Sequence: Synthetic oligonucleotide
  Target: LAMA2; (-) strand; PAM type: YTN; PAM sequence: CTT
aagatcaaagagatggagag

SEQ ID NO: 208779 - DNA, 20 bp, Artificial Sequence
  Description of Artificial Sequence: Synthetic oligonucleotide
  Target: LAMA2; (-) strand; PAM type: YTN; PAM sequence: CTA
tccccaaaggagtaatctta

SEQ ID NO: 208780 - DNA, 20 bp, Artificial Sequence
  Description of Artificial Sequence: Synthetic oligonucleotide
  Target: LAMA2; (-) strand; PAM type: YTN; PAM sequence: TTC
tatccccaaaggagtaatct

SEQ ID NO: 208781 - DNA, 20 bp, Artificial Sequence
  Description of Artificial Sequence: Synthetic oligonucleotide
  Target: LAMA2; (-) strand; PAM type: YTN; PAM sequence: CTT
ctatccccaaaggagtaatc

SEQ ID NO: 208782 - DNA, 20 bp, Artificial Sequence
  Description of Artificial Sequence: Synthetic oligonucleotide
  Target: LAMA2; (-) strand; PAM type: YTN; PAM sequence: TTA
ccttctatccccaaaggagt

SEQ ID NO: 208783 - DNA, 20 bp, Artificial Sequence
  Description of Artificial Sequence: Synthetic oligonucleotide
  Target: LAMA2; (-) strand; PAM type: YTN; PAM sequence: TTA
tattaccttctatccccaaa

SEQ ID NO: 208784 - DNA, 20 bp, Artificial Sequence
  Description of Artificial Sequence: Synthetic oligonucleotide
  Target: LAMA2; (-) strand; PAM type: YTN; PAM sequence: CTT
atattaccttctatccccaa

SEQ ID NO: 208785 - DNA, 20 bp, Artificial Sequence
  Description of Artificial Sequence: Synthetic oligonucleotide
  Target: LAMA2; (-) strand; PAM type: YTN; PAM sequence: TTC
agcagccttatattaccttc

SEQ ID NO: 208786 - DNA, 20 bp, Artificial Sequence
  Description of Artificial Sequence: Synthetic oligonucleotide
  Target: LAMA2; (-) strand; PAM type: YTN; PAM sequence: TTA
agttcagcagccttatatta

SEQ ID NO: 208787 - DNA, 20 bp, Artificial Sequence
  Description of Artificial Sequence: Synthetic oligonucleotide
  Target: LAMA2; (-) strand; PAM type: YTN; PAM sequence: TTT
aagttcagcagccttatatt

SEQ ID NO: 208788 - DNA, 20 bp, Artificial Sequence
  Description of Artificial Sequence: Synthetic oligonucleotide
  Target: LAMA2; (-) strand; PAM type: YTN; PAM sequence: TTT
taagttcagcagccttatat

SEQ ID NO: 208789 - DNA, 20 bp, Artificial Sequence
  Description of Artificial Sequence: Synthetic oligonucleotide
  Target: LAMA2; (-) strand; PAM type: YTN; PAM sequence: TTT
ttaagttcagcagccttata

SEQ ID NO: 208790 - DNA, 20 bp, Artificial Sequence
  Description of Artificial Sequence: Synthetic oligonucleotide
  Target: LAMA2; (-) strand; PAM type: YTN; PAM sequence: TTT
tttaagttcagcagccttat

SEQ ID NO: 208791 - DNA, 20 bp, Artificial Sequence
  Description of Artificial Sequence: Synthetic oligonucleotide
  Target: LAMA2; (-) strand; PAM type: YTN; PAM sequence: TTT
ttttaagttcagcagcctta

SEQ ID NO: 208792 - DNA, 20 bp, Artificial Sequence
  Description of Artificial Sequence: Synthetic oligonucleotide
  Target: LAMA2; (-) strand; PAM type: YTN; PAM sequence: TTT
tttttaagttcagcagcctt

SEQ ID NO: 208793 - DNA, 20 bp, Artificial Sequence
  Description of Artificial Sequence: Synthetic oligonucleotide
  Target: LAMA2; (-) strand; PAM type: YTN; PAM sequence: TTT
ttttttaagttcagcagcct

SEQ ID NO: 208794 - DNA, 20 bp, Artificial Sequence
  Description of Artificial Sequence: Synthetic oligonucleotide
  Target: LAMA2; (-) strand; PAM type: YTN; PAM sequence: TTT
tttttttaagttcagcagcc

SEQ ID NO: 208795 - DNA, 20 bp, Artificial Sequence
  Description of Artificial Sequence: Synthetic oligonucleotide
  Target: LAMA2; (-) strand; PAM type: YTN; PAM sequence: TTG
agcattttttttttaagttc

SEQ ID NO: 208796 - DNA, 20 bp, Artificial Sequence
  Description of Artificial Sequence: Synthetic oligonucleotide
  Target: LAMA2; (-) strand; PAM type: YTN; PAM sequence: TTT
gagcattttttttttaagtt

SEQ ID NO: 208797 - DNA, 20 bp, Artificial Sequence
  Description of Artificial Sequence: Synthetic oligonucleotide
  Target: LAMA2; (-) strand; PAM type: YTN; PAM sequence: CTT
tgagcattttttttttaagt

SEQ ID NO: 208798 - DNA, 20 bp, Artificial Sequence
  Description of Artificial Sequence: Synthetic oligonucleotide
  Target: LAMA2; (-) strand; PAM type: YTN; PAM sequence: CTC
actttgagcatttttttttt

SEQ ID NO: 208799 - DNA, 20 bp, Artificial Sequence
  Description of Artificial Sequence: Synthetic oligonucleotide
  Target: LAMA2; (-) strand; PAM type: YTN; PAM sequence: TTC
actcactttgagcatttttt

SEQ ID NO: 208800 - DNA, 20 bp, Artificial Sequence
  Description of Artificial Sequence: Synthetic oligonucleotide
  Target: LAMA2; (-) strand; PAM type: YTN; PAM sequence: CTT
cactcactttgagcattttt

SEQ ID NO: 208801 - DNA, 20 bp, Artificial Sequence
  Description of Artificial Sequence: Synthetic oligonucleotide
  Target: LAMA2; (-) strand; PAM type: YTN; PAM sequence: TTA
ccttcactcactttgagcat

SEQ ID NO: 208802 - DNA, 20 bp, Artificial Sequence
  Description of Artificial Sequence: Synthetic oligonucleotide
  Target: LAMA2; (-) strand; PAM type: YTN; PAM sequence: CTT
accttcactcactttgagca

SEQ ID NO: 208803 - DNA, 20 bp, Artificial Sequence
  Description of Artificial Sequence: Synthetic oligonucleotide
  Target: LAMA2; (-) strand; PAM type: YTN; PAM sequence: CTC
ttaccttcactcactttgag

SEQ ID NO: 208804 - DNA, 20 bp, Artificial Sequence
  Description of Artificial Sequence: Synthetic oligonucleotide
  Target: LAMA2; (-) strand; PAM type: YTN; PAM sequence: CTG
gaagaaaatgaacatctctt

SEQ ID NO: 208805 - DNA, 20 bp, Artificial Sequence
  Description of Artificial Sequence: Synthetic oligonucleotide
  Target: LAMA2; (-) strand; PAM type: YTN; PAM sequence: TTC
agtactggaagaaaatgaac

SEQ ID NO: 208806 - DNA, 20 bp, Artificial Sequence
  Description of Artificial Sequence: Synthetic oligonucleotide
  Target: LAMA2; (-) strand; PAM type: YTN; PAM sequence: TTT
cagtactggaagaaaatgaa

SEQ ID NO: 208807 - DNA, 20 bp, Artificial Sequence
  Description of Artificial Sequence: Synthetic oligonucleotide
  Target: LAMA2; (-) strand; PAM type: YTN; PAM sequence: TTT
tcagtactggaagaaaatga

SEQ ID NO: 208808 - DNA, 20 bp, Artificial Sequence
  Description of Artificial Sequence: Synthetic oligonucleotide
  Target: LAMA2; (-) strand; PAM type: YTN; PAM sequence: TTA
attttcagtactggaagaaa

SEQ ID NO: 208809 - DNA, 20 bp, Artificial Sequence
  Description of Artificial Sequence: Synthetic oligonucleotide
  Target: LAMA2; (-) strand; PAM type: YTN; PAM sequence: CTT
aattttcagtactggaagaa

SEQ ID NO: 208810 - DNA, 20 bp, Artificial Sequence
  Description of Artificial Sequence: Synthetic oligonucleotide
  Target: LAMA2; (-) strand; PAM type: YTN; PAM sequence: CTC
ttaattttcagtactggaag

SEQ ID NO: 208811 - DNA, 20 bp, Artificial Sequence
  Description of Artificial Sequence: Synthetic oligonucleotide
  Target: LAMA2; (-) strand; PAM type: YTN; PAM sequence: CTG
tactcttaattttcagtact

SEQ ID NO: 208812 - DNA, 20 bp, Artificial Sequence
  Description of Artificial Sequence: Synthetic oligonucleotide
  Target: LAMA2; (-) strand; PAM type: YTN; PAM sequence: TTG
tataatagcatgtgggtctg

SEQ ID NO: 208813 - DNA, 20 bp, Artificial Sequence
  Description of Artificial Sequence: Synthetic oligonucleotide
  Target: LAMA2; (-) strand; PAM type: YTN; PAM sequence: CTT
gtataatagcatgtgggtct

SEQ ID NO: 208814 - DNA, 20 bp, Artificial Sequence
  Description of Artificial Sequence: Synthetic oligonucleotide
  Target: LAMA2; (-) strand; PAM type: YTN; PAM sequence: CTC
ttgtataatagcatgtgggt

SEQ ID NO: 208815 - DNA, 20 bp, Artificial Sequence
  Description of Artificial Sequence: Synthetic oligonucleotide
  Target: LAMA2; (-) strand; PAM type: YTN; PAM sequence: TTC
tcttgtataatagcatgtgg

SEQ ID NO: 208816 - DNA, 20 bp, Artificial Sequence
  Description of Artificial Sequence: Synthetic oligonucleotide
  Target: LAMA2; (-) strand; PAM type: YTN; PAM sequence: TTT
ctcttgtataatagcatgtg

SEQ ID NO: 208817 - DNA, 20 bp, Artificial Sequence
  Description of Artificial Sequence: Synthetic oligonucleotide
  Target: LAMA2; (-) strand; PAM type: YTN; PAM sequence: CTT
tctcttgtataatagcatgt

SEQ ID NO: 208818 - DNA, 20 bp, Artificial Sequence
  Description of Artificial Sequence: Synthetic oligonucleotide
  Target: LAMA2; (-) strand; PAM type: YTN; PAM sequence: CTA
ctttctcttgtataatagca

SEQ ID NO: 208819 - DNA, 20 bp, Artificial Sequence
  Description of Artificial Sequence: Synthetic oligonucleotide
  Target: LAMA2; (-) strand; PAM type: YTN; PAM sequence: TTA
tccagcagtcataggactac

SEQ ID NO: 208820 - DNA, 20 bp, Artificial Sequence
  Description of Artificial Sequence: Synthetic oligonucleotide
  Target: LAMA2; (-) strand; PAM type: YTN; PAM sequence: TTA
gataatgtatgtaaattatc

SEQ ID NO: 208821 - DNA, 20 bp, Artificial Sequence
  Description of Artificial Sequence: Synthetic oligonucleotide
  Target: LAMA2; (-) strand; PAM type: YTN; PAM sequence: TTA
tgataaattagataatgtat

SEQ ID NO: 208822 - DNA, 20 bp, Artificial Sequence
  Description of Artificial Sequence: Synthetic oligonucleotide
  Target: LAMA2; (-) strand; PAM type: YTN; PAM sequence: CTC
ccagggttatgataaattag

SEQ ID NO: 208823 - DNA, 20 bp, Artificial Sequence
  Description of Artificial Sequence: Synthetic oligonucleotide
  Target: LAMA2; (-) strand; PAM type: YTN; PAM sequence: CTC
tcccagggttatgataaatt

SEQ ID NO: 208824 - DNA, 20 bp, Artificial Sequence
  Description of Artificial Sequence: Synthetic oligonucleotide
  Target: LAMA2; (-) strand; PAM type: YTN; PAM sequence: TTC
cactctcccagggttatgat

SEQ ID NO: 208825 - DNA, 20 bp, Artificial Sequence
  Description of Artificial Sequence: Synthetic oligonucleotide
  Target: LAMA2; (-) strand; PAM type: YTN; PAM sequence: TTT
ccactctcccagggttatga

SEQ ID NO: 208826 - DNA, 20 bp, Artificial Sequence
  Description of Artificial Sequence: Synthetic oligonucleotide
  Target: LAMA2; (-) strand; PAM type: YTN; PAM sequence: CTA
gtaaaataagaatagcaata

SEQ ID NO: 208827 - DNA, 20 bp, Artificial Sequence
  Description of Artificial Sequence: Synthetic oligonucleotide
  Target: LAMA2; (-) strand; PAM type: YTN; PAM sequence: CTC
actagtaaaataagaatagc

SEQ ID NO: 208828 - DNA, 20 bp, Artificial Sequence
  Description of Artificial Sequence: Synthetic oligonucleotide
  Target: LAMA2; (-) strand; PAM type: YTN; PAM sequence: CTC
tcactagtaaaataagaata

SEQ ID NO: 208829 - DNA, 20 bp, Artificial Sequence
  Description of Artificial Sequence: Synthetic oligonucleotide
  Target: LAMA2; (-) strand; PAM type: YTN; PAM sequence: TTA
gtctctcactagtaaaataa

SEQ ID NO: 208830 - DNA, 20 bp, Artificial Sequence
  Description of Artificial Sequence: Synthetic oligonucleotide
  Target: LAMA2; (-) strand; PAM type: YTN; PAM sequence: CTT
agtctctcactagtaaaata

SEQ ID NO: 208831 - DNA, 20 bp, Artificial Sequence
  Description of Artificial Sequence: Synthetic oligonucleotide
  Target: LAMA2; (-) strand; PAM type: YTN; PAM sequence: TTC
atgtagacccgggatcaaaa

SEQ ID NO: 208832 - DNA, 20 bp, Artificial Sequence
  Description of Artificial Sequence: Synthetic oligonucleotide
  Target: LAMA2; (-) strand; PAM type: YTN; PAM sequence: TTG
tattcatgtagacccgggat

SEQ ID NO: 208833 - DNA, 20 bp, Artificial Sequence
  Description of Artificial Sequence: Synthetic oligonucleotide
  Target: LAMA2; (-) strand; PAM type: YTN; PAM sequence: TTT
gtattcatgtagacccggga

SEQ ID NO: 208834 - DNA, 20 bp, Artificial Sequence
  Description of Artificial Sequence: Synthetic oligonucleotide
  Target: LAMA2; (-) strand; PAM type: YTN; PAM sequence: CTT
tgtattcatgtagacccggg

SEQ ID NO: 208835 - DNA, 20 bp, Artificial Sequence
  Description of Artificial Sequence: Synthetic oligonucleotide
  Target: LAMA2; (-) strand; PAM type: YTN; PAM sequence: TTA
aagatgtagctttgtattca

SEQ ID NO: 208836 - DNA, 20 bp, Artificial Sequence
  Description of Artificial Sequence: Synthetic oligonucleotide
  Target: LAMA2; (-) strand; PAM type: YTN; PAM sequence: CTA
attaaagatgtagctttgta

SEQ ID NO: 208837 - DNA, 20 bp, Artificial Sequence
  Description of Artificial Sequence: Synthetic oligonucleotide
  Target: LAMA2; (-) strand; PAM type: YTN; PAM sequence: CTA
tagagaactaattaaagatg

SEQ ID NO: 208838 - DNA, 20 bp, Artificial Sequence
  Description of Artificial Sequence: Synthetic oligonucleotide
  Target: LAMA2; (-) strand; PAM type: YTN; PAM sequence: TTG
agaccctatagagaactaat

SEQ ID NO: 208839 - DNA, 20 bp, Artificial Sequence
  Description of Artificial Sequence: Synthetic oligonucleotide
  Target: LAMA2; (-) strand; PAM type: YTN; PAM sequence: TTT
gagaccctatagagaactaa

SEQ ID NO: 208840 - DNA, 20 bp, Artificial Sequence
  Description of Artificial Sequence: Synthetic oligonucleotide
  Target: LAMA2; (-) strand; PAM type: YTN; PAM sequence: CTT
tgagaccctatagagaacta

SEQ ID NO: 208841 - DNA, 20 bp, Artificial Sequence
  Description of Artificial Sequence: Synthetic oligonucleotide
  Target: LAMA2; (-) strand; PAM type: YTN; PAM sequence: CTG
ctttgagaccctatagagaa

SEQ ID NO: 208842 - DNA, 20 bp, Artificial Sequence
  Description of Artificial Sequence: Synthetic oligonucleotide
  Target: LAMA2; (-) strand; PAM type: YTN; PAM sequence: TTA
gtaaaatgactgctttgaga

SEQ ID NO: 208843 - DNA, 20 bp, Artificial Sequence
  Description of Artificial Sequence: Synthetic oligonucleotide
  Target: LAMA2; (-) strand; PAM type: YTN; PAM sequence: TTT
agtaaaatgactgctttgag

SEQ ID NO: 208844 - DNA, 20 bp, Artificial Sequence
  Description of Artificial Sequence: Synthetic oligonucleotide
  Target: LAMA2; (-) strand; PAM type: YTN; PAM sequence: TTA
ataaagatcaaaaatttagt

SEQ ID NO: 208845 - DNA, 20 bp, Artificial Sequence
  Description of Artificial Sequence: Synthetic oligonucleotide
  Target: LAMA2; (-) strand; PAM type: YTN; PAM sequence: TTT
aataaagatcaaaaatttag

SEQ ID NO: 208846 - DNA, 20 bp, Artificial Sequence
  Description of Artificial Sequence: Synthetic oligonucleotide
  Target: LAMA2; (-) strand; PAM type: YTN; PAM sequence: CTA
tgtttaataaagatcaaaaa

SEQ ID NO: 208847 - DNA, 20 bp, Artificial Sequence
  Description of Artificial Sequence: Synthetic oligonucleotide
  Target: LAMA2; (-) strand; PAM type: YTN; PAM sequence: TTG
catctatgtttaataaagat

SEQ ID NO: 208848 - DNA, 20 bp, Artificial Sequence
  Description of Artificial Sequence: Synthetic oligonucleotide
  Target: LAMA2; (-) strand; PAM type: YTN; PAM sequence: TTT
gcatctatgtttaataaaga

SEQ ID NO: 208849 - DNA, 20 bp, Artificial Sequence
  Description of Artificial Sequence: Synthetic oligonucleotide
  Target: LAMA2; (-) strand; PAM type: YTN; PAM sequence: TTT
tgcatctatgtttaataaag

SEQ ID NO: 208850 - DNA, 20 bp, Artificial Sequence
  Description of Artificial Sequence: Synthetic oligonucleotide
  Target: LAMA2; (-) strand; PAM type: YTN; PAM sequence: CTT
ttgcatctatgtttaataaa

SEQ ID NO: 208851 - DNA, 20 bp, Artificial Sequence
  Description of Artificial Sequence: Synthetic oligonucleotide
  Target: LAMA2; (-) strand; PAM type: YTN; PAM sequence: TTA
cttttgcatctatgtttaat

SEQ ID NO: 208852 - DNA, 20 bp, Artificial Sequence
  Description of Artificial Sequence: Synthetic oligonucleotide
  Target: LAMA2; (-) strand; PAM type: YTN; PAM sequence: TTA
ttacttttgcatctatgttt

SEQ ID NO: 208853 - DNA, 20 bp, Artificial Sequence
  Description of Artificial Sequence: Synthetic oligonucleotide
  Target: LAMA2; (-) strand; PAM type: YTN; PAM sequence: TTA
ttattacttttgcatctatg

SEQ ID NO: 208854 - DNA, 20 bp, Artificial Sequence
  Description of Artificial Sequence: Synthetic oligonucleotide
  Target: LAMA2; (-) strand; PAM type: YTN; PAM sequence: TTG
tggaaatattattattactt

SEQ ID NO: 208855 - DNA, 20 bp, Artificial Sequence
  Description of Artificial Sequence: Synthetic oligonucleotide
  Target: LAMA2; (-) strand; PAM type: YTN; PAM sequence: TTT
gtggaaatattattattact

SEQ ID NO: 208856 - DNA, 20 bp, Artificial Sequence
  Description of Artificial Sequence: Synthetic oligonucleotide
  Target: LAMA2; (-) strand; PAM type: YTN; PAM sequence: TTA
tttgtggaaatattattatt

SEQ ID NO: 208857 - DNA, 20 bp, Artificial Sequence
  Description of Artificial Sequence: Synthetic oligonucleotide
  Target: LAMA2; (-) strand; PAM type: YTN; PAM sequence: TTT
atttgtggaaatattattat

SEQ ID NO: 208858 - DNA, 20 bp, Artificial Sequence
  Description of Artificial Sequence: Synthetic oligonucleotide
  Target: LAMA2; (-) strand; PAM type: YTN; PAM sequence: CTT
tatttgtggaaatattatta

SEQ ID NO: 208859 - DNA, 20 bp, Artificial Sequence
  Description of Artificial Sequence: Synthetic oligonucleotide
  Target: LAMA2; (-) strand; PAM type: YTN; PAM sequence: TTA
acatccctttatttgtggaa

SEQ ID NO: 208860 - DNA, 20 bp, Artificial Sequence
  Description of Artificial Sequence: Synthetic oligonucleotide
  Target: LAMA2; (-) strand; PAM type: YTN; PAM sequence: TTG
gttaacatccctttatttgt

SEQ ID NO: 208861 - DNA, 20 bp, Artificial Sequence
  Description of Artificial Sequence: Synthetic oligonucleotide
  Target: LAMA2; (-) strand; PAM type: YTN; PAM sequence: TTT
ggttaacatccctttatttg

SEQ ID NO: 208862 - DNA, 20 bp, Artificial Sequence
  Description of Artificial Sequence: Synthetic oligonucleotide
  Target: LAMA2; (-) strand; PAM type: YTN; PAM sequence: TTT
tggttaacatccctttattt

SEQ ID NO: 208863 - DNA, 20 bp, Artificial Sequence
  Description of Artificial Sequence: Synthetic oligonucleotide
  Target: LAMA2; (-) strand; PAM type: YTN; PAM sequence: TTA
attttggttaacatcccttt

SEQ ID NO: 208864 - DNA, 20 bp, Artificial Sequence
  Description of Artificial Sequence: Synthetic oligonucleotide
  Target: LAMA2; (-) strand; PAM type: YTN; PAM sequence: TTG
aacattaattttggttaaca

SEQ ID NO: 208865 - DNA, 20 bp, Artificial Sequence
  Description of Artificial Sequence: Synthetic oligonucleotide
  Target: LAMA2; (-) strand; PAM type: YTN; PAM sequence: CTT
gaacattaattttggttaac

SEQ ID NO: 208866 - DNA, 20 bp, Artificial Sequence
  Description of Artificial Sequence: Synthetic oligonucleotide
  Target: LAMA2; (-) strand; PAM type: YTN; PAM sequence: TTC
ttgaacattaattttggtta

SEQ ID NO: 208867 - DNA, 20 bp, Artificial Sequence
  Description of Artificial Sequence: Synthetic oligonucleotide
  Target: LAMA2; (-) strand; PAM type: YTN; PAM sequence: CTG
aaaggattcttgaacattaa

SEQ ID NO: 208868 - DNA, 20 bp, Artificial Sequence
  Description of Artificial Sequence: Synthetic oligonucleotide
  Target: LAMA2; (-) strand; PAM type: YTN; PAM sequence: TTA
aagaggtagagaaacactga

SEQ ID NO: 208869 - DNA, 20 bp, Artificial Sequence
  Description of Artificial Sequence: Synthetic oligonucleotide
  Target: LAMA2; (-) strand; PAM type: YTN; PAM sequence: TTT
aaagaggtagagaaacactg

SEQ ID NO: 208870 - DNA, 20 bp, Artificial Sequence
  Description of Artificial Sequence: Synthetic oligonucleotide
  Target: LAMA2; (-) strand; PAM type: YTN; PAM sequence: CTG
gaatatttaaagaggtagag

SEQ ID NO: 208871 - DNA, 20 bp, Artificial Sequence
  Description of Artificial Sequence: Synthetic oligonucleotide
  Target: LAMA2; (-) strand; PAM type: YTN; PAM sequence: TTC
tggaatatttaaagaggtag

SEQ ID NO: 208872 - DNA, 20 bp, Artificial Sequence
  Description of Artificial Sequence: Synthetic oligonucleotide
  Target: LAMA2; (-) strand; PAM type: YTN; PAM sequence: TTT
ctggaatatttaaagaggta

SEQ ID NO: 208873 - DNA, 20 bp, Artificial Sequence
  Description of Artificial Sequence: Synthetic oligonucleotide
  Target: LAMA2; (-) strand; PAM type: YTN; PAM sequence: CTG
tatcaccatttctggaatat

SEQ ID NO: 208874 - DNA, 20 bp, Artificial Sequence
  Description of Artificial Sequence: Synthetic oligonucleotide
  Target: LAMA2; (-) strand; PAM type: YTN; PAM sequence: CTG
actgtatcaccatttctgga

SEQ ID NO: 208875 - DNA, 20 bp, Artificial Sequence
  Description of Artificial Sequence: Synthetic oligonucleotide
  Target: LAMA2; (-) strand; PAM type: YTN; PAM sequence: CTC
ctgactgtatcaccatttct

SEQ ID NO: 208876 - DNA, 20 bp, Artificial Sequence
  Description of Artificial Sequence: Synthetic oligonucleotide
  Target: LAMA2; (-) strand; PAM type: YTN; PAM sequence: TTG
ctcctgactgtatcaccatt

SEQ ID NO: 208877 - DNA, 20 bp, Artificial Sequence
  Description of Artificial Sequence: Synthetic oligonucleotide
  Target: LAMA2; (-) strand; PAM type: YTN; PAM sequence: CTG
gcaatatattgctcctgact

SEQ ID NO: 208878 - DNA, 20 bp, Artificial Sequence
  Description of Artificial Sequence: Synthetic oligonucleotide
  Target: LAMA2; (-) strand; PAM type: YTN; PAM sequence: TTC
ctggcaatatattgctcctg

SEQ ID NO: 208879 - DNA, 20 bp, Artificial Sequence
  Description of Artificial Sequence: Synthetic oligonucleotide
  Target: LAMA2; (-) strand; PAM type: YTN; PAM sequence: CTG
ccaaagttcctggcaatata

SEQ ID NO: 208880 - DNA, 20 bp, Artificial Sequence
  Description of Artificial Sequence: Synthetic oligonucleotide
  Target: LAMA2; (-) strand; PAM type: YTN; PAM sequence: CTC
gtcctgccaaagttcctggc

SEQ ID NO: 208881 - DNA, 20 bp, Artificial Sequence
  Description of Artificial Sequence: Synthetic oligonucleotide
  Target: LAMA2; (-) strand; PAM type: YTN; PAM sequence: CTC
tcgtcctgccaaagttcctg

SEQ ID NO: 208882 - DNA, 20 bp, Artificial Sequence
  Description of Artificial Sequence: Synthetic oligonucleotide
  Target: LAMA2; (-) strand; PAM type: YTN; PAM sequence: CTA
tccaaaaagtaatctctcgt

SEQ ID NO: 208883 - DNA, 20 bp, Artificial Sequence
  Description of Artificial Sequence: Synthetic oligonucleotide
  Target: LAMA2; (-) strand; PAM type: YTN; PAM sequence: TTC
tatccaaaaagtaatctctc

SEQ ID NO: 208884 - DNA, 20 bp, Artificial Sequence
  Description of Artificial Sequence: Synthetic oligonucleotide
  Target: LAMA2; (-) strand; PAM type: YTN; PAM sequence: CTG
attctatccaaaaagtaatc

SEQ ID NO: 208885 - DNA, 20 bp, Artificial Sequence
  Description of Artificial Sequence: Synthetic oligonucleotide
  Target: LAMA2; (-) strand; PAM type: YTN; PAM sequence: CTG
caactgattctatccaaaaa

SEQ ID NO: 208886 - DNA, 20 bp, Artificial Sequence
  Description of Artificial Sequence: Synthetic oligonucleotide
  Target: LAMA2; (-) strand; PAM type: YTN; PAM sequence: TTC
ctgcaactgattctatccaa

SEQ ID NO: 208887 - DNA, 20 bp, Artificial Sequence
  Description of Artificial Sequence: Synthetic oligonucleotide
  Target: LAMA2; (-) strand; PAM type: YTN; PAM sequence: TTG
gaaaattcctgcaactgatt

SEQ ID NO: 208888 - DNA, 20 bp, Artificial Sequence
  Description of Artificial Sequence: Synthetic oligonucleotide
  Target: LAMA2; (-) strand; PAM type: YTN; PAM sequence: TTT
ggaaaattcctgcaactgat

SEQ ID NO: 208889 - DNA, 20 bp, Artificial Sequence
  Description of Artificial Sequence: Synthetic oligonucleotide
  Target: LAMA2; (-) strand; PAM type: YTN; PAM sequence: CTG
tgtgaatcgtttggaaaatt

SEQ ID NO: 208890 - DNA, 20 bp, Artificial Sequence
  Description of Artificial Sequence: Synthetic oligonucleotide
  Target: LAMA2; (-) strand; PAM type: YTN; PAM sequence: TTG
atgctgtgtgaatcgtttgg

SEQ ID NO: 208891 - DNA, 20 bp, Artificial Sequence
  Description of Artificial Sequence: Synthetic oligonucleotide
  Target: LAMA2; (-) strand; PAM type: YTN; PAM sequence: TTA
agttgatgctgtgtgaatcg

SEQ ID NO: 208892 - DNA, 20 bp, Artificial Sequence
  Description of Artificial Sequence: Synthetic oligonucleotide
  Target: LAMA2; (-) strand; PAM type: YTN; PAM sequence: TTC
cagaagattaagttgatgct

SEQ ID NO: 208893 - DNA, 20 bp, Artificial Sequence
  Description of Artificial Sequence: Synthetic oligonucleotide
  Target: LAMA2; (-) strand; PAM type: YTN; PAM sequence: TTT
ccagaagattaagttgatgc

SEQ ID NO: 208894 - DNA, 20 bp, Artificial Sequence
  Description of Artificial Sequence: Synthetic oligonucleotide
  Target: LAMA2; (-) strand; PAM type: YTN; PAM sequence: TTT
tccagaagattaagttgatg

SEQ ID NO: 208895 - DNA, 20 bp, Artificial Sequence
  Description of Artificial Sequence: Synthetic oligonucleotide
  Target: LAMA2; (-) strand; PAM type: YTN; PAM sequence: CTA
aaatgttttccagaagatta

SEQ ID NO: 208896 - DNA, 20 bp, Artificial Sequence
  Description of Artificial Sequence: Synthetic oligonucleotide
  Target: LAMA2; (-) strand; PAM type: YTN; PAM sequence: TTG
tggtccctaaaatgttttcc

SEQ ID NO: 208897 - DNA, 20 bp, Artificial Sequence
  Description of Artificial Sequence: Synthetic oligonucleotide
  Target: LAMA2; (-) strand; PAM type: YTN; PAM sequence: TTT
gtggtccctaaaatgttttc

SEQ ID NO: 208898 - DNA, 20 bp, Artificial Sequence
  Description of Artificial Sequence: Synthetic oligonucleotide
  Target: LAMA2; (-) strand; PAM type: YTN; PAM sequence: CTG
ggtacaatatgtatttgtgg

SEQ ID NO: 208899 - DNA, 20 bp, Artificial Sequence
  Description of Artificial Sequence: Synthetic oligonucleotide
  Target: LAMA2; (-) strand; PAM type: YTN; PAM sequence: CTA
catcctgggtacaatatgta

SEQ ID NO: 208900 - DNA, 20 bp, Artificial Sequence
  Description of Artificial Sequence: Synthetic oligonucleotide
  Target: LAMA2; (-) strand; PAM type: YTN; PAM sequence: CTG
cagtaagtacactacatcct

SEQ ID NO: 208901 - DNA, 20 bp, Artificial Sequence
  Description of Artificial Sequence: Synthetic oligonucleotide
  Target: LAMA2; (-) strand; PAM type: YTN; PAM sequence: TTA
tgcatgccaagaaaaatcat

SEQ ID NO: 208902 - DNA, 20 bp, Artificial Sequence
  Description of Artificial Sequence: Synthetic oligonucleotide
  Target: LAMA2; (-) strand; PAM type: YTN; PAM sequence: TTG
aattatgcatgccaagaaaa

SEQ ID NO: 208903 - DNA, 20 bp, Artificial Sequence
  Description of Artificial Sequence: Synthetic oligonucleotide
  Target: LAMA2; (-) strand; PAM type: YTN; PAM sequence: TTT
gaattatgcatgccaagaaa

SEQ ID NO: 208904 - DNA, 20 bp, Artificial Sequence
  Description of Artificial Sequence: Synthetic oligonucleotide
  Target: LAMA2; (-) strand; PAM type: YTN; PAM sequence: CTT
tgaattatgcatgccaagaa

SEQ ID NO: 208905 - DNA, 20 bp, Artificial Sequence
  Description of Artificial Sequence: Synthetic oligonucleotide
  Target: LAMA2; (-) strand; PAM type: YTN; PAM sequence: CTG
ggtctttgaattatgcatgc

SEQ ID NO: 208906 - DNA, 20 bp, Artificial Sequence
  Description of Artificial Sequence: Synthetic oligonucleotide
  Target: LAMA2; (-) strand; PAM type: YTN; PAM sequence: CTA
tctgggtctttgaattatgc

SEQ ID NO: 208907 - DNA, 20 bp, Artificial Sequence
  Description of Artificial Sequence: Synthetic oligonucleotide
  Target: LAMA2; (-) strand; PAM type: YTN; PAM sequence: TTC
tatctgggtctttgaattat

SEQ ID NO: 208908 - DNA, 20 bp, Artificial Sequence
  Description of Artificial Sequence: Synthetic oligonucleotide
  Target: LAMA2; (-) strand; PAM type: YTN; PAM sequence: TTT
ctatctgggtctttgaatta

SEQ ID NO: 208909 - DNA, 20 bp, Artificial Sequence
  Description of Artificial Sequence: Synthetic oligonucleotide
  Target: LAMA2; (-) strand; PAM type: YTN; PAM sequence: CTA
aaatcagtcatttctatctg

SEQ ID NO: 208910 - DNA, 20 bp, Artificial Sequence
  Description of Artificial Sequence: Synthetic oligonucleotide
  Target: LAMA2; (-) strand; PAM type: YTN; PAM sequence: TTA
gaagtgctaaaatcagtcat

SEQ ID NO: 208911 - DNA, 20 bp, Artificial Sequence
  Description of Artificial Sequence: Synthetic oligonucleotide
  Target: LAMA2; (-) strand; PAM type: YTN; PAM sequence: TTG
ttagaagtgctaaaatcagt

SEQ ID NO: 208912 - DNA, 20 bp, Artificial Sequence
  Description of Artificial Sequence: Synthetic oligonucleotide
  Target: LAMA2; (-) strand; PAM type: YTN; PAM sequence: TTA
ttgttagaagtgctaaaatc

SEQ ID NO: 208913 - DNA, 20 bp, Artificial Sequence
  Description of Artificial Sequence: Synthetic oligonucleotide
  Target: LAMA2; (-) strand; PAM type: YTN; PAM sequence: TTT
attgttagaagtgctaaaat

SEQ ID NO: 208914 - DNA, 20 bp, Artificial Sequence
  Description of Artificial Sequence: Synthetic oligonucleotide
  Target: LAMA2; (-) strand; PAM type: YTN; PAM sequence: TTT
tattgttagaagtgctaaaa

SEQ ID NO: 208915 - DNA, 20 bp, Artificial Sequence
  Description of Artificial Sequence: Synthetic oligonucleotide
  Target: LAMA2; (-) strand; PAM type: YTN; PAM sequence: TTG
ttttattgttagaagtgcta

SEQ ID NO: 208916 - DNA, 20 bp, Artificial Sequence
  Description of Artificial Sequence: Synthetic oligonucleotide
  Target: LAMA2; (-) strand; PAM type: YTN; PAM sequence: TTT
gttttattgttagaagtgct

SEQ ID NO: 208917 - DNA, 20 bp, Artificial Sequence
  Description of Artificial Sequence: Synthetic oligonucleotide
  Target: LAMA2; (-) strand; PAM type: YTN; PAM sequence: TTT
tgttttattgttagaagtgc

SEQ ID NO: 208918 - DNA, 20 bp, Artificial Sequence
  Description of Artificial Sequence: Synthetic oligonucleotide
  Target: LAMA2; (-) strand; PAM type: YTN; PAM sequence: CTT
ttgttttattgttagaagtg

SEQ ID NO: 208919 - DNA, 20 bp, Artificial Sequence
  Description of Artificial Sequence: Synthetic oligonucleotide
  Target: LAMA2; (-) strand; PAM type: YTN; PAM sequence: TTG
tagaagagcttttgttttat

SEQ ID NO: 208920 - DNA, 20 bp, Artificial Sequence
  Description of Artificial Sequence: Synthetic oligonucleotide
  Target: LAMA2; (-) strand; PAM type: YTN; PAM sequence: CTT
gtagaagagcttttgtttta

SEQ ID NO: 208921 - DNA, 20 bp, Artificial Sequence
  Description of Artificial Sequence: Synthetic oligonucleotide
  Target: LAMA2; (-) strand; PAM type: YTN; PAM sequence: CTC
ttgtagaagagcttttgttt

SEQ ID NO: 208922 - DNA, 20 bp, Artificial Sequence
  Description of Artificial Sequence: Synthetic oligonucleotide
  Target: LAMA2; (-) strand; PAM type: YTN; PAM sequence: TTC
tcttgtagaagagcttttgt

SEQ ID NO: 208923 - DNA, 20 bp, Artificial Sequence
  Description of Artificial Sequence: Synthetic oligonucleotide
  Target: LAMA2; (-) strand; PAM type: YTN; PAM sequence: TTA
acatgaatgaagatattctc

SEQ ID NO: 208924 - DNA, 20 bp, Artificial Sequence
  Description of Artificial Sequence: Synthetic oligonucleotide
  Target: LAMA2; (-) strand; PAM type: YTN; PAM sequence: TTT
aacatgaatgaagatattct

SEQ ID NO: 208925 - DNA, 20 bp, Artificial Sequence
  Description of Artificial Sequence: Synthetic oligonucleotide
  Target: LAMA2; (-) strand; PAM type: YTN; PAM sequence: TTG
atatgtttaacatgaatgaa

SEQ ID NO: 208926 - DNA, 20 bp, Artificial Sequence
  Description of Artificial Sequence: Synthetic oligonucleotide
  Target: LAMA2; (-) strand; PAM type: YTN; PAM sequence: TTG
agatattgatatgtttaaca

SEQ ID NO: 208927 - DNA, 20 bp, Artificial Sequence
  Description of Artificial Sequence: Synthetic oligonucleotide
  Target: LAMA2; (-) strand; PAM type: YTN; PAM sequence: CTT
gagatattgatatgtttaac

SEQ ID NO: 208928 - DNA, 20 bp, Artificial Sequence
  Description of Artificial Sequence: Synthetic oligonucleotide
  Target: LAMA2; (-) strand; PAM type: YTN; PAM sequence: TTA
cttgagatattgatatgttt

SEQ ID NO: 208929 - DNA, 20 bp, Artificial Sequence
  Description of Artificial Sequence: Synthetic oligonucleotide
  Target: LAMA2; (-) strand; PAM type: YTN; PAM sequence: CTT
acttgagatattgatatgtt

SEQ ID NO: 208930 - DNA, 20 bp, Artificial Sequence
  Description of Artificial Sequence: Synthetic oligonucleotide
  Target: LAMA2; (-) strand; PAM type: YTN; PAM sequence: TTC
atcatacttacttgagatat

SEQ ID NO: 208931 - DNA, 20 bp, Artificial Sequence
  Description of Artificial Sequence: Synthetic oligonucleotide
  Target: LAMA2; (-) strand; PAM type: YTN; PAM sequence: CTC
aaaattcatcatacttactt

SEQ ID NO: 208932 - DNA, 20 bp, Artificial Sequence
  Description of Artificial Sequence: Synthetic oligonucleotide
  Target: LAMA2; (-) strand; PAM type: YTN; PAM sequence: CTA
tctcaaaattcatcatactt

SEQ ID NO: 208933 - DNA, 20 bp, Artificial Sequence
  Description of Artificial Sequence: Synthetic oligonucleotide
  Target: LAMA2; (-) strand; PAM type: YTN; PAM sequence: TTC
cccatgaccaccagatgaga

SEQ ID NO: 208934 - DNA, 20 bp, Artificial Sequence
  Description of Artificial Sequence: Synthetic oligonucleotide
  Target: LAMA2; (-) strand; PAM type: YTN; PAM sequence: TTT
ccccatgaccaccagatgag

SEQ ID NO: 208935 - DNA, 20 bp, Artificial Sequence
  Description of Artificial Sequence: Synthetic oligonucleotide
  Target: LAMA2; (-) strand; PAM type: YTN; PAM sequence: CTC
caaagatatccaagaaagag

SEQ ID NO: 208936 - DNA, 20 bp, Artificial Sequence
  Description of Artificial Sequence: Synthetic oligonucleotide
  Target: LAMA2; (-) strand; PAM type: YTN; PAM sequence: CTC
tccaaagatatccaagaaag

SEQ ID NO: 208937 - DNA, 20 bp, Artificial Sequence
  Description of Artificial Sequence: Synthetic oligonucleotide
  Target: LAMA2; (-) strand; PAM type: YTN; PAM sequence: CTA
aagagtcaaatagtatactc

SEQ ID NO: 208938 - DNA, 20 bp, Artificial Sequence
  Description of Artificial Sequence: Synthetic oligonucleotide
  Target: LAMA2; (-) strand; PAM type: YTN; PAM sequence: TTG
actaaagagtcaaatagtat

SEQ ID NO: 208939 - DNA, 20 bp, Artificial Sequence
  Description of Artificial Sequence: Synthetic oligonucleotide
  Target: LAMA2; (-) strand; PAM type: YTN; PAM sequence: TTT
gactaaagagtcaaatagta

SEQ ID NO: 208940 - DNA, 20 bp, Artificial Sequence
  Description of Artificial Sequence: Synthetic oligonucleotide
  Target: LAMA2; (-) strand; PAM type: YTN; PAM sequence: CTC
agtttgactaaagagtcaaa

SEQ ID NO: 208941 - DNA, 20 bp, Artificial Sequence
  Description of Artificial Sequence: Synthetic oligonucleotide
  Target: LAMA2; (-) strand; PAM type: YTN; PAM sequence: CTG
atcctcagtttgactaaaga

SEQ ID NO: 208942 - DNA, 20 bp, Artificial Sequence
  Description of Artificial Sequence: Synthetic oligonucleotide
  Target: LAMA2; (-) strand; PAM type: YTN; PAM sequence: TTA
aaatactgatcctcagtttg

SEQ ID NO: 208943 - DNA, 20 bp, Artificial Sequence
  Description of Artificial Sequence: Synthetic oligonucleotide
  Target: LAMA2; (-) strand; PAM type: YTN; PAM sequence: TTT
aaaatactgatcctcagttt

SEQ ID NO: 208944 - DNA, 20 bp, Artificial Sequence
  Description of Artificial Sequence: Synthetic oligonucleotide
  Target: LAMA2; (-) strand; PAM type: YTN; PAM sequence: TTT
taaaatactgatcctcagtt

SEQ ID NO: 208945 - DNA, 20 bp, Artificial Sequence
  Description of Artificial Sequence: Synthetic oligonucleotide
  Target: LAMA2; (-) strand; PAM type: YTN; PAM sequence: CTT
ttaaaatactgatcctcagt

SEQ ID NO: 208946 - DNA, 20 bp, Artificial Sequence
  Description of Artificial Sequence: Synthetic oligonucleotide
  Target: LAMA2; (-) strand; PAM type: YTN; PAM sequence: TTA
tagacttttaaaatactgat

SEQ ID NO: 208947 - DNA, 20 bp, Artificial Sequence
  Description of Artificial Sequence: Synthetic oligonucleotide
  Target: LAMA2; (-) strand; PAM type: YTN; PAM sequence: TTT
atagacttttaaaatactga

SEQ ID NO: 208948 - DNA, 20 bp, Artificial Sequence
  Description of Artificial Sequence: Synthetic oligonucleotide
  Target: LAMA2; (-) strand; PAM type: YTN; PAM sequence: TTT
tatagacttttaaaatactg

SEQ ID NO: 208949 - DNA, 20 bp, Artificial Sequence
  Description of Artificial Sequence: Synthetic oligonucleotide
  Target: LAMA2; (-) strand; PAM type: YTN; PAM sequence: TTA
agtattttatagacttttaa

SEQ ID NO: 208950 - DNA, 20 bp, Artificial Sequence
  Description of Artificial Sequence: Synthetic oligonucleotide
  Target: LAMA2; (-) strand; PAM type: YTN; PAM sequence: CTT
aagtattttatagactttta

SEQ ID NO: 208951 - DNA, 20 bp, Artificial Sequence
  Description of Artificial Sequence: Synthetic oligonucleotide
  Target: LAMA2; (-) strand; PAM type: YTN; PAM sequence: CTA
caagatggcttaagtatttt

SEQ ID NO: 208952 - DNA, 20 bp, Artificial Sequence
  Description of Artificial Sequence: Synthetic oligonucleotide
  Target: LAMA2; (-) strand; PAM type: YTN; PAM sequence: TTC
tacaagatggcttaagtatt

SEQ ID NO: 208953 - DNA, 20 bp, Artificial Sequence
  Description of Artificial Sequence: Synthetic oligonucleotide
  Target: LAMA2; (-) strand; PAM type: YTN; PAM sequence: TTT
ctacaagatggcttaagtat

SEQ ID NO: 208954 - DNA, 20 bp, Artificial Sequence
  Description of Artificial Sequence: Synthetic oligonucleotide
  Target: LAMA2; (-) strand; PAM type: YTN; PAM sequence: TTA
tttctacaagatggcttaag

SEQ ID NO: 208955 - DNA, 20 bp, Artificial Sequence
  Description of Artificial Sequence: Synthetic oligonucleotide
  Target: LAMA2; (-) strand; PAM type: YTN; PAM sequence: TTT
atttctacaagatggcttaa

SEQ ID NO: 208956 - DNA, 20 bp, Artificial Sequence
  Description of Artificial Sequence: Synthetic oligonucleotide
  Target: LAMA2; (-) strand; PAM type: YTN; PAM sequence: CTA
tttatttctacaagatggct

SEQ ID NO: 208957 - DNA, 20 bp, Artificial Sequence
  Description of Artificial Sequence: Synthetic oligonucleotide
  Target: LAMA2; (-) strand; PAM type: YTN; PAM sequence: CTG
ggtgggaagactatttattt

SEQ ID NO: 208958 - DNA, 20 bp, Artificial Sequence
  Description of Artificial Sequence: Synthetic oligonucleotide
  Target: LAMA2; (-) strand; PAM type: YTN; PAM sequence: TTA
tggtctgggtgggaagacta

SEQ ID NO: 208959 - DNA, 20 bp, Artificial Sequence
  Description of Artificial Sequence: Synthetic oligonucleotide
  Target: LAMA2; (-) strand; PAM type: YTN; PAM sequence: TTC
agagattatggtctgggtgg

SEQ ID NO: 208960 - DNA, 20 bp, Artificial Sequence
  Description of Artificial Sequence: Synthetic oligonucleotide
  Target: LAMA2; (-) strand; PAM type: YTN; PAM sequence: TTT
cagagattatggtctgggtg

SEQ ID NO: 208961 - DNA, 20 bp, Artificial Sequence
  Description of Artificial Sequence: Synthetic oligonucleotide
  Target: LAMA2; (-) strand; PAM type: YTN; PAM sequence: TTA
tttcagagattatggtctgg

SEQ ID NO: 208962 - DNA, 20 bp, Artificial Sequence
  Description of Artificial Sequence: Synthetic oligonucleotide
  Target: LAMA2; (-) strand; PAM type: YTN; PAM sequence: CTA
ataattatttcagagattat

SEQ ID NO: 208963 - DNA, 20 bp, Artificial Sequence
  Description of Artificial Sequence: Synthetic oligonucleotide
  Target: LAMA2; (-) strand; PAM type: YTN; PAM sequence: TTC
ctaataattatttcagagat

SEQ ID NO: 208964 - DNA, 20 bp, Artificial Sequence
  Description of Artificial Sequence: Synthetic oligonucleotide
  Target: LAMA2; (-) strand; PAM type: YTN; PAM sequence: TTG
aaagaaaaagaaaattccta

SEQ ID NO: 208965 - DNA, 20 bp, Artificial Sequence
  Description of Artificial Sequence: Synthetic oligonucleotide
  Target: LAMA2; (-) strand; PAM type: YTN; PAM sequence: TTT
gaaagaaaaagaaaattcct

SEQ ID NO: 208966 - DNA, 20 bp, Artificial Sequence
  Description of Artificial Sequence: Synthetic oligonucleotide
  Target: LAMA2; (-) strand; PAM type: YTN; PAM sequence: TTC
caaagtgtttgaaagaaaaa

SEQ ID NO: 208967 - DNA, 20 bp, Artificial Sequence
  Description of Artificial Sequence: Synthetic oligonucleotide
  Target: LAMA2; (-) strand; PAM type: YTN; PAM sequence: TTA
taattccaaagtgtttgaaa

SEQ ID NO: 208968 - DNA, 20 bp, Artificial Sequence
  Description of Artificial Sequence: Synthetic oligonucleotide
  Target: LAMA2; (-) strand; PAM type: YTN; PAM sequence: CTA
aattataattccaaagtgtt

SEQ ID NO: 208969 - DNA, 20 bp, Artificial Sequence
  Description of Artificial Sequence: Synthetic oligonucleotide
  Target: LAMA2; (-) strand; PAM type: YTN; PAM sequence: TTA
aagaatctaaattataattc

SEQ ID NO: 208970 - DNA, 20 bp, Artificial Sequence
  Description of Artificial Sequence: Synthetic oligonucleotide
  Target: LAMA2; (-) strand; PAM type: YTN; PAM sequence: TTT
aaagaatctaaattataatt

SEQ ID NO: 208971 - DNA, 20 bp, Artificial Sequence
  Description of Artificial Sequence: Synthetic oligonucleotide
  Target: LAMA2; (-) strand; PAM type: YTN; PAM sequence: TTT
taaagaatctaaattataat

SEQ ID NO: 208972 - DNA, 20 bp, Artificial Sequence
  Description of Artificial Sequence: Synthetic oligonucleotide
  Target: LAMA2; (-) strand; PAM type: YTN; PAM sequence: TTT
ttaaagaatctaaattataa

SEQ ID NO: 208973 - DNA, 20 bp, Artificial Sequence
  Description of Artificial Sequence: Synthetic oligonucleotide
  Target: LAMA2; (-) strand; PAM type: YTN; PAM sequence: CTC
agtttttaaagaatctaaat

SEQ ID NO: 208974 - DNA, 20 bp, Artificial Sequence
  Description of Artificial Sequence: Synthetic oligonucleotide
  Target: LAMA2; (-) strand; PAM type: YTN; PAM sequence: TTG
aaaaaacagtcataaaactc

SEQ ID NO: 208975 - DNA, 20 bp, Artificial Sequence
  Description of Artificial Sequence: Synthetic oligonucleotide
  Target: LAMA2; (-) strand; PAM type: YTN; PAM sequence: TTT
gaaaaaacagtcataaaact

SEQ ID NO: 208976 - DNA, 20 bp, Artificial Sequence
  Description of Artificial Sequence: Synthetic oligonucleotide
  Target: LAMA2; (-) strand; PAM type: YTN; PAM sequence: TTT
tgaaaaaacagtcataaaac

SEQ ID NO: 208977 - DNA, 20 bp, Artificial Sequence
  Description of Artificial Sequence: Synthetic oligonucleotide
  Target: LAMA2; (-) strand; PAM type: YTN; PAM sequence: TTT
ttgaaaaaacagtcataaaa

SEQ ID NO: 208978 - DNA, 20 bp, Artificial Sequence
  Description of Artificial Sequence: Synthetic oligonucleotide
  Target: LAMA2; (-) strand; PAM type: YTN; PAM sequence: TTT
tttgaaaaaacagtcataaa

SEQ ID NO: 208979 - DNA, 20 bp, Artificial Sequence
  Description of Artificial Sequence: Synthetic oligonucleotide
  Target: LAMA2; (-) strand; PAM type: YTN; PAM sequence: CTT
ttttgaaaaaacagtcataa

SEQ ID NO: 208980 - DNA, 20 bp, Artificial Sequence
  Description of Artificial Sequence: Synthetic oligonucleotide
  Target: LAMA2; (-) strand; PAM type: YTN; PAM sequence: TTG
aagcttttttgaaaaaacag

SEQ ID NO: 208981 - DNA, 20 bp, Artificial Sequence
  Description of Artificial Sequence: Synthetic oligonucleotide
  Target: LAMA2; (-) strand; PAM type: YTN; PAM sequence: TTT
gaagcttttttgaaaaaaca

SEQ ID NO: 208982 - DNA, 20 bp, Artificial Sequence
  Description of Artificial Sequence: Synthetic oligonucleotide
  Target: LAMA2; (-) strand; PAM type: YTN; PAM sequence: TTT
tgaagcttttttgaaaaaac

SEQ ID NO: 208983 - DNA, 20 bp, Artificial Sequence
  Description of Artificial Sequence: Synthetic oligonucleotide
  Target: LAMA2; (-) strand; PAM type: YTN; PAM sequence: TTG
ccaaaattttgaagcttttt

SEQ ID NO: 208984 - DNA, 20 bp, Artificial Sequence
  Description of Artificial Sequence: Synthetic oligonucleotide
  Target: LAMA2; (-) strand; PAM type: YTN; PAM sequence: TTT
gccaaaattttgaagctttt

SEQ ID NO: 208985 - DNA, 20 bp, Artificial Sequence
  Description of Artificial Sequence: Synthetic oligonucleotide
  Target: LAMA2; (-) strand; PAM type: YTN; PAM sequence: TTG
gaaaaaaaaatgcaacattt

SEQ ID NO: 208986 - DNA, 20 bp, Artificial Sequence
  Description of Artificial Sequence: Synthetic oligonucleotide
  Target: LAMA2; (-) strand; PAM type: YTN; PAM sequence: CTA
attggaaaaaaaaatgcaac

SEQ ID NO: 208987 - DNA, 20 bp, Artificial Sequence
  Description of Artificial Sequence: Synthetic oligonucleotide
  Target: LAMA2; (-) strand; PAM type: YTN; PAM sequence: TTA
tcctaattggaaaaaaaaat

SEQ ID NO: 208988 - DNA, 20 bp, Artificial Sequence
  Description of Artificial Sequence: Synthetic oligonucleotide
  Target: LAMA2; (-) strand; PAM type: YTN; PAM sequence: CTT
atcctaattggaaaaaaaaa

SEQ ID NO: 208989 - DNA, 20 bp, Artificial Sequence
  Description of Artificial Sequence: Synthetic oligonucleotide
  Target: LAMA2; (-) strand; PAM type: YTN; PAM sequence: TTA
cttatcctaattggaaaaaa

SEQ ID NO: 208990 - DNA, 20 bp, Artificial Sequence
  Description of Artificial Sequence: Synthetic oligonucleotide
  Target: LAMA2; (-) strand; PAM type: YTN; PAM sequence: TTG
aattacttatcctaattgga

SEQ ID NO: 208991 - DNA, 20 bp, Artificial Sequence
  Description of Artificial Sequence: Synthetic oligonucleotide
  Target: LAMA2; (-) strand; PAM type: YTN; PAM sequence: TTT
gaattacttatcctaattgg

SEQ ID NO: 208992 - DNA, 20 bp, Artificial Sequence
  Description of Artificial Sequence: Synthetic oligonucleotide
  Target: LAMA2; (-) strand; PAM type: YTN; PAM sequence: TTT
tgaattacttatcctaattg

SEQ ID NO: 208993 - DNA, 20 bp, Artificial Sequence
  Description of Artificial Sequence: Synthetic oligonucleotide
  Target: LAMA2; (-) strand; PAM type: YTN; PAM sequence: TTT
ttgaattacttatcctaatt

SEQ ID NO: 208994 - DNA, 20 bp, Artificial Sequence
  Description of Artificial Sequence: Synthetic oligonucleotide
  Target: LAMA2; (-) strand; PAM type: YTN; PAM sequence: CTT
tttgaattacttatcctaat

SEQ ID NO: 208995 - DNA, 20 bp, Artificial Sequence
  Description of Artificial Sequence: Synthetic oligonucleotide
  Target: LAMA2; (-) strand; PAM type: YTN; PAM sequence: TTG
tgactttttgaattacttat

SEQ ID NO: 208996 - DNA, 20 bp, Artificial Sequence
  Description of Artificial Sequence: Synthetic oligonucleotide
  Target: LAMA2; (-) strand; PAM type: YTN; PAM sequence: CTG
aagcatgttgtgactttttg

SEQ ID NO: 208997 - DNA, 20 bp, Artificial Sequence
  Description of Artificial Sequence: Synthetic oligonucleotide
  Target: LAMA2; (-) strand; PAM type: YTN; PAM sequence: TTG
gctgaagcatgttgtgactt

SEQ ID NO: 208998 - DNA, 20 bp, Artificial Sequence
  Description of Artificial Sequence: Synthetic oligonucleotide
  Target: LAMA2; (-) strand; PAM type: YTN; PAM sequence: TTT
ggctgaagcatgttgtgact

SEQ ID NO: 208999 - DNA, 20 bp, Artificial Sequence
  Description of Artificial Sequence: Synthetic oligonucleotide
  Target: LAMA2; (-) strand; PAM type: YTN; PAM sequence: TTT
tggctgaagcatgttgtgac

SEQ ID NO: 209000 - DNA, 20 bp, Artificial Sequence
  Description of Artificial Sequence: Synthetic oligonucleotide
  Target: LAMA2; (-) strand; PAM type: YTN; PAM sequence: TTT
ttggctgaagcatgttgtga

SEQ ID NO: 209001 - DNA, 20 bp, Artificial Sequence
  Description of Artificial Sequence: Synthetic oligonucleotide
  Target: LAMA2; (-) strand; PAM type: YTN; PAM sequence: TTC
acaatggatttttggctgaa

SEQ ID NO: 209002 - DNA, 20 bp, Artificial Sequence
  Description of Artificial Sequence: Synthetic oligonucleotide
  Target: LAMA2; (-) strand; PAM type: YTN; PAM sequence: TTT
cacaatggatttttggctga

SEQ ID NO: 209003 - DNA, 20 bp, Artificial Sequence
  Description of Artificial Sequence: Synthetic oligonucleotide
  Target: LAMA2; (-) strand; PAM type: YTN; PAM sequence: TTT
tcacaatggatttttggctg

SEQ ID NO: 209004 - DNA, 20 bp, Artificial Sequence
  Description of Artificial Sequence: Synthetic oligonucleotide
  Target: LAMA2; (-) strand; PAM type: YTN; PAM sequence: CTA
ttttcacaatggatttttgg

SEQ ID NO: 209005 - DNA, 20 bp, Artificial Sequence
  Description of Artificial Sequence: Synthetic oligonucleotide
  Target: LAMA2; (-) strand; PAM type: YTN; PAM sequence: TTC
tattttcacaatggattttt

SEQ ID NO: 209006 - DNA, 20 bp, Artificial Sequence
  Description of Artificial Sequence: Synthetic oligonucleotide
  Target: LAMA2; (-) strand; PAM type: YTN; PAM sequence: TTT
ctattttcacaatggatttt

SEQ ID NO: 209007 - DNA, 20 bp, Artificial Sequence
  Description of Artificial Sequence: Synthetic oligonucleotide
  Target: LAMA2; (-) strand; PAM type: YTN; PAM sequence: CTA
atttctattttcacaatgga

SEQ ID NO: 209008 - DNA, 20 bp, Artificial Sequence
  Description of Artificial Sequence: Synthetic oligonucleotide
  Target: LAMA2; (-) strand; PAM type: YTN; PAM sequence: TTC
taatttctattttcacaatg

SEQ ID NO: 209009 - DNA, 20 bp, Artificial Sequence
  Description of Artificial Sequence: Synthetic oligonucleotide
  Target: LAMA2; (-) strand; PAM type: YTN; PAM sequence: TTT
ctaatttctattttcacaat

SEQ ID NO: 209010 - DNA, 20 bp, Artificial Sequence
  Description of Artificial Sequence: Synthetic oligonucleotide
  Target: LAMA2; (-) strand; PAM type: YTN; PAM sequence: TTG
aaagatcatttctaatttct

SEQ ID NO: 209011 - DNA, 20 bp, Artificial Sequence
  Description of Artificial Sequence: Synthetic oligonucleotide
  Target: LAMA2; (-) strand; PAM type: YTN; PAM sequence: TTT
gaaagatcatttctaatttc

SEQ ID NO: 209012 - DNA, 20 bp, Artificial Sequence
  Description of Artificial Sequence: Synthetic oligonucleotide
  Target: LAMA2; (-) strand; PAM type: YTN; PAM sequence: TTT
tgaaagatcatttctaattt

SEQ ID NO: 209013 - DNA, 20 bp, Artificial Sequence
  Description of Artificial Sequence: Synthetic oligonucleotide
  Target: LAMA2; (-) strand; PAM type: YTN; PAM sequence: TTT
ttgaaagatcatttctaatt

SEQ ID NO: 209014 - DNA, 20 bp, Artificial Sequence
  Description of Artificial Sequence: Synthetic oligonucleotide
  Target: LAMA2; (-) strand; PAM type: YTN; PAM sequence: TTT
tttgaaagatcatttctaat

SEQ ID NO: 209015 - DNA, 20 bp, Artificial Sequence
  Description of Artificial Sequence: Synthetic oligonucleotide
  Target: LAMA2; (-) strand; PAM type: YTN; PAM sequence: TTA
attttttgaaagatcatttc

SEQ ID NO: 209016 - DNA, 20 bp, Artificial Sequence
  Description of Artificial Sequence: Synthetic oligonucleotide
  Target: LAMA2; (-) strand; PAM type: YTN; PAM sequence: CTT
aattttttgaaagatcattt

SEQ ID NO: 209017 - DNA, 20 bp, Artificial Sequence
  Description of Artificial Sequence: Synthetic oligonucleotide
  Target: LAMA2; (-) strand; PAM type: YTN; PAM sequence: TTC
ttaattttttgaaagatcat

SEQ ID NO: 209018 - DNA, 20 bp, Artificial Sequence
  Description of Artificial Sequence: Synthetic oligonucleotide
  Target: LAMA2; (-) strand; PAM type: YTN; PAM sequence: TTT
cttaattttttgaaagatca

SEQ ID NO: 209019 - DNA, 20 bp, Artificial Sequence
  Description of Artificial Sequence: Synthetic oligonucleotide
  Target: LAMA2; (-) strand; PAM type: YTN; PAM sequence: TTC
aaaaaatgatttcttaattt

SEQ ID NO: 209020 - DNA, 20 bp, Artificial Sequence
  Description of Artificial Sequence: Synthetic oligonucleotide
  Target: LAMA2; (-) strand; PAM type: YTN; PAM sequence: TTT
caaaaaatgatttcttaatt

SEQ ID NO: 209021 - DNA, 20 bp, Artificial Sequence
  Description of Artificial Sequence: Synthetic oligonucleotide
  Target: LAMA2; (-) strand; PAM type: YTN; PAM sequence: TTT
tcaaaaaatgatttcttaat

SEQ ID NO: 209022 - DNA, 20 bp, Artificial Sequence
  Description of Artificial Sequence: Synthetic oligonucleotide
  Target: LAMA2; (-) strand; PAM type: YTN; PAM sequence: TTT
ttcaaaaaatgatttcttaa

SEQ ID NO: 209023 - DNA, 20 bp, Artificial Sequence
  Description of Artificial Sequence: Synthetic oligonucleotide
  Target: LAMA2; (-) strand; PAM type: YTN; PAM sequence: CTT
tttcaaaaaatgatttctta

SEQ ID NO: 209024 - DNA, 20 bp, Artificial Sequence
  Description of Artificial Sequence: Synthetic oligonucleotide
  Target: LAMA2; (-) strand; PAM type: YTN; PAM sequence: CTC
cacactttttcaaaaaatga

SEQ ID NO: 209025 - DNA, 20 bp, Artificial Sequence
  Description of Artificial Sequence: Synthetic oligonucleotide
  Target: LAMA2; (-) strand; PAM type: YTN; PAM sequence: TTA
atgactccacactttttcaa

SEQ ID NO: 209026 - DNA, 20 bp, Artificial Sequence
  Description of Artificial Sequence: Synthetic oligonucleotide
  Target: LAMA2; (-) strand; PAM type: YTN; PAM sequence: TTA
attaatgactccacactttt

SEQ ID NO: 209027 - DNA, 20 bp, Artificial Sequence
  Description of Artificial Sequence: Synthetic oligonucleotide
  Target: LAMA2; (-) strand; PAM type: YTN; PAM sequence: CTT
aattaatgactccacacttt

SEQ ID NO: 209028 - DNA, 20 bp, Artificial Sequence
  Description of Artificial Sequence: Synthetic oligonucleotide
  Target: LAMA2; (-) strand; PAM type: YTN; PAM sequence: TTG
agaaggcacaaaaggtcaaa

SEQ ID NO: 209029 - DNA, 20 bp, Artificial Sequence
  Description of Artificial Sequence: Synthetic oligonucleotide
  Target: LAMA2; (-) strand; PAM type: YTN; PAM sequence: TTT
gagaaggcacaaaaggtcaa

SEQ ID NO: 209030 - DNA, 20 bp, Artificial Sequence
  Description of Artificial Sequence: Synthetic oligonucleotide
  Target: LAMA2; (-) strand; PAM type: YTN; PAM sequence: TTG
aaaatggacatttgagaagg

SEQ ID NO: 209031 - DNA, 20 bp, Artificial Sequence
  Description of Artificial Sequence: Synthetic oligonucleotide
  Target: LAMA2; (-) strand; PAM type: YTN; PAM sequence: TTT
gaaaatggacatttgagaag

SEQ ID NO: 209032 - DNA, 20 bp, Artificial Sequence
  Description of Artificial Sequence: Synthetic oligonucleotide
  Target: LAMA2; (-) strand; PAM type: YTN; PAM sequence: TTT
tgaaaatggacatttgagaa

SEQ ID NO: 209033 - DNA, 20 bp, Artificial Sequence
  Description of Artificial Sequence: Synthetic oligonucleotide
  Target: LAMA2; (-) strand; PAM type: YTN; PAM sequence: TTT
ttgaaaatggacatttgaga

SEQ ID NO: 209034 - DNA, 20 bp, Artificial Sequence
  Description of Artificial Sequence: Synthetic oligonucleotide
  Target: LAMA2; (-) strand; PAM type: YTN; PAM sequence: CTT
tttgaaaatggacatttgag

SEQ ID NO: 209035 - DNA, 20 bp, Artificial Sequence
  Description of Artificial Sequence: Synthetic oligonucleotide
  Target: LAMA2; (-) strand; PAM type: YTN; PAM sequence: CTG
tctttttgaaaatggacatt

SEQ ID NO: 209036 - DNA, 20 bp, Artificial Sequence
  Description of Artificial Sequence: Synthetic oligonucleotide
  Target: LAMA2; (-) strand; PAM type: YTN; PAM sequence: CTG
catctgtctttttgaaaatg

SEQ ID NO: 209037 - DNA, 20 bp, Artificial Sequence
  Description of Artificial Sequence: Synthetic oligonucleotide
  Target: LAMA2; (-) strand; PAM type: YTN; PAM sequence: CTA
actgcatctgtctttttgaa

SEQ ID NO: 209038 - DNA, 20 bp, Artificial Sequence
  Description of Artificial Sequence: Synthetic oligonucleotide
  Target: LAMA2; (-) strand; PAM type: YTN; PAM sequence: TTC
taactgcatctgtctttttg

SEQ ID NO: 209039 - DNA, 20 bp, Artificial Sequence
  Description of Artificial Sequence: Synthetic oligonucleotide
  Target: LAMA2; (-) strand; PAM type: YTN; PAM sequence: CTT
ctaactgcatctgtcttttt

SEQ ID NO: 209040 - DNA, 20 bp, Artificial Sequence
  Description of Artificial Sequence: Synthetic oligonucleotide
  Target: LAMA2; (-) strand; PAM type: YTN; PAM sequence: TTC
cttctaactgcatctgtctt

SEQ ID NO: 209041 - DNA, 20 bp, Artificial Sequence
  Description of Artificial Sequence: Synthetic oligonucleotide
  Target: LAMA2; (-) strand; PAM type: YTN; PAM sequence: TTT
ccttctaactgcatctgtct

SEQ ID NO: 209042 - DNA, 20 bp, Artificial Sequence
  Description of Artificial Sequence: Synthetic oligonucleotide
  Target: LAMA2; (-) strand; PAM type: YTN; PAM sequence: TTT
tccttctaactgcatctgtc

SEQ ID NO: 209043 - DNA, 20 bp, Artificial Sequence
  Description of Artificial Sequence: Synthetic oligonucleotide
  Target: LAMA2; (-) strand; PAM type: YTN; PAM sequence: CTT
ttccttctaactgcatctgt

SEQ ID NO: 209044 - DNA, 20 bp, Artificial Sequence
  Description of Artificial Sequence: Synthetic oligonucleotide
  Target: LAMA2; (-) strand; PAM type: YTN; PAM sequence: TTC
atagtcttttccttctaact

SEQ ID NO: 209045 - DNA, 20 bp, Artificial Sequence
  Description of Artificial Sequence: Synthetic oligonucleotide
  Target: LAMA2; (-) strand; PAM type: YTN; PAM sequence: CTA
cattcatagtcttttccttc

SEQ ID NO: 209046 - DNA, 20 bp, Artificial Sequence
  Description of Artificial Sequence: Synthetic oligonucleotide
  Target: LAMA2; (-) strand; PAM type: YTN; PAM sequence: CTG
aacctacattcatagtcttt

SEQ ID NO: 209047 - DNA, 20 bp, Artificial Sequence
  Description of Artificial Sequence: Synthetic oligonucleotide
  Target: LAMA2; (-) strand; PAM type: YTN; PAM sequence: CTG
gccctgaacctacattcata

SEQ ID NO: 209048 - DNA, 20 bp, Artificial Sequence
  Description of Artificial Sequence: Synthetic oligonucleotide
  Target: LAMA2; (-) strand; PAM type: YTN; PAM sequence: CTC
tggccctgaacctacattca

SEQ ID NO: 209049 - DNA, 20 bp, Artificial Sequence
  Description of Artificial Sequence: Synthetic oligonucleotide
  Target: LAMA2; (-) strand; PAM type: YTN; PAM sequence: TTG
tcctctggccctgaacctac

SEQ ID NO: 209050 - DNA, 20 bp, Artificial Sequence
  Description of Artificial Sequence: Synthetic oligonucleotide
  Target: LAMA2; (-) strand; PAM type: YTN; PAM sequence: TTT
gtcctctggccctgaaccta

SEQ ID NO: 209051 - DNA, 20 bp, Artificial Sequence
  Description of Artificial Sequence: Synthetic oligonucleotide
  Target: LAMA2; (-) strand; PAM type: YTN; PAM sequence: TTT
tgtcctctggccctgaacct

SEQ ID NO: 209052 - DNA, 20 bp, Artificial Sequence
  Description of Artificial Sequence: Synthetic oligonucleotide
  Target: LAMA2; (-) strand; PAM type: YTN; PAM sequence: TTT
ttgtcctctggccctgaacc

SEQ ID NO: 209053 - DNA, 20 bp, Artificial Sequence
  Description of Artificial Sequence: Synthetic oligonucleotide
  Target: LAMA2; (-) strand; PAM type: YTN; PAM sequence: TTC
aacagtttttgtcctctggc

SEQ ID NO: 209054 - DNA, 20 bp, Artificial Sequence
  Description of Artificial Sequence: Synthetic oligonucleotide
  Target: LAMA2; (-) strand; PAM type: YTN; PAM sequence: TTT
caacagtttttgtcctctgg

SEQ ID NO: 209055 - DNA, 20 bp, Artificial Sequence
  Description of Artificial Sequence: Synthetic oligonucleotide
  Target: LAMA2; (-) strand; PAM type: YTN; PAM sequence: CTA
tatcaaggcaatttcaacag

SEQ ID NO: 209056 - DNA, 20 bp, Artificial Sequence
  Description of Artificial Sequence: Synthetic oligonucleotide
  Target: LAMA2; (-) strand; PAM type: YTN; PAM sequence: CTA
tgaatctatatcaaggcaat

SEQ ID NO: 209057 - DNA, 20 bp, Artificial Sequence
  Description of Artificial Sequence: Synthetic oligonucleotide
  Target: LAMA2; (-) strand; PAM type: YTN; PAM sequence: TTG
caatctatgaatctatatca

SEQ ID NO: 209058 - DNA, 20 bp, Artificial Sequence
  Description of Artificial Sequence: Synthetic oligonucleotide
  Target: LAMA2; (-) strand; PAM type: YTN; PAM sequence: TTT
gcaatctatgaatctatatc

SEQ ID NO: 209059 - DNA, 20 bp, Artificial Sequence
  Description of Artificial Sequence: Synthetic oligonucleotide
  Target: LAMA2; (-) strand; PAM type: YTN; PAM sequence: CTC
atttgcaatctatgaatcta

SEQ ID NO: 209060 - DNA, 20 bp, Artificial Sequence
  Description of Artificial Sequence: Synthetic oligonucleotide
  Target: LAMA2; (-) strand; PAM type: YTN; PAM sequence: TTA
aaaagtgctcatttgcaatc

SEQ ID NO: 209061 - DNA, 20 bp, Artificial Sequence
  Description of Artificial Sequence: Synthetic oligonucleotide
  Target: LAMA2; (-) strand; PAM type: YTN; PAM sequence: TTT
aaaaagtgctcatttgcaat

SEQ ID NO: 209062 - DNA, 20 bp, Artificial Sequence
  Description of Artificial Sequence: Synthetic oligonucleotide
  Target: LAMA2; (-) strand; PAM type: YTN; PAM sequence: TTT
taaaaagtgctcatttgcaa

SEQ ID NO: 209063 - DNA, 20 bp, Artificial Sequence
  Description of Artificial Sequence: Synthetic oligonucleotide
  Target: LAMA2; (-) strand; PAM type: YTN; PAM sequence: TTA
aattttaaaaagtgctcatt

SEQ ID NO: 209064 - DNA, 20 bp, Artificial Sequence
  Description of Artificial Sequence: Synthetic oligonucleotide
  Target: LAMA2; (-) strand; PAM type: YTN; PAM sequence: TTT
aaattttaaaaagtgctcat

SEQ ID NO: 209065 - DNA, 20 bp, Artificial Sequence
  Description of Artificial Sequence: Synthetic oligonucleotide
  Target: LAMA2; (-) strand; PAM type: YTN; PAM sequence: TTC
aagggtttaaattttaaaaa

SEQ ID NO: 209066 - DNA, 20 bp, Artificial Sequence
  Description of Artificial Sequence: Synthetic oligonucleotide
  Target: LAMA2; (-) strand; PAM type: YTN; PAM sequence: CTG
agataccatattcaagggtt

SEQ ID NO: 209067 - DNA, 20 bp, Artificial Sequence
  Description of Artificial Sequence: Synthetic oligonucleotide
  Target: LAMA2; (-) strand; PAM type: YTN; PAM sequence: CTG
tgcctgagataccatattca

SEQ ID NO: 209068 - DNA, 20 bp, Artificial Sequence
  Description of Artificial Sequence: Synthetic oligonucleotide
  Target: LAMA2; (-) strand; PAM type: YTN; PAM sequence: CTC
tgtgcctgagataccatatt

SEQ ID NO: 209069 - DNA, 20 bp, Artificial Sequence
  Description of Artificial Sequence: Synthetic oligonucleotide
  Target: LAMA2; (-) strand; PAM type: YTN; PAM sequence: CTC
actctgtgcctgagatacca

SEQ ID NO: 209070 - DNA, 20 bp, Artificial Sequence
  Description of Artificial Sequence: Synthetic oligonucleotide
  Target: LAMA2; (-) strand; PAM type: YTN; PAM sequence: TTG
tatatataaagaactcactc

SEQ ID NO: 209071 - DNA, 20 bp, Artificial Sequence
  Description of Artificial Sequence: Synthetic oligonucleotide
  Target: LAMA2; (-) strand; PAM type: YTN; PAM sequence: TTT
gtatatataaagaactcact

SEQ ID NO: 209072 - DNA, 20 bp, Artificial Sequence
  Description of Artificial Sequence: Synthetic oligonucleotide
  Target: LAMA2; (-) strand; PAM type: YTN; PAM sequence: TTT
tgtatatataaagaactcac

SEQ ID NO: 209073 - DNA, 20 bp, Artificial Sequence
  Description of Artificial Sequence: Synthetic oligonucleotide
  Target: LAMA2; (-) strand; PAM type: YTN; PAM sequence: CTG
gtaggcggtaagaatcacat

SEQ ID NO: 209074 - DNA, 20 bp, Artificial Sequence
  Description of Artificial Sequence: Synthetic oligonucleotide
  Target: LAMA2; (-) strand; PAM type: YTN; PAM sequence: CTG
gtgaaatcggaagacagctg

SEQ ID NO: 209075 - DNA, 20 bp, Artificial Sequence
  Description of Artificial Sequence: Synthetic oligonucleotide
  Target: LAMA2; (-) strand; PAM type: YTN; PAM sequence: TTA
tagggaaggtcatctggtga

SEQ ID NO: 209076 - DNA, 20 bp, Artificial Sequence
  Description of Artificial Sequence: Synthetic oligonucleotide
  Target: LAMA2; (-) strand; PAM type: YTN; PAM sequence: CTT
atagggaaggtcatctggtg

SEQ ID NO: 209077 - DNA, 20 bp, Artificial Sequence
  Description of Artificial Sequence: Synthetic oligonucleotide
  Target: LAMA2; (-) strand; PAM type: YTN; PAM sequence: TTA
cgtgtcaaacttatagggaa

SEQ ID NO: 209078 - DNA, 20 bp, Artificial Sequence
  Description of Artificial Sequence: Synthetic oligonucleotide
  Target: LAMA2; (-) strand; PAM type: YTN; PAM sequence: TTA
tgagttacgtgtcaaactta

SEQ ID NO: 209079 - DNA, 20 bp, Artificial Sequence
  Description of Artificial Sequence: Synthetic oligonucleotide
  Target: LAMA2; (-) strand; PAM type: YTN; PAM sequence: TTT
atgagttacgtgtcaaactt

SEQ ID NO: 209080 - DNA, 20 bp, Artificial Sequence
  Description of Artificial Sequence: Synthetic oligonucleotide
  Target: LAMA2; (-) strand; PAM type: YTN; PAM sequence: TTT
tatgagttacgtgtcaaact

SEQ ID NO: 209081 - DNA, 20 bp, Artificial Sequence
  Description of Artificial Sequence: Synthetic oligonucleotide
  Target: LAMA2; (-) strand; PAM type: YTN; PAM sequence: CTC
cagagccatgcattttatga

SEQ ID NO: 209082 - DNA, 20 bp, Artificial Sequence
  Description of Artificial Sequence: Synthetic oligonucleotide
  Target: LAMA2; (-) strand; PAM type: YTN; PAM sequence: TTC
tccagagccatgcattttat

SEQ ID NO: 209083 - DNA, 20 bp, Artificial Sequence
  Description of Artificial Sequence: Synthetic oligonucleotide
  Target: LAMA2; (-) strand; PAM type: YTN; PAM sequence: TTG
ttctccagagccatgcattt

SEQ ID NO: 209084 - DNA, 20 bp, Artificial Sequence
  Description of Artificial Sequence: Synthetic oligonucleotide
  Target: LAMA2; (-) strand; PAM type: YTN; PAM sequence: CTC
ccgtcatgataattgttctc

SEQ ID NO: 209085 - DNA, 20 bp, Artificial Sequence
  Description of Artificial Sequence: Synthetic oligonucleotide
  Target: LAMA2; (-) strand; PAM type: YTN; PAM sequence: CTG
ccatataatcaagaaagcat

SEQ ID NO: 209086 - DNA, 20 bp, Artificial Sequence
  Description of Artificial Sequence: Synthetic oligonucleotide
  Target: LAMA2; (-) strand; PAM type: YTN; PAM sequence: TTC
aaaagcagaggtgggaaaga

SEQ ID NO: 209087 - DNA, 20 bp, Artificial Sequence
  Description of Artificial Sequence: Synthetic oligonucleotide
  Target: LAMA2; (-) strand; PAM type: YTN; PAM sequence: CTT
caaaagcagaggtgggaaag

SEQ ID NO: 209088 - DNA, 20 bp, Artificial Sequence
  Description of Artificial Sequence: Synthetic oligonucleotide
  Target: LAMA2; (-) strand; PAM type: YTN; PAM sequence: TTA
atatccttcaaaagcagagg

SEQ ID NO: 209089 - DNA, 20 bp, Artificial Sequence
  Description of Artificial Sequence: Synthetic oligonucleotide
  Target: LAMA2; (-) strand; PAM type: YTN; PAM sequence: TTT
aatatccttcaaaagcagag

SEQ ID NO: 209090 - DNA, 20 bp, Artificial Sequence
  Description of Artificial Sequence: Synthetic oligonucleotide
  Target: LAMA2; (-) strand; PAM type: YTN; PAM sequence: CTT
taatatccttcaaaagcaga

SEQ ID NO: 209091 - DNA, 20 bp, Artificial Sequence
  Description of Artificial Sequence: Synthetic oligonucleotide
  Target: LAMA2; (-) strand; PAM type: YTN; PAM sequence: CTC
acctttaatatccttcaaaa

SEQ ID NO: 209092 - DNA, 20 bp, Artificial Sequence
  Description of Artificial Sequence: Synthetic oligonucleotide
  Target: LAMA2; (-) strand; PAM type: YTN; PAM sequence: TTA
atctcacctttaatatcctt

SEQ ID NO: 209093 - DNA, 20 bp, Artificial Sequence
  Description of Artificial Sequence: Synthetic oligonucleotide
  Target: LAMA2; (-) strand; PAM type: YTN; PAM sequence: TTT
aatctcacctttaatatcct

SEQ ID NO: 209094 - DNA, 20 bp, Artificial Sequence
  Description of Artificial Sequence: Synthetic oligonucleotide
  Target: LAMA2; (-) strand; PAM type: YTN; PAM sequence: TTT
taatctcacctttaatatcc

SEQ ID NO: 209095 - DNA, 20 bp, Artificial Sequence
  Description of Artificial Sequence: Synthetic oligonucleotide
  Target: LAMA2; (-) strand; PAM type: YTN; PAM sequence: TTT
ttaatctcacctttaatatc

SEQ ID NO: 209096 - DNA, 20 bp, Artificial Sequence
  Description of Artificial Sequence: Synthetic oligonucleotide
  Target: LAMA2; (-) strand; PAM type: YTN; PAM sequence: CTG
gagcatttttaatctcacct

SEQ ID NO: 209097 - DNA, 20 bp, Artificial Sequence
  Description of Artificial Sequence: Synthetic oligonucleotide
  Target: LAMA2; (-) strand; PAM type: YTN; PAM sequence: TTA
caatcagacaagcagaacaa

SEQ ID NO: 209098 - DNA, 20 bp, Artificial Sequence
  Description of Artificial Sequence: Synthetic oligonucleotide
  Target: LAMA2; (-) strand; PAM type: YTN; PAM sequence: CTG
ttacaatcagacaagcagaa

SEQ ID NO: 209099 - DNA, 20 bp, Artificial Sequence
  Description of Artificial Sequence: Synthetic oligonucleotide
  Target: LAMA2; (-) strand; PAM type: YTN; PAM sequence: TTC
actgttacaatcagacaagc

SEQ ID NO: 209100 - DNA, 20 bp, Artificial Sequence
  Description of Artificial Sequence: Synthetic oligonucleotide
  Target: LAMA2; (-) strand; PAM type: YTN; PAM sequence: CTT
cactgttacaatcagacaag

SEQ ID NO: 209101 - DNA, 20 bp, Artificial Sequence
  Description of Artificial Sequence: Synthetic oligonucleotide
  Target: LAMA2; (-) strand; PAM type: YTN; PAM sequence: CTC
cttcactgttacaatcagac

SEQ ID NO: 209102 - DNA, 20 bp, Artificial Sequence
  Description of Artificial Sequence: Synthetic oligonucleotide
  Target: LAMA2; (-) strand; PAM type: YTN; PAM sequence: TTG
tctccttcactgttacaatc

SEQ ID NO: 209103 - DNA, 20 bp, Artificial Sequence
  Description of Artificial Sequence: Synthetic oligonucleotide
  Target: LAMA2; (-) strand; PAM type: YTN; PAM sequence: TTT
gtctccttcactgttacaat

SEQ ID NO: 209104 - DNA, 20 bp, Artificial Sequence
  Description of Artificial Sequence: Synthetic oligonucleotide
  Target: LAMA2; (-) strand; PAM type: YTN; PAM sequence: TTT
tgtctccttcactgttacaa

SEQ ID NO: 209105 - DNA, 20 bp, Artificial Sequence
  Description of Artificial Sequence: Synthetic oligonucleotide
  Target: LAMA2; (-) strand; PAM type: YTN; PAM sequence: CTA
gaatcaattttgtctccttc

SEQ ID NO: 209106 - DNA, 20 bp, Artificial Sequence
  Description of Artificial Sequence: Synthetic oligonucleotide
  Target: LAMA2; (-) strand; PAM type: YTN; PAM sequence: CTG
agccataagctagaatcaat

SEQ ID NO: 209107 - DNA, 20 bp, Artificial Sequence
  Description of Artificial Sequence: Synthetic oligonucleotide
  Target: LAMA2; (-) strand; PAM type: YTN; PAM sequence: TTG
aaacactgagccataagcta

SEQ ID NO: 209108 - DNA, 20 bp, Artificial Sequence
  Description of Artificial Sequence: Synthetic oligonucleotide
  Target: LAMA2; (-) strand; PAM type: YTN; PAM sequence: CTG
cagaataacattgaaacact

SEQ ID NO: 209109 - DNA, 20 bp, Artificial Sequence
  Description of Artificial Sequence: Synthetic oligonucleotide
  Target: LAMA2; (-) strand; PAM type: YTN; PAM sequence: CTG
gcaaacaagtgctgcagaat

SEQ ID NO: 209110 - DNA, 20 bp, Artificial Sequence
  Description of Artificial Sequence: Synthetic oligonucleotide
  Target: LAMA2; (-) strand; PAM type: YTN; PAM sequence: CTG
ctggcaaacaagtgctgcag

SEQ ID NO: 209111 - DNA, 20 bp, Artificial Sequence
  Description of Artificial Sequence: Synthetic oligonucleotide
  Target: LAMA2; (-) strand; PAM type: YTN; PAM sequence: CTA
acagctgctggcaaacaagt

SEQ ID NO: 209112 - DNA, 20 bp, Artificial Sequence
  Description of Artificial Sequence: Synthetic oligonucleotide
  Target: LAMA2; (-) strand; PAM type: YTN; PAM sequence: CTG
caataatccctaacagctgc

SEQ ID NO: 209113 - DNA, 20 bp, Artificial Sequence
  Description of Artificial Sequence: Synthetic oligonucleotide
  Target: LAMA2; (-) strand; PAM type: YTN; PAM sequence: CTG
acaaagaaacctgcaataat

SEQ ID NO: 209114 - DNA, 20 bp, Artificial Sequence
  Description of Artificial Sequence: Synthetic oligonucleotide
  Target: LAMA2; (-) strand; PAM type: YTN; PAM sequence: TTC
ctgacaaagaaacctgcaat

SEQ ID NO: 209115 - DNA, 20 bp, Artificial Sequence
  Description of Artificial Sequence: Synthetic oligonucleotide
  Target: LAMA2; (-) strand; PAM type: YTN; PAM sequence: CTG
ttcctgacaaagaaacctgc

SEQ ID NO: 209116 - DNA, 20 bp, Artificial Sequence
  Description of Artificial Sequence: Synthetic oligonucleotide
  Target: LAMA2; (-) strand; PAM type: YTN; PAM sequence: TTG
ccacactgttcctgacaaag

SEQ ID NO: 209117 - DNA, 20 bp, Artificial Sequence
  Description of Artificial Sequence: Synthetic oligonucleotide
  Target: LAMA2; (-) strand; PAM type: YTN; PAM sequence: TTG
ttgccacactgttcctgaca

SEQ ID NO: 209118 - DNA, 20 bp, Artificial Sequence
  Description of Artificial Sequence: Synthetic oligonucleotide
  Target: LAMA2; (-) strand; PAM type: YTN; PAM sequence: TTA
ttgttgccacactgttcctg

SEQ ID NO: 209119 - DNA, 20 bp, Artificial Sequence
  Description of Artificial Sequence: Synthetic oligonucleotide
  Target: LAMA2; (-) strand; PAM type: YTN; PAM sequence: TTA
ttattgttgccacactgttc

SEQ ID NO: 209120 - DNA, 20 bp, Artificial Sequence
  Description of Artificial Sequence: Synthetic oligonucleotide
  Target: LAMA2; (-) strand; PAM type: YTN; PAM sequence: TTT
attattgttgccacactgtt

SEQ ID NO: 209121 - DNA, 20 bp, Artificial Sequence
  Description of Artificial Sequence: Synthetic oligonucleotide
  Target: LAMA2; (-) strand; PAM type: YTN; PAM sequence: CTG
atttattattgttgccacac

SEQ ID NO: 209122 - DNA, 20 bp, Artificial Sequence
  Description of Artificial Sequence: Synthetic oligonucleotide
  Target: LAMA2; (-) strand; PAM type: YTN; PAM sequence: CTA
aatctgatttattattgttg

SEQ ID NO: 209123 - DNA, 20 bp, Artificial Sequence
  Description of Artificial Sequence: Synthetic oligonucleotide
  Target: LAMA2; (-) strand; PAM type: YTN; PAM sequence: TTC
agtagccagtctaaatctga

SEQ ID NO: 209124 - DNA, 20 bp, Artificial Sequence
  Description of Artificial Sequence: Synthetic oligonucleotide
  Target: LAMA2; (-) strand; PAM type: YTN; PAM sequence: CTT
cagtagccagtctaaatctg

SEQ ID NO: 209125 - DNA, 20 bp, Artificial Sequence
  Description of Artificial Sequence: Synthetic oligonucleotide
  Target: LAMA2; (-) strand; PAM type: YTN; PAM sequence: TTA
aacaaaccccttcagtagcc

SEQ ID NO: 209126 - DNA, 20 bp, Artificial Sequence
  Description of Artificial Sequence: Synthetic oligonucleotide
  Target: LAMA2; (-) strand; PAM type: YTN; PAM sequence: TTT
aaacaaaccccttcagtagc

SEQ ID NO: 209127 - DNA, 20 bp, Artificial Sequence
  Description of Artificial Sequence: Synthetic oligonucleotide
  Target: LAMA2; (-) strand; PAM type: YTN; PAM sequence: TTT
taaacaaaccccttcagtag

SEQ ID NO: 209128 - DNA, 20 bp, Artificial Sequence
  Description of Artificial Sequence: Synthetic oligonucleotide
  Target: LAMA2; (-) strand; PAM type: YTN; PAM sequence: CTT
ttaaacaaaccccttcagta

SEQ ID NO: 209129 - DNA, 20 bp, Artificial Sequence
  Description of Artificial Sequence: Synthetic oligonucleotide
  Target: LAMA2; (-) strand; PAM type: YTN; PAM sequence: TTA
aatcttttaaacaaacccct

SEQ ID NO: 209130 - DNA, 20 bp, Artificial Sequence
  Description of Artificial Sequence: Synthetic oligonucleotide
  Target: LAMA2; (-) strand; PAM type: YTN; PAM sequence: TTT
aaatcttttaaacaaacccc

SEQ ID NO: 209131 - DNA, 20 bp, Artificial Sequence
  Description of Artificial Sequence: Synthetic oligonucleotide
  Target: LAMA2; (-) strand; PAM type: YTN; PAM sequence: TTT
taaatcttttaaacaaaccc

SEQ ID NO: 209132 - DNA, 20 bp, Artificial Sequence
  Description of Artificial Sequence: Synthetic oligonucleotide
  Target: LAMA2; (-) strand; PAM type: YTN; PAM sequence: TTT
ttaaatcttttaaacaaacc

SEQ ID NO: 209133 - DNA, 20 bp, Artificial Sequence
  Description of Artificial Sequence: Synthetic oligonucleotide
  Target: LAMA2; (-) strand; PAM type: YTN; PAM sequence: CTG
aagagatttttaaatctttt

SEQ ID NO: 209134 - DNA, 20 bp, Artificial Sequence
  Description of Artificial Sequence: Synthetic oligonucleotide
  Target: LAMA2; (-) strand; PAM type: YTN; PAM sequence: CTC
tgaagagatttttaaatctt

SEQ ID NO: 209135 - DNA, 20 bp, Artificial Sequence
  Description of Artificial Sequence: Synthetic oligonucleotide
  Target: LAMA2; (-) strand; PAM type: YTN; PAM sequence: TTG
actctgaagagatttttaaa

SEQ ID NO: 209136 - DNA, 20 bp, Artificial Sequence
  Description of Artificial Sequence: Synthetic oligonucleotide
  Target: LAMA2; (-) strand; PAM type: YTN; PAM sequence: TTT
gactctgaagagatttttaa

SEQ ID NO: 209137 - DNA, 20 bp, Artificial Sequence
  Description of Artificial Sequence: Synthetic oligonucleotide
  Target: LAMA2; (-) strand; PAM type: YTN; PAM sequence: CTT
tgactctgaagagattttta

SEQ ID NO: 209138 - DNA, 20 bp, Artificial Sequence
  Description of Artificial Sequence: Synthetic oligonucleotide
  Target: LAMA2; (-) strand; PAM type: YTN; PAM sequence: TTA
acatctttgactctgaagag

SEQ ID NO: 209139 - DNA, 20 bp, Artificial Sequence
  Description of Artificial Sequence: Synthetic oligonucleotide
  Target: LAMA2; (-) strand; PAM type: YTN; PAM sequence: TTC
accaggtagaattaacatct

SEQ ID NO: 209140 - DNA, 20 bp, Artificial Sequence
  Description of Artificial Sequence: Synthetic oligonucleotide
  Target: LAMA2; (-) strand; PAM type: YTN; PAM sequence: CTG
gttcaccaggtagaattaac

SEQ ID NO: 209141 - DNA, 20 bp, Artificial Sequence
  Description of Artificial Sequence: Synthetic oligonucleotide
  Target: LAMA2; (-) strand; PAM type: YTN; PAM sequence: TTC
tggttcaccaggtagaatta

SEQ ID NO: 209142 - DNA, 20 bp, Artificial Sequence
  Description of Artificial Sequence: Synthetic oligonucleotide
  Target: LAMA2; (-) strand; PAM type: YTN; PAM sequence: CTG
tcccaagatatatgcaggat

SEQ ID NO: 209143 - DNA, 20 bp, Artificial Sequence
  Description of Artificial Sequence: Synthetic oligonucleotide
  Target: LAMA2; (-) strand; PAM type: YTN; PAM sequence: TTA
gaaaatataagtctgtccca

SEQ ID NO: 209144 - DNA, 20 bp, Artificial Sequence
  Description of Artificial Sequence: Synthetic oligonucleotide
  Target: LAMA2; (-) strand; PAM type: YTN; PAM sequence: TTT
agaaaatataagtctgtccc

SEQ ID NO: 209145 - DNA, 20 bp, Artificial Sequence
  Description of Artificial Sequence: Synthetic oligonucleotide
  Target: LAMA2; (-) strand; PAM type: YTN; PAM sequence: TTA
cccagatttagaaaatataa

SEQ ID NO: 209146 - DNA, 20 bp, Artificial Sequence
  Description of Artificial Sequence: Synthetic oligonucleotide
  Target: LAMA2; (-) strand; PAM type: YTN; PAM sequence: TTC
agtgcatgtatgatcattac

SEQ ID NO: 209147 - DNA, 20 bp, Artificial Sequence
  Description of Artificial Sequence: Synthetic oligonucleotide
  Target: LAMA2; (-) strand; PAM type: YTN; PAM sequence: TTT
cagtgcatgtatgatcatta

SEQ ID NO: 209148 - DNA, 20 bp, Artificial Sequence
  Description of Artificial Sequence: Synthetic oligonucleotide
  Target: LAMA2; (-) strand; PAM type: YTN; PAM sequence: TTT
tcagtgcatgtatgatcatt

SEQ ID NO: 209149 - DNA, 20 bp, Artificial Sequence
  Description of Artificial Sequence: Synthetic oligonucleotide
  Target: LAMA2; (-) strand; PAM type: YTN; PAM sequence: CTT
ttcagtgcatgtatgatcat

SEQ ID NO: 209150 - DNA, 20 bp, Artificial Sequence
  Description of Artificial Sequence: Synthetic oligonucleotide
  Target: LAMA2; (-) strand; PAM type: YTN; PAM sequence: TTC
ttttcagtgcatgtatgatc

SEQ ID NO: 209151 - DNA, 20 bp, Artificial Sequence
  Description of Artificial Sequence: Synthetic oligonucleotide
  Target: LAMA2; (-) strand; PAM type: YTN; PAM sequence: CTT
cttttcagtgcatgtatgat

SEQ ID NO: 209152 - DNA, 20 bp, Artificial Sequence
  Description of Artificial Sequence: Synthetic oligonucleotide
  Target: LAMA2; (-) strand; PAM type: YTN; PAM sequence: CTG
ggagaagatggtcttctttt

SEQ ID NO: 209153 - DNA, 20 bp, Artificial Sequence
  Description of Artificial Sequence: Synthetic oligonucleotide
  Target: LAMA2; (-) strand; PAM type: YTN; PAM sequence: TTC
tgggagaagatggtcttctt

SEQ ID NO: 209154 - DNA, 20 bp, Artificial Sequence
  Description of Artificial Sequence: Synthetic oligonucleotide
  Target: LAMA2; (-) strand; PAM type: YTN; PAM sequence: TTT
ctgggagaagatggtcttct

SEQ ID NO: 209155 - DNA, 20 bp, Artificial Sequence
  Description of Artificial Sequence: Synthetic oligonucleotide
  Target: LAMA2; (-) strand; PAM type: YTN; PAM sequence: TTG
tatatttctgggagaagatg

SEQ ID NO: 209156 - DNA, 20 bp, Artificial Sequence
  Description of Artificial Sequence: Synthetic oligonucleotide
  Target: LAMA2; (-) strand; PAM type: YTN; PAM sequence: TTC
agtgttgtatatttctggga

SEQ ID NO: 209157 - DNA, 20 bp, Artificial Sequence
  Description of Artificial Sequence: Synthetic oligonucleotide
  Target: LAMA2; (-) strand; PAM type: YTN; PAM sequence: TTT
cagtgttgtatatttctggg

SEQ ID NO: 209158 - DNA, 20 bp, Artificial Sequence
  Description of Artificial Sequence: Synthetic oligonucleotide
  Target: LAMA2; (-) strand; PAM type: YTN; PAM sequence: CTT
tcagtgttgtatatttctgg

SEQ ID NO: 209159 - DNA, 20 bp, Artificial Sequence
  Description of Artificial Sequence: Synthetic oligonucleotide
  Target: LAMA2; (-) strand; PAM type: YTN; PAM sequence: TTG
gtagagaatctttcagtgtt

SEQ ID NO: 209160 - DNA, 20 bp, Artificial Sequence
  Description of Artificial Sequence: Synthetic oligonucleotide
  Target: LAMA2; (-) strand; PAM type: YTN; PAM sequence: TTT
ggtagagaatctttcagtgt

SEQ ID NO: 209161 - DNA, 20 bp, Artificial Sequence
  Description of Artificial Sequence: Synthetic oligonucleotide
  Target: LAMA2; (-) strand; PAM type: YTN; PAM sequence: TTC
atgcatgtttggtagagaat

SEQ ID NO: 209162 - DNA, 20 bp, Artificial Sequence
  Description of Artificial Sequence: Synthetic oligonucleotide
  Target: LAMA2; (-) strand; PAM type: YTN; PAM sequence: TTT
catgcatgtttggtagagaa

SEQ ID NO: 209163 - DNA, 20 bp, Artificial Sequence
  Description of Artificial Sequence: Synthetic oligonucleotide
  Target: LAMA2; (-) strand; PAM type: YTN; PAM sequence: TTT
tcatgcatgtttggtagaga

SEQ ID NO: 209164 - DNA, 20 bp, Artificial Sequence
  Description of Artificial Sequence: Synthetic oligonucleotide
  Target: LAMA2; (-) strand; PAM type: YTN; PAM sequence: CTT
ttcatgcatgtttggtagag

SEQ ID NO: 209165 - DNA, 20 bp, Artificial Sequence
  Description of Artificial Sequence: Synthetic oligonucleotide
  Target: LAMA2; (-) strand; PAM type: YTN; PAM sequence: CTA
tcttttcatgcatgtttggt

SEQ ID NO: 209166 - DNA, 20 bp, Artificial Sequence
  Description of Artificial Sequence: Synthetic oligonucleotide
  Target: LAMA2; (-) strand; PAM type: YTN; PAM sequence: TTG
ctatcttttcatgcatgttt

SEQ ID NO: 209167 - DNA, 20 bp, Artificial Sequence
  Description of Artificial Sequence: Synthetic oligonucleotide
  Target: LAMA2; (-) strand; PAM type: YTN; PAM sequence: TTT
gctatcttttcatgcatgtt

SEQ ID NO: 209168 - DNA, 20 bp, Artificial Sequence
  Description of Artificial Sequence: Synthetic oligonucleotide
  Target: LAMA2; (-) strand; PAM type: YTN; PAM sequence: CTT
tgctatcttttcatgcatgt

SEQ ID NO: 209169 - DNA, 20 bp, Artificial Sequence
  Description of Artificial Sequence: Synthetic oligonucleotide
  Target: LAMA2; (-) strand; PAM type: YTN; PAM sequence: TTG
tacctttgctatcttttcat

SEQ ID NO: 209170 - DNA, 20 bp, Artificial Sequence
  Description of Artificial Sequence: Synthetic oligonucleotide
  Target: LAMA2; (-) strand; PAM type: YTN; PAM sequence: TTA
aagaaatattgtacctttgc

SEQ ID NO: 209171 - DNA, 20 bp, Artificial Sequence
  Description of Artificial Sequence: Synthetic oligonucleotide
  Target: LAMA2; (-) strand; PAM type: YTN; PAM sequence: CTA
aacgaaagaggaaagaaaca

SEQ ID NO: 209172 - DNA, 20 bp, Artificial Sequence
  Description of Artificial Sequence: Synthetic oligonucleotide
  Target: LAMA2; (-) strand; PAM type: YTN; PAM sequence: TTC
acctaaacgaaagaggaaag

SEQ ID NO: 209173 - DNA, 20 bp, Artificial Sequence
  Description of Artificial Sequence: Synthetic oligonucleotide
  Target: LAMA2; (-) strand; PAM type: YTN; PAM sequence: TTT
cacctaaacgaaagaggaaa

SEQ ID NO: 209174 - DNA, 20 bp, Artificial Sequence
  Description of Artificial Sequence: Synthetic oligonucleotide
  Target: LAMA2; (-) strand; PAM type: YTN; PAM sequence: CTA
tttcacctaaacgaaagagg

SEQ ID NO: 209175 - DNA, 20 bp, Artificial Sequence
  Description of Artificial Sequence: Synthetic oligonucleotide
  Target: LAMA2; (-) strand; PAM type: YTN; PAM sequence: CTC
tatttcacctaaacgaaaga

SEQ ID NO: 209176 - DNA, 20 bp, Artificial Sequence
  Description of Artificial Sequence: Synthetic oligonucleotide
  Target: LAMA2; (-) strand; PAM type: YTN; PAM sequence: CTG
tatcctctatttcacctaaa

SEQ ID NO: 209177 - DNA, 20 bp, Artificial Sequence
  Description of Artificial Sequence: Synthetic oligonucleotide
  Target: LAMA2; (-) strand; PAM type: YTN; PAM sequence: CTA
atgatcagagctgtatcctc

SEQ ID NO: 209178 - DNA, 20 bp, Artificial Sequence
  Description of Artificial Sequence: Synthetic oligonucleotide
  Target: LAMA2; (-) strand; PAM type: YTN; PAM sequence: TTC
taatgatcagagctgtatcc

SEQ ID NO: 209179 - DNA, 20 bp, Artificial Sequence
  Description of Artificial Sequence: Synthetic oligonucleotide
  Target: LAMA2; (-) strand; PAM type: YTN; PAM sequence: TTG
ccatatgaaattctaatgat

SEQ ID NO: 209180 - DNA, 20 bp, Artificial Sequence
  Description of Artificial Sequence: Synthetic oligonucleotide
  Target: LAMA2; (-) strand; PAM type: YTN; PAM sequence: TTT
gccatatgaaattctaatga

SEQ ID NO: 209181 - DNA, 20 bp, Artificial Sequence
  Description of Artificial Sequence: Synthetic oligonucleotide
  Target: LAMA2; (-) strand; PAM type: YTN; PAM sequence: CTA
tgtgtgtgagcgtttgccat

SEQ ID NO: 209182 - DNA, 20 bp, Artificial Sequence
  Description of Artificial Sequence: Synthetic oligonucleotide
  Target: LAMA2; (-) strand; PAM type: YTN; PAM sequence: CTC
aaatccactatgtgtgtgag

SEQ ID NO: 209183 - DNA, 20 bp, Artificial Sequence
  Description of Artificial Sequence: Synthetic oligonucleotide
  Target: LAMA2; (-) strand; PAM type: YTN; PAM sequence: TTC
ctcaaatccactatgtgtgt

SEQ ID NO: 209184 - DNA, 20 bp, Artificial Sequence
  Description of Artificial Sequence: Synthetic oligonucleotide
  Target: LAMA2; (-) strand; PAM type: YTN; PAM sequence: TTT
cctcaaatccactatgtgtg

SEQ ID NO: 209185 - DNA, 20 bp, Artificial Sequence
  Description of Artificial Sequence: Synthetic oligonucleotide
  Target: LAMA2; (-) strand; PAM type: YTN; PAM sequence: TTG
atttcctcaaatccactatg

SEQ ID NO: 209186 - DNA, 20 bp, Artificial Sequence
  Description of Artificial Sequence: Synthetic oligonucleotide
  Target: LAMA2; (-) strand; PAM type: YTN; PAM sequence: TTA
gtgaaaattgatttcctcaa

SEQ ID NO: 209187 - DNA, 20 bp, Artificial Sequence
  Description of Artificial Sequence: Synthetic oligonucleotide
  Target: LAMA2; (-) strand; PAM type: YTN; PAM sequence: CTA
gattagtgaaaattgatttc

SEQ ID NO: 209188 - DNA, 20 bp, Artificial Sequence
  Description of Artificial Sequence: Synthetic oligonucleotide
  Target: LAMA2; (-) strand; PAM type: YTN; PAM sequence: TTC
tagattagtgaaaattgatt

SEQ ID NO: 209189 - DNA, 20 bp, Artificial Sequence
  Description of Artificial Sequence: Synthetic oligonucleotide
  Target: LAMA2; (-) strand; PAM type: YTN; PAM sequence: TTT
ctagattagtgaaaattgat

SEQ ID NO: 209190 - DNA, 20 bp, Artificial Sequence
  Description of Artificial Sequence: Synthetic oligonucleotide
  Target: LAMA2; (-) strand; PAM type: YTN; PAM sequence: TTT
tctagattagtgaaaattga

SEQ ID NO: 209191 - DNA, 20 bp, Artificial Sequence
  Description of Artificial Sequence: Synthetic oligonucleotide
  Target: LAMA2; (-) strand; PAM type: YTN; PAM sequence: TTG
aggagagaattttctagatt

SEQ ID NO: 209192 - DNA, 20 bp, Artificial Sequence
  Description of Artificial Sequence: Synthetic oligonucleotide
  Target: LAMA2; (-) strand; PAM type: YTN; PAM sequence: CTT
gaggagagaattttctagat

SEQ ID NO: 209193 - DNA, 20 bp, Artificial Sequence
  Description of Artificial Sequence: Synthetic oligonucleotide
  Target: LAMA2; (-) strand; PAM type: YTN; PAM sequence: CTC
ttgaggagagaattttctag

SEQ ID NO: 209194 - DNA, 20 bp, Artificial Sequence
  Description of Artificial Sequence: Synthetic oligonucleotide
  Target: LAMA2; (-) strand; PAM type: YTN; PAM sequence: TTC
tcttgaggagagaattttct

SEQ ID NO: 209195 - DNA, 20 bp, Artificial Sequence
  Description of Artificial Sequence: Synthetic oligonucleotide
  Target: LAMA2; (-) strand; PAM type: YTN; PAM sequence: TTT
ctcttgaggagagaattttc

SEQ ID NO: 209196 - DNA, 20 bp, Artificial Sequence
  Description of Artificial Sequence: Synthetic oligonucleotide
  Target: LAMA2; (-) strand; PAM type: YTN; PAM sequence: TTT
tctcttgaggagagaatttt

SEQ ID NO: 209197 - DNA, 20 bp, Artificial Sequence
  Description of Artificial Sequence: Synthetic oligonucleotide
  Target: LAMA2; (-) strand; PAM type: YTN; PAM sequence: CTT
ttctcttgaggagagaattt

SEQ ID NO: 209198 - DNA, 20 bp, Artificial Sequence
  Description of Artificial Sequence: Synthetic oligonucleotide
  Target: LAMA2; (-) strand; PAM type: YTN; PAM sequence: TTA
aatcccttttctcttgagga

SEQ ID NO: 209199 - DNA, 20 bp, Artificial Sequence
  Description of Artificial Sequence: Synthetic oligonucleotide
  Target: LAMA2; (-) strand; PAM type: YTN; PAM sequence: TTT
aaatcccttttctcttgagg

SEQ ID NO: 209200 - DNA, 20 bp, Artificial Sequence
  Description of Artificial Sequence: Synthetic oligonucleotide
  Target: LAMA2; (-) strand; PAM type: YTN; PAM sequence: TTT
taaatcccttttctcttgag

SEQ ID NO: 209201 - DNA, 20 bp, Artificial Sequence
  Description of Artificial Sequence: Synthetic oligonucleotide
  Target: LAMA2; (-) strand; PAM type: YTN; PAM sequence: TTT
ttaaatcccttttctcttga

SEQ ID NO: 209202 - DNA, 20 bp, Artificial Sequence
  Description of Artificial Sequence: Synthetic oligonucleotide
  Target: LAMA2; (-) strand; PAM type: YTN; PAM sequence: TTA
aatacatcatgaaagttttt

SEQ ID NO: 209203 - DNA, 20 bp, Artificial Sequence
  Description of Artificial Sequence: Synthetic oligonucleotide
  Target: LAMA2; (-) strand; PAM type: YTN; PAM sequence: TTT
aaatacatcatgaaagtttt

SEQ ID NO: 209204 - DNA, 20 bp, Artificial Sequence
  Description of Artificial Sequence: Synthetic oligonucleotide
  Target: LAMA2; (-) strand; PAM type: YTN; PAM sequence: TTG
aatttaaatacatcatgaaa

SEQ ID NO: 209205 - DNA, 20 bp, Artificial Sequence
  Description of Artificial Sequence: Synthetic oligonucleotide
  Target: LAMA2; (-) strand; PAM type: YTN; PAM sequence: TTA
aagtaggcaaaagatatgtt

SEQ ID NO: 209206 - DNA, 20 bp, Artificial Sequence
  Description of Artificial Sequence: Synthetic oligonucleotide
  Target: LAMA2; (-) strand; PAM type: YTN; PAM sequence: TTT
aaagtaggcaaaagatatgt

SEQ ID NO: 209207 - DNA, 20 bp, Artificial Sequence
  Description of Artificial Sequence: Synthetic oligonucleotide
  Target: LAMA2; (-) strand; PAM type: YTN; PAM sequence: CTA
tttaaagtaggcaaaagata

SEQ ID NO: 209208 - DNA, 20 bp, Artificial Sequence
  Description of Artificial Sequence: Synthetic oligonucleotide
  Target: LAMA2; (-) strand; PAM type: YTN; PAM sequence: TTC
cctatttaaagtaggcaaaa

SEQ ID NO: 209209 - DNA, 20 bp, Artificial Sequence
  Description of Artificial Sequence: Synthetic oligonucleotide
  Target: LAMA2; (-) strand; PAM type: YTN; PAM sequence: TTT
ccctatttaaagtaggcaaa

SEQ ID NO: 209210 - DNA, 20 bp, Artificial Sequence
  Description of Artificial Sequence: Synthetic oligonucleotide
  Target: LAMA2; (-) strand; PAM type: YTN; PAM sequence: TTT
tccctatttaaagtaggcaa

SEQ ID NO: 209211 - DNA, 20 bp, Artificial Sequence
  Description of Artificial Sequence: Synthetic oligonucleotide
  Target: LAMA2; (-) strand; PAM type: YTN; PAM sequence: CTT
ttccctatttaaagtaggca

SEQ ID NO: 209212 - DNA, 20 bp, Artificial Sequence
  Description of Artificial Sequence: Synthetic oligonucleotide
  Target: LAMA2; (-) strand; PAM type: YTN; PAM sequence: TTA
gagtcaccttttccctattt

SEQ ID NO: 209213 - DNA, 20 bp, Artificial Sequence
  Description of Artificial Sequence: Synthetic oligonucleotide
  Target: LAMA2; (-) strand; PAM type: YTN; PAM sequence: CTT
agagtcaccttttccctatt

SEQ ID NO: 209214 - DNA, 20 bp, Artificial Sequence
  Description of Artificial Sequence: Synthetic oligonucleotide
  Target: LAMA2; (-) strand; PAM type: YTN; PAM sequence: TTA
tgaccttagagtcacctttt

SEQ ID NO: 209215 - DNA, 20 bp, Artificial Sequence
  Description of Artificial Sequence: Synthetic oligonucleotide
  Target: LAMA2; (-) strand; PAM type: YTN; PAM sequence: TTC
acgttatgaccttagagtca

SEQ ID NO: 209216 - DNA, 20 bp, Artificial Sequence
  Description of Artificial Sequence: Synthetic oligonucleotide
  Target: LAMA2; (-) strand; PAM type: YTN; PAM sequence: TTT
cacgttatgaccttagagtc

SEQ ID NO: 209217 - DNA, 20 bp, Artificial Sequence
  Description of Artificial Sequence: Synthetic oligonucleotide
  Target: LAMA2; (-) strand; PAM type: YTN; PAM sequence: CTA
taccaggaagggtaaagtca

SEQ ID NO: 209218 - DNA, 20 bp, Artificial Sequence
  Description of Artificial Sequence: Synthetic oligonucleotide
  Target: LAMA2; (-) strand; PAM type: YTN; PAM sequence: TTC
tataccaggaagggtaaagt

SEQ ID NO: 209219 - DNA, 20 bp, Artificial Sequence
  Description of Artificial Sequence: Synthetic oligonucleotide
  Target: LAMA2; (-) strand; PAM type: YTN; PAM sequence: CTC
aatgtgaaatgccattctat

SEQ ID NO: 209220 - DNA, 20 bp, Artificial Sequence
  Description of Artificial Sequence: Synthetic oligonucleotide
  Target: LAMA2; (-) strand; PAM type: YTN; PAM sequence: TTC
tcaatgtgaaatgccattct

SEQ ID NO: 209221 - DNA, 20 bp, Artificial Sequence
  Description of Artificial Sequence: Synthetic oligonucleotide
  Target: LAMA2; (-) strand; PAM type: YTN; PAM sequence: TTT
ctcaatgtgaaatgccattc

SEQ ID NO: 209222 - DNA, 20 bp, Artificial Sequence
  Description of Artificial Sequence: Synthetic oligonucleotide
  Target: LAMA2; (-) strand; PAM type: YTN; PAM sequence: TTT
tctcaatgtgaaatgccatt

SEQ ID NO: 209223 - DNA, 20 bp, Artificial Sequence
  Description of Artificial Sequence: Synthetic oligonucleotide
  Target: LAMA2; (-) strand; PAM type: YTN; PAM sequence: TTT
ttctcaatgtgaaatgccat

SEQ ID NO: 209224 - DNA, 20 bp, Artificial Sequence
  Description of Artificial Sequence: Synthetic oligonucleotide
  Target: LAMA2; (-) strand; PAM type: YTN; PAM sequence: CTA
gtttttctcaatgtgaaatg

SEQ ID NO: 209225 - DNA, 20 bp, Artificial Sequence
  Description of Artificial Sequence: Synthetic oligonucleotide
  Target: LAMA2; (-) strand; PAM type: YTN; PAM sequence: CTC
cctagtttttctcaatgtga

SEQ ID NO: 209226 - DNA, 20 bp, Artificial Sequence
  Description of Artificial Sequence: Synthetic oligonucleotide
  Target: LAMA2; (-) strand; PAM type: YTN; PAM sequence: TTC
tccctagtttttctcaatgt

SEQ ID NO: 209227 - DNA, 20 bp, Artificial Sequence
  Description of Artificial Sequence: Synthetic oligonucleotide
  Target: LAMA2; (-) strand; PAM type: YTN; PAM sequence: CTT
ctccctagtttttctcaatg

SEQ ID NO: 209228 - DNA, 20 bp, Artificial Sequence
  Description of Artificial Sequence: Synthetic oligonucleotide
  Target: LAMA2; (-) strand; PAM type: YTN; PAM sequence: TTC
agtgcttctccctagttttt

SEQ ID NO: 209229 - DNA, 20 bp, Artificial Sequence
  Description of Artificial Sequence: Synthetic oligonucleotide
  Target: LAMA2; (-) strand; PAM type: YTN; PAM sequence: CTT
cagtgcttctccctagtttt

SEQ ID NO: 209230 - DNA, 20 bp, Artificial Sequence
  Description of Artificial Sequence: Synthetic oligonucleotide
  Target: LAMA2; (-) strand; PAM type: YTN; PAM sequence: TTC
ttcagtgcttctccctagtt

SEQ ID NO: 209231 - DNA, 20 bp, Artificial Sequence
  Description of Artificial Sequence: Synthetic oligonucleotide
  Target: LAMA2; (-) strand; PAM type: YTN; PAM sequence: TTA
attcttcagtgcttctccct

SEQ ID NO: 209232 - DNA, 20 bp, Artificial Sequence
  Description of Artificial Sequence: Synthetic oligonucleotide
  Target: LAMA2; (-) strand; PAM type: YTN; PAM sequence: CTG
cccattaattcttcagtgct

SEQ ID NO: 209233 - DNA, 20 bp, Artificial Sequence
  Description of Artificial Sequence: Synthetic oligonucleotide
  Target: LAMA2; (-) strand; PAM type: YTN; PAM sequence: CTC
cccactgcccattaattctt

SEQ ID NO: 209234 - DNA, 20 bp, Artificial Sequence
  Description of Artificial Sequence: Synthetic oligonucleotide
  Target: LAMA2; (-) strand; PAM type: YTN; PAM sequence: CTC
tccccactgcccattaattc

SEQ ID NO: 209235 - DNA, 20 bp, Artificial Sequence
  Description of Artificial Sequence: Synthetic oligonucleotide
  Target: LAMA2; (-) strand; PAM type: YTN; PAM sequence: TTC
tctccccactgcccattaat

SEQ ID NO: 209236 - DNA, 20 bp, Artificial Sequence
  Description of Artificial Sequence: Synthetic oligonucleotide
  Target: LAMA2; (-) strand; PAM type: YTN; PAM sequence: TTT
ctctccccactgcccattaa

SEQ ID NO: 209237 - DNA, 20 bp, Artificial Sequence
  Description of Artificial Sequence: Synthetic oligonucleotide
  Target: LAMA2; (-) strand; PAM type: YTN; PAM sequence: CTA
catttctctccccactgccc

SEQ ID NO: 209238 - DNA, 20 bp, Artificial Sequence
  Description of Artificial Sequence: Synthetic oligonucleotide
  Target: LAMA2; (-) strand; PAM type: YTN; PAM sequence: TTA
ccacgacaaataataaagta

SEQ ID NO: 209239 - DNA, 20 bp, Artificial Sequence
  Description of Artificial Sequence: Synthetic oligonucleotide
  Target: LAMA2; (-) strand; PAM type: YTN; PAM sequence: TTG
tataaagtatgtgttaccac

SEQ ID NO: 209240 - DNA, 20 bp, Artificial Sequence
  Description of Artificial Sequence: Synthetic oligonucleotide
  Target: LAMA2; (-) strand; PAM type: YTN; PAM sequence: TTG
gacaagtaggagtgatagat

SEQ ID NO: 209241 - DNA, 20 bp, Artificial Sequence
  Description of Artificial Sequence: Synthetic oligonucleotide
  Target: LAMA2; (-) strand; PAM type: YTN; PAM sequence: TTT
ggacaagtaggagtgataga

SEQ ID NO: 209242 - DNA, 20 bp, Artificial Sequence
  Description of Artificial Sequence: Synthetic oligonucleotide
  Target: LAMA2; (-) strand; PAM type: YTN; PAM sequence: CTC
aggagaaacacatatttgga

SEQ ID NO: 209243 - DNA, 20 bp, Artificial Sequence
  Description of Artificial Sequence: Synthetic oligonucleotide
  Target: LAMA2; (-) strand; PAM type: YTN; PAM sequence: TTA
cctcaggagaaacacatatt

SEQ ID NO: 209244 - DNA, 20 bp, Artificial Sequence
  Description of Artificial Sequence: Synthetic oligonucleotide
  Target: LAMA2; (-) strand; PAM type: YTN; PAM sequence: TTT
acctcaggagaaacacatat

SEQ ID NO: 209245 - DNA, 20 bp, Artificial Sequence
  Description of Artificial Sequence: Synthetic oligonucleotide
  Target: LAMA2; (-) strand; PAM type: YTN; PAM sequence: TTT
tacctcaggagaaacacata

SEQ ID NO: 209246 - DNA, 20 bp, Artificial Sequence
  Description of Artificial Sequence: Synthetic oligonucleotide
  Target: LAMA2; (-) strand; PAM type: YTN; PAM sequence: TTG
aaattttacctcaggagaaa

SEQ ID NO: 209247 - DNA, 20 bp, Artificial Sequence
  Description of Artificial Sequence: Synthetic oligonucleotide
  Target: LAMA2; (-) strand; PAM type: YTN; PAM sequence: TTT
gaaattttacctcaggagaa

SEQ ID NO: 209248 - DNA, 20 bp, Artificial Sequence
  Description of Artificial Sequence: Synthetic oligonucleotide
  Target: LAMA2; (-) strand; PAM type: YTN; PAM sequence: TTT
tgaaattttacctcaggaga

SEQ ID NO: 209249 - DNA, 20 bp, Artificial Sequence
  Description of Artificial Sequence: Synthetic oligonucleotide
  Target: LAMA2; (-) strand; PAM type: YTN; PAM sequence: TTT
ttgaaattttacctcaggag

SEQ ID NO: 209250 - DNA, 20 bp, Artificial Sequence
  Description of Artificial Sequence: Synthetic oligonucleotide
  Target: LAMA2; (-) strand; PAM type: YTN; PAM sequence: CTA
gaatttttgaaattttacct

SEQ ID NO: 209251 - DNA, 20 bp, Artificial Sequence
  Description of Artificial Sequence: Synthetic oligonucleotide
  Target: LAMA2; (-) strand; PAM type: YTN; PAM sequence: CTC
caaaacatcatctagaattt

SEQ ID NO: 209252 - DNA, 20 bp, Artificial Sequence
  Description of Artificial Sequence: Synthetic oligonucleotide
  Target: LAMA2; (-) strand; PAM type: YTN; PAM sequence: CTA
cagaacctccaaaacatcat

SEQ ID NO: 209253 - DNA, 20 bp, Artificial Sequence
  Description of Artificial Sequence: Synthetic oligonucleotide
  Target: LAMA2; (-) strand; PAM type: YTN; PAM sequence: CTC
tacagaacctccaaaacatc

SEQ ID NO: 209254 - DNA, 20 bp, Artificial Sequence
  Description of Artificial Sequence: Synthetic oligonucleotide
  Target: LAMA2; (-) strand; PAM type: YTN; PAM sequence: TTC
tctacagaacctccaaaaca

SEQ ID NO: 209255 - DNA, 20 bp, Artificial Sequence
  Description of Artificial Sequence: Synthetic oligonucleotide
  Target: LAMA2; (-) strand; PAM type: YTN; PAM sequence: CTT
ctctacagaacctccaaaac

SEQ ID NO: 209256 - DNA, 20 bp, Artificial Sequence
  Description of Artificial Sequence: Synthetic oligonucleotide
  Target: LAMA2; (-) strand; PAM type: YTN; PAM sequence: TTC
accttctctacagaacctcc

SEQ ID NO: 209257 - DNA, 20 bp, Artificial Sequence
  Description of Artificial Sequence: Synthetic oligonucleotide
  Target: LAMA2; (-) strand; PAM type: YTN; PAM sequence: CTA
taccattcaccttctctaca

SEQ ID NO: 209258 - DNA, 20 bp, Artificial Sequence
  Description of Artificial Sequence: Synthetic oligonucleotide
  Target: LAMA2; (-) strand; PAM type: YTN; PAM sequence: CTC
tataccattcaccttctcta

SEQ ID NO: 209259 - DNA, 20 bp, Artificial Sequence
  Description of Artificial Sequence: Synthetic oligonucleotide
  Target: LAMA2; (-) strand; PAM type: YTN; PAM sequence: TTA
gctctataccattcaccttc

SEQ ID NO: 209260 - DNA, 20 bp, Artificial Sequence
  Description of Artificial Sequence: Synthetic oligonucleotide
  Target: LAMA2; (-) strand; PAM type: YTN; PAM sequence: TTT
agctctataccattcacctt

SEQ ID NO: 209261 - DNA, 20 bp, Artificial Sequence
  Description of Artificial Sequence: Synthetic oligonucleotide
  Target: LAMA2; (-) strand; PAM type: YTN; PAM sequence: CTT
tagctctataccattcacct

SEQ ID NO: 209262 - DNA, 20 bp, Artificial Sequence
  Description of Artificial Sequence: Synthetic oligonucleotide
  Target: LAMA2; (-) strand; PAM type: YTN; PAM sequence: TTG
ctttagctctataccattca

SEQ ID NO: 209263 - DNA, 20 bp, Artificial Sequence
  Description of Artificial Sequence: Synthetic oligonucleotide
  Target: LAMA2; (-) strand; PAM type: YTN; PAM sequence: TTT
gctttagctctataccattc

SEQ ID NO: 209264 - DNA, 20 bp, Artificial Sequence
  Description of Artificial Sequence: Synthetic oligonucleotide
  Target: LAMA2; (-) strand; PAM type: YTN; PAM sequence: TTA
aataaaaaaatcatacaaga

SEQ ID NO: 209265 - DNA, 20 bp, Artificial Sequence
  Description of Artificial Sequence: Synthetic oligonucleotide
  Target: LAMA2; (-) strand; PAM type: YTN; PAM sequence: TTG
aaatcaaaagtgaacacgcg

SEQ ID NO: 209266 - DNA, 20 bp, Artificial Sequence
  Description of Artificial Sequence: Synthetic oligonucleotide
  Target: LAMA2; (-) strand; PAM type: YTN; PAM sequence: TTT
gaaatcaaaagtgaacacgc

SEQ ID NO: 209267 - DNA, 20 bp, Artificial Sequence
  Description of Artificial Sequence: Synthetic oligonucleotide
  Target: LAMA2; (-) strand; PAM type: YTN; PAM sequence: TTC
acaaataaaatttgaaatca

SEQ ID NO: 209268 - DNA, 20 bp, Artificial Sequence
  Description of Artificial Sequence: Synthetic oligonucleotide
  Target: LAMA2; (-) strand; PAM type: YTN; PAM sequence: TTT
cacaaataaaatttgaaatc

SEQ ID NO: 209269 - DNA, 20 bp, Artificial Sequence
  Description of Artificial Sequence: Synthetic oligonucleotide
  Target: LAMA2; (-) strand; PAM type: YTN; PAM sequence: TTT
tcacaaataaaatttgaaat

SEQ ID NO: 209270 - DNA, 20 bp, Artificial Sequence
  Description of Artificial Sequence: Synthetic oligonucleotide
  Target: LAMA2; (-) strand; PAM type: YTN; PAM sequence: TTT
ttcacaaataaaatttgaaa

SEQ ID NO: 209271 - DNA, 20 bp, Artificial Sequence
  Description of Artificial Sequence: Synthetic oligonucleotide
  Target: LAMA2; (-) strand; PAM type: YTN; PAM sequence: TTT
tttcacaaataaaatttgaa

SEQ ID NO: 209272 - DNA, 20 bp, Artificial Sequence
  Description of Artificial Sequence: Synthetic oligonucleotide
  Target: LAMA2; (-) strand; PAM type: YTN; PAM sequence: CTT
ttttcacaaataaaatttga

SEQ ID NO: 209273 - DNA, 20 bp, Artificial Sequence
  Description of Artificial Sequence: Synthetic oligonucleotide
  Target: LAMA2; (-) strand; PAM type: YTN; PAM sequence: CTG
cttttttcacaaataaaatt

SEQ ID NO: 209274 - DNA, 20 bp, Artificial Sequence
  Description of Artificial Sequence: Synthetic oligonucleotide
  Target: LAMA2; (-) strand; PAM type: YTN; PAM sequence: CTC
aaagaaaaaaaagaataaat

SEQ ID NO: 209275 - DNA, 20 bp, Artificial Sequence
  Description of Artificial Sequence: Synthetic oligonucleotide
  Target: LAMA2; (-) strand; PAM type: YTN; PAM sequence: CTC
catctcaaagaaaaaaaaga

SEQ ID NO: 209276 - DNA, 20 bp, Artificial Sequence
  Description of Artificial Sequence: Synthetic oligonucleotide
  Target: LAMA2; (-) strand; PAM type: YTN; PAM sequence: CTC
cagccagggggtgacagagc

SEQ ID NO: 209277 - DNA, 20 bp, Artificial Sequence
  Description of Artificial Sequence: Synthetic oligonucleotide
  Target: LAMA2; (-) strand; PAM type: YTN; PAM sequence: CTG
cactccagccagggggtgac

SEQ ID NO: 209278 - DNA, 20 bp, Artificial Sequence
  Description of Artificial Sequence: Synthetic oligonucleotide
  Target: LAMA2; (-) strand; PAM type: YTN; PAM sequence: TTG
cagtgagccaagatcaagcc

SEQ ID NO: 209279 - DNA, 20 bp, Artificial Sequence
  Description of Artificial Sequence: Synthetic oligonucleotide
  Target: LAMA2; (-) strand; PAM type: YTN; PAM sequence: CTG
aggttgcagtgagccaagat

SEQ ID NO: 209280 - DNA, 20 bp, Artificial Sequence
  Description of Artificial Sequence: Synthetic oligonucleotide
  Target: LAMA2; (-) strand; PAM type: YTN; PAM sequence: CTG
ggaggctgaggttgcagtga

SEQ ID NO: 209281 - DNA, 20 bp, Artificial Sequence
  Description of Artificial Sequence: Synthetic oligonucleotide
  Target: LAMA2; (-) strand; PAM type: YTN; PAM sequence: TTG
aacctgggaggctgaggttg

SEQ ID NO: 209282 - DNA, 20 bp, Artificial Sequence
  Description of Artificial Sequence: Synthetic oligonucleotide
  Target: LAMA2; (-) strand; PAM type: YTN; PAM sequence: CTT
gaacctgggaggctgaggtt

SEQ ID NO: 209283 - DNA, 20 bp, Artificial Sequence
  Description of Artificial Sequence: Synthetic oligonucleotide
  Target: LAMA2; (-) strand; PAM type: YTN; PAM sequence: TTA
cttgaacctgggaggctgag

SEQ ID NO: 209284 - DNA, 20 bp, Artificial Sequence
  Description of Artificial Sequence: Synthetic oligonucleotide
  Target: LAMA2; (-) strand; PAM type: YTN; PAM sequence: CTG
aggcaggagaattacttgaa

SEQ ID NO: 209285 - DNA, 20 bp, Artificial Sequence
  Description of Artificial Sequence: Synthetic oligonucleotide
  Target: LAMA2; (-) strand; PAM type: YTN; PAM sequence: CTC
gggaggctgaggcaggagaa

SEQ ID NO: 209286 - DNA, 20 bp, Artificial Sequence
  Description of Artificial Sequence: Synthetic oligonucleotide
  Target: LAMA2; (-) strand; PAM type: YTN; PAM sequence: CTA
ctcgggaggctgaggcagga

SEQ ID NO: 209287 - DNA, 20 bp, Artificial Sequence
  Description of Artificial Sequence: Synthetic oligonucleotide
  Target: LAMA2; (-) strand; PAM type: YTN; PAM sequence: CTA
gtcccagctactcgggaggc

SEQ ID NO: 209288 - DNA, 20 bp, Artificial Sequence
  Description of Artificial Sequence: Synthetic oligonucleotide
  Target: LAMA2; (-) strand; PAM type: YTN; PAM sequence: TTA
agaataaatctagtcccagc

SEQ ID NO: 209289 - DNA, 20 bp, Artificial Sequence
  Description of Artificial Sequence: Synthetic oligonucleotide
  Target: LAMA2; (-) strand; PAM type: YTN; PAM sequence: CTC
cacatggataaatgggatta

SEQ ID NO: 209290 - DNA, 20 bp, Artificial Sequence
  Description of Artificial Sequence: Synthetic oligonucleotide
  Target: LAMA2; (-) strand; PAM type: YTN; PAM sequence: TTC
tccacatggataaatgggat

SEQ ID NO: 209291 - DNA, 20 bp, Artificial Sequence
  Description of Artificial Sequence: Synthetic oligonucleotide
  Target: LAMA2; (-) strand; PAM type: YTN; PAM sequence: TTG
caaagtgaaatgagcagggt

SEQ ID NO: 209292 - DNA, 20 bp, Artificial Sequence
  Description of Artificial Sequence: Synthetic oligonucleotide
  Target: LAMA2; (-) strand; PAM type: YTN; PAM sequence: TTT
gcaaagtgaaatgagcaggg

SEQ ID NO: 209293 - DNA, 20 bp, Artificial Sequence
  Description of Artificial Sequence: Synthetic oligonucleotide
  Target: LAMA2; (-) strand; PAM type: YTN; PAM sequence: TTA
gtgacagagcaaaaagagaa

SEQ ID NO: 209294 - DNA, 20 bp, Artificial Sequence
  Description of Artificial Sequence: Synthetic oligonucleotide
  Target: LAMA2; (-) strand; PAM type: YTN; PAM sequence: CTA
ttagtgacagagcaaaaaga

SEQ ID NO: 209295 - DNA, 20 bp, Artificial Sequence
  Description of Artificial Sequence: Synthetic oligonucleotide
  Target: LAMA2; (-) strand; PAM type: YTN; PAM sequence: CTC
tattagtgacagagcaaaaa

SEQ ID NO: 209296 - DNA, 20 bp, Artificial Sequence
  Description of Artificial Sequence: Synthetic oligonucleotide
  Target: LAMA2; (-) strand; PAM type: YTN; PAM sequence: CTG
aaagctctattagtgacaga

SEQ ID NO: 209297 - DNA, 20 bp, Artificial Sequence
  Description of Artificial Sequence: Synthetic oligonucleotide
  Target: LAMA2; (-) strand; PAM type: YTN; PAM sequence: TTA
gtagctgaaagctctattag

SEQ ID NO: 209298 - DNA, 20 bp, Artificial Sequence
  Description of Artificial Sequence: Synthetic oligonucleotide
  Target: LAMA2; (-) strand; PAM type: YTN; PAM sequence: CTT
agtagctgaaagctctatta

SEQ ID NO: 209299 - DNA, 20 bp, Artificial Sequence
  Description of Artificial Sequence: Synthetic oligonucleotide
  Target: LAMA2; (-) strand; PAM type: YTN; PAM sequence: CTG
tgtgtcttagtagctgaaag

SEQ ID NO: 209300 - DNA, 20 bp, Artificial Sequence
  Description of Artificial Sequence: Synthetic oligonucleotide
  Target: LAMA2; (-) strand; PAM type: YTN; PAM sequence: CTC
ctgtgtgtcttagtagctga

SEQ ID NO: 209301 - DNA, 20 bp, Artificial Sequence
  Description of Artificial Sequence: Synthetic oligonucleotide
  Target: LAMA2; (-) strand; PAM type: YTN; PAM sequence: CTA
gaaaggactcctgtgtgtct

SEQ ID NO: 209302 - DNA, 20 bp, Artificial Sequence
  Description of Artificial Sequence: Synthetic oligonucleotide
  Target: LAMA2; (-) strand; PAM type: YTN; PAM sequence: CTC
tagaaaggactcctgtgtgt

SEQ ID NO: 209303 - DNA, 20 bp, Artificial Sequence
  Description of Artificial Sequence: Synthetic oligonucleotide
  Target: LAMA2; (-) strand; PAM type: YTN; PAM sequence: CTC
tctagaaaggactcctgtgt

SEQ ID NO: 209304 - DNA, 20 bp, Artificial Sequence
  Description of Artificial Sequence: Synthetic oligonucleotide
  Target: LAMA2; (-) strand; PAM type: YTN; PAM sequence: TTA
ctctctagaaaggactcctg

SEQ ID NO: 209305 - DNA, 20 bp, Artificial Sequence
  Description of Artificial Sequence: Synthetic oligonucleotide
  Target: LAMA2; (-) strand; PAM type: YTN; PAM sequence: TTC
agttactctctagaaaggac

SEQ ID NO: 209306 - DNA, 20 bp, Artificial Sequence
  Description of Artificial Sequence: Synthetic oligonucleotide
  Target: LAMA2; (-) strand; PAM type: YTN; PAM sequence: TTT
cagttactctctagaaagga

SEQ ID NO: 209307 - DNA, 20 bp, Artificial Sequence
  Description of Artificial Sequence: Synthetic oligonucleotide
  Target: LAMA2; (-) strand; PAM type: YTN; PAM sequence: TTA
atttcagttactctctagaa

SEQ ID NO: 209308 - DNA, 20 bp, Artificial Sequence
  Description of Artificial Sequence: Synthetic oligonucleotide
  Target: LAMA2; (-) strand; PAM type: YTN; PAM sequence: TTG
ccaccaaaatgatgtatgtg

SEQ ID NO: 209309 - DNA, 20 bp, Artificial Sequence
  Description of Artificial Sequence: Synthetic oligonucleotide
  Target: LAMA2; (-) strand; PAM type: YTN; PAM sequence: TTT
gccaccaaaatgatgtatgt

SEQ ID NO: 209310 - DNA, 20 bp, Artificial Sequence
  Description of Artificial Sequence: Synthetic oligonucleotide
  Target: LAMA2; (-) strand; PAM type: YTN; PAM sequence: CTG
tgaggtttgccaccaaaatg

SEQ ID NO: 209311 - DNA, 20 bp, Artificial Sequence
  Description of Artificial Sequence: Synthetic oligonucleotide
  Target: LAMA2; (-) strand; PAM type: YTN; PAM sequence: CTG
gtggctgtgaggtttgccac

SEQ ID NO: 209312 - DNA, 20 bp, Artificial Sequence
  Description of Artificial Sequence: Synthetic oligonucleotide
  Target: LAMA2; (-) strand; PAM type: YTN; PAM sequence: CTA
taaatgactggtggctgtga

SEQ ID NO: 209313 - DNA, 20 bp, Artificial Sequence
  Description of Artificial Sequence: Synthetic oligonucleotide
  Target: LAMA2; (-) strand; PAM type: YTN; PAM sequence: TTG
gtactataaatgactggtgg

SEQ ID NO: 209314 - DNA, 20 bp, Artificial Sequence
  Description of Artificial Sequence: Synthetic oligonucleotide
  Target: LAMA2; (-) strand; PAM type: YTN; PAM sequence: CTT
ggtactataaatgactggtg

SEQ ID NO: 209315 - DNA, 20 bp, Artificial Sequence
  Description of Artificial Sequence: Synthetic oligonucleotide
  Target: LAMA2; (-) strand; PAM type: YTN; PAM sequence: TTA
cccaaagagcagggacttgg

SEQ ID NO: 209316 - DNA, 20 bp, Artificial Sequence
  Description of Artificial Sequence: Synthetic oligonucleotide
  Target: LAMA2; (-) strand; PAM type: YTN; PAM sequence: CTG
ttacccaaagagcagggact

SEQ ID NO: 209317 - DNA, 20 bp, Artificial Sequence
  Description of Artificial Sequence: Synthetic oligonucleotide
  Target: LAMA2; (-) strand; PAM type: YTN; PAM sequence: TTA
tccactgttacccaaagagc

SEQ ID NO: 209318 - DNA, 20 bp, Artificial Sequence
  Description of Artificial Sequence: Synthetic oligonucleotide
  Target: LAMA2; (-) strand; PAM type: YTN; PAM sequence: CTT
atccactgttacccaaagag

SEQ ID NO: 209319 - DNA, 20 bp, Artificial Sequence
  Description of Artificial Sequence: Synthetic oligonucleotide
  Target: LAMA2; (-) strand; PAM type: YTN; PAM sequence: TTC
ttatccactgttacccaaag

SEQ ID NO: 209320 - DNA, 20 bp, Artificial Sequence
  Description of Artificial Sequence: Synthetic oligonucleotide
  Target: LAMA2; (-) strand; PAM type: YTN; PAM sequence: TTT
cttatccactgttacccaaa

SEQ ID NO: 209321 - DNA, 20 bp, Artificial Sequence
  Description of Artificial Sequence: Synthetic oligonucleotide
  Target: LAMA2; (-) strand; PAM type: YTN; PAM sequence: TTG
tgtagcatttcttatccact

SEQ ID NO: 209322 - DNA, 20 bp, Artificial Sequence
  Description of Artificial Sequence: Synthetic oligonucleotide
  Target: LAMA2; (-) strand; PAM type: YTN; PAM sequence: CTT
gtgtagcatttcttatccac

SEQ ID NO: 209323 - DNA, 20 bp, Artificial Sequence
  Description of Artificial Sequence: Synthetic oligonucleotide
  Target: LAMA2; (-) strand; PAM type: YTN; PAM sequence: CTC
cacataaggagcttgtgtag

SEQ ID NO: 209324 - DNA, 20 bp, Artificial Sequence
  Description of Artificial Sequence: Synthetic oligonucleotide
  Target: LAMA2; (-) strand; PAM type: YTN; PAM sequence: TTC
tccacataaggagcttgtgt

SEQ ID NO: 209325 - DNA, 20 bp, Artificial Sequence
  Description of Artificial Sequence: Synthetic oligonucleotide
  Target: LAMA2; (-) strand; PAM type: YTN; PAM sequence: TTT
ctccacataaggagcttgtg

SEQ ID NO: 209326 - DNA, 20 bp, Artificial Sequence
  Description of Artificial Sequence: Synthetic oligonucleotide
  Target: LAMA2; (-) strand; PAM type: YTN; PAM sequence: TTT
tctccacataaggagcttgt

SEQ ID NO: 209327 - DNA, 20 bp, Artificial Sequence
  Description of Artificial Sequence: Synthetic oligonucleotide
  Target: LAMA2; (-) strand; PAM type: YTN; PAM sequence: CTT
ttctccacataaggagcttg

SEQ ID NO: 209328 - DNA, 20 bp, Artificial Sequence
  Description of Artificial Sequence: Synthetic oligonucleotide
  Target: LAMA2; (-) strand; PAM type: YTN; PAM sequence: TTC
caaataggagaacagtcttt

SEQ ID NO: 209329 - DNA, 20 bp, Artificial Sequence
  Description of Artificial Sequence: Synthetic oligonucleotide
  Target: LAMA2; (-) strand; PAM type: YTN; PAM sequence: CTT
ccaaataggagaacagtctt

SEQ ID NO: 209330 - DNA, 20 bp, Artificial Sequence
  Description of Artificial Sequence: Synthetic oligonucleotide
  Target: LAMA2; (-) strand; PAM type: YTN; PAM sequence: TTG
ataaatgtgcaaagggcatg

SEQ ID NO: 209331 - DNA, 20 bp, Artificial Sequence
  Description of Artificial Sequence: Synthetic oligonucleotide
  Target: LAMA2; (-) strand; PAM type: YTN; PAM sequence: TTT
gataaatgtgcaaagggcat

SEQ ID NO: 209332 - DNA, 20 bp, Artificial Sequence
  Description of Artificial Sequence: Synthetic oligonucleotide
  Target: LAMA2; (-) strand; PAM type: YTN; PAM sequence: TTA
tttgataaatgtgcaaaggg

SEQ ID NO: 209333 - DNA, 20 bp, Artificial Sequence
  Description of Artificial Sequence: Synthetic oligonucleotide
  Target: LAMA2; (-) strand; PAM type: YTN; PAM sequence: TTG
aaaaaacataaaggacaagt

SEQ ID NO: 209334 - DNA, 20 bp, Artificial Sequence
  Description of Artificial Sequence: Synthetic oligonucleotide
  Target: LAMA2; (-) strand; PAM type: YTN; PAM sequence: CTT
gaaaaaacataaaggacaag

SEQ ID NO: 209335 - DNA, 20 bp, Artificial Sequence
  Description of Artificial Sequence: Synthetic oligonucleotide
  Target: LAMA2; (-) strand; PAM type: YTN; PAM sequence: CTA
atgatacaaatgcttgaaaa

SEQ ID NO: 209336 - DNA, 20 bp, Artificial Sequence
  Description of Artificial Sequence: Synthetic oligonucleotide
  Target: LAMA2; (-) strand; PAM type: YTN; PAM sequence: TTG
cctaatgatacaaatgcttg

SEQ ID NO: 209337 - DNA, 20 bp, Artificial Sequence
  Description of Artificial Sequence: Synthetic oligonucleotide
  Target: LAMA2; (-) strand; PAM type: YTN; PAM sequence: CTT
gcctaatgatacaaatgctt

SEQ ID NO: 209338 - DNA, 20 bp, Artificial Sequence
  Description of Artificial Sequence: Synthetic oligonucleotide
  Target: LAMA2; (-) strand; PAM type: YTN; PAM sequence: TTA
ggcagagccttgcctaatga

SEQ ID NO: 209339 - DNA, 20 bp, Artificial Sequence
  Description of Artificial Sequence: Synthetic oligonucleotide
  Target: LAMA2; (-) strand; PAM type: YTN; PAM sequence: TTC
cattaggcagagccttgcct

SEQ ID NO: 209340 - DNA, 20 bp, Artificial Sequence
  Description of Artificial Sequence: Synthetic oligonucleotide
  Target: LAMA2; (-) strand; PAM type: YTN; PAM sequence: CTT
ccattaggcagagccttgcc

SEQ ID NO: 209341 - DNA, 20 bp, Artificial Sequence
  Description of Artificial Sequence: Synthetic oligonucleotide
  Target: LAMA2; (-) strand; PAM type: YTN; PAM sequence: CTC
ttccattaggcagagccttg

SEQ ID NO: 209342 - DNA, 20 bp, Artificial Sequence
  Description of Artificial Sequence: Synthetic oligonucleotide
  Target: LAMA2; (-) strand; PAM type: YTN; PAM sequence: CTG
ggcacagagtaagagtaaat

SEQ ID NO: 209343 - DNA, 20 bp, Artificial Sequence
  Description of Artificial Sequence: Synthetic oligonucleotide
  Target: LAMA2; (-) strand; PAM type: YTN; PAM sequence: TTG
aaaatacccagagatggacg

SEQ ID NO: 209344 - DNA, 20 bp, Artificial Sequence
  Description of Artificial Sequence: Synthetic oligonucleotide
  Target: LAMA2; (-) strand; PAM type: YTN; PAM sequence: CTT
gaaaatacccagagatggac

SEQ ID NO: 209345 - DNA, 20 bp, Artificial Sequence
  Description of Artificial Sequence: Synthetic oligonucleotide
  Target: LAMA2; (-) strand; PAM type: YTN; PAM sequence: CTC
caatgcttgaaaatacccag

SEQ ID NO: 209346 - DNA, 20 bp, Artificial Sequence
  Description of Artificial Sequence: Synthetic oligonucleotide
  Target: LAMA2; (-) strand; PAM type: YTN; PAM sequence: TTG
ccacctccaatgcttgaaaa

SEQ ID NO: 209347 - DNA, 20 bp, Artificial Sequence
  Description of Artificial Sequence: Synthetic oligonucleotide
  Target: LAMA2; (-) strand; PAM type: YTN; PAM sequence: CTA
ttgccacctccaatgcttga

SEQ ID NO: 209348 - DNA, 20 bp, Artificial Sequence
  Description of Artificial Sequence: Synthetic oligonucleotide
  Target: LAMA2; (-) strand; PAM type: YTN; PAM sequence: CTA
agcacactattgccacctcc

SEQ ID NO: 209349 - DNA, 20 bp, Artificial Sequence
  Description of Artificial Sequence: Synthetic oligonucleotide
  Target: LAMA2; (-) strand; PAM type: YTN; PAM sequence: TTG
aggctaagcacactattgcc

SEQ ID NO: 209350 - DNA, 20 bp, Artificial Sequence
  Description of Artificial Sequence: Synthetic oligonucleotide
  Target: LAMA2; (-) strand; PAM type: YTN; PAM sequence: CTT
gaggctaagcacactattgc

SEQ ID NO: 209351 - DNA, 20 bp, Artificial Sequence
  Description of Artificial Sequence: Synthetic oligonucleotide
  Target: LAMA2; (-) strand; PAM type: YTN; PAM sequence: CTC
agtcttgaggctaagcacac

SEQ ID NO: 209352 - DNA, 20 bp, Artificial Sequence
  Description of Artificial Sequence: Synthetic oligonucleotide
  Target: LAMA2; (-) strand; PAM type: YTN; PAM sequence: TTG
ctcagtcttgaggctaagca

SEQ ID NO: 209353 - DNA, 20 bp, Artificial Sequence
  Description of Artificial Sequence: Synthetic oligonucleotide
  Target: LAMA2; (-) strand; PAM type: YTN; PAM sequence: TTT
gctcagtcttgaggctaagc

SEQ ID NO: 209354 - DNA, 20 bp, Artificial Sequence
  Description of Artificial Sequence: Synthetic oligonucleotide
  Target: LAMA2; (-) strand; PAM type: YTN; PAM sequence: CTT
tgctcagtcttgaggctaag

SEQ ID NO: 209355 - DNA, 20 bp, Artificial Sequence
  Description of Artificial Sequence: Synthetic oligonucleotide
  Target: LAMA2; (-) strand; PAM type: YTN; PAM sequence: TTC
tttgctcagtcttgaggcta

SEQ ID NO: 209356 - DNA, 20 bp, Artificial Sequence
  Description of Artificial Sequence: Synthetic oligonucleotide
  Target: LAMA2; (-) strand; PAM type: YTN; PAM sequence: TTT
ctttgctcagtcttgaggct

SEQ ID NO: 209357 - DNA, 20 bp, Artificial Sequence
  Description of Artificial Sequence: Synthetic oligonucleotide
  Target: LAMA2; (-) strand; PAM type: YTN; PAM sequence: TTC
atttctttgctcagtcttga

SEQ ID NO: 209358 - DNA, 20 bp, Artificial Sequence
  Description of Artificial Sequence: Synthetic oligonucleotide
  Target: LAMA2; (-) strand; PAM type: YTN; PAM sequence: CTG
gaaagttcatttctttgctc

SEQ ID NO: 209359 - DNA, 20 bp, Artificial Sequence
  Description of Artificial Sequence: Synthetic oligonucleotide
  Target: LAMA2; (-) strand; PAM type: YTN; PAM sequence: CTC
tggaaagttcatttctttgc

SEQ ID NO: 209360 - DNA, 20 bp, Artificial Sequence
  Description of Artificial Sequence: Synthetic oligonucleotide
  Target: LAMA2; (-) strand; PAM type: YTN; PAM sequence: TTA
agagtaatctctggaaagtt

SEQ ID NO: 209361 - DNA, 20 bp, Artificial Sequence
  Description of Artificial Sequence: Synthetic oligonucleotide
  Target: LAMA2; (-) strand; PAM type: YTN; PAM sequence: TTT
aagagtaatctctggaaagt

SEQ ID NO: 209362 - DNA, 20 bp, Artificial Sequence
  Description of Artificial Sequence: Synthetic oligonucleotide
  Target: LAMA2; (-) strand; PAM type: YTN; PAM sequence: TTT
taagagtaatctctggaaag

SEQ ID NO: 209363 - DNA, 20 bp, Artificial Sequence
  Description of Artificial Sequence: Synthetic oligonucleotide
  Target: LAMA2; (-) strand; PAM type: YTN; PAM sequence: CTC
agaatgggatattttaagag

SEQ ID NO: 209364 - DNA, 20 bp, Artificial Sequence
  Description of Artificial Sequence: Synthetic oligonucleotide
  Target: LAMA2; (-) strand; PAM type: YTN; PAM sequence: CTC
tcagaatgggatattttaag

SEQ ID NO: 209365 - DNA, 20 bp, Artificial Sequence
  Description of Artificial Sequence: Synthetic oligonucleotide
  Target: LAMA2; (-) strand; PAM type: YTN; PAM sequence: CTA
agagaaacatgtgctctcag

SEQ ID NO: 209366 - DNA, 20 bp, Artificial Sequence
  Description of Artificial Sequence: Synthetic oligonucleotide
  Target: LAMA2; (-) strand; PAM type: YTN; PAM sequence: CTG
aaagtccggagtaaacagta

SEQ ID NO: 209367 - DNA, 20 bp, Artificial Sequence
  Description of Artificial Sequence: Synthetic oligonucleotide
  Target: LAMA2; (-) strand; PAM type: YTN; PAM sequence: CTG
accctgaaagtccggagtaa

SEQ ID NO: 209368 - DNA, 20 bp, Artificial Sequence
  Description of Artificial Sequence: Synthetic oligonucleotide
  Target: LAMA2; (-) strand; PAM type: YTN; PAM sequence: CTA
ctgaccctgaaagtccggag

SEQ ID NO: 209369 - DNA, 20 bp, Artificial Sequence
  Description of Artificial Sequence: Synthetic oligonucleotide
  Target: LAMA2; (-) strand; PAM type: YTN; PAM sequence: TTG
cctactgaccctgaaagtcc

SEQ ID NO: 209370 - DNA, 20 bp, Artificial Sequence
  Description of Artificial Sequence: Synthetic oligonucleotide
  Target: LAMA2; (-) strand; PAM type: YTN; PAM sequence: CTT
gcctactgaccctgaaagtc

SEQ ID NO: 209371 - DNA, 20 bp, Artificial Sequence
  Description of Artificial Sequence: Synthetic oligonucleotide
  Target: LAMA2; (-) strand; PAM type: YTN; PAM sequence: TTG
aaaagcttgcctactgaccc

SEQ ID NO: 209372 - DNA, 20 bp, Artificial Sequence
  Description of Artificial Sequence: Synthetic oligonucleotide
  Target: LAMA2; (-) strand; PAM type: YTN; PAM sequence: TTG
ttgaaaagcttgcctactga

SEQ ID NO: 209373 - DNA, 20 bp, Artificial Sequence
  Description of Artificial Sequence: Synthetic oligonucleotide
  Target: LAMA2; (-) strand; PAM type: YTN; PAM sequence: TTT
gttgaaaagcttgcctactg

SEQ ID NO: 209374 - DNA, 20 bp, Artificial Sequence
  Description of Artificial Sequence: Synthetic oligonucleotide
  Target: LAMA2; (-) strand; PAM type: YTN; PAM sequence: TTA
aaagaaaccaaatttgttga

SEQ ID NO: 209375 - DNA, 20 bp, Artificial Sequence
  Description of Artificial Sequence: Synthetic oligonucleotide
  Target: LAMA2; (-) strand; PAM type: YTN; PAM sequence: TTT
aaaagaaaccaaatttgttg

SEQ ID NO: 209376 - DNA, 20 bp, Artificial Sequence
  Description of Artificial Sequence: Synthetic oligonucleotide
  Target: LAMA2; (-) strand; PAM type: YTN; PAM sequence: TTT
taaaagaaaccaaatttgtt

SEQ ID NO: 209377 - DNA, 20 bp, Artificial Sequence
  Description of Artificial Sequence: Synthetic oligonucleotide
  Target: LAMA2; (-) strand; PAM type: YTN; PAM sequence: TTT
ttaaaagaaaccaaatttgt

SEQ ID NO: 209378 - DNA, 20 bp, Artificial Sequence
  Description of Artificial Sequence: Synthetic oligonucleotide
  Target: LAMA2; (-) strand; PAM type: YTN; PAM sequence: CTA
ccaaaaatagtttttaaaag

SEQ ID NO: 209379 - DNA, 20 bp, Artificial Sequence
  Description of Artificial Sequence: Synthetic oligonucleotide
  Target: LAMA2; (-) strand; PAM type: YTN; PAM sequence: TTA
acaaaactaccaaaaatagt

SEQ ID NO: 209380 - DNA, 20 bp, Artificial Sequence
  Description of Artificial Sequence: Synthetic oligonucleotide
  Target: LAMA2; (-) strand; PAM type: YTN; PAM sequence: TTT
aacaaaactaccaaaaatag

SEQ ID NO: 209381 - DNA, 20 bp, Artificial Sequence
  Description of Artificial Sequence: Synthetic oligonucleotide
  Target: LAMA2; (-) strand; PAM type: YTN; PAM sequence: TTA
ccagacacatttaacaaaac

SEQ ID NO: 209382 - DNA, 20 bp, Artificial Sequence
  Description of Artificial Sequence: Synthetic oligonucleotide
  Target: LAMA2; (-) strand; PAM type: YTN; PAM sequence: TTA
aaatgaattaccagacacat

SEQ ID NO: 209383 - DNA, 20 bp, Artificial Sequence
  Description of Artificial Sequence: Synthetic oligonucleotide
  Target: LAMA2; (-) strand; PAM type: YTN; PAM sequence: CTT
aaaatgaattaccagacaca

SEQ ID NO: 209384 - DNA, 20 bp, Artificial Sequence
  Description of Artificial Sequence: Synthetic oligonucleotide
  Target: LAMA2; (-) strand; PAM type: YTN; PAM sequence: TTC
cacttaaaatgaattaccag

SEQ ID NO: 209385 - DNA, 20 bp, Artificial Sequence
  Description of Artificial Sequence: Synthetic oligonucleotide
  Target: LAMA2; (-) strand; PAM type: YTN; PAM sequence: TTT
ccacttaaaatgaattacca

SEQ ID NO: 209386 - DNA, 20 bp, Artificial Sequence
  Description of Artificial Sequence: Synthetic oligonucleotide
  Target: LAMA2; (-) strand; PAM type: YTN; PAM sequence: TTT
tccacttaaaatgaattacc

SEQ ID NO: 209387 - DNA, 20 bp, Artificial Sequence
  Description of Artificial Sequence: Synthetic oligonucleotide
  Target: LAMA2; (-) strand; PAM type: YTN; PAM sequence: CTT
ttccacttaaaatgaattac

SEQ ID NO: 209388 - DNA, 20 bp, Artificial Sequence
  Description of Artificial Sequence: Synthetic oligonucleotide
  Target: LAMA2; (-) strand; PAM type: YTN; PAM sequence: CTC
catcccttttccacttaaaa

SEQ ID NO: 209389 - DNA, 20 bp, Artificial Sequence
  Description of Artificial Sequence: Synthetic oligonucleotide
  Target: LAMA2; (-) strand; PAM type: YTN; PAM sequence: TTA
tctccatcccttttccactt

SEQ ID NO: 209390 - DNA, 20 bp, Artificial Sequence
  Description of Artificial Sequence: Synthetic oligonucleotide
  Target: LAMA2; (-) strand; PAM type: YTN; PAM sequence: TTT
atctccatcccttttccact

SEQ ID NO: 209391 - DNA, 20 bp, Artificial Sequence
  Description of Artificial Sequence: Synthetic oligonucleotide
  Target: LAMA2; (-) strand; PAM type: YTN; PAM sequence: CTT
tatctccatcccttttccac

SEQ ID NO: 209392 - DNA, 20 bp, Artificial Sequence
  Description of Artificial Sequence: Synthetic oligonucleotide
  Target: LAMA2; (-) strand; PAM type: YTN; PAM sequence: CTA
ccctttatctccatcccttt

SEQ ID NO: 209393 - DNA, 20 bp, Artificial Sequence
  Description of Artificial Sequence: Synthetic oligonucleotide
  Target: LAMA2; (-) strand; PAM type: YTN; PAM sequence: CTA
cctaccctttatctccatcc

SEQ ID NO: 209394 - DNA, 20 bp, Artificial Sequence
  Description of Artificial Sequence: Synthetic oligonucleotide
  Target: LAMA2; (-) strand; PAM type: YTN; PAM sequence: TTC
tacctaccctttatctccat

SEQ ID NO: 209395 - DNA, 20 bp, Artificial Sequence
  Description of Artificial Sequence: Synthetic oligonucleotide
  Target: LAMA2; (-) strand; PAM type: YTN; PAM sequence: TTA
caattctacctaccctttat

SEQ ID NO: 209396 - DNA, 20 bp, Artificial Sequence
  Description of Artificial Sequence: Synthetic oligonucleotide
  Target: LAMA2; (-) strand; PAM type: YTN; PAM sequence: TTT
acaattctacctacccttta

SEQ ID NO: 209397 - DNA, 20 bp, Artificial Sequence
  Description of Artificial Sequence: Synthetic oligonucleotide
  Target: LAMA2; (-) strand; PAM type: YTN; PAM sequence: TTA
ggacatttacaattctacct

SEQ ID NO: 209398 - DNA, 20 bp, Artificial Sequence
  Description of Artificial Sequence: Synthetic oligonucleotide
  Target: LAMA2; (-) strand; PAM type: YTN; PAM sequence: CTT
aggacatttacaattctacc

SEQ ID NO: 209399 - DNA, 20 bp, Artificial Sequence
  Description of Artificial Sequence: Synthetic oligonucleotide
  Target: LAMA2; (-) strand; PAM type: YTN; PAM sequence: TTA
tcaaaaacataggatgataa

SEQ ID NO: 209400 - DNA, 20 bp, Artificial Sequence
  Description of Artificial Sequence: Synthetic oligonucleotide
  Target: LAMA2; (-) strand; PAM type: YTN; PAM sequence: CTT
atcaaaaacataggatgata

SEQ ID NO: 209401 - DNA, 20 bp, Artificial Sequence
  Description of Artificial Sequence: Synthetic oligonucleotide
  Target: LAMA2; (-) strand; PAM type: YTN; PAM sequence: TTA
ccagataaaacttatcaaaa

SEQ ID NO: 209402 - DNA, 20 bp, Artificial Sequence
  Description of Artificial Sequence: Synthetic oligonucleotide
  Target: LAMA2; (-) strand; PAM type: YTN; PAM sequence: CTG
ttaccagataaaacttatca

SEQ ID NO: 209403 - DNA, 20 bp, Artificial Sequence
  Description of Artificial Sequence: Synthetic oligonucleotide
  Target: LAMA2; (-) strand; PAM type: YTN; PAM sequence: TTG
tctgttaccagataaaactt

SEQ ID NO: 209404 - DNA, 20 bp, Artificial Sequence
  Description of Artificial Sequence: Synthetic oligonucleotide
  Target: LAMA2; (-) strand; PAM type: YTN; PAM sequence: TTT
gtctgttaccagataaaact

SEQ ID NO: 209405 - DNA, 20 bp, Artificial Sequence
  Description of Artificial Sequence: Synthetic oligonucleotide
  Target: LAMA2; (-) strand; PAM type: YTN; PAM sequence: CTA
caatgtttgtctgttaccag

SEQ ID NO: 209406 - DNA, 20 bp, Artificial Sequence
  Description of Artificial Sequence: Synthetic oligonucleotide
  Target: LAMA2; (-) strand; PAM type: YTN; PAM sequence: TTC
tacaatgtttgtctgttacc

SEQ ID NO: 209407 - DNA, 20 bp, Artificial Sequence
  Description of Artificial Sequence: Synthetic oligonucleotide
  Target: LAMA2; (-) strand; PAM type: YTN; PAM sequence: CTT
ctacaatgtttgtctgttac

SEQ ID NO: 209408 - DNA, 20 bp, Artificial Sequence
  Description of Artificial Sequence: Synthetic oligonucleotide
  Target: LAMA2; (-) strand; PAM type: YTN; PAM sequence: TTG
cttctacaatgtttgtctgt

SEQ ID NO: 209409 - DNA, 20 bp, Artificial Sequence
  Description of Artificial Sequence: Synthetic oligonucleotide
  Target: LAMA2; (-) strand; PAM type: YTN; PAM sequence: CTT
gcttctacaatgtttgtctg

SEQ ID NO: 209410 - DNA, 20 bp, Artificial Sequence
  Description of Artificial Sequence: Synthetic oligonucleotide
  Target: LAMA2; (-) strand; PAM type: YTN; PAM sequence: TTC
ttgcttctacaatgtttgtc

SEQ ID NO: 209411 - DNA, 20 bp, Artificial Sequence
  Description of Artificial Sequence: Synthetic oligonucleotide
  Target: LAMA2; (-) strand; PAM type: YTN; PAM sequence: CTT
cttgcttctacaatgtttgt

SEQ ID NO: 209412 - DNA, 20 bp, Artificial Sequence
  Description of Artificial Sequence: Synthetic oligonucleotide
  Target: LAMA2; (-) strand; PAM type: YTN; PAM sequence: TTA
aaccccttcttgcttctaca

SEQ ID NO: 209413 - DNA, 20 bp, Artificial Sequence
  Description of Artificial Sequence: Synthetic oligonucleotide
  Target: LAMA2; (-) strand; PAM type: YTN; PAM sequence: TTA
acaacattaaaccccttctt

SEQ ID NO: 209414 - DNA, 20 bp, Artificial Sequence
  Description of Artificial Sequence: Synthetic oligonucleotide
  Target: LAMA2; (-) strand; PAM type: YTN; PAM sequence: TTT
aacaacattaaaccccttct

SEQ ID NO: 209415 - DNA, 20 bp, Artificial Sequence
  Description of Artificial Sequence: Synthetic oligonucleotide
  Target: LAMA2; (-) strand; PAM type: YTN; PAM sequence: TTA
tttaacaacattaaacccct

SEQ ID NO: 209416 - DNA, 20 bp, Artificial Sequence
  Description of Artificial Sequence: Synthetic oligonucleotide
  Target: LAMA2; (-) strand; PAM type: YTN; PAM sequence: TTT
atttaacaacattaaacccc

SEQ ID NO: 209417 - DNA, 20 bp, Artificial Sequence
  Description of Artificial Sequence: Synthetic oligonucleotide
  Target: LAMA2; (-) strand; PAM type: YTN; PAM sequence: CTT
tatttaacaacattaaaccc

SEQ ID NO: 209418 - DNA, 20 bp, Artificial Sequence
  Description of Artificial Sequence: Synthetic oligonucleotide
  Target: LAMA2; (-) strand; PAM type: YTN; PAM sequence: TTC
tttatttaacaacattaaac

SEQ ID NO: 209419 - DNA, 20 bp, Artificial Sequence
  Description of Artificial Sequence: Synthetic oligonucleotide
  Target: LAMA2; (-) strand; PAM type: YTN; PAM sequence: TTT
ctttatttaacaacattaaa

SEQ ID NO: 209420 - DNA, 20 bp, Artificial Sequence
  Description of Artificial Sequence: Synthetic oligonucleotide
  Target: LAMA2; (-) strand; PAM type: YTN; PAM sequence: TTT
tctttatttaacaacattaa

SEQ ID NO: 209421 - DNA, 20 bp, Artificial Sequence
  Description of Artificial Sequence: Synthetic oligonucleotide
  Target: LAMA2; (-) strand; PAM type: YTN; PAM sequence: TTA
atacattttctttatttaac

SEQ ID NO: 209422 - DNA, 20 bp, Artificial Sequence
  Description of Artificial Sequence: Synthetic oligonucleotide
  Target: LAMA2; (-) strand; PAM type: YTN; PAM sequence: TTT
aatacattttctttatttaa

SEQ ID NO: 209423 - DNA, 20 bp, Artificial Sequence
  Description of Artificial Sequence: Synthetic oligonucleotide
  Target: LAMA2; (-) strand; PAM type: YTN; PAM sequence: TTT
taatacattttctttattta

SEQ ID NO: 209424 - DNA, 20 bp, Artificial Sequence
  Description of Artificial Sequence: Synthetic oligonucleotide
  Target: LAMA2; (-) strand; PAM type: YTN; PAM sequence: CTT
ttaatacattttctttattt

SEQ ID NO: 209425 - DNA, 20 bp, Artificial Sequence
  Description of Artificial Sequence: Synthetic oligonucleotide
  Target: LAMA2; (-) strand; PAM type: YTN; PAM sequence: CTC
ttttaatacattttctttat

SEQ ID NO: 209426 - DNA, 20 bp, Artificial Sequence
  Description of Artificial Sequence: Synthetic oligonucleotide
  Target: LAMA2; (-) strand; PAM type: YTN; PAM sequence: TTC
tcttttaatacattttcttt

SEQ ID NO: 209427 - DNA, 20 bp, Artificial Sequence
  Description of Artificial Sequence: Synthetic oligonucleotide
  Target: LAMA2; (-) strand; PAM type: YTN; PAM sequence: TTT
ctcttttaatacattttctt

SEQ ID NO: 209428 - DNA, 20 bp, Artificial Sequence
  Description of Artificial Sequence: Synthetic oligonucleotide
  Target: LAMA2; (-) strand; PAM type: YTN; PAM sequence: TTT
tctcttttaatacattttct

SEQ ID NO: 209429 - DNA, 20 bp, Artificial Sequence
  Description of Artificial Sequence: Synthetic oligonucleotide
  Target: LAMA2; (-) strand; PAM type: YTN; PAM sequence: TTT
ttctcttttaatacattttc

SEQ ID NO: 209430 - DNA, 20 bp, Artificial Sequence
  Description of Artificial Sequence: Synthetic oligonucleotide
  Target: LAMA2; (-) strand; PAM type: YTN; PAM sequence: CTC
gtttttctcttttaatacat

SEQ ID NO: 209431 - DNA, 20 bp, Artificial Sequence
  Description of Artificial Sequence: Synthetic oligonucleotide
  Target: LAMA2; (-) strand; PAM type: YTN; PAM sequence: CTG
agtagaaggaacacaagggt

SEQ ID NO: 209432 - DNA, 20 bp, Artificial Sequence
  Description of Artificial Sequence: Synthetic oligonucleotide
  Target: LAMA2; (-) strand; PAM type: YTN; PAM sequence: TTA
caatggagtcctgagtagaa

SEQ ID NO: 209433 - DNA, 20 bp, Artificial Sequence
  Description of Artificial Sequence: Synthetic oligonucleotide
  Target: LAMA2; (-) strand; PAM type: YTN; PAM sequence: TTT
acaatggagtcctgagtaga

SEQ ID NO: 209434 - DNA, 20 bp, Artificial Sequence
  Description of Artificial Sequence: Synthetic oligonucleotide
  Target: LAMA2; (-) strand; PAM type: YTN; PAM sequence: CTG
agcatttacaatggagtcct

SEQ ID NO: 209435 - DNA, 20 bp, Artificial Sequence
  Description of Artificial Sequence: Synthetic oligonucleotide
  Target: LAMA2; (-) strand; PAM type: YTN; PAM sequence: TTA
atcctgagcatttacaatgg

SEQ ID NO: 209436 - DNA, 20 bp, Artificial Sequence
  Description of Artificial Sequence: Synthetic oligonucleotide
  Target: LAMA2; (-) strand; PAM type: YTN; PAM sequence: CTG
catcaaatgacaaaaaaatt

SEQ ID NO: 209437 - DNA, 20 bp, Artificial Sequence
  Description of Artificial Sequence: Synthetic oligonucleotide
  Target: LAMA2; (-) strand; PAM type: YTN; PAM sequence: TTG
cagaaagacaaggtacagta

SEQ ID NO: 209438 - DNA, 20 bp, Artificial Sequence
  Description of Artificial Sequence: Synthetic oligonucleotide
  Target: LAMA2; (-) strand; PAM type: YTN; PAM sequence: TTT
gcagaaagacaaggtacagt

SEQ ID NO: 209439 - DNA, 20 bp, Artificial Sequence
  Description of Artificial Sequence: Synthetic oligonucleotide
  Target: LAMA2; (-) strand; PAM type: YTN; PAM sequence: CTT
tgcagaaagacaaggtacag

SEQ ID NO: 209440 - DNA, 20 bp, Artificial Sequence
  Description of Artificial Sequence: Synthetic oligonucleotide
  Target: LAMA2; (-) strand; PAM type: YTN; PAM sequence: TTG
ctttgcagaaagacaaggta

SEQ ID NO: 209441 - DNA, 20 bp, Artificial Sequence
  Description of Artificial Sequence: Synthetic oligonucleotide
  Target: LAMA2; (-) strand; PAM type: YTN; PAM sequence: TTT
gctttgcagaaagacaaggt

SEQ ID NO: 209442 - DNA, 20 bp, Artificial Sequence
  Description of Artificial Sequence: Synthetic oligonucleotide
  Target: LAMA2; (-) strand; PAM type: YTN; PAM sequence: CTT
tgctttgcagaaagacaagg

SEQ ID NO: 209443 - DNA, 20 bp, Artificial Sequence
  Description of Artificial Sequence: Synthetic oligonucleotide
  Target: LAMA2; (-) strand; PAM type: YTN; PAM sequence: TTA
tctttgctttgcagaaagac

SEQ ID NO: 209444 - DNA, 20 bp, Artificial Sequence
  Description of Artificial Sequence: Synthetic oligonucleotide
  Target: LAMA2; (-) strand; PAM type: YTN; PAM sequence: CTA
caatattatctttgctttgc

SEQ ID NO: 209445 - DNA, 20 bp, Artificial Sequence
  Description of Artificial Sequence: Synthetic oligonucleotide
  Target: LAMA2; (-) strand; PAM type: YTN; PAM sequence: TTA
aactacaatattatctttgc

SEQ ID NO: 209446 - DNA, 20 bp, Artificial Sequence
  Description of Artificial Sequence: Synthetic oligonucleotide
  Target: LAMA2; (-) strand; PAM type: YTN; PAM sequence: TTT
aaactacaatattatctttg

SEQ ID NO: 209447 - DNA, 20 bp, Artificial Sequence
  Description of Artificial Sequence: Synthetic oligonucleotide
  Target: LAMA2; (-) strand; PAM type: YTN; PAM sequence: TTT
taaactacaatattatcttt

SEQ ID NO: 209448 - DNA, 20 bp, Artificial Sequence
  Description of Artificial Sequence: Synthetic oligonucleotide
  Target: LAMA2; (-) strand; PAM type: YTN; PAM sequence: CTC
atggtggtggatagccaagt

SEQ ID NO: 209449 - DNA, 20 bp, Artificial Sequence
  Description of Artificial Sequence: Synthetic oligonucleotide
  Target: LAMA2; (-) strand; PAM type: YTN; PAM sequence: TTC
cctcatggtggtggatagcc

SEQ ID NO: 209450 - DNA, 20 bp, Artificial Sequence
  Description of Artificial Sequence: Synthetic oligonucleotide
  Target: LAMA2; (-) strand; PAM type: YTN; PAM sequence: CTG
cagaaaaataagagaagcat

SEQ ID NO: 209451 - DNA, 20 bp, Artificial Sequence
  Description of Artificial Sequence: Synthetic oligonucleotide
  Target: LAMA2; (-) strand; PAM type: YTN; PAM sequence: TTC
tgcagaaaaataagagaagc

SEQ ID NO: 209452 - DNA, 20 bp, Artificial Sequence
  Description of Artificial Sequence: Synthetic oligonucleotide
  Target: LAMA2; (-) strand; PAM type: YTN; PAM sequence: TTT
ctgcagaaaaataagagaag

SEQ ID NO: 209453 - DNA, 20 bp, Artificial Sequence
  Description of Artificial Sequence: Synthetic oligonucleotide
  Target: LAMA2; (-) strand; PAM type: YTN; PAM sequence: TTA
aatgtttctgcagaaaaata

SEQ ID NO: 209454 - DNA, 20 bp, Artificial Sequence
  Description of Artificial Sequence: Synthetic oligonucleotide
  Target: LAMA2; (-) strand; PAM type: YTN; PAM sequence: TTT
aaatgtttctgcagaaaaat

SEQ ID NO: 209455 - DNA, 20 bp, Artificial Sequence
  Description of Artificial Sequence: Synthetic oligonucleotide
  Target: LAMA2; (-) strand; PAM type: YTN; PAM sequence: TTT
taaatgtttctgcagaaaaa

SEQ ID NO: 209456 - DNA, 20 bp, Artificial Sequence
  Description of Artificial Sequence: Synthetic oligonucleotide
  Target: LAMA2; (-) strand; PAM type: YTN; PAM sequence: CTG
aagaaattttaaatgtttct

SEQ ID NO: 209457 - DNA, 20 bp, Artificial Sequence
  Description of Artificial Sequence: Synthetic oligonucleotide
  Target: LAMA2; (-) strand; PAM type: YTN; PAM sequence: TTC
aggtaagtacaaaatatagc

SEQ ID NO: 209458 - DNA, 20 bp, Artificial Sequence
  Description of Artificial Sequence: Synthetic oligonucleotide
  Target: LAMA2; (-) strand; PAM type: YTN; PAM sequence: TTA
aaattcaggtaagtacaaaa

SEQ ID NO: 209459 - DNA, 20 bp, Artificial Sequence
  Description of Artificial Sequence: Synthetic oligonucleotide
  Target: LAMA2; (-) strand; PAM type: YTN; PAM sequence: TTT
aaaattcaggtaagtacaaa

SEQ ID NO: 209460 - DNA, 20 bp, Artificial Sequence
  Description of Artificial Sequence: Synthetic oligonucleotide
  Target: LAMA2; (-) strand; PAM type: YTN; PAM sequence: TTT
taaaattcaggtaagtacaa

SEQ ID NO: 209461 - DNA, 20 bp, Artificial Sequence
  Description of Artificial Sequence: Synthetic oligonucleotide
  Target: LAMA2; (-) strand; PAM type: YTN; PAM sequence: TTT
ttaaaattcaggtaagtaca

SEQ ID NO: 209462 - DNA, 20 bp, Artificial Sequence
  Description of Artificial Sequence: Synthetic oligonucleotide
  Target: LAMA2; (-) strand; PAM type: YTN; PAM sequence: CTA
tttttaaaattcaggtaagt

SEQ ID NO: 209463 - DNA, 20 bp, Artificial Sequence
  Description of Artificial Sequence: Synthetic oligonucleotide
  Target: LAMA2; (-) strand; PAM type: YTN; PAM sequence: TTC
tatttttaaaattcaggtaa

SEQ ID NO: 209464 - DNA, 20 bp, Artificial Sequence
  Description of Artificial Sequence: Synthetic oligonucleotide
  Target: LAMA2; (-) strand; PAM type: YTN; PAM sequence: CTA
tattctatttttaaaattca

SEQ ID NO: 209465 - DNA, 20 bp, Artificial Sequence
  Description of Artificial Sequence: Synthetic oligonucleotide
  Target: LAMA2; (-) strand; PAM type: YTN; PAM sequence: TTA
tctatattctatttttaaaa

SEQ ID NO: 209466 - DNA, 20 bp, Artificial Sequence
  Description of Artificial Sequence: Synthetic oligonucleotide
  Target: LAMA2; (-) strand; PAM type: YTN; PAM sequence: TTA
ataacagtgagtgagtcaca

SEQ ID NO: 209467 - DNA, 20 bp, Artificial Sequence
  Description of Artificial Sequence: Synthetic oligonucleotide
  Target: LAMA2; (-) strand; PAM type: YTN; PAM sequence: CTA
ttaataacagtgagtgagtc

SEQ ID NO: 209468 - DNA, 20 bp, Artificial Sequence
  Description of Artificial Sequence: Synthetic oligonucleotide
  Target: LAMA2; (-) strand; PAM type: YTN; PAM sequence: TTA
gaaaaataactattaataac

SEQ ID NO: 209469 - DNA, 20 bp, Artificial Sequence
  Description of Artificial Sequence: Synthetic oligonucleotide
  Target: LAMA2; (-) strand; PAM type: YTN; PAM sequence: TTC
aaattagaaaaataactatt

SEQ ID NO: 209470 - DNA, 20 bp, Artificial Sequence
  Description of Artificial Sequence: Synthetic oligonucleotide
  Target: LAMA2; (-) strand; PAM type: YTN; PAM sequence: TTA
acaaagcataatattcaaat

SEQ ID NO: 209471 - DNA, 20 bp, Artificial Sequence
  Description of Artificial Sequence: Synthetic oligonucleotide
  Target: LAMA2; (-) strand; PAM type: YTN; PAM sequence: CTT
aacaaagcataatattcaaa

SEQ ID NO: 209472 - DNA, 20 bp, Artificial Sequence
  Description of Artificial Sequence: Synthetic oligonucleotide
  Target: LAMA2; (-) strand; PAM type: YTN; PAM sequence: CTA
aataacttaacaaagcataa

SEQ ID NO: 209473 - DNA, 20 bp, Artificial Sequence
  Description of Artificial Sequence: Synthetic oligonucleotide
  Target: LAMA2; (-) strand; PAM type: YTN; PAM sequence: TTC
taaataacttaacaaagcat

SEQ ID NO: 209474 - DNA, 20 bp, Artificial Sequence
  Description of Artificial Sequence: Synthetic oligonucleotide
  Target: LAMA2; (-) strand; PAM type: YTN; PAM sequence: TTA
cagatggggtaagtggttct

SEQ ID NO: 209475 - DNA, 20 bp, Artificial Sequence
  Description of Artificial Sequence: Synthetic oligonucleotide
  Target: LAMA2; (-) strand; PAM type: YTN; PAM sequence: TTT
acagatggggtaagtggttc

SEQ ID NO: 209476 - DNA, 20 bp, Artificial Sequence
  Description of Artificial Sequence: Synthetic oligonucleotide
  Target: LAMA2; (-) strand; PAM type: YTN; PAM sequence: TTA
tttacagatggggtaagtgg

SEQ ID NO: 209477 - DNA, 20 bp, Artificial Sequence
  Description of Artificial Sequence: Synthetic oligonucleotide
  Target: LAMA2; (-) strand; PAM type: YTN; PAM sequence: TTC
ggggttatttacagatgggg

SEQ ID NO: 209478 - DNA, 20 bp, Artificial Sequence
  Description of Artificial Sequence: Synthetic oligonucleotide
  Target: LAMA2; (-) strand; PAM type: YTN; PAM sequence: TTA
gaagaaacaaaggtgatgac

SEQ ID NO: 209479 - DNA, 20 bp, Artificial Sequence
  Description of Artificial Sequence: Synthetic oligonucleotide
  Target: LAMA2; (-) strand; PAM type: YTN; PAM sequence: TTA
caacatgttagaagaaacaa

SEQ ID NO: 209480 - DNA, 20 bp, Artificial Sequence
  Description of Artificial Sequence: Synthetic oligonucleotide
  Target: LAMA2; (-) strand; PAM type: YTN; PAM sequence: TTA
cattacaacatgttagaaga

SEQ ID NO: 209481 - DNA, 20 bp, Artificial Sequence
  Description of Artificial Sequence: Synthetic oligonucleotide
  Target: LAMA2; (-) strand; PAM type: YTN; PAM sequence: TTT
acattacaacatgttagaag

SEQ ID NO: 209482 - DNA, 20 bp, Artificial Sequence
  Description of Artificial Sequence: Synthetic oligonucleotide
  Target: LAMA2; (-) strand; PAM type: YTN; PAM sequence: TTT
tacattacaacatgttagaa

SEQ ID NO: 209483 - DNA, 20 bp, Artificial Sequence
  Description of Artificial Sequence: Synthetic oligonucleotide
  Target: LAMA2; (-) strand; PAM type: YTN; PAM sequence: TTG
attttacattacaacatgtt

SEQ ID NO: 209484 - DNA, 20 bp, Artificial Sequence
  Description of Artificial Sequence: Synthetic oligonucleotide
  Target: LAMA2; (-) strand; PAM type: YTN; PAM sequence: TTT
gattttacattacaacatgt

SEQ ID NO: 209485 - DNA, 20 bp, Artificial Sequence
  Description of Artificial Sequence: Synthetic oligonucleotide
  Target: LAMA2; (-) strand; PAM type: YTN; PAM sequence: TTT
tgattttacattacaacatg

SEQ ID NO: 209486 - DNA, 20 bp, Artificial Sequence
  Description of Artificial Sequence: Synthetic oligonucleotide
  Target: LAMA2; (-) strand; PAM type: YTN; PAM sequence: TTA
ataattttgattttacatta

SEQ ID NO: 209487 - DNA, 20 bp, Artificial Sequence
  Description of Artificial Sequence: Synthetic oligonucleotide
  Target: LAMA2; (-) strand; PAM type: YTN; PAM sequence: CTT
aataattttgattttacatt

SEQ ID NO: 209488 - DNA, 20 bp, Artificial Sequence
  Description of Artificial Sequence: Synthetic oligonucleotide
  Target: LAMA2; (-) strand; PAM type: YTN; PAM sequence: TTA
taacttaataattttgattt

SEQ ID NO: 209489 - DNA, 20 bp, Artificial Sequence
  Description of Artificial Sequence: Synthetic oligonucleotide
  Target: LAMA2; (-) strand; PAM type: YTN; PAM sequence: TTA
tatcataaataattataact

SEQ ID NO: 209490 - DNA, 20 bp, Artificial Sequence
  Description of Artificial Sequence: Synthetic oligonucleotide
  Target: LAMA2; (-) strand; PAM type: YTN; PAM sequence: CTT
atatcataaataattataac

SEQ ID NO: 209491 - DNA, 20 bp, Artificial Sequence
  Description of Artificial Sequence: Synthetic oligonucleotide
  Target: LAMA2; (-) strand; PAM type: YTN; PAM sequence: TTC
ttatatcataaataattata

SEQ ID NO: 209492 - DNA, 20 bp, Artificial Sequence
  Description of Artificial Sequence: Synthetic oligonucleotide
  Target: LAMA2; (-) strand; PAM type: YTN; PAM sequence: CTT
cttatatcataaataattat

SEQ ID NO: 209493 - DNA, 20 bp, Artificial Sequence
  Description of Artificial Sequence: Synthetic oligonucleotide
  Target: LAMA2; (-) strand; PAM type: YTN; PAM sequence: TTA
tccacagaatacttcttata

SEQ ID NO: 209494 - DNA, 20 bp, Artificial Sequence
  Description of Artificial Sequence: Synthetic oligonucleotide
  Target: LAMA2; (-) strand; PAM type: YTN; PAM sequence: TTT
atccacagaatacttcttat

SEQ ID NO: 209495 - DNA, 20 bp, Artificial Sequence
  Description of Artificial Sequence: Synthetic oligonucleotide
  Target: LAMA2; (-) strand; PAM type: YTN; PAM sequence: CTT
tatccacagaatacttctta

SEQ ID NO: 209496 - DNA, 20 bp, Artificial Sequence
  Description of Artificial Sequence: Synthetic oligonucleotide
  Target: LAMA2; (-) strand; PAM type: YTN; PAM sequence: CTA
aatatccaaaataaatgtat

SEQ ID NO: 209497 - DNA, 20 bp, Artificial Sequence
  Description of Artificial Sequence: Synthetic oligonucleotide
  Target: LAMA2; (-) strand; PAM type: YTN; PAM sequence: TTC
taaatatccaaaataaatgt

SEQ ID NO: 209498 - DNA, 20 bp, Artificial Sequence
  Description of Artificial Sequence: Synthetic oligonucleotide
  Target: LAMA2; (-) strand; PAM type: YTN; PAM sequence: TTA
ttctaaatatccaaaataaa

SEQ ID NO: 209499 - DNA, 20 bp, Artificial Sequence
  Description of Artificial Sequence: Synthetic oligonucleotide
  Target: LAMA2; (-) strand; PAM type: YTN; PAM sequence: TTA
tgccaaaaacaaacaaaaat

SEQ ID NO: 209500 - DNA, 20 bp, Artificial Sequence
  Description of Artificial Sequence: Synthetic oligonucleotide
  Target: LAMA2; (-) strand; PAM type: YTN; PAM sequence: CTG
taaatagtcaagaaaaagga

SEQ ID NO: 209501 - DNA, 20 bp, Artificial Sequence
  Description of Artificial Sequence: Synthetic oligonucleotide
  Target: LAMA2; (-) strand; PAM type: YTN; PAM sequence: TTC
ctgtaaatagtcaagaaaaa

SEQ ID NO: 209502 - DNA, 20 bp, Artificial Sequence
  Description of Artificial Sequence: Synthetic oligonucleotide
  Target: LAMA2; (-) strand; PAM type: YTN; PAM sequence: TTT
cctgtaaatagtcaagaaaa

SEQ ID NO: 209503 - DNA, 20 bp, Artificial Sequence
  Description of Artificial Sequence: Synthetic oligonucleotide
  Target: LAMA2; (-) strand; PAM type: YTN; PAM sequence: CTA
tttcctgtaaatagtcaaga

SEQ ID NO: 209504 - DNA, 20 bp, Artificial Sequence
  Description of Artificial Sequence: Synthetic oligonucleotide
  Target: LAMA2; (-) strand; PAM type: YTN; PAM sequence: CTA
gctatttcctgtaaatagtc

SEQ ID NO: 209505 - DNA, 20 bp, Artificial Sequence
  Description of Artificial Sequence: Synthetic oligonucleotide
  Target: LAMA2; (-) strand; PAM type: YTN; PAM sequence: CTA
taactagctatttcctgtaa

SEQ ID NO: 209506 - DNA, 20 bp, Artificial Sequence
  Description of Artificial Sequence: Synthetic oligonucleotide
  Target: LAMA2; (-) strand; PAM type: YTN; PAM sequence: TTA
ggtaaaacctataactagct

SEQ ID NO: 209507 - DNA, 20 bp, Artificial Sequence
  Description of Artificial Sequence: Synthetic oligonucleotide
  Target: LAMA2; (-) strand; PAM type: YTN; PAM sequence: CTT
aggtaaaacctataactagc

SEQ ID NO: 209508 - DNA, 20 bp, Artificial Sequence
  Description of Artificial Sequence: Synthetic oligonucleotide
  Target: LAMA2; (-) strand; PAM type: YTN; PAM sequence: TTG
aatgagacttaggtaaaacc

SEQ ID NO: 209509 - DNA, 20 bp, Artificial Sequence
  Description of Artificial Sequence: Synthetic oligonucleotide
  Target: LAMA2; (-) strand; PAM type: YTN; PAM sequence: CTT
gaatgagacttaggtaaaac

SEQ ID NO: 209510 - DNA, 20 bp, Artificial Sequence
  Description of Artificial Sequence: Synthetic oligonucleotide
  Target: LAMA2; (-) strand; PAM type: YTN; PAM sequence: TTA
gcttgaatgagacttaggta

SEQ ID NO: 209511 - DNA, 20 bp, Artificial Sequence
  Description of Artificial Sequence: Synthetic oligonucleotide
  Target: LAMA2; (-) strand; PAM type: YTN; PAM sequence: TTG
cataatccattagcttgaat

SEQ ID NO: 209512 - DNA, 20 bp, Artificial Sequence
  Description of Artificial Sequence: Synthetic oligonucleotide
  Target: LAMA2; (-) strand; PAM type: YTN; PAM sequence: TTT
gcataatccattagcttgaa

SEQ ID NO: 209513 - DNA, 20 bp, Artificial Sequence
  Description of Artificial Sequence: Synthetic oligonucleotide
  Target: LAMA2; (-) strand; PAM type: YTN; PAM sequence: TTA
tttgcataatccattagctt

SEQ ID NO: 209514 - DNA, 20 bp, Artificial Sequence
  Description of Artificial Sequence: Synthetic oligonucleotide
  Target: LAMA2; (-) strand; PAM type: YTN; PAM sequence: TTT
atttgcataatccattagct

SEQ ID NO: 209515 - DNA, 20 bp, Artificial Sequence
  Description of Artificial Sequence: Synthetic oligonucleotide
  Target: LAMA2; (-) strand; PAM type: YTN; PAM sequence: CTT
tatttgcataatccattagc

SEQ ID NO: 209516 - DNA, 20 bp, Artificial Sequence
  Description of Artificial Sequence: Synthetic oligonucleotide
  Target: LAMA2; (-) strand; PAM type: YTN; PAM sequence: TTC
agtgagcaaactttatttgc

SEQ ID NO: 209517 - DNA, 20 bp, Artificial Sequence
  Description of Artificial Sequence: Synthetic oligonucleotide
  Target: LAMA2; (-) strand; PAM type: YTN; PAM sequence: CTT
cagtgagcaaactttatttg

SEQ ID NO: 209518 - DNA, 20 bp, Artificial Sequence
  Description of Artificial Sequence: Synthetic oligonucleotide
  Target: LAMA2; (-) strand; PAM type: YTN; PAM sequence: TTG
tccttcagtgagcaaacttt

SEQ ID NO: 209519 - DNA, 20 bp, Artificial Sequence
  Description of Artificial Sequence: Synthetic oligonucleotide
  Target: LAMA2; (-) strand; PAM type: YTN; PAM sequence: CTT
gtccttcagtgagcaaactt

SEQ ID NO: 209520 - DNA, 20 bp, Artificial Sequence
  Description of Artificial Sequence: Synthetic oligonucleotide
  Target: LAMA2; (-) strand; PAM type: YTN; PAM sequence: TTC
ttgtccttcagtgagcaaac

SEQ ID NO: 209521 - DNA, 20 bp, Artificial Sequence
  Description of Artificial Sequence: Synthetic oligonucleotide
  Target: LAMA2; (-) strand; PAM type: YTN; PAM sequence: TTG
aagaaccagaaaaaagatac

SEQ ID NO: 209522 - DNA, 20 bp, Artificial Sequence
  Description of Artificial Sequence: Synthetic oligonucleotide
  Target: LAMA2; (-) strand; PAM type: YTN; PAM sequence: CTT
gaagaaccagaaaaaagata

SEQ ID NO: 209523 - DNA, 20 bp, Artificial Sequence
  Description of Artificial Sequence: Synthetic oligonucleotide
  Target: LAMA2; (-) strand; PAM type: YTN; PAM sequence: CTA
tcaccttgaagaaccagaaa

SEQ ID NO: 209524 - DNA, 20 bp, Artificial Sequence
  Description of Artificial Sequence: Synthetic oligonucleotide
  Target: LAMA2; (-) strand; PAM type: YTN; PAM sequence: TTA
tgaactatcaccttgaagaa

SEQ ID NO: 209525 - DNA, 20 bp, Artificial Sequence
  Description of Artificial Sequence: Synthetic oligonucleotide
  Target: LAMA2; (-) strand; PAM type: YTN; PAM sequence: TTT
atgaactatcaccttgaaga

SEQ ID NO: 209526 - DNA, 20 bp, Artificial Sequence
  Description of Artificial Sequence: Synthetic oligonucleotide
  Target: LAMA2; (-) strand; PAM type: YTN; PAM sequence: CTT
tatgaactatcaccttgaag

SEQ ID NO: 209527 - DNA, 20 bp, Artificial Sequence
  Description of Artificial Sequence: Synthetic oligonucleotide
  Target: LAMA2; (-) strand; PAM type: YTN; PAM sequence: TTC
tttatgaactatcaccttga

SEQ ID NO: 209528 - DNA, 20 bp, Artificial Sequence
  Description of Artificial Sequence: Synthetic oligonucleotide
  Target: LAMA2; (-) strand; PAM type: YTN; PAM sequence: TTG
tcaatggaacatattcttta

SEQ ID NO: 209529 - DNA, 20 bp, Artificial Sequence
  Description of Artificial Sequence: Synthetic oligonucleotide
  Target: LAMA2; (-) strand; PAM type: YTN; PAM sequence: TTT
gtcaatggaacatattcttt

SEQ ID NO: 209530 - DNA, 20 bp, Artificial Sequence
  Description of Artificial Sequence: Synthetic oligonucleotide
  Target: LAMA2; (-) strand; PAM type: YTN; PAM sequence: CTT
tgtcaatggaacatattctt

SEQ ID NO: 209531 - DNA, 20 bp, Artificial Sequence
  Description of Artificial Sequence: Synthetic oligonucleotide
  Target: LAMA2; (-) strand; PAM type: YTN; PAM sequence: CTA
actttgtcaatggaacatat

SEQ ID NO: 209532 - DNA, 20 bp, Artificial Sequence
  Description of Artificial Sequence: Synthetic oligonucleotide
  Target: LAMA2; (-) strand; PAM type: YTN; PAM sequence: CTA
aaaaacataactaactttgt

SEQ ID NO: 209533 - DNA, 20 bp, Artificial Sequence
  Description of Artificial Sequence: Synthetic oligonucleotide
  Target: LAMA2; (-) strand; PAM type: YTN; PAM sequence: TTA
ataagctaaaaaacataact

SEQ ID NO: 209534 - DNA, 20 bp, Artificial Sequence
  Description of Artificial Sequence: Synthetic oligonucleotide
  Target: LAMA2; (-) strand; PAM type: YTN; PAM sequence: TTT
aataagctaaaaaacataac

SEQ ID NO: 209535 - DNA, 20 bp, Artificial Sequence
  Description of Artificial Sequence: Synthetic oligonucleotide
  Target: LAMA2; (-) strand; PAM type: YTN; PAM sequence: TTA
gtttaataagctaaaaaaca

SEQ ID NO: 209536 - DNA, 20 bp, Artificial Sequence
  Description of Artificial Sequence: Synthetic oligonucleotide
  Target: LAMA2; (-) strand; PAM type: YTN; PAM sequence: TTA
aattagtttaataagctaaa

SEQ ID NO: 209537 - DNA, 20 bp, Artificial Sequence
  Description of Artificial Sequence: Synthetic oligonucleotide
  Target: LAMA2; (-) strand; PAM type: YTN; PAM sequence: CTT
aaattagtttaataagctaa

SEQ ID NO: 209538 - DNA, 20 bp, Artificial Sequence
  Description of Artificial Sequence: Synthetic oligonucleotide
  Target: LAMA2; (-) strand; PAM type: YTN; PAM sequence: TTG
tccttaaattagtttaataa

SEQ ID NO: 209539 - DNA, 20 bp, Artificial Sequence
  Description of Artificial Sequence: Synthetic oligonucleotide
  Target: LAMA2; (-) strand; PAM type: YTN; PAM sequence: TTT
gtccttaaattagtttaata

SEQ ID NO: 209540 - DNA, 20 bp, Artificial Sequence
  Description of Artificial Sequence: Synthetic oligonucleotide
  Target: LAMA2; (-) strand; PAM type: YTN; PAM sequence: CTT
tgtccttaaattagtttaat

SEQ ID NO: 209541 - DNA, 20 bp, Artificial Sequence
  Description of Artificial Sequence: Synthetic oligonucleotide
  Target: LAMA2; (-) strand; PAM type: YTN; PAM sequence: TTC
tttgtccttaaattagttta

SEQ ID NO: 209542 - DNA, 20 bp, Artificial Sequence
  Description of Artificial Sequence: Synthetic oligonucleotide
  Target: LAMA2; (-) strand; PAM type: YTN; PAM sequence: CTT
ctttgtccttaaattagttt

SEQ ID NO: 209543 - DNA, 20 bp, Artificial Sequence
  Description of Artificial Sequence: Synthetic oligonucleotide
  Target: LAMA2; (-) strand; PAM type: YTN; PAM sequence: CTC
ttctttgtccttaaattagt

SEQ ID NO: 209544 - DNA, 20 bp, Artificial Sequence
  Description of Artificial Sequence: Synthetic oligonucleotide
  Target: LAMA2; (-) strand; PAM type: YTN; PAM sequence: TTC
tcttctttgtccttaaatta

SEQ ID NO: 209545 - DNA, 20 bp, Artificial Sequence
  Description of Artificial Sequence: Synthetic oligonucleotide
  Target: LAMA2; (-) strand; PAM type: YTN; PAM sequence: TTT
ctcttctttgtccttaaatt

SEQ ID NO: 209546 - DNA, 20 bp, Artificial Sequence
  Description of Artificial Sequence: Synthetic oligonucleotide
  Target: LAMA2; (-) strand; PAM type: YTN; PAM sequence: TTT
tctcttctttgtccttaaat

SEQ ID NO: 209547 - DNA, 20 bp, Artificial Sequence
  Description of Artificial Sequence: Synthetic oligonucleotide
  Target: LAMA2; (-) strand; PAM type: YTN; PAM sequence: TTA
ttttctcttctttgtcctta

SEQ ID NO: 209548 - DNA, 20 bp, Artificial Sequence
  Description of Artificial Sequence: Synthetic oligonucleotide
  Target: LAMA2; (-) strand; PAM type: YTN; PAM sequence: TTG
aaaattattttctcttcttt

SEQ ID NO: 209549 - DNA, 20 bp, Artificial Sequence
  Description of Artificial Sequence: Synthetic oligonucleotide
  Target: LAMA2; (-) strand; PAM type: YTN; PAM sequence: TTT
gaaaattattttctcttctt

SEQ ID NO: 209550 - DNA, 20 bp, Artificial Sequence
  Description of Artificial Sequence: Synthetic oligonucleotide
  Target: LAMA2; (-) strand; PAM type: YTN; PAM sequence: TTA
gtgagggccaagcacagtgg

SEQ ID NO: 209551 - DNA, 20 bp, Artificial Sequence
  Description of Artificial Sequence: Synthetic oligonucleotide
  Target: LAMA2; (-) strand; PAM type: YTN; PAM sequence: CTC
acaggcaaaaacataattag

SEQ ID NO: 209552 - DNA, 20 bp, Artificial Sequence
  Description of Artificial Sequence: Synthetic oligonucleotide
  Target: LAMA2; (-) strand; PAM type: YTN; PAM sequence: CTC
caaaatccgtatctcacagg

SEQ ID NO: 209553 - DNA, 20 bp, Artificial Sequence
  Description of Artificial Sequence: Synthetic oligonucleotide
  Target: LAMA2; (-) strand; PAM type: YTN; PAM sequence: TTG
caaatacagcctccaaaatc

SEQ ID NO: 209554 - DNA, 20 bp, Artificial Sequence
  Description of Artificial Sequence: Synthetic oligonucleotide
  Target: LAMA2; (-) strand; PAM type: YTN; PAM sequence: TTA
ttgcaaatacagcctccaaa

SEQ ID NO: 209555 - DNA, 20 bp, Artificial Sequence
  Description of Artificial Sequence: Synthetic oligonucleotide
  Target: LAMA2; (-) strand; PAM type: YTN; PAM sequence: CTT
attgcaaatacagcctccaa

SEQ ID NO: 209556 - DNA, 20 bp, Artificial Sequence
  Description of Artificial Sequence: Synthetic oligonucleotide
  Target: LAMA2; (-) strand; PAM type: YTN; PAM sequence: TTG
tgtatgtgtcacttattgca

SEQ ID NO: 209557 - DNA, 20 bp, Artificial Sequence
  Description of Artificial Sequence: Synthetic oligonucleotide
  Target: LAMA2; (-) strand; PAM type: YTN; PAM sequence: TTA
taaattgtgtatgtgtcact

SEQ ID NO: 209558 - DNA, 20 bp, Artificial Sequence
  Description of Artificial Sequence: Synthetic oligonucleotide
  Target: LAMA2; (-) strand; PAM type: YTN; PAM sequence: TTT
ataaattgtgtatgtgtcac

SEQ ID NO: 209559 - DNA, 20 bp, Artificial Sequence
  Description of Artificial Sequence: Synthetic oligonucleotide
  Target: LAMA2; (-) strand; PAM type: YTN; PAM sequence: TTA
tcatttataaattgtgtatg

SEQ ID NO: 209560 - DNA, 20 bp, Artificial Sequence
  Description of Artificial Sequence: Synthetic oligonucleotide
  Target: LAMA2; (-) strand; PAM type: YTN; PAM sequence: TTT
atcatttataaattgtgtat

SEQ ID NO: 209561 - DNA, 20 bp, Artificial Sequence
  Description of Artificial Sequence: Synthetic oligonucleotide
  Target: LAMA2; (-) strand; PAM type: YTN; PAM sequence: TTT
tatcatttataaattgtgta

SEQ ID NO: 209562 - DNA, 20 bp, Artificial Sequence
  Description of Artificial Sequence: Synthetic oligonucleotide
  Target: LAMA2; (-) strand; PAM type: YTN; PAM sequence: TTA
tattttatcatttataaatt

SEQ ID NO: 209563 - DNA, 20 bp, Artificial Sequence
  Description of Artificial Sequence: Synthetic oligonucleotide
  Target: LAMA2; (-) strand; PAM type: YTN; PAM sequence: TTT
atattttatcatttataaat

SEQ ID NO: 209564 - DNA, 20 bp, Artificial Sequence
  Description of Artificial Sequence: Synthetic oligonucleotide
  Target: LAMA2; (-) strand; PAM type: YTN; PAM sequence: TTT
tatattttatcatttataaa

SEQ ID NO: 209565 - DNA, 20 bp, Artificial Sequence
  Description of Artificial Sequence: Synthetic oligonucleotide
  Target: LAMA2; (-) strand; PAM type: YTN; PAM sequence: TTA
agacaaatattttatatttt

SEQ ID NO: 209566 - DNA, 20 bp, Artificial Sequence
  Description of Artificial Sequence: Synthetic oligonucleotide
  Target: LAMA2; (-) strand; PAM type: YTN; PAM sequence: TTT
aagacaaatattttatattt

SEQ ID NO: 209567 - DNA, 20 bp, Artificial Sequence
  Description of Artificial Sequence: Synthetic oligonucleotide
  Target: LAMA2; (-) strand; PAM type: YTN; PAM sequence: CTA
tttaagacaaatattttata

SEQ ID NO: 209568 - DNA, 20 bp, Artificial Sequence
  Description of Artificial Sequence: Synthetic oligonucleotide
  Target: LAMA2; (-) strand; PAM type: YTN; PAM sequence: CTC
cctatttaagacaaatattt

SEQ ID NO: 209569 - DNA, 20 bp, Artificial Sequence
  Description of Artificial Sequence: Synthetic oligonucleotide
  Target: LAMA2; (-) strand; PAM type: YTN; PAM sequence: TTA
cagcatctccctatttaaga

SEQ ID NO: 209570 - DNA, 20 bp, Artificial Sequence
  Description of Artificial Sequence: Synthetic oligonucleotide
  Target: LAMA2; (-) strand; PAM type: YTN; PAM sequence: TTG
aagaggggaaagagacatta

SEQ ID NO: 209571 - DNA, 20 bp, Artificial Sequence
  Description of Artificial Sequence: Synthetic oligonucleotide
  Target: LAMA2; (-) strand; PAM type: YTN; PAM sequence: CTG
taatatgatacgttgaagag

SEQ ID NO: 209572 - DNA, 20 bp, Artificial Sequence
  Description of Artificial Sequence: Synthetic oligonucleotide
  Target: LAMA2; (-) strand; PAM type: YTN; PAM sequence: TTG
aggaatcactgtaatatgat

SEQ ID NO: 209573 - DNA, 20 bp, Artificial Sequence
  Description of Artificial Sequence: Synthetic oligonucleotide
  Target: LAMA2; (-) strand; PAM type: YTN; PAM sequence: CTC
attgaggaatcactgtaata

SEQ ID NO: 209574 - DNA, 20 bp, Artificial Sequence
  Description of Artificial Sequence: Synthetic oligonucleotide
  Target: LAMA2; (-) strand; PAM type: YTN; PAM sequence: CTG
ctcattgaggaatcactgta

SEQ ID NO: 209575 - DNA, 20 bp, Artificial Sequence
  Description of Artificial Sequence: Synthetic oligonucleotide
  Target: LAMA2; (-) strand; PAM type: YTN; PAM sequence: TTC
agctgctcattgaggaatca

SEQ ID NO: 209576 - DNA, 20 bp, Artificial Sequence
  Description of Artificial Sequence: Synthetic oligonucleotide
  Target: LAMA2; (-) strand; PAM type: YTN; PAM sequence: CTG
atggtgataggtaatacgtc

SEQ ID NO: 209577 - DNA, 20 bp, Artificial Sequence
  Description of Artificial Sequence: Synthetic oligonucleotide
  Target: LAMA2; (-) strand; PAM type: YTN; PAM sequence: TTC
ataacatagcctgatggtga

SEQ ID NO: 209578 - DNA, 20 bp, Artificial Sequence
  Description of Artificial Sequence: Synthetic oligonucleotide
  Target: LAMA2; (-) strand; PAM type: YTN; PAM sequence: TTT
cataacatagcctgatggtg

SEQ ID NO: 209579 - DNA, 20 bp, Artificial Sequence
  Description of Artificial Sequence: Synthetic oligonucleotide
  Target: LAMA2; (-) strand; PAM type: YTN; PAM sequence: CTA
aaagtgagtttcataacata

SEQ ID NO: 209580 - DNA, 20 bp, Artificial Sequence
  Description of Artificial Sequence: Synthetic oligonucleotide
  Target: LAMA2; (-) strand; PAM type: YTN; PAM sequence: CTC
taaaagtgagtttcataaca

SEQ ID NO: 209581 - DNA, 20 bp, Artificial Sequence
  Description of Artificial Sequence: Synthetic oligonucleotide
  Target: LAMA2; (-) strand; PAM type: YTN; PAM sequence: TTA
tctctaaaagtgagtttcat

SEQ ID NO: 209582 - DNA, 20 bp, Artificial Sequence
  Description of Artificial Sequence: Synthetic oligonucleotide
  Target: LAMA2; (-) strand; PAM type: YTN; PAM sequence: TTT
atctctaaaagtgagtttca

SEQ ID NO: 209583 - DNA, 20 bp, Artificial Sequence
  Description of Artificial Sequence: Synthetic oligonucleotide
  Target: LAMA2; (-) strand; PAM type: YTN; PAM sequence: CTT
tatctctaaaagtgagtttc

SEQ ID NO: 209584 - DNA, 20 bp, Artificial Sequence
  Description of Artificial Sequence: Synthetic oligonucleotide
  Target: LAMA2; (-) strand; PAM type: YTN; PAM sequence: TTG
ctttatctctaaaagtgagt

SEQ ID NO: 209585 - DNA, 20 bp, Artificial Sequence
  Description of Artificial Sequence: Synthetic oligonucleotide
  Target: LAMA2; (-) strand; PAM type: YTN; PAM sequence: TTT
gctttatctctaaaagtgag

SEQ ID NO: 209586 - DNA, 20 bp, Artificial Sequence
  Description of Artificial Sequence: Synthetic oligonucleotide
  Target: LAMA2; (-) strand; PAM type: YTN; PAM sequence: TTG
gacaatttgctttatctcta

SEQ ID NO: 209587 - DNA, 20 bp, Artificial Sequence
  Description of Artificial Sequence: Synthetic oligonucleotide
  Target: LAMA2; (-) strand; PAM type: YTN; PAM sequence: TTT
ggacaatttgctttatctct

SEQ ID NO: 209588 - DNA, 20 bp, Artificial Sequence
  Description of Artificial Sequence: Synthetic oligonucleotide
  Target: LAMA2; (-) strand; PAM type: YTN; PAM sequence: TTG
gtgacatttggacaatttgc

SEQ ID NO: 209589 - DNA, 20 bp, Artificial Sequence
  Description of Artificial Sequence: Synthetic oligonucleotide
  Target: LAMA2; (-) strand; PAM type: YTN; PAM sequence: TTC
aataattggtgacatttgga

SEQ ID NO: 209590 - DNA, 20 bp, Artificial Sequence
  Description of Artificial Sequence: Synthetic oligonucleotide
  Target: LAMA2; (-) strand; PAM type: YTN; PAM sequence: TTA
gattcaataattggtgacat

SEQ ID NO: 209591 - DNA, 20 bp, Artificial Sequence
  Description of Artificial Sequence: Synthetic oligonucleotide
  Target: LAMA2; (-) strand; PAM type: YTN; PAM sequence: TTT
agattcaataattggtgaca

SEQ ID NO: 209592 - DNA, 20 bp, Artificial Sequence
  Description of Artificial Sequence: Synthetic oligonucleotide
  Target: LAMA2; (-) strand; PAM type: YTN; PAM sequence: CTG
tatgcccacatttagattca

SEQ ID NO: 209593 - DNA, 20 bp, Artificial Sequence
  Description of Artificial Sequence: Synthetic oligonucleotide
  Target: LAMA2; (-) strand; PAM type: YTN; PAM sequence: TTC
aaataaaacctgtatgccca

SEQ ID NO: 209594 - DNA, 20 bp, Artificial Sequence
  Description of Artificial Sequence: Synthetic oligonucleotide
  Target: LAMA2; (-) strand; PAM type: YTN; PAM sequence: CTT
caaataaaacctgtatgccc

SEQ ID NO: 209595 - DNA, 20 bp, Artificial Sequence
  Description of Artificial Sequence: Synthetic oligonucleotide
  Target: LAMA2; (-) strand; PAM type: YTN; PAM sequence: CTG
cttcaaataaaacctgtatg

SEQ ID NO: 209596 - DNA, 20 bp, Artificial Sequence
  Description of Artificial Sequence: Synthetic oligonucleotide
  Target: LAMA2; (-) strand; PAM type: YTN; PAM sequence: CTG
aaagactgcttcaaataaaa

SEQ ID NO: 209597 - DNA, 20 bp, Artificial Sequence
  Description of Artificial Sequence: Synthetic oligonucleotide
  Target: LAMA2; (-) strand; PAM type: YTN; PAM sequence: TTA
aataaaaatgtaatcatata

SEQ ID NO: 209598 - DNA, 20 bp, Artificial Sequence
  Description of Artificial Sequence: Synthetic oligonucleotide
  Target: LAMA2; (-) strand; PAM type: YTN; PAM sequence: TTT
aaataaaaatgtaatcatat

SEQ ID NO: 209599 - DNA, 20 bp, Artificial Sequence
  Description of Artificial Sequence: Synthetic oligonucleotide
  Target: LAMA2; (-) strand; PAM type: YTN; PAM sequence: TTT
taaataaaaatgtaatcata

SEQ ID NO: 209600 - DNA, 20 bp, Artificial Sequence
  Description of Artificial Sequence: Synthetic oligonucleotide
  Target: LAMA2; (-) strand; PAM type: YTN; PAM sequence: TTT
ttaaataaaaatgtaatcat

SEQ ID NO: 209601 - DNA, 20 bp, Artificial Sequence
  Description of Artificial Sequence: Synthetic oligonucleotide
  Target: LAMA2; (-) strand; PAM type: YTN; PAM sequence: TTC
aaaatttttaaataaaaatg

SEQ ID NO: 209602 - DNA, 20 bp, Artificial Sequence
  Description of Artificial Sequence: Synthetic oligonucleotide
  Target: LAMA2; (-) strand; PAM type: YTN; PAM sequence: CTA
ttcaaaatttttaaataaaa

SEQ ID NO: 209603 - DNA, 20 bp, Artificial Sequence
  Description of Artificial Sequence: Synthetic oligonucleotide
  Target: LAMA2; (-) strand; PAM type: YTN; PAM sequence: TTA
caggcgtgagccaccacacc

SEQ ID NO: 209604 - DNA, 20 bp, Artificial Sequence
  Description of Artificial Sequence: Synthetic oligonucleotide
  Target: LAMA2; (-) strand; PAM type: YTN; PAM sequence: CTG
ggattacaggcgtgagccac

SEQ ID NO: 209605 - DNA, 20 bp, Artificial Sequence
  Description of Artificial Sequence: Synthetic oligonucleotide
  Target: LAMA2; (-) strand; PAM type: YTN; PAM sequence: CTC
ccaaagtgctgggattacag

SEQ ID NO: 209606 - DNA, 20 bp, Artificial Sequence
  Description of Artificial Sequence: Synthetic oligonucleotide
  Target: LAMA2; (-) strand; PAM type: YTN; PAM sequence: CTC
agcctcccaaagtgctggga

SEQ ID NO: 209607 - DNA, 20 bp, Artificial Sequence
  Description of Artificial Sequence: Synthetic oligonucleotide
  Target: LAMA2; (-) strand; PAM type: YTN; PAM sequence: CTC
gtgatccgcccgcctcagcc

SEQ ID NO: 209608 - DNA, 20 bp, Artificial Sequence
  Description of Artificial Sequence: Synthetic oligonucleotide
  Target: LAMA2; (-) strand; PAM type: YTN; PAM sequence: CTG
acctcgtgatccgcccgcct

SEQ ID NO: 209609 - DNA, 20 bp, Artificial Sequence
  Description of Artificial Sequence: Synthetic oligonucleotide
  Target: LAMA2; (-) strand; PAM type: YTN; PAM sequence: CTC
ctgacctcgtgatccgcccg

SEQ ID NO: 209610 - DNA, 20 bp, Artificial Sequence
  Description of Artificial Sequence: Synthetic oligonucleotide
  Target: LAMA2; (-) strand; PAM type: YTN; PAM sequence: CTC
gatctcctgacctcgtgatc

SEQ ID NO: 209611 - DNA, 20 bp, Artificial Sequence
  Description of Artificial Sequence: Synthetic oligonucleotide
  Target: LAMA2; (-) strand; PAM type: YTN; PAM sequence: TTC
accgtggtagccaggatggt

SEQ ID NO: 209612 - DNA, 20 bp, Artificial Sequence
  Description of Artificial Sequence: Synthetic oligonucleotide
  Target: LAMA2; (-) strand; PAM type: YTN; PAM sequence: TTT
caccgtggtagccaggatgg

SEQ ID NO: 209613 - DNA, 20 bp, Artificial Sequence
  Description of Artificial Sequence: Synthetic oligonucleotide
  Target: LAMA2; (-) strand; PAM type: YTN; PAM sequence: TTA
gtagagacggggtttcaccg

SEQ ID NO: 209614 - DNA, 20 bp, Artificial Sequence
  Description of Artificial Sequence: Synthetic oligonucleotide
  Target: LAMA2; (-) strand; PAM type: YTN; PAM sequence: TTT
agtagagacggggtttcacc

SEQ ID NO: 209615 - DNA, 20 bp, Artificial Sequence
  Description of Artificial Sequence: Synthetic oligonucleotide
  Target: LAMA2; (-) strand; PAM type: YTN; PAM sequence: TTT
tagtagagacggggtttcac

SEQ ID NO: 209616 - DNA, 20 bp, Artificial Sequence
  Description of Artificial Sequence: Synthetic oligonucleotide
  Target: LAMA2; (-) strand; PAM type: YTN; PAM sequence: TTT
ttagtagagacggggtttca

SEQ ID NO: 209617 - DNA, 20 bp, Artificial Sequence
  Description of Artificial Sequence: Synthetic oligonucleotide
  Target: LAMA2; (-) strand; PAM type: YTN; PAM sequence: TTG
gatttttagtagagacgggg

SEQ ID NO: 209618 - DNA, 20 bp, Artificial Sequence
  Description of Artificial Sequence: Synthetic oligonucleotide
  Target: LAMA2; (-) strand; PAM type: YTN; PAM sequence: TTT
ggatttttagtagagacggg

SEQ ID NO: 209619 - DNA, 20 bp, Artificial Sequence
  Description of Artificial Sequence: Synthetic oligonucleotide
  Target: LAMA2; (-) strand; PAM type: YTN; PAM sequence: TTT
tggatttttagtagagacgg

SEQ ID NO: 209620 - DNA, 20 bp, Artificial Sequence
  Description of Artificial Sequence: Synthetic oligonucleotide
  Target: LAMA2; (-) strand; PAM type: YTN; PAM sequence: TTT
ttggatttttagtagagacg

SEQ ID NO: 209621 - DNA, 20 bp, Artificial Sequence
  Description of Artificial Sequence: Synthetic oligonucleotide
  Target: LAMA2; (-) strand; PAM type: YTN; PAM sequence: TTT
tttggatttttagtagagac

SEQ ID NO: 209622 - DNA, 20 bp, Artificial Sequence
  Description of Artificial Sequence: Synthetic oligonucleotide
  Target: LAMA2; (-) strand; PAM type: YTN; PAM sequence: TTT
ttttggatttttagtagaga

SEQ ID NO: 209623 - DNA, 20 bp, Artificial Sequence
  Description of Artificial Sequence: Synthetic oligonucleotide
  Target: LAMA2; (-) strand; PAM type: YTN; PAM sequence: TTT
tttttggatttttagtagag

SEQ ID NO: 209624 - DNA, 20 bp, Artificial Sequence
  Description of Artificial Sequence: Synthetic oligonucleotide
  Target: LAMA2; (-) strand; PAM type: YTN; PAM sequence: CTA
attttttttggatttttagt

SEQ ID NO: 209625 - DNA, 20 bp, Artificial Sequence
  Description of Artificial Sequence: Synthetic oligonucleotide
  Target: LAMA2; (-) strand; PAM type: YTN; PAM sequence: CTA
caggcgcccgccaccacgcc

SEQ ID NO: 209626 - DNA, 20 bp, Artificial Sequence
  Description of Artificial Sequence: Synthetic oligonucleotide
  Target: LAMA2; (-) strand; PAM type: YTN; PAM sequence: CTG
ggactacaggcgcccgccac

SEQ ID NO: 209627 - DNA, 20 bp, Artificial Sequence
  Description of Artificial Sequence: Synthetic oligonucleotide
  Target: LAMA2; (-) strand; PAM type: YTN; PAM sequence: CTC
ccgagtagctgggactacag

SEQ ID NO: 209628 - DNA, 20 bp, Artificial Sequence
  Description of Artificial Sequence: Synthetic oligonucleotide
  Target: LAMA2; (-) strand; PAM type: YTN; PAM sequence: CTC
agcctcccgagtagctggga

SEQ ID NO: 209629 - DNA, 20 bp, Artificial Sequence
  Description of Artificial Sequence: Synthetic oligonucleotide
  Target: LAMA2; (-) strand; PAM type: YTN; PAM sequence: CTG
cctcagcctcccgagtagct

SEQ ID NO: 209630 - DNA, 20 bp, Artificial Sequence
  Description of Artificial Sequence: Synthetic oligonucleotide
  Target: LAMA2; (-) strand; PAM type: YTN; PAM sequence: CTC
ctgcctcagcctcccgagta

SEQ ID NO: 209631 - DNA, 20 bp, Artificial Sequence
  Description of Artificial Sequence: Synthetic oligonucleotide
  Target: LAMA2; (-) strand; PAM type: YTN; PAM sequence: TTC
tcctgcctcagcctcccgag

SEQ ID NO: 209632 - DNA, 20 bp, Artificial Sequence
  Description of Artificial Sequence: Synthetic oligonucleotide
  Target: LAMA2; (-) strand; PAM type: YTN; PAM sequence: TTC
ccgccattctcctgcctcag

SEQ ID NO: 209633 - DNA, 20 bp, Artificial Sequence
  Description of Artificial Sequence: Synthetic oligonucleotide
  Target: LAMA2; (-) strand; PAM type: YTN; PAM sequence: CTC
ccgggttcccgccattctcc

SEQ ID NO: 209634 - DNA, 20 bp, Artificial Sequence
  Description of Artificial Sequence: Synthetic oligonucleotide
  Target: LAMA2; (-) strand; PAM type: YTN; PAM sequence: CTC
cgcctcccgggttcccgcca

SEQ ID NO: 209635 - DNA, 20 bp, Artificial Sequence
  Description of Artificial Sequence: Synthetic oligonucleotide
  Target: LAMA2; (-) strand; PAM type: YTN; PAM sequence: CTG
caggctccgcctcccgggtt

SEQ ID NO: 209636 - DNA, 20 bp, Artificial Sequence
  Description of Artificial Sequence: Synthetic oligonucleotide
  Target: LAMA2; (-) strand; PAM type: YTN; PAM sequence: CTC
cctgcaggctccgcctcccg

SEQ ID NO: 209637 - DNA, 20 bp, Artificial Sequence
  Description of Artificial Sequence: Synthetic oligonucleotide
  Target: LAMA2; (-) strand; PAM type: YTN; PAM sequence: CTC
ggctccctgcaggctccgcc

SEQ ID NO: 209638 - DNA, 20 bp, Artificial Sequence
  Description of Artificial Sequence: Synthetic oligonucleotide
  Target: LAMA2; (-) strand; PAM type: YTN; PAM sequence: CTG
cagtggcgcgatctcggctc

SEQ ID NO: 209639 - DNA, 20 bp, Artificial Sequence
  Description of Artificial Sequence: Synthetic oligonucleotide
  Target: LAMA2; (-) strand; PAM type: YTN; PAM sequence: TTC
gcccaggccggactgcagtg

SEQ ID NO: 209640 - DNA, 20 bp, Artificial Sequence
  Description of Artificial Sequence: Synthetic oligonucleotide
  Target: LAMA2; (-) strand; PAM type: YTN; PAM sequence: TTT
cgcccaggccggactgcagt

SEQ ID NO: 209641 - DNA, 20 bp, Artificial Sequence
  Description of Artificial Sequence: Synthetic oligonucleotide
  Target: LAMA2; (-) strand; PAM type: YTN; PAM sequence: CTT
tcgcccaggccggactgcag

SEQ ID NO: 209642 - DNA, 20 bp, Artificial Sequence
  Description of Artificial Sequence: Synthetic oligonucleotide
  Target: LAMA2; (-) strand; PAM type: YTN; PAM sequence: CTC
tttcgcccaggccggactgc

SEQ ID NO: 209643 - DNA, 20 bp, Artificial Sequence
  Description of Artificial Sequence: Synthetic oligonucleotide
  Target: LAMA2; (-) strand; PAM type: YTN; PAM sequence: CTC
tctttcgcccaggccggact

SEQ ID NO: 209644 - DNA, 20 bp, Artificial Sequence
  Description of Artificial Sequence: Synthetic oligonucleotide
  Target: LAMA2; (-) strand; PAM type: YTN; PAM sequence: CTC
tctctttcgcccaggccgga

SEQ ID NO: 209645 - DNA, 20 bp, Artificial Sequence
  Description of Artificial Sequence: Synthetic oligonucleotide
  Target: LAMA2; (-) strand; PAM type: YTN; PAM sequence: TTG
agatggagtctctctctttc

SEQ ID NO: 209646 - DNA, 20 bp, Artificial Sequence
  Description of Artificial Sequence: Synthetic oligonucleotide
  Target: LAMA2; (-) strand; PAM type: YTN; PAM sequence: TTT
gagatggagtctctctcttt

SEQ ID NO: 209647 - DNA, 20 bp, Artificial Sequence
  Description of Artificial Sequence: Synthetic oligonucleotide
  Target: LAMA2; (-) strand; PAM type: YTN; PAM sequence: TTT
tgagatggagtctctctctt

SEQ ID NO: 209648 - DNA, 20 bp, Artificial Sequence
  Description of Artificial Sequence: Synthetic oligonucleotide
  Target: LAMA2; (-) strand; PAM type: YTN; PAM sequence: TTT
ttgagatggagtctctctct

SEQ ID NO: 209649 - DNA, 20 bp, Artificial Sequence
  Description of Artificial Sequence: Synthetic oligonucleotide
  Target: LAMA2; (-) strand; PAM type: YTN; PAM sequence: TTT
tttgagatggagtctctctc

SEQ ID NO: 209650 - DNA, 20 bp, Artificial Sequence
  Description of Artificial Sequence: Synthetic oligonucleotide
  Target: LAMA2; (-) strand; PAM type: YTN; PAM sequence: TTT
ttttgagatggagtctctct

SEQ ID NO: 209651 - DNA, 20 bp, Artificial Sequence
  Description of Artificial Sequence: Synthetic oligonucleotide
  Target: LAMA2; (-) strand; PAM type: YTN; PAM sequence: TTT
tttttgagatggagtctctc

SEQ ID NO: 209652 - DNA, 20 bp, Artificial Sequence
  Description of Artificial Sequence: Synthetic oligonucleotide
  Target: LAMA2; (-) strand; PAM type: YTN; PAM sequence: TTT
ttttttgagatggagtctct

SEQ ID NO: 209653 - DNA, 20 bp, Artificial Sequence
  Description of Artificial Sequence: Synthetic oligonucleotide
  Target: LAMA2; (-) strand; PAM type: YTN; PAM sequence: TTT
tttttttgagatggagtctc

SEQ ID NO: 209654 - DNA, 20 bp, Artificial Sequence
  Description of Artificial Sequence: Synthetic oligonucleotide
  Target: LAMA2; (-) strand; PAM type: YTN; PAM sequence: TTT
ttttttttgagatggagtct

SEQ ID NO: 209655 - DNA, 20 bp, Artificial Sequence
  Description of Artificial Sequence: Synthetic oligonucleotide
  Target: LAMA2; (-) strand; PAM type: YTN; PAM sequence: TTT
tttttttttgagatggagtc

SEQ ID NO: 209656 - DNA, 20 bp, Artificial Sequence
  Description of Artificial Sequence: Synthetic oligonucleotide
  Target: LAMA2; (-) strand; PAM type: YTN; PAM sequence: TTT
ttttttttttgagatggagt

SEQ ID NO: 209657 - DNA, 20 bp, Artificial Sequence
  Description of Artificial Sequence: Synthetic oligonucleotide
  Target: LAMA2; (-) strand; PAM type: YTN; PAM sequence: TTC
aaaaaaaatttttttttttt

SEQ ID NO: 209658 - DNA, 20 bp, Artificial Sequence
  Description of Artificial Sequence: Synthetic oligonucleotide
  Target: LAMA2; (-) strand; PAM type: YTN; PAM sequence: TTA
ttcaaaaaaaattttttttt

SEQ ID NO: 209659 - DNA, 20 bp, Artificial Sequence
  Description of Artificial Sequence: Synthetic oligonucleotide
  Target: LAMA2; (-) strand; PAM type: YTN; PAM sequence: TTT
attcaaaaaaaatttttttt

SEQ ID NO: 209660 - DNA, 20 bp, Artificial Sequence
  Description of Artificial Sequence: Synthetic oligonucleotide
  Target: LAMA2; (-) strand; PAM type: YTN; PAM sequence: CTA
tttattcaaaaaaaattttt

SEQ ID NO: 209661 - DNA, 20 bp, Artificial Sequence
  Description of Artificial Sequence: Synthetic oligonucleotide
  Target: LAMA2; (-) strand; PAM type: YTN; PAM sequence: TTC
tatttattcaaaaaaaattt

SEQ ID NO: 209662 - DNA, 20 bp, Artificial Sequence
  Description of Artificial Sequence: Synthetic oligonucleotide
  Target: LAMA2; (-) strand; PAM type: YTN; PAM sequence: TTA
ttctatttattcaaaaaaaa

SEQ ID NO: 209663 - DNA, 20 bp, Artificial Sequence
  Description of Artificial Sequence: Synthetic oligonucleotide
  Target: LAMA2; (-) strand; PAM type: YTN; PAM sequence: CTA
tcacattattctatttattc

SEQ ID NO: 209664 - DNA, 20 bp, Artificial Sequence
  Description of Artificial Sequence: Synthetic oligonucleotide
  Target: LAMA2; (-) strand; PAM type: YTN; PAM sequence: TTG
ctatcacattattctattta

SEQ ID NO: 209665 - DNA, 20 bp, Artificial Sequence
  Description of Artificial Sequence: Synthetic oligonucleotide
  Target: LAMA2; (-) strand; PAM type: YTN; PAM sequence: TTT
gctatcacattattctattt

SEQ ID NO: 209666 - DNA, 20 bp, Artificial Sequence
  Description of Artificial Sequence: Synthetic oligonucleotide
  Target: LAMA2; (-) strand; PAM type: YTN; PAM sequence: CTA
gccatttgctatcacattat

SEQ ID NO: 209667 - DNA, 20 bp, Artificial Sequence
  Description of Artificial Sequence: Synthetic oligonucleotide
  Target: LAMA2; (-) strand; PAM type: YTN; PAM sequence: CTG
tctagccatttgctatcaca

SEQ ID NO: 209668 - DNA, 20 bp, Artificial Sequence
  Description of Artificial Sequence: Synthetic oligonucleotide
  Target: LAMA2; (-) strand; PAM type: YTN; PAM sequence: TTA
atagctgtctagccatttgc

SEQ ID NO: 209669 - DNA, 20 bp, Artificial Sequence
  Description of Artificial Sequence: Synthetic oligonucleotide
  Target: LAMA2; (-) strand; PAM type: YTN; PAM sequence: CTT
aatagctgtctagccatttg

SEQ ID NO: 209670 - DNA, 20 bp, Artificial Sequence
  Description of Artificial Sequence: Synthetic oligonucleotide
  Target: LAMA2; (-) strand; PAM type: YTN; PAM sequence: TTG
accaccttaatagctgtcta

SEQ ID NO: 209671 - DNA, 20 bp, Artificial Sequence
  Description of Artificial Sequence: Synthetic oligonucleotide
  Target: LAMA2; (-) strand; PAM type: YTN; PAM sequence: CTT
gaccaccttaatagctgtct

SEQ ID NO: 209672 - DNA, 20 bp, Artificial Sequence
  Description of Artificial Sequence: Synthetic oligonucleotide
  Target: LAMA2; (-) strand; PAM type: YTN; PAM sequence: TTC
cttgaccaccttaatagctg

SEQ ID NO: 209673 - DNA, 20 bp, Artificial Sequence
  Description of Artificial Sequence: Synthetic oligonucleotide
  Target: LAMA2; (-) strand; PAM type: YTN; PAM sequence: TTT
ccttgaccaccttaatagct

SEQ ID NO: 209674 - DNA, 20 bp, Artificial Sequence
  Description of Artificial Sequence: Synthetic oligonucleotide
  Target: LAMA2; (-) strand; PAM type: YTN; PAM sequence: TTT
tccttgaccaccttaatagc

SEQ ID NO: 209675 - DNA, 20 bp, Artificial Sequence
  Description of Artificial Sequence: Synthetic oligonucleotide
  Target: LAMA2; (-) strand; PAM type: YTN; PAM sequence: TTA
gtgggttttccttgaccacc

SEQ ID NO: 209676 - DNA, 20 bp, Artificial Sequence
  Description of Artificial Sequence: Synthetic oligonucleotide
  Target: LAMA2; (-) strand; PAM type: YTN; PAM sequence: TTT
agtgggttttccttgaccac

SEQ ID NO: 209677 - DNA, 20 bp, Artificial Sequence
  Description of Artificial Sequence: Synthetic oligonucleotide
  Target: LAMA2; (-) strand; PAM type: YTN; PAM sequence: TTT
tagtgggttttccttgacca

SEQ ID NO: 209678 - DNA, 20 bp, Artificial Sequence
  Description of Artificial Sequence: Synthetic oligonucleotide
  Target: LAMA2; (-) strand; PAM type: YTN; PAM sequence: CTT
ttagtgggttttccttgacc

SEQ ID NO: 209679 - DNA, 20 bp, Artificial Sequence
  Description of Artificial Sequence: Synthetic oligonucleotide
  Target: LAMA2; (-) strand; PAM type: YTN; PAM sequence: TTC
ttttagtgggttttccttga

SEQ ID NO: 209680 - DNA, 20 bp, Artificial Sequence
  Description of Artificial Sequence: Synthetic oligonucleotide
  Target: LAMA2; (-) strand; PAM type: YTN; PAM sequence: TTT
cttttagtgggttttccttg

SEQ ID NO: 209681 - DNA, 20 bp, Artificial Sequence
  Description of Artificial Sequence: Synthetic oligonucleotide
  Target: LAMA2; (-) strand; PAM type: YTN; PAM sequence: CTG
gtttcttttagtgggttttc

SEQ ID NO: 209682 - DNA, 20 bp, Artificial Sequence
  Description of Artificial Sequence: Synthetic oligonucleotide
  Target: LAMA2; (-) strand; PAM type: YTN; PAM sequence: CTA
tgctggtttcttttagtggg

SEQ ID NO: 209683 - DNA, 20 bp, Artificial Sequence
  Description of Artificial Sequence: Synthetic oligonucleotide
  Target: LAMA2; (-) strand; PAM type: YTN; PAM sequence: CTC
atacaaaatactatgctggt

SEQ ID NO: 209684 - DNA, 20 bp, Artificial Sequence
  Description of Artificial Sequence: Synthetic oligonucleotide
  Target: LAMA2; (-) strand; PAM type: YTN; PAM sequence: CTA
tgctcatacaaaatactatg

SEQ ID NO: 209685 - DNA, 20 bp, Artificial Sequence
  Description of Artificial Sequence: Synthetic oligonucleotide
  Target: LAMA2; (-) strand; PAM type: YTN; PAM sequence: TTC
tatgctcatacaaaatacta

SEQ ID NO: 209686 - DNA, 20 bp, Artificial Sequence
  Description of Artificial Sequence: Synthetic oligonucleotide
  Target: LAMA2; (-) strand; PAM type: YTN; PAM sequence: CTT
ctatgctcatacaaaatact

SEQ ID NO: 209687 - DNA, 20 bp, Artificial Sequence
  Description of Artificial Sequence: Synthetic oligonucleotide
  Target: LAMA2; (-) strand; PAM type: YTN; PAM sequence: CTA
acccacaccttctatgctca

SEQ ID NO: 209688 - DNA, 20 bp, Artificial Sequence
  Description of Artificial Sequence: Synthetic oligonucleotide
  Target: LAMA2; (-) strand; PAM type: YTN; PAM sequence: CTC
taacccacaccttctatgct

SEQ ID NO: 209689 - DNA, 20 bp, Artificial Sequence
  Description of Artificial Sequence: Synthetic oligonucleotide
  Target: LAMA2; (-) strand; PAM type: YTN; PAM sequence: TTC
tctaacccacaccttctatg

SEQ ID NO: 209690 - DNA, 20 bp, Artificial Sequence
  Description of Artificial Sequence: Synthetic oligonucleotide
  Target: LAMA2; (-) strand; PAM type: YTN; PAM sequence: TTT
ctctaacccacaccttctat

SEQ ID NO: 209691 - DNA, 20 bp, Artificial Sequence
  Description of Artificial Sequence: Synthetic oligonucleotide
  Target: LAMA2; (-) strand; PAM type: YTN; PAM sequence: TTG
gatttctctaacccacacct

SEQ ID NO: 209692 - DNA, 20 bp, Artificial Sequence
  Description of Artificial Sequence: Synthetic oligonucleotide
  Target: LAMA2; (-) strand; PAM type: YTN; PAM sequence: CTA
aaatagagacattggatttc

SEQ ID NO: 209693 - DNA, 20 bp, Artificial Sequence
  Description of Artificial Sequence: Synthetic oligonucleotide
  Target: LAMA2; (-) strand; PAM type: YTN; PAM sequence: TTC
taaaatagagacattggatt

SEQ ID NO: 209694 - DNA, 20 bp, Artificial Sequence
  Description of Artificial Sequence: Synthetic oligonucleotide
  Target: LAMA2; (-) strand; PAM type: YTN; PAM sequence: TTT
ctaaaatagagacattggat

SEQ ID NO: 209695 - DNA, 20 bp, Artificial Sequence
  Description of Artificial Sequence: Synthetic oligonucleotide
  Target: LAMA2; (-) strand; PAM type: YTN; PAM sequence: CTT
tctaaaatagagacattgga

SEQ ID NO: 209696 - DNA, 20 bp, Artificial Sequence
  Description of Artificial Sequence: Synthetic oligonucleotide
  Target: LAMA2; (-) strand; PAM type: YTN; PAM sequence: TTC
tttctaaaatagagacattg

SEQ ID NO: 209697 - DNA, 20 bp, Artificial Sequence
  Description of Artificial Sequence: Synthetic oligonucleotide
  Target: LAMA2; (-) strand; PAM type: YTN; PAM sequence: TTT
ctttctaaaatagagacatt

SEQ ID NO: 209698 - DNA, 20 bp, Artificial Sequence
  Description of Artificial Sequence: Synthetic oligonucleotide
  Target: LAMA2; (-) strand; PAM type: YTN; PAM sequence: TTG
atgacatttctttctaaaat

SEQ ID NO: 209699 - DNA, 20 bp, Artificial Sequence
  Description of Artificial Sequence: Synthetic oligonucleotide
  Target: LAMA2; (-) strand; PAM type: YTN; PAM sequence: CTT
gatgacatttctttctaaaa

SEQ ID NO: 209700 - DNA, 20 bp, Artificial Sequence
  Description of Artificial Sequence: Synthetic oligonucleotide
  Target: LAMA2; (-) strand; PAM type: YTN; PAM sequence: CTG
tccaccttgatgacatttct

SEQ ID NO: 209701 - DNA, 20 bp, Artificial Sequence
  Description of Artificial Sequence: Synthetic oligonucleotide
  Target: LAMA2; (-) strand; PAM type: YTN; PAM sequence: CTG
gtccctgtccaccttgatga

SEQ ID NO: 209702 - DNA, 20 bp, Artificial Sequence
  Description of Artificial Sequence: Synthetic oligonucleotide
  Target: LAMA2; (-) strand; PAM type: YTN; PAM sequence: TTC
tggtccctgtccaccttgat

SEQ ID NO: 209703 - DNA, 20 bp, Artificial Sequence
  Description of Artificial Sequence: Synthetic oligonucleotide
  Target: LAMA2; (-) strand; PAM type: YTN; PAM sequence: CTA
catgttctggtccctgtcca

SEQ ID NO: 209704 - DNA, 20 bp, Artificial Sequence
  Description of Artificial Sequence: Synthetic oligonucleotide
  Target: LAMA2; (-) strand; PAM type: YTN; PAM sequence: TTA
caaagtgctacatgttctgg

SEQ ID NO: 209705 - DNA, 20 bp, Artificial Sequence
  Description of Artificial Sequence: Synthetic oligonucleotide
  Target: LAMA2; (-) strand; PAM type: YTN; PAM sequence: CTT
acaaagtgctacatgttctg

SEQ ID NO: 209706 - DNA, 20 bp, Artificial Sequence
  Description of Artificial Sequence: Synthetic oligonucleotide
  Target: LAMA2; (-) strand; PAM type: YTN; PAM sequence: TTC
gtggcttacaaagtgctaca

SEQ ID NO: 209707 - DNA, 20 bp, Artificial Sequence
  Description of Artificial Sequence: Synthetic oligonucleotide
  Target: LAMA2; (-) strand; PAM type: YTN; PAM sequence: TTT
cgtggcttacaaagtgctac

SEQ ID NO: 209708 - DNA, 20 bp, Artificial Sequence
  Description of Artificial Sequence: Synthetic oligonucleotide
  Target: LAMA2; (-) strand; PAM type: YTN; PAM sequence: CTT
tcgtggcttacaaagtgcta

SEQ ID NO: 209709 - DNA, 20 bp, Artificial Sequence
  Description of Artificial Sequence: Synthetic oligonucleotide
  Target: LAMA2; (-) strand; PAM type: YTN; PAM sequence: CTA
caagaataaaatgaaaatgc

SEQ ID NO: 209710 - DNA, 20 bp, Artificial Sequence
  Description of Artificial Sequence: Synthetic oligonucleotide
  Target: LAMA2; (-) strand; PAM type: YTN; PAM sequence: TTA
aaatctacaagaataaaatg

SEQ ID NO: 209711 - DNA, 20 bp, Artificial Sequence
  Description of Artificial Sequence: Synthetic oligonucleotide
  Target: LAMA2; (-) strand; PAM type: YTN; PAM sequence: CTT
aaaatctacaagaataaaat

SEQ ID NO: 209712 - DNA, 20 bp, Artificial Sequence
  Description of Artificial Sequence: Synthetic oligonucleotide
  Target: LAMA2; (-) strand; PAM type: YTN; PAM sequence: CTA
cttaaaatctacaagaataa

SEQ ID NO: 209713 - DNA, 20 bp, Artificial Sequence
  Description of Artificial Sequence: Synthetic oligonucleotide
  Target: LAMA2; (-) strand; PAM type: YTN; PAM sequence: CTC
tacttaaaatctacaagaat

SEQ ID NO: 209714 - DNA, 20 bp, Artificial Sequence
  Description of Artificial Sequence: Synthetic oligonucleotide
  Target: LAMA2; (-) strand; PAM type: YTN; PAM sequence: CTG
catctctacttaaaatctac

SEQ ID NO: 209715 - DNA, 20 bp, Artificial Sequence
  Description of Artificial Sequence: Synthetic oligonucleotide
  Target: LAMA2; (-) strand; PAM type: YTN; PAM sequence: CTA
aaatatgtgagaagaaagct

SEQ ID NO: 209716 - DNA, 20 bp, Artificial Sequence
  Description of Artificial Sequence: Synthetic oligonucleotide
  Target: LAMA2; (-) strand; PAM type: YTN; PAM sequence: TTC
taaaatatgtgagaagaaag

SEQ ID NO: 209717 - DNA, 20 bp, Artificial Sequence
  Description of Artificial Sequence: Synthetic oligonucleotide
  Target: LAMA2; (-) strand; PAM type: YTN; PAM sequence: TTT
ctaaaatatgtgagaagaaa

SEQ ID NO: 209718 - DNA, 20 bp, Artificial Sequence
  Description of Artificial Sequence: Synthetic oligonucleotide
  Target: LAMA2; (-) strand; PAM type: YTN; PAM sequence: CTA
tatggtaaccaaataaatat

SEQ ID NO: 209719 - DNA, 20 bp, Artificial Sequence
  Description of Artificial Sequence: Synthetic oligonucleotide
  Target: LAMA2; (-) strand; PAM type: YTN; PAM sequence: CTC
tatatggtaaccaaataaat

SEQ ID NO: 209720 - DNA, 20 bp, Artificial Sequence
  Description of Artificial Sequence: Synthetic oligonucleotide
  Target: LAMA2; (-) strand; PAM type: YTN; PAM sequence: CTG
gctctatatggtaaccaaat

SEQ ID NO: 209721 - DNA, 20 bp, Artificial Sequence
  Description of Artificial Sequence: Synthetic oligonucleotide
  Target: LAMA2; (-) strand; PAM type: YTN; PAM sequence: CTA
tatgagaactggctctatat

SEQ ID NO: 209722 - DNA, 20 bp, Artificial Sequence
  Description of Artificial Sequence: Synthetic oligonucleotide
  Target: LAMA2; (-) strand; PAM type: YTN; PAM sequence: CTC
tatatgagaactggctctat

SEQ ID NO: 209723 - DNA, 20 bp, Artificial Sequence
  Description of Artificial Sequence: Synthetic oligonucleotide
  Target: LAMA2; (-) strand; PAM type: YTN; PAM sequence: TTC
tctatatgagaactggctct

SEQ ID NO: 209724 - DNA, 20 bp, Artificial Sequence
  Description of Artificial Sequence: Synthetic oligonucleotide
  Target: LAMA2; (-) strand; PAM type: YTN; PAM sequence: CTC
atatagagaataaattctct

SEQ ID NO: 209725 - DNA, 20 bp, Artificial Sequence
  Description of Artificial Sequence: Synthetic oligonucleotide
  Target: LAMA2; (-) strand; PAM type: YTN; PAM sequence: TTC
tcatatagagaataaattct

SEQ ID NO: 209726 - DNA, 20 bp, Artificial Sequence
  Description of Artificial Sequence: Synthetic oligonucleotide
  Target: LAMA2; (-) strand; PAM type: YTN; PAM sequence: CTA
ttctcatatagagaataaat

SEQ ID NO: 209727 - DNA, 20 bp, Artificial Sequence
  Description of Artificial Sequence: Synthetic oligonucleotide
  Target: LAMA2; (-) strand; PAM type: YTN; PAM sequence: CTC
tattctcatatagagaataa

SEQ ID NO: 209728 - DNA, 20 bp, Artificial Sequence
  Description of Artificial Sequence: Synthetic oligonucleotide
  Target: LAMA2; (-) strand; PAM type: YTN; PAM sequence: TTC
tctattctcatatagagaat

SEQ ID NO: 209729 - DNA, 20 bp, Artificial Sequence
  Description of Artificial Sequence: Synthetic oligonucleotide
  Target: LAMA2; (-) strand; PAM type: YTN; PAM sequence: TTA
ttctctattctcatatagag

SEQ ID NO: 209730 - DNA, 20 bp, Artificial Sequence
  Description of Artificial Sequence: Synthetic oligonucleotide
  Target: LAMA2; (-) strand; PAM type: YTN; PAM sequence: TTT
attctctattctcatataga

SEQ ID NO: 209731 - DNA, 20 bp, Artificial Sequence
  Description of Artificial Sequence: Synthetic oligonucleotide
  Target: LAMA2; (-) strand; PAM type: YTN; PAM sequence: TTG
caccaaatttattctctatt

SEQ ID NO: 209732 - DNA, 20 bp, Artificial Sequence
  Description of Artificial Sequence: Synthetic oligonucleotide
  Target: LAMA2; (-) strand; PAM type: YTN; PAM sequence: CTT
gcaccaaatttattctctat

SEQ ID NO: 209733 - DNA, 20 bp, Artificial Sequence
  Description of Artificial Sequence: Synthetic oligonucleotide
  Target: LAMA2; (-) strand; PAM type: YTN; PAM sequence: TTC
ttgcaccaaatttattctct

SEQ ID NO: 209734 - DNA, 20 bp, Artificial Sequence
  Description of Artificial Sequence: Synthetic oligonucleotide
  Target: LAMA2; (-) strand; PAM type: YTN; PAM sequence: TTT
cttgcaccaaatttattctc

SEQ ID NO: 209735 - DNA, 20 bp, Artificial Sequence
  Description of Artificial Sequence: Synthetic oligonucleotide
  Target: LAMA2; (-) strand; PAM type: YTN; PAM sequence: TTA
tttcttgcaccaaatttatt

SEQ ID NO: 209736 - DNA, 20 bp, Artificial Sequence
  Description of Artificial Sequence: Synthetic oligonucleotide
  Target: LAMA2; (-) strand; PAM type: YTN; PAM sequence: TTT
atttcttgcaccaaatttat

SEQ ID NO: 209737 - DNA, 20 bp, Artificial Sequence
  Description of Artificial Sequence: Synthetic oligonucleotide
  Target: LAMA2; (-) strand; PAM type: YTN; PAM sequence: TTG
cacccgatatttatttcttg

SEQ ID NO: 209738 - DNA, 20 bp, Artificial Sequence
  Description of Artificial Sequence: Synthetic oligonucleotide
  Target: LAMA2; (-) strand; PAM type: YTN; PAM sequence: CTT
gcacccgatatttatttctt

SEQ ID NO: 209739 - DNA, 20 bp, Artificial Sequence
  Description of Artificial Sequence: Synthetic oligonucleotide
  Target: LAMA2; (-) strand; PAM type: YTN; PAM sequence: TTA
gatcttgcacccgatattta

SEQ ID NO: 209740 - DNA, 20 bp, Artificial Sequence
  Description of Artificial Sequence: Synthetic oligonucleotide
  Target: LAMA2; (-) strand; PAM type: YTN; PAM sequence: TTT
agatcttgcacccgatattt

SEQ ID NO: 209741 - DNA, 20 bp, Artificial Sequence
  Description of Artificial Sequence: Synthetic oligonucleotide
  Target: LAMA2; (-) strand; PAM type: YTN; PAM sequence: TTT
tagatcttgcacccgatatt

SEQ ID NO: 209742 - DNA, 20 bp, Artificial Sequence
  Description of Artificial Sequence: Synthetic oligonucleotide
  Target: LAMA2; (-) strand; PAM type: YTN; PAM sequence: CTA
ttttagatcttgcacccgat

SEQ ID NO: 209743 - DNA, 20 bp, Artificial Sequence
  Description of Artificial Sequence: Synthetic oligonucleotide
  Target: LAMA2; (-) strand; PAM type: YTN; PAM sequence: TTC
ctattttagatcttgcaccc

SEQ ID NO: 209744 - DNA, 20 bp, Artificial Sequence
  Description of Artificial Sequence: Synthetic oligonucleotide
  Target: LAMA2; (-) strand; PAM type: YTN; PAM sequence: CTT
cctattttagatcttgcacc

SEQ ID NO: 209745 - DNA, 20 bp, Artificial Sequence
  Description of Artificial Sequence: Synthetic oligonucleotide
  Target: LAMA2; (-) strand; PAM type: YTN; PAM sequence: CTG
tcttcctattttagatcttg

SEQ ID NO: 209746 - DNA, 20 bp, Artificial Sequence
  Description of Artificial Sequence: Synthetic oligonucleotide
  Target: LAMA2; (-) strand; PAM type: YTN; PAM sequence: CTC
ataacctgtcttcctatttt

SEQ ID NO: 209747 - DNA, 20 bp, Artificial Sequence
  Description of Artificial Sequence: Synthetic oligonucleotide
  Target: LAMA2; (-) strand; PAM type: YTN; PAM sequence: TTA
taatggggatccaacagcct

SEQ ID NO: 209748 - DNA, 20 bp, Artificial Sequence
  Description of Artificial Sequence: Synthetic oligonucleotide
  Target: LAMA2; (-) strand; PAM type: YTN; PAM sequence: CTG
ccattataatggggatccaa

SEQ ID NO: 209749 - DNA, 20 bp, Artificial Sequence
  Description of Artificial Sequence: Synthetic oligonucleotide
  Target: LAMA2; (-) strand; PAM type: YTN; PAM sequence: CTC
atccaagctgccattataat

SEQ ID NO: 209750 - DNA, 20 bp, Artificial Sequence
  Description of Artificial Sequence: Synthetic oligonucleotide
  Target: LAMA2; (-) strand; PAM type: YTN; PAM sequence: CTA
tctcatccaagctgccatta

SEQ ID NO: 209751 - DNA, 20 bp, Artificial Sequence
  Description of Artificial Sequence: Synthetic oligonucleotide
  Target: LAMA2; (-) strand; PAM type: YTN; PAM sequence: TTC
atgaaacctatctcatccaa

SEQ ID NO: 209752 - DNA, 20 bp, Artificial Sequence
  Description of Artificial Sequence: Synthetic oligonucleotide
  Target: LAMA2; (-) strand; PAM type: YTN; PAM sequence: TTT
catgaaacctatctcatcca

SEQ ID NO: 209753 - DNA, 20 bp, Artificial Sequence
  Description of Artificial Sequence: Synthetic oligonucleotide
  Target: LAMA2; (-) strand; PAM type: YTN; PAM sequence: TTT
tcatgaaacctatctcatcc

SEQ ID NO: 209754 - DNA, 20 bp, Artificial Sequence
  Description of Artificial Sequence: Synthetic oligonucleotide
  Target: LAMA2; (-) strand; PAM type: YTN; PAM sequence: TTC
ccattttcatgaaacctatc

SEQ ID NO: 209755 - DNA, 20 bp, Artificial Sequence
  Description of Artificial Sequence: Synthetic oligonucleotide
  Target: LAMA2; (-) strand; PAM type: YTN; PAM sequence: TTT
cccattttcatgaaacctat

SEQ ID NO: 209756 - DNA, 20 bp, Artificial Sequence
  Description of Artificial Sequence: Synthetic oligonucleotide
  Target: LAMA2; (-) strand; PAM type: YTN; PAM sequence: TTT
tcccattttcatgaaaccta

SEQ ID NO: 209757 - DNA, 20 bp, Artificial Sequence
  Description of Artificial Sequence: Synthetic oligonucleotide
  Target: LAMA2; (-) strand; PAM type: YTN; PAM sequence: TTT
ttcccattttcatgaaacct

SEQ ID NO: 209758 - DNA, 20 bp, Artificial Sequence
  Description of Artificial Sequence: Synthetic oligonucleotide
  Target: LAMA2; (-) strand; PAM type: YTN; PAM sequence: CTT
tttcccattttcatgaaacc

SEQ ID NO: 209759 - DNA, 20 bp, Artificial Sequence
  Description of Artificial Sequence: Synthetic oligonucleotide
  Target: LAMA2; (-) strand; PAM type: YTN; PAM sequence: CTG
ctttttcccattttcatgaa

SEQ ID NO: 209760 - DNA, 20 bp, Artificial Sequence
  Description of Artificial Sequence: Synthetic oligonucleotide
  Target: LAMA2; (-) strand; PAM type: YTN; PAM sequence: CTA
aaacatcccacacatgtctg

SEQ ID NO: 209761 - DNA, 20 bp, Artificial Sequence
  Description of Artificial Sequence: Synthetic oligonucleotide
  Target: LAMA2; (-) strand; PAM type: YTN; PAM sequence: CTG
cctaaaacatcccacacatg

SEQ ID NO: 209762 - DNA, 20 bp, Artificial Sequence
  Description of Artificial Sequence: Synthetic oligonucleotide
  Target: LAMA2; (-) strand; PAM type: YTN; PAM sequence: TTC
cagctgcctaaaacatccca

SEQ ID NO: 209763 - DNA, 20 bp, Artificial Sequence
  Description of Artificial Sequence: Synthetic oligonucleotide
  Target: LAMA2; (-) strand; PAM type: YTN; PAM sequence: TTG
attccagctgcctaaaacat

SEQ ID NO: 209764 - DNA, 20 bp, Artificial Sequence
  Description of Artificial Sequence: Synthetic oligonucleotide
  Target: LAMA2; (-) strand; PAM type: YTN; PAM sequence: CTA
ttgattccagctgcctaaaa

SEQ ID NO: 209765 - DNA, 20 bp, Artificial Sequence
  Description of Artificial Sequence: Synthetic oligonucleotide
  Target: LAMA2; (-) strand; PAM type: YTN; PAM sequence: TTA
ataagtactattgattccag

SEQ ID NO: 209766 - DNA, 20 bp, Artificial Sequence
  Description of Artificial Sequence: Synthetic oligonucleotide
  Target: LAMA2; (-) strand; PAM type: YTN; PAM sequence: CTG
ggccattaataagtactatt

SEQ ID NO: 209767 - DNA, 20 bp, Artificial Sequence
  Description of Artificial Sequence: Synthetic oligonucleotide
  Target: LAMA2; (-) strand; PAM type: YTN; PAM sequence: CTC
tgggccattaataagtacta

SEQ ID NO: 209768 - DNA, 20 bp, Artificial Sequence
  Description of Artificial Sequence: Synthetic oligonucleotide
  Target: LAMA2; (-) strand; PAM type: YTN; PAM sequence: CTA
cccagacctctgggccatta

SEQ ID NO: 209769 - DNA, 20 bp, Artificial Sequence
  Description of Artificial Sequence: Synthetic oligonucleotide
  Target: LAMA2; (-) strand; PAM type: YTN; PAM sequence: TTA
ctacccagacctctgggcca

SEQ ID NO: 209770 - DNA, 20 bp, Artificial Sequence
  Description of Artificial Sequence: Synthetic oligonucleotide
  Target: LAMA2; (-) strand; PAM type: YTN; PAM sequence: TTT
actacccagacctctgggcc

SEQ ID NO: 209771 - DNA, 20 bp, Artificial Sequence
  Description of Artificial Sequence: Synthetic oligonucleotide
  Target: LAMA2; (-) strand; PAM type: YTN; PAM sequence: CTT
tactacccagacctctgggc

SEQ ID NO: 209772 - DNA, 20 bp, Artificial Sequence
  Description of Artificial Sequence: Synthetic oligonucleotide
  Target: LAMA2; (-) strand; PAM type: YTN; PAM sequence: TTC
ctttactacccagacctctg

SEQ ID NO: 209773 - DNA, 20 bp, Artificial Sequence
  Description of Artificial Sequence: Synthetic oligonucleotide
  Target: LAMA2; (-) strand; PAM type: YTN; PAM sequence: TTT
cctttactacccagacctct

SEQ ID NO: 209774 - DNA, 20 bp, Artificial Sequence
  Description of Artificial Sequence: Synthetic oligonucleotide
  Target: LAMA2; (-) strand; PAM type: YTN; PAM sequence: CTT
tcctttactacccagacctc

SEQ ID NO: 209775 - DNA, 20 bp, Artificial Sequence
  Description of Artificial Sequence: Synthetic oligonucleotide
  Target: LAMA2; (-) strand; PAM type: YTN; PAM sequence: CTC
tttcctttactacccagacc

SEQ ID NO: 209776 - DNA, 20 bp, Artificial Sequence
  Description of Artificial Sequence: Synthetic oligonucleotide
  Target: LAMA2; (-) strand; PAM type: YTN; PAM sequence: CTC
ctctttcctttactacccag

SEQ ID NO: 209777 - DNA, 20 bp, Artificial Sequence
  Description of Artificial Sequence: Synthetic oligonucleotide
  Target: LAMA2; (-) strand; PAM type: YTN; PAM sequence: TTC
tcctctttcctttactaccc

SEQ ID NO: 209778 - DNA, 20 bp, Artificial Sequence
  Description of Artificial Sequence: Synthetic oligonucleotide
  Target: LAMA2; (-) strand; PAM type: YTN; PAM sequence: TTT
ctcctctttcctttactacc

SEQ ID NO: 209779 - DNA, 20 bp, Artificial Sequence
  Description of Artificial Sequence: Synthetic oligonucleotide
  Target: LAMA2; (-) strand; PAM type: YTN; PAM sequence: CTA
aagtttctcctctttccttt

SEQ ID NO: 209780 - DNA, 20 bp, Artificial Sequence
  Description of Artificial Sequence: Synthetic oligonucleotide
  Target: LAMA2; (-) strand; PAM type: YTN; PAM sequence: TTA
tctaaagtttctcctctttc

SEQ ID NO: 209781 - DNA, 20 bp, Artificial Sequence
  Description of Artificial Sequence: Synthetic oligonucleotide
  Target: LAMA2; (-) strand; PAM type: YTN; PAM sequence: CTT
atctaaagtttctcctcttt

SEQ ID NO: 209782 - DNA, 20 bp, Artificial Sequence
  Description of Artificial Sequence: Synthetic oligonucleotide
  Target: LAMA2; (-) strand; PAM type: YTN; PAM sequence: CTG
ccttatctaaagtttctcct

SEQ ID NO: 209783 - DNA, 20 bp, Artificial Sequence
  Description of Artificial Sequence: Synthetic oligonucleotide
  Target: LAMA2; (-) strand; PAM type: YTN; PAM sequence: CTA
actgccttatctaaagtttc

SEQ ID NO: 209784 - DNA, 20 bp, Artificial Sequence
  Description of Artificial Sequence: Synthetic oligonucleotide
  Target: LAMA2; (-) strand; PAM type: YTN; PAM sequence: CTC
taactgccttatctaaagtt

SEQ ID NO: 209785 - DNA, 20 bp, Artificial Sequence
  Description of Artificial Sequence: Synthetic oligonucleotide
  Target: LAMA2; (-) strand; PAM type: YTN; PAM sequence: TTC
tctaactgccttatctaaag

SEQ ID NO: 209786 - DNA, 20 bp, Artificial Sequence
  Description of Artificial Sequence: Synthetic oligonucleotide
  Target: LAMA2; (-) strand; PAM type: YTN; PAM sequence: CTT
ctctaactgccttatctaaa

SEQ ID NO: 209787 - DNA, 20 bp, Artificial Sequence
  Description of Artificial Sequence: Synthetic oligonucleotide
  Target: LAMA2; (-) strand; PAM type: YTN; PAM sequence: TTC
cttctctaactgccttatct

SEQ ID NO: 209788 - DNA, 20 bp, Artificial Sequence
  Description of Artificial Sequence: Synthetic oligonucleotide
  Target: LAMA2; (-) strand; PAM type: YTN; PAM sequence: TTT
ccttctctaactgccttatc

SEQ ID NO: 209789 - DNA, 20 bp, Artificial Sequence
  Description of Artificial Sequence: Synthetic oligonucleotide
  Target: LAMA2; (-) strand; PAM type: YTN; PAM sequence: TTT
tccttctctaactgccttat

SEQ ID NO: 209790 - DNA, 20 bp, Artificial Sequence
  Description of Artificial Sequence: Synthetic oligonucleotide
  Target: LAMA2; (-) strand; PAM type: YTN; PAM sequence: TTG
attttccttctctaactgcc

SEQ ID NO: 209791 - DNA, 20 bp, Artificial Sequence
  Description of Artificial Sequence: Synthetic oligonucleotide
  Target: LAMA2; (-) strand; PAM type: YTN; PAM sequence: CTT
gattttccttctctaactgc

SEQ ID NO: 209792 - DNA, 20 bp, Artificial Sequence
  Description of Artificial Sequence: Synthetic oligonucleotide
  Target: LAMA2; (-) strand; PAM type: YTN; PAM sequence: CTA
tccttgattttccttctcta

SEQ ID NO: 209793 - DNA, 20 bp, Artificial Sequence
  Description of Artificial Sequence: Synthetic oligonucleotide
  Target: LAMA2; (-) strand; PAM type: YTN; PAM sequence: CTA
gaatctatccttgattttcc

SEQ ID NO: 209794 - DNA, 20 bp, Artificial Sequence
  Description of Artificial Sequence: Synthetic oligonucleotide
  Target: LAMA2; (-) strand; PAM type: YTN; PAM sequence: CTC
aagacaaaaatctagaatct

SEQ ID NO: 209795 - DNA, 20 bp, Artificial Sequence
  Description of Artificial Sequence: Synthetic oligonucleotide
  Target: LAMA2; (-) strand; PAM type: YTN; PAM sequence: TTG
ctcaagacaaaaatctagaa

SEQ ID NO: 209796 - DNA, 20 bp, Artificial Sequence
  Description of Artificial Sequence: Synthetic oligonucleotide
  Target: LAMA2; (-) strand; PAM type: YTN; PAM sequence: TTC
aatgacatcaccatccatgc

SEQ ID NO: 209797 - DNA, 20 bp, Artificial Sequence
  Description of Artificial Sequence: Synthetic oligonucleotide
  Target: LAMA2; (-) strand; PAM type: YTN; PAM sequence: TTC
catcacattcaatgacatca

SEQ ID NO: 209798 - DNA, 20 bp, Artificial Sequence
  Description of Artificial Sequence: Synthetic oligonucleotide
  Target: LAMA2; (-) strand; PAM type: YTN; PAM sequence: CTA
ttccatcacattcaatgaca

SEQ ID NO: 209799 - DNA, 20 bp, Artificial Sequence
  Description of Artificial Sequence: Synthetic oligonucleotide
  Target: LAMA2; (-) strand; PAM type: YTN; PAM sequence: CTC
ccgatctattccatcacatt

SEQ ID NO: 209800 - DNA, 20 bp, Artificial Sequence
  Description of Artificial Sequence: Synthetic oligonucleotide
  Target: LAMA2; (-) strand; PAM type: YTN; PAM sequence: TTG
cacccctcccgatctattcc

SEQ ID NO: 209801 - DNA, 20 bp, Artificial Sequence
  Description of Artificial Sequence: Synthetic oligonucleotide
  Target: LAMA2; (-) strand; PAM type: YTN; PAM sequence: CTT
gcacccctcccgatctattc

SEQ ID NO: 209802 - DNA, 20 bp, Artificial Sequence
  Description of Artificial Sequence: Synthetic oligonucleotide
  Target: LAMA2; (-) strand; PAM type: YTN; PAM sequence: CTC
catgaaaaatcttgcacccc

SEQ ID NO: 209803 - DNA, 20 bp, Artificial Sequence
  Description of Artificial Sequence: Synthetic oligonucleotide
  Target: LAMA2; (-) strand; PAM type: YTN; PAM sequence: TTC
cctccatgaaaaatcttgca

SEQ ID NO: 209804 - DNA, 20 bp, Artificial Sequence
  Description of Artificial Sequence: Synthetic oligonucleotide
  Target: LAMA2; (-) strand; PAM type: YTN; PAM sequence: CTT
ccctccatgaaaaatcttgc

SEQ ID NO: 209805 - DNA, 20 bp, Artificial Sequence
  Description of Artificial Sequence: Synthetic oligonucleotide
  Target: LAMA2; (-) strand; PAM type: YTN; PAM sequence: CTG
gccttccctccatgaaaaat

SEQ ID NO: 209806 - DNA, 20 bp, Artificial Sequence
  Description of Artificial Sequence: Synthetic oligonucleotide
  Target: LAMA2; (-) strand; PAM type: YTN; PAM sequence: CTC
tggccttccctccatgaaaa

SEQ ID NO: 209807 - DNA, 20 bp, Artificial Sequence
  Description of Artificial Sequence: Synthetic oligonucleotide
  Target: LAMA2; (-) strand; PAM type: YTN; PAM sequence: TTC
tctggccttccctccatgaa

SEQ ID NO: 209808 - DNA, 20 bp, Artificial Sequence
  Description of Artificial Sequence: Synthetic oligonucleotide
  Target: LAMA2; (-) strand; PAM type: YTN; PAM sequence: CTT
ctctggccttccctccatga

SEQ ID NO: 209809 - DNA, 20 bp, Artificial Sequence
  Description of Artificial Sequence: Synthetic oligonucleotide
  Target: LAMA2; (-) strand; PAM type: YTN; PAM sequence: TTC
ttctctggccttccctccat

SEQ ID NO: 209810 - DNA, 20 bp, Artificial Sequence
  Description of Artificial Sequence: Synthetic oligonucleotide
  Target: LAMA2; (-) strand; PAM type: YTN; PAM sequence: TTT
cttctctggccttccctcca

SEQ ID NO: 209811 - DNA, 20 bp, Artificial Sequence
  Description of Artificial Sequence: Synthetic oligonucleotide
  Target: LAMA2; (-) strand; PAM type: YTN; PAM sequence: CTG
tttcttctctggccttccct

SEQ ID NO: 209812 - DNA, 20 bp, Artificial Sequence
  Description of Artificial Sequence: Synthetic oligonucleotide
  Target: LAMA2; (-) strand; PAM type: YTN; PAM sequence: CTA
tagcagaactgtttcttctc

SEQ ID NO: 209813 - DNA, 20 bp, Artificial Sequence
  Description of Artificial Sequence: Synthetic oligonucleotide
  Target: LAMA2; (-) strand; PAM type: YTN; PAM sequence: TTC
agtatggctatagcagaact

SEQ ID NO: 209814 - DNA, 20 bp, Artificial Sequence
  Description of Artificial Sequence: Synthetic oligonucleotide
  Target: LAMA2; (-) strand; PAM type: YTN; PAM sequence: CTA
aaattcagtatggctatagc

SEQ ID NO: 209815 - DNA, 20 bp, Artificial Sequence
  Description of Artificial Sequence: Synthetic oligonucleotide
  Target: LAMA2; (-) strand; PAM type: YTN; PAM sequence: CTA
aaaggtgcctaaaattcagt

SEQ ID NO: 209816 - DNA, 20 bp, Artificial Sequence
  Description of Artificial Sequence: Synthetic oligonucleotide
  Target: LAMA2; (-) strand; PAM type: YTN; PAM sequence: TTA
gatgtctaaaaggtgcctaa

SEQ ID NO: 209817 - DNA, 20 bp, Artificial Sequence
  Description of Artificial Sequence: Synthetic oligonucleotide
  Target: LAMA2; (-) strand; PAM type: YTN; PAM sequence: TTT
agatgtctaaaaggtgccta

SEQ ID NO: 209818 - DNA, 20 bp, Artificial Sequence
  Description of Artificial Sequence: Synthetic oligonucleotide
  Target: LAMA2; (-) strand; PAM type: YTN; PAM sequence: CTA
tttagatgtctaaaaggtgc

SEQ ID NO: 209819 - DNA, 20 bp, Artificial Sequence
  Description of Artificial Sequence: Synthetic oligonucleotide
  Target: LAMA2; (-) strand; PAM type: YTN; PAM sequence: TTC
tatttagatgtctaaaaggt

SEQ ID NO: 209820 - DNA, 20 bp, Artificial Sequence
  Description of Artificial Sequence: Synthetic oligonucleotide
  Target: LAMA2; (-) strand; PAM type: YTN; PAM sequence: TTA
aatcaatagttctatttaga

SEQ ID NO: 209821 - DNA, 20 bp, Artificial Sequence
  Description of Artificial Sequence: Synthetic oligonucleotide
  Target: LAMA2; (-) strand; PAM type: YTN; PAM sequence: TTA
catatccaaatattaaatca

SEQ ID NO: 209822 - DNA, 20 bp, Artificial Sequence
  Description of Artificial Sequence: Synthetic oligonucleotide
  Target: LAMA2; (-) strand; PAM type: YTN; PAM sequence: CTT
acatatccaaatattaaatc

SEQ ID NO: 209823 - DNA, 20 bp, Artificial Sequence
  Description of Artificial Sequence: Synthetic oligonucleotide
  Target: LAMA2; (-) strand; PAM type: YTN; PAM sequence: TTC
caggccagtgtaaaaaatac

SEQ ID NO: 209824 - DNA, 20 bp, Artificial Sequence
  Description of Artificial Sequence: Synthetic oligonucleotide
  Target: LAMA2; (-) strand; PAM type: YTN; PAM sequence: TTT
ccaggccagtgtaaaaaata

SEQ ID NO: 209825 - DNA, 20 bp, Artificial Sequence
  Description of Artificial Sequence: Synthetic oligonucleotide
  Target: LAMA2; (-) strand; PAM type: YTN; PAM sequence: TTT
tccaggccagtgtaaaaaat

SEQ ID NO: 209826 - DNA, 20 bp, Artificial Sequence
  Description of Artificial Sequence: Synthetic oligonucleotide
  Target: LAMA2; (-) strand; PAM type: YTN; PAM sequence: CTT
ttccaggccagtgtaaaaaa

SEQ ID NO: 209827 - DNA, 20 bp, Artificial Sequence
  Description of Artificial Sequence: Synthetic oligonucleotide
  Target: LAMA2; (-) strand; PAM type: YTN; PAM sequence: TTG
ccagcttttccaggccagtg

SEQ ID NO: 209828 - DNA, 20 bp, Artificial Sequence
  Description of Artificial Sequence: Synthetic oligonucleotide
  Target: LAMA2; (-) strand; PAM type: YTN; PAM sequence: TTT
gccagcttttccaggccagt

SEQ ID NO: 209829 - DNA, 20 bp, Artificial Sequence
  Description of Artificial Sequence: Synthetic oligonucleotide
  Target: LAMA2; (-) strand; PAM type: YTN; PAM sequence: TTT
tgccagcttttccaggccag

SEQ ID NO: 209830 - DNA, 20 bp, Artificial Sequence
  Description of Artificial Sequence: Synthetic oligonucleotide
  Target: LAMA2; (-) strand; PAM type: YTN; PAM sequence: CTA
ggttttgccagcttttccag

SEQ ID NO: 209831 - DNA, 20 bp, Artificial Sequence
  Description of Artificial Sequence: Synthetic oligonucleotide
  Target: LAMA2; (-) strand; PAM type: YTN; PAM sequence: TTC
taggttttgccagcttttcc

SEQ ID NO: 209832 - DNA, 20 bp, Artificial Sequence
  Description of Artificial Sequence: Synthetic oligonucleotide
  Target: LAMA2; (-) strand; PAM type: YTN; PAM sequence: CTG
aaatggtataaacgcagagg

SEQ ID NO: 209833 - DNA, 20 bp, Artificial Sequence
  Description of Artificial Sequence: Synthetic oligonucleotide
  Target: LAMA2; (-) strand; PAM type: YTN; PAM sequence: CTG
tcaactgaaatggtataaac

SEQ ID NO: 209834 - DNA, 20 bp, Artificial Sequence
  Description of Artificial Sequence: Synthetic oligonucleotide
  Target: LAMA2; (-) strand; PAM type: YTN; PAM sequence: TTA
gacctgtcaactgaaatggt

SEQ ID NO: 209835 - DNA, 20 bp, Artificial Sequence
  Description of Artificial Sequence: Synthetic oligonucleotide
  Target: LAMA2; (-) strand; PAM type: YTN; PAM sequence: TTA
aaattagacctgtcaactga

SEQ ID NO: 209836 - DNA, 20 bp, Artificial Sequence
  Description of Artificial Sequence: Synthetic oligonucleotide
  Target: LAMA2; (-) strand; PAM type: YTN; PAM sequence: CTT
aaaattagacctgtcaactg

SEQ ID NO: 209837 - DNA, 20 bp, Artificial Sequence
  Description of Artificial Sequence: Synthetic oligonucleotide
  Target: LAMA2; (-) strand; PAM type: YTN; PAM sequence: TTA
tgaaaaggtggaacttaaaa

SEQ ID NO: 209838 - DNA, 20 bp, Artificial Sequence
  Description of Artificial Sequence: Synthetic oligonucleotide
  Target: LAMA2; (-) strand; PAM type: YTN; PAM sequence: TTG
tgtacaaatgaataatcaat

SEQ ID NO: 209839 - DNA, 20 bp, Artificial Sequence
  Description of Artificial Sequence: Synthetic oligonucleotide
  Target: LAMA2; (-) strand; PAM type: YTN; PAM sequence: CTT
gtgtacaaatgaataatcaa

SEQ ID NO: 209840 - DNA, 20 bp, Artificial Sequence
  Description of Artificial Sequence: Synthetic oligonucleotide
  Target: LAMA2; (-) strand; PAM type: YTN; PAM sequence: CTC
aacaaatacttgtgtacaaa

SEQ ID NO: 209841 - DNA, 20 bp, Artificial Sequence
  Description of Artificial Sequence: Synthetic oligonucleotide
  Target: LAMA2; (-) strand; PAM type: YTN; PAM sequence: CTG
gtactcaacaaatacttgtg

SEQ ID NO: 209842 - DNA, 20 bp, Artificial Sequence
  Description of Artificial Sequence: Synthetic oligonucleotide
  Target: LAMA2; (-) strand; PAM type: YTN; PAM sequence: TTC
tggtactcaacaaatacttg

SEQ ID NO: 209843 - DNA, 20 bp, Artificial Sequence
  Description of Artificial Sequence: Synthetic oligonucleotide
  Target: LAMA2; (-) strand; PAM type: YTN; PAM sequence: TTT
ctggtactcaacaaatactt

SEQ ID NO: 209844 - DNA, 20 bp, Artificial Sequence
  Description of Artificial Sequence: Synthetic oligonucleotide
  Target: LAMA2; (-) strand; PAM type: YTN; PAM sequence: CTA
tttctggtactcaacaaata

SEQ ID NO: 209845 - DNA, 20 bp, Artificial Sequence
  Description of Artificial Sequence: Synthetic oligonucleotide
  Target: LAMA2; (-) strand; PAM type: YTN; PAM sequence: CTA
aatgctatttctggtactca

SEQ ID NO: 209846 - DNA, 20 bp, Artificial Sequence
  Description of Artificial Sequence: Synthetic oligonucleotide
  Target: LAMA2; (-) strand; PAM type: YTN; PAM sequence: TTG
aaatgactaaatgctatttc

SEQ ID NO: 209847 - DNA, 20 bp, Artificial Sequence
  Description of Artificial Sequence: Synthetic oligonucleotide
  Target: LAMA2; (-) strand; PAM type: YTN; PAM sequence: CTT
gaaatgactaaatgctattt

SEQ ID NO: 209848 - DNA, 20 bp, Artificial Sequence
  Description of Artificial Sequence: Synthetic oligonucleotide
  Target: LAMA2; (-) strand; PAM type: YTN; PAM sequence: CTA
aagcttgaaatgactaaatg

SEQ ID NO: 209849 - DNA, 20 bp, Artificial Sequence
  Description of Artificial Sequence: Synthetic oligonucleotide
  Target: LAMA2; (-) strand; PAM type: YTN; PAM sequence: CTG
gagaataggatgatgaaaaa

SEQ ID NO: 209850 - DNA, 20 bp, Artificial Sequence
  Description of Artificial Sequence: Synthetic oligonucleotide
  Target: LAMA2; (-) strand; PAM type: YTN; PAM sequence: CTG
aaatctggagaataggatga

SEQ ID NO: 209851 - DNA, 20 bp, Artificial Sequence
  Description of Artificial Sequence: Synthetic oligonucleotide
  Target: LAMA2; (-) strand; PAM type: YTN; PAM sequence: CTG
ctgaaatctggagaatagga

SEQ ID NO: 209852 - DNA, 20 bp, Artificial Sequence
  Description of Artificial Sequence: Synthetic oligonucleotide
  Target: LAMA2; (-) strand; PAM type: YTN; PAM sequence: CTG
atgctgctgaaatctggaga

SEQ ID NO: 209853 - DNA, 20 bp, Artificial Sequence
  Description of Artificial Sequence: Synthetic oligonucleotide
  Target: LAMA2; (-) strand; PAM type: YTN; PAM sequence: TTC
tgatgctgctgaaatctgga

SEQ ID NO: 209854 - DNA, 20 bp, Artificial Sequence
  Description of Artificial Sequence: Synthetic oligonucleotide
  Target: LAMA2; (-) strand; PAM type: YTN; PAM sequence: CTT
ctgatgctgctgaaatctgg

SEQ ID NO: 209855 - DNA, 20 bp, Artificial Sequence
  Description of Artificial Sequence: Synthetic oligonucleotide
  Target: LAMA2; (-) strand; PAM type: YTN; PAM sequence: TTA
tatggcttctgatgctgctg

SEQ ID NO: 209856 - DNA, 20 bp, Artificial Sequence
  Description of Artificial Sequence: Synthetic oligonucleotide
  Target: LAMA2; (-) strand; PAM type: YTN; PAM sequence: TTT
atatggcttctgatgctgct

SEQ ID NO: 209857 - DNA, 20 bp, Artificial Sequence
  Description of Artificial Sequence: Synthetic oligonucleotide
  Target: LAMA2; (-) strand; PAM type: YTN; PAM sequence: CTA
agggccatccgaaggcagtg

SEQ ID NO: 209858 - DNA, 20 bp, Artificial Sequence
  Description of Artificial Sequence: Synthetic oligonucleotide
  Target: LAMA2; (-) strand; PAM type: YTN; PAM sequence: TTG
gtggccatctaagggccatc

SEQ ID NO: 209859 - DNA, 20 bp, Artificial Sequence
  Description of Artificial Sequence: Synthetic oligonucleotide
  Target: LAMA2; (-) strand; PAM type: YTN; PAM sequence: CTT
ggtggccatctaagggccat

SEQ ID NO: 209860 - DNA, 20 bp, Artificial Sequence
  Description of Artificial Sequence: Synthetic oligonucleotide
  Target: LAMA2; (-) strand; PAM type: YTN; PAM sequence: CTA
ggggatcttggtggccatct

SEQ ID NO: 209861 - DNA, 20 bp, Artificial Sequence
  Description of Artificial Sequence: Synthetic oligonucleotide
  Target: LAMA2; (-) strand; PAM type: YTN; PAM sequence: TTG
tacacagaaaatgtaactag

SEQ ID NO: 209862 - DNA, 20 bp, Artificial Sequence
  Description of Artificial Sequence: Synthetic oligonucleotide
  Target: LAMA2; (-) strand; PAM type: YTN; PAM sequence: TTT
gtacacagaaaatgtaacta

SEQ ID NO: 209863 - DNA, 20 bp, Artificial Sequence
  Description of Artificial Sequence: Synthetic oligonucleotide
  Target: LAMA2; (-) strand; PAM type: YTN; PAM sequence: CTT
tgtacacagaaaatgtaact

SEQ ID NO: 209864 - DNA, 20 bp, Artificial Sequence
  Description of Artificial Sequence: Synthetic oligonucleotide
  Target: LAMA2; (-) strand; PAM type: YTN; PAM sequence: CTG
ctttgtacacagaaaatgta

SEQ ID NO: 209865 - DNA, 20 bp, Artificial Sequence
  Description of Artificial Sequence: Synthetic oligonucleotide
  Target: LAMA2; (-) strand; PAM type: YTN; PAM sequence: TTC
tgctttgtacacagaaaatg

SEQ ID NO: 209866 - DNA, 20 bp, Artificial Sequence
  Description of Artificial Sequence: Synthetic oligonucleotide
  Target: LAMA2; (-) strand; PAM type: YTN; PAM sequence: CTT
ctgctttgtacacagaaaat

SEQ ID NO: 209867 - DNA, 20 bp, Artificial Sequence
  Description of Artificial Sequence: Synthetic oligonucleotide
  Target: LAMA2; (-) strand; PAM type: YTN; PAM sequence: TTC
ttctgctttgtacacagaaa

SEQ ID NO: 209868 - DNA, 20 bp, Artificial Sequence
  Description of Artificial Sequence: Synthetic oligonucleotide
  Target: LAMA2; (-) strand; PAM type: YTN; PAM sequence: TTT
cttctgctttgtacacagaa

SEQ ID NO: 209869 - DNA, 20 bp, Artificial Sequence
  Description of Artificial Sequence: Synthetic oligonucleotide
  Target: LAMA2; (-) strand; PAM type: YTN; PAM sequence: CTT
tcttctgctttgtacacaga

SEQ ID NO: 209870 - DNA, 20 bp, Artificial Sequence
  Description of Artificial Sequence: Synthetic oligonucleotide
  Target: LAMA2; (-) strand; PAM type: YTN; PAM sequence: CTG
tgtacagaatgaaggacatc

SEQ ID NO: 209871 - DNA, 20 bp, Artificial Sequence
  Description of Artificial Sequence: Synthetic oligonucleotide
  Target: LAMA2; (-) strand; PAM type: YTN; PAM sequence: CTA
aaccacagtgtagcacactg

SEQ ID NO: 209872 - DNA, 20 bp, Artificial Sequence
  Description of Artificial Sequence: Synthetic oligonucleotide
  Target: LAMA2; (-) strand; PAM type: YTN; PAM sequence: TTA
ataataaactaaaccacagt

SEQ ID NO: 209873 - DNA, 20 bp, Artificial Sequence
  Description of Artificial Sequence: Synthetic oligonucleotide
  Target: LAMA2; (-) strand; PAM type: YTN; PAM sequence: TTT
aataataaactaaaccacag

SEQ ID NO: 209874 - DNA, 20 bp, Artificial Sequence
  Description of Artificial Sequence: Synthetic oligonucleotide
  Target: LAMA2; (-) strand; PAM type: YTN; PAM sequence: CTT
taataataaactaaaccaca

SEQ ID NO: 209875 - DNA, 20 bp, Artificial Sequence
  Description of Artificial Sequence: Synthetic oligonucleotide
  Target: LAMA2; (-) strand; PAM type: YTN; PAM sequence: CTC
tttaataataaactaaacca

SEQ ID NO: 209876 - DNA, 20 bp, Artificial Sequence
  Description of Artificial Sequence: Synthetic oligonucleotide
  Target: LAMA2; (-) strand; PAM type: YTN; PAM sequence: TTA
tgctctttaataataaacta

SEQ ID NO: 209877 - DNA, 20 bp, Artificial Sequence
  Description of Artificial Sequence: Synthetic oligonucleotide
  Target: LAMA2; (-) strand; PAM type: YTN; PAM sequence: TTA
attatgctctttaataataa

SEQ ID NO: 209878 - DNA, 20 bp, Artificial Sequence
  Description of Artificial Sequence: Synthetic oligonucleotide
  Target: LAMA2; (-) strand; PAM type: YTN; PAM sequence: TTT
aattatgctctttaataata

SEQ ID NO: 209879 - DNA, 20 bp, Artificial Sequence
  Description of Artificial Sequence: Synthetic oligonucleotide
  Target: LAMA2; (-) strand; PAM type: YTN; PAM sequence: TTT
taattatgctctttaataat

SEQ ID NO: 209880 - DNA, 20 bp, Artificial Sequence
  Description of Artificial Sequence: Synthetic oligonucleotide
  Target: LAMA2; (-) strand; PAM type: YTN; PAM sequence: CTT
ttaattatgctctttaataa

SEQ ID NO: 209881 - DNA, 20 bp, Artificial Sequence
  Description of Artificial Sequence: Synthetic oligonucleotide
  Target: LAMA2; (-) strand; PAM type: YTN; PAM sequence: TTC
ttttaattatgctctttaat

SEQ ID NO: 209882 - DNA, 20 bp, Artificial Sequence
  Description of Artificial Sequence: Synthetic oligonucleotide
  Target: LAMA2; (-) strand; PAM type: YTN; PAM sequence: TTT
cttttaattatgctctttaa

SEQ ID NO: 209883 - DNA, 20 bp, Artificial Sequence
  Description of Artificial Sequence: Synthetic oligonucleotide
  Target: LAMA2; (-) strand; PAM type: YTN; PAM sequence: TTT
tcttttaattatgctcttta

SEQ ID NO: 209884 - DNA, 20 bp, Artificial Sequence
  Description of Artificial Sequence: Synthetic oligonucleotide
  Target: LAMA2; (-) strand; PAM type: YTN; PAM sequence: TTT
ttcttttaattatgctcttt

SEQ ID NO: 209885 - DNA, 20 bp, Artificial Sequence
  Description of Artificial Sequence: Synthetic oligonucleotide
  Target: LAMA2; (-) strand; PAM type: YTN; PAM sequence: TTT
tttcttttaattatgctctt

SEQ ID NO: 209886 - DNA, 20 bp, Artificial Sequence
  Description of Artificial Sequence: Synthetic oligonucleotide
  Target: LAMA2; (-) strand; PAM type: YTN; PAM sequence: CTA
aatagcatattttttctttt

SEQ ID NO: 209887 - DNA, 20 bp, Artificial Sequence
  Description of Artificial Sequence: Synthetic oligonucleotide
  Target: LAMA2; (-) strand; PAM type: YTN; PAM sequence: TTA
gtaatccaaacctaaatagc

SEQ ID NO: 209888 - DNA, 20 bp, Artificial Sequence
  Description of Artificial Sequence: Synthetic oligonucleotide
  Target: LAMA2; (-) strand; PAM type: YTN; PAM sequence: TTA
aaattagtaatccaaaccta

SEQ ID NO: 209889 - DNA, 20 bp, Artificial Sequence
  Description of Artificial Sequence: Synthetic oligonucleotide
  Target: LAMA2; (-) strand; PAM type: YTN; PAM sequence: CTT
aaaattagtaatccaaacct

SEQ ID NO: 209890 - DNA, 20 bp, Artificial Sequence
  Description of Artificial Sequence: Synthetic oligonucleotide
  Target: LAMA2; (-) strand; PAM type: YTN; PAM sequence: TTA
aacttaaaattagtaatcca

SEQ ID NO: 209891 - DNA, 20 bp, Artificial Sequence
  Description of Artificial Sequence: Synthetic oligonucleotide
  Target: LAMA2; (-) strand; PAM type: YTN; PAM sequence: TTT
aaacttaaaattagtaatcc

SEQ ID NO: 209892 - DNA, 20 bp, Artificial Sequence
  Description of Artificial Sequence: Synthetic oligonucleotide
  Target: LAMA2; (-) strand; PAM type: YTN; PAM sequence: TTC
aaagaaatatgatataaagg

SEQ ID NO: 209893 - DNA, 20 bp, Artificial Sequence
  Description of Artificial Sequence: Synthetic oligonucleotide
  Target: LAMA2; (-) strand; PAM type: YTN; PAM sequence: CTT
caaagaaatatgatataaag

SEQ ID NO: 209894 - DNA, 20 bp, Artificial Sequence
  Description of Artificial Sequence: Synthetic oligonucleotide
  Target: LAMA2; (-) strand; PAM type: YTN; PAM sequence: CTA
gcttcaaagaaatatgatat

SEQ ID NO: 209895 - DNA, 20 bp, Artificial Sequence
  Description of Artificial Sequence: Synthetic oligonucleotide
  Target: LAMA2; (-) strand; PAM type: YTN; PAM sequence: TTG
aatacatgtctagcttcaaa

SEQ ID NO: 209896 - DNA, 20 bp, Artificial Sequence
  Description of Artificial Sequence: Synthetic oligonucleotide
  Target: LAMA2; (-) strand; PAM type: YTN; PAM sequence: TTT
gaatacatgtctagcttcaa

SEQ ID NO: 209897 - DNA, 20 bp, Artificial Sequence
  Description of Artificial Sequence: Synthetic oligonucleotide
  Target: LAMA2; (-) strand; PAM type: YTN; PAM sequence: CTG
aggtttgaatacatgtctag

SEQ ID NO: 209898 - DNA, 20 bp, Artificial Sequence
  Description of Artificial Sequence: Synthetic oligonucleotide
  Target: LAMA2; (-) strand; PAM type: YTN; PAM sequence: TTG
ggggagctgaggtttgaata

SEQ ID NO: 209899 - DNA, 20 bp, Artificial Sequence
  Description of Artificial Sequence: Synthetic oligonucleotide
  Target: LAMA2; (-) strand; PAM type: YTN; PAM sequence: TTA
ttgggggagctgaggtttga

SEQ ID NO: 209900 - DNA, 20 bp, Artificial Sequence
  Description of Artificial Sequence: Synthetic oligonucleotide
  Target: LAMA2; (-) strand; PAM type: YTN; PAM sequence: CTA
attattgggggagctgaggt

SEQ ID NO: 209901 - DNA, 20 bp, Artificial Sequence
  Description of Artificial Sequence: Synthetic oligonucleotide
  Target: LAMA2; (-) strand; PAM type: YTN; PAM sequence: TTC
aaatatctaattattggggg

SEQ ID NO: 209902 - DNA, 20 bp, Artificial Sequence
  Description of Artificial Sequence: Synthetic oligonucleotide
  Target: LAMA2; (-) strand; PAM type: YTN; PAM sequence: TTC
caccatgttcaaatatctaa

SEQ ID NO: 209903 - DNA, 20 bp, Artificial Sequence
  Description of Artificial Sequence: Synthetic oligonucleotide
  Target: LAMA2; (-) strand; PAM type: YTN; PAM sequence: TTT
ccaccatgttcaaatatcta

SEQ ID NO: 209904 - DNA, 20 bp, Artificial Sequence
  Description of Artificial Sequence: Synthetic oligonucleotide
  Target: LAMA2; (-) strand; PAM type: YTN; PAM sequence: CTA
tttccaccatgttcaaatat

SEQ ID NO: 209905 - DNA, 20 bp, Artificial Sequence
  Description of Artificial Sequence: Synthetic oligonucleotide
  Target: LAMA2; (-) strand; PAM type: YTN; PAM sequence: TTC
actatttccaccatgttcaa

SEQ ID NO: 209906 - DNA, 20 bp, Artificial Sequence
  Description of Artificial Sequence: Synthetic oligonucleotide
  Target: LAMA2; (-) strand; PAM type: YTN; PAM sequence: TTA
aagatgataggttcactatt

SEQ ID NO: 209907 - DNA, 20 bp, Artificial Sequence
  Description of Artificial Sequence: Synthetic oligonucleotide
  Target: LAMA2; (-) strand; PAM type: YTN; PAM sequence: TTT
aaagatgataggttcactat

SEQ ID NO: 209908 - DNA, 20 bp, Artificial Sequence
  Description of Artificial Sequence: Synthetic oligonucleotide
  Target: LAMA2; (-) strand; PAM type: YTN; PAM sequence: TTT
taaagatgataggttcacta

SEQ ID NO: 209909 - DNA, 20 bp, Artificial Sequence
  Description of Artificial Sequence: Synthetic oligonucleotide
  Target: LAMA2; (-) strand; PAM type: YTN; PAM sequence: TTG
ttttaaagatgataggttca

SEQ ID NO: 209910 - DNA, 20 bp, Artificial Sequence
  Description of Artificial Sequence: Synthetic oligonucleotide
  Target: LAMA2; (-) strand; PAM type: YTN; PAM sequence: TTT
gttttaaagatgataggttc

SEQ ID NO: 209911 - DNA, 20 bp, Artificial Sequence
  Description of Artificial Sequence: Synthetic oligonucleotide
  Target: LAMA2; (-) strand; PAM type: YTN; PAM sequence: CTT
tgttttaaagatgataggtt

SEQ ID NO: 209912 - DNA, 20 bp, Artificial Sequence
  Description of Artificial Sequence: Synthetic oligonucleotide
  Target: LAMA2; (-) strand; PAM type: YTN; PAM sequence: TTA
tatcctttgttttaaagatg

SEQ ID NO: 209913 - DNA, 20 bp, Artificial Sequence
  Description of Artificial Sequence: Synthetic oligonucleotide
  Target: LAMA2; (-) strand; PAM type: YTN; PAM sequence: TTT
atatcctttgttttaaagat

SEQ ID NO: 209914 - DNA, 20 bp, Artificial Sequence
  Description of Artificial Sequence: Synthetic oligonucleotide
  Target: LAMA2; (-) strand; PAM type: YTN; PAM sequence: TTT
tatatcctttgttttaaaga

SEQ ID NO: 209915 - DNA, 20 bp, Artificial Sequence
  Description of Artificial Sequence: Synthetic oligonucleotide
  Target: LAMA2; (-) strand; PAM type: YTN; PAM sequence: TTA
gattttatatcctttgtttt

SEQ ID NO: 209916 - DNA, 20 bp, Artificial Sequence
  Description of Artificial Sequence: Synthetic oligonucleotide
  Target: LAMA2; (-) strand; PAM type: YTN; PAM sequence: CTA
ttagattttatatcctttgt

SEQ ID NO: 209917 - DNA, 20 bp, Artificial Sequence
  Description of Artificial Sequence: Synthetic oligonucleotide
  Target: LAMA2; (-) strand; PAM type: YTN; PAM sequence: CTC
tattagattttatatccttt

SEQ ID NO: 209918 - DNA, 20 bp, Artificial Sequence
  Description of Artificial Sequence: Synthetic oligonucleotide
  Target: LAMA2; (-) strand; PAM type: YTN; PAM sequence: TTA
tccactctattagattttat

SEQ ID NO: 209919 - DNA, 20 bp, Artificial Sequence
  Description of Artificial Sequence: Synthetic oligonucleotide
  Target: LAMA2; (-) strand; PAM type: YTN; PAM sequence: TTA
taatcatgttatccactcta

SEQ ID NO: 209920 - DNA, 20 bp, Artificial Sequence
  Description of Artificial Sequence: Synthetic oligonucleotide
  Target: LAMA2; (-) strand; PAM type: YTN; PAM sequence: TTA
ttataatcatgttatccact

SEQ ID NO: 209921 - DNA, 20 bp, Artificial Sequence
  Description of Artificial Sequence: Synthetic oligonucleotide
  Target: LAMA2; (-) strand; PAM type: YTN; PAM sequence: TTT
attataatcatgttatccac

SEQ ID NO: 209922 - DNA, 20 bp, Artificial Sequence
  Description of Artificial Sequence: Synthetic oligonucleotide
  Target: LAMA2; (-) strand; PAM type: YTN; PAM sequence: CTT
tattataatcatgttatcca

SEQ ID NO: 209923 - DNA, 20 bp, Artificial Sequence
  Description of Artificial Sequence: Synthetic oligonucleotide
  Target: LAMA2; (-) strand; PAM type: YTN; PAM sequence: TTA
tatctttattataatcatgt

SEQ ID NO: 209924 - DNA, 20 bp, Artificial Sequence
  Description of Artificial Sequence: Synthetic oligonucleotide
  Target: LAMA2; (-) strand; PAM type: YTN; PAM sequence: TTT
atatctttattataatcatg

SEQ ID NO: 209925 - DNA, 20 bp, Artificial Sequence
  Description of Artificial Sequence: Synthetic oligonucleotide
  Target: LAMA2; (-) strand; PAM type: YTN; PAM sequence: CTT
tatatctttattataatcat

SEQ ID NO: 209926 - DNA, 20 bp, Artificial Sequence
  Description of Artificial Sequence: Synthetic oligonucleotide
  Target: LAMA2; (-) strand; PAM type: YTN; PAM sequence: TTA
taatctttatatctttatta

SEQ ID NO: 209927 - DNA, 20 bp, Artificial Sequence
  Description of Artificial Sequence: Synthetic oligonucleotide
  Target: LAMA2; (-) strand; PAM type: YTN; PAM sequence: TTT
ataatctttatatctttatt

SEQ ID NO: 209928 - DNA, 20 bp, Artificial Sequence
  Description of Artificial Sequence: Synthetic oligonucleotide
  Target: LAMA2; (-) strand; PAM type: YTN; PAM sequence: TTT
tataatctttatatctttat

SEQ ID NO: 209929 - DNA, 20 bp, Artificial Sequence
  Description of Artificial Sequence: Synthetic oligonucleotide
  Target: LAMA2; (-) strand; PAM type: YTN; PAM sequence: TTA
atattttataatctttatat

SEQ ID NO: 209930 - DNA, 20 bp, Artificial Sequence
  Description of Artificial Sequence: Synthetic oligonucleotide
  Target: LAMA2; (-) strand; PAM type: YTN; PAM sequence: TTT
aatattttataatctttata

SEQ ID NO: 209931 - DNA, 20 bp, Artificial Sequence
  Description of Artificial Sequence: Synthetic oligonucleotide
  Target: LAMA2; (-) strand; PAM type: YTN; PAM sequence: TTT
taatattttataatctttat

SEQ ID NO: 209932 - DNA, 20 bp, Artificial Sequence
  Description of Artificial Sequence: Synthetic oligonucleotide
  Target: LAMA2; (-) strand; PAM type: YTN; PAM sequence: CTT
ttaatattttataatcttta

SEQ ID NO: 209933 - DNA, 20 bp, Artificial Sequence
  Description of Artificial Sequence: Synthetic oligonucleotide
  Target: LAMA2; (-) strand; PAM type: YTN; PAM sequence: TTG
aacttttaatattttataat

SEQ ID NO: 209934 - DNA, 20 bp, Artificial Sequence
  Description of Artificial Sequence: Synthetic oligonucleotide
  Target: LAMA2; (-) strand; PAM type: YTN; PAM sequence: CTA
atgacaatattgaactttta

SEQ ID NO: 209935 - DNA, 20 bp, Artificial Sequence
  Description of Artificial Sequence: Synthetic oligonucleotide
  Target: LAMA2; (-) strand; PAM type: YTN; PAM sequence: TTA
gagtctaatgacaatattga

SEQ ID NO: 209936 - DNA, 20 bp, Artificial Sequence
  Description of Artificial Sequence: Synthetic oligonucleotide
  Target: LAMA2; (-) strand; PAM type: YTN; PAM sequence: TTG
attagagtctaatgacaata

SEQ ID NO: 209937 - DNA, 20 bp, Artificial Sequence
  Description of Artificial Sequence: Synthetic oligonucleotide
  Target: LAMA2; (-) strand; PAM type: YTN; PAM sequence: TTA
ttgattagagtctaatgaca

SEQ ID NO: 209938 - DNA, 20 bp, Artificial Sequence
  Description of Artificial Sequence: Synthetic oligonucleotide
  Target: LAMA2; (-) strand; PAM type: YTN; PAM sequence: CTC
attattgattagagtctaat

SEQ ID NO: 209939 - DNA, 20 bp, Artificial Sequence
  Description of Artificial Sequence: Synthetic oligonucleotide
  Target: LAMA2; (-) strand; PAM type: YTN; PAM sequence: TTC
atgtcaaaatataatacgtg

SEQ ID NO: 209940 - DNA, 20 bp, Artificial Sequence
  Description of Artificial Sequence: Synthetic oligonucleotide
  Target: LAMA2; (-) strand; PAM type: YTN; PAM sequence: CTT
catgtcaaaatataatacgt

SEQ ID NO: 209941 - DNA, 20 bp, Artificial Sequence
  Description of Artificial Sequence: Synthetic oligonucleotide
  Target: LAMA2; (-) strand; PAM type: YTN; PAM sequence: TTC
ttcatgtcaaaatataatac

SEQ ID NO: 209942 - DNA, 20 bp, Artificial Sequence
  Description of Artificial Sequence: Synthetic oligonucleotide
  Target: LAMA2; (-) strand; PAM type: YTN; PAM sequence: CTA
aatagttcttcatgtcaaaa

SEQ ID NO: 209943 - DNA, 20 bp, Artificial Sequence
  Description of Artificial Sequence: Synthetic oligonucleotide
  Target: LAMA2; (-) strand; PAM type: YTN; PAM sequence: CTA
aggctaaatagttcttcatg

SEQ ID NO: 209944 - DNA, 20 bp, Artificial Sequence
  Description of Artificial Sequence: Synthetic oligonucleotide
  Target: LAMA2; (-) strand; PAM type: YTN; PAM sequence: CTC
taaggctaaatagttcttca

SEQ ID NO: 209945 - DNA, 20 bp, Artificial Sequence
  Description of Artificial Sequence: Synthetic oligonucleotide
  Target: LAMA2; (-) strand; PAM type: YTN; PAM sequence: TTC
aaagctctaaggctaaatag

SEQ ID NO: 209946 - DNA, 20 bp, Artificial Sequence
  Description of Artificial Sequence: Synthetic oligonucleotide
  Target: LAMA2; (-) strand; PAM type: YTN; PAM sequence: TTT
caaagctctaaggctaaata

SEQ ID NO: 209947 - DNA, 20 bp, Artificial Sequence
  Description of Artificial Sequence: Synthetic oligonucleotide
  Target: LAMA2; (-) strand; PAM type: YTN; PAM sequence: TTA
tatttcaaagctctaaggct

SEQ ID NO: 209948 - DNA, 20 bp, Artificial Sequence
  Description of Artificial Sequence: Synthetic oligonucleotide
  Target: LAMA2; (-) strand; PAM type: YTN; PAM sequence: TTA
gttatatttcaaagctctaa

SEQ ID NO: 209949 - DNA, 20 bp, Artificial Sequence
  Description of Artificial Sequence: Synthetic oligonucleotide
  Target: LAMA2; (-) strand; PAM type: YTN; PAM sequence: CTT
agttatatttcaaagctcta

SEQ ID NO: 209950 - DNA, 20 bp, Artificial Sequence
  Description of Artificial Sequence: Synthetic oligonucleotide
  Target: LAMA2; (-) strand; PAM type: YTN; PAM sequence: TTC
ttagttatatttcaaagctc

SEQ ID NO: 209951 - DNA, 20 bp, Artificial Sequence
  Description of Artificial Sequence: Synthetic oligonucleotide
  Target: LAMA2; (-) strand; PAM type: YTN; PAM sequence: TTT
cttagttatatttcaaagct

SEQ ID NO: 209952 - DNA, 20 bp, Artificial Sequence
  Description of Artificial Sequence: Synthetic oligonucleotide
  Target: LAMA2; (-) strand; PAM type: YTN; PAM sequence: TTA
atagatttcttagttatatt

SEQ ID NO: 209953 - DNA, 20 bp, Artificial Sequence
  Description of Artificial Sequence: Synthetic oligonucleotide
  Target: LAMA2; (-) strand; PAM type: YTN; PAM sequence: TTT
aatagatttcttagttatat

SEQ ID NO: 209954 - DNA, 20 bp, Artificial Sequence
  Description of Artificial Sequence: Synthetic oligonucleotide
  Target: LAMA2; (-) strand; PAM type: YTN; PAM sequence: TTT
taatagatttcttagttata

SEQ ID NO: 209955 - DNA, 20 bp, Artificial Sequence
  Description of Artificial Sequence: Synthetic oligonucleotide
  Target: LAMA2; (-) strand; PAM type: YTN; PAM sequence: TTA
ttttaatagatttcttagtt

SEQ ID NO: 209956 - DNA, 20 bp, Artificial Sequence
  Description of Artificial Sequence: Synthetic oligonucleotide
  Target: LAMA2; (-) strand; PAM type: YTN; PAM sequence: TTT
attttaatagatttcttagt

SEQ ID NO: 209957 - DNA, 20 bp, Artificial Sequence
  Description of Artificial Sequence: Synthetic oligonucleotide
  Target: LAMA2; (-) strand; PAM type: YTN; PAM sequence: TTA
atttattttaatagatttct

SEQ ID NO: 209958 - DNA, 20 bp, Artificial Sequence
  Description of Artificial Sequence: Synthetic oligonucleotide
  Target: LAMA2; (-) strand; PAM type: YTN; PAM sequence: TTT
aatttattttaatagatttc

SEQ ID NO: 209959 - DNA, 20 bp, Artificial Sequence
  Description of Artificial Sequence: Synthetic oligonucleotide
  Target: LAMA2; (-) strand; PAM type: YTN; PAM sequence: CTA
tttaatttattttaatagat

SEQ ID NO: 209960 - DNA, 20 bp, Artificial Sequence
  Description of Artificial Sequence: Synthetic oligonucleotide
  Target: LAMA2; (-) strand; PAM type: YTN; PAM sequence: TTC
tatttaatttattttaatag

SEQ ID NO: 209961 - DNA, 20 bp, Artificial Sequence
  Description of Artificial Sequence: Synthetic oligonucleotide
  Target: LAMA2; (-) strand; PAM type: YTN; PAM sequence: TTG
gaatatattctatttaattt

SEQ ID NO: 209962 - DNA, 20 bp, Artificial Sequence
  Description of Artificial Sequence: Synthetic oligonucleotide
  Target: LAMA2; (-) strand; PAM type: YTN; PAM sequence: TTT
ggaatatattctatttaatt

SEQ ID NO: 209963 - DNA, 20 bp, Artificial Sequence
  Description of Artificial Sequence: Synthetic oligonucleotide
  Target: LAMA2; (-) strand; PAM type: YTN; PAM sequence: CTT
tggaatatattctatttaat

SEQ ID NO: 209964 - DNA, 20 bp, Artificial Sequence
  Description of Artificial Sequence: Synthetic oligonucleotide
  Target: LAMA2; (-) strand; PAM type: YTN; PAM sequence: TTA
ctttggaatatattctattt

SEQ ID NO: 209965 - DNA, 20 bp, Artificial Sequence
  Description of Artificial Sequence: Synthetic oligonucleotide
  Target: LAMA2; (-) strand; PAM type: YTN; PAM sequence: TTA
gttactttggaatatattct

SEQ ID NO: 209966 - DNA, 20 bp, Artificial Sequence
  Description of Artificial Sequence: Synthetic oligonucleotide
  Target: LAMA2; (-) strand; PAM type: YTN; PAM sequence: TTA
atatgggaaaacattagtta

SEQ ID NO: 209967 - DNA, 20 bp, Artificial Sequence
  Description of Artificial Sequence: Synthetic oligonucleotide
  Target: LAMA2; (-) strand; PAM type: YTN; PAM sequence: CTG
agttaatatgggaaaacatt

SEQ ID NO: 209968 - DNA, 20 bp, Artificial Sequence
  Description of Artificial Sequence: Synthetic oligonucleotide
  Target: LAMA2; (-) strand; PAM type: YTN; PAM sequence: TTC
tgagttaatatgggaaaaca

SEQ ID NO: 209969 - DNA, 20 bp, Artificial Sequence
  Description of Artificial Sequence: Synthetic oligonucleotide
  Target: LAMA2; (-) strand; PAM type: YTN; PAM sequence: TTA
ttctgagttaatatgggaaa

SEQ ID NO: 209970 - DNA, 20 bp, Artificial Sequence
  Description of Artificial Sequence: Synthetic oligonucleotide
  Target: LAMA2; (-) strand; PAM type: YTN; PAM sequence: TTC
agacaaagttattctgagtt

SEQ ID NO: 209971 - DNA, 20 bp, Artificial Sequence
  Description of Artificial Sequence: Synthetic oligonucleotide
  Target: LAMA2; (-) strand; PAM type: YTN; PAM sequence: TTT
cagacaaagttattctgagt

SEQ ID NO: 209972 - DNA, 20 bp, Artificial Sequence
  Description of Artificial Sequence: Synthetic oligonucleotide
  Target: LAMA2; (-) strand; PAM type: YTN; PAM sequence: TTA
atttcagacaaagttattct

SEQ ID NO: 209973 - DNA, 20 bp, Artificial Sequence
  Description of Artificial Sequence: Synthetic oligonucleotide
  Target: LAMA2; (-) strand; PAM type: YTN; PAM sequence: TTT
aatttcagacaaagttattc

SEQ ID NO: 209974 - DNA, 20 bp, Artificial Sequence
  Description of Artificial Sequence: Synthetic oligonucleotide
  Target: LAMA2; (-) strand; PAM type: YTN; PAM sequence: TTC
agtttaatttcagacaaagt

SEQ ID NO: 209975 - DNA, 20 bp, Artificial Sequence
  Description of Artificial Sequence: Synthetic oligonucleotide
  Target: LAMA2; (-) strand; PAM type: YTN; PAM sequence: CTA
taaatgatatatattcagtt

SEQ ID NO: 209976 - DNA, 20 bp, Artificial Sequence
  Description of Artificial Sequence: Synthetic oligonucleotide
  Target: LAMA2; (-) strand; PAM type: YTN; PAM sequence: TTG
tatctataaatgatatatat

SEQ ID NO: 209977 - DNA, 20 bp, Artificial Sequence
  Description of Artificial Sequence: Synthetic oligonucleotide
  Target: LAMA2; (-) strand; PAM type: YTN; PAM sequence: CTT
gtatctataaatgatatata

SEQ ID NO: 209978 - DNA, 20 bp, Artificial Sequence
  Description of Artificial Sequence: Synthetic oligonucleotide
  Target: LAMA2; (-) strand; PAM type: YTN; PAM sequence: CTA
tgcttgtatctataaatgat

SEQ ID NO: 209979 - DNA, 20 bp, Artificial Sequence
  Description of Artificial Sequence: Synthetic oligonucleotide
  Target: LAMA2; (-) strand; PAM type: YTN; PAM sequence: CTC
tatgcttgtatctataaatg

SEQ ID NO: 209980 - DNA, 20 bp, Artificial Sequence
  Description of Artificial Sequence: Synthetic oligonucleotide
  Target: LAMA2; (-) strand; PAM type: YTN; PAM sequence: TTA
aactctatgcttgtatctat

SEQ ID NO: 209981 - DNA, 20 bp, Artificial Sequence
  Description of Artificial Sequence: Synthetic oligonucleotide
  Target: LAMA2; (-) strand; PAM type: YTN; PAM sequence: TTT
aaactctatgcttgtatcta

SEQ ID NO: 209982 - DNA, 20 bp, Artificial Sequence
  Description of Artificial Sequence: Synthetic oligonucleotide
  Target: LAMA2; (-) strand; PAM type: YTN; PAM sequence: CTG
aatttaaactctatgcttgt

SEQ ID NO: 209983 - DNA, 20 bp, Artificial Sequence
  Description of Artificial Sequence: Synthetic oligonucleotide
  Target: LAMA2; (-) strand; PAM type: YTN; PAM sequence: TTA
cctgaatttaaactctatgc

SEQ ID NO: 209984 - DNA, 20 bp, Artificial Sequence
  Description of Artificial Sequence: Synthetic oligonucleotide
  Target: LAMA2; (-) strand; PAM type: YTN; PAM sequence: TTG
tacatccaaataagattacc

SEQ ID NO: 209985 - DNA, 20 bp, Artificial Sequence
  Description of Artificial Sequence: Synthetic oligonucleotide
  Target: LAMA2; (-) strand; PAM type: YTN; PAM sequence: TTT
gtacatccaaataagattac

SEQ ID NO: 209986 - DNA, 20 bp, Artificial Sequence
  Description of Artificial Sequence: Synthetic oligonucleotide
  Target: LAMA2; (-) strand; PAM type: YTN; PAM sequence: TTC
acggtttgtacatccaaata

SEQ ID NO: 209987 - DNA, 20 bp, Artificial Sequence
  Description of Artificial Sequence: Synthetic oligonucleotide
  Target: LAMA2; (-) strand; PAM type: YTN; PAM sequence: CTA
ttcacggtttgtacatccaa

SEQ ID NO: 209988 - DNA, 20 bp, Artificial Sequence
  Description of Artificial Sequence: Synthetic oligonucleotide
  Target: LAMA2; (-) strand; PAM type: YTN; PAM sequence: CTC
tattcacggtttgtacatcc

SEQ ID NO: 209989 - DNA, 20 bp, Artificial Sequence
  Description of Artificial Sequence: Synthetic oligonucleotide
  Target: LAMA2; (-) strand; PAM type: YTN; PAM sequence: TTA
atgtctctattcacggtttg

SEQ ID NO: 209990 - DNA, 20 bp, Artificial Sequence
  Description of Artificial Sequence: Synthetic oligonucleotide
  Target: LAMA2; (-) strand; PAM type: YTN; PAM sequence: CTT
aatgtctctattcacggttt

SEQ ID NO: 209991 - DNA, 20 bp, Artificial Sequence
  Description of Artificial Sequence: Synthetic oligonucleotide
  Target: LAMA2; (-) strand; PAM type: YTN; PAM sequence: TTC
cttaatgtctctattcacgg

SEQ ID NO: 209992 - DNA, 20 bp, Artificial Sequence
  Description of Artificial Sequence: Synthetic oligonucleotide
  Target: LAMA2; (-) strand; PAM type: YTN; PAM sequence: TTT
ccttaatgtctctattcacg

SEQ ID NO: 209993 - DNA, 20 bp, Artificial Sequence
  Description of Artificial Sequence: Synthetic oligonucleotide
  Target: LAMA2; (-) strand; PAM type: YTN; PAM sequence: TTT
tccttaatgtctctattcac

SEQ ID NO: 209994 - DNA, 20 bp, Artificial Sequence
  Description of Artificial Sequence: Synthetic oligonucleotide
  Target: LAMA2; (-) strand; PAM type: YTN; PAM sequence: CTT
ttccttaatgtctctattca

SEQ ID NO: 209995 - DNA, 20 bp, Artificial Sequence
  Description of Artificial Sequence: Synthetic oligonucleotide
  Target: LAMA2; (-) strand; PAM type: YTN; PAM sequence: CTA
cttttccttaatgtctctat

SEQ ID NO: 209996 - DNA, 20 bp, Artificial Sequence
  Description of Artificial Sequence: Synthetic oligonucleotide
  Target: LAMA2; (-) strand; PAM type: YTN; PAM sequence: TTA
tgactacttttccttaatgt

SEQ ID NO: 209997 - DNA, 20 bp, Artificial Sequence
  Description of Artificial Sequence: Synthetic oligonucleotide
  Target: LAMA2; (-) strand; PAM type: YTN; PAM sequence: TTA
attatgactacttttcctta

SEQ ID NO: 209998 - DNA, 20 bp, Artificial Sequence
  Description of Artificial Sequence: Synthetic oligonucleotide
  Target: LAMA2; (-) strand; PAM type: YTN; PAM sequence: TTC
gatataattaattatgacta

SEQ ID NO: 209999 - DNA, 20 bp, Artificial Sequence
  Description of Artificial Sequence: Synthetic oligonucleotide
  Target: LAMA2; (-) strand; PAM type: YTN; PAM sequence: CTG
aagattcgatataattaatt

SEQ ID NO: 210000 - DNA, 20 bp, Artificial Sequence
  Description of Artificial Sequence: Synthetic oligonucleotide
  Target: LAMA2; (-) strand; PAM type: YTN; PAM sequence: CTC
tgaagattcgatataattaa

SEQ ID NO: 210001 - DNA, 20 bp, Artificial Sequence
  Description of Artificial Sequence: Synthetic oligonucleotide
  Target: LAMA2; (-) strand; PAM type: YTN; PAM sequence: TTA
ggaagaggaatggtgtgaac

SEQ ID NO: 210002 - DNA, 20 bp, Artificial Sequence
  Description of Artificial Sequence: Synthetic oligonucleotide
  Target: LAMA2; (-) strand; PAM type: YTN; PAM sequence: TTT
aggaagaggaatggtgtgaa

SEQ ID NO: 210003 - DNA, 20 bp, Artificial Sequence
  Description of Artificial Sequence: Synthetic oligonucleotide
  Target: LAMA2; (-) strand; PAM type: YTN; PAM sequence: TTT
taggaagaggaatggtgtga

SEQ ID NO: 210004 - DNA, 20 bp, Artificial Sequence
  Description of Artificial Sequence: Synthetic oligonucleotide
  Target: LAMA2; (-) strand; PAM type: YTN; PAM sequence: TTT
ttaggaagaggaatggtgtg

SEQ ID NO: 210005 - DNA, 20 bp, Artificial Sequence
  Description of Artificial Sequence: Synthetic oligonucleotide
  Target: LAMA2; (-) strand; PAM type: YTN; PAM sequence: CTG
tatgtgtttttaggaagagg

SEQ ID NO: 210006 - DNA, 20 bp, Artificial Sequence
  Description of Artificial Sequence: Synthetic oligonucleotide
  Target: LAMA2; (-) strand; PAM type: YTN; PAM sequence: CTA
aacctgtatgtgtttttagg

SEQ ID NO: 210007 - DNA, 20 bp, Artificial Sequence
  Description of Artificial Sequence: Synthetic oligonucleotide
  Target: LAMA2; (-) strand; PAM type: YTN; PAM sequence: TTG
atcagcctaaacctgtatgt

SEQ ID NO: 210008 - DNA, 20 bp, Artificial Sequence
  Description of Artificial Sequence: Synthetic oligonucleotide
  Target: LAMA2; (-) strand; PAM type: YTN; PAM sequence: CTT
gatcagcctaaacctgtatg

SEQ ID NO: 210009 - DNA, 20 bp, Artificial Sequence
  Description of Artificial Sequence: Synthetic oligonucleotide
  Target: LAMA2; (-) strand; PAM type: YTN; PAM sequence: TTG
atatcttgatcagcctaaac

SEQ ID NO: 210010 - DNA, 20 bp, Artificial Sequence
  Description of Artificial Sequence: Synthetic oligonucleotide
  Target: LAMA2; (-) strand; PAM type: YTN; PAM sequence: CTC
agagcagacattgatatctt

SEQ ID NO: 210011 - DNA, 20 bp, Artificial Sequence
  Description of Artificial Sequence: Synthetic oligonucleotide
  Target: LAMA2; (-) strand; PAM type: YTN; PAM sequence: TTG
atgatctcagagcagacatt

SEQ ID NO: 210012 - DNA, 20 bp, Artificial Sequence
  Description of Artificial Sequence: Synthetic oligonucleotide
  Target: LAMA2; (-) strand; PAM type: YTN; PAM sequence: TTT
gatgatctcagagcagacat

SEQ ID NO: 210013 - DNA, 20 bp, Artificial Sequence
  Description of Artificial Sequence: Synthetic oligonucleotide
  Target: LAMA2; (-) strand; PAM type: YTN; PAM sequence: CTT
tgatgatctcagagcagaca

SEQ ID NO: 210014 - DNA, 20 bp, Artificial Sequence
  Description of Artificial Sequence: Synthetic oligonucleotide
  Target: LAMA2; (-) strand; PAM type: YTN; PAM sequence: TTA
ctttgatgatctcagagcag

SEQ ID NO: 210015 - DNA, 20 bp, Artificial Sequence
  Description of Artificial Sequence: Synthetic oligonucleotide
  Target: LAMA2; (-) strand; PAM type: YTN; PAM sequence: TTA
gaatggacgcattactttga

SEQ ID NO: 210016 - DNA, 20 bp, Artificial Sequence
  Description of Artificial Sequence: Synthetic oligonucleotide
  Target: LAMA2; (-) strand; PAM type: YTN; PAM sequence: CTT
agaatggacgcattactttg

SEQ ID NO: 210017 - DNA, 20 bp, Artificial Sequence
  Description of Artificial Sequence: Synthetic oligonucleotide
  Target: LAMA2; (-) strand; PAM type: YTN; PAM sequence: TTC
ttagaatggacgcattactt

SEQ ID NO: 210018 - DNA, 20 bp, Artificial Sequence
  Description of Artificial Sequence: Synthetic oligonucleotide
  Target: LAMA2; (-) strand; PAM type: YTN; PAM sequence: CTT
cttagaatggacgcattact

SEQ ID NO: 210019 - DNA, 20 bp, Artificial Sequence
  Description of Artificial Sequence: Synthetic oligonucleotide
  Target: LAMA2; (-) strand; PAM type: YTN; PAM sequence: CTA
gtgcttcttagaatggacgc

SEQ ID NO: 210020 - DNA, 20 bp, Artificial Sequence
  Description of Artificial Sequence: Synthetic oligonucleotide
  Target: LAMA2; (-) strand; PAM type: YTN; PAM sequence: CTA
ccgtgatcatatatgccact

SEQ ID NO: 210021 - DNA, 20 bp, Artificial Sequence
  Description of Artificial Sequence: Synthetic oligonucleotide
  Target: LAMA2; (-) strand; PAM type: YTN; PAM sequence: TTC
taccgtgatcatatatgcca

SEQ ID NO: 210022 - DNA, 20 bp, Artificial Sequence
  Description of Artificial Sequence: Synthetic oligonucleotide
  Target: LAMA2; (-) strand; PAM type: YTN; PAM sequence: CTT
ctaccgtgatcatatatgcc

SEQ ID NO: 210023 - DNA, 20 bp, Artificial Sequence
  Description of Artificial Sequence: Synthetic oligonucleotide
  Target: LAMA2; (-) strand; PAM type: YTN; PAM sequence: CTC
ttctaccgtgatcatatatg

SEQ ID NO: 210024 - DNA, 20 bp, Artificial Sequence
  Description of Artificial Sequence: Synthetic oligonucleotide
  Target: LAMA2; (-) strand; PAM type: YTN; PAM sequence: TTG
ctcttctaccgtgatcatat

SEQ ID NO: 210025 - DNA, 20 bp, Artificial Sequence
  Description of Artificial Sequence: Synthetic oligonucleotide
  Target: LAMA2; (-) strand; PAM type: YTN; PAM sequence: CTT
gctcttctaccgtgatcata

SEQ ID NO: 210026 - DNA, 20 bp, Artificial Sequence
  Description of Artificial Sequence: Synthetic oligonucleotide
  Target: LAMA2; (-) strand; PAM type: YTN; PAM sequence: TTC
ttgctcttctaccgtgatca

SEQ ID NO: 210027 - DNA, 20 bp, Artificial Sequence
  Description of Artificial Sequence: Synthetic oligonucleotide
  Target: LAMA2; (-) strand; PAM type: YTN; PAM sequence: TTT
cttgctcttctaccgtgatc

SEQ ID NO: 210028 - DNA, 20 bp, Artificial Sequence
  Description of Artificial Sequence: Synthetic oligonucleotide
  Target: LAMA2; (-) strand; PAM type: YTN; PAM sequence: TTT
tcttgctcttctaccgtgat

SEQ ID NO: 210029 - DNA, 20 bp, Artificial Sequence
  Description of Artificial Sequence: Synthetic oligonucleotide
  Target: LAMA2; (-) strand; PAM type: YTN; PAM sequence: CTT
ttcttgctcttctaccgtga

SEQ ID NO: 210030 - DNA, 20 bp, Artificial Sequence
  Description of Artificial Sequence: Synthetic oligonucleotide
  Target: LAMA2; (-) strand; PAM type: YTN; PAM sequence: CTC
cttttcttgctcttctaccg

SEQ ID NO: 210031 - DNA, 20 bp, Artificial Sequence
  Description of Artificial Sequence: Synthetic oligonucleotide
  Target: LAMA2; (-) strand; PAM type: YTN; PAM sequence: CTA
agtgagggctccttttcttg

SEQ ID NO: 210032 - DNA, 20 bp, Artificial Sequence
  Description of Artificial Sequence: Synthetic oligonucleotide
  Target: LAMA2; (-) strand; PAM type: YTN; PAM sequence: TTC
taagtgagggctccttttct

SEQ ID NO: 210033 - DNA, 20 bp, Artificial Sequence
  Description of Artificial Sequence: Synthetic oligonucleotide
  Target: LAMA2; (-) strand; PAM type: YTN; PAM sequence: TTA
tggggttctaagtgagggct

SEQ ID NO: 210034 - DNA, 20 bp, Artificial Sequence
  Description of Artificial Sequence: Synthetic oligonucleotide
  Target: LAMA2; (-) strand; PAM type: YTN; PAM sequence: CTT
atggggttctaagtgagggc

SEQ ID NO: 210035 - DNA, 20 bp, Artificial Sequence
  Description of Artificial Sequence: Synthetic oligonucleotide
  Target: LAMA2; (-) strand; PAM type: YTN; PAM sequence: CTG
tcttatggggttctaagtga

SEQ ID NO: 210036 - DNA, 20 bp, Artificial Sequence
  Description of Artificial Sequence: Synthetic oligonucleotide
  Target: LAMA2; (-) strand; PAM type: YTN; PAM sequence: TTC
ctgtcttatggggttctaag

SEQ ID NO: 210037 - DNA, 20 bp, Artificial Sequence
  Description of Artificial Sequence: Synthetic oligonucleotide
  Target: LAMA2; (-) strand; PAM type: YTN; PAM sequence: TTT
cctgtcttatggggttctaa

SEQ ID NO: 210038 - DNA, 20 bp, Artificial Sequence
  Description of Artificial Sequence: Synthetic oligonucleotide
  Target: LAMA2; (-) strand; PAM type: YTN; PAM sequence: CTT
tcctgtcttatggggttcta

SEQ ID NO: 210039 - DNA, 20 bp, Artificial Sequence
  Description of Artificial Sequence: Synthetic oligonucleotide
  Target: LAMA2; (-) strand; PAM type: YTN; PAM sequence: CTG
tatctttcctgtcttatggg

SEQ ID NO: 210040 - DNA, 20 bp, Artificial Sequence
  Description of Artificial Sequence: Synthetic oligonucleotide
  Target: LAMA2; (-) strand; PAM type: YTN; PAM sequence: TTG
atgctgtatctttcctgtct

SEQ ID NO: 210041 - DNA, 20 bp, Artificial Sequence
  Description of Artificial Sequence: Synthetic oligonucleotide
  Target: LAMA2; (-) strand; PAM type: YTN; PAM sequence: CTG
gagaggagaggttgatgctg

SEQ ID NO: 210042 - DNA, 20 bp, Artificial Sequence
  Description of Artificial Sequence: Synthetic oligonucleotide
  Target: LAMA2; (-) strand; PAM type: YTN; PAM sequence: TTA
caatccataacacagataaa

SEQ ID NO: 210043 - DNA, 20 bp, Artificial Sequence
  Description of Artificial Sequence: Synthetic oligonucleotide
  Target: LAMA2; (-) strand; PAM type: YTN; PAM sequence: CTT
acaatccataacacagataa

SEQ ID NO: 210044 - DNA, 20 bp, Artificial Sequence
  Description of Artificial Sequence: Synthetic oligonucleotide
  Target: LAMA2; (-) strand; PAM type: YTN; PAM sequence: CTC
ttacaatccataacacagat

SEQ ID NO: 210045 - DNA, 20 bp, Artificial Sequence
  Description of Artificial Sequence: Synthetic oligonucleotide
  Target: LAMA2; (-) strand; PAM type: YTN; PAM sequence: TTC
aaaacactcttacaatccat

SEQ ID NO: 210046 - DNA, 20 bp, Artificial Sequence
  Description of Artificial Sequence: Synthetic oligonucleotide
  Target: LAMA2; (-) strand; PAM type: YTN; PAM sequence: TTT
caaaacactcttacaatcca

SEQ ID NO: 210047 - DNA, 20 bp, Artificial Sequence
  Description of Artificial Sequence: Synthetic oligonucleotide
  Target: LAMA2; (-) strand; PAM type: YTN; PAM sequence: TTA
tttcaaaacactcttacaat

SEQ ID NO: 210048 - DNA, 20 bp, Artificial Sequence
  Description of Artificial Sequence: Synthetic oligonucleotide
  Target: LAMA2; (-) strand; PAM type: YTN; PAM sequence: CTA
agtaaaatattatttcaaaa

SEQ ID NO: 210049 - DNA, 20 bp, Artificial Sequence
  Description of Artificial Sequence: Synthetic oligonucleotide
  Target: LAMA2; (-) strand; PAM type: YTN; PAM sequence: TTA
ctaagtaaaatattatttca

SEQ ID NO: 210050 - DNA, 20 bp, Artificial Sequence
  Description of Artificial Sequence: Synthetic oligonucleotide
  Target: LAMA2; (-) strand; PAM type: YTN; PAM sequence: TTT
actaagtaaaatattatttc

SEQ ID NO: 210051 - DNA, 20 bp, Artificial Sequence
  Description of Artificial Sequence: Synthetic oligonucleotide
  Target: LAMA2; (-) strand; PAM type: YTN; PAM sequence: CTT
tactaagtaaaatattattt

SEQ ID NO: 210052 - DNA, 20 bp, Artificial Sequence
  Description of Artificial Sequence: Synthetic oligonucleotide
  Target: LAMA2; (-) strand; PAM type: YTN; PAM sequence: TTA
ctttactaagtaaaatatta

SEQ ID NO: 210053 - DNA, 20 bp, Artificial Sequence
  Description of Artificial Sequence: Synthetic oligonucleotide
  Target: LAMA2; (-) strand; PAM type: YTN; PAM sequence: TTG
tggatattactttactaagt

SEQ ID NO: 210054 - DNA, 20 bp, Artificial Sequence
  Description of Artificial Sequence: Synthetic oligonucleotide
  Target: LAMA2; (-) strand; PAM type: YTN; PAM sequence: CTT
gtggatattactttactaag

SEQ ID NO: 210055 - DNA, 20 bp, Artificial Sequence
  Description of Artificial Sequence: Synthetic oligonucleotide
  Target: LAMA2; (-) strand; PAM type: YTN; PAM sequence: TTC
atggtgaaatgcttgtggat

SEQ ID NO: 210056 - DNA, 20 bp, Artificial Sequence
  Description of Artificial Sequence: Synthetic oligonucleotide
  Target: LAMA2; (-) strand; PAM type: YTN; PAM sequence: TTT
catggtgaaatgcttgtgga

SEQ ID NO: 210057 - DNA, 20 bp, Artificial Sequence
  Description of Artificial Sequence: Synthetic oligonucleotide
  Target: LAMA2; (-) strand; PAM type: YTN; PAM sequence: TTT
tcatggtgaaatgcttgtgg

SEQ ID NO: 210058 - DNA, 20 bp, Artificial Sequence
  Description of Artificial Sequence: Synthetic oligonucleotide
  Target: LAMA2; (-) strand; PAM type: YTN; PAM sequence: TTT
ttcatggtgaaatgcttgtg

SEQ ID NO: 210059 - DNA, 20 bp, Artificial Sequence
  Description of Artificial Sequence: Synthetic oligonucleotide
  Target: LAMA2; (-) strand; PAM type: YTN; PAM sequence: TTA
atgtttttcatggtgaaatg

SEQ ID NO: 210060 - DNA, 20 bp, Artificial Sequence
  Description of Artificial Sequence: Synthetic oligonucleotide
  Target: LAMA2; (-) strand; PAM type: YTN; PAM sequence: TTT
aatgtttttcatggtgaaat

SEQ ID NO: 210061 - DNA, 20 bp, Artificial Sequence
  Description of Artificial Sequence: Synthetic oligonucleotide
  Target: LAMA2; (-) strand; PAM type: YTN; PAM sequence: TTA
aaatgtttaatgtttttcat

SEQ ID NO: 210062 - DNA, 20 bp, Artificial Sequence
  Description of Artificial Sequence: Synthetic oligonucleotide
  Target: LAMA2; (-) strand; PAM type: YTN; PAM sequence: CTT
aaaatgtttaatgtttttca

SEQ ID NO: 210063 - DNA, 20 bp, Artificial Sequence
  Description of Artificial Sequence: Synthetic oligonucleotide
  Target: LAMA2; (-) strand; PAM type: YTN; PAM sequence: TTA
tatacttaaaatgtttaatg

SEQ ID NO: 210064 - DNA, 20 bp, Artificial Sequence
  Description of Artificial Sequence: Synthetic oligonucleotide
  Target: LAMA2; (-) strand; PAM type: YTN; PAM sequence: TTC
atattatatacttaaaatgt

SEQ ID NO: 210065 - DNA, 20 bp, Artificial Sequence
  Description of Artificial Sequence: Synthetic oligonucleotide
  Target: LAMA2; (-) strand; PAM type: YTN; PAM sequence: TTT
catattatatacttaaaatg

SEQ ID NO: 210066 - DNA, 20 bp, Artificial Sequence
  Description of Artificial Sequence: Synthetic oligonucleotide
  Target: LAMA2; (-) strand; PAM type: YTN; PAM sequence: TTG
gcaagaatatggtcaataaa

SEQ ID NO: 210067 - DNA, 20 bp, Artificial Sequence
  Description of Artificial Sequence: Synthetic oligonucleotide
  Target: LAMA2; (-) strand; PAM type: YTN; PAM sequence: TTA
gagttggcaagaatatggtc

SEQ ID NO: 210068 - DNA, 20 bp, Artificial Sequence
  Description of Artificial Sequence: Synthetic oligonucleotide
  Target: LAMA2; (-) strand; PAM type: YTN; PAM sequence: CTT
agagttggcaagaatatggt

SEQ ID NO: 210069 - DNA, 20 bp, Artificial Sequence
  Description of Artificial Sequence: Synthetic oligonucleotide
  Target: LAMA2; (-) strand; PAM type: YTN; PAM sequence: TTA
gagtaccttagagttggcaa

SEQ ID NO: 210070 - DNA, 20 bp, Artificial Sequence
  Description of Artificial Sequence: Synthetic oligonucleotide
  Target: LAMA2; (-) strand; PAM type: YTN; PAM sequence: CTA
gtgttagagtaccttagagt

SEQ ID NO: 210071 - DNA, 20 bp, Artificial Sequence
  Description of Artificial Sequence: Synthetic oligonucleotide
  Target: LAMA2; (-) strand; PAM type: YTN; PAM sequence: TTC
tagtgttagagtaccttaga

SEQ ID NO: 210072 - DNA, 20 bp, Artificial Sequence
  Description of Artificial Sequence: Synthetic oligonucleotide
  Target: LAMA2; (-) strand; PAM type: YTN; PAM sequence: TTA
aaattctagtgttagagtac

SEQ ID NO: 210073 - DNA, 20 bp, Artificial Sequence
  Description of Artificial Sequence: Synthetic oligonucleotide
  Target: LAMA2; (-) strand; PAM type: YTN; PAM sequence: TTT
aaaattctagtgttagagta

SEQ ID NO: 210074 - DNA, 20 bp, Artificial Sequence
  Description of Artificial Sequence: Synthetic oligonucleotide
  Target: LAMA2; (-) strand; PAM type: YTN; PAM sequence: TTC
gtaccaaagtaacaaatata

SEQ ID NO: 210075 - DNA, 20 bp, Artificial Sequence
  Description of Artificial Sequence: Synthetic oligonucleotide
  Target: LAMA2; (-) strand; PAM type: YTN; PAM sequence: TTG
acattcgtaccaaagtaaca

SEQ ID NO: 210076 - DNA, 20 bp, Artificial Sequence
  Description of Artificial Sequence: Synthetic oligonucleotide
  Target: LAMA2; (-) strand; PAM type: YTN; PAM sequence: TTT
gacattcgtaccaaagtaac

SEQ ID NO: 210077 - DNA, 20 bp, Artificial Sequence
  Description of Artificial Sequence: Synthetic oligonucleotide
  Target: LAMA2; (-) strand; PAM type: YTN; PAM sequence: CTT
tgacattcgtaccaaagtaa

SEQ ID NO: 210078 - DNA, 20 bp, Artificial Sequence
  Description of Artificial Sequence: Synthetic oligonucleotide
  Target: LAMA2; (-) strand; PAM type: YTN; PAM sequence: TTC
tttgacattcgtaccaaagt

SEQ ID NO: 210079 - DNA, 20 bp, Artificial Sequence
  Description of Artificial Sequence: Synthetic oligonucleotide
  Target: LAMA2; (-) strand; PAM type: YTN; PAM sequence: TTT
ctttgacattcgtaccaaag

SEQ ID NO: 210080 - DNA, 20 bp, Artificial Sequence
  Description of Artificial Sequence: Synthetic oligonucleotide
  Target: LAMA2; (-) strand; PAM type: YTN; PAM sequence: CTT
tctttgacattcgtaccaaa

SEQ ID NO: 210081 - DNA, 20 bp, Artificial Sequence
  Description of Artificial Sequence: Synthetic oligonucleotide
  Target: LAMA2; (-) strand; PAM type: YTN; PAM sequence: TTA
caggtaatacctttctttga

SEQ ID NO: 210082 - DNA, 20 bp, Artificial Sequence
  Description of Artificial Sequence: Synthetic oligonucleotide
  Target: LAMA2; (-) strand; PAM type: YTN; PAM sequence: CTT
acaggtaatacctttctttg

SEQ ID NO: 210083 - DNA, 20 bp, Artificial Sequence
  Description of Artificial Sequence: Synthetic oligonucleotide
  Target: LAMA2; (-) strand; PAM type: YTN; PAM sequence: CTA
atacttacaggtaatacctt

SEQ ID NO: 210084 - DNA, 20 bp, Artificial Sequence
  Description of Artificial Sequence: Synthetic oligonucleotide
  Target: LAMA2; (-) strand; PAM type: YTN; PAM sequence: CTC
taatacttacaggtaatacc

SEQ ID NO: 210085 - DNA, 20 bp, Artificial Sequence
  Description of Artificial Sequence: Synthetic oligonucleotide
  Target: LAMA2; (-) strand; PAM type: YTN; PAM sequence: TTA
ggaacaatgaggaatgctct

SEQ ID NO: 210086 - DNA, 20 bp, Artificial Sequence
  Description of Artificial Sequence: Synthetic oligonucleotide
  Target: LAMA2; (-) strand; PAM type: YTN; PAM sequence: TTT
aggaacaatgaggaatgctc

SEQ ID NO: 210087 - DNA, 20 bp, Artificial Sequence
  Description of Artificial Sequence: Synthetic oligonucleotide
  Target: LAMA2; (-) strand; PAM type: YTN; PAM sequence: TTG
tttaggaacaatgaggaatg

SEQ ID NO: 210088 - DNA, 20 bp, Artificial Sequence
  Description of Artificial Sequence: Synthetic oligonucleotide
  Target: LAMA2; (-) strand; PAM type: YTN; PAM sequence: TTT
gtttaggaacaatgaggaat

SEQ ID NO: 210089 - DNA, 20 bp, Artificial Sequence
  Description of Artificial Sequence: Synthetic oligonucleotide
  Target: LAMA2; (-) strand; PAM type: YTN; PAM sequence: CTT
tgtttaggaacaatgaggaa

SEQ ID NO: 210090 - DNA, 20 bp, Artificial Sequence
  Description of Artificial Sequence: Synthetic oligonucleotide
  Target: LAMA2; (-) strand; PAM type: YTN; PAM sequence: TTC
tttgtttaggaacaatgagg

SEQ ID NO: 210091 - DNA, 20 bp, Artificial Sequence
  Description of Artificial Sequence: Synthetic oligonucleotide
  Target: LAMA2; (-) strand; PAM type: YTN; PAM sequence: CTA
cataaaaagaaattctttgt

SEQ ID NO: 210092 - DNA, 20 bp, Artificial Sequence
  Description of Artificial Sequence: Synthetic oligonucleotide
  Target: LAMA2; (-) strand; PAM type: YTN; PAM sequence: CTA
gtgcagactacataaaaaga

SEQ ID NO: 210093 - DNA, 20 bp, Artificial Sequence
  Description of Artificial Sequence: Synthetic oligonucleotide
  Target: LAMA2; (-) strand; PAM type: YTN; PAM sequence: TTC
ctagtgcagactacataaaa

SEQ ID NO: 210094 - DNA, 20 bp, Artificial Sequence
  Description of Artificial Sequence: Synthetic oligonucleotide
  Target: LAMA2; (-) strand; PAM type: YTN; PAM sequence: TTC
caattcctagtgcagactac

SEQ ID NO: 210095 - DNA, 20 bp, Artificial Sequence
  Description of Artificial Sequence: Synthetic oligonucleotide
  Target: LAMA2; (-) strand; PAM type: YTN; PAM sequence: TTT
ccaattcctagtgcagacta

SEQ ID NO: 210096 - DNA, 20 bp, Artificial Sequence
  Description of Artificial Sequence: Synthetic oligonucleotide
  Target: LAMA2; (-) strand; PAM type: YTN; PAM sequence: TTA
tgtgcatcatttccaattcc

SEQ ID NO: 210097 - DNA, 20 bp, Artificial Sequence
  Description of Artificial Sequence: Synthetic oligonucleotide
  Target: LAMA2; (-) strand; PAM type: YTN; PAM sequence: TTT
atgtgcatcatttccaattc

SEQ ID NO: 210098 - DNA, 20 bp, Artificial Sequence
  Description of Artificial Sequence: Synthetic oligonucleotide
  Target: LAMA2; (-) strand; PAM type: YTN; PAM sequence: TTT
tatgtgcatcatttccaatt

SEQ ID NO: 210099 - DNA, 20 bp, Artificial Sequence
  Description of Artificial Sequence: Synthetic oligonucleotide
  Target: LAMA2; (-) strand; PAM type: YTN; PAM sequence: CTG
tattttatgtgcatcatttc

SEQ ID NO: 210100 - DNA, 20 bp, Artificial Sequence
  Description of Artificial Sequence: Synthetic oligonucleotide
  Target: LAMA2; (-) strand; PAM type: YTN; PAM sequence: TTA
aaaagctgtattttatgtgc

SEQ ID NO: 210101 - DNA, 20 bp, Artificial Sequence
  Description of Artificial Sequence: Synthetic oligonucleotide
  Target: LAMA2; (-) strand; PAM type: YTN; PAM sequence: CTC
acagattaaaaagctgtatt

SEQ ID NO: 210102 - DNA, 20 bp, Artificial Sequence
  Description of Artificial Sequence: Synthetic oligonucleotide
  Target: LAMA2; (-) strand; PAM type: YTN; PAM sequence: CTA
agatgcataaacaatctcac

SEQ ID NO: 210103 - DNA, 20 bp, Artificial Sequence
  Description of Artificial Sequence: Synthetic oligonucleotide
  Target: LAMA2; (-) strand; PAM type: YTN; PAM sequence: CTA
agcaaacctaagatgcataa

SEQ ID NO: 210104 - DNA, 20 bp, Artificial Sequence
  Description of Artificial Sequence: Synthetic oligonucleotide
  Target: LAMA2; (-) strand; PAM type: YTN; PAM sequence: TTG
caaaactaagcaaacctaag

SEQ ID NO: 210105 - DNA, 20 bp, Artificial Sequence
  Description of Artificial Sequence: Synthetic oligonucleotide
  Target: LAMA2; (-) strand; PAM type: YTN; PAM sequence: TTT
gcaaaactaagcaaacctaa

SEQ ID NO: 210106 - DNA, 20 bp, Artificial Sequence
  Description of Artificial Sequence: Synthetic oligonucleotide
  Target: LAMA2; (-) strand; PAM type: YTN; PAM sequence: TTA
aatgcacgcatttgcaaaac

SEQ ID NO: 210107 - DNA, 20 bp, Artificial Sequence
  Description of Artificial Sequence: Synthetic oligonucleotide
  Target: LAMA2; (-) strand; PAM type: YTN; PAM sequence: TTT
aaatgcacgcatttgcaaaa

SEQ ID NO: 210108 - DNA, 20 bp, Artificial Sequence
  Description of Artificial Sequence: Synthetic oligonucleotide
  Target: LAMA2; (-) strand; PAM type: YTN; PAM sequence: TTT
taaatgcacgcatttgcaaa

SEQ ID NO: 210109 - DNA, 20 bp, Artificial Sequence
  Description of Artificial Sequence: Synthetic oligonucleotide
  Target: LAMA2; (-) strand; PAM type: YTN; PAM sequence: TTC
aaaatacaaatggtgatttt

SEQ ID NO: 210110 - DNA, 20 bp, Artificial Sequence
  Description of Artificial Sequence: Synthetic oligonucleotide
  Target: LAMA2; (-) strand; PAM type: YTN; PAM sequence: TTA
aaagccagaagagttcaaaa

SEQ ID NO: 210111 - DNA, 20 bp, Artificial Sequence
  Description of Artificial Sequence: Synthetic oligonucleotide
  Target: LAMA2; (-) strand; PAM type: YTN; PAM sequence: CTA
cagttaaaagccagaagagt

SEQ ID NO: 210112 - DNA, 20 bp, Artificial Sequence
  Description of Artificial Sequence: Synthetic oligonucleotide
  Target: LAMA2; (-) strand; PAM type: YTN; PAM sequence: TTC
cactacagttaaaagccaga

SEQ ID NO: 210113 - DNA, 20 bp, Artificial Sequence
  Description of Artificial Sequence: Synthetic oligonucleotide
  Target: LAMA2; (-) strand; PAM type: YTN; PAM sequence: TTT
ccactacagttaaaagccag

SEQ ID NO: 210114 - DNA, 20 bp, Artificial Sequence
  Description of Artificial Sequence: Synthetic oligonucleotide
  Target: LAMA2; (-) strand; PAM type: YTN; PAM sequence: TTC
aatccaaatttccactacag

SEQ ID NO: 210115 - DNA, 20 bp, Artificial Sequence
  Description of Artificial Sequence: Synthetic oligonucleotide
  Target: LAMA2; (-) strand; PAM type: YTN; PAM sequence: CTT
caatccaaatttccactaca

SEQ ID NO: 210116 - DNA, 20 bp, Artificial Sequence
  Description of Artificial Sequence: Synthetic oligonucleotide
  Target: LAMA2; (-) strand; PAM type: YTN; PAM sequence: TTG
tcttcaatccaaatttccac

SEQ ID NO: 210117 - DNA, 20 bp, Artificial Sequence
  Description of Artificial Sequence: Synthetic oligonucleotide
  Target: LAMA2; (-) strand; PAM type: YTN; PAM sequence: TTC
cattgtcttcaatccaaatt

SEQ ID NO: 210118 - DNA, 20 bp, Artificial Sequence
  Description of Artificial Sequence: Synthetic oligonucleotide
  Target: LAMA2; (-) strand; PAM type: YTN; PAM sequence: TTT
ccattgtcttcaatccaaat

SEQ ID NO: 210119 - DNA, 20 bp, Artificial Sequence
  Description of Artificial Sequence: Synthetic oligonucleotide
  Target: LAMA2; (-) strand; PAM type: YTN; PAM sequence: CTC
acggtttccattgtcttcaa

SEQ ID NO: 210120 - DNA, 20 bp, Artificial Sequence
  Description of Artificial Sequence: Synthetic oligonucleotide
  Target: LAMA2; (-) strand; PAM type: YTN; PAM sequence: TTG
tacctcacggtttccattgt

SEQ ID NO: 210121 - DNA, 20 bp, Artificial Sequence
  Description of Artificial Sequence: Synthetic oligonucleotide
  Target: LAMA2; (-) strand; PAM type: YTN; PAM sequence: TTA
tatattgtacctcacggttt

SEQ ID NO: 210122 - DNA, 20 bp, Artificial Sequence
  Description of Artificial Sequence: Synthetic oligonucleotide
  Target: LAMA2; (-) strand; PAM type: YTN; PAM sequence: TTT
atatattgtacctcacggtt

SEQ ID NO: 210123 - DNA, 20 bp, Artificial Sequence
  Description of Artificial Sequence: Synthetic oligonucleotide
  Target: LAMA2; (-) strand; PAM type: YTN; PAM sequence: TTG
gatgcaagtttatatattgt

SEQ ID NO: 210124 - DNA, 20 bp, Artificial Sequence
  Description of Artificial Sequence: Synthetic oligonucleotide
  Target: LAMA2; (-) strand; PAM type: YTN; PAM sequence: CTC
ggttggatgcaagtttatat

SEQ ID NO: 210125 - DNA, 20 bp, Artificial Sequence
  Description of Artificial Sequence: Synthetic oligonucleotide
  Target: LAMA2; (-) strand; PAM type: YTN; PAM sequence: TTC
tcggttggatgcaagtttat

SEQ ID NO: 210126 - DNA, 20 bp, Artificial Sequence
  Description of Artificial Sequence: Synthetic oligonucleotide
  Target: LAMA2; (-) strand; PAM type: YTN; PAM sequence: TTT
ctcggttggatgcaagttta

SEQ ID NO: 210127 - DNA, 20 bp, Artificial Sequence
  Description of Artificial Sequence: Synthetic oligonucleotide
  Target: LAMA2; (-) strand; PAM type: YTN; PAM sequence: TTT
tctcggttggatgcaagttt

SEQ ID NO: 210128 - DNA, 20 bp, Artificial Sequence
  Description of Artificial Sequence: Synthetic oligonucleotide
  Target: LAMA2; (-) strand; PAM type: YTN; PAM sequence: TTT
ttctcggttggatgcaagtt

SEQ ID NO: 210129 - DNA, 20 bp, Artificial Sequence
  Description of Artificial Sequence: Synthetic oligonucleotide
  Target: LAMA2; (-) strand; PAM type: YTN; PAM sequence: TTG
aagtgcagataagagtagtg

SEQ ID NO: 210130 - DNA, 20 bp, Artificial Sequence
  Description of Artificial Sequence: Synthetic oligonucleotide
  Target: LAMA2; (-) strand; PAM type: YTN; PAM sequence: CTG
attgaagtgcagataagagt

SEQ ID NO: 210131 - DNA, 20 bp, Artificial Sequence
  Description of Artificial Sequence: Synthetic oligonucleotide
  Target: LAMA2; (-) strand; PAM type: YTN; PAM sequence: CTG
ctgattgaagtgcagataag

SEQ ID NO: 210132 - DNA, 20 bp, Artificial Sequence
  Description of Artificial Sequence: Synthetic oligonucleotide
  Target: LAMA2; (-) strand; PAM type: YTN; PAM sequence: CTC
ctgctgattgaagtgcagat

SEQ ID NO: 210133 - DNA, 20 bp, Artificial Sequence
  Description of Artificial Sequence: Synthetic oligonucleotide
  Target: LAMA2; (-) strand; PAM type: YTN; PAM sequence: CTG
aaaaagaacctcctgctgat

SEQ ID NO: 210134 - DNA, 20 bp, Artificial Sequence
  Description of Artificial Sequence: Synthetic oligonucleotide
  Target: LAMA2; (-) strand; PAM type: YTN; PAM sequence: CTA
aacaaactgaaaaagaacct

SEQ ID NO: 210135 - DNA, 20 bp, Artificial Sequence
  Description of Artificial Sequence: Synthetic oligonucleotide
  Target: LAMA2; (-) strand; PAM type: YTN; PAM sequence: TTC
taaacaaactgaaaaagaac

SEQ ID NO: 210136 - DNA, 20 bp, Artificial Sequence
  Description of Artificial Sequence: Synthetic oligonucleotide
  Target: LAMA2; (-) strand; PAM type: YTN; PAM sequence: TTT
ctaaacaaactgaaaaagaa

SEQ ID NO: 210137 - DNA, 20 bp, Artificial Sequence
  Description of Artificial Sequence: Synthetic oligonucleotide
  Target: LAMA2; (-) strand; PAM type: YTN; PAM sequence: TTT
tctaaacaaactgaaaaaga

SEQ ID NO: 210138 - DNA, 20 bp, Artificial Sequence
  Description of Artificial Sequence: Synthetic oligonucleotide
  Target: LAMA2; (-) strand; PAM type: YTN; PAM sequence: TTT
ttctaaacaaactgaaaaag

SEQ ID NO: 210139 - DNA, 20 bp, Artificial Sequence
  Description of Artificial Sequence: Synthetic oligonucleotide
  Target: LAMA2; (-) strand; PAM type: YTN; PAM sequence: CTT
tttctaaacaaactgaaaaa

SEQ ID NO: 210140 - DNA, 20 bp, Artificial Sequence
  Description of Artificial Sequence: Synthetic oligonucleotide
  Target: LAMA2; (-) strand; PAM type: YTN; PAM sequence: CTA
ctttttctaaacaaactgaa

SEQ ID NO: 210141 - DNA, 20 bp, Artificial Sequence
  Description of Artificial Sequence: Synthetic oligonucleotide
  Target: LAMA2; (-) strand; PAM type: YTN; PAM sequence: TTG
tatgccatgcagatgacagg

SEQ ID NO: 210142 - DNA, 20 bp, Artificial Sequence
  Description of Artificial Sequence: Synthetic oligonucleotide
  Target: LAMA2; (-) strand; PAM type: YTN; PAM sequence: TTG
taaagattgtatgccatgca

SEQ ID NO: 210143 - DNA, 20 bp, Artificial Sequence
  Description of Artificial Sequence: Synthetic oligonucleotide
  Target: LAMA2; (-) strand; PAM type: YTN; PAM sequence: TTT
gtaaagattgtatgccatgc

SEQ ID NO: 210144 - DNA, 20 bp, Artificial Sequence
  Description of Artificial Sequence: Synthetic oligonucleotide
  Target: LAMA2; (-) strand; PAM type: YTN; PAM sequence: CTT
tgtaaagattgtatgccatg

SEQ ID NO: 210145 - DNA, 20 bp, Artificial Sequence
  Description of Artificial Sequence: Synthetic oligonucleotide
  Target: LAMA2; (-) strand; PAM type: YTN; PAM sequence: TTC
tttgtaaagattgtatgcca

SEQ ID NO: 210146 - DNA, 20 bp, Artificial Sequence
  Description of Artificial Sequence: Synthetic oligonucleotide
  Target: LAMA2; (-) strand; PAM type: YTN; PAM sequence: TTT
ctttgtaaagattgtatgcc

SEQ ID NO: 210147 - DNA, 20 bp, Artificial Sequence
  Description of Artificial Sequence: Synthetic oligonucleotide
  Target: LAMA2; (-) strand; PAM type: YTN; PAM sequence: TTA
aaacacaaagggcaaaagaa

SEQ ID NO: 210148 - DNA, 20 bp, Artificial Sequence
  Description of Artificial Sequence: Synthetic oligonucleotide
  Target: LAMA2; (-) strand; PAM type: YTN; PAM sequence: CTC
agtagttaaaacacaaaggg

SEQ ID NO: 210149 - DNA, 20 bp, Artificial Sequence
  Description of Artificial Sequence: Synthetic oligonucleotide
  Target: LAMA2; (-) strand; PAM type: YTN; PAM sequence: CTG
cagcactcagtagttaaaac

SEQ ID NO: 210150 - DNA, 20 bp, Artificial Sequence
  Description of Artificial Sequence: Synthetic oligonucleotide
  Target: LAMA2; (-) strand; PAM type: YTN; PAM sequence: TTC
tgcagcactcagtagttaaa

SEQ ID NO: 210151 - DNA, 20 bp, Artificial Sequence
  Description of Artificial Sequence: Synthetic oligonucleotide
  Target: LAMA2; (-) strand; PAM type: YTN; PAM sequence: TTT
ctgcagcactcagtagttaa

SEQ ID NO: 210152 - DNA, 20 bp, Artificial Sequence
  Description of Artificial Sequence: Synthetic oligonucleotide
  Target: LAMA2; (-) strand; PAM type: YTN; PAM sequence: TTA
gacagaagtttctgcagcac

SEQ ID NO: 210153 - DNA, 20 bp, Artificial Sequence
  Description of Artificial Sequence: Synthetic oligonucleotide
  Target: LAMA2; (-) strand; PAM type: YTN; PAM sequence: TTG
cagttagacagaagtttctg

SEQ ID NO: 210154 - DNA, 20 bp, Artificial Sequence
  Description of Artificial Sequence: Synthetic oligonucleotide
  Target: LAMA2; (-) strand; PAM type: YTN; PAM sequence: TTT
gcagttagacagaagtttct

SEQ ID NO: 210155 - DNA, 20 bp, Artificial Sequence
  Description of Artificial Sequence: Synthetic oligonucleotide
  Target: LAMA2; (-) strand; PAM type: YTN; PAM sequence: TTT
tgcagttagacagaagtttc

SEQ ID NO: 210156 - DNA, 20 bp, Artificial Sequence
  Description of Artificial Sequence: Synthetic oligonucleotide
  Target: LAMA2; (-) strand; PAM type: YTN; PAM sequence: CTG
ttttgcagttagacagaagt

SEQ ID NO: 210157 - DNA, 20 bp, Artificial Sequence
  Description of Artificial Sequence: Synthetic oligonucleotide
  Target: LAMA2; (-) strand; PAM type: YTN; PAM sequence: TTA
aactgttttgcagttagaca

SEQ ID NO: 210158 - DNA, 20 bp, Artificial Sequence
  Description of Artificial Sequence: Synthetic oligonucleotide
  Target: LAMA2; (-) strand; PAM type: YTN; PAM sequence: CTT
aaactgttttgcagttagac

SEQ ID NO: 210159 - DNA, 20 bp, Artificial Sequence
  Description of Artificial Sequence: Synthetic oligonucleotide
  Target: LAMA2; (-) strand; PAM type: YTN; PAM sequence: TTG
tcatagatgataccttaaac

SEQ ID NO: 210160 - DNA, 20 bp, Artificial Sequence
  Description of Artificial Sequence: Synthetic oligonucleotide
  Target: LAMA2; (-) strand; PAM type: YTN; PAM sequence: TTA
acattgtcatagatgatacc

SEQ ID NO: 210161 - DNA, 20 bp, Artificial Sequence
  Description of Artificial Sequence: Synthetic oligonucleotide
  Target: LAMA2; (-) strand; PAM type: YTN; PAM sequence: TTT
aacattgtcatagatgatac

SEQ ID NO: 210162 - DNA, 20 bp, Artificial Sequence
  Description of Artificial Sequence: Synthetic oligonucleotide
  Target: LAMA2; (-) strand; PAM type: YTN; PAM sequence: TTT
taacattgtcatagatgata

SEQ ID NO: 210163 - DNA, 20 bp, Artificial Sequence
  Description of Artificial Sequence: Synthetic oligonucleotide
  Target: LAMA2; (-) strand; PAM type: YTN; PAM sequence: CTT
ttaacattgtcatagatgat

SEQ ID NO: 210164 - DNA, 20 bp, Artificial Sequence
  Description of Artificial Sequence: Synthetic oligonucleotide
  Target: LAMA2; (-) strand; PAM type: YTN; PAM sequence: TTA
cttttaacattgtcatagat

SEQ ID NO: 210165 - DNA, 20 bp, Artificial Sequence
  Description of Artificial Sequence: Synthetic oligonucleotide
  Target: LAMA2; (-) strand; PAM type: YTN; PAM sequence: TTT
acttttaacattgtcataga

SEQ ID NO: 210166 - DNA, 20 bp, Artificial Sequence
  Description of Artificial Sequence: Synthetic oligonucleotide
  Target: LAMA2; (-) strand; PAM type: YTN; PAM sequence: TTT
tacttttaacattgtcatag

SEQ ID NO: 210167 - DNA, 20 bp, Artificial Sequence
  Description of Artificial Sequence: Synthetic oligonucleotide
  Target: LAMA2; (-) strand; PAM type: YTN; PAM sequence: TTG
ggttttacttttaacattgt

SEQ ID NO: 210168 - DNA, 20 bp, Artificial Sequence
  Description of Artificial Sequence: Synthetic oligonucleotide
  Target: LAMA2; (-) strand; PAM type: YTN; PAM sequence: TTG
attgggttttacttttaaca

SEQ ID NO: 210169 - DNA, 20 bp, Artificial Sequence
  Description of Artificial Sequence: Synthetic oligonucleotide
  Target: LAMA2; (-) strand; PAM type: YTN; PAM sequence: TTT
gattgggttttacttttaac

SEQ ID NO: 210170 - DNA, 20 bp, Artificial Sequence
  Description of Artificial Sequence: Synthetic oligonucleotide
  Target: LAMA2; (-) strand; PAM type: YTN; PAM sequence: CTT
tgattgggttttacttttaa

SEQ ID NO: 210171 - DNA, 20 bp, Artificial Sequence
  Description of Artificial Sequence: Synthetic oligonucleotide
  Target: LAMA2; (-) strand; PAM type: YTN; PAM sequence: TTA
tgcatgataatataaacttt

SEQ ID NO: 210172 - DNA, 20 bp, Artificial Sequence
  Description of Artificial Sequence: Synthetic oligonucleotide
  Target: LAMA2; (-) strand; PAM type: YTN; PAM sequence: CTA
ttatgcatgataatataaac

SEQ ID NO: 210173 - DNA, 20 bp, Artificial Sequence
  Description of Artificial Sequence: Synthetic oligonucleotide
  Target: LAMA2; (-) strand; PAM type: YTN; PAM sequence: TTG
gtctattatgcatgataata

SEQ ID NO: 210174 - DNA, 20 bp, Artificial Sequence
  Description of Artificial Sequence: Synthetic oligonucleotide
  Target: LAMA2; (-) strand; PAM type: YTN; PAM sequence: CTT
ggtctattatgcatgataat

SEQ ID NO: 210175 - DNA, 20 bp, Artificial Sequence
  Description of Artificial Sequence: Synthetic oligonucleotide
  Target: LAMA2; (-) strand; PAM type: YTN; PAM sequence: TTC
agataatggtgcttggtcta

SEQ ID NO: 210176 - DNA, 20 bp, Artificial Sequence
  Description of Artificial Sequence: Synthetic oligonucleotide
  Target: LAMA2; (-) strand; PAM type: YTN; PAM sequence: TTG
gtattcagataatggtgctt

SEQ ID NO: 210177 - DNA, 20 bp, Artificial Sequence
  Description of Artificial Sequence: Synthetic oligonucleotide
  Target: LAMA2; (-) strand; PAM type: YTN; PAM sequence: TTT
ggtattcagataatggtgct

SEQ ID NO: 210178 - DNA, 20 bp, Artificial Sequence
  Description of Artificial Sequence: Synthetic oligonucleotide
  Target: LAMA2; (-) strand; PAM type: YTN; PAM sequence: TTG
gccccgtttggtattcagat

SEQ ID NO: 210179 - DNA, 20 bp, Artificial Sequence
  Description of Artificial Sequence: Synthetic oligonucleotide
  Target: LAMA2; (-) strand; PAM type: YTN; PAM sequence: TTT
ggccccgtttggtattcaga

SEQ ID NO: 210180 - DNA, 20 bp, Artificial Sequence
  Description of Artificial Sequence: Synthetic oligonucleotide
  Target: LAMA2; (-) strand; PAM type: YTN; PAM sequence: TTA
tttggccccgtttggtattc

SEQ ID NO: 210181 - DNA, 20 bp, Artificial Sequence
  Description of Artificial Sequence: Synthetic oligonucleotide
  Target: LAMA2; (-) strand; PAM type: YTN; PAM sequence: CTG
aatcatagagaattatttgg

SEQ ID NO: 210182 - DNA, 20 bp, Artificial Sequence
  Description of Artificial Sequence: Synthetic oligonucleotide
  Target: LAMA2; (-) strand; PAM type: YTN; PAM sequence: CTC
atctgaatcatagagaatta

SEQ ID NO: 210183 - DNA, 20 bp, Artificial Sequence
  Description of Artificial Sequence: Synthetic oligonucleotide
  Target: LAMA2; (-) strand; PAM type: YTN; PAM sequence: TTA
tgtctcatctgaatcataga

SEQ ID NO: 210184 - DNA, 20 bp, Artificial Sequence
  Description of Artificial Sequence: Synthetic oligonucleotide
  Target: LAMA2; (-) strand; PAM type: YTN; PAM sequence: TTT
atgtctcatctgaatcatag

SEQ ID NO: 210185 - DNA, 20 bp, Artificial Sequence
  Description of Artificial Sequence: Synthetic oligonucleotide
  Target: LAMA2; (-) strand; PAM type: YTN; PAM sequence: TTT
tatgtctcatctgaatcata

SEQ ID NO: 210186 - DNA, 20 bp, Artificial Sequence
  Description of Artificial Sequence: Synthetic oligonucleotide
  Target: LAMA2; (-) strand; PAM type: YTN; PAM sequence: CTT
ttatgtctcatctgaatcat

SEQ ID NO: 210187 - DNA, 20 bp, Artificial Sequence
  Description of Artificial Sequence: Synthetic oligonucleotide
  Target: LAMA2; (-) strand; PAM type: YTN; PAM sequence: TTA
aagcacttttatgtctcatc

SEQ ID NO: 210188 - DNA, 20 bp, Artificial Sequence
  Description of Artificial Sequence: Synthetic oligonucleotide
  Target: LAMA2; (-) strand; PAM type: YTN; PAM sequence: TTT
aaagcacttttatgtctcat

SEQ ID NO: 210189 - DNA, 20 bp, Artificial Sequence
  Description of Artificial Sequence: Synthetic oligonucleotide
  Target: LAMA2; (-) strand; PAM type: YTN; PAM sequence: TTT
taaagcacttttatgtctca

SEQ ID NO: 210190 - DNA, 20 bp, Artificial Sequence
  Description of Artificial Sequence: Synthetic oligonucleotide
  Target: LAMA2; (-) strand; PAM type: YTN; PAM sequence: TTT
ttaaagcacttttatgtctc

SEQ ID NO: 210191 - DNA, 20 bp, Artificial Sequence
  Description of Artificial Sequence: Synthetic oligonucleotide
  Target: LAMA2; (-) strand; PAM type: YTN; PAM sequence: TTG
tttttaaagcacttttatgt

SEQ ID NO: 210192 - DNA, 20 bp, Artificial Sequence
  Description of Artificial Sequence: Synthetic oligonucleotide
  Target: LAMA2; (-) strand; PAM type: YTN; PAM sequence: CTT
gtttttaaagcacttttatg

SEQ ID NO: 210193 - DNA, 20 bp, Artificial Sequence
  Description of Artificial Sequence: Synthetic oligonucleotide
  Target: LAMA2; (-) strand; PAM type: YTN; PAM sequence: TTA
ccacatacttgtttttaaag

SEQ ID NO: 210194 - DNA, 20 bp, Artificial Sequence
  Description of Artificial Sequence: Synthetic oligonucleotide
  Target: LAMA2; (-) strand; PAM type: YTN; PAM sequence: TTT
accacatacttgtttttaaa

SEQ ID NO: 210195 - DNA, 20 bp, Artificial Sequence
  Description of Artificial Sequence: Synthetic oligonucleotide
  Target: LAMA2; (-) strand; PAM type: YTN; PAM sequence: TTT
taccacatacttgtttttaa

SEQ ID NO: 210196 - DNA, 20 bp, Artificial Sequence
  Description of Artificial Sequence: Synthetic oligonucleotide
  Target: LAMA2; (-) strand; PAM type: YTN; PAM sequence: TTT
ttaccacatacttgttttta

SEQ ID NO: 210197 - DNA, 20 bp, Artificial Sequence
  Description of Artificial Sequence: Synthetic oligonucleotide
  Target: LAMA2; (-) strand; PAM type: YTN; PAM sequence: TTC
caaagtgatttttaccacat

SEQ ID NO: 210198 - DNA, 20 bp, Artificial Sequence
  Description of Artificial Sequence: Synthetic oligonucleotide
  Target: LAMA2; (-) strand; PAM type: YTN; PAM sequence: TTT
ccaaagtgatttttaccaca

SEQ ID NO: 210199 - DNA, 20 bp, Artificial Sequence
  Description of Artificial Sequence: Synthetic oligonucleotide
  Target: LAMA2; (-) strand; PAM type: YTN; PAM sequence: TTT
tccaaagtgatttttaccac

SEQ ID NO: 210200 - DNA, 20 bp, Artificial Sequence
  Description of Artificial Sequence: Synthetic oligonucleotide
  Target: LAMA2; (-) strand; PAM type: YTN; PAM sequence: TTA
gataatgccaaaggttttcc

SEQ ID NO: 210201 - DNA, 20 bp, Artificial Sequence
  Description of Artificial Sequence: Synthetic oligonucleotide
  Target: LAMA2; (-) strand; PAM type: YTN; PAM sequence: TTC
attagataatgccaaaggtt

SEQ ID NO: 210202 - DNA, 20 bp, Artificial Sequence
  Description of Artificial Sequence: Synthetic oligonucleotide
  Target: LAMA2; (-) strand; PAM type: YTN; PAM sequence: TTT
cattagataatgccaaaggt

SEQ ID NO: 210203 - DNA, 20 bp, Artificial Sequence
  Description of Artificial Sequence: Synthetic oligonucleotide
  Target: LAMA2; (-) strand; PAM type: YTN; PAM sequence: TTA
atttcattagataatgccaa

SEQ ID NO: 210204 - DNA, 20 bp, Artificial Sequence
  Description of Artificial Sequence: Synthetic oligonucleotide
  Target: LAMA2; (-) strand; PAM type: YTN; PAM sequence: TTG
caacatcatagagtaggcac

SEQ ID NO: 210205 - DNA, 20 bp, Artificial Sequence
  Description of Artificial Sequence: Synthetic oligonucleotide
  Target: LAMA2; (-) strand; PAM type: YTN; PAM sequence: TTG
aattgcaacatcatagagta

SEQ ID NO: 210206 - DNA, 20 bp, Artificial Sequence
  Description of Artificial Sequence: Synthetic oligonucleotide
  Target: LAMA2; (-) strand; PAM type: YTN; PAM sequence: TTA
caagttgaattgcaacatca

SEQ ID NO: 210207 - DNA, 20 bp, Artificial Sequence
  Description of Artificial Sequence: Synthetic oligonucleotide
  Target: LAMA2; (-) strand; PAM type: YTN; PAM sequence: CTT
acaagttgaattgcaacatc

SEQ ID NO: 210208 - DNA, 20 bp, Artificial Sequence
  Description of Artificial Sequence: Synthetic oligonucleotide
  Target: LAMA2; (-) strand; PAM type: YTN; PAM sequence: TTG
agtatatgcttacaagttga

SEQ ID NO: 210209 - DNA, 20 bp, Artificial Sequence
  Description of Artificial Sequence: Synthetic oligonucleotide
  Target: LAMA2; (-) strand; PAM type: YTN; PAM sequence: CTT
gagtatatgcttacaagttg

SEQ ID NO: 210210 - DNA, 20 bp, Artificial Sequence
  Description of Artificial Sequence: Synthetic oligonucleotide
  Target: LAMA2; (-) strand; PAM type: YTN; PAM sequence: CTC
ttgagtatatgcttacaagt

SEQ ID NO: 210211 - DNA, 20 bp, Artificial Sequence
  Description of Artificial Sequence: Synthetic oligonucleotide
  Target: LAMA2; (-) strand; PAM type: YTN; PAM sequence: TTC
tcttgagtatatgcttacaa

SEQ ID NO: 210212 - DNA, 20 bp, Artificial Sequence
  Description of Artificial Sequence: Synthetic oligonucleotide
  Target: LAMA2; (-) strand; PAM type: YTN; PAM sequence: TTT
ctcttgagtatatgcttaca

SEQ ID NO: 210213 - DNA, 20 bp, Artificial Sequence
  Description of Artificial Sequence: Synthetic oligonucleotide
  Target: LAMA2; (-) strand; PAM type: YTN; PAM sequence: CTA
tttctcttgagtatatgctt

SEQ ID NO: 210214 - DNA, 20 bp, Artificial Sequence
  Description of Artificial Sequence: Synthetic oligonucleotide
  Target: LAMA2; (-) strand; PAM type: YTN; PAM sequence: TTG
tacacatgtgcacctatttc

SEQ ID NO: 210215 - DNA, 20 bp, Artificial Sequence
  Description of Artificial Sequence: Synthetic oligonucleotide
  Target: LAMA2; (-) strand; PAM type: YTN; PAM sequence: TTT
gtacacatgtgcacctattt

SEQ ID NO: 210216 - DNA, 20 bp, Artificial Sequence
  Description of Artificial Sequence: Synthetic oligonucleotide
  Target: LAMA2; (-) strand; PAM type: YTN; PAM sequence: CTT
tgtacacatgtgcacctatt

SEQ ID NO: 210217 - DNA, 20 bp, Artificial Sequence
  Description of Artificial Sequence: Synthetic oligonucleotide
  Target: LAMA2; (-) strand; PAM type: YTN; PAM sequence: TTG
aatatgtctttgtacacatg

SEQ ID NO: 210218 - DNA, 20 bp, Artificial Sequence
  Description of Artificial Sequence: Synthetic oligonucleotide
  Target: LAMA2; (-) strand; PAM type: YTN; PAM sequence: CTT
gaatatgtctttgtacacat

SEQ ID NO: 210219 - DNA, 20 bp, Artificial Sequence
  Description of Artificial Sequence: Synthetic oligonucleotide
  Target: LAMA2; (-) strand; PAM type: YTN; PAM sequence: TTC
ttgaatatgtctttgtacac

SEQ ID NO: 210220 - DNA, 20 bp, Artificial Sequence
  Description of Artificial Sequence: Synthetic oligonucleotide
  Target: LAMA2; (-) strand; PAM type: YTN; PAM sequence: TTA
tgagcattcttgaatatgtc

SEQ ID NO: 210221 - DNA, 20 bp, Artificial Sequence
  Description of Artificial Sequence: Synthetic oligonucleotide
  Target: LAMA2; (-) strand; PAM type: YTN; PAM sequence: CTG
ttatgagcattcttgaatat

SEQ ID NO: 210222 - DNA, 20 bp, Artificial Sequence
  Description of Artificial Sequence: Synthetic oligonucleotide
  Target: LAMA2; (-) strand; PAM type: YTN; PAM sequence: TTA
atagtgctgttatgagcatt

SEQ ID NO: 210223 - DNA, 20 bp, Artificial Sequence
  Description of Artificial Sequence: Synthetic oligonucleotide
  Target: LAMA2; (-) strand; PAM type: YTN; PAM sequence: TTA
ttaatagtgctgttatgagc

SEQ ID NO: 210224 - DNA, 20 bp, Artificial Sequence
  Description of Artificial Sequence: Synthetic oligonucleotide
  Target: LAMA2; (-) strand; PAM type: YTN; PAM sequence: TTA
gatattattaatagtgctgt

SEQ ID NO: 210225 - DNA, 20 bp, Artificial Sequence
  Description of Artificial Sequence: Synthetic oligonucleotide
  Target: LAMA2; (-) strand; PAM type: YTN; PAM sequence: TTT
agatattattaatagtgctg

SEQ ID NO: 210226 - DNA, 20 bp, Artificial Sequence
  Description of Artificial Sequence: Synthetic oligonucleotide
  Target: LAMA2; (-) strand; PAM type: YTN; PAM sequence: CTT
tagatattattaatagtgct

SEQ ID NO: 210227 - DNA, 20 bp, Artificial Sequence
  Description of Artificial Sequence: Synthetic oligonucleotide
  Target: LAMA2; (-) strand; PAM type: YTN; PAM sequence: TTC
cagctttagatattattaat

SEQ ID NO: 210228 - DNA, 20 bp, Artificial Sequence
  Description of Artificial Sequence: Synthetic oligonucleotide
  Target: LAMA2; (-) strand; PAM type: YTN; PAM sequence: TTT
ccagctttagatattattaa

SEQ ID NO: 210229 - DNA, 20 bp, Artificial Sequence
  Description of Artificial Sequence: Synthetic oligonucleotide
  Target: LAMA2; (-) strand; PAM type: YTN; PAM sequence: TTA
tttccagctttagatattat

SEQ ID NO: 210230 - DNA, 20 bp, Artificial Sequence
  Description of Artificial Sequence: Synthetic oligonucleotide
  Target: LAMA2; (-) strand; PAM type: YTN; PAM sequence: TTG
gttatttccagctttagata

SEQ ID NO: 210231 - DNA, 20 bp, Artificial Sequence
  Description of Artificial Sequence: Synthetic oligonucleotide
  Target: LAMA2; (-) strand; PAM type: YTN; PAM sequence: TTT
ggttatttccagctttagat

SEQ ID NO: 210232 - DNA, 20 bp, Artificial Sequence
  Description of Artificial Sequence: Synthetic oligonucleotide
  Target: LAMA2; (-) strand; PAM type: YTN; PAM sequence: TTC
atgccaatagcgatgtcatt

SEQ ID NO: 210233 - DNA, 20 bp, Artificial Sequence
  Description of Artificial Sequence: Synthetic oligonucleotide
  Target: LAMA2; (-) strand; PAM type: YTN; PAM sequence: TTA
ttcatgccaatagcgatgtc

SEQ ID NO: 210234 - DNA, 20 bp, Artificial Sequence
  Description of Artificial Sequence: Synthetic oligonucleotide
  Target: LAMA2; (-) strand; PAM type: YTN; PAM sequence: TTT
attcatgccaatagcgatgt

SEQ ID NO: 210235 - DNA, 20 bp, Artificial Sequence
  Description of Artificial Sequence: Synthetic oligonucleotide
  Target: LAMA2; (-) strand; PAM type: YTN; PAM sequence: CTA
tgaaatatttattcatgcca

SEQ ID NO: 210236 - DNA, 20 bp, Artificial Sequence
  Description of Artificial Sequence: Synthetic oligonucleotide
  Target: LAMA2; (-) strand; PAM type: YTN; PAM sequence: TTA
tgatactatgaaatatttat

SEQ ID NO: 210237 - DNA, 20 bp, Artificial Sequence
  Description of Artificial Sequence: Synthetic oligonucleotide
  Target: LAMA2; (-) strand; PAM type: YTN; PAM sequence: CTA
atattatgatactatgaaat

SEQ ID NO: 210238 - DNA, 20 bp, Artificial Sequence
  Description of Artificial Sequence: Synthetic oligonucleotide
  Target: LAMA2; (-) strand; PAM type: YTN; PAM sequence: TTC
ctaatattatgatactatga

SEQ ID NO: 210239 - DNA, 20 bp, Artificial Sequence
  Description of Artificial Sequence: Synthetic oligonucleotide
  Target: LAMA2; (-) strand; PAM type: YTN; PAM sequence: TTA
tagtattcctaatattatga

SEQ ID NO: 210240 - DNA, 20 bp, Artificial Sequence
  Description of Artificial Sequence: Synthetic oligonucleotide
  Target: LAMA2; (-) strand; PAM type: YTN; PAM sequence: TTT
atagtattcctaatattatg

SEQ ID NO: 210241 - DNA, 20 bp, Artificial Sequence
  Description of Artificial Sequence: Synthetic oligonucleotide
  Target: LAMA2; (-) strand; PAM type: YTN; PAM sequence: CTT
tatagtattcctaatattat

SEQ ID NO: 210242 - DNA, 20 bp, Artificial Sequence
  Description of Artificial Sequence: Synthetic oligonucleotide
  Target: LAMA2; (-) strand; PAM type: YTN; PAM sequence: CTG
ctttatagtattcctaatat

SEQ ID NO: 210243 - DNA, 20 bp, Artificial Sequence
  Description of Artificial Sequence: Synthetic oligonucleotide
  Target: LAMA2; (-) strand; PAM type: YTN; PAM sequence: TTA
ctgctttatagtattcctaa

SEQ ID NO: 210244 - DNA, 20 bp, Artificial Sequence
  Description of Artificial Sequence: Synthetic oligonucleotide
  Target: LAMA2; (-) strand; PAM type: YTN; PAM sequence: TTT
actgctttatagtattccta

SEQ ID NO: 210245 - DNA, 20 bp, Artificial Sequence
  Description of Artificial Sequence: Synthetic oligonucleotide
  Target: LAMA2; (-) strand; PAM type: YTN; PAM sequence: TTT
tactgctttatagtattcct

SEQ ID NO: 210246 - DNA, 20 bp, Artificial Sequence
  Description of Artificial Sequence: Synthetic oligonucleotide
  Target: LAMA2; (-) strand; PAM type: YTN; PAM sequence: TTT
ttactgctttatagtattcc

SEQ ID NO: 210247 - DNA, 20 bp, Artificial Sequence
  Description of Artificial Sequence: Synthetic oligonucleotide
  Target: LAMA2; (-) strand; PAM type: YTN; PAM sequence: TTC
atttttactgctttatagta

SEQ ID NO: 210248 - DNA, 20 bp, Artificial Sequence
  Description of Artificial Sequence: Synthetic oligonucleotide
  Target: LAMA2; (-) strand; PAM type: YTN; PAM sequence: TTG
ttcatttttactgctttata

SEQ ID NO: 210249 - DNA, 20 bp, Artificial Sequence
  Description of Artificial Sequence: Synthetic oligonucleotide
  Target: LAMA2; (-) strand; PAM type: YTN; PAM sequence: TTT
gttcatttttactgctttat

SEQ ID NO: 210250 - DNA, 20 bp, Artificial Sequence
  Description of Artificial Sequence: Synthetic oligonucleotide
  Target: LAMA2; (-) strand; PAM type: YTN; PAM sequence: TTG
tttgttcatttttactgctt

SEQ ID NO: 210251 - DNA, 20 bp, Artificial Sequence
  Description of Artificial Sequence: Synthetic oligonucleotide
  Target: LAMA2; (-) strand; PAM type: YTN; PAM sequence: TTG
ggtataacagttgtttgttc

SEQ ID NO: 210252 - DNA, 20 bp, Artificial Sequence
  Description of Artificial Sequence: Synthetic oligonucleotide
  Target: LAMA2; (-) strand; PAM type: YTN; PAM sequence: CTG
ttgggtataacagttgtttg

SEQ ID NO: 210253 - DNA, 20 bp, Artificial Sequence
  Description of Artificial Sequence: Synthetic oligonucleotide
  Target: LAMA2; (-) strand; PAM type: YTN; PAM sequence: TTC
acccgtgctgttgggtataa

SEQ ID NO: 210254 - DNA, 20 bp, Artificial Sequence
  Description of Artificial Sequence: Synthetic oligonucleotide
  Target: LAMA2; (-) strand; PAM type: YTN; PAM sequence: TTA
agggttcacccgtgctgttg

SEQ ID NO: 210255 - DNA, 20 bp, Artificial Sequence
  Description of Artificial Sequence: Synthetic oligonucleotide
  Target: LAMA2; (-) strand; PAM type: YTN; PAM sequence: TTT
aagggttcacccgtgctgtt

SEQ ID NO: 210256 - DNA, 20 bp, Artificial Sequence
  Description of Artificial Sequence: Synthetic oligonucleotide
  Target: LAMA2; (-) strand; PAM type: YTN; PAM sequence: TTA
tgtttaagggttcacccgtg

SEQ ID NO: 210257 - DNA, 20 bp, Artificial Sequence
  Description of Artificial Sequence: Synthetic oligonucleotide
  Target: LAMA2; (-) strand; PAM type: YTN; PAM sequence: TTA
agattatgtttaagggttca

SEQ ID NO: 210258 - DNA, 20 bp, Artificial Sequence
  Description of Artificial Sequence: Synthetic oligonucleotide
  Target: LAMA2; (-) strand; PAM type: YTN; PAM sequence: CTT
aagattatgtttaagggttc

SEQ ID NO: 210259 - DNA, 20 bp, Artificial Sequence
  Description of Artificial Sequence: Synthetic oligonucleotide
  Target: LAMA2; (-) strand; PAM type: YTN; PAM sequence: TTC
cttaagattatgtttaaggg

SEQ ID NO: 210260 - DNA, 20 bp, Artificial Sequence
  Description of Artificial Sequence: Synthetic oligonucleotide
  Target: LAMA2; (-) strand; PAM type: YTN; PAM sequence: TTT
ccttaagattatgtttaagg

SEQ ID NO: 210261 - DNA, 20 bp, Artificial Sequence
  Description of Artificial Sequence: Synthetic oligonucleotide
  Target: LAMA2; (-) strand; PAM type: YTN; PAM sequence: TTT
tccttaagattatgtttaag

SEQ ID NO: 210262 - DNA, 20 bp, Artificial Sequence
  Description of Artificial Sequence: Synthetic oligonucleotide
  Target: LAMA2; (-) strand; PAM type: YTN; PAM sequence: CTT
ttccttaagattatgtttaa

SEQ ID NO: 210263 - DNA, 20 bp, Artificial Sequence
  Description of Artificial Sequence: Synthetic oligonucleotide
  Target: LAMA2; (-) strand; PAM type: YTN; PAM sequence: TTC
ttttccttaagattatgttt

SEQ ID NO: 210264 - DNA, 20 bp, Artificial Sequence
  Description of Artificial Sequence: Synthetic oligonucleotide
  Target: LAMA2; (-) strand; PAM type: YTN; PAM sequence: TTT
cttttccttaagattatgtt

SEQ ID NO: 210265 - DNA, 20 bp, Artificial Sequence
  Description of Artificial Sequence: Synthetic oligonucleotide
  Target: LAMA2; (-) strand; PAM type: YTN; PAM sequence: CTA
atttcttttccttaagatta

SEQ ID NO: 210266 - DNA, 20 bp, Artificial Sequence
  Description of Artificial Sequence: Synthetic oligonucleotide
  Target: LAMA2; (-) strand; PAM type: YTN; PAM sequence: TTA
tgtctaatttcttttcctta

SEQ ID NO: 210267 - DNA, 20 bp, Artificial Sequence
  Description of Artificial Sequence: Synthetic oligonucleotide
  Target: LAMA2; (-) strand; PAM type: YTN; PAM sequence: TTT
atgtctaatttcttttcctt

SEQ ID NO: 210268 - DNA, 20 bp, Artificial Sequence
  Description of Artificial Sequence: Synthetic oligonucleotide
  Target: LAMA2; (-) strand; PAM type: YTN; PAM sequence: TTT
tatgtctaatttcttttcct

SEQ ID NO: 210269 - DNA, 20 bp, Artificial Sequence
  Description of Artificial Sequence: Synthetic oligonucleotide
  Target: LAMA2; (-) strand; PAM type: YTN; PAM sequence: CTT
ttatgtctaatttcttttcc

SEQ ID NO: 210270 - DNA, 20 bp, Artificial Sequence
  Description of Artificial Sequence: Synthetic oligonucleotide
  Target: LAMA2; (-) strand; PAM type: YTN; PAM sequence: CTC
ttttatgtctaatttctttt

SEQ ID NO: 210271 - DNA, 20 bp, Artificial Sequence
  Description of Artificial Sequence: Synthetic oligonucleotide
  Target: LAMA2; (-) strand; PAM type: YTN; PAM sequence: CTG
tatactcttttatgtctaat

SEQ ID NO: 210272 - DNA, 20 bp, Artificial Sequence
  Description of Artificial Sequence: Synthetic oligonucleotide
  Target: LAMA2; (-) strand; PAM type: YTN; PAM sequence: TTA
tatgaatggaatcaggcact

SEQ ID NO: 210273 - DNA, 20 bp, Artificial Sequence
  Description of Artificial Sequence: Synthetic oligonucleotide
  Target: LAMA2; (-) strand; PAM type: YTN; PAM sequence: TTG
aatgttatatgaatggaatc

SEQ ID NO: 210274 - DNA, 20 bp, Artificial Sequence
  Description of Artificial Sequence: Synthetic oligonucleotide
  Target: LAMA2; (-) strand; PAM type: YTN; PAM sequence: TTT
gaatgttatatgaatggaat

SEQ ID NO: 210275 - DNA, 20 bp, Artificial Sequence
  Description of Artificial Sequence: Synthetic oligonucleotide
  Target: LAMA2; (-) strand; PAM type: YTN; PAM sequence: TTT
tgaatgttatatgaatggaa

SEQ ID NO: 210276 - DNA, 20 bp, Artificial Sequence
  Description of Artificial Sequence: Synthetic oligonucleotide
  Target: LAMA2; (-) strand; PAM type: YTN; PAM sequence: TTT
ttgaatgttatatgaatgga

SEQ ID NO: 210277 - DNA, 20 bp, Artificial Sequence
  Description of Artificial Sequence: Synthetic oligonucleotide
  Target: LAMA2; (-) strand; PAM type: YTN; PAM sequence: CTA
tttttgaatgttatatgaat

SEQ ID NO: 210278 - DNA, 20 bp, Artificial Sequence
  Description of Artificial Sequence: Synthetic oligonucleotide
  Target: LAMA2; (-) strand; PAM type: YTN; PAM sequence: TTG
catctatttttgaatgttat

SEQ ID NO: 210279 - DNA, 20 bp, Artificial Sequence
  Description of Artificial Sequence: Synthetic oligonucleotide
  Target: LAMA2; (-) strand; PAM type: YTN; PAM sequence: TTG
aattgcatctatttttgaat

SEQ ID NO: 210280 - DNA, 20 bp, Artificial Sequence
  Description of Artificial Sequence: Synthetic oligonucleotide
  Target: LAMA2; (-) strand; PAM type: YTN; PAM sequence: CTA
gcatgaaagttgaattgcat

SEQ ID NO: 210281 - DNA, 20 bp, Artificial Sequence
  Description of Artificial Sequence: Synthetic oligonucleotide
  Target: LAMA2; (-) strand; PAM type: YTN; PAM sequence: CTA
tctagcatgaaagttgaatt

SEQ ID NO: 210282 - DNA, 20 bp, Artificial Sequence
  Description of Artificial Sequence: Synthetic oligonucleotide
  Target: LAMA2; (-) strand; PAM type: YTN; PAM sequence: TTC
tatctagcatgaaagttgaa

SEQ ID NO: 210283 - DNA, 20 bp, Artificial Sequence
  Description of Artificial Sequence: Synthetic oligonucleotide
  Target: LAMA2; (-) strand; PAM type: YTN; PAM sequence: CTT
ctatctagcatgaaagttga

SEQ ID NO: 210284 - DNA, 20 bp, Artificial Sequence
  Description of Artificial Sequence: Synthetic oligonucleotide
  Target: LAMA2; (-) strand; PAM type: YTN; PAM sequence: CTG
acttctatctagcatgaaag

SEQ ID NO: 210285 - DNA, 20 bp, Artificial Sequence
  Description of Artificial Sequence: Synthetic oligonucleotide
  Target: LAMA2; (-) strand; PAM type: YTN; PAM sequence: CTA
gtatcctgacttctatctag

SEQ ID NO: 210286 - DNA, 20 bp, Artificial Sequence
  Description of Artificial Sequence: Synthetic oligonucleotide
  Target: LAMA2; (-) strand; PAM type: YTN; PAM sequence: TTC
caaagataactagtatcctg

SEQ ID NO: 210287 - DNA, 20 bp, Artificial Sequence
  Description of Artificial Sequence: Synthetic oligonucleotide
  Target: LAMA2; (-) strand; PAM type: YTN; PAM sequence: TTT
ccaaagataactagtatcct

SEQ ID NO: 210288 - DNA, 20 bp, Artificial Sequence
  Description of Artificial Sequence: Synthetic oligonucleotide
  Target: LAMA2; (-) strand; PAM type: YTN; PAM sequence: CTT
tccaaagataactagtatcc

SEQ ID NO: 210289 - DNA, 20 bp, Artificial Sequence
  Description of Artificial Sequence: Synthetic oligonucleotide
  Target: LAMA2; (-) strand; PAM type: YTN; PAM sequence: CTA
ccctttccaaagataactag

SEQ ID NO: 210290 - DNA, 20 bp, Artificial Sequence
  Description of Artificial Sequence: Synthetic oligonucleotide
  Target: LAMA2; (-) strand; PAM type: YTN; PAM sequence: CTC
taccctttccaaagataact

SEQ ID NO: 210291 - DNA, 20 bp, Artificial Sequence
  Description of Artificial Sequence: Synthetic oligonucleotide
  Target: LAMA2; (-) strand; PAM type: YTN; PAM sequence: CTA
tctctaccctttccaaagat

SEQ ID NO: 210292 - DNA, 20 bp, Artificial Sequence
  Description of Artificial Sequence: Synthetic oligonucleotide
  Target: LAMA2; (-) strand; PAM type: YTN; PAM sequence: CTC
cctatctctaccctttccaa

SEQ ID NO: 210293 - DNA, 20 bp, Artificial Sequence
  Description of Artificial Sequence: Synthetic oligonucleotide
  Target: LAMA2; (-) strand; PAM type: YTN; PAM sequence: CTA
agaatcctccctatctctac

SEQ ID NO: 210294 - DNA, 20 bp, Artificial Sequence
  Description of Artificial Sequence: Synthetic oligonucleotide
  Target: LAMA2; (-) strand; PAM type: YTN; PAM sequence: TTG
cccatactaagaatcctccc

SEQ ID NO: 210295 - DNA, 20 bp, Artificial Sequence
  Description of Artificial Sequence: Synthetic oligonucleotide
  Target: LAMA2; (-) strand; PAM type: YTN; PAM sequence: CTA
tgtaaccatcatatagatca

SEQ ID NO: 210296 - DNA, 20 bp, Artificial Sequence
  Description of Artificial Sequence: Synthetic oligonucleotide
  Target: LAMA2; (-) strand; PAM type: YTN; PAM sequence: CTA
catataaaaacctatgtaac

SEQ ID NO: 210297 - DNA, 20 bp, Artificial Sequence
  Description of Artificial Sequence: Synthetic oligonucleotide
  Target: LAMA2; (-) strand; PAM type: YTN; PAM sequence: TTA
ataacctacatataaaaacc

SEQ ID NO: 210298 - DNA, 20 bp, Artificial Sequence
  Description of Artificial Sequence: Synthetic oligonucleotide
  Target: LAMA2; (-) strand; PAM type: YTN; PAM sequence: TTT
aataacctacatataaaaac

SEQ ID NO: 210299 - DNA, 20 bp, Artificial Sequence
  Description of Artificial Sequence: Synthetic oligonucleotide
  Target: LAMA2; (-) strand; PAM type: YTN; PAM sequence: TTT
taataacctacatataaaaa

SEQ ID NO: 210300 - DNA, 20 bp, Artificial Sequence
  Description of Artificial Sequence: Synthetic oligonucleotide
  Target: LAMA2; (-) strand; PAM type: YTN; PAM sequence: TTA
ttttaataacctacatataa

SEQ ID NO: 210301 - DNA, 20 bp, Artificial Sequence
  Description of Artificial Sequence: Synthetic oligonucleotide
  Target: LAMA2; (-) strand; PAM type: YTN; PAM sequence: TTA
tcagtatattattttaataa

SEQ ID NO: 210302 - DNA, 20 bp, Artificial Sequence
  Description of Artificial Sequence: Synthetic oligonucleotide
  Target: LAMA2; (-) strand; PAM type: YTN; PAM sequence: CTC
aatgtatgatcatattatca

SEQ ID NO: 210303 - DNA, 20 bp, Artificial Sequence
  Description of Artificial Sequence: Synthetic oligonucleotide
  Target: LAMA2; (-) strand; PAM type: YTN; PAM sequence: TTG
taataaataaaaacctcaat

SEQ ID NO: 210304 - DNA, 20 bp, Artificial Sequence
  Description of Artificial Sequence: Synthetic oligonucleotide
  Target: LAMA2; (-) strand; PAM type: YTN; PAM sequence: TTA
ttgtaataaataaaaacctc

SEQ ID NO: 210305 - DNA, 20 bp, Artificial Sequence
  Description of Artificial Sequence: Synthetic oligonucleotide
  Target: LAMA2; (-) strand; PAM type: YTN; PAM sequence: CTT
attgtaataaataaaaacct

SEQ ID NO: 210306 - DNA, 20 bp, Artificial Sequence
  Description of Artificial Sequence: Synthetic oligonucleotide
  Target: LAMA2; (-) strand; PAM type: YTN; PAM sequence: CTC
aacttattgtaataaataaa

SEQ ID NO: 210307 - DNA, 20 bp, Artificial Sequence
  Description of Artificial Sequence: Synthetic oligonucleotide
  Target: LAMA2; (-) strand; PAM type: YTN; PAM sequence: TTG
aataatctcaacttattgta

SEQ ID NO: 210308 - DNA, 20 bp, Artificial Sequence
  Description of Artificial Sequence: Synthetic oligonucleotide
  Target: LAMA2; (-) strand; PAM type: YTN; PAM sequence: TTT
gaataatctcaacttattgt

SEQ ID NO: 210309 - DNA, 20 bp, Artificial Sequence
  Description of Artificial Sequence: Synthetic oligonucleotide
  Target: LAMA2; (-) strand; PAM type: YTN; PAM sequence: CTT
tgaataatctcaacttattg

SEQ ID NO: 210310 - DNA, 20 bp, Artificial Sequence
  Description of Artificial Sequence: Synthetic oligonucleotide
  Target: LAMA2; (-) strand; PAM type: YTN; PAM sequence: TTG
gtatatatatgtatatgtaa

SEQ ID NO: 210311 - DNA, 20 bp, Artificial Sequence
  Description of Artificial Sequence: Synthetic oligonucleotide
  Target: LAMA2; (-) strand; PAM type: YTN; PAM sequence: TTA
aaaattggtatatatatgta

SEQ ID NO: 210312 - DNA, 20 bp, Artificial Sequence
  Description of Artificial Sequence: Synthetic oligonucleotide
  Target: LAMA2; (-) strand; PAM type: YTN; PAM sequence: TTT
aaaaattggtatatatatgt

SEQ ID NO: 210313 - DNA, 20 bp, Artificial Sequence
  Description of Artificial Sequence: Synthetic oligonucleotide
  Target: LAMA2; (-) strand; PAM type: YTN; PAM sequence: TTT
taaaaattggtatatatatg

SEQ ID NO: 210314 - DNA, 20 bp, Artificial Sequence
  Description of Artificial Sequence: Synthetic oligonucleotide
  Target: LAMA2; (-) strand; PAM type: YTN; PAM sequence: TTA
gaacattttaaaaattggta

SEQ ID NO: 210315 - DNA, 20 bp, Artificial Sequence
  Description of Artificial Sequence: Synthetic oligonucleotide
  Target: LAMA2; (-) strand; PAM type: YTN; PAM sequence: CTT
agaacattttaaaaattggt

SEQ ID NO: 210316 - DNA, 20 bp, Artificial Sequence
  Description of Artificial Sequence: Synthetic oligonucleotide
  Target: LAMA2; (-) strand; PAM type: YTN; PAM sequence: CTC
ttagaacattttaaaaattg

SEQ ID NO: 210317 - DNA, 20 bp, Artificial Sequence
  Description of Artificial Sequence: Synthetic oligonucleotide
  Target: LAMA2; (-) strand; PAM type: YTN; PAM sequence: TTC
tcttagaacattttaaaaat

SEQ ID NO: 210318 - DNA, 20 bp, Artificial Sequence
  Description of Artificial Sequence: Synthetic oligonucleotide
  Target: LAMA2; (-) strand; PAM type: YTN; PAM sequence: TTT
ctcttagaacattttaaaaa

SEQ ID NO: 210319 - DNA, 20 bp, Artificial Sequence
  Description of Artificial Sequence: Synthetic oligonucleotide
  Target: LAMA2; (-) strand; PAM type: YTN; PAM sequence: CTT
tctcttagaacattttaaaa

SEQ ID NO: 210320 - DNA, 20 bp, Artificial Sequence
  Description of Artificial Sequence: Synthetic oligonucleotide
  Target: LAMA2; (-) strand; PAM type: YTN; PAM sequence: TTC
tttctcttagaacattttaa

SEQ ID NO: 210321 - DNA, 20 bp, Artificial Sequence
  Description of Artificial Sequence: Synthetic oligonucleotide
  Target: LAMA2; (-) strand; PAM type: YTN; PAM sequence: TTT
ctttctcttagaacatttta

SEQ ID NO: 210322 - DNA, 20 bp, Artificial Sequence
  Description of Artificial Sequence: Synthetic oligonucleotide
  Target: LAMA2; (-) strand; PAM type: YTN; PAM sequence: TTT
tctttctcttagaacatttt

SEQ ID NO: 210323 - DNA, 20 bp, Artificial Sequence
  Description of Artificial Sequence: Synthetic oligonucleotide
  Target: LAMA2; (-) strand; PAM type: YTN; PAM sequence: CTT
ttctttctcttagaacattt

SEQ ID NO: 210324 - DNA, 20 bp, Artificial Sequence
  Description of Artificial Sequence: Synthetic oligonucleotide
  Target: LAMA2; (-) strand; PAM type: YTN; PAM sequence: TTG
agcttttctttctcttagaa

SEQ ID NO: 210325 - DNA, 20 bp, Artificial Sequence
  Description of Artificial Sequence: Synthetic oligonucleotide
  Target: LAMA2; (-) strand; PAM type: YTN; PAM sequence: TTA
ttgagcttttctttctctta

SEQ ID NO: 210326 - DNA, 20 bp, Artificial Sequence
  Description of Artificial Sequence: Synthetic oligonucleotide
  Target: LAMA2; (-) strand; PAM type: YTN; PAM sequence: TTT
attgagcttttctttctctt

SEQ ID NO: 210327 - DNA, 20 bp, Artificial Sequence
  Description of Artificial Sequence: Synthetic oligonucleotide
  Target: LAMA2; (-) strand; PAM type: YTN; PAM sequence: TTA
tttattgagcttttctttct

SEQ ID NO: 210328 - DNA, 20 bp, Artificial Sequence
  Description of Artificial Sequence: Synthetic oligonucleotide
  Target: LAMA2; (-) strand; PAM type: YTN; PAM sequence: TTT
atttattgagcttttctttc

SEQ ID NO: 210329 - DNA, 20 bp, Artificial Sequence
  Description of Artificial Sequence: Synthetic oligonucleotide
  Target: LAMA2; (-) strand; PAM type: YTN; PAM sequence: TTT
tatttattgagcttttcttt

SEQ ID NO: 210330 - DNA, 20 bp, Artificial Sequence
  Description of Artificial Sequence: Synthetic oligonucleotide
  Target: LAMA2; (-) strand; PAM type: YTN; PAM sequence: TTT
ttatttattgagcttttctt

SEQ ID NO: 210331 - DNA, 20 bp, Artificial Sequence
  Description of Artificial Sequence: Synthetic oligonucleotide
  Target: LAMA2; (-) strand; PAM type: YTN; PAM sequence: CTA
gtgacaaggaaatggggtgt

SEQ ID NO: 210332 - DNA, 20 bp, Artificial Sequence
  Description of Artificial Sequence: Synthetic oligonucleotide
  Target: LAMA2; (-) strand; PAM type: YTN; PAM sequence: CTC
tagtgacaaggaaatggggt

SEQ ID NO: 210333 - DNA, 20 bp, Artificial Sequence
  Description of Artificial Sequence: Synthetic oligonucleotide
  Target: LAMA2; (-) strand; PAM type: YTN; PAM sequence: TTC
atctctagtgacaaggaaat

SEQ ID NO: 210334 - DNA, 20 bp, Artificial Sequence
  Description of Artificial Sequence: Synthetic oligonucleotide
  Target: LAMA2; (-) strand; PAM type: YTN; PAM sequence: TTG
aacataatagtaattcatct

SEQ ID NO: 210335 - DNA, 20 bp, Artificial Sequence
  Description of Artificial Sequence: Synthetic oligonucleotide
  Target: LAMA2; (-) strand; PAM type: YTN; PAM sequence: TTT
gaacataatagtaattcatc

SEQ ID NO: 210336 - DNA, 20 bp, Artificial Sequence
  Description of Artificial Sequence: Synthetic oligonucleotide
  Target: LAMA2; (-) strand; PAM type: YTN; PAM sequence: CTG
tatatacgatttgaacataa

SEQ ID NO: 210337 - DNA, 20 bp, Artificial Sequence
  Description of Artificial Sequence: Synthetic oligonucleotide
  Target: LAMA2; (-) strand; PAM type: YTN; PAM sequence: TTA
gatacatatataaaaaatat

SEQ ID NO: 210338 - DNA, 20 bp, Artificial Sequence
  Description of Artificial Sequence: Synthetic oligonucleotide
  Target: LAMA2; (-) strand; PAM type: YTN; PAM sequence: TTT
agatacatatataaaaaata

SEQ ID NO: 210339 - DNA, 20 bp, Artificial Sequence
  Description of Artificial Sequence: Synthetic oligonucleotide
  Target: LAMA2; (-) strand; PAM type: YTN; PAM sequence: TTT
tagatacatatataaaaaat

SEQ ID NO: 210340 - DNA, 20 bp, Artificial Sequence
  Description of Artificial Sequence: Synthetic oligonucleotide
  Target: LAMA2; (-) strand; PAM type: YTN; PAM sequence: TTC
agcatattttagatacatat

SEQ ID NO: 210341 - DNA, 20 bp, Artificial Sequence
  Description of Artificial Sequence: Synthetic oligonucleotide
  Target: LAMA2; (-) strand; PAM type: YTN; PAM sequence: TTA
ttcagcatattttagataca

SEQ ID NO: 210342 - DNA, 20 bp, Artificial Sequence
  Description of Artificial Sequence: Synthetic oligonucleotide
  Target: LAMA2; (-) strand; PAM type: YTN; PAM sequence: CTT
attcagcatattttagatac

SEQ ID NO: 210343 - DNA, 20 bp, Artificial Sequence
  Description of Artificial Sequence: Synthetic oligonucleotide
  Target: LAMA2; (-) strand; PAM type: YTN; PAM sequence: TTG
cttattcagcatattttaga

SEQ ID NO: 210344 - DNA, 20 bp, Artificial Sequence
  Description of Artificial Sequence: Synthetic oligonucleotide
  Target: LAMA2; (-) strand; PAM type: YTN; PAM sequence: TTT
gcttattcagcatattttag

SEQ ID NO: 210345 - DNA, 20 bp, Artificial Sequence
  Description of Artificial Sequence: Synthetic oligonucleotide
  Target: LAMA2; (-) strand; PAM type: YTN; PAM sequence: TTG
atttgcttattcagcatatt

SEQ ID NO: 210346 - DNA, 20 bp, Artificial Sequence
  Description of Artificial Sequence: Synthetic oligonucleotide
  Target: LAMA2; (-) strand; PAM type: YTN; PAM sequence: TTG
ttgatttgcttattcagcat

SEQ ID NO: 210347 - DNA, 20 bp, Artificial Sequence
  Description of Artificial Sequence: Synthetic oligonucleotide
  Target: LAMA2; (-) strand; PAM type: YTN; PAM sequence: CTA
gatgtagttgttgatttgct

SEQ ID NO: 210348 - DNA, 20 bp, Artificial Sequence
  Description of Artificial Sequence: Synthetic oligonucleotide
  Target: LAMA2; (-) strand; PAM type: YTN; PAM sequence: TTG
cgatgcagaagtctagatgt

SEQ ID NO: 210349 - DNA, 20 bp, Artificial Sequence
  Description of Artificial Sequence: Synthetic oligonucleotide
  Target: LAMA2; (-) strand; PAM type: YTN; PAM sequence: TTT
gcgatgcagaagtctagatg

SEQ ID NO: 210350 - DNA, 20 bp, Artificial Sequence
  Description of Artificial Sequence: Synthetic oligonucleotide
  Target: LAMA2; (-) strand; PAM type: YTN; PAM sequence: CTG
gtttgcgatgcagaagtcta

SEQ ID NO: 210351 - DNA, 20 bp, Artificial Sequence
  Description of Artificial Sequence: Synthetic oligonucleotide
  Target: LAMA2; (-) strand; PAM type: YTN; PAM sequence: TTC
tggtttgcgatgcagaagtc

SEQ ID NO: 210352 - DNA, 20 bp, Artificial Sequence
  Description of Artificial Sequence: Synthetic oligonucleotide
  Target: LAMA2; (-) strand; PAM type: YTN; PAM sequence: TTA
aatgtagttctggtttgcga

SEQ ID NO: 210353 - DNA, 20 bp, Artificial Sequence
  Description of Artificial Sequence: Synthetic oligonucleotide
  Target: LAMA2; (-) strand; PAM type: YTN; PAM sequence: TTT
aaatgtagttctggtttgcg

SEQ ID NO: 210354 - DNA, 20 bp, Artificial Sequence
  Description of Artificial Sequence: Synthetic oligonucleotide
  Target: LAMA2; (-) strand; PAM type: YTN; PAM sequence: TTA
agtgtgagataaaatgcatt

SEQ ID NO: 210355 - DNA, 20 bp, Artificial Sequence
  Description of Artificial Sequence: Synthetic oligonucleotide
  Target: LAMA2; (-) strand; PAM type: YTN; PAM sequence: TTT
aagtgtgagataaaatgcat

SEQ ID NO: 210356 - DNA, 20 bp, Artificial Sequence
  Description of Artificial Sequence: Synthetic oligonucleotide
  Target: LAMA2; (-) strand; PAM type: YTN; PAM sequence: CTT
taagtgtgagataaaatgca

SEQ ID NO: 210357 - DNA, 20 bp, Artificial Sequence
  Description of Artificial Sequence: Synthetic oligonucleotide
  Target: LAMA2; (-) strand; PAM type: YTN; PAM sequence: TTC
tttaagtgtgagataaaatg

SEQ ID NO: 210358 - DNA, 20 bp, Artificial Sequence
  Description of Artificial Sequence: Synthetic oligonucleotide
  Target: LAMA2; (-) strand; PAM type: YTN; PAM sequence: TTA
attctttaagtgtgagataa

SEQ ID NO: 210359 - DNA, 20 bp, Artificial Sequence
  Description of Artificial Sequence: Synthetic oligonucleotide
  Target: LAMA2; (-) strand; PAM type: YTN; PAM sequence: TTT
aattctttaagtgtgagata

SEQ ID NO: 210360 - DNA, 20 bp, Artificial Sequence
  Description of Artificial Sequence: Synthetic oligonucleotide
  Target: LAMA2; (-) strand; PAM type: YTN; PAM sequence: TTT
taattctttaagtgtgagat

SEQ ID NO: 210361 - DNA, 20 bp, Artificial Sequence
  Description of Artificial Sequence: Synthetic oligonucleotide
  Target: LAMA2; (-) strand; PAM type: YTN; PAM sequence: TTA
ttttaattctttaagtgtga

SEQ ID NO: 210362 - DNA, 20 bp, Artificial Sequence
  Description of Artificial Sequence: Synthetic oligonucleotide
  Target: LAMA2; (-) strand; PAM type: YTN; PAM sequence: TTT
attttaattctttaagtgtg

SEQ ID NO: 210363 - DNA, 20 bp, Artificial Sequence
  Description of Artificial Sequence: Synthetic oligonucleotide
  Target: LAMA2; (-) strand; PAM type: YTN; PAM sequence: TTT
tattttaattctttaagtgt

SEQ ID NO: 210364 - DNA, 20 bp, Artificial Sequence
  Description of Artificial Sequence: Synthetic oligonucleotide
  Target: LAMA2; (-) strand; PAM type: YTN; PAM sequence: TTC
agaaaagagttttattttaa

SEQ ID NO: 210365 - DNA, 20 bp, Artificial Sequence
  Description of Artificial Sequence: Synthetic oligonucleotide
  Target: LAMA2; (-) strand; PAM type: YTN; PAM sequence: TTG
ttcagaaaagagttttattt

SEQ ID NO: 210366 - DNA, 20 bp, Artificial Sequence
  Description of Artificial Sequence: Synthetic oligonucleotide
  Target: LAMA2; (-) strand; PAM type: YTN; PAM sequence: TTG
gaagattgttcagaaaagag

SEQ ID NO: 210367 - DNA, 20 bp, Artificial Sequence
  Description of Artificial Sequence: Synthetic oligonucleotide
  Target: LAMA2; (-) strand; PAM type: YTN; PAM sequence: TTA
tggtcaatatattggaagat

SEQ ID NO: 210368 - DNA, 20 bp, Artificial Sequence
  Description of Artificial Sequence: Synthetic oligonucleotide
  Target: LAMA2; (-) strand; PAM type: YTN; PAM sequence: CTT
atggtcaatatattggaaga

SEQ ID NO: 210369 - DNA, 20 bp, Artificial Sequence
  Description of Artificial Sequence: Synthetic oligonucleotide
  Target: LAMA2; (-) strand; PAM type: YTN; PAM sequence: TTA
cttatggtcaatatattgga

SEQ ID NO: 210370 - DNA, 20 bp, Artificial Sequence
  Description of Artificial Sequence: Synthetic oligonucleotide
  Target: LAMA2; (-) strand; PAM type: YTN; PAM sequence: TTT
acttatggtcaatatattgg

SEQ ID NO: 210371 - DNA, 20 bp, Artificial Sequence
  Description of Artificial Sequence: Synthetic oligonucleotide
  Target: LAMA2; (-) strand; PAM type: YTN; PAM sequence: TTA
catttacttatggtcaatat

SEQ ID NO: 210372 - DNA, 20 bp, Artificial Sequence
  Description of Artificial Sequence: Synthetic oligonucleotide
  Target: LAMA2; (-) strand; PAM type: YTN; PAM sequence: CTC
atattacatttacttatggt

SEQ ID NO: 210373 - DNA, 20 bp, Artificial Sequence
  Description of Artificial Sequence: Synthetic oligonucleotide
  Target: LAMA2; (-) strand; PAM type: YTN; PAM sequence: TTG
actcatattacatttactta

SEQ ID NO: 210374 - DNA, 20 bp, Artificial Sequence
  Description of Artificial Sequence: Synthetic oligonucleotide
  Target: LAMA2; (-) strand; PAM type: YTN; PAM sequence: TTA
aaataattgactcatattac

SEQ ID NO: 210375 - DNA, 20 bp, Artificial Sequence
  Description of Artificial Sequence: Synthetic oligonucleotide
  Target: LAMA2; (-) strand; PAM type: YTN; PAM sequence: TTA
caaaacggttaaaataattg

SEQ ID NO: 210376 - DNA, 20 bp, Artificial Sequence
  Description of Artificial Sequence: Synthetic oligonucleotide
  Target: LAMA2; (-) strand; PAM type: YTN; PAM sequence: TTG
agttacaaaacggttaaaat

SEQ ID NO: 210377 - DNA, 20 bp, Artificial Sequence
  Description of Artificial Sequence: Synthetic oligonucleotide
  Target: LAMA2; (-) strand; PAM type: YTN; PAM sequence: TTA
taaaaatcaagataaatcca

SEQ ID NO: 210378 - DNA, 20 bp, Artificial Sequence
  Description of Artificial Sequence: Synthetic oligonucleotide
  Target: LAMA2; (-) strand; PAM type: YTN; PAM sequence: TTT
ataaaaatcaagataaatcc

SEQ ID NO: 210379 - DNA, 20 bp, Artificial Sequence
  Description of Artificial Sequence: Synthetic oligonucleotide
  Target: LAMA2; (-) strand; PAM type: YTN; PAM sequence: CTT
tataaaaatcaagataaatc

SEQ ID NO: 210380 - DNA, 20 bp, Artificial Sequence
  Description of Artificial Sequence: Synthetic oligonucleotide
  Target: LAMA2; (-) strand; PAM type: YTN; PAM sequence: CTG
aactttataaaaatcaagat

SEQ ID NO: 210381 - DNA, 20 bp, Artificial Sequence
  Description of Artificial Sequence: Synthetic oligonucleotide
  Target: LAMA2; (-) strand; PAM type: YTN; PAM sequence: TTG
ctgaactttataaaaatcaa

SEQ ID NO: 210382 - DNA, 20 bp, Artificial Sequence
  Description of Artificial Sequence: Synthetic oligonucleotide
  Target: LAMA2; (-) strand; PAM type: YTN; PAM sequence: TTG
aattgctgaactttataaaa

SEQ ID NO: 210383 - DNA, 20 bp, Artificial Sequence
  Description of Artificial Sequence: Synthetic oligonucleotide
  Target: LAMA2; (-) strand; PAM type: YTN; PAM sequence: CTC
acaaaaatagaaacaaaaga

SEQ ID NO: 210384 - DNA, 20 bp, Artificial Sequence
  Description of Artificial Sequence: Synthetic oligonucleotide
  Target: LAMA2; (-) strand; PAM type: YTN; PAM sequence: CTA
tagtgcctcacaaaaataga

SEQ ID NO: 210385 - DNA, 20 bp, Artificial Sequence
  Description of Artificial Sequence: Synthetic oligonucleotide
  Target: LAMA2; (-) strand; PAM type: YTN; PAM sequence: TTA
cataaaaactatagtgcctc

SEQ ID NO: 210386 - DNA, 20 bp, Artificial Sequence
  Description of Artificial Sequence: Synthetic oligonucleotide
  Target: LAMA2; (-) strand; PAM type: YTN; PAM sequence: TTA
ttacataaaaactatagtgc

SEQ ID NO: 210387 - DNA, 20 bp, Artificial Sequence
  Description of Artificial Sequence: Synthetic oligonucleotide
  Target: LAMA2; (-) strand; PAM type: YTN; PAM sequence: TTT
attacataaaaactatagtg

SEQ ID NO: 210388 - DNA, 20 bp, Artificial Sequence
  Description of Artificial Sequence: Synthetic oligonucleotide
  Target: LAMA2; (-) strand; PAM type: YTN; PAM sequence: CTA
agtaggaggccatatcagta

SEQ ID NO: 210389 - DNA, 20 bp, Artificial Sequence
  Description of Artificial Sequence: Synthetic oligonucleotide
  Target: LAMA2; (-) strand; PAM type: YTN; PAM sequence: TTC
taagtaggaggccatatcag

SEQ ID NO: 210390 - DNA, 20 bp, Artificial Sequence
  Description of Artificial Sequence: Synthetic oligonucleotide
  Target: LAMA2; (-) strand; PAM type: YTN; PAM sequence: TTT
ctaagtaggaggccatatca

SEQ ID NO: 210391 - DNA, 20 bp, Artificial Sequence
  Description of Artificial Sequence: Synthetic oligonucleotide
  Target: LAMA2; (-) strand; PAM type: YTN; PAM sequence: TTT
tctaagtaggaggccatatc

SEQ ID NO: 210392 - DNA, 20 bp, Artificial Sequence
  Description of Artificial Sequence: Synthetic oligonucleotide
  Target: LAMA2; (-) strand; PAM type: YTN; PAM sequence: CTC
atgaataacattttctaagt

SEQ ID NO: 210393 - DNA, 20 bp, Artificial Sequence
  Description of Artificial Sequence: Synthetic oligonucleotide
  Target: LAMA2; (-) strand; PAM type: YTN; PAM sequence: CTC
tcatgaataacattttctaa

SEQ ID NO: 210394 - DNA, 20 bp, Artificial Sequence
  Description of Artificial Sequence: Synthetic oligonucleotide
  Target: LAMA2; (-) strand; PAM type: YTN; PAM sequence: CTA
aaatcaatatactctcatga

SEQ ID NO: 210395 - DNA, 20 bp, Artificial Sequence
  Description of Artificial Sequence: Synthetic oligonucleotide
  Target: LAMA2; (-) strand; PAM type: YTN; PAM sequence: TTG
ctaaaatcaatatactctca

SEQ ID NO: 210396 - DNA, 20 bp, Artificial Sequence
  Description of Artificial Sequence: Synthetic oligonucleotide
  Target: LAMA2; (-) strand; PAM type: YTN; PAM sequence: TTT
gctaaaatcaatatactctc

SEQ ID NO: 210397 - DNA, 20 bp, Artificial Sequence
  Description of Artificial Sequence: Synthetic oligonucleotide
  Target: LAMA2; (-) strand; PAM type: YTN; PAM sequence: TTT
tgctaaaatcaatatactct

SEQ ID NO: 210398 - DNA, 20 bp, Artificial Sequence
  Description of Artificial Sequence: Synthetic oligonucleotide
  Target: LAMA2; (-) strand; PAM type: YTN; PAM sequence: CTG
tggatgtacatatgtaaata

SEQ ID NO: 210399 - DNA, 20 bp, Artificial Sequence
  Description of Artificial Sequence: Synthetic oligonucleotide
  Target: LAMA2; (-) strand; PAM type: YTN; PAM sequence: TTA
catatgcaaacctgtggatg

SEQ ID NO: 210400 - DNA, 20 bp, Artificial Sequence
  Description of Artificial Sequence: Synthetic oligonucleotide
  Target: LAMA2; (-) strand; PAM type: YTN; PAM sequence: TTT
acatatgcaaacctgtggat

SEQ ID NO: 210401 - DNA, 20 bp, Artificial Sequence
  Description of Artificial Sequence: Synthetic oligonucleotide
  Target: LAMA2; (-) strand; PAM type: YTN; PAM sequence: TTT
tacatatgcaaacctgtgga

SEQ ID NO: 210402 - DNA, 20 bp, Artificial Sequence
  Description of Artificial Sequence: Synthetic oligonucleotide
  Target: LAMA2; (-) strand; PAM type: YTN; PAM sequence: TTT
ttacatatgcaaacctgtgg

SEQ ID NO: 210403 - DNA, 20 bp, Artificial Sequence
  Description of Artificial Sequence: Synthetic oligonucleotide
  Target: LAMA2; (-) strand; PAM type: YTN; PAM sequence: CTA
tatttttacatatgcaaacc

SEQ ID NO: 210404 - DNA, 20 bp, Artificial Sequence
  Description of Artificial Sequence: Synthetic oligonucleotide
  Target: LAMA2; (-) strand; PAM type: YTN; PAM sequence: TTC
aatagtaagtaaataatcta

SEQ ID NO: 210405 - DNA, 20 bp, Artificial Sequence
  Description of Artificial Sequence: Synthetic oligonucleotide
  Target: LAMA2; (-) strand; PAM type: YTN; PAM sequence: TTT
caatagtaagtaaataatct

SEQ ID NO: 210406 - DNA, 20 bp, Artificial Sequence
  Description of Artificial Sequence: Synthetic oligonucleotide
  Target: LAMA2; (-) strand; PAM type: YTN; PAM sequence: TTT
tcaatagtaagtaaataatc

SEQ ID NO: 210407 - DNA, 20 bp, Artificial Sequence
  Description of Artificial Sequence: Synthetic oligonucleotide
  Target: LAMA2; (-) strand; PAM type: YTN; PAM sequence: TTT
ttcaatagtaagtaaataat

SEQ ID NO: 210408 - DNA, 20 bp, Artificial Sequence
  Description of Artificial Sequence: Synthetic oligonucleotide
  Target: LAMA2; (-) strand; PAM type: YTN; PAM sequence: CTT
tttcaatagtaagtaaataa

SEQ ID NO: 210409 - DNA, 20 bp, Artificial Sequence
  Description of Artificial Sequence: Synthetic oligonucleotide
  Target: LAMA2; (-) strand; PAM type: YTN; PAM sequence: TTC
cataatacactttttcaata

SEQ ID NO: 210410 - DNA, 20 bp, Artificial Sequence
  Description of Artificial Sequence: Synthetic oligonucleotide
  Target: LAMA2; (-) strand; PAM type: YTN; PAM sequence: CTT
ccataatacactttttcaat

SEQ ID NO: 210411 - DNA, 20 bp, Artificial Sequence
  Description of Artificial Sequence: Synthetic oligonucleotide
  Target: LAMA2; (-) strand; PAM type: YTN; PAM sequence: TTA
tcttccataatacacttttt

SEQ ID NO: 210412 - DNA, 20 bp, Artificial Sequence
  Description of Artificial Sequence: Synthetic oligonucleotide
  Target: LAMA2; (-) strand; PAM type: YTN; PAM sequence: TTT
atcttccataatacactttt

SEQ ID NO: 210413 - DNA, 20 bp, Artificial Sequence
  Description of Artificial Sequence: Synthetic oligonucleotide
  Target: LAMA2; (-) strand; PAM type: YTN; PAM sequence: TTT
tatcttccataatacacttt

SEQ ID NO: 210414 - DNA, 20 bp, Artificial Sequence
  Description of Artificial Sequence: Synthetic oligonucleotide
  Target: LAMA2; (-) strand; PAM type: YTN; PAM sequence: CTT
ttatcttccataatacactt

SEQ ID NO: 210415 - DNA, 20 bp, Artificial Sequence
  Description of Artificial Sequence: Synthetic oligonucleotide
  Target: LAMA2; (-) strand; PAM type: YTN; PAM sequence: CTG
acagagatgaaaacctttta

SEQ ID NO: 210416 - DNA, 20 bp, Artificial Sequence
  Description of Artificial Sequence: Synthetic oligonucleotide
  Target: LAMA2; (-) strand; PAM type: YTN; PAM sequence: CTG
tcgtatctgacagagatgaa

SEQ ID NO: 210417 - DNA, 20 bp, Artificial Sequence
  Description of Artificial Sequence: Synthetic oligonucleotide
  Target: LAMA2; (-) strand; PAM type: YTN; PAM sequence: TTC
acctgtcgtatctgacagag

SEQ ID NO: 210418 - DNA, 20 bp, Artificial Sequence
  Description of Artificial Sequence: Synthetic oligonucleotide
  Target: LAMA2; (-) strand; PAM type: YTN; PAM sequence: TTA
ccaaagttcacctgtcgtat

SEQ ID NO: 210419 - DNA, 20 bp, Artificial Sequence
  Description of Artificial Sequence: Synthetic oligonucleotide
  Target: LAMA2; (-) strand; PAM type: YTN; PAM sequence: TTA
tgttaccaaagttcacctgt

SEQ ID NO: 210420 - DNA, 20 bp, Artificial Sequence
  Description of Artificial Sequence: Synthetic oligonucleotide
  Target: LAMA2; (-) strand; PAM type: YTN; PAM sequence: CTT
atgttaccaaagttcacctg

SEQ ID NO: 210421 - DNA, 20 bp, Artificial Sequence
  Description of Artificial Sequence: Synthetic oligonucleotide
  Target: LAMA2; (-) strand; PAM type: YTN; PAM sequence: CTA
ggccttatgttaccaaagtt

SEQ ID NO: 210422 - DNA, 20 bp, Artificial Sequence
  Description of Artificial Sequence: Synthetic oligonucleotide
  Target: LAMA2; (-) strand; PAM type: YTN; PAM sequence: TTG
ctaggccttatgttaccaaa

SEQ ID NO: 210423 - DNA, 20 bp, Artificial Sequence
  Description of Artificial Sequence: Synthetic oligonucleotide
  Target: LAMA2; (-) strand; PAM type: YTN; PAM sequence: TTT
gctaggccttatgttaccaa

SEQ ID NO: 210424 - DNA, 20 bp, Artificial Sequence
  Description of Artificial Sequence: Synthetic oligonucleotide
  Target: LAMA2; (-) strand; PAM type: YTN; PAM sequence: CTT
tgctaggccttatgttacca

SEQ ID NO: 210425 - DNA, 20 bp, Artificial Sequence
  Description of Artificial Sequence: Synthetic oligonucleotide
  Target: LAMA2; (-) strand; PAM type: YTN; PAM sequence: TTA
tatatatatatatgtaagat

SEQ ID NO: 210426 - DNA, 20 bp, Artificial Sequence
  Description of Artificial Sequence: Synthetic oligonucleotide
  Target: LAMA2; (-) strand; PAM type: YTN; PAM sequence: TTT
atatatatatatatgtaaga

SEQ ID NO: 210427 - DNA, 20 bp, Artificial Sequence
  Description of Artificial Sequence: Synthetic oligonucleotide
  Target: LAMA2; (-) strand; PAM type: YTN; PAM sequence: TTT
tatatatatatatatgtaag

SEQ ID NO: 210428 - DNA, 20 bp, Artificial Sequence
  Description of Artificial Sequence: Synthetic oligonucleotide
  Target: LAMA2; (-) strand; PAM type: YTN; PAM sequence: TTA
tgaaaaaccattttatatat

SEQ ID NO: 210429 - DNA, 20 bp, Artificial Sequence
  Description of Artificial Sequence: Synthetic oligonucleotide
  Target: LAMA2; (-) strand; PAM type: YTN; PAM sequence: TTG
gatgatgcatcccatgaaat

SEQ ID NO: 210430 - DNA, 20 bp, Artificial Sequence
  Description of Artificial Sequence: Synthetic oligonucleotide
  Target: LAMA2; (-) strand; PAM type: YTN; PAM sequence: CTT
ggatgatgcatcccatgaaa

SEQ ID NO: 210431 - DNA, 20 bp, Artificial Sequence
  Description of Artificial Sequence: Synthetic oligonucleotide
  Target: LAMA2; (-) strand; PAM type: YTN; PAM sequence: CTC
ttggatgatgcatcccatga

SEQ ID NO: 210432 - DNA, 20 bp, Artificial Sequence
  Description of Artificial Sequence: Synthetic oligonucleotide
  Target: LAMA2; (-) strand; PAM type: YTN; PAM sequence: TTC
tcttggatgatgcatcccat

SEQ ID NO: 210433 - DNA, 20 bp, Artificial Sequence
  Description of Artificial Sequence: Synthetic oligonucleotide
  Target: LAMA2; (-) strand; PAM type: YTN; PAM sequence: CTG
tgatcattctcttggatgat

SEQ ID NO: 210434 - DNA, 20 bp, Artificial Sequence
  Description of Artificial Sequence: Synthetic oligonucleotide
  Target: LAMA2; (-) strand; PAM type: YTN; PAM sequence: TTA
gtatcactgtgatcattctc

SEQ ID NO: 210435 - DNA, 20 bp, Artificial Sequence
  Description of Artificial Sequence: Synthetic oligonucleotide
  Target: LAMA2; (-) strand; PAM type: YTN; PAM sequence: CTA
gtcaatggcagtaattagta

SEQ ID NO: 210436 - DNA, 20 bp, Artificial Sequence
  Description of Artificial Sequence: Synthetic oligonucleotide
  Target: LAMA2; (-) strand; PAM type: YTN; PAM sequence: CTG
gcatgtggcaggtggctagt

SEQ ID NO: 210437 - DNA, 20 bp, Artificial Sequence
  Description of Artificial Sequence: Synthetic oligonucleotide
  Target: LAMA2; (-) strand; PAM type: YTN; PAM sequence: TTA
tcatcagccatgtcaccatg

SEQ ID NO: 210438 - DNA, 20 bp, Artificial Sequence
  Description of Artificial Sequence: Synthetic oligonucleotide
  Target: LAMA2; (-) strand; PAM type: YTN; PAM sequence: CTA
tcacatgttatcatcagcca

SEQ ID NO: 210439 - DNA, 20 bp, Artificial Sequence
  Description of Artificial Sequence: Synthetic oligonucleotide
  Target: LAMA2; (-) strand; PAM type: YTN; PAM sequence: TTG
ggaaacacctatcacatgtt

SEQ ID NO: 210440 - DNA, 20 bp, Artificial Sequence
  Description of Artificial Sequence: Synthetic oligonucleotide
  Target: LAMA2; (-) strand; PAM type: YTN; PAM sequence: CTT
gggaaacacctatcacatgt

SEQ ID NO: 210441 - DNA, 20 bp, Artificial Sequence
  Description of Artificial Sequence: Synthetic oligonucleotide
  Target: LAMA2; (-) strand; PAM type: YTN; PAM sequence: CTC
ttgggaaacacctatcacat

SEQ ID NO: 210442 - DNA, 20 bp, Artificial Sequence
  Description of Artificial Sequence: Synthetic oligonucleotide
  Target: LAMA2; (-) strand; PAM type: YTN; PAM sequence: CTC
tcttgggaaacacctatcac

SEQ ID NO: 210443 - DNA, 20 bp, Artificial Sequence
  Description of Artificial Sequence: Synthetic oligonucleotide
  Target: LAMA2; (-) strand; PAM type: YTN; PAM sequence: TTA
aagggactctcttgggaaac

SEQ ID NO: 210444 - DNA, 20 bp, Artificial Sequence
  Description of Artificial Sequence: Synthetic oligonucleotide
  Target: LAMA2; (-) strand; PAM type: YTN; PAM sequence: TTT
aaagggactctcttgggaaa

SEQ ID NO: 210445 - DNA, 20 bp, Artificial Sequence
  Description of Artificial Sequence: Synthetic oligonucleotide
  Target: LAMA2; (-) strand; PAM type: YTN; PAM sequence: TTG
tttaaagggactctcttggg

SEQ ID NO: 210446 - DNA, 20 bp, Artificial Sequence
  Description of Artificial Sequence: Synthetic oligonucleotide
  Target: LAMA2; (-) strand; PAM type: YTN; PAM sequence: CTT
gtttaaagggactctcttgg

SEQ ID NO: 210447 - DNA, 20 bp, Artificial Sequence
  Description of Artificial Sequence: Synthetic oligonucleotide
  Target: LAMA2; (-) strand; PAM type: YTN; PAM sequence: TTC
atcaatatgaagacaggaaa

SEQ ID NO: 210448 - DNA, 20 bp, Artificial Sequence
  Description of Artificial Sequence: Synthetic oligonucleotide
  Target: LAMA2; (-) strand; PAM type: YTN; PAM sequence: CTT
catcaatatgaagacaggaa

SEQ ID NO: 210449 - DNA, 20 bp, Artificial Sequence
  Description of Artificial Sequence: Synthetic oligonucleotide
  Target: LAMA2; (-) strand; PAM type: YTN; PAM sequence: TTA
gaaaaaacacttcatcaata

SEQ ID NO: 210450 - DNA, 20 bp, Artificial Sequence
  Description of Artificial Sequence: Synthetic oligonucleotide
  Target: LAMA2; (-) strand; PAM type: YTN; PAM sequence: TTC
atagaataaatgaaataatg

SEQ ID NO: 210451 - DNA, 20 bp, Artificial Sequence
  Description of Artificial Sequence: Synthetic oligonucleotide
  Target: LAMA2; (-) strand; PAM type: YTN; PAM sequence: TTT
catagaataaatgaaataat

SEQ ID NO: 210452 - DNA, 20 bp, Artificial Sequence
  Description of Artificial Sequence: Synthetic oligonucleotide
  Target: LAMA2; (-) strand; PAM type: YTN; PAM sequence: CTT
tcatagaataaatgaaataa

SEQ ID NO: 210453 - DNA, 20 bp, Artificial Sequence
  Description of Artificial Sequence: Synthetic oligonucleotide
  Target: LAMA2; (-) strand; PAM type: YTN; PAM sequence: TTG
tctttcatagaataaatgaa

SEQ ID NO: 210454 - DNA, 20 bp, Artificial Sequence
  Description of Artificial Sequence: Synthetic oligonucleotide
  Target: LAMA2; (-) strand; PAM type: YTN; PAM sequence: TTT
gtctttcatagaataaatga

SEQ ID NO: 210455 - DNA, 20 bp, Artificial Sequence
  Description of Artificial Sequence: Synthetic oligonucleotide
  Target: LAMA2; (-) strand; PAM type: YTN; PAM sequence: TTT
tgtctttcatagaataaatg

SEQ ID NO: 210456 - DNA, 20 bp, Artificial Sequence
  Description of Artificial Sequence: Synthetic oligonucleotide
  Target: LAMA2; (-) strand; PAM type: YTN; PAM sequence: TTA
aaatgccaattttgtctttc

SEQ ID NO: 210457 - DNA, 20 bp, Artificial Sequence
  Description of Artificial Sequence: Synthetic oligonucleotide
  Target: LAMA2; (-) strand; PAM type: YTN; PAM sequence: TTT
aaaatgccaattttgtcttt

SEQ ID NO: 210458 - DNA, 20 bp, Artificial Sequence
  Description of Artificial Sequence: Synthetic oligonucleotide
  Target: LAMA2; (-) strand; PAM type: YTN; PAM sequence: TTT
taaaatgccaattttgtctt

SEQ ID NO: 210459 - DNA, 20 bp, Artificial Sequence
  Description of Artificial Sequence: Synthetic oligonucleotide
  Target: LAMA2; (-) strand; PAM type: YTN; PAM sequence: CTT
ttaaaatgccaattttgtct

SEQ ID NO: 210460 - DNA, 20 bp, Artificial Sequence
  Description of Artificial Sequence: Synthetic oligonucleotide
  Target: LAMA2; (-) strand; PAM type: YTN; PAM sequence: CTA
cttttaaaatgccaattttg

SEQ ID NO: 210461 - DNA, 20 bp, Artificial Sequence
  Description of Artificial Sequence: Synthetic oligonucleotide
  Target: LAMA2; (-) strand; PAM type: YTN; PAM sequence: TTC
tacttttaaaatgccaattt

SEQ ID NO: 210462 - DNA, 20 bp, Artificial Sequence
  Description of Artificial Sequence: Synthetic oligonucleotide
  Target: LAMA2; (-) strand; PAM type: YTN; PAM sequence: CTC
agatgacaggtatcaaaaga

SEQ ID NO: 210463 - DNA, 20 bp, Artificial Sequence
  Description of Artificial Sequence: Synthetic oligonucleotide
  Target: LAMA2; (-) strand; PAM type: YTN; PAM sequence: TTG
ggtatctcagatgacaggta

SEQ ID NO: 210464 - DNA, 20 bp, Artificial Sequence
  Description of Artificial Sequence: Synthetic oligonucleotide
  Target: LAMA2; (-) strand; PAM type: YTN; PAM sequence: TTT
gggtatctcagatgacaggt

SEQ ID NO: 210465 - DNA, 20 bp, Artificial Sequence
  Description of Artificial Sequence: Synthetic oligonucleotide
  Target: LAMA2; (-) strand; PAM type: YTN; PAM sequence: CTT
tgggtatctcagatgacagg

SEQ ID NO: 210466 - DNA, 20 bp, Artificial Sequence
  Description of Artificial Sequence: Synthetic oligonucleotide
  Target: LAMA2; (-) strand; PAM type: YTN; PAM sequence: TTA
aaaaaaaaatcctttgggta

SEQ ID NO: 210467 - DNA, 20 bp, Artificial Sequence
  Description of Artificial Sequence: Synthetic oligonucleotide
  Target: LAMA2; (-) strand; PAM type: YTN; PAM sequence: CTT
aaaaaaaaaatcctttgggt

SEQ ID NO: 210468 - DNA, 20 bp, Artificial Sequence
  Description of Artificial Sequence: Synthetic oligonucleotide
  Target: LAMA2; (-) strand; PAM type: YTN; PAM sequence: CTA
acttaaaaaaaaaatccttt

SEQ ID NO: 210469 - DNA, 20 bp, Artificial Sequence
  Description of Artificial Sequence: Synthetic oligonucleotide
  Target: LAMA2; (-) strand; PAM type: YTN; PAM sequence: TTG
atgctaacttaaaaaaaaaa

SEQ ID NO: 210470 - DNA, 20 bp, Artificial Sequence
  Description of Artificial Sequence: Synthetic oligonucleotide
  Target: LAMA2; (-) strand; PAM type: YTN; PAM sequence: CTT
gatgctaacttaaaaaaaaa

SEQ ID NO: 210471 - DNA, 20 bp, Artificial Sequence
  Description of Artificial Sequence: Synthetic oligonucleotide
  Target: LAMA2; (-) strand; PAM type: YTN; PAM sequence: TTA
cccttgatgctaacttaaaa

SEQ ID NO: 210472 - DNA, 20 bp, Artificial Sequence
  Description of Artificial Sequence: Synthetic oligonucleotide
  Target: LAMA2; (-) strand; PAM type: YTN; PAM sequence: TTT
acccttgatgctaacttaaa

SEQ ID NO: 210473 - DNA, 20 bp, Artificial Sequence
  Description of Artificial Sequence: Synthetic oligonucleotide
  Target: LAMA2; (-) strand; PAM type: YTN; PAM sequence: TTA
tttacccttgatgctaactt

SEQ ID NO: 210474 - DNA, 20 bp, Artificial Sequence
  Description of Artificial Sequence: Synthetic oligonucleotide
  Target: LAMA2; (-) strand; PAM type: YTN; PAM sequence: TTA
ttatttacccttgatgctaa

SEQ ID NO: 210475 - DNA, 20 bp, Artificial Sequence
  Description of Artificial Sequence: Synthetic oligonucleotide
  Target: LAMA2; (-) strand; PAM type: YTN; PAM sequence: TTG
ttattatttacccttgatgc

SEQ ID NO: 210476 - DNA, 20 bp, Artificial Sequence
  Description of Artificial Sequence: Synthetic oligonucleotide
  Target: LAMA2; (-) strand; PAM type: YTN; PAM sequence: TTT
gttattatttacccttgatg

SEQ ID NO: 210477 - DNA, 20 bp, Artificial Sequence
  Description of Artificial Sequence: Synthetic oligonucleotide
  Target: LAMA2; (-) strand; PAM type: YTN; PAM sequence: TTC
atttgttattatttaccctt

SEQ ID NO: 210478 - DNA, 20 bp, Artificial Sequence
  Description of Artificial Sequence: Synthetic oligonucleotide
  Target: LAMA2; (-) strand; PAM type: YTN; PAM sequence: CTT
catttgttattatttaccct

SEQ ID NO: 210479 - DNA, 20 bp, Artificial Sequence
  Description of Artificial Sequence: Synthetic oligonucleotide
  Target: LAMA2; (-) strand; PAM type: YTN; PAM sequence: CTA
acataaaataacttcatttg

SEQ ID NO: 210480 - DNA, 20 bp, Artificial Sequence
  Description of Artificial Sequence: Synthetic oligonucleotide
  Target: LAMA2; (-) strand; PAM type: YTN; PAM sequence: CTA
caagatctaacataaaataa

SEQ ID NO: 210481 - DNA, 20 bp, Artificial Sequence
  Description of Artificial Sequence: Synthetic oligonucleotide
  Target: LAMA2; (-) strand; PAM type: YTN; PAM sequence: TTA
gacctacaagatctaacata

SEQ ID NO: 210482 - DNA, 20 bp, Artificial Sequence
  Description of Artificial Sequence: Synthetic oligonucleotide
  Target: LAMA2; (-) strand; PAM type: YTN; PAM sequence: TTT
agacctacaagatctaacat

SEQ ID NO: 210483 - DNA, 20 bp, Artificial Sequence
  Description of Artificial Sequence: Synthetic oligonucleotide
  Target: LAMA2; (-) strand; PAM type: YTN; PAM sequence: CTG
tgcatatatttagacctaca

SEQ ID NO: 210484 - DNA, 20 bp, Artificial Sequence
  Description of Artificial Sequence: Synthetic oligonucleotide
  Target: LAMA2; (-) strand; PAM type: YTN; PAM sequence: TTG
ctgtgcatatatttagacct

SEQ ID NO: 210485 - DNA, 20 bp, Artificial Sequence
  Description of Artificial Sequence: Synthetic oligonucleotide
  Target: LAMA2; (-) strand; PAM type: YTN; PAM sequence: TTA
aatattgctgtgcatatatt

SEQ ID NO: 210486 - DNA, 20 bp, Artificial Sequence
  Description of Artificial Sequence: Synthetic oligonucleotide
  Target: LAMA2; (-) strand; PAM type: YTN; PAM sequence: TTC
aggatgttaaatattgctgt

SEQ ID NO: 210487 - DNA, 20 bp, Artificial Sequence
  Description of Artificial Sequence: Synthetic oligonucleotide
  Target: LAMA2; (-) strand; PAM type: YTN; PAM sequence: TTT
caggatgttaaatattgctg

SEQ ID NO: 210488 - DNA, 20 bp, Artificial Sequence
  Description of Artificial Sequence: Synthetic oligonucleotide
  Target: LAMA2; (-) strand; PAM type: YTN; PAM sequence: CTG
atttcaggatgttaaatatt

SEQ ID NO: 210489 - DNA, 20 bp, Artificial Sequence
  Description of Artificial Sequence: Synthetic oligonucleotide
  Target: LAMA2; (-) strand; PAM type: YTN; PAM sequence: TTC
tgatttcaggatgttaaata

SEQ ID NO: 210490 - DNA, 20 bp, Artificial Sequence
  Description of Artificial Sequence: Synthetic oligonucleotide
  Target: LAMA2; (-) strand; PAM type: YTN; PAM sequence: TTT
ctgatttcaggatgttaaat

SEQ ID NO: 210491 - DNA, 20 bp, Artificial Sequence
  Description of Artificial Sequence: Synthetic oligonucleotide
  Target: LAMA2; (-) strand; PAM type: YTN; PAM sequence: TTC
aaatcacataatggaaagag

SEQ ID NO: 210492 - DNA, 20 bp, Artificial Sequence
  Description of Artificial Sequence: Synthetic oligonucleotide
  Target: LAMA2; (-) strand; PAM type: YTN; PAM sequence: TTT
caaatcacataatggaaaga

SEQ ID NO: 210493 - DNA, 20 bp, Artificial Sequence
  Description of Artificial Sequence: Synthetic oligonucleotide
  Target: LAMA2; (-) strand; PAM type: YTN; PAM sequence: CTA
aaatgtttcaaatcacataa

SEQ ID NO: 210494 - DNA, 20 bp, Artificial Sequence
  Description of Artificial Sequence: Synthetic oligonucleotide
  Target: LAMA2; (-) strand; PAM type: YTN; PAM sequence: TTC
catgcaaagtagacaggaaa

SEQ ID NO: 210495 - DNA, 20 bp, Artificial Sequence
  Description of Artificial Sequence: Synthetic oligonucleotide
  Target: LAMA2; (-) strand; PAM type: YTN; PAM sequence: TTT
ccatgcaaagtagacaggaa

SEQ ID NO: 210496 - DNA, 20 bp, Artificial Sequence
  Description of Artificial Sequence: Synthetic oligonucleotide
  Target: LAMA2; (-) strand; PAM type: YTN; PAM sequence: TTT
tccatgcaaagtagacagga

SEQ ID NO: 210497 - DNA, 20 bp, Artificial Sequence
  Description of Artificial Sequence: Synthetic oligonucleotide
  Target: LAMA2; (-) strand; PAM type: YTN; PAM sequence: TTT
ttccatgcaaagtagacagg

SEQ ID NO: 210498 - DNA, 20 bp, Artificial Sequence
  Description of Artificial Sequence: Synthetic oligonucleotide
  Target: LAMA2; (-) strand; PAM type: YTN; PAM sequence: TTT
tttccatgcaaagtagacag

SEQ ID NO: 210499 - DNA, 20 bp, Artificial Sequence
  Description of Artificial Sequence: Synthetic oligonucleotide
  Target: LAMA2; (-) strand; PAM type: YTN; PAM sequence: CTG
tagttttttccatgcaaagt

SEQ ID NO: 210500 - DNA, 20 bp, Artificial Sequence
  Description of Artificial Sequence: Synthetic oligonucleotide
  Target: LAMA2; (-) strand; PAM type: YTN; PAM sequence: TTG
acaaagtctgtagttttttc

SEQ ID NO: 210501 - DNA, 20 bp, Artificial Sequence
  Description of Artificial Sequence: Synthetic oligonucleotide
  Target: LAMA2; (-) strand; PAM type: YTN; PAM sequence: TTT
gacaaagtctgtagtttttt

SEQ ID NO: 210502 - DNA, 20 bp, Artificial Sequence
  Description of Artificial Sequence: Synthetic oligonucleotide
  Target: LAMA2; (-) strand; PAM type: YTN; PAM sequence: CTA
gatttgacaaagtctgtagt

SEQ ID NO: 210503 - DNA, 20 bp, Artificial Sequence
  Description of Artificial Sequence: Synthetic oligonucleotide
  Target: LAMA2; (-) strand; PAM type: YTN; PAM sequence: TTC
caaggcaactagatttgaca

SEQ ID NO: 210504 - DNA, 20 bp, Artificial Sequence
  Description of Artificial Sequence: Synthetic oligonucleotide
  Target: LAMA2; (-) strand; PAM type: YTN; PAM sequence: CTT
ccaaggcaactagatttgac

SEQ ID NO: 210505 - DNA, 20 bp, Artificial Sequence
  Description of Artificial Sequence: Synthetic oligonucleotide
  Target: LAMA2; (-) strand; PAM type: YTN; PAM sequence: TTC
ttccaaggcaactagatttg

SEQ ID NO: 210506 - DNA, 20 bp, Artificial Sequence
  Description of Artificial Sequence: Synthetic oligonucleotide
  Target: LAMA2; (-) strand; PAM type: YTN; PAM sequence: CTT
cttccaaggcaactagattt

SEQ ID NO: 210507 - DNA, 20 bp, Artificial Sequence
  Description of Artificial Sequence: Synthetic oligonucleotide
  Target: LAMA2; (-) strand; PAM type: YTN; PAM sequence: TTC
ttcttccaaggcaactagat

SEQ ID NO: 210508 - DNA, 20 bp, Artificial Sequence
  Description of Artificial Sequence: Synthetic oligonucleotide
  Target: LAMA2; (-) strand; PAM type: YTN; PAM sequence: TTC
attcttcttccaaggcaact

SEQ ID NO: 210509 - DNA, 20 bp, Artificial Sequence
  Description of Artificial Sequence: Synthetic oligonucleotide
  Target: LAMA2; (-) strand; PAM type: YTN; PAM sequence: TTA
ttcattcttcttccaaggca

SEQ ID NO: 210510 - DNA, 20 bp, Artificial Sequence
  Description of Artificial Sequence: Synthetic oligonucleotide
  Target: LAMA2; (-) strand; PAM type: YTN; PAM sequence: CTT
attcattcttcttccaaggc

SEQ ID NO: 210511 - DNA, 20 bp, Artificial Sequence
  Description of Artificial Sequence: Synthetic oligonucleotide
  Target: LAMA2; (-) strand; PAM type: YTN; PAM sequence: CTC
ttattcattcttcttccaag

SEQ ID NO: 210512 - DNA, 20 bp, Artificial Sequence
  Description of Artificial Sequence: Synthetic oligonucleotide
  Target: LAMA2; (-) strand; PAM type: YTN; PAM sequence: CTC
ctcttattcattcttcttcc

SEQ ID NO: 210513 - DNA, 20 bp, Artificial Sequence
  Description of Artificial Sequence: Synthetic oligonucleotide
  Target: LAMA2; (-) strand; PAM type: YTN; PAM sequence: TTA
acacatctcctcttattcat

SEQ ID NO: 210514 - DNA, 20 bp, Artificial Sequence
  Description of Artificial Sequence: Synthetic oligonucleotide
  Target: LAMA2; (-) strand; PAM type: YTN; PAM sequence: TTT
aacacatctcctcttattca

SEQ ID NO: 210515 - DNA, 20 bp, Artificial Sequence
  Description of Artificial Sequence: Synthetic oligonucleotide
  Target: LAMA2; (-) strand; PAM type: YTN; PAM sequence: TTG
tttaacacatctcctcttat

SEQ ID NO: 210516 - DNA, 20 bp, Artificial Sequence
  Description of Artificial Sequence: Synthetic oligonucleotide
  Target: LAMA2; (-) strand; PAM type: YTN; PAM sequence: TTG
tattgtttaacacatctcct

SEQ ID NO: 210517 - DNA, 20 bp, Artificial Sequence
  Description of Artificial Sequence: Synthetic oligonucleotide
  Target: LAMA2; (-) strand; PAM type: YTN; PAM sequence: TTT
gtattgtttaacacatctcc

SEQ ID NO: 210518 - DNA, 20 bp, Artificial Sequence
  Description of Artificial Sequence: Synthetic oligonucleotide
  Target: LAMA2; (-) strand; PAM type: YTN; PAM sequence: TTT
tgtattgtttaacacatctc

SEQ ID NO: 210519 - DNA, 20 bp, Artificial Sequence
  Description of Artificial Sequence: Synthetic oligonucleotide
  Target: LAMA2; (-) strand; PAM type: YTN; PAM sequence: TTG
aaatagcaaaaatattttgt

SEQ ID NO: 210520 - DNA, 20 bp, Artificial Sequence
  Description of Artificial Sequence: Synthetic oligonucleotide
  Target: LAMA2; (-) strand; PAM type: YTN; PAM sequence: CTT
gaaatagcaaaaatattttg

SEQ ID NO: 210521 - DNA, 20 bp, Artificial Sequence
  Description of Artificial Sequence: Synthetic oligonucleotide
  Target: LAMA2; (-) strand; PAM type: YTN; PAM sequence: TTC
aaacttgaaatagcaaaaat

SEQ ID NO: 210522 - DNA, 20 bp, Artificial Sequence
  Description of Artificial Sequence: Synthetic oligonucleotide
  Target: LAMA2; (-) strand; PAM type: YTN; PAM sequence: TTC
aaaatcaattcaaacttgaa

SEQ ID NO: 210523 - DNA, 20 bp, Artificial Sequence
  Description of Artificial Sequence: Synthetic oligonucleotide
  Target: LAMA2; (-) strand; PAM type: YTN; PAM sequence: TTT
caaaatcaattcaaacttga

SEQ ID NO: 210524 - DNA, 20 bp, Artificial Sequence
  Description of Artificial Sequence: Synthetic oligonucleotide
  Target: LAMA2; (-) strand; PAM type: YTN; PAM sequence: TTA
tttcaaaatcaattcaaact

SEQ ID NO: 210525 - DNA, 20 bp, Artificial Sequence
  Description of Artificial Sequence: Synthetic oligonucleotide
  Target: LAMA2; (-) strand; PAM type: YTN; PAM sequence: CTA
ttatttcaaaatcaattcaa

SEQ ID NO: 210526 - DNA, 20 bp, Artificial Sequence
  Description of Artificial Sequence: Synthetic oligonucleotide
  Target: LAMA2; (-) strand; PAM type: YTN; PAM sequence: CTG
aaactattatttcaaaatca

SEQ ID NO: 210527 - DNA, 20 bp, Artificial Sequence
  Description of Artificial Sequence: Synthetic oligonucleotide
  Target: LAMA2; (-) strand; PAM type: YTN; PAM sequence: TTA
gcctgaaactattatttcaa

SEQ ID NO: 210528 - DNA, 20 bp, Artificial Sequence
  Description of Artificial Sequence: Synthetic oligonucleotide
  Target: LAMA2; (-) strand; PAM type: YTN; PAM sequence: TTT
agcctgaaactattatttca

SEQ ID NO: 210529 - DNA, 20 bp, Artificial Sequence
  Description of Artificial Sequence: Synthetic oligonucleotide
  Target: LAMA2; (-) strand; PAM type: YTN; PAM sequence: TTA
tttagcctgaaactattatt

SEQ ID NO: 210530 - DNA, 20 bp, Artificial Sequence
  Description of Artificial Sequence: Synthetic oligonucleotide
  Target: LAMA2; (-) strand; PAM type: YTN; PAM sequence: TTA
ttatttagcctgaaactatt

SEQ ID NO: 210531 - DNA, 20 bp, Artificial Sequence
  Description of Artificial Sequence: Synthetic oligonucleotide
  Target: LAMA2; (-) strand; PAM type: YTN; PAM sequence: TTT
attatttagcctgaaactat

SEQ ID NO: 210532 - DNA, 20 bp, Artificial Sequence
  Description of Artificial Sequence: Synthetic oligonucleotide
  Target: LAMA2; (-) strand; PAM type: YTN; PAM sequence: CTA
aaaagacagtttattattta

SEQ ID NO: 210533 - DNA, 20 bp, Artificial Sequence
  Description of Artificial Sequence: Synthetic oligonucleotide
  Target: LAMA2; (-) strand; PAM type: YTN; PAM sequence: TTC
ctaaaaagacagtttattat

SEQ ID NO: 210534 - DNA, 20 bp, Artificial Sequence
  Description of Artificial Sequence: Synthetic oligonucleotide
  Target: LAMA2; (-) strand; PAM type: YTN; PAM sequence: TTT
cctaaaaagacagtttatta

SEQ ID NO: 210535 - DNA, 20 bp, Artificial Sequence
  Description of Artificial Sequence: Synthetic oligonucleotide
  Target: LAMA2; (-) strand; PAM type: YTN; PAM sequence: TTG
tttcctaaaaagacagttta

SEQ ID NO: 210536 - DNA, 20 bp, Artificial Sequence
  Description of Artificial Sequence: Synthetic oligonucleotide
  Target: LAMA2; (-) strand; PAM type: YTN; PAM sequence: TTT
gtttcctaaaaagacagttt

SEQ ID NO: 210537 - DNA, 20 bp, Artificial Sequence
  Description of Artificial Sequence: Synthetic oligonucleotide
  Target: LAMA2; (-) strand; PAM type: YTN; PAM sequence: TTT
tgtttcctaaaaagacagtt

SEQ ID NO: 210538 - DNA, 20 bp, Artificial Sequence
  Description of Artificial Sequence: Synthetic oligonucleotide
  Target: LAMA2; (-) strand; PAM type: YTN; PAM sequence: CTT
ttgtttcctaaaaagacagt

SEQ ID NO: 210539 - DNA, 20 bp, Artificial Sequence
  Description of Artificial Sequence: Synthetic oligonucleotide
  Target: LAMA2; (-) strand; PAM type: YTN; PAM sequence: TTC
ttttgtttcctaaaaagaca

SEQ ID NO: 210540 - DNA, 20 bp, Artificial Sequence
  Description of Artificial Sequence: Synthetic oligonucleotide
  Target: LAMA2; (-) strand; PAM type: YTN; PAM sequence: CTT
cttttgtttcctaaaaagac

SEQ ID NO: 210541 - DNA, 20 bp, Artificial Sequence
  Description of Artificial Sequence: Synthetic oligonucleotide
  Target: LAMA2; (-) strand; PAM type: YTN; PAM sequence: CTA
aaatacttcttttgtttcct

SEQ ID NO: 210542 - DNA, 20 bp, Artificial Sequence
  Description of Artificial Sequence: Synthetic oligonucleotide
  Target: LAMA2; (-) strand; PAM type: YTN; PAM sequence: TTC
taaaatacttcttttgtttc

SEQ ID NO: 210543 - DNA, 20 bp, Artificial Sequence
  Description of Artificial Sequence: Synthetic oligonucleotide
  Target: LAMA2; (-) strand; PAM type: YTN; PAM sequence: TTT
ctaaaatacttcttttgttt

SEQ ID NO: 210544 - DNA, 20 bp, Artificial Sequence
  Description of Artificial Sequence: Synthetic oligonucleotide
  Target: LAMA2; (-) strand; PAM type: YTN; PAM sequence: TTT
tctaaaatacttcttttgtt

SEQ ID NO: 210545 - DNA, 20 bp, Artificial Sequence
  Description of Artificial Sequence: Synthetic oligonucleotide
  Target: LAMA2; (-) strand; PAM type: YTN; PAM sequence: TTT
ttctaaaatacttcttttgt

SEQ ID NO: 210546 - DNA, 20 bp, Artificial Sequence
  Description of Artificial Sequence: Synthetic oligonucleotide
  Target: LAMA2; (-) strand; PAM type: YTN; PAM sequence: CTT
tttctaaaatacttcttttg

SEQ ID NO: 210547 - DNA, 20 bp, Artificial Sequence
  Description of Artificial Sequence: Synthetic oligonucleotide
  Target: LAMA2; (-) strand; PAM type: YTN; PAM sequence: TTA
atgtctttttctaaaatact

SEQ ID NO: 210548 - DNA, 20 bp, Artificial Sequence
  Description of Artificial Sequence: Synthetic oligonucleotide
  Target: LAMA2; (-) strand; PAM type: YTN; PAM sequence: TTT
aatgtctttttctaaaatac

SEQ ID NO: 210549 - DNA, 20 bp, Artificial Sequence
  Description of Artificial Sequence: Synthetic oligonucleotide
  Target: LAMA2; (-) strand; PAM type: YTN; PAM sequence: TTT
taatgtctttttctaaaata

SEQ ID NO: 210550 - DNA, 20 bp, Artificial Sequence
  Description of Artificial Sequence: Synthetic oligonucleotide
  Target: LAMA2; (-) strand; PAM type: YTN; PAM sequence: TTT
ttaatgtctttttctaaaat

SEQ ID NO: 210551 - DNA, 20 bp, Artificial Sequence
  Description of Artificial Sequence: Synthetic oligonucleotide
  Target: LAMA2; (-) strand; PAM type: YTN; PAM sequence: CTT
tttaatgtctttttctaaaa

SEQ ID NO: 210552 - DNA, 20 bp, Artificial Sequence
  Description of Artificial Sequence: Synthetic oligonucleotide
  Target: LAMA2; (-) strand; PAM type: YTN; PAM sequence: TTA
ataaagtctttttaatgtct

SEQ ID NO: 210553 - DNA, 20 bp, Artificial Sequence
  Description of Artificial Sequence: Synthetic oligonucleotide
  Target: LAMA2; (-) strand; PAM type: YTN; PAM sequence: TTT
aataaagtctttttaatgtc

SEQ ID NO: 210554 - DNA, 20 bp, Artificial Sequence
  Description of Artificial Sequence: Synthetic oligonucleotide
  Target: LAMA2; (-) strand; PAM type: YTN; PAM sequence: TTT
taataaagtctttttaatgt

SEQ ID NO: 210555 - DNA, 20 bp, Artificial Sequence
  Description of Artificial Sequence: Synthetic oligonucleotide
  Target: LAMA2; (-) strand; PAM type: YTN; PAM sequence: CTA
ttttaataaagtctttttaa

SEQ ID NO: 210556 - DNA, 20 bp, Artificial Sequence
  Description of Artificial Sequence: Synthetic oligonucleotide
  Target: LAMA2; (-) strand; PAM type: YTN; PAM sequence: CTC
tattttaataaagtcttttt

SEQ ID NO: 210557 - DNA, 20 bp, Artificial Sequence
  Description of Artificial Sequence: Synthetic oligonucleotide
  Target: LAMA2; (-) strand; PAM type: YTN; PAM sequence: TTA
aagcaacaaacaagatcatc

SEQ ID NO: 210558 - DNA, 20 bp, Artificial Sequence
  Description of Artificial Sequence: Synthetic oligonucleotide
  Target: LAMA2; (-) strand; PAM type: YTN; PAM sequence: CTT
aaagcaacaaacaagatcat

SEQ ID NO: 210559 - DNA, 20 bp, Artificial Sequence
  Description of Artificial Sequence: Synthetic oligonucleotide
  Target: LAMA2; (-) strand; PAM type: YTN; PAM sequence: CTG
cttaaagcaacaaacaagat

SEQ ID NO: 210560 - DNA, 20 bp, Artificial Sequence
  Description of Artificial Sequence: Synthetic oligonucleotide
  Target: LAMA2; (-) strand; PAM type: YTN; PAM sequence: CTA
cataaactgcttaaagcaac

SEQ ID NO: 210561 - DNA, 20 bp, Artificial Sequence
  Description of Artificial Sequence: Synthetic oligonucleotide
  Target: LAMA2; (-) strand; PAM type: YTN; PAM sequence: TTA
ctacataaactgcttaaagc

SEQ ID NO: 210562 - DNA, 20 bp, Artificial Sequence
  Description of Artificial Sequence: Synthetic oligonucleotide
  Target: LAMA2; (-) strand; PAM type: YTN; PAM sequence: TTA
aagttactacataaactgct

SEQ ID NO: 210563 - DNA, 20 bp, Artificial Sequence
  Description of Artificial Sequence: Synthetic oligonucleotide
  Target: LAMA2; (-) strand; PAM type: YTN; PAM sequence: CTT
aaagttactacataaactgc

SEQ ID NO: 210564 - DNA, 20 bp, Artificial Sequence
  Description of Artificial Sequence: Synthetic oligonucleotide
  Target: LAMA2; (-) strand; PAM type: YTN; PAM sequence: CTA
ccaccttaaagttactacat

SEQ ID NO: 210565 - DNA, 20 bp, Artificial Sequence
  Description of Artificial Sequence: Synthetic oligonucleotide
  Target: LAMA2; (-) strand; PAM type: YTN; PAM sequence: TTC
taccaccttaaagttactac

SEQ ID NO: 210566 - DNA, 20 bp, Artificial Sequence
  Description of Artificial Sequence: Synthetic oligonucleotide
  Target: LAMA2; (-) strand; PAM type: YTN; PAM sequence: TTT
ctaccaccttaaagttacta

SEQ ID NO: 210567 - DNA, 20 bp, Artificial Sequence
  Description of Artificial Sequence: Synthetic oligonucleotide
  Target: LAMA2; (-) strand; PAM type: YTN; PAM sequence: CTT
tctaccaccttaaagttact

SEQ ID NO: 210568 - DNA, 20 bp, Artificial Sequence
  Description of Artificial Sequence: Synthetic oligonucleotide
  Target: LAMA2; (-) strand; PAM type: YTN; PAM sequence: CTG
acactttctaccaccttaaa

SEQ ID NO: 210569 - DNA, 20 bp, Artificial Sequence
  Description of Artificial Sequence: Synthetic oligonucleotide
  Target: LAMA2; (-) strand; PAM type: YTN; PAM sequence: TTC
ctgacactttctaccacctt

SEQ ID NO: 210570 - DNA, 20 bp, Artificial Sequence
  Description of Artificial Sequence: Synthetic oligonucleotide
  Target: LAMA2; (-) strand; PAM type: YTN; PAM sequence: TTT
cctgacactttctaccacct

SEQ ID NO: 210571 - DNA, 20 bp, Artificial Sequence
  Description of Artificial Sequence: Synthetic oligonucleotide
  Target: LAMA2; (-) strand; PAM type: YTN; PAM sequence: TTG
atttcctgacactttctacc

SEQ ID NO: 210572 - DNA, 20 bp, Artificial Sequence
  Description of Artificial Sequence: Synthetic oligonucleotide
  Target: LAMA2; (-) strand; PAM type: YTN; PAM sequence: TTC
aaattgatttcctgacactt

SEQ ID NO: 210573 - DNA, 20 bp, Artificial Sequence
  Description of Artificial Sequence: Synthetic oligonucleotide
  Target: LAMA2; (-) strand; PAM type: YTN; PAM sequence: CTT
caaattgatttcctgacact

SEQ ID NO: 210574 - DNA, 20 bp, Artificial Sequence
  Description of Artificial Sequence: Synthetic oligonucleotide
  Target: LAMA2; (-) strand; PAM type: YTN; PAM sequence: TTG
ccttcaaattgatttcctga

SEQ ID NO: 210575 - DNA, 20 bp, Artificial Sequence
  Description of Artificial Sequence: Synthetic oligonucleotide
  Target: LAMA2; (-) strand; PAM type: YTN; PAM sequence: TTT
gccttcaaattgatttcctg

SEQ ID NO: 210576 - DNA, 20 bp, Artificial Sequence
  Description of Artificial Sequence: Synthetic oligonucleotide
  Target: LAMA2; (-) strand; PAM type: YTN; PAM sequence: TTC
atatgtgaagatttgccttc

SEQ ID NO: 210577 - DNA, 20 bp, Artificial Sequence
  Description of Artificial Sequence: Synthetic oligonucleotide
  Target: LAMA2; (-) strand; PAM type: YTN; PAM sequence: TTT
catatgtgaagatttgcctt

SEQ ID NO: 210578 - DNA, 20 bp, Artificial Sequence
  Description of Artificial Sequence: Synthetic oligonucleotide
  Target: LAMA2; (-) strand; PAM type: YTN; PAM sequence: TTT
tcatatgtgaagatttgcct

SEQ ID NO: 210579 - DNA, 20 bp, Artificial Sequence
  Description of Artificial Sequence: Synthetic oligonucleotide
  Target: LAMA2; (-) strand; PAM type: YTN; PAM sequence: CTT
ttcatatgtgaagatttgcc

SEQ ID NO: 210580 - DNA, 20 bp, Artificial Sequence
  Description of Artificial Sequence: Synthetic oligonucleotide
  Target: LAMA2; (-) strand; PAM type: YTN; PAM sequence: TTC
ttttcatatgtgaagatttg

SEQ ID NO: 210581 - DNA, 20 bp, Artificial Sequence
  Description of Artificial Sequence: Synthetic oligonucleotide
  Target: LAMA2; (-) strand; PAM type: YTN; PAM sequence: CTG
attcttttcatatgtgaaga

SEQ ID NO: 210582 - DNA, 20 bp, Artificial Sequence
  Description of Artificial Sequence: Synthetic oligonucleotide
  Target: LAMA2; (-) strand; PAM type: YTN; PAM sequence: TTC
tgattcttttcatatgtgaa

SEQ ID NO: 210583 - DNA, 20 bp, Artificial Sequence
  Description of Artificial Sequence: Synthetic oligonucleotide
  Target: LAMA2; (-) strand; PAM type: YTN; PAM sequence: TTT
ctgattcttttcatatgtga

SEQ ID NO: 210584 - DNA, 20 bp, Artificial Sequence
  Description of Artificial Sequence: Synthetic oligonucleotide
  Target: LAMA2; (-) strand; PAM type: YTN; PAM sequence: TTA
acatttctgattcttttcat

SEQ ID NO: 210585 - DNA, 20 bp, Artificial Sequence
  Description of Artificial Sequence: Synthetic oligonucleotide
  Target: LAMA2; (-) strand; PAM type: YTN; PAM sequence: CTG
agttaacatttctgattctt

SEQ ID NO: 210586 - DNA, 20 bp, Artificial Sequence
  Description of Artificial Sequence: Synthetic oligonucleotide
  Target: LAMA2; (-) strand; PAM type: YTN; PAM sequence: TTA
agacctgagttaacatttct

SEQ ID NO: 210587 - DNA, 20 bp, Artificial Sequence
  Description of Artificial Sequence: Synthetic oligonucleotide
  Target: LAMA2; (-) strand; PAM type: YTN; PAM sequence: TTT
aagacctgagttaacatttc

SEQ ID NO: 210588 - DNA, 20 bp, Artificial Sequence
  Description of Artificial Sequence: Synthetic oligonucleotide
  Target: LAMA2; (-) strand; PAM type: YTN; PAM sequence: TTA
tttaagacctgagttaacat

SEQ ID NO: 210589 - DNA, 20 bp, Artificial Sequence
  Description of Artificial Sequence: Synthetic oligonucleotide
  Target: LAMA2; (-) strand; PAM type: YTN; PAM sequence: TTT
atttaagacctgagttaaca

SEQ ID NO: 210590 - DNA, 20 bp, Artificial Sequence
  Description of Artificial Sequence: Synthetic oligonucleotide
  Target: LAMA2; (-) strand; PAM type: YTN; PAM sequence: TTT
tatttaagacctgagttaac

SEQ ID NO: 210591 - DNA, 20 bp, Artificial Sequence
  Description of Artificial Sequence: Synthetic oligonucleotide
  Target: LAMA2; (-) strand; PAM type: YTN; PAM sequence: TTT
ttatttaagacctgagttaa

SEQ ID NO: 210592 - DNA, 20 bp, Artificial Sequence
  Description of Artificial Sequence: Synthetic oligonucleotide
  Target: LAMA2; (-) strand; PAM type: YTN; PAM sequence: CTT
tttatttaagacctgagtta

SEQ ID NO: 210593 - DNA, 20 bp, Artificial Sequence
  Description of Artificial Sequence: Synthetic oligonucleotide
  Target: LAMA2; (-) strand; PAM type: YTN; PAM sequence: TTC
ctttttatttaagacctgag

SEQ ID NO: 210594 - DNA, 20 bp, Artificial Sequence
  Description of Artificial Sequence: Synthetic oligonucleotide
  Target: LAMA2; (-) strand; PAM type: YTN; PAM sequence: CTT
cctttttatttaagacctga

SEQ ID NO: 210595 - DNA, 20 bp, Artificial Sequence
  Description of Artificial Sequence: Synthetic oligonucleotide
  Target: LAMA2; (-) strand; PAM type: YTN; PAM sequence: TTC
ttcctttttatttaagacct

SEQ ID NO: 210596 - DNA, 20 bp, Artificial Sequence
  Description of Artificial Sequence: Synthetic oligonucleotide
  Target: LAMA2; (-) strand; PAM type: YTN; PAM sequence: TTA
attcttcctttttatttaag

SEQ ID NO: 210597 - DNA, 20 bp, Artificial Sequence
  Description of Artificial Sequence: Synthetic oligonucleotide
  Target: LAMA2; (-) strand; PAM type: YTN; PAM sequence: TTA
atatatcatattaattcttc

SEQ ID NO: 210598 - DNA, 20 bp, Artificial Sequence
  Description of Artificial Sequence: Synthetic oligonucleotide
  Target: LAMA2; (-) strand; PAM type: YTN; PAM sequence: TTT
aatatatcatattaattctt

SEQ ID NO: 210599 - DNA, 20 bp, Artificial Sequence
  Description of Artificial Sequence: Synthetic oligonucleotide
  Target: LAMA2; (-) strand; PAM type: YTN; PAM sequence: TTT
taatatatcatattaattct

SEQ ID NO: 210600 - DNA, 20 bp, Artificial Sequence
  Description of Artificial Sequence: Synthetic oligonucleotide
  Target: LAMA2; (-) strand; PAM type: YTN; PAM sequence: CTT
ttaatatatcatattaattc

SEQ ID NO: 210601 - DNA, 20 bp, Artificial Sequence
  Description of Artificial Sequence: Synthetic oligonucleotide
  Target: LAMA2; (-) strand; PAM type: YTN; PAM sequence: TTC
gtatcacttttaatatatca

SEQ ID NO: 210602 - DNA, 20 bp, Artificial Sequence
  Description of Artificial Sequence: Synthetic oligonucleotide
  Target: LAMA2; (-) strand; PAM type: YTN; PAM sequence: TTT
cgtatcacttttaatatatc

SEQ ID NO: 210603 - DNA, 20 bp, Artificial Sequence
  Description of Artificial Sequence: Synthetic oligonucleotide
  Target: LAMA2; (-) strand; PAM type: YTN; PAM sequence: CTT
tcgtatcacttttaatatat

SEQ ID NO: 210604 - DNA, 20 bp, Artificial Sequence
  Description of Artificial Sequence: Synthetic oligonucleotide
  Target: LAMA2; (-) strand; PAM type: YTN; PAM sequence: TTG
actttcgtatcacttttaat

SEQ ID NO: 210605 - DNA, 20 bp, Artificial Sequence
  Description of Artificial Sequence: Synthetic oligonucleotide
  Target: LAMA2; (-) strand; PAM type: YTN; PAM sequence: TTT
gactttcgtatcacttttaa

SEQ ID NO: 210606 - DNA, 20 bp, Artificial Sequence
  Description of Artificial Sequence: Synthetic oligonucleotide
  Target: LAMA2; (-) strand; PAM type: YTN; PAM sequence: CTT
tgactttcgtatcactttta

SEQ ID NO: 210607 - DNA, 20 bp, Artificial Sequence
  Description of Artificial Sequence: Synthetic oligonucleotide
  Target: LAMA2; (-) strand; PAM type: YTN; PAM sequence: TTC
ctttgactttcgtatcactt

SEQ ID NO: 210608 - DNA, 20 bp, Artificial Sequence
  Description of Artificial Sequence: Synthetic oligonucleotide
  Target: LAMA2; (-) strand; PAM type: YTN; PAM sequence: TTT
cctttgactttcgtatcact

SEQ ID NO: 210609 - DNA, 20 bp, Artificial Sequence
  Description of Artificial Sequence: Synthetic oligonucleotide
  Target: LAMA2; (-) strand; PAM type: YTN; PAM sequence: CTT
tcctttgactttcgtatcac

SEQ ID NO: 210610 - DNA, 20 bp, Artificial Sequence
  Description of Artificial Sequence: Synthetic oligonucleotide
  Target: LAMA2; (-) strand; PAM type: YTN; PAM sequence: CTC
atcaatctttcctttgactt

SEQ ID NO: 210611 - DNA, 20 bp, Artificial Sequence
  Description of Artificial Sequence: Synthetic oligonucleotide
  Target: LAMA2; (-) strand; PAM type: YTN; PAM sequence: TTA
ataagtctcatcaatctttc

SEQ ID NO: 210612 - DNA, 20 bp, Artificial Sequence
  Description of Artificial Sequence: Synthetic oligonucleotide
  Target: LAMA2; (-) strand; PAM type: YTN; PAM sequence: TTC
atattaataagtctcatcaa

SEQ ID NO: 210613 - DNA, 20 bp, Artificial Sequence
  Description of Artificial Sequence: Synthetic oligonucleotide
  Target: LAMA2; (-) strand; PAM type: YTN; PAM sequence: TTT
catattaataagtctcatca

SEQ ID NO: 210614 - DNA, 20 bp, Artificial Sequence
  Description of Artificial Sequence: Synthetic oligonucleotide
  Target: LAMA2; (-) strand; PAM type: YTN; PAM sequence: CTC
atttcatattaataagtctc

SEQ ID NO: 210615 - DNA, 20 bp, Artificial Sequence
  Description of Artificial Sequence: Synthetic oligonucleotide
  Target: LAMA2; (-) strand; PAM type: YTN; PAM sequence: TTG
aagaaacctcatttcatatt

SEQ ID NO: 210616 - DNA, 20 bp, Artificial Sequence
  Description of Artificial Sequence: Synthetic oligonucleotide
  Target: LAMA2; (-) strand; PAM type: YTN; PAM sequence: TTA
ttgaagaaacctcatttcat

SEQ ID NO: 210617 - DNA, 20 bp, Artificial Sequence
  Description of Artificial Sequence: Synthetic oligonucleotide
  Target: LAMA2; (-) strand; PAM type: YTN; PAM sequence: TTT
attgaagaaacctcatttca

SEQ ID NO: 210618 - DNA, 20 bp, Artificial Sequence
  Description of Artificial Sequence: Synthetic oligonucleotide
  Target: LAMA2; (-) strand; PAM type: YTN; PAM sequence: TTA
catatttattgaagaaacct

SEQ ID NO: 210619 - DNA, 20 bp, Artificial Sequence
  Description of Artificial Sequence: Synthetic oligonucleotide
  Target: LAMA2; (-) strand; PAM type: YTN; PAM sequence: CTT
acatatttattgaagaaacc

SEQ ID NO: 210620 - DNA, 20 bp, Artificial Sequence
  Description of Artificial Sequence: Synthetic oligonucleotide
  Target: LAMA2; (-) strand; PAM type: YTN; PAM sequence: TTG
tacttacatatttattgaag

SEQ ID NO: 210621 - DNA, 20 bp, Artificial Sequence
  Description of Artificial Sequence: Synthetic oligonucleotide
  Target: LAMA2; (-) strand; PAM type: YTN; PAM sequence: TTT
gtacttacatatttattgaa

SEQ ID NO: 210622 - DNA, 20 bp, Artificial Sequence
  Description of Artificial Sequence: Synthetic oligonucleotide
  Target: LAMA2; (-) strand; PAM type: YTN; PAM sequence: TTT
tgtacttacatatttattga

SEQ ID NO: 210623 - DNA, 20 bp, Artificial Sequence
  Description of Artificial Sequence: Synthetic oligonucleotide
  Target: LAMA2; (-) strand; PAM type: YTN; PAM sequence: TTT
ttgtacttacatatttattg

SEQ ID NO: 210624 - DNA, 20 bp, Artificial Sequence
  Description of Artificial Sequence: Synthetic oligonucleotide
  Target: LAMA2; (-) strand; PAM type: YTN; PAM sequence: TTT
tttgtacttacatatttatt

SEQ ID NO: 210625 - DNA, 20 bp, Artificial Sequence
  Description of Artificial Sequence: Synthetic oligonucleotide
  Target: LAMA2; (-) strand; PAM type: YTN; PAM sequence: CTT
ttttgtacttacatatttat

SEQ ID NO: 210626 - DNA, 20 bp, Artificial Sequence
  Description of Artificial Sequence: Synthetic oligonucleotide
  Target: LAMA2; (-) strand; PAM type: YTN; PAM sequence: TTA
acttttttgtacttacatat

SEQ ID NO: 210627 - DNA, 20 bp, Artificial Sequence
  Description of Artificial Sequence: Synthetic oligonucleotide
  Target: LAMA2; (-) strand; PAM type: YTN; PAM sequence: TTT
aacttttttgtacttacata

SEQ ID NO: 210628 - DNA, 20 bp, Artificial Sequence
  Description of Artificial Sequence: Synthetic oligonucleotide
  Target: LAMA2; (-) strand; PAM type: YTN; PAM sequence: TTA
atacaatttaacttttttgt

SEQ ID NO: 210629 - DNA, 20 bp, Artificial Sequence
  Description of Artificial Sequence: Synthetic oligonucleotide
  Target: LAMA2; (-) strand; PAM type: YTN; PAM sequence: CTT
aatacaatttaacttttttg

SEQ ID NO: 210630 - DNA, 20 bp, Artificial Sequence
  Description of Artificial Sequence: Synthetic oligonucleotide
  Target: LAMA2; (-) strand; PAM type: YTN; PAM sequence: TTC
ttaatacaatttaacttttt

SEQ ID NO: 210631 - DNA, 20 bp, Artificial Sequence
  Description of Artificial Sequence: Synthetic oligonucleotide
  Target: LAMA2; (-) strand; PAM type: YTN; PAM sequence: TTT
cttaatacaatttaactttt

SEQ ID NO: 210632 - DNA, 20 bp, Artificial Sequence
  Description of Artificial Sequence: Synthetic oligonucleotide
  Target: LAMA2; (-) strand; PAM type: YTN; PAM sequence: CTC
aagtttcttaatacaattta

SEQ ID NO: 210633 - DNA, 20 bp, Artificial Sequence
  Description of Artificial Sequence: Synthetic oligonucleotide
  Target: LAMA2; (-) strand; PAM type: YTN; PAM sequence: TTA
aatctcaagtttcttaatac

SEQ ID NO: 210634 - DNA, 20 bp, Artificial Sequence
  Description of Artificial Sequence: Synthetic oligonucleotide
  Target: LAMA2; (-) strand; PAM type: YTN; PAM sequence: TTT
aaatctcaagtttcttaata

SEQ ID NO: 210635 - DNA, 20 bp, Artificial Sequence
  Description of Artificial Sequence: Synthetic oligonucleotide
  Target: LAMA2; (-) strand; PAM type: YTN; PAM sequence: TTT
taaatctcaagtttcttaat

SEQ ID NO: 210636 - DNA, 20 bp, Artificial Sequence
  Description of Artificial Sequence: Synthetic oligonucleotide
  Target: LAMA2; (-) strand; PAM type: YTN; PAM sequence: TTT
ttaaatctcaagtttcttaa

SEQ ID NO: 210637 - DNA, 20 bp, Artificial Sequence
  Description of Artificial Sequence: Synthetic oligonucleotide
  Target: LAMA2; (-) strand; PAM type: YTN; PAM sequence: TTT
tttaaatctcaagtttctta

SEQ ID NO: 210638 - DNA, 20 bp, Artificial Sequence
  Description of Artificial Sequence: Synthetic oligonucleotide
  Target: LAMA2; (-) strand; PAM type: YTN; PAM sequence: TTT
ttttaaatctcaagtttctt

SEQ ID NO: 210639 - DNA, 20 bp, Artificial Sequence
  Description of Artificial Sequence: Synthetic oligonucleotide
  Target: LAMA2; (-) strand; PAM type: YTN; PAM sequence: TTT
tttttaaatctcaagtttct

SEQ ID NO: 210640 - DNA, 20 bp, Artificial Sequence
  Description of Artificial Sequence: Synthetic oligonucleotide
  Target: LAMA2; (-) strand; PAM type: YTN; PAM sequence: TTT
ttttttaaatctcaagtttc

SEQ ID NO: 210641 - DNA, 20 bp, Artificial Sequence
  Description of Artificial Sequence: Synthetic oligonucleotide
  Target: LAMA2; (-) strand; PAM type: YTN; PAM sequence: TTT
tttttttaaatctcaagttt

SEQ ID NO: 210642 - DNA, 20 bp, Artificial Sequence
  Description of Artificial Sequence: Synthetic oligonucleotide
  Target: LAMA2; (-) strand; PAM type: YTN; PAM sequence: TTT
ttttttttaaatctcaagtt

SEQ ID NO: 210643 - DNA, 20 bp, Artificial Sequence
  Description of Artificial Sequence: Synthetic oligonucleotide
  Target: LAMA2; (-) strand; PAM type: YTN; PAM sequence: TTT
tttttttttaaatctcaagt

SEQ ID NO: 210644 - DNA, 20 bp, Artificial Sequence
  Description of Artificial Sequence: Synthetic oligonucleotide
  Target: LAMA2; (-) strand; PAM type: YTN; PAM sequence: TTT
ttttttttttaaatctcaag

SEQ ID NO: 210645 - DNA, 20 bp, Artificial Sequence
  Description of Artificial Sequence: Synthetic oligonucleotide
  Target: LAMA2; (-) strand; PAM type: YTN; PAM sequence: TTT
tttttttttttaaatctcaa

SEQ ID NO: 210646 - DNA, 20 bp, Artificial Sequence
  Description of Artificial Sequence: Synthetic oligonucleotide
  Target: LAMA2; (-) strand; PAM type: YTN; PAM sequence: CTT
ttttttttttttaaatctca

SEQ ID NO: 210647 - DNA, 20 bp, Artificial Sequence
  Description of Artificial Sequence: Synthetic oligonucleotide
  Target: LAMA2; (-) strand; PAM type: YTN; PAM sequence: TTC
gcttttttttttttttaaat

SEQ ID NO: 210648 - DNA, 20 bp, Artificial Sequence
  Description of Artificial Sequence: Synthetic oligonucleotide
  Target: LAMA2; (-) strand; PAM type: YTN; PAM sequence: CTT
cgcttttttttttttttaaa

SEQ ID NO: 210649 - DNA, 20 bp, Artificial Sequence
  Description of Artificial Sequence: Synthetic oligonucleotide
  Target: LAMA2; (-) strand; PAM type: YTN; PAM sequence: TTA
aatacttcgctttttttttt

SEQ ID NO: 210650 - DNA, 20 bp, Artificial Sequence
  Description of Artificial Sequence: Synthetic oligonucleotide
  Target: LAMA2; (-) strand; PAM type: YTN; PAM sequence: TTT
aaatacttcgcttttttttt

SEQ ID NO: 210651 - DNA, 20 bp, Artificial Sequence
  Description of Artificial Sequence: Synthetic oligonucleotide
  Target: LAMA2; (-) strand; PAM type: YTN; PAM sequence: CTC
aagaggggtagtttaaatac

SEQ ID NO: 210652 - DNA, 20 bp, Artificial Sequence
  Description of Artificial Sequence: Synthetic oligonucleotide
  Target: LAMA2; (-) strand; PAM type: YTN; PAM sequence: CTG
ggagctcaagaggggtagtt

SEQ ID NO: 210653 - DNA, 20 bp, Artificial Sequence
  Description of Artificial Sequence: Synthetic oligonucleotide
  Target: LAMA2; (-) strand; PAM type: YTN; PAM sequence: CTA
agaggaatgtggctgggagc

SEQ ID NO: 210654 - DNA, 20 bp, Artificial Sequence
  Description of Artificial Sequence: Synthetic oligonucleotide
  Target: LAMA2; (-) strand; PAM type: YTN; PAM sequence: TTA
gacaactaagaggaatgtgg

SEQ ID NO: 210655 - DNA, 20 bp, Artificial Sequence
  Description of Artificial Sequence: Synthetic oligonucleotide
  Target: LAMA2; (-) strand; PAM type: YTN; PAM sequence: TTA
ttagacaactaagaggaatg

SEQ ID NO: 210656 - DNA, 20 bp, Artificial Sequence
  Description of Artificial Sequence: Synthetic oligonucleotide
  Target: LAMA2; (-) strand; PAM type: YTN; PAM sequence: TTA
ttattagacaactaagagga

SEQ ID NO: 210657 - DNA, 20 bp, Artificial Sequence
  Description of Artificial Sequence: Synthetic oligonucleotide
  Target: LAMA2; (-) strand; PAM type: YTN; PAM sequence: TTA
gaaatatccagtgaaatagc

SEQ ID NO: 210658 - DNA, 20 bp, Artificial Sequence
  Description of Artificial Sequence: Synthetic oligonucleotide
  Target: LAMA2; (-) strand; PAM type: YTN; PAM sequence: TTT
agaaatatccagtgaaatag

SEQ ID NO: 210659 - DNA, 20 bp, Artificial Sequence
  Description of Artificial Sequence: Synthetic oligonucleotide
  Target: LAMA2; (-) strand; PAM type: YTN; PAM sequence: CTA
tcatttagaaatatccagtg

SEQ ID NO: 210660 - DNA, 20 bp, Artificial Sequence
  Description of Artificial Sequence: Synthetic oligonucleotide
  Target: LAMA2; (-) strand; PAM type: YTN; PAM sequence: TTG
agatatatgaataggaccct

SEQ ID NO: 210661 - DNA, 20 bp, Artificial Sequence
  Description of Artificial Sequence: Synthetic oligonucleotide
  Target: LAMA2; (-) strand; PAM type: YTN; PAM sequence: TTG
acaagttgagatatatgaat

SEQ ID NO: 210662 - DNA, 20 bp, Artificial Sequence
  Description of Artificial Sequence: Synthetic oligonucleotide
  Target: LAMA2; (-) strand; PAM type: YTN; PAM sequence: TTA
aaaattgacaagttgagata

SEQ ID NO: 210663 - DNA, 20 bp, Artificial Sequence
  Description of Artificial Sequence: Synthetic oligonucleotide
  Target: LAMA2; (-) strand; PAM type: YTN; PAM sequence: TTG
atgatattaaaaattgacaa

SEQ ID NO: 210664 - DNA, 20 bp, Artificial Sequence
  Description of Artificial Sequence: Synthetic oligonucleotide
  Target: LAMA2; (-) strand; PAM type: YTN; PAM sequence: CTA
aaaaaggaatgtcaattgat

SEQ ID NO: 210665 - DNA, 20 bp, Artificial Sequence
  Description of Artificial Sequence: Synthetic oligonucleotide
  Target: LAMA2; (-) strand; PAM type: YTN; PAM sequence: TTC
taaaaaaggaatgtcaattg

SEQ ID NO: 210666 - DNA, 20 bp, Artificial Sequence
  Description of Artificial Sequence: Synthetic oligonucleotide
  Target: LAMA2; (-) strand; PAM type: YTN; PAM sequence: TTT
ctaaaaaaggaatgtcaatt

SEQ ID NO: 210667 - DNA, 20 bp, Artificial Sequence
  Description of Artificial Sequence: Synthetic oligonucleotide
  Target: LAMA2; (-) strand; PAM type: YTN; PAM sequence: CTA
agtcatgatttctaaaaaag

SEQ ID NO: 210668 - DNA, 20 bp, Artificial Sequence
  Description of Artificial Sequence: Synthetic oligonucleotide
  Target: LAMA2; (-) strand; PAM type: YTN; PAM sequence: CTG
aagatggagtataagtagct

SEQ ID NO: 210669 - DNA, 20 bp, Artificial Sequence
  Description of Artificial Sequence: Synthetic oligonucleotide
  Target: LAMA2; (-) strand; PAM type: YTN; PAM sequence: TTA
gaaggataagcactgaagat

SEQ ID NO: 210670 - DNA, 20 bp, Artificial Sequence
  Description of Artificial Sequence: Synthetic oligonucleotide
  Target: LAMA2; (-) strand; PAM type: YTN; PAM sequence: TTA
cattagaaggataagcactg

SEQ ID NO: 210671 - DNA, 20 bp, Artificial Sequence
  Description of Artificial Sequence: Synthetic oligonucleotide
  Target: LAMA2; (-) strand; PAM type: YTN; PAM sequence: TTA
tgatagtattacattagaag

SEQ ID NO: 210672 - DNA, 20 bp, Artificial Sequence
  Description of Artificial Sequence: Synthetic oligonucleotide
  Target: LAMA2; (-) strand; PAM type: YTN; PAM sequence: TTA
aataaaattatgatagtatt

SEQ ID NO: 210673 - DNA, 20 bp, Artificial Sequence
  Description of Artificial Sequence: Synthetic oligonucleotide
  Target: LAMA2; (-) strand; PAM type: YTN; PAM sequence: TTT
aaataaaattatgatagtat

SEQ ID NO: 210674 - DNA, 20 bp, Artificial Sequence
  Description of Artificial Sequence: Synthetic oligonucleotide
  Target: LAMA2; (-) strand; PAM type: YTN; PAM sequence: TTA
cgtcataaaagacatatagt

SEQ ID NO: 210675 - DNA, 20 bp, Artificial Sequence
  Description of Artificial Sequence: Synthetic oligonucleotide
  Target: LAMA2; (-) strand; PAM type: YTN; PAM sequence: TTT
acgtcataaaagacatatag

SEQ ID NO: 210676 - DNA, 20 bp, Artificial Sequence
  Description of Artificial Sequence: Synthetic oligonucleotide
  Target: LAMA2; (-) strand; PAM type: YTN; PAM sequence: TTA
gacaatatttacgtcataaa

SEQ ID NO: 210677 - DNA, 20 bp, Artificial Sequence
  Description of Artificial Sequence: Synthetic oligonucleotide
  Target: LAMA2; (-) strand; PAM type: YTN; PAM sequence: TTA
gtattagacaatatttacgt

SEQ ID NO: 210678 - DNA, 20 bp, Artificial Sequence
  Description of Artificial Sequence: Synthetic oligonucleotide
  Target: LAMA2; (-) strand; PAM type: YTN; PAM sequence: TTT
agtattagacaatatttacg

SEQ ID NO: 210679 - DNA, 20 bp, Artificial Sequence
  Description of Artificial Sequence: Synthetic oligonucleotide
  Target: LAMA2; (-) strand; PAM type: YTN; PAM sequence: TTT
tagtattagacaatatttac

SEQ ID NO: 210680 - DNA, 20 bp, Artificial Sequence
  Description of Artificial Sequence: Synthetic oligonucleotide
  Target: LAMA2; (-) strand; PAM type: YTN; PAM sequence: TTA
agataaaacacagaaacatg

SEQ ID NO: 210681 - DNA, 20 bp, Artificial Sequence
  Description of Artificial Sequence: Synthetic oligonucleotide
  Target: LAMA2; (-) strand; PAM type: YTN; PAM sequence: CTT
aagataaaacacagaaacat

SEQ ID NO: 210682 - DNA, 20 bp, Artificial Sequence
  Description of Artificial Sequence: Synthetic oligonucleotide
  Target: LAMA2; (-) strand; PAM type: YTN; PAM sequence: CTC
ttaagataaaacacagaaac

SEQ ID NO: 210683 - DNA, 20 bp, Artificial Sequence
  Description of Artificial Sequence: Synthetic oligonucleotide
  Target: LAMA2; (-) strand; PAM type: YTN; PAM sequence: TTA
acctcttaagataaaacaca

SEQ ID NO: 210684 - DNA, 20 bp, Artificial Sequence
  Description of Artificial Sequence: Synthetic oligonucleotide
  Target: LAMA2; (-) strand; PAM type: YTN; PAM sequence: CTA
aagacccaggaaaaataaac

SEQ ID NO: 210685 - DNA, 20 bp, Artificial Sequence
  Description of Artificial Sequence: Synthetic oligonucleotide
  Target: LAMA2; (-) strand; PAM type: YTN; PAM sequence: TTA
gtgggaaaataatataataa

SEQ ID NO: 210686 - DNA, 20 bp, Artificial Sequence
  Description of Artificial Sequence: Synthetic oligonucleotide
  Target: LAMA2; (-) strand; PAM type: YTN; PAM sequence: TTG
aaatgttagtgggaaaataa

SEQ ID NO: 210687 - DNA, 20 bp, Artificial Sequence
  Description of Artificial Sequence: Synthetic oligonucleotide
  Target: LAMA2; (-) strand; PAM type: YTN; PAM sequence: TTT
gaaatgttagtgggaaaata

SEQ ID NO: 210688 - DNA, 20 bp, Artificial Sequence
  Description of Artificial Sequence: Synthetic oligonucleotide
  Target: LAMA2; (-) strand; PAM type: YTN; PAM sequence: TTT
tgaaatgttagtgggaaaat

SEQ ID NO: 210689 - DNA, 20 bp, Artificial Sequence
  Description of Artificial Sequence: Synthetic oligonucleotide
  Target: LAMA2; (-) strand; PAM type: YTN; PAM sequence: CTA
atattttgaaatgttagtgg

SEQ ID NO: 210690 - DNA, 20 bp, Artificial Sequence
  Description of Artificial Sequence: Synthetic oligonucleotide
  Target: LAMA2; (-) strand; PAM type: YTN; PAM sequence: TTA
gaataactaatattttgaaa

SEQ ID NO: 210691 - DNA, 20 bp, Artificial Sequence
  Description of Artificial Sequence: Synthetic oligonucleotide
  Target: LAMA2; (-) strand; PAM type: YTN; PAM sequence: TTT
agaataactaatattttgaa

SEQ ID NO: 210692 - DNA, 20 bp, Artificial Sequence
  Description of Artificial Sequence: Synthetic oligonucleotide
  Target: LAMA2; (-) strand; PAM type: YTN; PAM sequence: CTA
tttagaataactaatatttt

SEQ ID NO: 210693 - DNA, 20 bp, Artificial Sequence
  Description of Artificial Sequence: Synthetic oligonucleotide
  Target: LAMA2; (-) strand; PAM type: YTN; PAM sequence: CTA
aagaaaagtcagactattta

SEQ ID NO: 210694 - DNA, 20 bp, Artificial Sequence
  Description of Artificial Sequence: Synthetic oligonucleotide
  Target: LAMA2; (-) strand; PAM type: YTN; PAM sequence: CTC
taaagaaaagtcagactatt

SEQ ID NO: 210695 - DNA, 20 bp, Artificial Sequence
  Description of Artificial Sequence: Synthetic oligonucleotide
  Target: LAMA2; (-) strand; PAM type: YTN; PAM sequence: TTG
agtgaagaactctaaagaaa

SEQ ID NO: 210696 - DNA, 20 bp, Artificial Sequence
  Description of Artificial Sequence: Synthetic oligonucleotide
  Target: LAMA2; (-) strand; PAM type: YTN; PAM sequence: TTT
gagtgaagaactctaaagaa

SEQ ID NO: 210697 - DNA, 20 bp, Artificial Sequence
  Description of Artificial Sequence: Synthetic oligonucleotide
  Target: LAMA2; (-) strand; PAM type: YTN; PAM sequence: CTT
tgagtgaagaactctaaaga

SEQ ID NO: 210698 - DNA, 20 bp, Artificial Sequence
  Description of Artificial Sequence: Synthetic oligonucleotide
  Target: LAMA2; (-) strand; PAM type: YTN; PAM sequence: TTC
aggcagaacatagaggactt

SEQ ID NO: 210699 - DNA, 20 bp, Artificial Sequence
  Description of Artificial Sequence: Synthetic oligonucleotide
  Target: LAMA2; (-) strand; PAM type: YTN; PAM sequence: CTA
attcaggcagaacatagagg

SEQ ID NO: 210700 - DNA, 20 bp, Artificial Sequence
  Description of Artificial Sequence: Synthetic oligonucleotide
  Target: LAMA2; (-) strand; PAM type: YTN; PAM sequence: CTG
acaaggtagatccaatgtag

SEQ ID NO: 210701 - DNA, 20 bp, Artificial Sequence
  Description of Artificial Sequence: Synthetic oligonucleotide
  Target: LAMA2; (-) strand; PAM type: YTN; PAM sequence: CTC
cagcaaaatgagaaagtaaa

SEQ ID NO: 210702 - DNA, 20 bp, Artificial Sequence
  Description of Artificial Sequence: Synthetic oligonucleotide
  Target: LAMA2; (-) strand; PAM type: YTN; PAM sequence: TTG
aggatgtgctccagcaaaat

SEQ ID NO: 210703 - DNA, 20 bp, Artificial Sequence
  Description of Artificial Sequence: Synthetic oligonucleotide
  Target: LAMA2; (-) strand; PAM type: YTN; PAM sequence: TTT
gaggatgtgctccagcaaaa

SEQ ID NO: 210704 - DNA, 20 bp, Artificial Sequence
  Description of Artificial Sequence: Synthetic oligonucleotide
  Target: LAMA2; (-) strand; PAM type: YTN; PAM sequence: TTA
agaagccatttgaggatgtg

SEQ ID NO: 210705 - DNA, 20 bp, Artificial Sequence
  Description of Artificial Sequence: Synthetic oligonucleotide
  Target: LAMA2; (-) strand; PAM type: YTN; PAM sequence: CTT
aagaagccatttgaggatgt

SEQ ID NO: 210706 - DNA, 20 bp, Artificial Sequence
  Description of Artificial Sequence: Synthetic oligonucleotide
  Target: LAMA2; (-) strand; PAM type: YTN; PAM sequence: TTC
ttaagaagccatttgaggat

SEQ ID NO: 210707 - DNA, 20 bp, Artificial Sequence
  Description of Artificial Sequence: Synthetic oligonucleotide
  Target: LAMA2; (-) strand; PAM type: YTN; PAM sequence: TTT
cttaagaagccatttgagga

SEQ ID NO: 210708 - DNA, 20 bp, Artificial Sequence
  Description of Artificial Sequence: Synthetic oligonucleotide
  Target: LAMA2; (-) strand; PAM type: YTN; PAM sequence: CTG
cccatgtaatatttcttaag

SEQ ID NO: 210709 - DNA, 20 bp, Artificial Sequence
  Description of Artificial Sequence: Synthetic oligonucleotide
  Target: LAMA2; (-) strand; PAM type: YTN; PAM sequence: TTC
actgcccatgtaatatttct

SEQ ID NO: 210710 - DNA, 20 bp, Artificial Sequence
  Description of Artificial Sequence: Synthetic oligonucleotide
  Target: LAMA2; (-) strand; PAM type: YTN; PAM sequence: CTC
agaaaattcactgcccatgt

SEQ ID NO: 210711 - DNA, 20 bp, Artificial Sequence
  Description of Artificial Sequence: Synthetic oligonucleotide
  Target: LAMA2; (-) strand; PAM type: YTN; PAM sequence: CTG
gaaggactcagaaaattcac

SEQ ID NO: 210712 - DNA, 20 bp, Artificial Sequence
  Description of Artificial Sequence: Synthetic oligonucleotide
  Target: LAMA2; (-) strand; PAM type: YTN; PAM sequence: TTA
aactggaaggactcagaaaa

SEQ ID NO: 210713 - DNA, 20 bp, Artificial Sequence
  Description of Artificial Sequence: Synthetic oligonucleotide
  Target: LAMA2; (-) strand; PAM type: YTN; PAM sequence: TTG
caatgagttaaactggaagg

SEQ ID NO: 210714 - DNA, 20 bp, Artificial Sequence
  Description of Artificial Sequence: Synthetic oligonucleotide
  Target: LAMA2; (-) strand; PAM type: YTN; PAM sequence: TTG
tatattgcaatgagttaaac

SEQ ID NO: 210715 - DNA, 20 bp, Artificial Sequence
  Description of Artificial Sequence: Synthetic oligonucleotide
  Target: LAMA2; (-) strand; PAM type: YTN; PAM sequence: TTT
gtatattgcaatgagttaaa

SEQ ID NO: 210716 - DNA, 20 bp, Artificial Sequence
  Description of Artificial Sequence: Synthetic oligonucleotide
  Target: LAMA2; (-) strand; PAM type: YTN; PAM sequence: TTT
tgtatattgcaatgagttaa

SEQ ID NO: 210717 - DNA, 20 bp, Artificial Sequence
  Description of Artificial Sequence: Synthetic oligonucleotide
  Target: LAMA2; (-) strand; PAM type: YTN; PAM sequence: CTG
ccattttgtatattgcaatg

SEQ ID NO: 210718 - DNA, 20 bp, Artificial Sequence
  Description of Artificial Sequence: Synthetic oligonucleotide
  Target: LAMA2; (-) strand; PAM type: YTN; PAM sequence: TTG
aatgggcctgccattttgta

SEQ ID NO: 210719 - DNA, 20 bp, Artificial Sequence
  Description of Artificial Sequence: Synthetic oligonucleotide
  Target: LAMA2; (-) strand; PAM type: YTN; PAM sequence: TTG
aaggaataagtatataaatt

SEQ ID NO: 210720 - DNA, 20 bp, Artificial Sequence
  Description of Artificial Sequence: Synthetic oligonucleotide
  Target: LAMA2; (-) strand; PAM type: YTN; PAM sequence: CTT
gaaggaataagtatataaat

SEQ ID NO: 210721 - DNA, 20 bp, Artificial Sequence
  Description of Artificial Sequence: Synthetic oligonucleotide
  Target: LAMA2; (-) strand; PAM type: YTN; PAM sequence: TTA
ccaaaacttgaaggaataag

SEQ ID NO: 210722 - DNA, 20 bp, Artificial Sequence
  Description of Artificial Sequence: Synthetic oligonucleotide
  Target: LAMA2; (-) strand; PAM type: YTN; PAM sequence: TTA
ataataatgcagataaatta

SEQ ID NO: 210723 - DNA, 20 bp, Artificial Sequence
  Description of Artificial Sequence: Synthetic oligonucleotide
  Target: LAMA2; (-) strand; PAM type: YTN; PAM sequence: TTT
aataataatgcagataaatt

SEQ ID NO: 210724 - DNA, 20 bp, Artificial Sequence
  Description of Artificial Sequence: Synthetic oligonucleotide
  Target: LAMA2; (-) strand; PAM type: YTN; PAM sequence: TTA
tttaataataatgcagataa

SEQ ID NO: 210725 - DNA, 20 bp, Artificial Sequence
  Description of Artificial Sequence: Synthetic oligonucleotide
  Target: LAMA2; (-) strand; PAM type: YTN; PAM sequence: TTA
atatattatttaataataat

SEQ ID NO: 210726 - DNA, 20 bp, Artificial Sequence
  Description of Artificial Sequence: Synthetic oligonucleotide
  Target: LAMA2; (-) strand; PAM type: YTN; PAM sequence: TTA
agtaatatattaatatatta

SEQ ID NO: 210727 - DNA, 20 bp, Artificial Sequence
  Description of Artificial Sequence: Synthetic oligonucleotide
  Target: LAMA2; (-) strand; PAM type: YTN; PAM sequence: TTT
aagtaatatattaatatatt

SEQ ID NO: 210728 - DNA, 20 bp, Artificial Sequence
  Description of Artificial Sequence: Synthetic oligonucleotide
  Target: LAMA2; (-) strand; PAM type: YTN; PAM sequence: TTT
taagtaatatattaatatat

SEQ ID NO: 210729 - DNA, 20 bp, Artificial Sequence
  Description of Artificial Sequence: Synthetic oligonucleotide
  Target: LAMA2; (-) strand; PAM type: YTN; PAM sequence: TTA
tattttaagtaatatattaa

SEQ ID NO: 210730 - DNA, 20 bp, Artificial Sequence
  Description of Artificial Sequence: Synthetic oligonucleotide
  Target: LAMA2; (-) strand; PAM type: YTN; PAM sequence: TTT
atattttaagtaatatatta

SEQ ID NO: 210731 - DNA, 20 bp, Artificial Sequence
  Description of Artificial Sequence: Synthetic oligonucleotide
  Target: LAMA2; (-) strand; PAM type: YTN; PAM sequence: TTA
atttatattttaagtaatat

SEQ ID NO: 210732 - DNA, 20 bp, Artificial Sequence
  Description of Artificial Sequence: Synthetic oligonucleotide
  Target: LAMA2; (-) strand; PAM type: YTN; PAM sequence: TTT
aatttatattttaagtaata

SEQ ID NO: 210733 - DNA, 20 bp, Artificial Sequence
  Description of Artificial Sequence: Synthetic oligonucleotide
  Target: LAMA2; (-) strand; PAM type: YTN; PAM sequence: TTT
taatttatattttaagtaat

SEQ ID NO: 210734 - DNA, 20 bp, Artificial Sequence
  Description of Artificial Sequence: Synthetic oligonucleotide
  Target: LAMA2; (-) strand; PAM type: YTN; PAM sequence: TTA
tgttttaatttatattttaa

SEQ ID NO: 210735 - DNA, 20 bp, Artificial Sequence
  Description of Artificial Sequence: Synthetic oligonucleotide
  Target: LAMA2; (-) strand; PAM type: YTN; PAM sequence: TTT
atgttttaatttatatttta

SEQ ID NO: 210736 - DNA, 20 bp, Artificial Sequence
  Description of Artificial Sequence: Synthetic oligonucleotide
  Target: LAMA2; (-) strand; PAM type: YTN; PAM sequence: TTA
gaaggaatttatgttttaat

SEQ ID NO: 210737 - DNA, 20 bp, Artificial Sequence
  Description of Artificial Sequence: Synthetic oligonucleotide
  Target: LAMA2; (-) strand; PAM type: YTN; PAM sequence: CTG
gagaaattagaaggaattta

SEQ ID NO: 210738 - DNA, 20 bp, Artificial Sequence
  Description of Artificial Sequence: Synthetic oligonucleotide
  Target: LAMA2; (-) strand; PAM type: YTN; PAM sequence: TTC
aaaaaagtagactggagaaa

SEQ ID NO: 210739 - DNA, 20 bp, Artificial Sequence
  Description of Artificial Sequence: Synthetic oligonucleotide
  Target: LAMA2; (-) strand; PAM type: YTN; PAM sequence: TTT
caaaaaagtagactggagaa

SEQ ID NO: 210740 - DNA, 20 bp, Artificial Sequence
  Description of Artificial Sequence: Synthetic oligonucleotide
  Target: LAMA2; (-) strand; PAM type: YTN; PAM sequence: CTC
atgggagtttcaaaaaagta

SEQ ID NO: 210741 - DNA, 20 bp, Artificial Sequence
  Description of Artificial Sequence: Synthetic oligonucleotide
  Target: LAMA2; (-) strand; PAM type: YTN; PAM sequence: TTG
actcatgggagtttcaaaaa

SEQ ID NO: 210742 - DNA, 20 bp, Artificial Sequence
  Description of Artificial Sequence: Synthetic oligonucleotide
  Target: LAMA2; (-) strand; PAM type: YTN; PAM sequence: TTT
gactcatgggagtttcaaaa

SEQ ID NO: 210743 - DNA, 20 bp, Artificial Sequence
  Description of Artificial Sequence: Synthetic oligonucleotide
  Target: LAMA2; (-) strand; PAM type: YTN; PAM sequence: CTG
aaaatatgagagaaatgata

SEQ ID NO: 210744 - DNA, 20 bp, Artificial Sequence
  Description of Artificial Sequence: Synthetic oligonucleotide
  Target: LAMA2; (-) strand; PAM type: YTN; PAM sequence: TTG
aaggcatcacccacaaaaga

SEQ ID NO: 210745 - DNA, 20 bp, Artificial Sequence
  Description of Artificial Sequence: Synthetic oligonucleotide
  Target: LAMA2; (-) strand; PAM type: YTN; PAM sequence: TTG
gacaaaaaagttgaaggcat

SEQ ID NO: 210746 - DNA, 20 bp, Artificial Sequence
  Description of Artificial Sequence: Synthetic oligonucleotide
  Target: LAMA2; (-) strand; PAM type: YTN; PAM sequence: CTT
ggacaaaaaagttgaaggca

SEQ ID NO: 210747 - DNA, 20 bp, Artificial Sequence
  Description of Artificial Sequence: Synthetic oligonucleotide
  Target: LAMA2; (-) strand; PAM type: YTN; PAM sequence: CTC
ttggacaaaaaagttgaagg

SEQ ID NO: 210748 - DNA, 20 bp, Artificial Sequence
  Description of Artificial Sequence: Synthetic oligonucleotide
  Target: LAMA2; (-) strand; PAM type: YTN; PAM sequence: TTA
atatgactcttggacaaaaa

SEQ ID NO: 210749 - DNA, 20 bp, Artificial Sequence
  Description of Artificial Sequence: Synthetic oligonucleotide
  Target: LAMA2; (-) strand; PAM type: YTN; PAM sequence: TTT
aatatgactcttggacaaaa

SEQ ID NO: 210750 - DNA, 20 bp, Artificial Sequence
  Description of Artificial Sequence: Synthetic oligonucleotide
  Target: LAMA2; (-) strand; PAM type: YTN; PAM sequence: TTT
taatatgactcttggacaaa

SEQ ID NO: 210751 - DNA, 20 bp, Artificial Sequence
  Description of Artificial Sequence: Synthetic oligonucleotide
  Target: LAMA2; (-) strand; PAM type: YTN; PAM sequence: TTA
aaataaagttttaatatgac

SEQ ID NO: 210752 - DNA, 20 bp, Artificial Sequence
  Description of Artificial Sequence: Synthetic oligonucleotide
  Target: LAMA2; (-) strand; PAM type: YTN; PAM sequence: TTT
aaaataaagttttaatatga

SEQ ID NO: 210753 - DNA, 20 bp, Artificial Sequence
  Description of Artificial Sequence: Synthetic oligonucleotide
  Target: LAMA2; (-) strand; PAM type: YTN; PAM sequence: TTT
taaaataaagttttaatatg

SEQ ID NO: 210754 - DNA, 20 bp, Artificial Sequence
  Description of Artificial Sequence: Synthetic oligonucleotide
  Target: LAMA2; (-) strand; PAM type: YTN; PAM sequence: CTT
ttaaaataaagttttaatat

SEQ ID NO: 210755 - DNA, 20 bp, Artificial Sequence
  Description of Artificial Sequence: Synthetic oligonucleotide
  Target: LAMA2; (-) strand; PAM type: YTN; PAM sequence: TTA
aaaagggaaaaatacaaatc

SEQ ID NO: 210756 - DNA, 20 bp, Artificial Sequence
  Description of Artificial Sequence: Synthetic oligonucleotide
  Target: LAMA2; (-) strand; PAM type: YTN; PAM sequence: TTC
aagaagaaaaatagaataat

SEQ ID NO: 210757 - DNA, 20 bp, Artificial Sequence
  Description of Artificial Sequence: Synthetic oligonucleotide
  Target: LAMA2; (-) strand; PAM type: YTN; PAM sequence: TTG
aagagattcaagaagaaaaa

SEQ ID NO: 210758 - DNA, 20 bp, Artificial Sequence
  Description of Artificial Sequence: Synthetic oligonucleotide
  Target: LAMA2; (-) strand; PAM type: YTN; PAM sequence: TTT
gaagagattcaagaagaaaa

SEQ ID NO: 210759 - DNA, 20 bp, Artificial Sequence
  Description of Artificial Sequence: Synthetic oligonucleotide
  Target: LAMA2; (-) strand; PAM type: YTN; PAM sequence: TTT
tgaagagattcaagaagaaa

SEQ ID NO: 210760 - DNA, 20 bp, Artificial Sequence
  Description of Artificial Sequence: Synthetic oligonucleotide
  Target: LAMA2; (-) strand; PAM type: YTN; PAM sequence: TTT
ttgaagagattcaagaagaa

SEQ ID NO: 210761 - DNA, 20 bp, Artificial Sequence
  Description of Artificial Sequence: Synthetic oligonucleotide
  Target: LAMA2; (-) strand; PAM type: YTN; PAM sequence: TTA
atatttttgaagagattcaa

SEQ ID NO: 210762 - DNA, 20 bp, Artificial Sequence
  Description of Artificial Sequence: Synthetic oligonucleotide
  Target: LAMA2; (-) strand; PAM type: YTN; PAM sequence: CTA
attaatatttttgaagagat

SEQ ID NO: 210763 - DNA, 20 bp, Artificial Sequence
  Description of Artificial Sequence: Synthetic oligonucleotide
  Target: LAMA2; (-) strand; PAM type: YTN; PAM sequence: CTG
ctaattaatatttttgaaga

SEQ ID NO: 210764 - DNA, 20 bp, Artificial Sequence
  Description of Artificial Sequence: Synthetic oligonucleotide
  Target: LAMA2; (-) strand; PAM type: YTN; PAM sequence: TTA
aaagcaaactgctaattaat

SEQ ID NO: 210765 - DNA, 20 bp, Artificial Sequence
  Description of Artificial Sequence: Synthetic oligonucleotide
  Target: LAMA2; (-) strand; PAM type: YTN; PAM sequence: TTT
aaaagcaaactgctaattaa

SEQ ID NO: 210766 - DNA, 20 bp, Artificial Sequence
  Description of Artificial Sequence: Synthetic oligonucleotide
  Target: LAMA2; (-) strand; PAM type: YTN; PAM sequence: TTT
taaaagcaaactgctaatta

SEQ ID NO: 210767 - DNA, 20 bp, Artificial Sequence
  Description of Artificial Sequence: Synthetic oligonucleotide
  Target: LAMA2; (-) strand; PAM type: YTN; PAM sequence: TTT
ttaaaagcaaactgctaatt

SEQ ID NO: 210768 - DNA, 20 bp, Artificial Sequence
  Description of Artificial Sequence: Synthetic oligonucleotide
  Target: LAMA2; (-) strand; PAM type: YTN; PAM sequence: CTG
ataatatttttaaaagcaaa

SEQ ID NO: 210769 - DNA, 20 bp, Artificial Sequence
  Description of Artificial Sequence: Synthetic oligonucleotide
  Target: LAMA2; (-) strand; PAM type: YTN; PAM sequence: TTA
aaaaactgataatattttta

SEQ ID NO: 210770 - DNA, 20 bp, Artificial Sequence
  Description of Artificial Sequence: Synthetic oligonucleotide
  Target: LAMA2; (-) strand; PAM type: YTN; PAM sequence: TTT
aaaaaactgataatattttt

SEQ ID NO: 210771 - DNA, 20 bp, Artificial Sequence
  Description of Artificial Sequence: Synthetic oligonucleotide
  Target: LAMA2; (-) strand; PAM type: YTN; PAM sequence: TTA
tttaaaaaactgataatatt

SEQ ID NO: 210772 - DNA, 20 bp, Artificial Sequence
  Description of Artificial Sequence: Synthetic oligonucleotide
  Target: LAMA2; (-) strand; PAM type: YTN; PAM sequence: CTT
atttaaaaaactgataatat

SEQ ID NO: 210773 - DNA, 20 bp, Artificial Sequence
  Description of Artificial Sequence: Synthetic oligonucleotide
  Target: LAMA2; (-) strand; PAM type: YTN; PAM sequence: CTG
gaggacaaatgcttatttaa

SEQ ID NO: 210774 - DNA, 20 bp, Artificial Sequence
  Description of Artificial Sequence: Synthetic oligonucleotide
  Target: LAMA2; (-) strand; PAM type: YTN; PAM sequence: TTA
aacaggggaaaaaatctgga

SEQ ID NO: 210775 - DNA, 20 bp, Artificial Sequence
  Description of Artificial Sequence: Synthetic oligonucleotide
  Target: LAMA2; (-) strand; PAM type: YTN; PAM sequence: CTC
atggaaaagaagaatcaaca

SEQ ID NO: 210776 - DNA, 20 bp, Artificial Sequence
  Description of Artificial Sequence: Synthetic oligonucleotide
  Target: LAMA2; (-) strand; PAM type: YTN; PAM sequence: TTG
cgtaaatagtccctcatgga

SEQ ID NO: 210777 - DNA, 20 bp, Artificial Sequence
  Description of Artificial Sequence: Synthetic oligonucleotide
  Target: LAMA2; (-) strand; PAM type: YTN; PAM sequence: TTG
ttgcgtaaatagtccctcat

SEQ ID NO: 210778 - DNA, 20 bp, Artificial Sequence
  Description of Artificial Sequence: Synthetic oligonucleotide
  Target: LAMA2; (-) strand; PAM type: YTN; PAM sequence: TTA
tgtagattgttgcgtaaata

SEQ ID NO: 210779 - DNA, 20 bp, Artificial Sequence
  Description of Artificial Sequence: Synthetic oligonucleotide
  Target: LAMA2; (-) strand; PAM type: YTN; PAM sequence: TTA
gtagggaataaagattatgt

SEQ ID NO: 210780 - DNA, 20 bp, Artificial Sequence
  Description of Artificial Sequence: Synthetic oligonucleotide
  Target: LAMA2; (-) strand; PAM type: YTN; PAM sequence: TTA
aatgttagtagggaataaag

SEQ ID NO: 210781 - DNA, 20 bp, Artificial Sequence
  Description of Artificial Sequence: Synthetic oligonucleotide
  Target: LAMA2; (-) strand; PAM type: YTN; PAM sequence: TTA
ggatatcacagttaaatgtt

SEQ ID NO: 210782 - DNA, 20 bp, Artificial Sequence
  Description of Artificial Sequence: Synthetic oligonucleotide
  Target: LAMA2; (-) strand; PAM type: YTN; PAM sequence: TTT
aggatatcacagttaaatgt

SEQ ID NO: 210783 - DNA, 20 bp, Artificial Sequence
  Description of Artificial Sequence: Synthetic oligonucleotide
  Target: LAMA2; (-) strand; PAM type: YTN; PAM sequence: TTT
taggatatcacagttaaatg

SEQ ID NO: 210784 - DNA, 20 bp, Artificial Sequence
  Description of Artificial Sequence: Synthetic oligonucleotide
  Target: LAMA2; (-) strand; PAM type: YTN; PAM sequence: CTC
aatcaggccattttaggata

SEQ ID NO: 210785 - DNA, 20 bp, Artificial Sequence
  Description of Artificial Sequence: Synthetic oligonucleotide
  Target: LAMA2; (-) strand; PAM type: YTN; PAM sequence: TTC
ctcaatcaggccattttagg

SEQ ID NO: 210786 - DNA, 20 bp, Artificial Sequence
  Description of Artificial Sequence: Synthetic oligonucleotide
  Target: LAMA2; (-) strand; PAM type: YTN; PAM sequence: CTC
aatcagttcctcaatcaggc

SEQ ID NO: 210787 - DNA, 20 bp, Artificial Sequence
  Description of Artificial Sequence: Synthetic oligonucleotide
  Target: LAMA2; (-) strand; PAM type: YTN; PAM sequence: TTA
atcatctcaatcagttcctc

SEQ ID NO: 210788 - DNA, 20 bp, Artificial Sequence
  Description of Artificial Sequence: Synthetic oligonucleotide
  Target: LAMA2; (-) strand; PAM type: YTN; PAM sequence: CTT
aatcatctcaatcagttcct

SEQ ID NO: 210789 - DNA, 20 bp, Artificial Sequence
  Description of Artificial Sequence: Synthetic oligonucleotide
  Target: LAMA2; (-) strand; PAM type: YTN; PAM sequence: CTC
ttaatcatctcaatcagttc

SEQ ID NO: 210790 - DNA, 20 bp, Artificial Sequence
  Description of Artificial Sequence: Synthetic oligonucleotide
  Target: LAMA2; (-) strand; PAM type: YTN; PAM sequence: CTA
cagagctcttaatcatctca

SEQ ID NO: 210791 - DNA, 20 bp, Artificial Sequence
  Description of Artificial Sequence: Synthetic oligonucleotide
  Target: LAMA2; (-) strand; PAM type: YTN; PAM sequence: CTG
ctacagagctcttaatcatc

SEQ ID NO: 210792 - DNA, 20 bp, Artificial Sequence
  Description of Artificial Sequence: Synthetic oligonucleotide
  Target: LAMA2; (-) strand; PAM type: YTN; PAM sequence: CTG
cgccctgctacagagctctt

SEQ ID NO: 210793 - DNA, 20 bp, Artificial Sequence
  Description of Artificial Sequence: Synthetic oligonucleotide
  Target: LAMA2; (-) strand; PAM type: YTN; PAM sequence: TTA
caggcgtgagccactgcgcc

SEQ ID NO: 210794 - DNA, 20 bp, Artificial Sequence
  Description of Artificial Sequence: Synthetic oligonucleotide
  Target: LAMA2; (-) strand; PAM type: YTN; PAM sequence: CTA
ggattacaggcgtgagccac

SEQ ID NO: 210795 - DNA, 20 bp, Artificial Sequence
  Description of Artificial Sequence: Synthetic oligonucleotide
  Target: LAMA2; (-) strand; PAM type: YTN; PAM sequence: CTC
acagaagtgctaggattaca

SEQ ID NO: 210796 - DNA, 20 bp, Artificial Sequence
  Description of Artificial Sequence: Synthetic oligonucleotide
  Target: LAMA2; (-) strand; PAM type: YTN; PAM sequence: CTC
agcctcacagaagtgctagg

SEQ ID NO: 210797 - DNA, 20 bp, Artificial Sequence
  Description of Artificial Sequence: Synthetic oligonucleotide
  Target: LAMA2; (-) strand; PAM type: YTN; PAM sequence: CTG
cctcagcctcacagaagtgc

SEQ ID NO: 210798 - DNA, 20 bp, Artificial Sequence
  Description of Artificial Sequence: Synthetic oligonucleotide
  Target: LAMA2; (-) strand; PAM type: YTN; PAM sequence: CTG
cctgcctcagcctcacagaa

SEQ ID NO: 210799 - DNA, 20 bp, Artificial Sequence
  Description of Artificial Sequence: Synthetic oligonucleotide
  Target: LAMA2; (-) strand; PAM type: YTN; PAM sequence: CTC
aggtgatctgcctgcctcag

SEQ ID NO: 210800 - DNA, 20 bp, Artificial Sequence
  Description of Artificial Sequence: Synthetic oligonucleotide
  Target: LAMA2; (-) strand; PAM type: YTN; PAM sequence: CTG
acctcaggtgatctgcctgc

SEQ ID NO: 210801 - DNA, 20 bp, Artificial Sequence
  Description of Artificial Sequence: Synthetic oligonucleotide
  Target: LAMA2; (-) strand; PAM type: YTN; PAM sequence: CTC
ctgacctcaggtgatctgcc

SEQ ID NO: 210802 - DNA, 20 bp, Artificial Sequence
  Description of Artificial Sequence: Synthetic oligonucleotide
  Target: LAMA2; (-) strand; PAM type: YTN; PAM sequence: CTC
gaactcctgacctcaggtga

SEQ ID NO: 210803 - DNA, 20 bp, Artificial Sequence
  Description of Artificial Sequence: Synthetic oligonucleotide
  Target: LAMA2; (-) strand; PAM type: YTN; PAM sequence: CTG
gtctcgaactcctgacctca

SEQ ID NO: 210804 - DNA, 20 bp, Artificial Sequence
  Description of Artificial Sequence: Synthetic oligonucleotide
  Target: LAMA2; (-) strand; PAM type: YTN; PAM sequence: TTG
gccaggctggtctcgaactc

SEQ ID NO: 210805 - DNA, 20 bp, Artificial Sequence
  Description of Artificial Sequence: Synthetic oligonucleotide
  Target: LAMA2; (-) strand; PAM type: YTN; PAM sequence: TTC
gccatgttggccaggctggt

SEQ ID NO: 210806 - DNA, 20 bp, Artificial Sequence
  Description of Artificial Sequence: Synthetic oligonucleotide
  Target: LAMA2; (-) strand; PAM type: YTN; PAM sequence: TTT
cgccatgttggccaggctgg

SEQ ID NO: 210807 - DNA, 20 bp, Artificial Sequence
  Description of Artificial Sequence: Synthetic oligonucleotide
  Target: LAMA2; (-) strand; PAM type: YTN; PAM sequence: TTA
gtagagaccagggtttcgcc

SEQ ID NO: 210808 - DNA, 20 bp, Artificial Sequence
  Description of Artificial Sequence: Synthetic oligonucleotide
  Target: LAMA2; (-) strand; PAM type: YTN; PAM sequence: TTT
agtagagaccagggtttcgc

SEQ ID NO: 210809 - DNA, 20 bp, Artificial Sequence
  Description of Artificial Sequence: Synthetic oligonucleotide
  Target: LAMA2; (-) strand; PAM type: YTN; PAM sequence: TTT
tagtagagaccagggtttcg

SEQ ID NO: 210810 - DNA, 20 bp, Artificial Sequence
  Description of Artificial Sequence: Synthetic oligonucleotide
  Target: LAMA2; (-) strand; PAM type: YTN; PAM sequence: CTT
ttagtagagaccagggtttc

SEQ ID NO: 210811 - DNA, 20 bp, Artificial Sequence
  Description of Artificial Sequence: Synthetic oligonucleotide
  Target: LAMA2; (-) strand; PAM type: YTN; PAM sequence: TTG
gtacttttagtagagaccag

SEQ ID NO: 210812 - DNA, 20 bp, Artificial Sequence
  Description of Artificial Sequence: Synthetic oligonucleotide
  Target: LAMA2; (-) strand; PAM type: YTN; PAM sequence: TTT
ggtacttttagtagagacca

SEQ ID NO: 210813 - DNA, 20 bp, Artificial Sequence
  Description of Artificial Sequence: Synthetic oligonucleotide
  Target: LAMA2; (-) strand; PAM type: YTN; PAM sequence: TTT
tggtacttttagtagagacc

SEQ ID NO: 210814 - DNA, 20 bp, Artificial Sequence
  Description of Artificial Sequence: Synthetic oligonucleotide
  Target: LAMA2; (-) strand; PAM type: YTN; PAM sequence: CTG
attttggtacttttagtaga

SEQ ID NO: 210815 - DNA, 20 bp, Artificial Sequence
  Description of Artificial Sequence: Synthetic oligonucleotide
  Target: LAMA2; (-) strand; PAM type: YTN; PAM sequence: CTG
gctgattttggtacttttag

SEQ ID NO: 210816 - DNA, 20 bp, Artificial Sequence
  Description of Artificial Sequence: Synthetic oligonucleotide
  Target: LAMA2; (-) strand; PAM type: YTN; PAM sequence: CTG
ccaccacacctggctgattt

SEQ ID NO: 210817 - DNA, 20 bp, Artificial Sequence
  Description of Artificial Sequence: Synthetic oligonucleotide
  Target: LAMA2; (-) strand; PAM type: YTN; PAM sequence: TTA
caggtgcctgccaccacacc

SEQ ID NO: 210818 - DNA, 20 bp, Artificial Sequence
  Description of Artificial Sequence: Synthetic oligonucleotide
  Target: LAMA2; (-) strand; PAM type: YTN; PAM sequence: CTG
ggattacaggtgcctgccac

SEQ ID NO: 210819 - DNA, 20 bp, Artificial Sequence
  Description of Artificial Sequence: Synthetic oligonucleotide
  Target: LAMA2; (-) strand; PAM type: YTN; PAM sequence: CTG
agtagctgggattacaggtg

SEQ ID NO: 210820 - DNA, 20 bp, Artificial Sequence
  Description of Artificial Sequence: Synthetic oligonucleotide
  Target: LAMA2; (-) strand; PAM type: YTN; PAM sequence: CTC
ctgagtagctgggattacag

SEQ ID NO: 210821 - DNA, 20 bp, Artificial Sequence
  Description of Artificial Sequence: Synthetic oligonucleotide
  Target: LAMA2; (-) strand; PAM type: YTN; PAM sequence: CTC
agcctcctgagtagctggga

SEQ ID NO: 210822 - DNA, 20 bp, Artificial Sequence
  Description of Artificial Sequence: Synthetic oligonucleotide
  Target: LAMA2; (-) strand; PAM type: YTN; PAM sequence: CTG
cctcagcctcctgagtagct

SEQ ID NO: 210823 - DNA, 20 bp, Artificial Sequence
  Description of Artificial Sequence: Synthetic oligonucleotide
  Target: LAMA2; (-) strand; PAM type: YTN; PAM sequence: CTC
ctgcctcagcctcctgagta

SEQ ID NO: 210824 - DNA, 20 bp, Artificial Sequence
  Description of Artificial Sequence: Synthetic oligonucleotide
  Target: LAMA2; (-) strand; PAM type: YTN; PAM sequence: TTC
tcctgcctcagcctcctgag

SEQ ID NO: 210825 - DNA, 20 bp, Artificial Sequence
  Description of Artificial Sequence: Synthetic oligonucleotide
  Target: LAMA2; (-) strand; PAM type: YTN; PAM sequence: TTA
gcaattctcctgcctcagcc

SEQ ID NO: 210826 - DNA, 20 bp, Artificial Sequence
  Description of Artificial Sequence: Synthetic oligonucleotide
  Target: LAMA2; (-) strand; PAM type: YTN; PAM sequence: TTT
agcaattctcctgcctcagc

SEQ ID NO: 210827 - DNA, 20 bp, Artificial Sequence
  Description of Artificial Sequence: Synthetic oligonucleotide
  Target: LAMA2; (-) strand; PAM type: YTN; PAM sequence: TTT
tagcaattctcctgcctcag

SEQ ID NO: 210828 - DNA, 20 bp, Artificial Sequence
  Description of Artificial Sequence: Synthetic oligonucleotide
  Target: LAMA2; (-) strand; PAM type: YTN; PAM sequence: TTT
ttagcaattctcctgcctca

SEQ ID NO: 210829 - DNA, 20 bp, Artificial Sequence
  Description of Artificial Sequence: Synthetic oligonucleotide
  Target: LAMA2; (-) strand; PAM type: YTN; PAM sequence: CTC
ccaagtttttagcaattctc

SEQ ID NO: 210830 - DNA, 20 bp, Artificial Sequence
  Description of Artificial Sequence: Synthetic oligonucleotide
  Target: LAMA2; (-) strand; PAM type: YTN; PAM sequence: TTG
cctcccaagtttttagcaat

SEQ ID NO: 210831 - DNA, 20 bp, Artificial Sequence
  Description of Artificial Sequence: Synthetic oligonucleotide
  Target: LAMA2; (-) strand; PAM type: YTN; PAM sequence: CTT
gcctcccaagtttttagcaa

SEQ ID NO: 210832 - DNA, 20 bp, Artificial Sequence
  Description of Artificial Sequence: Synthetic oligonucleotide
  Target: LAMA2; (-) strand; PAM type: YTN; PAM sequence: CTC
ttgcctcccaagtttttagc

SEQ ID NO: 210833 - DNA, 20 bp, Artificial Sequence
  Description of Artificial Sequence: Synthetic oligonucleotide
  Target: LAMA2; (-) strand; PAM type: YTN; PAM sequence: CTG
caactcttgcctcccaagtt

SEQ ID NO: 210834 - DNA, 20 bp, Artificial Sequence
  Description of Artificial Sequence: Synthetic oligonucleotide
  Target: LAMA2; (-) strand; PAM type: YTN; PAM sequence: CTC
actgcaactcttgcctccca

SEQ ID NO: 210835 - DNA, 20 bp, Artificial Sequence
  Description of Artificial Sequence: Synthetic oligonucleotide
  Target: LAMA2; (-) strand; PAM type: YTN; PAM sequence: CTC
agctcactgcaactcttgcc

SEQ ID NO: 210836 - DNA, 20 bp, Artificial Sequence
  Description of Artificial Sequence: Synthetic oligonucleotide
  Target: LAMA2; (-) strand; PAM type: YTN; PAM sequence: CTG
gagtgcagtggtgcgatctc

SEQ ID NO: 210837 - DNA, 20 bp, Artificial Sequence
  Description of Artificial Sequence: Synthetic oligonucleotide
  Target: LAMA2; (-) strand; PAM type: YTN; PAM sequence: TTG
tcgcccaggctggagtgcag

SEQ ID NO: 210838 - DNA, 20 bp, Artificial Sequence
  Description of Artificial Sequence: Synthetic oligonucleotide
  Target: LAMA2; (-) strand; PAM type: YTN; PAM sequence: CTT
gtcgcccaggctggagtgca

SEQ ID NO: 210839 - DNA, 20 bp, Artificial Sequence
  Description of Artificial Sequence: Synthetic oligonucleotide
  Target: LAMA2; (-) strand; PAM type: YTN; PAM sequence: CTC
ttgtcgcccaggctggagtg

SEQ ID NO: 210840 - DNA, 20 bp, Artificial Sequence
  Description of Artificial Sequence: Synthetic oligonucleotide
  Target: LAMA2; (-) strand; PAM type: YTN; PAM sequence: TTG
ctcttgtcgcccaggctgga

SEQ ID NO: 210841 - DNA, 20 bp, Artificial Sequence
  Description of Artificial Sequence: Synthetic oligonucleotide
  Target: LAMA2; (-) strand; PAM type: YTN; PAM sequence: CTT
gctcttgtcgcccaggctgg

SEQ ID NO: 210842 - DNA, 20 bp, Artificial Sequence
  Description of Artificial Sequence: Synthetic oligonucleotide
  Target: LAMA2; (-) strand; PAM type: YTN; PAM sequence: TTG
agatggagtcttgctcttgt

SEQ ID NO: 210843 - DNA, 20 bp, Artificial Sequence
  Description of Artificial Sequence: Synthetic oligonucleotide
  Target: LAMA2; (-) strand; PAM type: YTN; PAM sequence: TTT
gagatggagtcttgctcttg

SEQ ID NO: 210844 - DNA, 20 bp, Artificial Sequence
  Description of Artificial Sequence: Synthetic oligonucleotide
  Target: LAMA2; (-) strand; PAM type: YTN; PAM sequence: TTT
tgagatggagtcttgctctt

SEQ ID NO: 210845 - DNA, 20 bp, Artificial Sequence
  Description of Artificial Sequence: Synthetic oligonucleotide
  Target: LAMA2; (-) strand; PAM type: YTN; PAM sequence: TTT
ttgagatggagtcttgctct

SEQ ID NO: 210846 - DNA, 20 bp, Artificial Sequence
  Description of Artificial Sequence: Synthetic oligonucleotide
  Target: LAMA2; (-) strand; PAM type: YTN; PAM sequence: CTT
tttgagatggagtcttgctc

SEQ ID NO: 210847 - DNA, 20 bp, Artificial Sequence
  Description of Artificial Sequence: Synthetic oligonucleotide
  Target: LAMA2; (-) strand; PAM type: YTN; PAM sequence: TTC
tttttgagatggagtcttgc

SEQ ID NO: 210848 - DNA, 20 bp, Artificial Sequence
  Description of Artificial Sequence: Synthetic oligonucleotide
  Target: LAMA2; (-) strand; PAM type: YTN; PAM sequence: TTT
ctttttgagatggagtcttg

SEQ ID NO: 210849 - DNA, 20 bp, Artificial Sequence
  Description of Artificial Sequence: Synthetic oligonucleotide
  Target: LAMA2; (-) strand; PAM type: YTN; PAM sequence: TTT
tctttttgagatggagtctt

SEQ ID NO: 210850 - DNA, 20 bp, Artificial Sequence
  Description of Artificial Sequence: Synthetic oligonucleotide
  Target: LAMA2; (-) strand; PAM type: YTN; PAM sequence: TTT
ttctttttgagatggagtct

SEQ ID NO: 210851 - DNA, 20 bp, Artificial Sequence
  Description of Artificial Sequence: Synthetic oligonucleotide
  Target: LAMA2; (-) strand; PAM type: YTN; PAM sequence: TTT
tttctttttgagatggagtc

SEQ ID NO: 210852 - DNA, 20 bp, Artificial Sequence
  Description of Artificial Sequence: Synthetic oligonucleotide
  Target: LAMA2; (-) strand; PAM type: YTN; PAM sequence: TTT
ttttctttttgagatggagt

SEQ ID NO: 210853 - DNA, 20 bp, Artificial Sequence
  Description of Artificial Sequence: Synthetic oligonucleotide
  Target: LAMA2; (-) strand; PAM type: YTN; PAM sequence: TTT
tttttctttttgagatggag

SEQ ID NO: 210854 - DNA, 20 bp, Artificial Sequence
  Description of Artificial Sequence: Synthetic oligonucleotide
  Target: LAMA2; (-) strand; PAM type: YTN; PAM sequence: TTT
ttttttctttttgagatgga

SEQ ID NO: 210855 - DNA, 20 bp, Artificial Sequence
  Description of Artificial Sequence: Synthetic oligonucleotide
  Target: LAMA2; (-) strand; PAM type: YTN; PAM sequence: CTT
tttttttctttttgagatgg

SEQ ID NO: 210856 - DNA, 20 bp, Artificial Sequence
  Description of Artificial Sequence: Synthetic oligonucleotide
  Target: LAMA2; (-) strand; PAM type: YTN; PAM sequence: TTC
tttttttttctttttgagat

SEQ ID NO: 210857 - DNA, 20 bp, Artificial Sequence
  Description of Artificial Sequence: Synthetic oligonucleotide
  Target: LAMA2; (-) strand; PAM type: YTN; PAM sequence: TTT
ctttttttttctttttgaga

SEQ ID NO: 210858 - DNA, 20 bp, Artificial Sequence
  Description of Artificial Sequence: Synthetic oligonucleotide
  Target: LAMA2; (-) strand; PAM type: YTN; PAM sequence: TTT
tctttttttttctttttgag

SEQ ID NO: 210859 - DNA, 20 bp, Artificial Sequence
  Description of Artificial Sequence: Synthetic oligonucleotide
  Target: LAMA2; (-) strand; PAM type: YTN; PAM sequence: TTT
ttctttttttttctttttga

SEQ ID NO: 210860 - DNA, 20 bp, Artificial Sequence
  Description of Artificial Sequence: Synthetic oligonucleotide
  Target: LAMA2; (-) strand; PAM type: YTN; PAM sequence: TTT
tttctttttttttctttttg

SEQ ID NO: 210861 - DNA, 20 bp, Artificial Sequence
  Description of Artificial Sequence: Synthetic oligonucleotide
  Target: LAMA2; (-) strand; PAM type: YTN; PAM sequence: TTT
ttttctttttttttcttttt

SEQ ID NO: 210862 - DNA, 20 bp, Artificial Sequence
  Description of Artificial Sequence: Synthetic oligonucleotide
  Target: LAMA2; (-) strand; PAM type: YTN; PAM sequence: TTT
tttttctttttttttctttt

SEQ ID NO: 210863 - DNA, 20 bp, Artificial Sequence
  Description of Artificial Sequence: Synthetic oligonucleotide
  Target: LAMA2; (-) strand; PAM type: YTN; PAM sequence: TTT
ttttttctttttttttcttt

SEQ ID NO: 210864 - DNA, 20 bp, Artificial Sequence
  Description of Artificial Sequence: Synthetic oligonucleotide
  Target: LAMA2; (-) strand; PAM type: YTN; PAM sequence: TTT
tttttttctttttttttctt

SEQ ID NO: 210865 - DNA, 20 bp, Artificial Sequence
  Description of Artificial Sequence: Synthetic oligonucleotide
  Target: LAMA2; (-) strand; PAM type: YTN; PAM sequence: TTT
ttttttttctttttttttct

SEQ ID NO: 210866 - DNA, 20 bp, Artificial Sequence
  Description of Artificial Sequence: Synthetic oligonucleotide
  Target: LAMA2; (-) strand; PAM type: YTN; PAM sequence: TTT
tttttttttctttttttttc

SEQ ID NO: 210867 - DNA, 20 bp, Artificial Sequence
  Description of Artificial Sequence: Synthetic oligonucleotide
  Target: LAMA2; (-) strand; PAM type: YTN; PAM sequence: TTT
ttttttttttcttttttttt

SEQ ID NO: 210868 - DNA, 20 bp, Artificial Sequence
  Description of Artificial Sequence: Synthetic oligonucleotide
  Target: LAMA2; (-) strand; PAM type: YTN; PAM sequence: TTT
tttttttttttctttttttt

SEQ ID NO: 210869 - DNA, 20 bp, Artificial Sequence
  Description of Artificial Sequence: Synthetic oligonucleotide
  Target: LAMA2; (-) strand; PAM type: YTN; PAM sequence: TTT
ttttttttttttcttttttt

SEQ ID NO: 210870 - DNA, 20 bp, Artificial Sequence
  Description of Artificial Sequence: Synthetic oligonucleotide
  Target: LAMA2; (-) strand; PAM type: YTN; PAM sequence: TTT
tttttttttttttctttttt

SEQ ID NO: 210871 - DNA, 20 bp, Artificial Sequence
  Description of Artificial Sequence: Synthetic oligonucleotide
  Target: LAMA2; (-) strand; PAM type: YTN; PAM sequence: TTT
ttttttttttttttcttttt

SEQ ID NO: 210872 - DNA, 20 bp, Artificial Sequence
  Description of Artificial Sequence: Synthetic oligonucleotide
  Target: LAMA2; (-) strand; PAM type: YTN; PAM sequence: CTT
tttttttttttttttctttt

SEQ ID NO: 210873 - DNA, 20 bp, Artificial Sequence
  Description of Artificial Sequence: Synthetic oligonucleotide
  Target: LAMA2; (-) strand; PAM type: YTN; PAM sequence: TTC
tttttttttttttttttctt

SEQ ID NO: 210874 - DNA, 20 bp, Artificial Sequence
  Description of Artificial Sequence: Synthetic oligonucleotide
  Target: LAMA2; (-) strand; PAM type: YTN; PAM sequence: CTT
ctttttttttttttttttct

SEQ ID NO: 210875 - DNA, 20 bp, Artificial Sequence
  Description of Artificial Sequence: Synthetic oligonucleotide
  Target: LAMA2; (-) strand; PAM type: YTN; PAM sequence: CTA
tacacagacttctttttttt

SEQ ID NO: 210876 - DNA, 20 bp, Artificial Sequence
  Description of Artificial Sequence: Synthetic oligonucleotide
  Target: LAMA2; (-) strand; PAM type: YTN; PAM sequence: CTG
ccctatacacagacttcttt

SEQ ID NO: 210877 - DNA, 20 bp, Artificial Sequence
  Description of Artificial Sequence: Synthetic oligonucleotide
  Target: LAMA2; (-) strand; PAM type: YTN; PAM sequence: TTC
gtcctgccctatacacagac

SEQ ID NO: 210878 - DNA, 20 bp, Artificial Sequence
  Description of Artificial Sequence: Synthetic oligonucleotide
  Target: LAMA2; (-) strand; PAM type: YTN; PAM sequence: TTT
cgtcctgccctatacacaga

SEQ ID NO: 210879 - DNA, 20 bp, Artificial Sequence
  Description of Artificial Sequence: Synthetic oligonucleotide
  Target: LAMA2; (-) strand; PAM type: YTN; PAM sequence: CTT
tcgtcctgccctatacacag

SEQ ID NO: 210880 - DNA, 20 bp, Artificial Sequence
  Description of Artificial Sequence: Synthetic oligonucleotide
  Target: LAMA2; (-) strand; PAM type: YTN; PAM sequence: CTA
ccaaatcacctttcgtcctg

SEQ ID NO: 210881 - DNA, 20 bp, Artificial Sequence
  Description of Artificial Sequence: Synthetic oligonucleotide
  Target: LAMA2; (-) strand; PAM type: YTN; PAM sequence: TTC
taccaaatcacctttcgtcc

SEQ ID NO: 210882 - DNA, 20 bp, Artificial Sequence
  Description of Artificial Sequence: Synthetic oligonucleotide
  Target: LAMA2; (-) strand; PAM type: YTN; PAM sequence: TTT
ctaccaaatcacctttcgtc

SEQ ID NO: 210883 - DNA, 20 bp, Artificial Sequence
  Description of Artificial Sequence: Synthetic oligonucleotide
  Target: LAMA2; (-) strand; PAM type: YTN; PAM sequence: CTT
tctaccaaatcacctttcgt

SEQ ID NO: 210884 - DNA, 20 bp, Artificial Sequence
  Description of Artificial Sequence: Synthetic oligonucleotide
  Target: LAMA2; (-) strand; PAM type: YTN; PAM sequence: CTA
gctttctaccaaatcacctt

SEQ ID NO: 210885 - DNA, 20 bp, Artificial Sequence
  Description of Artificial Sequence: Synthetic oligonucleotide
  Target: LAMA2; (-) strand; PAM type: YTN; PAM sequence: CTG
gcaaaacagctagctttcta

SEQ ID NO: 210886 - DNA, 20 bp, Artificial Sequence
  Description of Artificial Sequence: Synthetic oligonucleotide
  Target: LAMA2; (-) strand; PAM type: YTN; PAM sequence: CTG
cctggcaaaacagctagctt

SEQ ID NO: 210887 - DNA, 20 bp, Artificial Sequence
  Description of Artificial Sequence: Synthetic oligonucleotide
  Target: LAMA2; (-) strand; PAM type: YTN; PAM sequence: TTA
atgctgcctggcaaaacagc

SEQ ID NO: 210888 - DNA, 20 bp, Artificial Sequence
  Description of Artificial Sequence: Synthetic oligonucleotide
  Target: LAMA2; (-) strand; PAM type: YTN; PAM sequence: TTT
aatgctgcctggcaaaacag

SEQ ID NO: 210889 - DNA, 20 bp, Artificial Sequence
  Description of Artificial Sequence: Synthetic oligonucleotide
  Target: LAMA2; (-) strand; PAM type: YTN; PAM sequence: TTA
catttaatgctgcctggcaa

SEQ ID NO: 210890 - DNA, 20 bp, Artificial Sequence
  Description of Artificial Sequence: Synthetic oligonucleotide
  Target: LAMA2; (-) strand; PAM type: YTN; PAM sequence: CTT
acatttaatgctgcctggca

SEQ ID NO: 210891 - DNA, 20 bp, Artificial Sequence
  Description of Artificial Sequence: Synthetic oligonucleotide
  Target: LAMA2; (-) strand; PAM type: YTN; PAM sequence: TTC
ttacatttaatgctgcctgg

SEQ ID NO: 210892 - DNA, 20 bp, Artificial Sequence
  Description of Artificial Sequence: Synthetic oligonucleotide
  Target: LAMA2; (-) strand; PAM type: YTN; PAM sequence: CTG
cacattcttacatttaatgc

SEQ ID NO: 210893 - DNA, 20 bp, Artificial Sequence
  Description of Artificial Sequence: Synthetic oligonucleotide
  Target: LAMA2; (-) strand; PAM type: YTN; PAM sequence: CTG
gagaaatgacaggatcccag

SEQ ID NO: 210894 - DNA, 20 bp, Artificial Sequence
  Description of Artificial Sequence: Synthetic oligonucleotide
  Target: LAMA2; (-) strand; PAM type: YTN; PAM sequence: TTC
tggagaaatgacaggatccc

SEQ ID NO: 210895 - DNA, 20 bp, Artificial Sequence
  Description of Artificial Sequence: Synthetic oligonucleotide
  Target: LAMA2; (-) strand; PAM type: YTN; PAM sequence: TTA
ccattctggagaaatgacag

SEQ ID NO: 210896 - DNA, 20 bp, Artificial Sequence
  Description of Artificial Sequence: Synthetic oligonucleotide
  Target: LAMA2; (-) strand; PAM type: YTN; PAM sequence: CTC
caggaataagtatggagatt

SEQ ID NO: 210897 - DNA, 20 bp, Artificial Sequence
  Description of Artificial Sequence: Synthetic oligonucleotide
  Target: LAMA2; (-) strand; PAM type: YTN; PAM sequence: CTC
ctccaggaataagtatggag

SEQ ID NO: 210898 - DNA, 20 bp, Artificial Sequence
  Description of Artificial Sequence: Synthetic oligonucleotide
  Target: LAMA2; (-) strand; PAM type: YTN; PAM sequence: CTC
tcctccaggaataagtatgg

SEQ ID NO: 210899 - DNA, 20 bp, Artificial Sequence
  Description of Artificial Sequence: Synthetic oligonucleotide
  Target: LAMA2; (-) strand; PAM type: YTN; PAM sequence: TTG
taaccacctctcctccagga

SEQ ID NO: 210900 - DNA, 20 bp, Artificial Sequence
  Description of Artificial Sequence: Synthetic oligonucleotide
  Target: LAMA2; (-) strand; PAM type: YTN; PAM sequence: CTT
gtaaccacctctcctccagg

SEQ ID NO: 210901 - DNA, 20 bp, Artificial Sequence
  Description of Artificial Sequence: Synthetic oligonucleotide
  Target: LAMA2; (-) strand; PAM type: YTN; PAM sequence: TTG
tggccccagaatacttgtaa

SEQ ID NO: 210902 - DNA, 20 bp, Artificial Sequence
  Description of Artificial Sequence: Synthetic oligonucleotide
  Target: LAMA2; (-) strand; PAM type: YTN; PAM sequence: TTC
aggggtagacaaaaggccaa

SEQ ID NO: 210903 - DNA, 20 bp, Artificial Sequence
  Description of Artificial Sequence: Synthetic oligonucleotide
  Target: LAMA2; (-) strand; PAM type: YTN; PAM sequence: CTT
caggggtagacaaaaggcca

SEQ ID NO: 210904 - DNA, 20 bp, Artificial Sequence
  Description of Artificial Sequence: Synthetic oligonucleotide
  Target: LAMA2; (-) strand; PAM type: YTN; PAM sequence: TTC
cagtgatggaaacttcaggg

SEQ ID NO: 210905 - DNA, 20 bp, Artificial Sequence
  Description of Artificial Sequence: Synthetic oligonucleotide
  Target: LAMA2; (-) strand; PAM type: YTN; PAM sequence: TTA
ttccagtgatggaaacttca

SEQ ID NO: 210906 - DNA, 20 bp, Artificial Sequence
  Description of Artificial Sequence: Synthetic oligonucleotide
  Target: LAMA2; (-) strand; PAM type: YTN; PAM sequence: TTT
attccagtgatggaaacttc

SEQ ID NO: 210907 - DNA, 20 bp, Artificial Sequence
  Description of Artificial Sequence: Synthetic oligonucleotide
  Target: LAMA2; (-) strand; PAM type: YTN; PAM sequence: CTG
tccagtttattccagtgatg

SEQ ID NO: 210908 - DNA, 20 bp, Artificial Sequence
  Description of Artificial Sequence: Synthetic oligonucleotide
  Target: LAMA2; (-) strand; PAM type: YTN; PAM sequence: CTA
actgtccagtttattccagt

SEQ ID NO: 210909 - DNA, 20 bp, Artificial Sequence
  Description of Artificial Sequence: Synthetic oligonucleotide
  Target: LAMA2; (-) strand; PAM type: YTN; PAM sequence: CTG
tctaactgtccagtttattc

SEQ ID NO: 210910 - DNA, 20 bp, Artificial Sequence
  Description of Artificial Sequence: Synthetic oligonucleotide
  Target: LAMA2; (-) strand; PAM type: YTN; PAM sequence: TTA
atctgtctaactgtccagtt

SEQ ID NO: 210911 - DNA, 20 bp, Artificial Sequence
  Description of Artificial Sequence: Synthetic oligonucleotide
  Target: LAMA2; (-) strand; PAM type: YTN; PAM sequence: CTC
atgttaatctgtctaactgt

SEQ ID NO: 210912 - DNA, 20 bp, Artificial Sequence
  Description of Artificial Sequence: Synthetic oligonucleotide
  Target: LAMA2; (-) strand; PAM type: YTN; PAM sequence: TTC
tcatgttaatctgtctaact

SEQ ID NO: 210913 - DNA, 20 bp, Artificial Sequence
  Description of Artificial Sequence: Synthetic oligonucleotide
  Target: LAMA2; (-) strand; PAM type: YTN; PAM sequence: TTT
ctcatgttaatctgtctaac

SEQ ID NO: 210914 - DNA, 20 bp, Artificial Sequence
  Description of Artificial Sequence: Synthetic oligonucleotide
  Target: LAMA2; (-) strand; PAM type: YTN; PAM sequence: TTT
tctcatgttaatctgtctaa

SEQ ID NO: 210915 - DNA, 20 bp, Artificial Sequence
  Description of Artificial Sequence: Synthetic oligonucleotide
  Target: LAMA2; (-) strand; PAM type: YTN; PAM sequence: CTT
ttctcatgttaatctgtcta

SEQ ID NO: 210916 - DNA, 20 bp, Artificial Sequence
  Description of Artificial Sequence: Synthetic oligonucleotide
  Target: LAMA2; (-) strand; PAM type: YTN; PAM sequence: TTC
caggtacatgtgcgtgtaat

SEQ ID NO: 210917 - DNA, 20 bp, Artificial Sequence
  Description of Artificial Sequence: Synthetic oligonucleotide
  Target: LAMA2; (-) strand; PAM type: YTN; PAM sequence: CTT
ccaggtacatgtgcgtgtaa

SEQ ID NO: 210918 - DNA, 20 bp, Artificial Sequence
  Description of Artificial Sequence: Synthetic oligonucleotide
  Target: LAMA2; (-) strand; PAM type: YTN; PAM sequence: TTG
ccttccaggtacatgtgcgt

SEQ ID NO: 210919 - DNA, 20 bp, Artificial Sequence
  Description of Artificial Sequence: Synthetic oligonucleotide
  Target: LAMA2; (-) strand; PAM type: YTN; PAM sequence: TTG
ttgccttccaggtacatgtg

SEQ ID NO: 210920 - DNA, 20 bp, Artificial Sequence
  Description of Artificial Sequence: Synthetic oligonucleotide
  Target: LAMA2; (-) strand; PAM type: YTN; PAM sequence: TTT
gttgccttccaggtacatgt

SEQ ID NO: 210921 - DNA, 20 bp, Artificial Sequence
  Description of Artificial Sequence: Synthetic oligonucleotide
  Target: LAMA2; (-) strand; PAM type: YTN; PAM sequence: CTT
tgttgccttccaggtacatg

SEQ ID NO: 210922 - DNA, 20 bp, Artificial Sequence
  Description of Artificial Sequence: Synthetic oligonucleotide
  Target: LAMA2; (-) strand; PAM type: YTN; PAM sequence: CTC
atactttgttgccttccagg

SEQ ID NO: 210923 - DNA, 20 bp, Artificial Sequence
  Description of Artificial Sequence: Synthetic oligonucleotide
  Target: LAMA2; (-) strand; PAM type: YTN; PAM sequence: TTA
agtctcatactttgttgcct

SEQ ID NO: 210924 - DNA, 20 bp, Artificial Sequence
  Description of Artificial Sequence: Synthetic oligonucleotide
  Target: LAMA2; (-) strand; PAM type: YTN; PAM sequence: TTT
aagtctcatactttgttgcc

SEQ ID NO: 210925 - DNA, 20 bp, Artificial Sequence
  Description of Artificial Sequence: Synthetic oligonucleotide
  Target: LAMA2; (-) strand; PAM type: YTN; PAM sequence: CTT
taagtctcatactttgttgc

SEQ ID NO: 210926 - DNA, 20 bp, Artificial Sequence
  Description of Artificial Sequence: Synthetic oligonucleotide
  Target: LAMA2; (-) strand; PAM type: YTN; PAM sequence: CTC
tttaagtctcatactttgtt

SEQ ID NO: 210927 - DNA, 20 bp, Artificial Sequence
  Description of Artificial Sequence: Synthetic oligonucleotide
  Target: LAMA2; (-) strand; PAM type: YTN; PAM sequence: CTG
gcccctctttaagtctcata

SEQ ID NO: 210928 - DNA, 20 bp, Artificial Sequence
  Description of Artificial Sequence: Synthetic oligonucleotide
  Target: LAMA2; (-) strand; PAM type: YTN; PAM sequence: TTC
aaccatctggcccctcttta

SEQ ID NO: 210929 - DNA, 20 bp, Artificial Sequence
  Description of Artificial Sequence: Synthetic oligonucleotide
  Target: LAMA2; (-) strand; PAM type: YTN; PAM sequence: TTT
caaccatctggcccctcttt

SEQ ID NO: 210930 - DNA, 20 bp, Artificial Sequence
  Description of Artificial Sequence: Synthetic oligonucleotide
  Target: LAMA2; (-) strand; PAM type: YTN; PAM sequence: CTA
aatttcaaccatctggcccc

SEQ ID NO: 210931 - DNA, 20 bp, Artificial Sequence
  Description of Artificial Sequence: Synthetic oligonucleotide
  Target: LAMA2; (-) strand; PAM type: YTN; PAM sequence: CTA
tctaaatttcaaccatctgg

SEQ ID NO: 210932 - DNA, 20 bp, Artificial Sequence
  Description of Artificial Sequence: Synthetic oligonucleotide
  Target: LAMA2; (-) strand; PAM type: YTN; PAM sequence: CTC
cagatgctatctaaatttca

SEQ ID NO: 210933 - DNA, 20 bp, Artificial Sequence
  Description of Artificial Sequence: Synthetic oligonucleotide
  Target: LAMA2; (-) strand; PAM type: YTN; PAM sequence: TTC
cgtatctccagatgctatct

SEQ ID NO: 210934 - DNA, 20 bp, Artificial Sequence
  Description of Artificial Sequence: Synthetic oligonucleotide
  Target: LAMA2; (-) strand; PAM type: YTN; PAM sequence: CTT
ccgtatctccagatgctatc

SEQ ID NO: 210935 - DNA, 20 bp, Artificial Sequence
  Description of Artificial Sequence: Synthetic oligonucleotide
  Target: LAMA2; (-) strand; PAM type: YTN; PAM sequence: TTC
cttccgtatctccagatgct

SEQ ID NO: 210936 - DNA, 20 bp, Artificial Sequence
  Description of Artificial Sequence: Synthetic oligonucleotide
  Target: LAMA2; (-) strand; PAM type: YTN; PAM sequence: CTT
ccttccgtatctccagatgc

SEQ ID NO: 210937 - DNA, 20 bp, Artificial Sequence
  Description of Artificial Sequence: Synthetic oligonucleotide
  Target: LAMA2; (-) strand; PAM type: YTN; PAM sequence: TTC
cttccttccgtatctccaga

SEQ ID NO: 210938 - DNA, 20 bp, Artificial Sequence
  Description of Artificial Sequence: Synthetic oligonucleotide
  Target: LAMA2; (-) strand; PAM type: YTN; PAM sequence: TTT
ccttccttccgtatctccag

SEQ ID NO: 210939 - DNA, 20 bp, Artificial Sequence
  Description of Artificial Sequence: Synthetic oligonucleotide
  Target: LAMA2; (-) strand; PAM type: YTN; PAM sequence: TTA
tttccttccttccgtatctc

SEQ ID NO: 210940 - DNA, 20 bp, Artificial Sequence
  Description of Artificial Sequence: Synthetic oligonucleotide
  Target: LAMA2; (-) strand; PAM type: YTN; PAM sequence: CTT
atttccttccttccgtatct

SEQ ID NO: 210941 - DNA, 20 bp, Artificial Sequence
  Description of Artificial Sequence: Synthetic oligonucleotide
  Target: LAMA2; (-) strand; PAM type: YTN; PAM sequence: TTA
agtccttatttccttccttc

SEQ ID NO: 210942 - DNA, 20 bp, Artificial Sequence
  Description of Artificial Sequence: Synthetic oligonucleotide
  Target: LAMA2; (-) strand; PAM type: YTN; PAM sequence: TTT
aagtccttatttccttcctt

SEQ ID NO: 210943 - DNA, 20 bp, Artificial Sequence
  Description of Artificial Sequence: Synthetic oligonucleotide
  Target: LAMA2; (-) strand; PAM type: YTN; PAM sequence: CTT
taagtccttatttccttcct

SEQ ID NO: 210944 - DNA, 20 bp, Artificial Sequence
  Description of Artificial Sequence: Synthetic oligonucleotide
  Target: LAMA2; (-) strand; PAM type: YTN; PAM sequence: CTA
agagactttaagtccttatt

SEQ ID NO: 210945 - DNA, 20 bp, Artificial Sequence
  Description of Artificial Sequence: Synthetic oligonucleotide
  Target: LAMA2; (-) strand; PAM type: YTN; PAM sequence: CTA
ctaagagactttaagtcctt

SEQ ID NO: 210946 - DNA, 20 bp, Artificial Sequence
  Description of Artificial Sequence: Synthetic oligonucleotide
  Target: LAMA2; (-) strand; PAM type: YTN; PAM sequence: TTG
ccaccacctactaagagact

SEQ ID NO: 210947 - DNA, 20 bp, Artificial Sequence
  Description of Artificial Sequence: Synthetic oligonucleotide
  Target: LAMA2; (-) strand; PAM type: YTN; PAM sequence: TTG
ttgccaccacctactaagag

SEQ ID NO: 210948 - DNA, 20 bp, Artificial Sequence
  Description of Artificial Sequence: Synthetic oligonucleotide
  Target: LAMA2; (-) strand; PAM type: YTN; PAM sequence: CTT
gttgccaccacctactaaga

SEQ ID NO: 210949 - DNA, 20 bp, Artificial Sequence
  Description of Artificial Sequence: Synthetic oligonucleotide
  Target: LAMA2; (-) strand; PAM type: YTN; PAM sequence: CTC
ccacagcttgttgccaccac

SEQ ID NO: 210950 - DNA, 20 bp, Artificial Sequence
  Description of Artificial Sequence: Synthetic oligonucleotide
  Target: LAMA2; (-) strand; PAM type: YTN; PAM sequence: CTC
acactcccacagcttgttgc

SEQ ID NO: 210951 - DNA, 20 bp, Artificial Sequence
  Description of Artificial Sequence: Synthetic oligonucleotide
  Target: LAMA2; (-) strand; PAM type: YTN; PAM sequence: CTC
ctcacactcccacagcttgt

SEQ ID NO: 210952 - DNA, 20 bp, Artificial Sequence
  Description of Artificial Sequence: Synthetic oligonucleotide
  Target: LAMA2; (-) strand; PAM type: YTN; PAM sequence: CTC
tcctcacactcccacagctt

SEQ ID NO: 210953 - DNA, 20 bp, Artificial Sequence
  Description of Artificial Sequence: Synthetic oligonucleotide
  Target: LAMA2; (-) strand; PAM type: YTN; PAM sequence: TTC
ctctcctcacactcccacag

SEQ ID NO: 210954 - DNA, 20 bp, Artificial Sequence
  Description of Artificial Sequence: Synthetic oligonucleotide
  Target: LAMA2; (-) strand; PAM type: YTN; PAM sequence: TTG
ccatgcagttcctctcctca

SEQ ID NO: 210955 - DNA, 20 bp, Artificial Sequence
  Description of Artificial Sequence: Synthetic oligonucleotide
  Target: LAMA2; (-) strand; PAM type: YTN; PAM sequence: CTT
gccatgcagttcctctcctc

SEQ ID NO: 210956 - DNA, 20 bp, Artificial Sequence
  Description of Artificial Sequence: Synthetic oligonucleotide
  Target: LAMA2; (-) strand; PAM type: YTN; PAM sequence: TTG
cttgccatgcagttcctctc

SEQ ID NO: 210957 - DNA, 20 bp, Artificial Sequence
  Description of Artificial Sequence: Synthetic oligonucleotide
  Target: LAMA2; (-) strand; PAM type: YTN; PAM sequence: TTT
gcttgccatgcagttcctct

SEQ ID NO: 210958 - DNA, 20 bp, Artificial Sequence
  Description of Artificial Sequence: Synthetic oligonucleotide
  Target: LAMA2; (-) strand; PAM type: YTN; PAM sequence: CTT
tgcttgccatgcagttcctc

SEQ ID NO: 210959 - DNA, 20 bp, Artificial Sequence
  Description of Artificial Sequence: Synthetic oligonucleotide
  Target: LAMA2; (-) strand; PAM type: YTN; PAM sequence: TTC
atgatatgacaacctttgct

SEQ ID NO: 210960 - DNA, 20 bp, Artificial Sequence
  Description of Artificial Sequence: Synthetic oligonucleotide
  Target: LAMA2; (-) strand; PAM type: YTN; PAM sequence: CTT
catgatatgacaacctttgc

SEQ ID NO: 210961 - DNA, 20 bp, Artificial Sequence
  Description of Artificial Sequence: Synthetic oligonucleotide
  Target: LAMA2; (-) strand; PAM type: YTN; PAM sequence: TTA
tcttcatgatatgacaacct

SEQ ID NO: 210962 - DNA, 20 bp, Artificial Sequence
  Description of Artificial Sequence: Synthetic oligonucleotide
  Target: LAMA2; (-) strand; PAM type: YTN; PAM sequence: TTT
atcttcatgatatgacaacc

SEQ ID NO: 210963 - DNA, 20 bp, Artificial Sequence
  Description of Artificial Sequence: Synthetic oligonucleotide
  Target: LAMA2; (-) strand; PAM type: YTN; PAM sequence: CTT
tatcttcatgatatgacaac

SEQ ID NO: 210964 - DNA, 20 bp, Artificial Sequence
  Description of Artificial Sequence: Synthetic oligonucleotide
  Target: LAMA2; (-) strand; PAM type: YTN; PAM sequence: TTA
gagactttatcttcatgata

SEQ ID NO: 210965 - DNA, 20 bp, Artificial Sequence
  Description of Artificial Sequence: Synthetic oligonucleotide
  Target: LAMA2; (-) strand; PAM type: YTN; PAM sequence: CTT
agagactttatcttcatgat

SEQ ID NO: 210966 - DNA, 20 bp, Artificial Sequence
  Description of Artificial Sequence: Synthetic oligonucleotide
  Target: LAMA2; (-) strand; PAM type: YTN; PAM sequence: CTA
ccttagagactttatcttca

SEQ ID NO: 210967 - DNA, 20 bp, Artificial Sequence
  Description of Artificial Sequence: Synthetic oligonucleotide
  Target: LAMA2; (-) strand; PAM type: YTN; PAM sequence: TTG
ctaccttagagactttatct

SEQ ID NO: 210968 - DNA, 20 bp, Artificial Sequence
  Description of Artificial Sequence: Synthetic oligonucleotide
  Target: LAMA2; (-) strand; PAM type: YTN; PAM sequence: CTG
aggattgctaccttagagac

SEQ ID NO: 210969 - DNA, 20 bp, Artificial Sequence
  Description of Artificial Sequence: Synthetic oligonucleotide
  Target: LAMA2; (-) strand; PAM type: YTN; PAM sequence: TTC
tgaggattgctaccttagag

SEQ ID NO: 210970 - DNA, 20 bp, Artificial Sequence
  Description of Artificial Sequence: Synthetic oligonucleotide
  Target: LAMA2; (-) strand; PAM type: YTN; PAM sequence: CTT
ctgaggattgctaccttaga

SEQ ID NO: 210971 - DNA, 20 bp, Artificial Sequence
  Description of Artificial Sequence: Synthetic oligonucleotide
  Target: LAMA2; (-) strand; PAM type: YTN; PAM sequence: TTC
ttctgaggattgctacctta

SEQ ID NO: 210972 - DNA, 20 bp, Artificial Sequence
  Description of Artificial Sequence: Synthetic oligonucleotide
  Target: LAMA2; (-) strand; PAM type: YTN; PAM sequence: TTC
acgtgttcttctgaggattg

SEQ ID NO: 210973 - DNA, 20 bp, Artificial Sequence
  Description of Artificial Sequence: Synthetic oligonucleotide
  Target: LAMA2; (-) strand; PAM type: YTN; PAM sequence: TTT
cacgtgttcttctgaggatt

SEQ ID NO: 210974 - DNA, 20 bp, Artificial Sequence
  Description of Artificial Sequence: Synthetic oligonucleotide
  Target: LAMA2; (-) strand; PAM type: YTN; PAM sequence: TTT
tcacgtgttcttctgaggat

SEQ ID NO: 210975 - DNA, 20 bp, Artificial Sequence
  Description of Artificial Sequence: Synthetic oligonucleotide
  Target: LAMA2; (-) strand; PAM type: YTN; PAM sequence: CTT
ttcacgtgttcttctgagga

SEQ ID NO: 210976 - DNA, 20 bp, Artificial Sequence
  Description of Artificial Sequence: Synthetic oligonucleotide
  Target: LAMA2; (-) strand; PAM type: YTN; PAM sequence: CTG
ggacaccttttcacgtgttc

SEQ ID NO: 210977 - DNA, 20 bp, Artificial Sequence
  Description of Artificial Sequence: Synthetic oligonucleotide
  Target: LAMA2; (-) strand; PAM type: YTN; PAM sequence: CTC
ccgggacaccacgcctggga

SEQ ID NO: 210978 - DNA, 20 bp, Artificial Sequence
  Description of Artificial Sequence: Synthetic oligonucleotide
  Target: LAMA2; (-) strand; PAM type: YTN; PAM sequence: CTC
aggagaggaaactcccggga

SEQ ID NO: 210979 - DNA, 20 bp, Artificial Sequence
  Description of Artificial Sequence: Synthetic oligonucleotide
  Target: LAMA2; (-) strand; PAM type: YTN; PAM sequence: CTA
tctcaggagaggaaactccc

SEQ ID NO: 210980 - DNA, 20 bp, Artificial Sequence
  Description of Artificial Sequence: Synthetic oligonucleotide
  Target: LAMA2; (-) strand; PAM type: YTN; PAM sequence: TTA
aatcctatctcaggagagga

SEQ ID NO: 210981 - DNA, 20 bp, Artificial Sequence
  Description of Artificial Sequence: Synthetic oligonucleotide
  Target: LAMA2; (-) strand; PAM type: YTN; PAM sequence: CTA
gagaagattaaatcctatct

SEQ ID NO: 210982 - DNA, 20 bp, Artificial Sequence
  Description of Artificial Sequence: Synthetic oligonucleotide
  Target: LAMA2; (-) strand; PAM type: YTN; PAM sequence: CTA
catgaactagagaagattaa

SEQ ID NO: 210983 - DNA, 20 bp, Artificial Sequence
  Description of Artificial Sequence: Synthetic oligonucleotide
  Target: LAMA2; (-) strand; PAM type: YTN; PAM sequence: CTG
gaatctacatgaactagaga

SEQ ID NO: 210984 - DNA, 20 bp, Artificial Sequence
  Description of Artificial Sequence: Synthetic oligonucleotide
  Target: LAMA2; (-) strand; PAM type: YTN; PAM sequence: TTC
cctggaatctacatgaacta

SEQ ID NO: 210985 - DNA, 20 bp, Artificial Sequence
  Description of Artificial Sequence: Synthetic oligonucleotide
  Target: LAMA2; (-) strand; PAM type: YTN; PAM sequence: CTT
ccctggaatctacatgaact

SEQ ID NO: 210986 - DNA, 20 bp, Artificial Sequence
  Description of Artificial Sequence: Synthetic oligonucleotide
  Target: LAMA2; (-) strand; PAM type: YTN; PAM sequence: TTG
tcatgaaccccttccctgga

SEQ ID NO: 210987 - DNA, 20 bp, Artificial Sequence
  Description of Artificial Sequence: Synthetic oligonucleotide
  Target: LAMA2; (-) strand; PAM type: YTN; PAM sequence: CTC
cagaaggaatgtaattgtca

SEQ ID NO: 210988 - DNA, 20 bp, Artificial Sequence
  Description of Artificial Sequence: Synthetic oligonucleotide
  Target: LAMA2; (-) strand; PAM type: YTN; PAM sequence: TTC
ctccagaaggaatgtaattg

SEQ ID NO: 210989 - DNA, 20 bp, Artificial Sequence
  Description of Artificial Sequence: Synthetic oligonucleotide
  Target: LAMA2; (-) strand; PAM type: YTN; PAM sequence: CTA
agggaagttcctccagaagg

SEQ ID NO: 210990 - DNA, 20 bp, Artificial Sequence
  Description of Artificial Sequence: Synthetic oligonucleotide
  Target: LAMA2; (-) strand; PAM type: YTN; PAM sequence: TTA
tctaagggaagttcctccag

SEQ ID NO: 210991 - DNA, 20 bp, Artificial Sequence
  Description of Artificial Sequence: Synthetic oligonucleotide
  Target: LAMA2; (-) strand; PAM type: YTN; PAM sequence: CTT
atctaagggaagttcctcca

SEQ ID NO: 210992 - DNA, 20 bp, Artificial Sequence
  Description of Artificial Sequence: Synthetic oligonucleotide
  Target: LAMA2; (-) strand; PAM type: YTN; PAM sequence: TTC
ccccttatctaagggaagtt

SEQ ID NO: 210993 - DNA, 20 bp, Artificial Sequence
  Description of Artificial Sequence: Synthetic oligonucleotide
  Target: LAMA2; (-) strand; PAM type: YTN; PAM sequence: CTG
aagttcccccttatctaagg

SEQ ID NO: 210994 - DNA, 20 bp, Artificial Sequence
  Description of Artificial Sequence: Synthetic oligonucleotide
  Target: LAMA2; (-) strand; PAM type: YTN; PAM sequence: CTC
tgaagttcccccttatctaa

SEQ ID NO: 210995 - DNA, 20 bp, Artificial Sequence
  Description of Artificial Sequence: Synthetic oligonucleotide
  Target: LAMA2; (-) strand; PAM type: YTN; PAM sequence: TTC
tctgaagttcccccttatct

SEQ ID NO: 210996 - DNA, 20 bp, Artificial Sequence
  Description of Artificial Sequence: Synthetic oligonucleotide
  Target: LAMA2; (-) strand; PAM type: YTN; PAM sequence: TTT
ctctgaagttcccccttatc

SEQ ID NO: 210997 - DNA, 20 bp, Artificial Sequence
  Description of Artificial Sequence: Synthetic oligonucleotide
  Target: LAMA2; (-) strand; PAM type: YTN; PAM sequence: CTT
tctctgaagttcccccttat

SEQ ID NO: 210998 - DNA, 20 bp, Artificial Sequence
  Description of Artificial Sequence: Synthetic oligonucleotide
  Target: LAMA2; (-) strand; PAM type: YTN; PAM sequence: CTC
aagcacagggagaggctttc

SEQ ID NO: 210999 - DNA, 20 bp, Artificial Sequence
  Description of Artificial Sequence: Synthetic oligonucleotide
  Target: LAMA2; (-) strand; PAM type: YTN; PAM sequence: CTC
ctcaagcacagggagaggct

SEQ ID NO: 211000 - DNA, 20 bp, Artificial Sequence
  Description of Artificial Sequence: Synthetic oligonucleotide
  Target: LAMA2; (-) strand; PAM type: YTN; PAM sequence: CTC
tcctcaagcacagggagagg

SEQ ID NO: 211001 - DNA, 20 bp, Artificial Sequence
  Description of Artificial Sequence: Synthetic oligonucleotide
  Target: LAMA2; (-) strand; PAM type: YTN; PAM sequence: CTG
cctctcctcaagcacaggga

SEQ ID NO: 211002 - DNA, 20 bp, Artificial Sequence
  Description of Artificial Sequence: Synthetic oligonucleotide
  Target: LAMA2; (-) strand; PAM type: YTN; PAM sequence: CTC
tgcctctcctcaagcacagg

SEQ ID NO: 211003 - DNA, 20 bp, Artificial Sequence
  Description of Artificial Sequence: Synthetic oligonucleotide
  Target: LAMA2; (-) strand; PAM type: YTN; PAM sequence: CTC
gcccctctgcctctcctcaa

SEQ ID NO: 211004 - DNA, 20 bp, Artificial Sequence
  Description of Artificial Sequence: Synthetic oligonucleotide
  Target: LAMA2; (-) strand; PAM type: YTN; PAM sequence: CTC
tcgcccctctgcctctcctc

SEQ ID NO: 211005 - DNA, 20 bp, Artificial Sequence
  Description of Artificial Sequence: Synthetic oligonucleotide
  Target: LAMA2; (-) strand; PAM type: YTN; PAM sequence: CTC
ccatctctcgcccctctgcc

SEQ ID NO: 211006 - DNA, 20 bp, Artificial Sequence
  Description of Artificial Sequence: Synthetic oligonucleotide
  Target: LAMA2; (-) strand; PAM type: YTN; PAM sequence: TTC
cactcccatctctcgcccct

SEQ ID NO: 211007 - DNA, 20 bp, Artificial Sequence
  Description of Artificial Sequence: Synthetic oligonucleotide
  Target: LAMA2; (-) strand; PAM type: YTN; PAM sequence: CTT
ccactcccatctctcgcccc

SEQ ID NO: 211008 - DNA, 20 bp, Artificial Sequence
  Description of Artificial Sequence: Synthetic oligonucleotide
  Target: LAMA2; (-) strand; PAM type: YTN; PAM sequence: TTG
ccttccactcccatctctcg

SEQ ID NO: 211009 - DNA, 20 bp, Artificial Sequence
  Description of Artificial Sequence: Synthetic oligonucleotide
  Target: LAMA2; (-) strand; PAM type: YTN; PAM sequence: CTT
gccttccactcccatctctc

SEQ ID NO: 211010 - DNA, 20 bp, Artificial Sequence
  Description of Artificial Sequence: Synthetic oligonucleotide
  Target: LAMA2; (-) strand; PAM type: YTN; PAM sequence: CTG
acttgccttccactcccatc

SEQ ID NO: 211011 - DNA, 20 bp, Artificial Sequence
  Description of Artificial Sequence: Synthetic oligonucleotide
  Target: LAMA2; (-) strand; PAM type: YTN; PAM sequence: CTC
tgacttgccttccactccca

SEQ ID NO: 211012 - DNA, 20 bp, Artificial Sequence
  Description of Artificial Sequence: Synthetic oligonucleotide
  Target: LAMA2; (-) strand; PAM type: YTN; PAM sequence: CTC
tctgacttgccttccactcc

SEQ ID NO: 211013 - DNA, 20 bp, Artificial Sequence
  Description of Artificial Sequence: Synthetic oligonucleotide
  Target: LAMA2; (-) strand; PAM type: YTN; PAM sequence: TTC
tctctgacttgccttccact

SEQ ID NO: 211014 - DNA, 20 bp, Artificial Sequence
  Description of Artificial Sequence: Synthetic oligonucleotide
  Target: LAMA2; (-) strand; PAM type: YTN; PAM sequence: TTA
gaaccaagttctctctgact

SEQ ID NO: 211015 - DNA, 20 bp, Artificial Sequence
  Description of Artificial Sequence: Synthetic oligonucleotide
  Target: LAMA2; (-) strand; PAM type: YTN; PAM sequence: CTT
agaaccaagttctctctgac

SEQ ID NO: 211016 - DNA, 20 bp, Artificial Sequence
  Description of Artificial Sequence: Synthetic oligonucleotide
  Target: LAMA2; (-) strand; PAM type: YTN; PAM sequence: CTA
aagaagccaccttagaacca

SEQ ID NO: 211017 - DNA, 20 bp, Artificial Sequence
  Description of Artificial Sequence: Synthetic oligonucleotide
  Target: LAMA2; (-) strand; PAM type: YTN; PAM sequence: TTG
gactaaagaagccaccttag

SEQ ID NO: 211018 - DNA, 20 bp, Artificial Sequence
  Description of Artificial Sequence: Synthetic oligonucleotide
  Target: LAMA2; (-) strand; PAM type: YTN; PAM sequence: TTT
ggactaaagaagccacctta

SEQ ID NO: 211019 - DNA, 20 bp, Artificial Sequence
  Description of Artificial Sequence: Synthetic oligonucleotide
  Target: LAMA2; (-) strand; PAM type: YTN; PAM sequence: CTT
tggactaaagaagccacctt

SEQ ID NO: 211020 - DNA, 20 bp, Artificial Sequence
  Description of Artificial Sequence: Synthetic oligonucleotide
  Target: LAMA2; (-) strand; PAM type: YTN; PAM sequence: CTG
agcactttggactaaagaag

SEQ ID NO: 211021 - DNA, 20 bp, Artificial Sequence
  Description of Artificial Sequence: Synthetic oligonucleotide
  Target: LAMA2; (-) strand; PAM type: YTN; PAM sequence: TTG
aggagctgagcactttggac

SEQ ID NO: 211022 - DNA, 20 bp, Artificial Sequence
  Description of Artificial Sequence: Synthetic oligonucleotide
  Target: LAMA2; (-) strand; PAM type: YTN; PAM sequence: TTT
gaggagctgagcactttgga

SEQ ID NO: 211023 - DNA, 20 bp, Artificial Sequence
  Description of Artificial Sequence: Synthetic oligonucleotide
  Target: LAMA2; (-) strand; PAM type: YTN; PAM sequence: CTT
tgaggagctgagcactttgg

SEQ ID NO: 211024 - DNA, 20 bp, Artificial Sequence
  Description of Artificial Sequence: Synthetic oligonucleotide
  Target: LAMA2; (-) strand; PAM type: YTN; PAM sequence: CTC
caaagtatggcgctttgagg

SEQ ID NO: 211025 - DNA, 20 bp, Artificial Sequence
  Description of Artificial Sequence: Synthetic oligonucleotide
  Target: LAMA2; (-) strand; PAM type: YTN; PAM sequence: CTC
agaaaatagtactccaaagt

SEQ ID NO: 211026 - DNA, 20 bp, Artificial Sequence
  Description of Artificial Sequence: Synthetic oligonucleotide
  Target: LAMA2; (-) strand; PAM type: YTN; PAM sequence: TTA
gggctcagaaaatagtactc

SEQ ID NO: 211027 - DNA, 20 bp, Artificial Sequence
  Description of Artificial Sequence: Synthetic oligonucleotide
  Target: LAMA2; (-) strand; PAM type: YTN; PAM sequence: CTG
ttagggctcagaaaatagta

SEQ ID NO: 211028 - DNA, 20 bp, Artificial Sequence
  Description of Artificial Sequence: Synthetic oligonucleotide
  Target: LAMA2; (-) strand; PAM type: YTN; PAM sequence: TTG
tggctgttagggctcagaaa

SEQ ID NO: 211029 - DNA, 20 bp, Artificial Sequence
  Description of Artificial Sequence: Synthetic oligonucleotide
  Target: LAMA2; (-) strand; PAM type: YTN; PAM sequence: TTT
gtggctgttagggctcagaa

SEQ ID NO: 211030 - DNA, 20 bp, Artificial Sequence
  Description of Artificial Sequence: Synthetic oligonucleotide
  Target: LAMA2; (-) strand; PAM type: YTN; PAM sequence: TTC
catttgtggctgttagggct

SEQ ID NO: 211031 - DNA, 20 bp, Artificial Sequence
  Description of Artificial Sequence: Synthetic oligonucleotide
  Target: LAMA2; (-) strand; PAM type: YTN; PAM sequence: CTT
ccatttgtggctgttagggc

SEQ ID NO: 211032 - DNA, 20 bp, Artificial Sequence
  Description of Artificial Sequence: Synthetic oligonucleotide
  Target: LAMA2; (-) strand; PAM type: YTN; PAM sequence: TTC
ttccatttgtggctgttagg

SEQ ID NO: 211033 - DNA, 20 bp, Artificial Sequence
  Description of Artificial Sequence: Synthetic oligonucleotide
  Target: LAMA2; (-) strand; PAM type: YTN; PAM sequence: CTT
cttccatttgtggctgttag

SEQ ID NO: 211034 - DNA, 20 bp, Artificial Sequence
  Description of Artificial Sequence: Synthetic oligonucleotide
  Target: LAMA2; (-) strand; PAM type: YTN; PAM sequence: CTG
tacaggggaatacttcttcc

SEQ ID NO: 211035 - DNA, 20 bp, Artificial Sequence
  Description of Artificial Sequence: Synthetic oligonucleotide
  Target: LAMA2; (-) strand; PAM type: YTN; PAM sequence: TTC
tgtacaggggaatacttctt

SEQ ID NO: 211036 - DNA, 20 bp, Artificial Sequence
  Description of Artificial Sequence: Synthetic oligonucleotide
  Target: LAMA2; (-) strand; PAM type: YTN; PAM sequence: TTT
ctgtacaggggaatacttct

SEQ ID NO: 211037 - DNA, 20 bp, Artificial Sequence
  Description of Artificial Sequence: Synthetic oligonucleotide
  Target: LAMA2; (-) strand; PAM type: YTN; PAM sequence: TTT
tctgtacaggggaatacttc

SEQ ID NO: 211038 - DNA, 20 bp, Artificial Sequence
  Description of Artificial Sequence: Synthetic oligonucleotide
  Target: LAMA2; (-) strand; PAM type: YTN; PAM sequence: CTT
ttctgtacaggggaatactt

SEQ ID NO: 211039 - DNA, 20 bp, Artificial Sequence
  Description of Artificial Sequence: Synthetic oligonucleotide
  Target: LAMA2; (-) strand; PAM type: YTN; PAM sequence: CTG
acaaaagtaatgcaaacttt

SEQ ID NO: 211040 - DNA, 20 bp, Artificial Sequence
  Description of Artificial Sequence: Synthetic oligonucleotide
  Target: LAMA2; (-) strand; PAM type: YTN; PAM sequence: TTA
agagacataatctgacaaaa

SEQ ID NO: 211041 - DNA, 20 bp, Artificial Sequence
  Description of Artificial Sequence: Synthetic oligonucleotide
  Target: LAMA2; (-) strand; PAM type: YTN; PAM sequence: TTA
tattaagagacataatctga

SEQ ID NO: 211042 - DNA, 20 bp, Artificial Sequence
  Description of Artificial Sequence: Synthetic oligonucleotide
  Target: LAMA2; (-) strand; PAM type: YTN; PAM sequence: TTC
ataaaatgtgattatattaa

SEQ ID NO: 211043 - DNA, 20 bp, Artificial Sequence
  Description of Artificial Sequence: Synthetic oligonucleotide
  Target: LAMA2; (-) strand; PAM type: YTN; PAM sequence: TTA
ttcataaaatgtgattatat

SEQ ID NO: 211044 - DNA, 20 bp, Artificial Sequence
  Description of Artificial Sequence: Synthetic oligonucleotide
  Target: LAMA2; (-) strand; PAM type: YTN; PAM sequence: CTT
attcataaaatgtgattata

SEQ ID NO: 211045 - DNA, 20 bp, Artificial Sequence
  Description of Artificial Sequence: Synthetic oligonucleotide
  Target: LAMA2; (-) strand; PAM type: YTN; PAM sequence: TTA
agtgaaataaaacttattca

SEQ ID NO: 211046 - DNA, 20 bp, Artificial Sequence
  Description of Artificial Sequence: Synthetic oligonucleotide
  Target: LAMA2; (-) strand; PAM type: YTN; PAM sequence: CTG
ttaagtgaaataaaacttat

SEQ ID NO: 211047 - DNA, 20 bp, Artificial Sequence
  Description of Artificial Sequence: Synthetic oligonucleotide
  Target: LAMA2; (-) strand; PAM type: YTN; PAM sequence: TTA
aaaaataaataaatctgtta

SEQ ID NO: 211048 - DNA, 20 bp, Artificial Sequence
  Description of Artificial Sequence: Synthetic oligonucleotide
  Target: LAMA2; (-) strand; PAM type: YTN; PAM sequence: TTT
aaaaaataaataaatctgtt

SEQ ID NO: 211049 - DNA, 20 bp, Artificial Sequence
  Description of Artificial Sequence: Synthetic oligonucleotide
  Target: LAMA2; (-) strand; PAM type: YTN; PAM sequence: TTT
taaaaaataaataaatctgt

SEQ ID NO: 211050 - DNA, 20 bp, Artificial Sequence
  Description of Artificial Sequence: Synthetic oligonucleotide
  Target: LAMA2; (-) strand; PAM type: YTN; PAM sequence: TTG
tggttttaaaaaataaataa

SEQ ID NO: 211051 - DNA, 20 bp, Artificial Sequence
  Description of Artificial Sequence: Synthetic oligonucleotide
  Target: LAMA2; (-) strand; PAM type: YTN; PAM sequence: TTA
aagttgtggttttaaaaaat

SEQ ID NO: 211052 - DNA, 20 bp, Artificial Sequence
  Description of Artificial Sequence: Synthetic oligonucleotide
  Target: LAMA2; (-) strand; PAM type: YTN; PAM sequence: TTG
ggaattaaagttgtggtttt

SEQ ID NO: 211053 - DNA, 20 bp, Artificial Sequence
  Description of Artificial Sequence: Synthetic oligonucleotide
  Target: LAMA2; (-) strand; PAM type: YTN; PAM sequence: CTT
gggaattaaagttgtggttt

SEQ ID NO: 211054 - DNA, 20 bp, Artificial Sequence
  Description of Artificial Sequence: Synthetic oligonucleotide
  Target: LAMA2; (-) strand; PAM type: YTN; PAM sequence: TTA
cttgggaattaaagttgtgg

SEQ ID NO: 211055 - DNA, 20 bp, Artificial Sequence
  Description of Artificial Sequence: Synthetic oligonucleotide
  Target: LAMA2; (-) strand; PAM type: YTN; PAM sequence: CTA
agagttacttgggaattaaa

SEQ ID NO: 211056 - DNA, 20 bp, Artificial Sequence
  Description of Artificial Sequence: Synthetic oligonucleotide
  Target: LAMA2; (-) strand; PAM type: YTN; PAM sequence: TTC
taagagttacttgggaatta

SEQ ID NO: 211057 - DNA, 20 bp, Artificial Sequence
  Description of Artificial Sequence: Synthetic oligonucleotide
  Target: LAMA2; (-) strand; PAM type: YTN; PAM sequence: CTT
ctaagagttacttgggaatt

SEQ ID NO: 211058 - DNA, 20 bp, Artificial Sequence
  Description of Artificial Sequence: Synthetic oligonucleotide
  Target: LAMA2; (-) strand; PAM type: YTN; PAM sequence: CTA
aacatcaaaatgaaaatcca

SEQ ID NO: 211059 - DNA, 20 bp, Artificial Sequence
  Description of Artificial Sequence: Synthetic oligonucleotide
  Target: LAMA2; (-) strand; PAM type: YTN; PAM sequence: CTA
ctaaacatcaaaatgaaaat

SEQ ID NO: 211060 - DNA, 20 bp, Artificial Sequence
  Description of Artificial Sequence: Synthetic oligonucleotide
  Target: LAMA2; (-) strand; PAM type: YTN; PAM sequence: TTA
agcctactaaacatcaaaat

SEQ ID NO: 211061 - DNA, 20 bp, Artificial Sequence
  Description of Artificial Sequence: Synthetic oligonucleotide
  Target: LAMA2; (-) strand; PAM type: YTN; PAM sequence: TTT
aagcctactaaacatcaaaa

SEQ ID NO: 211062 - DNA, 20 bp, Artificial Sequence
  Description of Artificial Sequence: Synthetic oligonucleotide
  Target: LAMA2; (-) strand; PAM type: YTN; PAM sequence: CTG
gaatttaagcctactaaaca

SEQ ID NO: 211063 - DNA, 20 bp, Artificial Sequence
  Description of Artificial Sequence: Synthetic oligonucleotide
  Target: LAMA2; (-) strand; PAM type: YTN; PAM sequence: TTA
aacactggaatttaagccta

SEQ ID NO: 211064 - DNA, 20 bp, Artificial Sequence
  Description of Artificial Sequence: Synthetic oligonucleotide
  Target: LAMA2; (-) strand; PAM type: YTN; PAM sequence: TTG
tgttaaacactggaatttaa

SEQ ID NO: 211065 - DNA, 20 bp, Artificial Sequence
  Description of Artificial Sequence: Synthetic oligonucleotide
  Target: LAMA2; (-) strand; PAM type: YTN; PAM sequence: CTG
ggggttgtgttaaacactgg

SEQ ID NO: 211066 - DNA, 20 bp, Artificial Sequence
  Description of Artificial Sequence: Synthetic oligonucleotide
  Target: LAMA2; (-) strand; PAM type: YTN; PAM sequence: CTC
aaaagctgggggttgtgtta

SEQ ID NO: 211067 - DNA, 20 bp, Artificial Sequence
  Description of Artificial Sequence: Synthetic oligonucleotide
  Target: LAMA2; (-) strand; PAM type: YTN; PAM sequence: CTG
tgactcaaaagctgggggtt

SEQ ID NO: 211068 - DNA, 20 bp, Artificial Sequence
  Description of Artificial Sequence: Synthetic oligonucleotide
  Target: LAMA2; (-) strand; PAM type: YTN; PAM sequence: CTA
taatgaaataaactgtgact

SEQ ID NO: 211069 - DNA, 20 bp, Artificial Sequence
  Description of Artificial Sequence: Synthetic oligonucleotide
  Target: LAMA2; (-) strand; PAM type: YTN; PAM sequence: CTA
ctataatgaaataaactgtg

SEQ ID NO: 211070 - DNA, 20 bp, Artificial Sequence
  Description of Artificial Sequence: Synthetic oligonucleotide
  Target: LAMA2; (-) strand; PAM type: YTN; PAM sequence: TTG
gcaatcaggggtctactata

SEQ ID NO: 211071 - DNA, 20 bp, Artificial Sequence
  Description of Artificial Sequence: Synthetic oligonucleotide
  Target: LAMA2; (-) strand; PAM type: YTN; PAM sequence: TTT
ggcaatcaggggtctactat

SEQ ID NO: 211072 - DNA, 20 bp, Artificial Sequence
  Description of Artificial Sequence: Synthetic oligonucleotide
  Target: LAMA2; (-) strand; PAM type: YTN; PAM sequence: TTG
taatttggcaatcaggggtc

SEQ ID NO: 211073 - DNA, 20 bp, Artificial Sequence
  Description of Artificial Sequence: Synthetic oligonucleotide
  Target: LAMA2; (-) strand; PAM type: YTN; PAM sequence: TTC
ataagatattgtaatttggc

SEQ ID NO: 211074 - DNA, 20 bp, Artificial Sequence
  Description of Artificial Sequence: Synthetic oligonucleotide
  Target: LAMA2; (-) strand; PAM type: YTN; PAM sequence: TTG
cccggttcataagatattgt

SEQ ID NO: 211075 - DNA, 20 bp, Artificial Sequence
  Description of Artificial Sequence: Synthetic oligonucleotide
  Target: LAMA2; (-) strand; PAM type: YTN; PAM sequence: TTT
gcccggttcataagatattg

SEQ ID NO: 211076 - DNA, 20 bp, Artificial Sequence
  Description of Artificial Sequence: Synthetic oligonucleotide
  Target: LAMA2; (-) strand; PAM type: YTN; PAM sequence: TTT
tgcccggttcataagatatt

SEQ ID NO: 211077 - DNA, 20 bp, Artificial Sequence
  Description of Artificial Sequence: Synthetic oligonucleotide
  Target: LAMA2; (-) strand; PAM type: YTN; PAM sequence: CTA
aataagtcaacattttgccc

SEQ ID NO: 211078 - DNA, 20 bp, Artificial Sequence
  Description of Artificial Sequence: Synthetic oligonucleotide
  Target: LAMA2; (-) strand; PAM type: YTN; PAM sequence: TTG
gaataaataggtaacataat

SEQ ID NO: 211079 - DNA, 20 bp, Artificial Sequence
  Description of Artificial Sequence: Synthetic oligonucleotide
  Target: LAMA2; (-) strand; PAM type: YTN; PAM sequence: TTT
ggaataaataggtaacataa

SEQ ID NO: 211080 - DNA, 20 bp, Artificial Sequence
  Description of Artificial Sequence: Synthetic oligonucleotide
  Target: LAMA2; (-) strand; PAM type: YTN; PAM sequence: TTT
tggaataaataggtaacata

SEQ ID NO: 211081 - DNA, 20 bp, Artificial Sequence
  Description of Artificial Sequence: Synthetic oligonucleotide
  Target: LAMA2; (-) strand; PAM type: YTN; PAM sequence: TTC
aaatgaaatattttggaata

SEQ ID NO: 211082 - DNA, 20 bp, Artificial Sequence
  Description of Artificial Sequence: Synthetic oligonucleotide
  Target: LAMA2; (-) strand; PAM type: YTN; PAM sequence: TTT
caaatgaaatattttggaat

SEQ ID NO: 211083 - DNA, 20 bp, Artificial Sequence
  Description of Artificial Sequence: Synthetic oligonucleotide
  Target: LAMA2; (-) strand; PAM type: YTN; PAM sequence: TTT
tcaaatgaaatattttggaa

SEQ ID NO: 211084 - DNA, 20 bp, Artificial Sequence
  Description of Artificial Sequence: Synthetic oligonucleotide
  Target: LAMA2; (-) strand; PAM type: YTN; PAM sequence: CTG
attttcaaatgaaatatttt

SEQ ID NO: 211085 - DNA, 20 bp, Artificial Sequence
  Description of Artificial Sequence: Synthetic oligonucleotide
  Target: LAMA2; (-) strand; PAM type: YTN; PAM sequence: CTA
catgggaatgtagctgattt

SEQ ID NO: 211086 - DNA, 20 bp, Artificial Sequence
  Description of Artificial Sequence: Synthetic oligonucleotide
  Target: LAMA2; (-) strand; PAM type: YTN; PAM sequence: TTG
tataaagaaaagtctacatg

SEQ ID NO: 211087 - DNA, 20 bp, Artificial Sequence
  Description of Artificial Sequence: Synthetic oligonucleotide
  Target: LAMA2; (-) strand; PAM type: YTN; PAM sequence: TTT
gtataaagaaaagtctacat

SEQ ID NO: 211088 - DNA, 20 bp, Artificial Sequence
  Description of Artificial Sequence: Synthetic oligonucleotide
  Target: LAMA2; (-) strand; PAM type: YTN; PAM sequence: TTT
tgtataaagaaaagtctaca

SEQ ID NO: 211089 - DNA, 20 bp, Artificial Sequence
  Description of Artificial Sequence: Synthetic oligonucleotide
  Target: LAMA2; (-) strand; PAM type: YTN; PAM sequence: CTT
ttgtataaagaaaagtctac

SEQ ID NO: 211090 - DNA, 20 bp, Artificial Sequence
  Description of Artificial Sequence: Synthetic oligonucleotide
  Target: LAMA2; (-) strand; PAM type: YTN; PAM sequence: TTA
acttttgtataaagaaaagt

SEQ ID NO: 211091 - DNA, 20 bp, Artificial Sequence
  Description of Artificial Sequence: Synthetic oligonucleotide
  Target: LAMA2; (-) strand; PAM type: YTN; PAM sequence: TTT
aacttttgtataaagaaaag

SEQ ID NO: 211092 - DNA, 20 bp, Artificial Sequence
  Description of Artificial Sequence: Synthetic oligonucleotide
  Target: LAMA2; (-) strand; PAM type: YTN; PAM sequence: TTT
taacttttgtataaagaaaa

SEQ ID NO: 211093 - DNA, 20 bp, Artificial Sequence
  Description of Artificial Sequence: Synthetic oligonucleotide
  Target: LAMA2; (-) strand; PAM type: YTN; PAM sequence: TTA
ttttaacttttgtataaaga

SEQ ID NO: 211094 - DNA, 20 bp, Artificial Sequence
  Description of Artificial Sequence: Synthetic oligonucleotide
  Target: LAMA2; (-) strand; PAM type: YTN; PAM sequence: CTG
taattattttaacttttgta

SEQ ID NO: 211095 - DNA, 20 bp, Artificial Sequence
  Description of Artificial Sequence: Synthetic oligonucleotide
  Target: LAMA2; (-) strand; PAM type: YTN; PAM sequence: TTC
tgtaattattttaacttttg

SEQ ID NO: 211096 - DNA, 20 bp, Artificial Sequence
  Description of Artificial Sequence: Synthetic oligonucleotide
  Target: LAMA2; (-) strand; PAM type: YTN; PAM sequence: TTT
ctgtaattattttaactttt

SEQ ID NO: 211097 - DNA, 20 bp, Artificial Sequence
  Description of Artificial Sequence: Synthetic oligonucleotide
  Target: LAMA2; (-) strand; PAM type: YTN; PAM sequence: CTT
tctgtaattattttaacttt

SEQ ID NO: 211098 - DNA, 20 bp, Artificial Sequence
  Description of Artificial Sequence: Synthetic oligonucleotide
  Target: LAMA2; (-) strand; PAM type: YTN; PAM sequence: TTA
cctttctgtaattattttaa

SEQ ID NO: 211099 - DNA, 20 bp, Artificial Sequence
  Description of Artificial Sequence: Synthetic oligonucleotide
  Target: LAMA2; (-) strand; PAM type: YTN; PAM sequence: TTT
acctttctgtaattatttta

SEQ ID NO: 211100 - DNA, 20 bp, Artificial Sequence
  Description of Artificial Sequence: Synthetic oligonucleotide
  Target: LAMA2; (-) strand; PAM type: YTN; PAM sequence: TTA
gcatcagaataatttacctt

SEQ ID NO: 211101 - DNA, 20 bp, Artificial Sequence
  Description of Artificial Sequence: Synthetic oligonucleotide
  Target: LAMA2; (-) strand; PAM type: YTN; PAM sequence: TTT
agcatcagaataatttacct

SEQ ID NO: 211102 - DNA, 20 bp, Artificial Sequence
  Description of Artificial Sequence: Synthetic oligonucleotide
  Target: LAMA2; (-) strand; PAM type: YTN; PAM sequence: TTT
tagcatcagaataatttacc

SEQ ID NO: 211103 - DNA, 20 bp, Artificial Sequence
  Description of Artificial Sequence: Synthetic oligonucleotide
  Target: LAMA2; (-) strand; PAM type: YTN; PAM sequence: CTA
attttagcatcagaataatt

SEQ ID NO: 211104 - DNA, 20 bp, Artificial Sequence
  Description of Artificial Sequence: Synthetic oligonucleotide
  Target: LAMA2; (-) strand; PAM type: YTN; PAM sequence: TTG
aaatcaatgaaaggctaatt

SEQ ID NO: 211105 - DNA, 20 bp, Artificial Sequence
  Description of Artificial Sequence: Synthetic oligonucleotide
  Target: LAMA2; (-) strand; PAM type: YTN; PAM sequence: CTT
gaaatcaatgaaaggctaat

SEQ ID NO: 211106 - DNA, 20 bp, Artificial Sequence
  Description of Artificial Sequence: Synthetic oligonucleotide
  Target: LAMA2; (-) strand; PAM type: YTN; PAM sequence: CTA
cttgaaatcaatgaaaggct

SEQ ID NO: 211107 - DNA, 20 bp, Artificial Sequence
  Description of Artificial Sequence: Synthetic oligonucleotide
  Target: LAMA2; (-) strand; PAM type: YTN; PAM sequence: TTA
caatctacttgaaatcaatg

SEQ ID NO: 211108 - DNA, 20 bp, Artificial Sequence
  Description of Artificial Sequence: Synthetic oligonucleotide
  Target: LAMA2; (-) strand; PAM type: YTN; PAM sequence: CTA
gccaattacaatctacttga

SEQ ID NO: 211109 - DNA, 20 bp, Artificial Sequence
  Description of Artificial Sequence: Synthetic oligonucleotide
  Target: LAMA2; (-) strand; PAM type: YTN; PAM sequence: TTG
atcctagccaattacaatct

SEQ ID NO: 211110 - DNA, 20 bp, Artificial Sequence
  Description of Artificial Sequence: Synthetic oligonucleotide
  Target: LAMA2; (-) strand; PAM type: YTN; PAM sequence: TTT
gatcctagccaattacaatc

SEQ ID NO: 211111 - DNA, 20 bp, Artificial Sequence
  Description of Artificial Sequence: Synthetic oligonucleotide
  Target: LAMA2; (-) strand; PAM type: YTN; PAM sequence: TTA
cataaagcatgtatttgatc

SEQ ID NO: 211112 - DNA, 20 bp, Artificial Sequence
  Description of Artificial Sequence: Synthetic oligonucleotide
  Target: LAMA2; (-) strand; PAM type: YTN; PAM sequence: CTG
tattacataaagcatgtatt

SEQ ID NO: 211113 - DNA, 20 bp, Artificial Sequence
  Description of Artificial Sequence: Synthetic oligonucleotide
  Target: LAMA2; (-) strand; PAM type: YTN; PAM sequence: TTA
agaaataaactgtattacat

SEQ ID NO: 211114 - DNA, 20 bp, Artificial Sequence
  Description of Artificial Sequence: Synthetic oligonucleotide
  Target: LAMA2; (-) strand; PAM type: YTN; PAM sequence: TTT
aagaaataaactgtattaca

SEQ ID NO: 211115 - DNA, 20 bp, Artificial Sequence
  Description of Artificial Sequence: Synthetic oligonucleotide
  Target: LAMA2; (-) strand; PAM type: YTN; PAM sequence: CTG
tatcagtttaagaaataaac

SEQ ID NO: 211116 - DNA, 20 bp, Artificial Sequence
  Description of Artificial Sequence: Synthetic oligonucleotide
  Target: LAMA2; (-) strand; PAM type: YTN; PAM sequence: TTC
tgtatcagtttaagaaataa

SEQ ID NO: 211117 - DNA, 20 bp, Artificial Sequence
  Description of Artificial Sequence: Synthetic oligonucleotide
  Target: LAMA2; (-) strand; PAM type: YTN; PAM sequence: TTT
ctgtatcagtttaagaaata

SEQ ID NO: 211118 - DNA, 20 bp, Artificial Sequence
  Description of Artificial Sequence: Synthetic oligonucleotide
  Target: LAMA2; (-) strand; PAM type: YTN; PAM sequence: CTT
tctgtatcagtttaagaaat

SEQ ID NO: 211119 - DNA, 20 bp, Artificial Sequence
  Description of Artificial Sequence: Synthetic oligonucleotide
  Target: LAMA2; (-) strand; PAM type: YTN; PAM sequence: TTA
tgtgcactttctgtatcagt

SEQ ID NO: 211120 - DNA, 20 bp, Artificial Sequence
  Description of Artificial Sequence: Synthetic oligonucleotide
  Target: LAMA2; (-) strand; PAM type: YTN; PAM sequence: TTC
cagaattatgtgcactttct

SEQ ID NO: 211121 - DNA, 20 bp, Artificial Sequence
  Description of Artificial Sequence: Synthetic oligonucleotide
  Target: LAMA2; (-) strand; PAM type: YTN; PAM sequence: CTT
ccagaattatgtgcactttc

SEQ ID NO: 211122 - DNA, 20 bp, Artificial Sequence
  Description of Artificial Sequence: Synthetic oligonucleotide
  Target: LAMA2; (-) strand; PAM type: YTN; PAM sequence: TTA
cttccagaattatgtgcact

SEQ ID NO: 211123 - DNA, 20 bp, Artificial Sequence
  Description of Artificial Sequence: Synthetic oligonucleotide
  Target: LAMA2; (-) strand; PAM type: YTN; PAM sequence: TTT
acttccagaattatgtgcac

SEQ ID NO: 211124 - DNA, 20 bp, Artificial Sequence
  Description of Artificial Sequence: Synthetic oligonucleotide
  Target: LAMA2; (-) strand; PAM type: YTN; PAM sequence: TTT
tacttccagaattatgtgca

SEQ ID NO: 211125 - DNA, 20 bp, Artificial Sequence
  Description of Artificial Sequence: Synthetic oligonucleotide
  Target: LAMA2; (-) strand; PAM type: YTN; PAM sequence: TTT
ttacttccagaattatgtgc

SEQ ID NO: 211126 - DNA, 20 bp, Artificial Sequence
  Description of Artificial Sequence: Synthetic oligonucleotide
  Target: LAMA2; (-) strand; PAM type: YTN; PAM sequence: TTG
aacatttttacttccagaat

SEQ ID NO: 211127 - DNA, 20 bp, Artificial Sequence
  Description of Artificial Sequence: Synthetic oligonucleotide
  Target: LAMA2; (-) strand; PAM type: YTN; PAM sequence: TTT
gaacatttttacttccagaa

SEQ ID NO: 211128 - DNA, 20 bp, Artificial Sequence
  Description of Artificial Sequence: Synthetic oligonucleotide
  Target: LAMA2; (-) strand; PAM type: YTN; PAM sequence: TTT
tgaacatttttacttccaga

SEQ ID NO: 211129 - DNA, 20 bp, Artificial Sequence
  Description of Artificial Sequence: Synthetic oligonucleotide
  Target: LAMA2; (-) strand; PAM type: YTN; PAM sequence: CTT
ttgaacatttttacttccag

SEQ ID NO: 211130 - DNA, 20 bp, Artificial Sequence
  Description of Artificial Sequence: Synthetic oligonucleotide
  Target: LAMA2; (-) strand; PAM type: YTN; PAM sequence: TTA
gcttttgaacatttttactt

SEQ ID NO: 211131 - DNA, 20 bp, Artificial Sequence
  Description of Artificial Sequence: Synthetic oligonucleotide
  Target: LAMA2; (-) strand; PAM type: YTN; PAM sequence: CTT
agcttttgaacatttttact

SEQ ID NO: 211132 - DNA, 20 bp, Artificial Sequence
  Description of Artificial Sequence: Synthetic oligonucleotide
  Target: LAMA2; (-) strand; PAM type: YTN; PAM sequence: TTC
ttagcttttgaacattttta

SEQ ID NO: 211133 - DNA, 20 bp, Artificial Sequence
  Description of Artificial Sequence: Synthetic oligonucleotide
  Target: LAMA2; (-) strand; PAM type: YTN; PAM sequence: CTT
cttagcttttgaacattttt

SEQ ID NO: 211134 - DNA, 20 bp, Artificial Sequence
  Description of Artificial Sequence: Synthetic oligonucleotide
  Target: LAMA2; (-) strand; PAM type: YTN; PAM sequence: TTG
aagaaaaataacatgagagc

SEQ ID NO: 211135 - DNA, 20 bp, Artificial Sequence
  Description of Artificial Sequence: Synthetic oligonucleotide
  Target: LAMA2; (-) strand; PAM type: YTN; PAM sequence: TTG
tagcaaattgaagaaaaata

SEQ ID NO: 211136 - DNA, 20 bp, Artificial Sequence
  Description of Artificial Sequence: Synthetic oligonucleotide
  Target: LAMA2; (-) strand; PAM type: YTN; PAM sequence: TTT
gtagcaaattgaagaaaaat

SEQ ID NO: 211137 - DNA, 20 bp, Artificial Sequence
  Description of Artificial Sequence: Synthetic oligonucleotide
  Target: LAMA2; (-) strand; PAM type: YTN; PAM sequence: CTA
tatatgtttgtagcaaattg

SEQ ID NO: 211138 - DNA, 20 bp, Artificial Sequence
  Description of Artificial Sequence: Synthetic oligonucleotide
  Target: LAMA2; (-) strand; PAM type: YTN; PAM sequence: CTC
tatatatgtttgtagcaaat

SEQ ID NO: 211139 - DNA, 20 bp, Artificial Sequence
  Description of Artificial Sequence: Synthetic oligonucleotide
  Target: LAMA2; (-) strand; PAM type: YTN; PAM sequence: CTA
cactctatatatgtttgtag

SEQ ID NO: 211140 - DNA, 20 bp, Artificial Sequence
  Description of Artificial Sequence: Synthetic oligonucleotide
  Target: LAMA2; (-) strand; PAM type: YTN; PAM sequence: CTA
gaaaataactacactctata

SEQ ID NO: 211141 - DNA, 20 bp, Artificial Sequence
  Description of Artificial Sequence: Synthetic oligonucleotide
  Target: LAMA2; (-) strand; PAM type: YTN; PAM sequence: TTA
tggctagaaaataactacac

SEQ ID NO: 211142 - DNA, 20 bp, Artificial Sequence
  Description of Artificial Sequence: Synthetic oligonucleotide
  Target: LAMA2; (-) strand; PAM type: YTN; PAM sequence: CTT
atggctagaaaataactaca

SEQ ID NO: 211143 - DNA, 20 bp, Artificial Sequence
  Description of Artificial Sequence: Synthetic oligonucleotide
  Target: LAMA2; (-) strand; PAM type: YTN; PAM sequence: TTC
ttatggctagaaaataacta

SEQ ID NO: 211144 - DNA, 20 bp, Artificial Sequence
  Description of Artificial Sequence: Synthetic oligonucleotide
  Target: LAMA2; (-) strand; PAM type: YTN; PAM sequence: CTA
attcttatggctagaaaata

SEQ ID NO: 211145 - DNA, 20 bp, Artificial Sequence
  Description of Artificial Sequence: Synthetic oligonucleotide
  Target: LAMA2; (-) strand; PAM type: YTN; PAM sequence: CTG
ctaattcttatggctagaaa

SEQ ID NO: 211146 - DNA, 20 bp, Artificial Sequence
  Description of Artificial Sequence: Synthetic oligonucleotide
  Target: LAMA2; (-) strand; PAM type: YTN; PAM sequence: TTC
tgctaattcttatggctaga

SEQ ID NO: 211147 - DNA, 20 bp, Artificial Sequence
  Description of Artificial Sequence: Synthetic oligonucleotide
  Target: LAMA2; (-) strand; PAM type: YTN; PAM sequence: CTT
ctgctaattcttatggctag

SEQ ID NO: 211148 - DNA, 20 bp, Artificial Sequence
  Description of Artificial Sequence: Synthetic oligonucleotide
  Target: LAMA2; (-) strand; PAM type: YTN; PAM sequence: CTC
caaagcttctgctaattctt

SEQ ID NO: 211149 - DNA, 20 bp, Artificial Sequence
  Description of Artificial Sequence: Synthetic oligonucleotide
  Target: LAMA2; (-) strand; PAM type: YTN; PAM sequence: CTC
tccaaagcttctgctaattc

SEQ ID NO: 211150 - DNA, 20 bp, Artificial Sequence
  Description of Artificial Sequence: Synthetic oligonucleotide
  Target: LAMA2; (-) strand; PAM type: YTN; PAM sequence: TTC
tctccaaagcttctgctaat

SEQ ID NO: 211151 - DNA, 20 bp, Artificial Sequence
  Description of Artificial Sequence: Synthetic oligonucleotide
  Target: LAMA2; (-) strand; PAM type: YTN; PAM sequence: TTT
ctctccaaagcttctgctaa

SEQ ID NO: 211152 - DNA, 20 bp, Artificial Sequence
  Description of Artificial Sequence: Synthetic oligonucleotide
  Target: LAMA2; (-) strand; PAM type: YTN; PAM sequence: TTT
tctctccaaagcttctgcta

SEQ ID NO: 211153 - DNA, 20 bp, Artificial Sequence
  Description of Artificial Sequence: Synthetic oligonucleotide
  Target: LAMA2; (-) strand; PAM type: YTN; PAM sequence: CTT
ttctctccaaagcttctgct

SEQ ID NO: 211154 - DNA, 20 bp, Artificial Sequence
  Description of Artificial Sequence: Synthetic oligonucleotide
  Target: LAMA2; (-) strand; PAM type: YTN; PAM sequence: CTA
ccttttctctccaaagcttc

SEQ ID NO: 211155 - DNA, 20 bp, Artificial Sequence
  Description of Artificial Sequence: Synthetic oligonucleotide
  Target: LAMA2; (-) strand; PAM type: YTN; PAM sequence: CTC
ctaccttttctctccaaagc

SEQ ID NO: 211156 - DNA, 20 bp, Artificial Sequence
  Description of Artificial Sequence: Synthetic oligonucleotide
  Target: LAMA2; (-) strand; PAM type: YTN; PAM sequence: TTC
agtctcctaccttttctctc

SEQ ID NO: 211157 - DNA, 20 bp, Artificial Sequence
  Description of Artificial Sequence: Synthetic oligonucleotide
  Target: LAMA2; (-) strand; PAM type: YTN; PAM sequence: CTC
agggcattcagtctcctacc

SEQ ID NO: 211158 - DNA, 20 bp, Artificial Sequence
  Description of Artificial Sequence: Synthetic oligonucleotide
  Target: LAMA2; (-) strand; PAM type: YTN; PAM sequence: TTC
aaagggatgctcagggcatt

SEQ ID NO: 211159 - DNA, 20 bp, Artificial Sequence
  Description of Artificial Sequence: Synthetic oligonucleotide
  Target: LAMA2; (-) strand; PAM type: YTN; PAM sequence: CTA
ttcaaagggatgctcagggc

SEQ ID NO: 211160 - DNA, 20 bp, Artificial Sequence
  Description of Artificial Sequence: Synthetic oligonucleotide
  Target: LAMA2; (-) strand; PAM type: YTN; PAM sequence: CTG
agctattcaaagggatgctc

SEQ ID NO: 211161 - DNA, 20 bp, Artificial Sequence
  Description of Artificial Sequence: Synthetic oligonucleotide
  Target: LAMA2; (-) strand; PAM type: YTN; PAM sequence: TTG
cctgagctattcaaagggat

SEQ ID NO: 211162 - DNA, 20 bp, Artificial Sequence
  Description of Artificial Sequence: Synthetic oligonucleotide
  Target: LAMA2; (-) strand; PAM type: YTN; PAM sequence: CTT
gcctgagctattcaaaggga

SEQ ID NO: 211163 - DNA, 20 bp, Artificial Sequence
  Description of Artificial Sequence: Synthetic oligonucleotide
  Target: LAMA2; (-) strand; PAM type: YTN; PAM sequence: TTC
ttgcctgagctattcaaagg

SEQ ID NO: 211164 - DNA, 20 bp, Artificial Sequence
  Description of Artificial Sequence: Synthetic oligonucleotide
  Target: LAMA2; (-) strand; PAM type: YTN; PAM sequence: CTT
cttgcctgagctattcaaag

SEQ ID NO: 211165 - DNA, 20 bp, Artificial Sequence
  Description of Artificial Sequence: Synthetic oligonucleotide
  Target: LAMA2; (-) strand; PAM type: YTN; PAM sequence: CTC
ttcttgcctgagctattcaa

SEQ ID NO: 211166 - DNA, 20 bp, Artificial Sequence
  Description of Artificial Sequence: Synthetic oligonucleotide
  Target: LAMA2; (-) strand; PAM type: YTN; PAM sequence: CTG
ggataatagcacctcttctt

SEQ ID NO: 211167 - DNA, 20 bp, Artificial Sequence
  Description of Artificial Sequence: Synthetic oligonucleotide
  Target: LAMA2; (-) strand; PAM type: YTN; PAM sequence: CTC
ctgggataatagcacctctt

SEQ ID NO: 211168 - DNA, 20 bp, Artificial Sequence
  Description of Artificial Sequence: Synthetic oligonucleotide
  Target: LAMA2; (-) strand; PAM type: YTN; PAM sequence: CTC
ctcctgggataatagcacct

SEQ ID NO: 211169 - DNA, 20 bp, Artificial Sequence
  Description of Artificial Sequence: Synthetic oligonucleotide
  Target: LAMA2; (-) strand; PAM type: YTN; PAM sequence: TTA
cagtctcctcctgggataat

SEQ ID NO: 211170 - DNA, 20 bp, Artificial Sequence
  Description of Artificial Sequence: Synthetic oligonucleotide
  Target: LAMA2; (-) strand; PAM type: YTN; PAM sequence: CTT
acagtctcctcctgggataa

SEQ ID NO: 211171 - DNA, 20 bp, Artificial Sequence
  Description of Artificial Sequence: Synthetic oligonucleotide
  Target: LAMA2; (-) strand; PAM type: YTN; PAM sequence: TTA
cacaaacgtcacttacagtc

SEQ ID NO: 211172 - DNA, 20 bp, Artificial Sequence
  Description of Artificial Sequence: Synthetic oligonucleotide
  Target: LAMA2; (-) strand; PAM type: YTN; PAM sequence: TTG
aattacacaaacgtcactta

SEQ ID NO: 211173 - DNA, 20 bp, Artificial Sequence
  Description of Artificial Sequence: Synthetic oligonucleotide
  Target: LAMA2; (-) strand; PAM type: YTN; PAM sequence: CTT
gaattacacaaacgtcactt

SEQ ID NO: 211174 - DNA, 20 bp, Artificial Sequence
  Description of Artificial Sequence: Synthetic oligonucleotide
  Target: LAMA2; (-) strand; PAM type: YTN; PAM sequence: TTA
tccaggcaggacatacttga

SEQ ID NO: 211175 - DNA, 20 bp, Artificial Sequence
  Description of Artificial Sequence: Synthetic oligonucleotide
  Target: LAMA2; (-) strand; PAM type: YTN; PAM sequence: CTT
atccaggcaggacatacttg

SEQ ID NO: 211176 - DNA, 20 bp, Artificial Sequence
  Description of Artificial Sequence: Synthetic oligonucleotide
  Target: LAMA2; (-) strand; PAM type: YTN; PAM sequence: TTA
cccacaagtccttatccagg

SEQ ID NO: 211177 - DNA, 20 bp, Artificial Sequence
  Description of Artificial Sequence: Synthetic oligonucleotide
  Target: LAMA2; (-) strand; PAM type: YTN; PAM sequence: CTT
acccacaagtccttatccag

SEQ ID NO: 211178 - DNA, 20 bp, Artificial Sequence
  Description of Artificial Sequence: Synthetic oligonucleotide
  Target: LAMA2; (-) strand; PAM type: YTN; PAM sequence: TTC
cttacccacaagtccttatc

SEQ ID NO: 211179 - DNA, 20 bp, Artificial Sequence
  Description of Artificial Sequence: Synthetic oligonucleotide
  Target: LAMA2; (-) strand; PAM type: YTN; PAM sequence: TTT
ccttacccacaagtccttat

SEQ ID NO: 211180 - DNA, 20 bp, Artificial Sequence
  Description of Artificial Sequence: Synthetic oligonucleotide
  Target: LAMA2; (-) strand; PAM type: YTN; PAM sequence: CTG
tttccttacccacaagtcct

SEQ ID NO: 211181 - DNA, 20 bp, Artificial Sequence
  Description of Artificial Sequence: Synthetic oligonucleotide
  Target: LAMA2; (-) strand; PAM type: YTN; PAM sequence: CTC
tgtttccttacccacaagtc

SEQ ID NO: 211182 - DNA, 20 bp, Artificial Sequence
  Description of Artificial Sequence: Synthetic oligonucleotide
  Target: LAMA2; (-) strand; PAM type: YTN; PAM sequence: CTA
ctctgtttccttacccacaa

SEQ ID NO: 211183 - DNA, 20 bp, Artificial Sequence
  Description of Artificial Sequence: Synthetic oligonucleotide
  Target: LAMA2; (-) strand; PAM type: YTN; PAM sequence: TTA
ctactctgtttccttaccca

SEQ ID NO: 211184 - DNA, 20 bp, Artificial Sequence
  Description of Artificial Sequence: Synthetic oligonucleotide
  Target: LAMA2; (-) strand; PAM type: YTN; PAM sequence: TTT
actactctgtttccttaccc

SEQ ID NO: 211185 - DNA, 20 bp, Artificial Sequence
  Description of Artificial Sequence: Synthetic oligonucleotide
  Target: LAMA2; (-) strand; PAM type: YTN; PAM sequence: CTA
tttactactctgtttcctta

SEQ ID NO: 211186 - DNA, 20 bp, Artificial Sequence
  Description of Artificial Sequence: Synthetic oligonucleotide
  Target: LAMA2; (-) strand; PAM type: YTN; PAM sequence: TTG
gctatttactactctgtttc

SEQ ID NO: 211187 - DNA, 20 bp, Artificial Sequence
  Description of Artificial Sequence: Synthetic oligonucleotide
  Target: LAMA2; (-) strand; PAM type: YTN; PAM sequence: TTT
ggctatttactactctgttt

SEQ ID NO: 211188 - DNA, 20 bp, Artificial Sequence
  Description of Artificial Sequence: Synthetic oligonucleotide
  Target: LAMA2; (-) strand; PAM type: YTN; PAM sequence: CTT
tggctatttactactctgtt

SEQ ID NO: 211189 - DNA, 20 bp, Artificial Sequence
  Description of Artificial Sequence: Synthetic oligonucleotide
  Target: LAMA2; (-) strand; PAM type: YTN; PAM sequence: TTC
cctttggctatttactactc

SEQ ID NO: 211190 - DNA, 20 bp, Artificial Sequence
  Description of Artificial Sequence: Synthetic oligonucleotide
  Target: LAMA2; (-) strand; PAM type: YTN; PAM sequence: CTT
ccctttggctatttactact

SEQ ID NO: 211191 - DNA, 20 bp, Artificial Sequence
  Description of Artificial Sequence: Synthetic oligonucleotide
  Target: LAMA2; (-) strand; PAM type: YTN; PAM sequence: TTC
ttccctttggctatttacta

SEQ ID NO: 211192 - DNA, 20 bp, Artificial Sequence
  Description of Artificial Sequence: Synthetic oligonucleotide
  Target: LAMA2; (-) strand; PAM type: YTN; PAM sequence: TTT
cttccctttggctatttact

SEQ ID NO: 211193 - DNA, 20 bp, Artificial Sequence
  Description of Artificial Sequence: Synthetic oligonucleotide
  Target: LAMA2; (-) strand; PAM type: YTN; PAM sequence: CTT
tcttccctttggctatttac

SEQ ID NO: 211194 - DNA, 20 bp, Artificial Sequence
  Description of Artificial Sequence: Synthetic oligonucleotide
  Target: LAMA2; (-) strand; PAM type: YTN; PAM sequence: CTG
actttcttccctttggctat

SEQ ID NO: 211195 - DNA, 20 bp, Artificial Sequence
  Description of Artificial Sequence: Synthetic oligonucleotide
  Target: LAMA2; (-) strand; PAM type: YTN; PAM sequence: TTC
tgactttcttccctttggct

SEQ ID NO: 211196 - DNA, 20 bp, Artificial Sequence
  Description of Artificial Sequence: Synthetic oligonucleotide
  Target: LAMA2; (-) strand; PAM type: YTN; PAM sequence: TTT
ctgactttcttccctttggc

SEQ ID NO: 211197 - DNA, 20 bp, Artificial Sequence
  Description of Artificial Sequence: Synthetic oligonucleotide
  Target: LAMA2; (-) strand; PAM type: YTN; PAM sequence: TTT
tctgactttcttccctttgg

SEQ ID NO: 211198 - DNA, 20 bp, Artificial Sequence
  Description of Artificial Sequence: Synthetic oligonucleotide
  Target: LAMA2; (-) strand; PAM type: YTN; PAM sequence: CTT
ttctgactttcttccctttg

SEQ ID NO: 211199 - DNA, 20 bp, Artificial Sequence
  Description of Artificial Sequence: Synthetic oligonucleotide
  Target: LAMA2; (-) strand; PAM type: YTN; PAM sequence: TTA
agtggaggaacacagcaagc

SEQ ID NO: 211200 - DNA, 20 bp, Artificial Sequence
  Description of Artificial Sequence: Synthetic oligonucleotide
  Target: LAMA2; (-) strand; PAM type: YTN; PAM sequence: TTT
aagtggaggaacacagcaag

SEQ ID NO: 211201 - DNA, 20 bp, Artificial Sequence
  Description of Artificial Sequence: Synthetic oligonucleotide
  Target: LAMA2; (-) strand; PAM type: YTN; PAM sequence: CTA
aagaaataacatatatttaa

SEQ ID NO: 211202 - DNA, 20 bp, Artificial Sequence
  Description of Artificial Sequence: Synthetic oligonucleotide
  Target: LAMA2; (-) strand; PAM type: YTN; PAM sequence: CTG
cagtccctaaagaaataaca

SEQ ID NO: 211203 - DNA, 20 bp, Artificial Sequence
  Description of Artificial Sequence: Synthetic oligonucleotide
  Target: LAMA2; (-) strand; PAM type: YTN; PAM sequence: TTG
taaaacctgcagtccctaaa

SEQ ID NO: 211204 - DNA, 20 bp, Artificial Sequence
  Description of Artificial Sequence: Synthetic oligonucleotide
  Target: LAMA2; (-) strand; PAM type: YTN; PAM sequence: TTT
gtaaaacctgcagtccctaa

SEQ ID NO: 211205 - DNA, 20 bp, Artificial Sequence
  Description of Artificial Sequence: Synthetic oligonucleotide
  Target: LAMA2; (-) strand; PAM type: YTN; PAM sequence: CTT
tgtaaaacctgcagtcccta

SEQ ID NO: 211206 - DNA, 20 bp, Artificial Sequence
  Description of Artificial Sequence: Synthetic oligonucleotide
  Target: LAMA2; (-) strand; PAM type: YTN; PAM sequence: CTC
tttgtaaaacctgcagtccc

SEQ ID NO: 211207 - DNA, 20 bp, Artificial Sequence
  Description of Artificial Sequence: Synthetic oligonucleotide
  Target: LAMA2; (-) strand; PAM type: YTN; PAM sequence: TTC
atctctttgtaaaacctgca

SEQ ID NO: 211208 - DNA, 20 bp, Artificial Sequence
  Description of Artificial Sequence: Synthetic oligonucleotide
  Target: LAMA2; (-) strand; PAM type: YTN; PAM sequence: CTT
catctctttgtaaaacctgc

SEQ ID NO: 211209 - DNA, 20 bp, Artificial Sequence
  Description of Artificial Sequence: Synthetic oligonucleotide
  Target: LAMA2; (-) strand; PAM type: YTN; PAM sequence: TTA
gtcttcatctctttgtaaaa

SEQ ID NO: 211210 - DNA, 20 bp, Artificial Sequence
  Description of Artificial Sequence: Synthetic oligonucleotide
  Target: LAMA2; (-) strand; PAM type: YTN; PAM sequence: TTC
cgaattagtcttcatctctt

SEQ ID NO: 211211 - DNA, 20 bp, Artificial Sequence
  Description of Artificial Sequence: Synthetic oligonucleotide
  Target: LAMA2; (-) strand; PAM type: YTN; PAM sequence: TTG
gaaacagaggtaagtagcat

SEQ ID NO: 211212 - DNA, 20 bp, Artificial Sequence
  Description of Artificial Sequence: Synthetic oligonucleotide
  Target: LAMA2; (-) strand; PAM type: YTN; PAM sequence: TTT
ggaaacagaggtaagtagca

SEQ ID NO: 211213 - DNA, 20 bp, Artificial Sequence
  Description of Artificial Sequence: Synthetic oligonucleotide
  Target: LAMA2; (-) strand; PAM type: YTN; PAM sequence: TTT
tggaaacagaggtaagtagc

SEQ ID NO: 211214 - DNA, 20 bp, Artificial Sequence
  Description of Artificial Sequence: Synthetic oligonucleotide
  Target: LAMA2; (-) strand; PAM type: YTN; PAM sequence: CTT
ttggaaacagaggtaagtag

SEQ ID NO: 211215 - DNA, 20 bp, Artificial Sequence
  Description of Artificial Sequence: Synthetic oligonucleotide
  Target: LAMA2; (-) strand; PAM type: YTN; PAM sequence: TTC
ttttggaaacagaggtaagt

SEQ ID NO: 211216 - DNA, 20 bp, Artificial Sequence
  Description of Artificial Sequence: Synthetic oligonucleotide
  Target: LAMA2; (-) strand; PAM type: YTN; PAM sequence: TTT
cttttggaaacagaggtaag

SEQ ID NO: 211217 - DNA, 20 bp, Artificial Sequence
  Description of Artificial Sequence: Synthetic oligonucleotide
  Target: LAMA2; (-) strand; PAM type: YTN; PAM sequence: TTT
tcttttggaaacagaggtaa

SEQ ID NO: 211218 - DNA, 20 bp, Artificial Sequence
  Description of Artificial Sequence: Synthetic oligonucleotide
  Target: LAMA2; (-) strand; PAM type: YTN; PAM sequence: TTT
ttcttttggaaacagaggta

SEQ ID NO: 211219 - DNA, 20 bp, Artificial Sequence
  Description of Artificial Sequence: Synthetic oligonucleotide
  Target: LAMA2; (-) strand; PAM type: YTN; PAM sequence: CTT
tttcttttggaaacagaggt

SEQ ID NO: 211220 - DNA, 20 bp, Artificial Sequence
  Description of Artificial Sequence: Synthetic oligonucleotide
  Target: LAMA2; (-) strand; PAM type: YTN; PAM sequence: CTG
gaggagtctttttcttttgg

SEQ ID NO: 211221 - DNA, 20 bp, Artificial Sequence
  Description of Artificial Sequence: Synthetic oligonucleotide
  Target: LAMA2; (-) strand; PAM type: YTN; PAM sequence: TTC
tggaggagtctttttctttt

SEQ ID NO: 211222 - DNA, 20 bp, Artificial Sequence
  Description of Artificial Sequence: Synthetic oligonucleotide
  Target: LAMA2; (-) strand; PAM type: YTN; PAM sequence: TTA
aaaccacattctggaggagt

SEQ ID NO: 211223 - DNA, 20 bp, Artificial Sequence
  Description of Artificial Sequence: Synthetic oligonucleotide
  Target: LAMA2; (-) strand; PAM type: YTN; PAM sequence: CTT
aaaaccacattctggaggag

SEQ ID NO: 211224 - DNA, 20 bp, Artificial Sequence
  Description of Artificial Sequence: Synthetic oligonucleotide
  Target: LAMA2; (-) strand; PAM type: YTN; PAM sequence: CTA
cttaaaaccacattctggag

SEQ ID NO: 211225 - DNA, 20 bp, Artificial Sequence
  Description of Artificial Sequence: Synthetic oligonucleotide
  Target: LAMA2; (-) strand; PAM type: YTN; PAM sequence: TTG
gtccatggcctacttaaaac

SEQ ID NO: 211226 - DNA, 20 bp, Artificial Sequence
  Description of Artificial Sequence: Synthetic oligonucleotide
  Target: LAMA2; (-) strand; PAM type: YTN; PAM sequence: TTT
ggtccatggcctacttaaaa

SEQ ID NO: 211227 - DNA, 20 bp, Artificial Sequence
  Description of Artificial Sequence: Synthetic oligonucleotide
  Target: LAMA2; (-) strand; PAM type: YTN; PAM sequence: TTT
tggtccatggcctacttaaa

SEQ ID NO: 211228 - DNA, 20 bp, Artificial Sequence
  Description of Artificial Sequence: Synthetic oligonucleotide
  Target: LAMA2; (-) strand; PAM type: YTN; PAM sequence: CTT
ttggtccatggcctacttaa

SEQ ID NO: 211229 - DNA, 20 bp, Artificial Sequence
  Description of Artificial Sequence: Synthetic oligonucleotide
  Target: LAMA2; (-) strand; PAM type: YTN; PAM sequence: CTA
cttttggtccatggcctact

SEQ ID NO: 211230 - DNA, 20 bp, Artificial Sequence
  Description of Artificial Sequence: Synthetic oligonucleotide
  Target: LAMA2; (-) strand; PAM type: YTN; PAM sequence: TTG
tggcctacttttggtccatg

SEQ ID NO: 211231 - DNA, 20 bp, Artificial Sequence
  Description of Artificial Sequence: Synthetic oligonucleotide
  Target: LAMA2; (-) strand; PAM type: YTN; PAM sequence: CTT
gtggcctacttttggtccat

SEQ ID NO: 211232 - DNA, 20 bp, Artificial Sequence
  Description of Artificial Sequence: Synthetic oligonucleotide
  Target: LAMA2; (-) strand; PAM type: YTN; PAM sequence: CTG
ccatgccttgtggcctactt

SEQ ID NO: 211233 - DNA, 20 bp, Artificial Sequence
  Description of Artificial Sequence: Synthetic oligonucleotide
  Target: LAMA2; (-) strand; PAM type: YTN; PAM sequence: CTG
cctgccatgccttgtggcct

SEQ ID NO: 211234 - DNA, 20 bp, Artificial Sequence
  Description of Artificial Sequence: Synthetic oligonucleotide
  Target: LAMA2; (-) strand; PAM type: YTN; PAM sequence: TTC
ataaagctgcctgccatgcc

SEQ ID NO: 211235 - DNA, 20 bp, Artificial Sequence
  Description of Artificial Sequence: Synthetic oligonucleotide
  Target: LAMA2; (-) strand; PAM type: YTN; PAM sequence: TTG
aagttcataaagctgcctgc

SEQ ID NO: 211236 - DNA, 20 bp, Artificial Sequence
  Description of Artificial Sequence: Synthetic oligonucleotide
  Target: LAMA2; (-) strand; PAM type: YTN; PAM sequence: CTT
gaagttcataaagctgcctg

SEQ ID NO: 211237 - DNA, 20 bp, Artificial Sequence
  Description of Artificial Sequence: Synthetic oligonucleotide
  Target: LAMA2; (-) strand; PAM type: YTN; PAM sequence: CTA
gaaccttgaagttcataaag

SEQ ID NO: 211238 - DNA, 20 bp, Artificial Sequence
  Description of Artificial Sequence: Synthetic oligonucleotide
  Target: LAMA2; (-) strand; PAM type: YTN; PAM sequence: TTC
ctagaaccttgaagttcata

SEQ ID NO: 211239 - DNA, 20 bp, Artificial Sequence
  Description of Artificial Sequence: Synthetic oligonucleotide
  Target: LAMA2; (-) strand; PAM type: YTN; PAM sequence: TTT
cctagaaccttgaagttcat

SEQ ID NO: 211240 - DNA, 20 bp, Artificial Sequence
  Description of Artificial Sequence: Synthetic oligonucleotide
  Target: LAMA2; (-) strand; PAM type: YTN; PAM sequence: CTC
caatggatgaaatttcctag

SEQ ID NO: 211241 - DNA, 20 bp, Artificial Sequence
  Description of Artificial Sequence: Synthetic oligonucleotide
  Target: LAMA2; (-) strand; PAM type: YTN; PAM sequence: CTC
tccaatggatgaaatttcct

SEQ ID NO: 211242 - DNA, 20 bp, Artificial Sequence
  Description of Artificial Sequence: Synthetic oligonucleotide
  Target: LAMA2; (-) strand; PAM type: YTN; PAM sequence: CTG
gagaactctccaatggatga

SEQ ID NO: 211243 - DNA, 20 bp, Artificial Sequence
  Description of Artificial Sequence: Synthetic oligonucleotide
  Target: LAMA2; (-) strand; PAM type: YTN; PAM sequence: TTA
aagcactggagaactctcca

SEQ ID NO: 211244 - DNA, 20 bp, Artificial Sequence
  Description of Artificial Sequence: Synthetic oligonucleotide
  Target: LAMA2; (-) strand; PAM type: YTN; PAM sequence: TTT
aaagcactggagaactctcc

SEQ ID NO: 211245 - DNA, 20 bp, Artificial Sequence
  Description of Artificial Sequence: Synthetic oligonucleotide
  Target: LAMA2; (-) strand; PAM type: YTN; PAM sequence: TTG
tttaaagcactggagaactc

SEQ ID NO: 211246 - DNA, 20 bp, Artificial Sequence
  Description of Artificial Sequence: Synthetic oligonucleotide
  Target: LAMA2; (-) strand; PAM type: YTN; PAM sequence: CTA
atattgtttaaagcactgga

SEQ ID NO: 211247 - DNA, 20 bp, Artificial Sequence
  Description of Artificial Sequence: Synthetic oligonucleotide
  Target: LAMA2; (-) strand; PAM type: YTN; PAM sequence: TTC
taatattgtttaaagcactg

SEQ ID NO: 211248 - DNA, 20 bp, Artificial Sequence
  Description of Artificial Sequence: Synthetic oligonucleotide
  Target: LAMA2; (-) strand; PAM type: YTN; PAM sequence: TTT
ctaatattgtttaaagcact

SEQ ID NO: 211249 - DNA, 20 bp, Artificial Sequence
  Description of Artificial Sequence: Synthetic oligonucleotide
  Target: LAMA2; (-) strand; PAM type: YTN; PAM sequence: CTT
tctaatattgtttaaagcac

SEQ ID NO: 211250 - DNA, 20 bp, Artificial Sequence
  Description of Artificial Sequence: Synthetic oligonucleotide
  Target: LAMA2; (-) strand; PAM type: YTN; PAM sequence: TTC
tttctaatattgtttaaagc

SEQ ID NO: 211251 - DNA, 20 bp, Artificial Sequence
  Description of Artificial Sequence: Synthetic oligonucleotide
  Target: LAMA2; (-) strand; PAM type: YTN; PAM sequence: TTT
ctttctaatattgtttaaag

SEQ ID NO: 211252 - DNA, 20 bp, Artificial Sequence
  Description of Artificial Sequence: Synthetic oligonucleotide
  Target: LAMA2; (-) strand; PAM type: YTN; PAM sequence: TTT
tctttctaatattgtttaaa

SEQ ID NO: 211253 - DNA, 20 bp, Artificial Sequence
  Description of Artificial Sequence: Synthetic oligonucleotide
  Target: LAMA2; (-) strand; PAM type: YTN; PAM sequence: CTG
ttttctttctaatattgttt

SEQ ID NO: 211254 - DNA, 20 bp, Artificial Sequence
  Description of Artificial Sequence: Synthetic oligonucleotide
  Target: LAMA2; (-) strand; PAM type: YTN; PAM sequence: TTG
taccgctgttttctttctaa

SEQ ID NO: 211255 - DNA, 20 bp, Artificial Sequence
  Description of Artificial Sequence: Synthetic oligonucleotide
  Target: LAMA2; (-) strand; PAM type: YTN; PAM sequence: TTT
gtaccgctgttttctttcta

SEQ ID NO: 211256 - DNA, 20 bp, Artificial Sequence
  Description of Artificial Sequence: Synthetic oligonucleotide
  Target: LAMA2; (-) strand; PAM type: YTN; PAM sequence: TTG
atttgtaccgctgttttctt

SEQ ID NO: 211257 - DNA, 20 bp, Artificial Sequence
  Description of Artificial Sequence: Synthetic oligonucleotide
  Target: LAMA2; (-) strand; PAM type: YTN; PAM sequence: CTA
gcatggttgatttgtaccgc

SEQ ID NO: 211258 - DNA, 20 bp, Artificial Sequence
  Description of Artificial Sequence: Synthetic oligonucleotide
  Target: LAMA2; (-) strand; PAM type: YTN; PAM sequence: TTA
ctagcatggttgatttgtac

SEQ ID NO: 211259 - DNA, 20 bp, Artificial Sequence
  Description of Artificial Sequence: Synthetic oligonucleotide
  Target: LAMA2; (-) strand; PAM type: YTN; PAM sequence: TTT
actagcatggttgatttgta

SEQ ID NO: 211260 - DNA, 20 bp, Artificial Sequence
  Description of Artificial Sequence: Synthetic oligonucleotide
  Target: LAMA2; (-) strand; PAM type: YTN; PAM sequence: TTT
tactagcatggttgatttgt

SEQ ID NO: 211261 - DNA, 20 bp, Artificial Sequence
  Description of Artificial Sequence: Synthetic oligonucleotide
  Target: LAMA2; (-) strand; PAM type: YTN; PAM sequence: TTT
ttactagcatggttgatttg

SEQ ID NO: 211262 - DNA, 20 bp, Artificial Sequence
  Description of Artificial Sequence: Synthetic oligonucleotide
  Target: LAMA2; (-) strand; PAM type: YTN; PAM sequence: TTG
caggagagatttttactagc

SEQ ID NO: 211263 - DNA, 20 bp, Artificial Sequence
  Description of Artificial Sequence: Synthetic oligonucleotide
  Target: LAMA2; (-) strand; PAM type: YTN; PAM sequence: CTT
gcaggagagatttttactag

SEQ ID NO: 211264 - DNA, 20 bp, Artificial Sequence
  Description of Artificial Sequence: Synthetic oligonucleotide
  Target: LAMA2; (-) strand; PAM type: YTN; PAM sequence: CTC
agtaatgtcttgcaggagag

SEQ ID NO: 211265 - DNA, 20 bp, Artificial Sequence
  Description of Artificial Sequence: Synthetic oligonucleotide
  Target: LAMA2; (-) strand; PAM type: YTN; PAM sequence: TTC
accactcagtaatgtcttgc

SEQ ID NO: 211266 - DNA, 20 bp, Artificial Sequence
  Description of Artificial Sequence: Synthetic oligonucleotide
  Target: LAMA2; (-) strand; PAM type: YTN; PAM sequence: CTT
caccactcagtaatgtcttg

SEQ ID NO: 211267 - DNA, 20 bp, Artificial Sequence
  Description of Artificial Sequence: Synthetic oligonucleotide
  Target: LAMA2; (-) strand; PAM type: YTN; PAM sequence: TTA
gtcttcaccactcagtaatg

SEQ ID NO: 211268 - DNA, 20 bp, Artificial Sequence
  Description of Artificial Sequence: Synthetic oligonucleotide
  Target: LAMA2; (-) strand; PAM type: YTN; PAM sequence: CTT
agtcttcaccactcagtaat

SEQ ID NO: 211269 - DNA, 20 bp, Artificial Sequence
  Description of Artificial Sequence: Synthetic oligonucleotide
  Target: LAMA2; (-) strand; PAM type: YTN; PAM sequence: CTA
aaaatcaacaaaaaagaagc

SEQ ID NO: 211270 - DNA, 20 bp, Artificial Sequence
  Description of Artificial Sequence: Synthetic oligonucleotide
  Target: LAMA2; (-) strand; PAM type: YTN; PAM sequence: TTA
tatgctaaaaatcaacaaaa

SEQ ID NO: 211271 - DNA, 20 bp, Artificial Sequence
  Description of Artificial Sequence: Synthetic oligonucleotide
  Target: LAMA2; (-) strand; PAM type: YTN; PAM sequence: TTT
atatgctaaaaatcaacaaa

SEQ ID NO: 211272 - DNA, 20 bp, Artificial Sequence
  Description of Artificial Sequence: Synthetic oligonucleotide
  Target: LAMA2; (-) strand; PAM type: YTN; PAM sequence: TTA
tttatatgctaaaaatcaac

SEQ ID NO: 211273 - DNA, 20 bp, Artificial Sequence
  Description of Artificial Sequence: Synthetic oligonucleotide
  Target: LAMA2; (-) strand; PAM type: YTN; PAM sequence: TTT
atttatatgctaaaaatcaa

SEQ ID NO: 211274 - DNA, 20 bp, Artificial Sequence
  Description of Artificial Sequence: Synthetic oligonucleotide
  Target: LAMA2; (-) strand; PAM type: YTN; PAM sequence: TTT
tatttatatgctaaaaatca

SEQ ID NO: 211275 - DNA, 20 bp, Artificial Sequence
  Description of Artificial Sequence: Synthetic oligonucleotide
  Target: LAMA2; (-) strand; PAM type: YTN; PAM sequence: TTA
taaattttatttatatgcta

SEQ ID NO: 211276 - DNA, 20 bp, Artificial Sequence
  Description of Artificial Sequence: Synthetic oligonucleotide
  Target: LAMA2; (-) strand; PAM type: YTN; PAM sequence: CTT
ataaattttatttatatgct

SEQ ID NO: 211277 - DNA, 20 bp, Artificial Sequence
  Description of Artificial Sequence: Synthetic oligonucleotide
  Target: LAMA2; (-) strand; PAM type: YTN; PAM sequence: TTG
ggcttataaattttatttat

SEQ ID NO: 211278 - DNA, 20 bp, Artificial Sequence
  Description of Artificial Sequence: Synthetic oligonucleotide
  Target: LAMA2; (-) strand; PAM type: YTN; PAM sequence: TTG
ttgggcttataaattttatt

SEQ ID NO: 211279 - DNA, 20 bp, Artificial Sequence
  Description of Artificial Sequence: Synthetic oligonucleotide
  Target: LAMA2; (-) strand; PAM type: YTN; PAM sequence: TTT
gttgggcttataaattttat

SEQ ID NO: 211280 - DNA, 20 bp, Artificial Sequence
  Description of Artificial Sequence: Synthetic oligonucleotide
  Target: LAMA2; (-) strand; PAM type: YTN; PAM sequence: TTT
tgttgggcttataaatttta

SEQ ID NO: 211281 - DNA, 20 bp, Artificial Sequence
  Description of Artificial Sequence: Synthetic oligonucleotide
  Target: LAMA2; (-) strand; PAM type: YTN; PAM sequence: CTT
ttgttgggcttataaatttt

SEQ ID NO: 211282 - DNA, 20 bp, Artificial Sequence
  Description of Artificial Sequence: Synthetic oligonucleotide
  Target: LAMA2; (-) strand; PAM type: YTN; PAM sequence: TTC
ttttgttgggcttataaatt

SEQ ID NO: 211283 - DNA, 20 bp, Artificial Sequence
  Description of Artificial Sequence: Synthetic oligonucleotide
  Target: LAMA2; (-) strand; PAM type: YTN; PAM sequence: TTT
cttttgttgggcttataaat

SEQ ID NO: 211284 - DNA, 20 bp, Artificial Sequence
  Description of Artificial Sequence: Synthetic oligonucleotide
  Target: LAMA2; (-) strand; PAM type: YTN; PAM sequence: TTT
tcttttgttgggcttataaa

SEQ ID NO: 211285 - DNA, 20 bp, Artificial Sequence
  Description of Artificial Sequence: Synthetic oligonucleotide
  Target: LAMA2; (-) strand; PAM type: YTN; PAM sequence: CTT
ttcttttgttgggcttataa

SEQ ID NO: 211286 - DNA, 20 bp, Artificial Sequence
  Description of Artificial Sequence: Synthetic oligonucleotide
  Target: LAMA2; (-) strand; PAM type: YTN; PAM sequence: TTC
ttttcttttgttgggcttat

SEQ ID NO: 211287 - DNA, 20 bp, Artificial Sequence
  Description of Artificial Sequence: Synthetic oligonucleotide
  Target: LAMA2; (-) strand; PAM type: YTN; PAM sequence: TTT
cttttcttttgttgggctta

SEQ ID NO: 211288 - DNA, 20 bp, Artificial Sequence
  Description of Artificial Sequence: Synthetic oligonucleotide
  Target: LAMA2; (-) strand; PAM type: YTN; PAM sequence: CTT
tcttttcttttgttgggctt

SEQ ID NO: 211289 - DNA, 20 bp, Artificial Sequence
  Description of Artificial Sequence: Synthetic oligonucleotide
  Target: LAMA2; (-) strand; PAM type: YTN; PAM sequence: TTG
ctttcttttcttttgttggg

SEQ ID NO: 211290 - DNA, 20 bp, Artificial Sequence
  Description of Artificial Sequence: Synthetic oligonucleotide
  Target: LAMA2; (-) strand; PAM type: YTN; PAM sequence: TTG
aaagattgctttcttttctt

SEQ ID NO: 211291 - DNA, 20 bp, Artificial Sequence
  Description of Artificial Sequence: Synthetic oligonucleotide
  Target: LAMA2; (-) strand; PAM type: YTN; PAM sequence: CTT
gaaagattgctttcttttct

SEQ ID NO: 211292 - DNA, 20 bp, Artificial Sequence
  Description of Artificial Sequence: Synthetic oligonucleotide
  Target: LAMA2; (-) strand; PAM type: YTN; PAM sequence: CTC
ttgaaagattgctttctttt

SEQ ID NO: 211293 - DNA, 20 bp, Artificial Sequence
  Description of Artificial Sequence: Synthetic oligonucleotide
  Target: LAMA2; (-) strand; PAM type: YTN; PAM sequence: TTA
aagcctcttgaaagattgct

SEQ ID NO: 211294 - DNA, 20 bp, Artificial Sequence
  Description of Artificial Sequence: Synthetic oligonucleotide
  Target: LAMA2; (-) strand; PAM type: YTN; PAM sequence: CTT
aaagcctcttgaaagattgc

SEQ ID NO: 211295 - DNA, 20 bp, Artificial Sequence
  Description of Artificial Sequence: Synthetic oligonucleotide
  Target: LAMA2; (-) strand; PAM type: YTN; PAM sequence: TTA
tcttaaagcctcttgaaaga

SEQ ID NO: 211296 - DNA, 20 bp, Artificial Sequence
  Description of Artificial Sequence: Synthetic oligonucleotide
  Target: LAMA2; (-) strand; PAM type: YTN; PAM sequence: CTC
gaaaatgtatgatgttatct

SEQ ID NO: 211297 - DNA, 20 bp, Artificial Sequence
  Description of Artificial Sequence: Synthetic oligonucleotide
  Target: LAMA2; (-) strand; PAM type: YTN; PAM sequence: TTA
aaaacctcgaaaatgtatga

SEQ ID NO: 211298 - DNA, 20 bp, Artificial Sequence
  Description of Artificial Sequence: Synthetic oligonucleotide
  Target: LAMA2; (-) strand; PAM type: YTN; PAM sequence: CTT
aaaaacctcgaaaatgtatg

SEQ ID NO: 211299 - DNA, 20 bp, Artificial Sequence
  Description of Artificial Sequence: Synthetic oligonucleotide
  Target: LAMA2; (-) strand; PAM type: YTN; PAM sequence: CTC
agccttaaaaacctcgaaaa

SEQ ID NO: 211300 - DNA, 20 bp, Artificial Sequence
  Description of Artificial Sequence: Synthetic oligonucleotide
  Target: LAMA2; (-) strand; PAM type: YTN; PAM sequence: TTA
agtaaaacaaaatagaatct

SEQ ID NO: 211301 - DNA, 20 bp, Artificial Sequence
  Description of Artificial Sequence: Synthetic oligonucleotide
  Target: LAMA2; (-) strand; PAM type: YTN; PAM sequence: TTT
aagtaaaacaaaatagaatc

SEQ ID NO: 211302 - DNA, 20 bp, Artificial Sequence
  Description of Artificial Sequence: Synthetic oligonucleotide
  Target: LAMA2; (-) strand; PAM type: YTN; PAM sequence: TTT
taagtaaaacaaaatagaat

SEQ ID NO: 211303 - DNA, 20 bp, Artificial Sequence
  Description of Artificial Sequence: Synthetic oligonucleotide
  Target: LAMA2; (-) strand; PAM type: YTN; PAM sequence: CTT
ttaagtaaaacaaaatagaa

SEQ ID NO: 211304 - DNA, 20 bp, Artificial Sequence
  Description of Artificial Sequence: Synthetic oligonucleotide
  Target: LAMA2; (-) strand; PAM type: YTN; PAM sequence: TTC
cttttaagtaaaacaaaata

SEQ ID NO: 211305 - DNA, 20 bp, Artificial Sequence
  Description of Artificial Sequence: Synthetic oligonucleotide
  Target: LAMA2; (-) strand; PAM type: YTN; PAM sequence: TTG
taacattccttttaagtaaa

SEQ ID NO: 211306 - DNA, 20 bp, Artificial Sequence
  Description of Artificial Sequence: Synthetic oligonucleotide
  Target: LAMA2; (-) strand; PAM type: YTN; PAM sequence: TTA
acagcattgtaacattcctt

SEQ ID NO: 211307 - DNA, 20 bp, Artificial Sequence
  Description of Artificial Sequence: Synthetic oligonucleotide
  Target: LAMA2; (-) strand; PAM type: YTN; PAM sequence: TTC
atgaataagcaaaaatgtag

SEQ ID NO: 211308 - DNA, 20 bp, Artificial Sequence
  Description of Artificial Sequence: Synthetic oligonucleotide
  Target: LAMA2; (-) strand; PAM type: YTN; PAM sequence: TTT
catgaataagcaaaaatgta

SEQ ID NO: 211309 - DNA, 20 bp, Artificial Sequence
  Description of Artificial Sequence: Synthetic oligonucleotide
  Target: LAMA2; (-) strand; PAM type: YTN; PAM sequence: CTC
ccgagtttcatgaataagca

SEQ ID NO: 211310 - DNA, 20 bp, Artificial Sequence
  Description of Artificial Sequence: Synthetic oligonucleotide
  Target: LAMA2; (-) strand; PAM type: YTN; PAM sequence: TTC
tcccgagtttcatgaataag

SEQ ID NO: 211311 - DNA, 20 bp, Artificial Sequence
  Description of Artificial Sequence: Synthetic oligonucleotide
  Target: LAMA2; (-) strand; PAM type: YTN; PAM sequence: TTT
ctcccgagtttcatgaataa

SEQ ID NO: 211312 - DNA, 20 bp, Artificial Sequence
  Description of Artificial Sequence: Synthetic oligonucleotide
  Target: LAMA2; (-) strand; PAM type: YTN; PAM sequence: CTG
ccaatagacagaatttctcc

SEQ ID NO: 211313 - DNA, 20 bp, Artificial Sequence
  Description of Artificial Sequence: Synthetic oligonucleotide
  Target: LAMA2; (-) strand; PAM type: YTN; PAM sequence: TTA
gtgtggtgatgaatacacaa

SEQ ID NO: 211314 - DNA, 20 bp, Artificial Sequence
  Description of Artificial Sequence: Synthetic oligonucleotide
  Target: LAMA2; (-) strand; PAM type: YTN; PAM sequence: TTC
ggagtaaatgagtggttagt

SEQ ID NO: 211315 - DNA, 20 bp, Artificial Sequence
  Description of Artificial Sequence: Synthetic oligonucleotide
  Target: LAMA2; (-) strand; PAM type: YTN; PAM sequence: TTT
cggagtaaatgagtggttag

SEQ ID NO: 211316 - DNA, 20 bp, Artificial Sequence
  Description of Artificial Sequence: Synthetic oligonucleotide
  Target: LAMA2; (-) strand; PAM type: YTN; PAM sequence: TTA
atttcggagtaaatgagtgg

SEQ ID NO: 211317 - DNA, 20 bp, Artificial Sequence
  Description of Artificial Sequence: Synthetic oligonucleotide
  Target: LAMA2; (-) strand; PAM type: YTN; PAM sequence: CTT
aatttcggagtaaatgagtg

SEQ ID NO: 211318 - DNA, 20 bp, Artificial Sequence
  Description of Artificial Sequence: Synthetic oligonucleotide
  Target: LAMA2; (-) strand; PAM type: YTN; PAM sequence: CTG
agcacttaatttcggagtaa

SEQ ID NO: 211319 - DNA, 20 bp, Artificial Sequence
  Description of Artificial Sequence: Synthetic oligonucleotide
  Target: LAMA2; (-) strand; PAM type: YTN; PAM sequence: TTA
taacatgcatatcactgagc

SEQ ID NO: 211320 - DNA, 20 bp, Artificial Sequence
  Description of Artificial Sequence: Synthetic oligonucleotide
  Target: LAMA2; (-) strand; PAM type: YTN; PAM sequence: TTT
ataacatgcatatcactgag

SEQ ID NO: 211321 - DNA, 20 bp, Artificial Sequence
  Description of Artificial Sequence: Synthetic oligonucleotide
  Target: LAMA2; (-) strand; PAM type: YTN; PAM sequence: CTG
agaatgaatttataacatgc

SEQ ID NO: 211322 - DNA, 20 bp, Artificial Sequence
  Description of Artificial Sequence: Synthetic oligonucleotide
  Target: LAMA2; (-) strand; PAM type: YTN; PAM sequence: TTG
caactgagaatgaatttata

SEQ ID NO: 211323 - DNA, 20 bp, Artificial Sequence
  Description of Artificial Sequence: Synthetic oligonucleotide
  Target: LAMA2; (-) strand; PAM type: YTN; PAM sequence: TTT
gcaactgagaatgaatttat

SEQ ID NO: 211324 - DNA, 20 bp, Artificial Sequence
  Description of Artificial Sequence: Synthetic oligonucleotide
  Target: LAMA2; (-) strand; PAM type: YTN; PAM sequence: TTT
tgcaactgagaatgaattta

SEQ ID NO: 211325 - DNA, 20 bp, Artificial Sequence
  Description of Artificial Sequence: Synthetic oligonucleotide
  Target: LAMA2; (-) strand; PAM type: YTN; PAM sequence: TTA
agcaccaagaaaattttgca

SEQ ID NO: 211326 - DNA, 20 bp, Artificial Sequence
  Description of Artificial Sequence: Synthetic oligonucleotide
  Target: LAMA2; (-) strand; PAM type: YTN; PAM sequence: CTT
aagcaccaagaaaattttgc

SEQ ID NO: 211327 - DNA, 20 bp, Artificial Sequence
  Description of Artificial Sequence: Synthetic oligonucleotide
  Target: LAMA2; (-) strand; PAM type: YTN; PAM sequence: TTC
ttaagcaccaagaaaatttt

SEQ ID NO: 211328 - DNA, 20 bp, Artificial Sequence
  Description of Artificial Sequence: Synthetic oligonucleotide
  Target: LAMA2; (-) strand; PAM type: YTN; PAM sequence: TTT
cttaagcaccaagaaaattt

SEQ ID NO: 211329 - DNA, 20 bp, Artificial Sequence
  Description of Artificial Sequence: Synthetic oligonucleotide
  Target: LAMA2; (-) strand; PAM type: YTN; PAM sequence: TTA
aagtacaatttcttaagcac

SEQ ID NO: 211330 - DNA, 20 bp, Artificial Sequence
  Description of Artificial Sequence: Synthetic oligonucleotide
  Target: LAMA2; (-) strand; PAM type: YTN; PAM sequence: CTA
aaagcgattaaagtacaatt

SEQ ID NO: 211331 - DNA, 20 bp, Artificial Sequence
  Description of Artificial Sequence: Synthetic oligonucleotide
  Target: LAMA2; (-) strand; PAM type: YTN; PAM sequence: TTG
gctaaaagcgattaaagtac

SEQ ID NO: 211332 - DNA, 20 bp, Artificial Sequence
  Description of Artificial Sequence: Synthetic oligonucleotide
  Target: LAMA2; (-) strand; PAM type: YTN; PAM sequence: TTT
ggctaaaagcgattaaagta

SEQ ID NO: 211333 - DNA, 20 bp, Artificial Sequence
  Description of Artificial Sequence: Synthetic oligonucleotide
  Target: LAMA2; (-) strand; PAM type: YTN; PAM sequence: TTT
tggctaaaagcgattaaagt

SEQ ID NO: 211334 - DNA, 20 bp, Artificial Sequence
  Description of Artificial Sequence: Synthetic oligonucleotide
  Target: LAMA2; (-) strand; PAM type: YTN; PAM sequence: TTT
ttggctaaaagcgattaaag

SEQ ID NO: 211335 - DNA, 20 bp, Artificial Sequence
  Description of Artificial Sequence: Synthetic oligonucleotide
  Target: LAMA2; (-) strand; PAM type: YTN; PAM sequence: CTT
tttggctaaaagcgattaaa

SEQ ID NO: 211336 - DNA, 20 bp, Artificial Sequence
  Description of Artificial Sequence: Synthetic oligonucleotide
  Target: LAMA2; (-) strand; PAM type: YTN; PAM sequence: CTA
aactttttggctaaaagcga

SEQ ID NO: 211337 - DNA, 20 bp, Artificial Sequence
  Description of Artificial Sequence: Synthetic oligonucleotide
  Target: LAMA2; (-) strand; PAM type: YTN; PAM sequence: TTG
ctaaactttttggctaaaag

SEQ ID NO: 211338 - DNA, 20 bp, Artificial Sequence
  Description of Artificial Sequence: Synthetic oligonucleotide
  Target: LAMA2; (-) strand; PAM type: YTN; PAM sequence: TTT
gctaaactttttggctaaaa

SEQ ID NO: 211339 - DNA, 20 bp, Artificial Sequence
  Description of Artificial Sequence: Synthetic oligonucleotide
  Target: LAMA2; (-) strand; PAM type: YTN; PAM sequence: TTT
tgctaaactttttggctaaa

SEQ ID NO: 211340 - DNA, 20 bp, Artificial Sequence
  Description of Artificial Sequence: Synthetic oligonucleotide
  Target: LAMA2; (-) strand; PAM type: YTN; PAM sequence: TTT
ttgctaaactttttggctaa

SEQ ID NO: 211341 - DNA, 20 bp, Artificial Sequence
  Description of Artificial Sequence: Synthetic oligonucleotide
  Target: LAMA2; (-) strand; PAM type: YTN; PAM sequence: CTA
tttttgctaaactttttggc

SEQ ID NO: 211342 - DNA, 20 bp, Artificial Sequence
  Description of Artificial Sequence: Synthetic oligonucleotide
  Target: LAMA2; (-) strand; PAM type: YTN; PAM sequence: CTA
tgtcaaagtactatttttgc

SEQ ID NO: 211343 - DNA, 20 bp, Artificial Sequence
  Description of Artificial Sequence: Synthetic oligonucleotide
  Target: LAMA2; (-) strand; PAM type: YTN; PAM sequence: CTG
tcagtactatgtcaaagtac

SEQ ID NO: 211344 - DNA, 20 bp, Artificial Sequence
  Description of Artificial Sequence: Synthetic oligonucleotide
  Target: LAMA2; (-) strand; PAM type: YTN; PAM sequence: CTA
agcacaggctgtcagtacta

SEQ ID NO: 211345 - DNA, 20 bp, Artificial Sequence
  Description of Artificial Sequence: Synthetic oligonucleotide
  Target: LAMA2; (-) strand; PAM type: YTN; PAM sequence: TTA
tcaaaatctaagcacaggct

SEQ ID NO: 211346 - DNA, 20 bp, Artificial Sequence
  Description of Artificial Sequence: Synthetic oligonucleotide
  Target: LAMA2; (-) strand; PAM type: YTN; PAM sequence: TTT
atcaaaatctaagcacaggc

SEQ ID NO: 211347 - DNA, 20 bp, Artificial Sequence
  Description of Artificial Sequence: Synthetic oligonucleotide
  Target: LAMA2; (-) strand; PAM type: YTN; PAM sequence: TTG
tccacatttatcaaaatcta

SEQ ID NO: 211348 - DNA, 20 bp, Artificial Sequence
  Description of Artificial Sequence: Synthetic oligonucleotide
  Target: LAMA2; (-) strand; PAM type: YTN; PAM sequence: TTT
gtccacatttatcaaaatct

SEQ ID NO: 211349 - DNA, 20 bp, Artificial Sequence
  Description of Artificial Sequence: Synthetic oligonucleotide
  Target: LAMA2; (-) strand; PAM type: YTN; PAM sequence: TTT
tgtccacatttatcaaaatc

SEQ ID NO: 211350 - DNA, 20 bp, Artificial Sequence
  Description of Artificial Sequence: Synthetic oligonucleotide
  Target: LAMA2; (-) strand; PAM type: YTN; PAM sequence: TTG
attttgtccacatttatcaa

SEQ ID NO: 211351 - DNA, 20 bp, Artificial Sequence
  Description of Artificial Sequence: Synthetic oligonucleotide
  Target: LAMA2; (-) strand; PAM type: YTN; PAM sequence: CTA
ttgattttgtccacatttat

SEQ ID NO: 211352 - DNA, 20 bp, Artificial Sequence
  Description of Artificial Sequence: Synthetic oligonucleotide
  Target: LAMA2; (-) strand; PAM type: YTN; PAM sequence: CTA
tctattgattttgtccacat

SEQ ID NO: 211353 - DNA, 20 bp, Artificial Sequence
  Description of Artificial Sequence: Synthetic oligonucleotide
  Target: LAMA2; (-) strand; PAM type: YTN; PAM sequence: TTA
tgcatctatctattgatttt

SEQ ID NO: 211354 - DNA, 20 bp, Artificial Sequence
  Description of Artificial Sequence: Synthetic oligonucleotide
  Target: LAMA2; (-) strand; PAM type: YTN; PAM sequence: CTT
atgcatctatctattgattt

SEQ ID NO: 211355 - DNA, 20 bp, Artificial Sequence
  Description of Artificial Sequence: Synthetic oligonucleotide
  Target: LAMA2; (-) strand; PAM type: YTN; PAM sequence: CTC
cttatgcatctatctattga

SEQ ID NO: 211356 - DNA, 20 bp, Artificial Sequence
  Description of Artificial Sequence: Synthetic oligonucleotide
  Target: LAMA2; (-) strand; PAM type: YTN; PAM sequence: CTG
ggcactccttatgcatctat

SEQ ID NO: 211357 - DNA, 20 bp, Artificial Sequence
  Description of Artificial Sequence: Synthetic oligonucleotide
  Target: LAMA2; (-) strand; PAM type: YTN; PAM sequence: TTA
tctgggcactccttatgcat

SEQ ID NO: 211358 - DNA, 20 bp, Artificial Sequence
  Description of Artificial Sequence: Synthetic oligonucleotide
  Target: LAMA2; (-) strand; PAM type: YTN; PAM sequence: TTT
atctgggcactccttatgca

SEQ ID NO: 211359 - DNA, 20 bp, Artificial Sequence
  Description of Artificial Sequence: Synthetic oligonucleotide
  Target: LAMA2; (-) strand; PAM type: YTN; PAM sequence: TTT
tatctgggcactccttatgc

SEQ ID NO: 211360 - DNA, 20 bp, Artificial Sequence
  Description of Artificial Sequence: Synthetic oligonucleotide
  Target: LAMA2; (-) strand; PAM type: YTN; PAM sequence: TTG
aagtatgatgattttatctg

SEQ ID NO: 211361 - DNA, 20 bp, Artificial Sequence
  Description of Artificial Sequence: Synthetic oligonucleotide
  Target: LAMA2; (-) strand; PAM type: YTN; PAM sequence: TTT
gaagtatgatgattttatct

SEQ ID NO: 211362 - DNA, 20 bp, Artificial Sequence
  Description of Artificial Sequence: Synthetic oligonucleotide
  Target: LAMA2; (-) strand; PAM type: YTN; PAM sequence: TTT
tgaagtatgatgattttatc

SEQ ID NO: 211363 - DNA, 20 bp, Artificial Sequence
  Description of Artificial Sequence: Synthetic oligonucleotide
  Target: LAMA2; (-) strand; PAM type: YTN; PAM sequence: CTT
ttgaagtatgatgattttat

SEQ ID NO: 211364 - DNA, 20 bp, Artificial Sequence
  Description of Artificial Sequence: Synthetic oligonucleotide
  Target: LAMA2; (-) strand; PAM type: YTN; PAM sequence: TTA
gaaaaagcttttgaagtatg

SEQ ID NO: 211365 - DNA, 20 bp, Artificial Sequence
  Description of Artificial Sequence: Synthetic oligonucleotide
  Target: LAMA2; (-) strand; PAM type: YTN; PAM sequence: TTA
tgttagaaaaagcttttgaa

SEQ ID NO: 211366 - DNA, 20 bp, Artificial Sequence
  Description of Artificial Sequence: Synthetic oligonucleotide
  Target: LAMA2; (-) strand; PAM type: YTN; PAM sequence: CTG
tgagttatgttagaaaaagc

SEQ ID NO: 211367 - DNA, 20 bp, Artificial Sequence
  Description of Artificial Sequence: Synthetic oligonucleotide
  Target: LAMA2; (-) strand; PAM type: YTN; PAM sequence: CTA
cagctgtgagttatgttaga

SEQ ID NO: 211368 - DNA, 20 bp, Artificial Sequence
  Description of Artificial Sequence: Synthetic oligonucleotide
  Target: LAMA2; (-) strand; PAM type: YTN; PAM sequence: TTG
aaaggaaaagtctacagctg

SEQ ID NO: 211369 - DNA, 20 bp, Artificial Sequence
  Description of Artificial Sequence: Synthetic oligonucleotide
  Target: LAMA2; (-) strand; PAM type: YTN; PAM sequence: TTA
ttgaaaggaaaagtctacag

SEQ ID NO: 211370 - DNA, 20 bp, Artificial Sequence
  Description of Artificial Sequence: Synthetic oligonucleotide
  Target: LAMA2; (-) strand; PAM type: YTN; PAM sequence: TTA
ttattgaaaggaaaagtcta

SEQ ID NO: 211371 - DNA, 20 bp, Artificial Sequence
  Description of Artificial Sequence: Synthetic oligonucleotide
  Target: LAMA2; (-) strand; PAM type: YTN; PAM sequence: CTT
attattgaaaggaaaagtct

SEQ ID NO: 211372 - DNA, 20 bp, Artificial Sequence
  Description of Artificial Sequence: Synthetic oligonucleotide
  Target: LAMA2; (-) strand; PAM type: YTN; PAM sequence: TTG
cttattattgaaaggaaaag

SEQ ID NO: 211373 - DNA, 20 bp, Artificial Sequence
  Description of Artificial Sequence: Synthetic oligonucleotide
  Target: LAMA2; (-) strand; PAM type: YTN; PAM sequence: TTT
gcttattattgaaaggaaaa

SEQ ID NO: 211374 - DNA, 20 bp, Artificial Sequence
  Description of Artificial Sequence: Synthetic oligonucleotide
  Target: LAMA2; (-) strand; PAM type: YTN; PAM sequence: TTT
tgcttattattgaaaggaaa

SEQ ID NO: 211375 - DNA, 20 bp, Artificial Sequence
  Description of Artificial Sequence: Synthetic oligonucleotide
  Target: LAMA2; (-) strand; PAM type: YTN; PAM sequence: TTT
ttgcttattattgaaaggaa

SEQ ID NO: 211376 - DNA, 20 bp, Artificial Sequence
  Description of Artificial Sequence: Synthetic oligonucleotide
  Target: LAMA2; (-) strand; PAM type: YTN; PAM sequence: TTG
tttttgcttattattgaaag

SEQ ID NO: 211377 - DNA, 20 bp, Artificial Sequence
  Description of Artificial Sequence: Synthetic oligonucleotide
  Target: LAMA2; (-) strand; PAM type: YTN; PAM sequence: CTA
tgaaaattgtttttgcttat

SEQ ID NO: 211378 - DNA, 20 bp, Artificial Sequence
  Description of Artificial Sequence: Synthetic oligonucleotide
  Target: LAMA2; (-) strand; PAM type: YTN; PAM sequence: TTG
tagctatgaaaattgttttt

SEQ ID NO: 211379 - DNA, 20 bp, Artificial Sequence
  Description of Artificial Sequence: Synthetic oligonucleotide
  Target: LAMA2; (-) strand; PAM type: YTN; PAM sequence: TTT
gtagctatgaaaattgtttt

SEQ ID NO: 211380 - DNA, 20 bp, Artificial Sequence
  Description of Artificial Sequence: Synthetic oligonucleotide
  Target: LAMA2; (-) strand; PAM type: YTN; PAM sequence: TTG
tgtcggcggtttgtagctat

SEQ ID NO: 211381 - DNA, 20 bp, Artificial Sequence
  Description of Artificial Sequence: Synthetic oligonucleotide
  Target: LAMA2; (-) strand; PAM type: YTN; PAM sequence: TTA
aatagaaagttgtgtcggcg

SEQ ID NO: 211382 - DNA, 20 bp, Artificial Sequence
  Description of Artificial Sequence: Synthetic oligonucleotide
  Target: LAMA2; (-) strand; PAM type: YTN; PAM sequence: TTT
aaatagaaagttgtgtcggc

SEQ ID NO: 211383 - DNA, 20 bp, Artificial Sequence
  Description of Artificial Sequence: Synthetic oligonucleotide
  Target: LAMA2; (-) strand; PAM type: YTN; PAM sequence: CTT
taaatagaaagttgtgtcgg

SEQ ID NO: 211384 - DNA, 20 bp, Artificial Sequence
  Description of Artificial Sequence: Synthetic oligonucleotide
  Target: LAMA2; (-) strand; PAM type: YTN; PAM sequence: CTC
tttaaatagaaagttgtgtc

SEQ ID NO: 211385 - DNA, 20 bp, Artificial Sequence
  Description of Artificial Sequence: Synthetic oligonucleotide
  Target: LAMA2; (-) strand; PAM type: YTN; PAM sequence: CTG
caaagaagtcctctttaaat

SEQ ID NO: 211386 - DNA, 20 bp, Artificial Sequence
  Description of Artificial Sequence: Synthetic oligonucleotide
  Target: LAMA2; (-) strand; PAM type: YTN; PAM sequence: CTC
ctgcaaagaagtcctcttta

SEQ ID NO: 211387 - DNA, 20 bp, Artificial Sequence
  Description of Artificial Sequence: Synthetic oligonucleotide
  Target: LAMA2; (-) strand; PAM type: YTN; PAM sequence: CTG
cctcctgcaaagaagtcctc

SEQ ID NO: 211388 - DNA, 20 bp, Artificial Sequence
  Description of Artificial Sequence: Synthetic oligonucleotide
  Target: LAMA2; (-) strand; PAM type: YTN; PAM sequence: TTC
tgcctcctgcaaagaagtcc

SEQ ID NO: 211389 - DNA, 20 bp, Artificial Sequence
  Description of Artificial Sequence: Synthetic oligonucleotide
  Target: LAMA2; (-) strand; PAM type: YTN; PAM sequence: TTA
ttctgcctcctgcaaagaag

SEQ ID NO: 211390 - DNA, 20 bp, Artificial Sequence
  Description of Artificial Sequence: Synthetic oligonucleotide
  Target: LAMA2; (-) strand; PAM type: YTN; PAM sequence: TTA
ttattctgcctcctgcaaag

SEQ ID NO: 211391 - DNA, 20 bp, Artificial Sequence
  Description of Artificial Sequence: Synthetic oligonucleotide
  Target: LAMA2; (-) strand; PAM type: YTN; PAM sequence: TTG
agttattattctgcctcctg

SEQ ID NO: 211392 - DNA, 20 bp, Artificial Sequence
  Description of Artificial Sequence: Synthetic oligonucleotide
  Target: LAMA2; (-) strand; PAM type: YTN; PAM sequence: TTG
ttgagttattattctgcctc

SEQ ID NO: 211393 - DNA, 20 bp, Artificial Sequence
  Description of Artificial Sequence: Synthetic oligonucleotide
  Target: LAMA2; (-) strand; PAM type: YTN; PAM sequence: TTT
gttgagttattattctgcct

SEQ ID NO: 211394 - DNA, 20 bp, Artificial Sequence
  Description of Artificial Sequence: Synthetic oligonucleotide
  Target: LAMA2; (-) strand; PAM type: YTN; PAM sequence: TTT
tgttgagttattattctgcc

SEQ ID NO: 211395 - DNA, 20 bp, Artificial Sequence
  Description of Artificial Sequence: Synthetic oligonucleotide
  Target: LAMA2; (-) strand; PAM type: YTN; PAM sequence: TTA
ttttgttgagttattattct

SEQ ID NO: 211396 - DNA, 20 bp, Artificial Sequence
  Description of Artificial Sequence: Synthetic oligonucleotide
  Target: LAMA2; (-) strand; PAM type: YTN; PAM sequence: TTT
attttgttgagttattattc

SEQ ID NO: 211397 - DNA, 20 bp, Artificial Sequence
  Description of Artificial Sequence: Synthetic oligonucleotide
  Target: LAMA2; (-) strand; PAM type: YTN; PAM sequence: CTA
tttattttgttgagttatta

SEQ ID NO: 211398 - DNA, 20 bp, Artificial Sequence
  Description of Artificial Sequence: Synthetic oligonucleotide
  Target: LAMA2; (-) strand; PAM type: YTN; PAM sequence: TTC
tatttattttgttgagttat

SEQ ID NO: 211399 - DNA, 20 bp, Artificial Sequence
  Description of Artificial Sequence: Synthetic oligonucleotide
  Target: LAMA2; (-) strand; PAM type: YTN; PAM sequence: TTA
gagattctatttattttgtt

SEQ ID NO: 211400 - DNA, 20 bp, Artificial Sequence
  Description of Artificial Sequence: Synthetic oligonucleotide
  Target: LAMA2; (-) strand; PAM type: YTN; PAM sequence: TTG
aaattagagattctatttat

SEQ ID NO: 211401 - DNA, 20 bp, Artificial Sequence
  Description of Artificial Sequence: Synthetic oligonucleotide
  Target: LAMA2; (-) strand; PAM type: YTN; PAM sequence: TTT
gaaattagagattctattta

SEQ ID NO: 211402 - DNA, 20 bp, Artificial Sequence
  Description of Artificial Sequence: Synthetic oligonucleotide
  Target: LAMA2; (-) strand; PAM type: YTN; PAM sequence: TTT
tgaaattagagattctattt

SEQ ID NO: 211403 - DNA, 20 bp, Artificial Sequence
  Description of Artificial Sequence: Synthetic oligonucleotide
  Target: LAMA2; (-) strand; PAM type: YTN; PAM sequence: TTG
gggataatagtattttgaaa

SEQ ID NO: 211404 - DNA, 20 bp, Artificial Sequence
  Description of Artificial Sequence: Synthetic oligonucleotide
  Target: LAMA2; (-) strand; PAM type: YTN; PAM sequence: TTT
ggggataatagtattttgaa

SEQ ID NO: 211405 - DNA, 20 bp, Artificial Sequence
  Description of Artificial Sequence: Synthetic oligonucleotide
  Target: LAMA2; (-) strand; PAM type: YTN; PAM sequence: TTT
tggggataatagtattttga

SEQ ID NO: 211406 - DNA, 20 bp, Artificial Sequence
  Description of Artificial Sequence: Synthetic oligonucleotide
  Target: LAMA2; (-) strand; PAM type: YTN; PAM sequence: CTT
ttggggataatagtattttg

SEQ ID NO: 211407 - DNA, 20 bp, Artificial Sequence
  Description of Artificial Sequence: Synthetic oligonucleotide
  Target: LAMA2; (-) strand; PAM type: YTN; PAM sequence: TTA
cttttggggataatagtatt

SEQ ID NO: 211408 - DNA, 20 bp, Artificial Sequence
  Description of Artificial Sequence: Synthetic oligonucleotide
  Target: LAMA2; (-) strand; PAM type: YTN; PAM sequence: TTC
ccattacttttggggataat

SEQ ID NO: 211409 - DNA, 20 bp, Artificial Sequence
  Description of Artificial Sequence: Synthetic oligonucleotide
  Target: LAMA2; (-) strand; PAM type: YTN; PAM sequence: TTA
aaattcccattacttttggg

SEQ ID NO: 211410 - DNA, 20 bp, Artificial Sequence
  Description of Artificial Sequence: Synthetic oligonucleotide
  Target: LAMA2; (-) strand; PAM type: YTN; PAM sequence: TTT
aaaattcccattacttttgg

SEQ ID NO: 211411 - DNA, 20 bp, Artificial Sequence
  Description of Artificial Sequence: Synthetic oligonucleotide
  Target: LAMA2; (-) strand; PAM type: YTN; PAM sequence: TTT
taaaattcccattacttttg

SEQ ID NO: 211412 - DNA, 20 bp, Artificial Sequence
  Description of Artificial Sequence: Synthetic oligonucleotide
  Target: LAMA2; (-) strand; PAM type: YTN; PAM sequence: TTT
ttaaaattcccattactttt

SEQ ID NO: 211413 - DNA, 20 bp, Artificial Sequence
  Description of Artificial Sequence: Synthetic oligonucleotide
  Target: LAMA2; (-) strand; PAM type: YTN; PAM sequence: CTA
aataatttttaaaattccca

SEQ ID NO: 211414 - DNA, 20 bp, Artificial Sequence
  Description of Artificial Sequence: Synthetic oligonucleotide
  Target: LAMA2; (-) strand; PAM type: YTN; PAM sequence: CTG
gaaacactaaataattttta

SEQ ID NO: 211415 - DNA, 20 bp, Artificial Sequence
  Description of Artificial Sequence: Synthetic oligonucleotide
  Target: LAMA2; (-) strand; PAM type: YTN; PAM sequence: CTA
aactggaaacactaaataat

SEQ ID NO: 211416 - DNA, 20 bp, Artificial Sequence
  Description of Artificial Sequence: Synthetic oligonucleotide
  Target: LAMA2; (-) strand; PAM type: YTN; PAM sequence: TTA
aatatctaaactggaaacac

SEQ ID NO: 211417 - DNA, 20 bp, Artificial Sequence
  Description of Artificial Sequence: Synthetic oligonucleotide
  Target: LAMA2; (-) strand; PAM type: YTN; PAM sequence: CTT
aaatatctaaactggaaaca

SEQ ID NO: 211418 - DNA, 20 bp, Artificial Sequence
  Description of Artificial Sequence: Synthetic oligonucleotide
  Target: LAMA2; (-) strand; PAM type: YTN; PAM sequence: TTC
ttaaatatctaaactggaaa

SEQ ID NO: 211419 - DNA, 20 bp, Artificial Sequence
  Description of Artificial Sequence: Synthetic oligonucleotide
  Target: LAMA2; (-) strand; PAM type: YTN; PAM sequence: TTG
gcatgtagatgtgagtggtg

SEQ ID NO: 211420 - DNA, 20 bp, Artificial Sequence
  Description of Artificial Sequence: Synthetic oligonucleotide
  Target: LAMA2; (-) strand; PAM type: YTN; PAM sequence: TTT
ggcatgtagatgtgagtggt

SEQ ID NO: 211421 - DNA, 20 bp, Artificial Sequence
  Description of Artificial Sequence: Synthetic oligonucleotide
  Target: LAMA2; (-) strand; PAM type: YTN; PAM sequence: TTA
tttggcatgtagatgtgagt

SEQ ID NO: 211422 - DNA, 20 bp, Artificial Sequence
  Description of Artificial Sequence: Synthetic oligonucleotide
  Target: LAMA2; (-) strand; PAM type: YTN; PAM sequence: TTT
atttggcatgtagatgtgag

SEQ ID NO: 211423 - DNA, 20 bp, Artificial Sequence
  Description of Artificial Sequence: Synthetic oligonucleotide
  Target: LAMA2; (-) strand; PAM type: YTN; PAM sequence: CTG
atataacgggtggagggtgg

SEQ ID NO: 211424 - DNA, 20 bp, Artificial Sequence
  Description of Artificial Sequence: Synthetic oligonucleotide
  Target: LAMA2; (-) strand; PAM type: YTN; PAM sequence: CTA
agaaaaaagacaatggatgg

SEQ ID NO: 211425 - DNA, 20 bp, Artificial Sequence
  Description of Artificial Sequence: Synthetic oligonucleotide
  Target: LAMA2; (-) strand; PAM type: YTN; PAM sequence: CTA
atagggtgacatatcaagat

SEQ ID NO: 211426 - DNA, 20 bp, Artificial Sequence
  Description of Artificial Sequence: Synthetic oligonucleotide
  Target: LAMA2; (-) strand; PAM type: YTN; PAM sequence: CTG
caaggaaaaaactaataggg

SEQ ID NO: 211427 - DNA, 20 bp, Artificial Sequence
  Description of Artificial Sequence: Synthetic oligonucleotide
  Target: LAMA2; (-) strand; PAM type: YTN; PAM sequence: TTA
aaaaaagcaagaagcaagtg

SEQ ID NO: 211428 - DNA, 20 bp, Artificial Sequence
  Description of Artificial Sequence: Synthetic oligonucleotide
  Target: LAMA2; (-) strand; PAM type: YTN; PAM sequence: TTT
aaaaaaagcaagaagcaagt

SEQ ID NO: 211429 - DNA, 20 bp, Artificial Sequence
  Description of Artificial Sequence: Synthetic oligonucleotide
  Target: LAMA2; (-) strand; PAM type: YTN; PAM sequence: TTG
tttaaaaaaagcaagaagca

SEQ ID NO: 211430 - DNA, 20 bp, Artificial Sequence
  Description of Artificial Sequence: Synthetic oligonucleotide
  Target: LAMA2; (-) strand; PAM type: YTN; PAM sequence: TTT
gtttaaaaaaagcaagaagc

SEQ ID NO: 211431 - DNA, 20 bp, Artificial Sequence
  Description of Artificial Sequence: Synthetic oligonucleotide
  Target: LAMA2; (-) strand; PAM type: YTN; PAM sequence: TTT
tgtttaaaaaaagcaagaag

SEQ ID NO: 211432 - DNA, 20 bp, Artificial Sequence
  Description of Artificial Sequence: Synthetic oligonucleotide
  Target: LAMA2; (-) strand; PAM type: YTN; PAM sequence: TTT
ttgtttaaaaaaagcaagaa

SEQ ID NO: 211433 - DNA, 20 bp, Artificial Sequence
  Description of Artificial Sequence: Synthetic oligonucleotide
  Target: LAMA2; (-) strand; PAM type: YTN; PAM sequence: CTG
aagaatgaatgaatatgagg

SEQ ID NO: 211434 - DNA, 20 bp, Artificial Sequence
  Description of Artificial Sequence: Synthetic oligonucleotide
  Target: LAMA2; (-) strand; PAM type: YTN; PAM sequence: TTG
ccaccagctgaagaatgaat

SEQ ID NO: 211435 - DNA, 20 bp, Artificial Sequence
  Description of Artificial Sequence: Synthetic oligonucleotide
  Target: LAMA2; (-) strand; PAM type: YTN; PAM sequence: CTG
attgccaccagctgaagaat

SEQ ID NO: 211436 - DNA, 20 bp, Artificial Sequence
  Description of Artificial Sequence: Synthetic oligonucleotide
  Target: LAMA2; (-) strand; PAM type: YTN; PAM sequence: CTG
aatgctgattgccaccagct

SEQ ID NO: 211437 - DNA, 20 bp, Artificial Sequence
  Description of Artificial Sequence: Synthetic oligonucleotide
  Target: LAMA2; (-) strand; PAM type: YTN; PAM sequence: TTA
tggagagaaactgaatgctg

SEQ ID NO: 211438 - DNA, 20 bp, Artificial Sequence
  Description of Artificial Sequence: Synthetic oligonucleotide
  Target: LAMA2; (-) strand; PAM type: YTN; PAM sequence: TTT
atggagagaaactgaatgct

SEQ ID NO: 211439 - DNA, 20 bp, Artificial Sequence
  Description of Artificial Sequence: Synthetic oligonucleotide
  Target: LAMA2; (-) strand; PAM type: YTN; PAM sequence: TTT
tatggagagaaactgaatgc

SEQ ID NO: 211440 - DNA, 20 bp, Artificial Sequence
  Description of Artificial Sequence: Synthetic oligonucleotide
  Target: LAMA2; (-) strand; PAM type: YTN; PAM sequence: TTA
ataacagttttatggagaga

SEQ ID NO: 211441 - DNA, 20 bp, Artificial Sequence
  Description of Artificial Sequence: Synthetic oligonucleotide
  Target: LAMA2; (-) strand; PAM type: YTN; PAM sequence: TTT
aataacagttttatggagag

SEQ ID NO: 211442 - DNA, 20 bp, Artificial Sequence
  Description of Artificial Sequence: Synthetic oligonucleotide
  Target: LAMA2; (-) strand; PAM type: YTN; PAM sequence: TTG
gatttaataacagttttatg

SEQ ID NO: 211443 - DNA, 20 bp, Artificial Sequence
  Description of Artificial Sequence: Synthetic oligonucleotide
  Target: LAMA2; (-) strand; PAM type: YTN; PAM sequence: TTA
ttggatttaataacagtttt

SEQ ID NO: 211444 - DNA, 20 bp, Artificial Sequence
  Description of Artificial Sequence: Synthetic oligonucleotide
  Target: LAMA2; (-) strand; PAM type: YTN; PAM sequence: CTT
attggatttaataacagttt

SEQ ID NO: 211445 - DNA, 20 bp, Artificial Sequence
  Description of Artificial Sequence: Synthetic oligonucleotide
  Target: LAMA2; (-) strand; PAM type: YTN; PAM sequence: TTC
agaaatgaaaggcttattgg

SEQ ID NO: 211446 - DNA, 20 bp, Artificial Sequence
  Description of Artificial Sequence: Synthetic oligonucleotide
  Target: LAMA2; (-) strand; PAM type: YTN; PAM sequence: TTG
attcagaaatgaaaggctta

SEQ ID NO: 211447 - DNA, 20 bp, Artificial Sequence
  Description of Artificial Sequence: Synthetic oligonucleotide
  Target: LAMA2; (-) strand; PAM type: YTN; PAM sequence: CTT
gattcagaaatgaaaggctt

SEQ ID NO: 211448 - DNA, 20 bp, Artificial Sequence
  Description of Artificial Sequence: Synthetic oligonucleotide
  Target: LAMA2; (-) strand; PAM type: YTN; PAM sequence: TTC
acttgattcagaaatgaaag

SEQ ID NO: 211449 - DNA, 20 bp, Artificial Sequence
  Description of Artificial Sequence: Synthetic oligonucleotide
  Target: LAMA2; (-) strand; PAM type: YTN; PAM sequence: CTT
cacttgattcagaaatgaaa

SEQ ID NO: 211450 - DNA, 20 bp, Artificial Sequence
  Description of Artificial Sequence: Synthetic oligonucleotide
  Target: LAMA2; (-) strand; PAM type: YTN; PAM sequence: TTC
agcaaagatagagaaaaatc

SEQ ID NO: 211451 - DNA, 20 bp, Artificial Sequence
  Description of Artificial Sequence: Synthetic oligonucleotide
  Target: LAMA2; (-) strand; PAM type: YTN; PAM sequence: TTA
aatgccataaagaattcagc

SEQ ID NO: 211452 - DNA, 20 bp, Artificial Sequence
  Description of Artificial Sequence: Synthetic oligonucleotide
  Target: LAMA2; (-) strand; PAM type: YTN; PAM sequence: TTA
gaagtcatggaagagagtcc

SEQ ID NO: 211453 - DNA, 20 bp, Artificial Sequence
  Description of Artificial Sequence: Synthetic oligonucleotide
  Target: LAMA2; (-) strand; PAM type: YTN; PAM sequence: CTT
agaagtcatggaagagagtc

SEQ ID NO: 211454 - DNA, 20 bp, Artificial Sequence
  Description of Artificial Sequence: Synthetic oligonucleotide
  Target: LAMA2; (-) strand; PAM type: YTN; PAM sequence: TTG
tcttagaagtcatggaagag

SEQ ID NO: 211455 - DNA, 20 bp, Artificial Sequence
  Description of Artificial Sequence: Synthetic oligonucleotide
  Target: LAMA2; (-) strand; PAM type: YTN; PAM sequence: TTA
aaaagtgttgtcttagaagt

SEQ ID NO: 211456 - DNA, 20 bp, Artificial Sequence
  Description of Artificial Sequence: Synthetic oligonucleotide
  Target: LAMA2; (-) strand; PAM type: YTN; PAM sequence: CTA
aaatggtggaagagaattaa

SEQ ID NO: 211457 - DNA, 20 bp, Artificial Sequence
  Description of Artificial Sequence: Synthetic oligonucleotide
  Target: LAMA2; (-) strand; PAM type: YTN; PAM sequence: CTA
caaagacaaacctaaaatgg

SEQ ID NO: 211458 - DNA, 20 bp, Artificial Sequence
  Description of Artificial Sequence: Synthetic oligonucleotide
  Target: LAMA2; (-) strand; PAM type: YTN; PAM sequence: TTA
cctacaaagacaaacctaaa

SEQ ID NO: 211459 - DNA, 20 bp, Artificial Sequence
  Description of Artificial Sequence: Synthetic oligonucleotide
  Target: LAMA2; (-) strand; PAM type: YTN; PAM sequence: CTA
taaaggttacctacaaagac

SEQ ID NO: 211460 - DNA, 20 bp, Artificial Sequence
  Description of Artificial Sequence: Synthetic oligonucleotide
  Target: LAMA2; (-) strand; PAM type: YTN; PAM sequence: TTA
cacagaagaatctataaagg

SEQ ID NO: 211461 - DNA, 20 bp, Artificial Sequence
  Description of Artificial Sequence: Synthetic oligonucleotide
  Target: LAMA2; (-) strand; PAM type: YTN; PAM sequence: TTG
gtatgtaaggattacacaga

SEQ ID NO: 211462 - DNA, 20 bp, Artificial Sequence
  Description of Artificial Sequence: Synthetic oligonucleotide
  Target: LAMA2; (-) strand; PAM type: YTN; PAM sequence: TTC
agaacattggtatgtaagga

SEQ ID NO: 211463 - DNA, 20 bp, Artificial Sequence
  Description of Artificial Sequence: Synthetic oligonucleotide
  Target: LAMA2; (-) strand; PAM type: YTN; PAM sequence: CTA
tggaatggaaaaagaggagc

SEQ ID NO: 211464 - DNA, 20 bp, Artificial Sequence
  Description of Artificial Sequence: Synthetic oligonucleotide
  Target: LAMA2; (-) strand; PAM type: YTN; PAM sequence: CTC
tatggaatggaaaaagagga

SEQ ID NO: 211465 - DNA, 20 bp, Artificial Sequence
  Description of Artificial Sequence: Synthetic oligonucleotide
  Target: LAMA2; (-) strand; PAM type: YTN; PAM sequence: TTG
caagtacacaatcagactct

SEQ ID NO: 211466 - DNA, 20 bp, Artificial Sequence
  Description of Artificial Sequence: Synthetic oligonucleotide
  Target: LAMA2; (-) strand; PAM type: YTN; PAM sequence: TTT
gcaagtacacaatcagactc

SEQ ID NO: 211467 - DNA, 20 bp, Artificial Sequence
  Description of Artificial Sequence: Synthetic oligonucleotide
  Target: LAMA2; (-) strand; PAM type: YTN; PAM sequence: TTG
aaatagataccatggaagtg

SEQ ID NO: 211468 - DNA, 20 bp, Artificial Sequence
  Description of Artificial Sequence: Synthetic oligonucleotide
  Target: LAMA2; (-) strand; PAM type: YTN; PAM sequence: CTT
gaaatagataccatggaagt

SEQ ID NO: 211469 - DNA, 20 bp, Artificial Sequence
  Description of Artificial Sequence: Synthetic oligonucleotide
  Target: LAMA2; (-) strand; PAM type: YTN; PAM sequence: TTC
aaaatacacttgaaatagat

SEQ ID NO: 211470 - DNA, 20 bp, Artificial Sequence
  Description of Artificial Sequence: Synthetic oligonucleotide
  Target: LAMA2; (-) strand; PAM type: YTN; PAM sequence: TTT
caaaatacacttgaaataga

SEQ ID NO: 211471 - DNA, 20 bp, Artificial Sequence
  Description of Artificial Sequence: Synthetic oligonucleotide
  Target: LAMA2; (-) strand; PAM type: YTN; PAM sequence: TTT
tcaaaatacacttgaaatag

SEQ ID NO: 211472 - DNA, 20 bp, Artificial Sequence
  Description of Artificial Sequence: Synthetic oligonucleotide
  Target: LAMA2; (-) strand; PAM type: YTN; PAM sequence: CTT
ttcaaaatacacttgaaata

SEQ ID NO: 211473 - DNA, 20 bp, Artificial Sequence
  Description of Artificial Sequence: Synthetic oligonucleotide
  Target: LAMA2; (-) strand; PAM type: YTN; PAM sequence: TTA
gacttttcaaaatacacttg

SEQ ID NO: 211474 - DNA, 20 bp, Artificial Sequence
  Description of Artificial Sequence: Synthetic oligonucleotide
  Target: LAMA2; (-) strand; PAM type: YTN; PAM sequence: CTA
gatgttagacttttcaaaat

SEQ ID NO: 211475 - DNA, 20 bp, Artificial Sequence
  Description of Artificial Sequence: Synthetic oligonucleotide
  Target: LAMA2; (-) strand; PAM type: YTN; PAM sequence: TTG
aaagcctagatgttagactt

SEQ ID NO: 211476 - DNA, 20 bp, Artificial Sequence
  Description of Artificial Sequence: Synthetic oligonucleotide
  Target: LAMA2; (-) strand; PAM type: YTN; PAM sequence: CTC
aggtatagaatacagaaagt

SEQ ID NO: 211477 - DNA, 20 bp, Artificial Sequence
  Description of Artificial Sequence: Synthetic oligonucleotide
  Target: LAMA2; (-) strand; PAM type: YTN; PAM sequence: CTG
acactcaggtatagaataca

SEQ ID NO: 211478 - DNA, 20 bp, Artificial Sequence
  Description of Artificial Sequence: Synthetic oligonucleotide
  Target: LAMA2; (-) strand; PAM type: YTN; PAM sequence: TTG
ctgacactcaggtatagaat

SEQ ID NO: 211479 - DNA, 20 bp, Artificial Sequence
  Description of Artificial Sequence: Synthetic oligonucleotide
  Target: LAMA2; (-) strand; PAM type: YTN; PAM sequence: TTT
gctgacactcaggtatagaa

SEQ ID NO: 211480 - DNA, 20 bp, Artificial Sequence
  Description of Artificial Sequence: Synthetic oligonucleotide
  Target: LAMA2; (-) strand; PAM type: YTN; PAM sequence: CTT
tgctgacactcaggtataga

SEQ ID NO: 211481 - DNA, 20 bp, Artificial Sequence
  Description of Artificial Sequence: Synthetic oligonucleotide
  Target: LAMA2; (-) strand; PAM type: YTN; PAM sequence: CTC
ccaggcgtctttgctgacac

SEQ ID NO: 211482 - DNA, 20 bp, Artificial Sequence
  Description of Artificial Sequence: Synthetic oligonucleotide
  Target: LAMA2; (-) strand; PAM type: YTN; PAM sequence: CTC
aaagacagctcccaggcgtc

SEQ ID NO: 211483 - DNA, 20 bp, Artificial Sequence
  Description of Artificial Sequence: Synthetic oligonucleotide
  Target: LAMA2; (-) strand; PAM type: YTN; PAM sequence: TTA
aatatggaggtaagagagaa

SEQ ID NO: 211484 - DNA, 20 bp, Artificial Sequence
  Description of Artificial Sequence: Synthetic oligonucleotide
  Target: LAMA2; (-) strand; PAM type: YTN; PAM sequence: TTA
agaaggtaaaatcaatgaga

SEQ ID NO: 211485 - DNA, 20 bp, Artificial Sequence
  Description of Artificial Sequence: Synthetic oligonucleotide
  Target: LAMA2; (-) strand; PAM type: YTN; PAM sequence: TTA
agagaaattaagaaggtaaa

SEQ ID NO: 211486 - DNA, 20 bp, Artificial Sequence
  Description of Artificial Sequence: Synthetic oligonucleotide
  Target: LAMA2; (-) strand; PAM type: YTN; PAM sequence: TTT
aagagaaattaagaaggtaa

SEQ ID NO: 211487 - DNA, 20 bp, Artificial Sequence
  Description of Artificial Sequence: Synthetic oligonucleotide
  Target: LAMA2; (-) strand; PAM type: YTN; PAM sequence: TTA
ggtatagagaaagaaaatca

SEQ ID NO: 211488 - DNA, 20 bp, Artificial Sequence
  Description of Artificial Sequence: Synthetic oligonucleotide
  Target: LAMA2; (-) strand; PAM type: YTN; PAM sequence: CTA
acattaggtatagagaaaga

SEQ ID NO: 211489 - DNA, 20 bp, Artificial Sequence
  Description of Artificial Sequence: Synthetic oligonucleotide
  Target: LAMA2; (-) strand; PAM type: YTN; PAM sequence: TTC
cagcaatgtaaaccagatag

SEQ ID NO: 211490 - DNA, 20 bp, Artificial Sequence
  Description of Artificial Sequence: Synthetic oligonucleotide
  Target: LAMA2; (-) strand; PAM type: YTN; PAM sequence: CTG
ttccagcaatgtaaaccaga

SEQ ID NO: 211491 - DNA, 20 bp, Artificial Sequence
  Description of Artificial Sequence: Synthetic oligonucleotide
  Target: LAMA2; (-) strand; PAM type: YTN; PAM sequence: CTA
agaacaagatagcaaatcag

SEQ ID NO: 211492 - DNA, 20 bp, Artificial Sequence
  Description of Artificial Sequence: Synthetic oligonucleotide
  Target: LAMA2; (-) strand; PAM type: YTN; PAM sequence: TTG
ggatggcaagactaagaaca

SEQ ID NO: 211493 - DNA, 20 bp, Artificial Sequence
  Description of Artificial Sequence: Synthetic oligonucleotide
  Target: LAMA2; (-) strand; PAM type: YTN; PAM sequence: CTA
agttgggatggcaagactaa

SEQ ID NO: 211494 - DNA, 20 bp, Artificial Sequence
  Description of Artificial Sequence: Synthetic oligonucleotide
  Target: LAMA2; (-) strand; PAM type: YTN; PAM sequence: CTG
tataaaggaaaagacatcag

SEQ ID NO: 211495 - DNA, 20 bp, Artificial Sequence
  Description of Artificial Sequence: Synthetic oligonucleotide
  Target: LAMA2; (-) strand; PAM type: YTN; PAM sequence: TTG
ataaatggtatgataactgt

SEQ ID NO: 211496 - DNA, 20 bp, Artificial Sequence
  Description of Artificial Sequence: Synthetic oligonucleotide
  Target: LAMA2; (-) strand; PAM type: YTN; PAM sequence: TTA
taagtaaataaaatcagata

SEQ ID NO: 211497 - DNA, 20 bp, Artificial Sequence
  Description of Artificial Sequence: Synthetic oligonucleotide
  Target: LAMA2; (-) strand; PAM type: YTN; PAM sequence: CTT
ataagtaaataaaatcagat

SEQ ID NO: 211498 - DNA, 20 bp, Artificial Sequence
  Description of Artificial Sequence: Synthetic oligonucleotide
  Target: LAMA2; (-) strand; PAM type: YTN; PAM sequence: CTA
acaaagaacatgacttataa

SEQ ID NO: 211499 - DNA, 20 bp, Artificial Sequence
  Description of Artificial Sequence: Synthetic oligonucleotide
  Target: LAMA2; (-) strand; PAM type: YTN; PAM sequence: CTA
atgagctaacaaagaacatg

SEQ ID NO: 211500 - DNA, 20 bp, Artificial Sequence
  Description of Artificial Sequence: Synthetic oligonucleotide
  Target: LAMA2; (-) strand; PAM type: YTN; PAM sequence: TTG
gtacctaatgagctaacaaa

SEQ ID NO: 211501 - DNA, 20 bp, Artificial Sequence
  Description of Artificial Sequence: Synthetic oligonucleotide
  Target: LAMA2; (-) strand; PAM type: YTN; PAM sequence: TTG
atataaaattggtacctaat

SEQ ID NO: 211502 - DNA, 20 bp, Artificial Sequence
  Description of Artificial Sequence: Synthetic oligonucleotide
  Target: LAMA2; (-) strand; PAM type: YTN; PAM sequence: CTG
aatgacaaacagaaaaataa

SEQ ID NO: 211503 - DNA, 20 bp, Artificial Sequence
  Description of Artificial Sequence: Synthetic oligonucleotide
  Target: LAMA2; (-) strand; PAM type: YTN; PAM sequence: CTA
aaaccaaaccaaaacaacaa

SEQ ID NO: 211504 - DNA, 20 bp, Artificial Sequence
  Description of Artificial Sequence: Synthetic oligonucleotide
  Target: LAMA2; (-) strand; PAM type: YTN; PAM sequence: CTC
taaaaccaaaccaaaacaac

SEQ ID NO: 211505 - DNA, 20 bp, Artificial Sequence
  Description of Artificial Sequence: Synthetic oligonucleotide
  Target: LAMA2; (-) strand; PAM type: YTN; PAM sequence: CTC
gtctctaaaaccaaaccaaa

SEQ ID NO: 211506 - DNA, 20 bp, Artificial Sequence
  Description of Artificial Sequence: Synthetic oligonucleotide
  Target: LAMA2; (-) strand; PAM type: YTN; PAM sequence: CTG
cctcgtctctaaaaccaaac

SEQ ID NO: 211507 - DNA, 20 bp, Artificial Sequence
  Description of Artificial Sequence: Synthetic oligonucleotide
  Target: LAMA2; (-) strand; PAM type: YTN; PAM sequence: TTC
acctgcctcgtctctaaaac

SEQ ID NO: 211508 - DNA, 20 bp, Artificial Sequence
  Description of Artificial Sequence: Synthetic oligonucleotide
  Target: LAMA2; (-) strand; PAM type: YTN; PAM sequence: CTA
ttcacctgcctcgtctctaa

SEQ ID NO: 211509 - DNA, 20 bp, Artificial Sequence
  Description of Artificial Sequence: Synthetic oligonucleotide
  Target: LAMA2; (-) strand; PAM type: YTN; PAM sequence: CTA
tacctattcacctgcctcgt

SEQ ID NO: 211510 - DNA, 20 bp, Artificial Sequence
  Description of Artificial Sequence: Synthetic oligonucleotide
  Target: LAMA2; (-) strand; PAM type: YTN; PAM sequence: TTC
agtctatacctattcacctg

SEQ ID NO: 211511 - DNA, 20 bp, Artificial Sequence
  Description of Artificial Sequence: Synthetic oligonucleotide
  Target: LAMA2; (-) strand; PAM type: YTN; PAM sequence: TTA
ggagcattcagtctatacct

SEQ ID NO: 211512 - DNA, 20 bp, Artificial Sequence
  Description of Artificial Sequence: Synthetic oligonucleotide
  Target: LAMA2; (-) strand; PAM type: YTN; PAM sequence: CTT
aggagcattcagtctatacc

SEQ ID NO: 211513 - DNA, 20 bp, Artificial Sequence
  Description of Artificial Sequence: Synthetic oligonucleotide
  Target: LAMA2; (-) strand; PAM type: YTN; PAM sequence: CTA
gcttaggagcattcagtcta

SEQ ID NO: 211514 - DNA, 20 bp, Artificial Sequence
  Description of Artificial Sequence: Synthetic oligonucleotide
  Target: LAMA2; (-) strand; PAM type: YTN; PAM sequence: TTA
tcatctagcttaggagcatt

SEQ ID NO: 211515 - DNA, 20 bp, Artificial Sequence
  Description of Artificial Sequence: Synthetic oligonucleotide
  Target: LAMA2; (-) strand; PAM type: YTN; PAM sequence: TTG
gtcattatcatctagcttag

SEQ ID NO: 211516 - DNA, 20 bp, Artificial Sequence
  Description of Artificial Sequence: Synthetic oligonucleotide
  Target: LAMA2; (-) strand; PAM type: YTN; PAM sequence: TTT
ggtcattatcatctagctta

SEQ ID NO: 211517 - DNA, 20 bp, Artificial Sequence
  Description of Artificial Sequence: Synthetic oligonucleotide
  Target: LAMA2; (-) strand; PAM type: YTN; PAM sequence: CTC
agtaatcatttggtcattat

SEQ ID NO: 211518 - DNA, 20 bp, Artificial Sequence
  Description of Artificial Sequence: Synthetic oligonucleotide
  Target: LAMA2; (-) strand; PAM type: YTN; PAM sequence: CTG
tctcagtaatcatttggtca

SEQ ID NO: 211519 - DNA, 20 bp, Artificial Sequence
  Description of Artificial Sequence: Synthetic oligonucleotide
  Target: LAMA2; (-) strand; PAM type: YTN; PAM sequence: CTC
atccctgtctcagtaatcat

SEQ ID NO: 211520 - DNA, 20 bp, Artificial Sequence
  Description of Artificial Sequence: Synthetic oligonucleotide
  Target: LAMA2; (-) strand; PAM type: YTN; PAM sequence: CTG
accatcgctcatccctgtct

SEQ ID NO: 211521 - DNA, 20 bp, Artificial Sequence
  Description of Artificial Sequence: Synthetic oligonucleotide
  Target: LAMA2; (-) strand; PAM type: YTN; PAM sequence: TTC
actgaccatcgctcatccct

SEQ ID NO: 211522 - DNA, 20 bp, Artificial Sequence
  Description of Artificial Sequence: Synthetic oligonucleotide
  Target: LAMA2; (-) strand; PAM type: YTN; PAM sequence: TTT
cactgaccatcgctcatccc

SEQ ID NO: 211523 - DNA, 20 bp, Artificial Sequence
  Description of Artificial Sequence: Synthetic oligonucleotide
  Target: LAMA2; (-) strand; PAM type: YTN; PAM sequence: TTC
aatttcactgaccatcgctc

SEQ ID NO: 211524 - DNA, 20 bp, Artificial Sequence
  Description of Artificial Sequence: Synthetic oligonucleotide
  Target: LAMA2; (-) strand; PAM type: YTN; PAM sequence: TTT
caatttcactgaccatcgct

SEQ ID NO: 211525 - DNA, 20 bp, Artificial Sequence
  Description of Artificial Sequence: Synthetic oligonucleotide
  Target: LAMA2; (-) strand; PAM type: YTN; PAM sequence: CTT
tcaatttcactgaccatcgc

SEQ ID NO: 211526 - DNA, 20 bp, Artificial Sequence
  Description of Artificial Sequence: Synthetic oligonucleotide
  Target: LAMA2; (-) strand; PAM type: YTN; PAM sequence: CTA
aaatatcctttcaatttcac

SEQ ID NO: 211527 - DNA, 20 bp, Artificial Sequence
  Description of Artificial Sequence: Synthetic oligonucleotide
  Target: LAMA2; (-) strand; PAM type: YTN; PAM sequence: CTG
ctaaaatatcctttcaattt

SEQ ID NO: 211528 - DNA, 20 bp, Artificial Sequence
  Description of Artificial Sequence: Synthetic oligonucleotide
  Target: LAMA2; (-) strand; PAM type: YTN; PAM sequence: TTA
aagcagctgctaaaatatcc

SEQ ID NO: 211529 - DNA, 20 bp, Artificial Sequence
  Description of Artificial Sequence: Synthetic oligonucleotide
  Target: LAMA2; (-) strand; PAM type: YTN; PAM sequence: TTG
ttaaagcagctgctaaaata

SEQ ID NO: 211530 - DNA, 20 bp, Artificial Sequence
  Description of Artificial Sequence: Synthetic oligonucleotide
  Target: LAMA2; (-) strand; PAM type: YTN; PAM sequence: CTT
gttaaagcagctgctaaaat

SEQ ID NO: 211531 - DNA, 20 bp, Artificial Sequence
  Description of Artificial Sequence: Synthetic oligonucleotide
  Target: LAMA2; (-) strand; PAM type: YTN; PAM sequence: TTC
ccagatacttgttaaagcag

SEQ ID NO: 211532 - DNA, 20 bp, Artificial Sequence
  Description of Artificial Sequence: Synthetic oligonucleotide
  Target: LAMA2; (-) strand; PAM type: YTN; PAM sequence: TTT
cccagatacttgttaaagca

SEQ ID NO: 211533 - DNA, 20 bp, Artificial Sequence
  Description of Artificial Sequence: Synthetic oligonucleotide
  Target: LAMA2; (-) strand; PAM type: YTN; PAM sequence: TTT
tcccagatacttgttaaagc

SEQ ID NO: 211534 - DNA, 20 bp, Artificial Sequence
  Description of Artificial Sequence: Synthetic oligonucleotide
  Target: LAMA2; (-) strand; PAM type: YTN; PAM sequence: CTT
ttcccagatacttgttaaag

SEQ ID NO: 211535 - DNA, 20 bp, Artificial Sequence
  Description of Artificial Sequence: Synthetic oligonucleotide
  Target: LAMA2; (-) strand; PAM type: YTN; PAM sequence: TTC
agaaatgcaaggaagagacc

SEQ ID NO: 211536 - DNA, 20 bp, Artificial Sequence
  Description of Artificial Sequence: Synthetic oligonucleotide
  Target: LAMA2; (-) strand; PAM type: YTN; PAM sequence: TTA
acgttcagaaatgcaaggaa

SEQ ID NO: 211537 - DNA, 20 bp, Artificial Sequence
  Description of Artificial Sequence: Synthetic oligonucleotide
  Target: LAMA2; (-) strand; PAM type: YTN; PAM sequence: TTA
atacaaattaacgttcagaa

SEQ ID NO: 211538 - DNA, 20 bp, Artificial Sequence
  Description of Artificial Sequence: Synthetic oligonucleotide
  Target: LAMA2; (-) strand; PAM type: YTN; PAM sequence: TTT
aatacaaattaacgttcaga

SEQ ID NO: 211539 - DNA, 20 bp, Artificial Sequence
  Description of Artificial Sequence: Synthetic oligonucleotide
  Target: LAMA2; (-) strand; PAM type: YTN; PAM sequence: TTT
taatacaaattaacgttcag

SEQ ID NO: 211540 - DNA, 20 bp, Artificial Sequence
  Description of Artificial Sequence: Synthetic oligonucleotide
  Target: LAMA2; (-) strand; PAM type: YTN; PAM sequence: CTT
ttaatacaaattaacgttca

SEQ ID NO: 211541 - DNA, 20 bp, Artificial Sequence
  Description of Artificial Sequence: Synthetic oligonucleotide
  Target: LAMA2; (-) strand; PAM type: YTN; PAM sequence: CTG
cttttaatacaaattaacgt

SEQ ID NO: 211542 - DNA, 20 bp, Artificial Sequence
  Description of Artificial Sequence: Synthetic oligonucleotide
  Target: LAMA2; (-) strand; PAM type: YTN; PAM sequence: CTG
agtcatgctgcttttaatac

SEQ ID NO: 211543 - DNA, 20 bp, Artificial Sequence
  Description of Artificial Sequence: Synthetic oligonucleotide
  Target: LAMA2; (-) strand; PAM type: YTN; PAM sequence: TTC
tgagtcatgctgcttttaat

SEQ ID NO: 211544 - DNA, 20 bp, Artificial Sequence
  Description of Artificial Sequence: Synthetic oligonucleotide
  Target: LAMA2; (-) strand; PAM type: YTN; PAM sequence: TTT
ctgagtcatgctgcttttaa

SEQ ID NO: 211545 - DNA, 20 bp, Artificial Sequence
  Description of Artificial Sequence: Synthetic oligonucleotide
  Target: LAMA2; (-) strand; PAM type: YTN; PAM sequence: TTA
tataaaatttctgagtcatg

SEQ ID NO: 211546 - DNA, 20 bp, Artificial Sequence
  Description of Artificial Sequence: Synthetic oligonucleotide
  Target: LAMA2; (-) strand; PAM type: YTN; PAM sequence: TTT
atataaaatttctgagtcat

SEQ ID NO: 211547 - DNA, 20 bp, Artificial Sequence
  Description of Artificial Sequence: Synthetic oligonucleotide
  Target: LAMA2; (-) strand; PAM type: YTN; PAM sequence: TTT
tatataaaatttctgagtca

SEQ ID NO: 211548 - DNA, 20 bp, Artificial Sequence
  Description of Artificial Sequence: Synthetic oligonucleotide
  Target: LAMA2; (-) strand; PAM type: YTN; PAM sequence: TTG
agttttatataaaatttctg

SEQ ID NO: 211549 - DNA, 20 bp, Artificial Sequence
  Description of Artificial Sequence: Synthetic oligonucleotide
  Target: LAMA2; (-) strand; PAM type: YTN; PAM sequence: TTT
gagttttatataaaatttct

SEQ ID NO: 211550 - DNA, 20 bp, Artificial Sequence
  Description of Artificial Sequence: Synthetic oligonucleotide
  Target: LAMA2; (-) strand; PAM type: YTN; PAM sequence: TTA
tttgagttttatataaaatt

SEQ ID NO: 211551 - DNA, 20 bp, Artificial Sequence
  Description of Artificial Sequence: Synthetic oligonucleotide
  Target: LAMA2; (-) strand; PAM type: YTN; PAM sequence: TTT
atttgagttttatataaaat

SEQ ID NO: 211552 - DNA, 20 bp, Artificial Sequence
  Description of Artificial Sequence: Synthetic oligonucleotide
  Target: LAMA2; (-) strand; PAM type: YTN; PAM sequence: CTA
aggtttatttgagttttata

SEQ ID NO: 211553 - DNA, 20 bp, Artificial Sequence
  Description of Artificial Sequence: Synthetic oligonucleotide
  Target: LAMA2; (-) strand; PAM type: YTN; PAM sequence: TTC
taaggtttatttgagtttta

SEQ ID NO: 211554 - DNA, 20 bp, Artificial Sequence
  Description of Artificial Sequence: Synthetic oligonucleotide
  Target: LAMA2; (-) strand; PAM type: YTN; PAM sequence: CTC
gataagatccaattctaagg

SEQ ID NO: 211555 - DNA, 20 bp, Artificial Sequence
  Description of Artificial Sequence: Synthetic oligonucleotide
  Target: LAMA2; (-) strand; PAM type: YTN; PAM sequence: CTG
tataacacaatactcgataa

SEQ ID NO: 211556 - DNA, 20 bp, Artificial Sequence
  Description of Artificial Sequence: Synthetic oligonucleotide
  Target: LAMA2; (-) strand; PAM type: YTN; PAM sequence: CTC
tgtataacacaatactcgat

SEQ ID NO: 211557 - DNA, 20 bp, Artificial Sequence
  Description of Artificial Sequence: Synthetic oligonucleotide
  Target: LAMA2; (-) strand; PAM type: YTN; PAM sequence: TTC
tctgtataacacaatactcg

SEQ ID NO: 211558 - DNA, 20 bp, Artificial Sequence
  Description of Artificial Sequence: Synthetic oligonucleotide
  Target: LAMA2; (-) strand; PAM type: YTN; PAM sequence: CTC
catattctctgtataacaca

SEQ ID NO: 211559 - DNA, 20 bp, Artificial Sequence
  Description of Artificial Sequence: Synthetic oligonucleotide
  Target: LAMA2; (-) strand; PAM type: YTN; PAM sequence: TTC
tccatattctctgtataaca

SEQ ID NO: 211560 - DNA, 20 bp, Artificial Sequence
  Description of Artificial Sequence: Synthetic oligonucleotide
  Target: LAMA2; (-) strand; PAM type: YTN; PAM sequence: TTA
tcccacatattctccatatt

SEQ ID NO: 211561 - DNA, 20 bp, Artificial Sequence
  Description of Artificial Sequence: Synthetic oligonucleotide
  Target: LAMA2; (-) strand; PAM type: YTN; PAM sequence: TTT
atcccacatattctccatat

SEQ ID NO: 211562 - DNA, 20 bp, Artificial Sequence
  Description of Artificial Sequence: Synthetic oligonucleotide
  Target: LAMA2; (-) strand; PAM type: YTN; PAM sequence: CTC
atttatcccacatattctcc

SEQ ID NO: 211563 - DNA, 20 bp, Artificial Sequence
  Description of Artificial Sequence: Synthetic oligonucleotide
  Target: LAMA2; (-) strand; PAM type: YTN; PAM sequence: TTG
actcatttatcccacatatt

SEQ ID NO: 211564 - DNA, 20 bp, Artificial Sequence
  Description of Artificial Sequence: Synthetic oligonucleotide
  Target: LAMA2; (-) strand; PAM type: YTN; PAM sequence: TTT
gactcatttatcccacatat

SEQ ID NO: 211565 - DNA, 20 bp, Artificial Sequence
  Description of Artificial Sequence: Synthetic oligonucleotide
  Target: LAMA2; (-) strand; PAM type: YTN; PAM sequence: TTA
acataccatttgactcattt

SEQ ID NO: 211566 - DNA, 20 bp, Artificial Sequence
  Description of Artificial Sequence: Synthetic oligonucleotide
  Target: LAMA2; (-) strand; PAM type: YTN; PAM sequence: TTT
aacataccatttgactcatt

SEQ ID NO: 211567 - DNA, 20 bp, Artificial Sequence
  Description of Artificial Sequence: Synthetic oligonucleotide
  Target: LAMA2; (-) strand; PAM type: YTN; PAM sequence: TTT
taacataccatttgactcat

SEQ ID NO: 211568 - DNA, 20 bp, Artificial Sequence
  Description of Artificial Sequence: Synthetic oligonucleotide
  Target: LAMA2; (-) strand; PAM type: YTN; PAM sequence: TTT
ttaacataccatttgactca

SEQ ID NO: 211569 - DNA, 20 bp, Artificial Sequence
  Description of Artificial Sequence: Synthetic oligonucleotide
  Target: LAMA2; (-) strand; PAM type: YTN; PAM sequence: TTT
tttaacataccatttgactc

SEQ ID NO: 211570 - DNA, 20 bp, Artificial Sequence
  Description of Artificial Sequence: Synthetic oligonucleotide
  Target: LAMA2; (-) strand; PAM type: YTN; PAM sequence: TTT
ttttaacataccatttgact

SEQ ID NO: 211571 - DNA, 20 bp, Artificial Sequence
  Description of Artificial Sequence: Synthetic oligonucleotide
  Target: LAMA2; (-) strand; PAM type: YTN; PAM sequence: TTT
tttttaacataccatttgac

SEQ ID NO: 211572 - DNA, 20 bp, Artificial Sequence
  Description of Artificial Sequence: Synthetic oligonucleotide
  Target: LAMA2; (-) strand; PAM type: YTN; PAM sequence: TTT
ttttttaacataccatttga

SEQ ID NO: 211573 - DNA, 20 bp, Artificial Sequence
  Description of Artificial Sequence: Synthetic oligonucleotide
  Target: LAMA2; (-) strand; PAM type: YTN; PAM sequence: TTT
tttttttaacataccatttg

SEQ ID NO: 211574 - DNA, 20 bp, Artificial Sequence
  Description of Artificial Sequence: Synthetic oligonucleotide
  Target: LAMA2; (-) strand; PAM type: YTN; PAM sequence: CTT
ttttttttaacataccattt

SEQ ID NO: 211575 - DNA, 20 bp, Artificial Sequence
  Description of Artificial Sequence: Synthetic oligonucleotide
  Target: LAMA2; (-) strand; PAM type: YTN; PAM sequence: CTA
cttttttttttaacatacca

SEQ ID NO: 211576 - DNA, 20 bp, Artificial Sequence
  Description of Artificial Sequence: Synthetic oligonucleotide
  Target: LAMA2; (-) strand; PAM type: YTN; PAM sequence: TTC
ctacttttttttttaacata

SEQ ID NO: 211577 - DNA, 20 bp, Artificial Sequence
  Description of Artificial Sequence: Synthetic oligonucleotide
  Target: LAMA2; (-) strand; PAM type: YTN; PAM sequence: CTT
cctacttttttttttaacat

SEQ ID NO: 211578 - DNA, 20 bp, Artificial Sequence
  Description of Artificial Sequence: Synthetic oligonucleotide
  Target: LAMA2; (-) strand; PAM type: YTN; PAM sequence: CTA
tcatgcttcctacttttttt

SEQ ID NO: 211579 - DNA, 20 bp, Artificial Sequence
  Description of Artificial Sequence: Synthetic oligonucleotide
  Target: LAMA2; (-) strand; PAM type: YTN; PAM sequence: TTG
agtctatcatgcttcctact

SEQ ID NO: 211580 - DNA, 20 bp, Artificial Sequence
  Description of Artificial Sequence: Synthetic oligonucleotide
  Target: LAMA2; (-) strand; PAM type: YTN; PAM sequence: TTA
agaattgagtctatcatgct

SEQ ID NO: 211581 - DNA, 20 bp, Artificial Sequence
  Description of Artificial Sequence: Synthetic oligonucleotide
  Target: LAMA2; (-) strand; PAM type: YTN; PAM sequence: CTA
ggaattaagaattgagtcta

SEQ ID NO: 211582 - DNA, 20 bp, Artificial Sequence
  Description of Artificial Sequence: Synthetic oligonucleotide
  Target: LAMA2; (-) strand; PAM type: YTN; PAM sequence: CTC
taggaattaagaattgagtc

SEQ ID NO: 211583 - DNA, 20 bp, Artificial Sequence
  Description of Artificial Sequence: Synthetic oligonucleotide
  Target: LAMA2; (-) strand; PAM type: YTN; PAM sequence: TTC
ctctaggaattaagaattga

SEQ ID NO: 211584 - DNA, 20 bp, Artificial Sequence
  Description of Artificial Sequence: Synthetic oligonucleotide
  Target: LAMA2; (-) strand; PAM type: YTN; PAM sequence: TTT
cctctaggaattaagaattg

SEQ ID NO: 211585 - DNA, 20 bp, Artificial Sequence
  Description of Artificial Sequence: Synthetic oligonucleotide
  Target: LAMA2; (-) strand; PAM type: YTN; PAM sequence: CTG
tttcctctaggaattaagaa

SEQ ID NO: 211586 - DNA, 20 bp, Artificial Sequence
  Description of Artificial Sequence: Synthetic oligonucleotide
  Target: LAMA2; (-) strand; PAM type: YTN; PAM sequence: CTC
tgtttcctctaggaattaag

SEQ ID NO: 211587 - DNA, 20 bp, Artificial Sequence
  Description of Artificial Sequence: Synthetic oligonucleotide
  Target: LAMA2; (-) strand; PAM type: YTN; PAM sequence: TTG
gacataactctgtttcctct

SEQ ID NO: 211588 - DNA, 20 bp, Artificial Sequence
  Description of Artificial Sequence: Synthetic oligonucleotide
  Target: LAMA2; (-) strand; PAM type: YTN; PAM sequence: CTT
ggacataactctgtttcctc

SEQ ID NO: 211589 - DNA, 20 bp, Artificial Sequence
  Description of Artificial Sequence: Synthetic oligonucleotide
  Target: LAMA2; (-) strand; PAM type: YTN; PAM sequence: TTC
cttggacataactctgtttc

SEQ ID NO: 211590 - DNA, 20 bp, Artificial Sequence
  Description of Artificial Sequence: Synthetic oligonucleotide
  Target: LAMA2; (-) strand; PAM type: YTN; PAM sequence: TTG
aatatgttccttggacataa

SEQ ID NO: 211591 - DNA, 20 bp, Artificial Sequence
  Description of Artificial Sequence: Synthetic oligonucleotide
  Target: LAMA2; (-) strand; PAM type: YTN; PAM sequence: TTG
ggttgaatatgttccttgga

SEQ ID NO: 211592 - DNA, 20 bp, Artificial Sequence
  Description of Artificial Sequence: Synthetic oligonucleotide
  Target: LAMA2; (-) strand; PAM type: YTN; PAM sequence: CTG
tacagtgattgggttgaata

SEQ ID NO: 211593 - DNA, 20 bp, Artificial Sequence
  Description of Artificial Sequence: Synthetic oligonucleotide
  Target: LAMA2; (-) strand; PAM type: YTN; PAM sequence: CTA
cagctgtacagtgattgggt

SEQ ID NO: 211594 - DNA, 20 bp, Artificial Sequence
  Description of Artificial Sequence: Synthetic oligonucleotide
  Target: LAMA2; (-) strand; PAM type: YTN; PAM sequence: CTC
aaaaaaaaaaaaaaaaaaaa

SEQ ID NO: 211595 - DNA, 20 bp, Artificial Sequence
  Description of Artificial Sequence: Synthetic oligonucleotide
  Target: LAMA2; (-) strand; PAM type: YTN; PAM sequence: CTG
tctcaaaaaaaaaaaaaaaa

SEQ ID NO: 211596 - DNA, 20 bp, Artificial Sequence
  Description of Artificial Sequence: Synthetic oligonucleotide
  Target: LAMA2; (-) strand; PAM type: YTN; PAM sequence: CTG
agactgtctcaaaaaaaaaa

SEQ ID NO: 211597 - DNA, 20 bp, Artificial Sequence
  Description of Artificial Sequence: Synthetic oligonucleotide
  Target: LAMA2; (-) strand; PAM type: YTN; PAM sequence: CTG
ggcaatggactgagactgtc

SEQ ID NO: 211598 - DNA, 20 bp, Artificial Sequence
  Description of Artificial Sequence: Synthetic oligonucleotide
  Target: LAMA2; (-) strand; PAM type: YTN; PAM sequence: TTG
cacaccagcctgggcaatgg

SEQ ID NO: 211599 - DNA, 20 bp, Artificial Sequence
  Description of Artificial Sequence: Synthetic oligonucleotide
  Target: LAMA2; (-) strand; PAM type: YTN; PAM sequence: CTG
agatcatgccattgcacacc

SEQ ID NO: 211600 - DNA, 20 bp, Artificial Sequence
  Description of Artificial Sequence: Synthetic oligonucleotide
  Target: LAMA2; (-) strand; PAM type: YTN; PAM sequence: TTG
cagtgagctgagatcatgcc

SEQ ID NO: 211601 - DNA, 20 bp, Artificial Sequence
  Description of Artificial Sequence: Synthetic oligonucleotide
  Target: LAMA2; (-) strand; PAM type: YTN; PAM sequence: CTG
ggaggcagaggttgcagtga

SEQ ID NO: 211602 - DNA, 20 bp, Artificial Sequence
  Description of Artificial Sequence: Synthetic oligonucleotide
  Target: LAMA2; (-) strand; PAM type: YTN; PAM sequence: TTA
acctgggaggcagaggttgc

SEQ ID NO: 211603 - DNA, 20 bp, Artificial Sequence
  Description of Artificial Sequence: Synthetic oligonucleotide
  Target: LAMA2; (-) strand; PAM type: YTN; PAM sequence: TTT
aacctgggaggcagaggttg

SEQ ID NO: 211604 - DNA, 20 bp, Artificial Sequence
  Description of Artificial Sequence: Synthetic oligonucleotide
  Target: LAMA2; (-) strand; PAM type: YTN; PAM sequence: TTT
taacctgggaggcagaggtt

SEQ ID NO: 211605 - DNA, 20 bp, Artificial Sequence
  Description of Artificial Sequence: Synthetic oligonucleotide
  Target: LAMA2; (-) strand; PAM type: YTN; PAM sequence: TTG
ttttaacctgggaggcagag

SEQ ID NO: 211606 - DNA, 20 bp, Artificial Sequence
  Description of Artificial Sequence: Synthetic oligonucleotide
  Target: LAMA2; (-) strand; PAM type: YTN; PAM sequence: CTG
aggcaggagaattgttttaa

SEQ ID NO: 211607 - DNA, 20 bp, Artificial Sequence
  Description of Artificial Sequence: Synthetic oligonucleotide
  Target: LAMA2; (-) strand; PAM type: YTN; PAM sequence: TTG
ggaggctgaggcaggagaat

SEQ ID NO: 211608 - DNA, 20 bp, Artificial Sequence
  Description of Artificial Sequence: Synthetic oligonucleotide
  Target: LAMA2; (-) strand; PAM type: YTN; PAM sequence: CTT
gggaggctgaggcaggagaa

SEQ ID NO: 211609 - DNA, 20 bp, Artificial Sequence
  Description of Artificial Sequence: Synthetic oligonucleotide
  Target: LAMA2; (-) strand; PAM type: YTN; PAM sequence: CTA
cttgggaggctgaggcagga

SEQ ID NO: 211610 - DNA, 20 bp, Artificial Sequence
  Description of Artificial Sequence: Synthetic oligonucleotide
  Target: LAMA2; (-) strand; PAM type: YTN; PAM sequence: CTG
taatcccagctacttgggag

SEQ ID NO: 211611 - DNA, 20 bp, Artificial Sequence
  Description of Artificial Sequence: Synthetic oligonucleotide
  Target: LAMA2; (-) strand; PAM type: YTN; PAM sequence: CTG
gcatggtggcaggtgcctgt

SEQ ID NO: 211612 - DNA, 20 bp, Artificial Sequence
  Description of Artificial Sequence: Synthetic oligonucleotide
  Target: LAMA2; (-) strand; PAM type: YTN; PAM sequence: TTA
gctggcatggtggcaggtgc

SEQ ID NO: 211613 - DNA, 20 bp, Artificial Sequence
  Description of Artificial Sequence: Synthetic oligonucleotide
  Target: LAMA2; (-) strand; PAM type: YTN; PAM sequence: CTA
aaaatacaaaaaaataaaat

SEQ ID NO: 211614 - DNA, 20 bp, Artificial Sequence
  Description of Artificial Sequence: Synthetic oligonucleotide
  Target: LAMA2; (-) strand; PAM type: YTN; PAM sequence: CTA
ctaaaaatacaaaaaaataa

SEQ ID NO: 211615 - DNA, 20 bp, Artificial Sequence
  Description of Artificial Sequence: Synthetic oligonucleotide
  Target: LAMA2; (-) strand; PAM type: YTN; PAM sequence: CTC
tactaaaaatacaaaaaaat

SEQ ID NO: 211616 - DNA, 20 bp, Artificial Sequence
  Description of Artificial Sequence: Synthetic oligonucleotide
  Target: LAMA2; (-) strand; PAM type: YTN; PAM sequence: CTG
gccaacatggtgaagtcccg

SEQ ID NO: 211617 - DNA, 20 bp, Artificial Sequence
  Description of Artificial Sequence: Synthetic oligonucleotide
  Target: LAMA2; (-) strand; PAM type: YTN; PAM sequence: TTG
agaccaggctggccaacatg

SEQ ID NO: 211618 - DNA, 20 bp, Artificial Sequence
  Description of Artificial Sequence: Synthetic oligonucleotide
  Target: LAMA2; (-) strand; PAM type: YTN; PAM sequence: TTT
gagaccaggctggccaacat

SEQ ID NO: 211619 - DNA, 20 bp, Artificial Sequence
  Description of Artificial Sequence: Synthetic oligonucleotide
  Target: LAMA2; (-) strand; PAM type: YTN; PAM sequence: CTG
aggtcaggggtttgagacca

SEQ ID NO: 211620 - DNA, 20 bp, Artificial Sequence
  Description of Artificial Sequence: Synthetic oligonucleotide
  Target: LAMA2; (-) strand; PAM type: YTN; PAM sequence: TTG
ggaggccaaggtgggaggat

SEQ ID NO: 211621 - DNA, 20 bp, Artificial Sequence
  Description of Artificial Sequence: Synthetic oligonucleotide
  Target: LAMA2; (-) strand; PAM type: YTN; PAM sequence: TTT
gggaggccaaggtgggagga

SEQ ID NO: 211622 - DNA, 20 bp, Artificial Sequence
  Description of Artificial Sequence: Synthetic oligonucleotide
  Target: LAMA2; (-) strand; PAM type: YTN; PAM sequence: CTT
tgggaggccaaggtgggagg

SEQ ID NO: 211623 - DNA, 20 bp, Artificial Sequence
  Description of Artificial Sequence: Synthetic oligonucleotide
  Target: LAMA2; (-) strand; PAM type: YTN; PAM sequence: CTG
taatcccagcactttgggag

SEQ ID NO: 211624 - DNA, 20 bp, Artificial Sequence
  Description of Artificial Sequence: Synthetic oligonucleotide
  Target: LAMA2; (-) strand; PAM type: YTN; PAM sequence: CTC
atgcctgtaatcccagcact

SEQ ID NO: 211625 - DNA, 20 bp, Artificial Sequence
  Description of Artificial Sequence: Synthetic oligonucleotide
  Target: LAMA2; (-) strand; PAM type: YTN; PAM sequence: TTG
gccaggcacggtggctcatg

SEQ ID NO: 211626 - DNA, 20 bp, Artificial Sequence
  Description of Artificial Sequence: Synthetic oligonucleotide
  Target: LAMA2; (-) strand; PAM type: YTN; PAM sequence: TTA
gaaaaattggccaggcacgg

SEQ ID NO: 211627 - DNA, 20 bp, Artificial Sequence
  Description of Artificial Sequence: Synthetic oligonucleotide
  Target: LAMA2; (-) strand; PAM type: YTN; PAM sequence: TTT
agaaaaattggccaggcacg

SEQ ID NO: 211628 - DNA, 20 bp, Artificial Sequence
  Description of Artificial Sequence: Synthetic oligonucleotide
  Target: LAMA2; (-) strand; PAM type: YTN; PAM sequence: TTA
tttagaaaaattggccaggc

SEQ ID NO: 211629 - DNA, 20 bp, Artificial Sequence
  Description of Artificial Sequence: Synthetic oligonucleotide
  Target: LAMA2; (-) strand; PAM type: YTN; PAM sequence: TTT
atttagaaaaattggccagg

SEQ ID NO: 211630 - DNA, 20 bp, Artificial Sequence
  Description of Artificial Sequence: Synthetic oligonucleotide
  Target: LAMA2; (-) strand; PAM type: YTN; PAM sequence: TTA
atttatttagaaaaattggc

SEQ ID NO: 211631 - DNA, 20 bp, Artificial Sequence
  Description of Artificial Sequence: Synthetic oligonucleotide
  Target: LAMA2; (-) strand; PAM type: YTN; PAM sequence: TTA
tcatcatcatattaatttat

SEQ ID NO: 211632 - DNA, 20 bp, Artificial Sequence
  Description of Artificial Sequence: Synthetic oligonucleotide
  Target: LAMA2; (-) strand; PAM type: YTN; PAM sequence: TTG
gatataccattatcatcatc

SEQ ID NO: 211633 - DNA, 20 bp, Artificial Sequence
  Description of Artificial Sequence: Synthetic oligonucleotide
  Target: LAMA2; (-) strand; PAM type: YTN; PAM sequence: TTT
ggatataccattatcatcat

SEQ ID NO: 211634 - DNA, 20 bp, Artificial Sequence
  Description of Artificial Sequence: Synthetic oligonucleotide
  Target: LAMA2; (-) strand; PAM type: YTN; PAM sequence: CTA
tttggatataccattatcat

SEQ ID NO: 211635 - DNA, 20 bp, Artificial Sequence
  Description of Artificial Sequence: Synthetic oligonucleotide
  Target: LAMA2; (-) strand; PAM type: YTN; PAM sequence: CTG
ggtagctatttggatatacc

SEQ ID NO: 211636 - DNA, 20 bp, Artificial Sequence
  Description of Artificial Sequence: Synthetic oligonucleotide
  Target: LAMA2; (-) strand; PAM type: YTN; PAM sequence: CTA
atcaaaaactgggtagctat

SEQ ID NO: 211637 - DNA, 20 bp, Artificial Sequence
  Description of Artificial Sequence: Synthetic oligonucleotide
  Target: LAMA2; (-) strand; PAM type: YTN; PAM sequence: CTG
cctaatcaaaaactgggtag

SEQ ID NO: 211638 - DNA, 20 bp, Artificial Sequence
  Description of Artificial Sequence: Synthetic oligonucleotide
  Target: LAMA2; (-) strand; PAM type: YTN; PAM sequence: TTC
tgcctaatcaaaaactgggt

SEQ ID NO: 211639 - DNA, 20 bp, Artificial Sequence
  Description of Artificial Sequence: Synthetic oligonucleotide
  Target: LAMA2; (-) strand; PAM type: YTN; PAM sequence: CTT
ctgcctaatcaaaaactggg

SEQ ID NO: 211640 - DNA, 20 bp, Artificial Sequence
  Description of Artificial Sequence: Synthetic oligonucleotide
  Target: LAMA2; (-) strand; PAM type: YTN; PAM sequence: CTG
accataagcatacttctgcc

SEQ ID NO: 211641 - DNA, 20 bp, Artificial Sequence
  Description of Artificial Sequence: Synthetic oligonucleotide
  Target: LAMA2; (-) strand; PAM type: YTN; PAM sequence: CTG
actgaccataagcatacttc

SEQ ID NO: 211642 - DNA, 20 bp, Artificial Sequence
  Description of Artificial Sequence: Synthetic oligonucleotide
  Target: LAMA2; (-) strand; PAM type: YTN; PAM sequence: CTC
tgactgaccataagcatact

SEQ ID NO: 211643 - DNA, 20 bp, Artificial Sequence
  Description of Artificial Sequence: Synthetic oligonucleotide
  Target: LAMA2; (-) strand; PAM type: YTN; PAM sequence: TTA
ctctgactgaccataagcat

SEQ ID NO: 211644 - DNA, 20 bp, Artificial Sequence
  Description of Artificial Sequence: Synthetic oligonucleotide
  Target: LAMA2; (-) strand; PAM type: YTN; PAM sequence: TTT
actctgactgaccataagca

SEQ ID NO: 211645 - DNA, 20 bp, Artificial Sequence
  Description of Artificial Sequence: Synthetic oligonucleotide
  Target: LAMA2; (-) strand; PAM type: YTN; PAM sequence: TTT
tactctgactgaccataagc

SEQ ID NO: 211646 - DNA, 20 bp, Artificial Sequence
  Description of Artificial Sequence: Synthetic oligonucleotide
  Target: LAMA2; (-) strand; PAM type: YTN; PAM sequence: TTT
ttactctgactgaccataag

SEQ ID NO: 211647 - DNA, 20 bp, Artificial Sequence
  Description of Artificial Sequence: Synthetic oligonucleotide
  Target: LAMA2; (-) strand; PAM type: YTN; PAM sequence: CTT
tttactctgactgaccataa

SEQ ID NO: 211648 - DNA, 20 bp, Artificial Sequence
  Description of Artificial Sequence: Synthetic oligonucleotide
  Target: LAMA2; (-) strand; PAM type: YTN; PAM sequence: CTC
actttttactctgactgacc

SEQ ID NO: 211649 - DNA, 20 bp, Artificial Sequence
  Description of Artificial Sequence: Synthetic oligonucleotide
  Target: LAMA2; (-) strand; PAM type: YTN; PAM sequence: CTG
gtctcactttttactctgac

SEQ ID NO: 211650 - DNA, 20 bp, Artificial Sequence
  Description of Artificial Sequence: Synthetic oligonucleotide
  Target: LAMA2; (-) strand; PAM type: YTN; PAM sequence: TTA
catgtgcatgccaccatgct

SEQ ID NO: 211651 - DNA, 20 bp, Artificial Sequence
  Description of Artificial Sequence: Synthetic oligonucleotide
  Target: LAMA2; (-) strand; PAM type: YTN; PAM sequence: CTG
ggattacatgtgcatgccac

SEQ ID NO: 211652 - DNA, 20 bp, Artificial Sequence
  Description of Artificial Sequence: Synthetic oligonucleotide
  Target: LAMA2; (-) strand; PAM type: YTN; PAM sequence: CTC
ccaagtagctgggattacat

SEQ ID NO: 211653 - DNA, 20 bp, Artificial Sequence
  Description of Artificial Sequence: Synthetic oligonucleotide
  Target: LAMA2; (-) strand; PAM type: YTN; PAM sequence: CTC
cgcctcccaagtagctggga

SEQ ID NO: 211654 - DNA, 20 bp, Artificial Sequence
  Description of Artificial Sequence: Synthetic oligonucleotide
  Target: LAMA2; (-) strand; PAM type: YTN; PAM sequence: CTG
tctccgcctcccaagtagct

SEQ ID NO: 211655 - DNA, 20 bp, Artificial Sequence
  Description of Artificial Sequence: Synthetic oligonucleotide
  Target: LAMA2; (-) strand; PAM type: YTN; PAM sequence: CTC
ctgtctccgcctcccaagta

SEQ ID NO: 211656 - DNA, 20 bp, Artificial Sequence
  Description of Artificial Sequence: Synthetic oligonucleotide
  Target: LAMA2; (-) strand; PAM type: YTN; PAM sequence: CTC
aaagggtcctcctgtctccg

SEQ ID NO: 211657 - DNA, 20 bp, Artificial Sequence
  Description of Artificial Sequence: Synthetic oligonucleotide
  Target: LAMA2; (-) strand; PAM type: YTN; PAM sequence: CTA
agctcaaagggtcctcctgt

SEQ ID NO: 211658 - DNA, 20 bp, Artificial Sequence
  Description of Artificial Sequence: Synthetic oligonucleotide
  Target: LAMA2; (-) strand; PAM type: YTN; PAM sequence: CTC
ctaagctcaaagggtcctcc

SEQ ID NO: 211659 - DNA, 20 bp, Artificial Sequence
  Description of Artificial Sequence: Synthetic oligonucleotide
  Target: LAMA2; (-) strand; PAM type: YTN; PAM sequence: CTC
agactcctaagctcaaaggg

SEQ ID NO: 211660 - DNA, 20 bp, Artificial Sequence
  Description of Artificial Sequence: Synthetic oligonucleotide
  Target: LAMA2; (-) strand; PAM type: YTN; PAM sequence: CTA
taacctcagactcctaagct

SEQ ID NO: 211661 - DNA, 20 bp, Artificial Sequence
  Description of Artificial Sequence: Synthetic oligonucleotide
  Target: LAMA2; (-) strand; PAM type: YTN; PAM sequence: TTC
ataggcataatcatagtgtg

SEQ ID NO: 211662 - DNA, 20 bp, Artificial Sequence
  Description of Artificial Sequence: Synthetic oligonucleotide
  Target: LAMA2; (-) strand; PAM type: YTN; PAM sequence: CTA
ttcataggcataatcatagt

SEQ ID NO: 211663 - DNA, 20 bp, Artificial Sequence
  Description of Artificial Sequence: Synthetic oligonucleotide
  Target: LAMA2; (-) strand; PAM type: YTN; PAM sequence: CTG
gagtgcagtggctattcata

SEQ ID NO: 211664 - DNA, 20 bp, Artificial Sequence
  Description of Artificial Sequence: Synthetic oligonucleotide
  Target: LAMA2; (-) strand; PAM type: YTN; PAM sequence: CTG
cccaggctggagtgcagtgg

SEQ ID NO: 211665 - DNA, 20 bp, Artificial Sequence
  Description of Artificial Sequence: Synthetic oligonucleotide
  Target: LAMA2; (-) strand; PAM type: YTN; PAM sequence: CTA
cactgcccaggctggagtgc

SEQ ID NO: 211666 - DNA, 20 bp, Artificial Sequence
  Description of Artificial Sequence: Synthetic oligonucleotide
  Target: LAMA2; (-) strand; PAM type: YTN; PAM sequence: TTG
ctacactgcccaggctggag

SEQ ID NO: 211667 - DNA, 20 bp, Artificial Sequence
  Description of Artificial Sequence: Synthetic oligonucleotide
  Target: LAMA2; (-) strand; PAM type: YTN; PAM sequence: CTT
gctacactgcccaggctgga

SEQ ID NO: 211668 - DNA, 20 bp, Artificial Sequence
  Description of Artificial Sequence: Synthetic oligonucleotide
  Target: LAMA2; (-) strand; PAM type: YTN; PAM sequence: TTC
agagatagggtcttgctaca

SEQ ID NO: 211669 - DNA, 20 bp, Artificial Sequence
  Description of Artificial Sequence: Synthetic oligonucleotide
  Target: LAMA2; (-) strand; PAM type: YTN; PAM sequence: TTT
cagagatagggtcttgctac

SEQ ID NO: 211670 - DNA, 20 bp, Artificial Sequence
  Description of Artificial Sequence: Synthetic oligonucleotide
  Target: LAMA2; (-) strand; PAM type: YTN; PAM sequence: TTT
tcagagatagggtcttgcta

SEQ ID NO: 211671 - DNA, 20 bp, Artificial Sequence
  Description of Artificial Sequence: Synthetic oligonucleotide
  Target: LAMA2; (-) strand; PAM type: YTN; PAM sequence: TTT
ttcagagatagggtcttgct

SEQ ID NO: 211672 - DNA, 20 bp, Artificial Sequence
  Description of Artificial Sequence: Synthetic oligonucleotide
  Target: LAMA2; (-) strand; PAM type: YTN; PAM sequence: TTT
tttcagagatagggtcttgc

SEQ ID NO: 211673 - DNA, 20 bp, Artificial Sequence
  Description of Artificial Sequence: Synthetic oligonucleotide
  Target: LAMA2; (-) strand; PAM type: YTN; PAM sequence: CTT
ttttcagagatagggtcttg

SEQ ID NO: 211674 - DNA, 20 bp, Artificial Sequence
  Description of Artificial Sequence: Synthetic oligonucleotide
  Target: LAMA2; (-) strand; PAM type: YTN; PAM sequence: TTC
ttttttcagagatagggtct

SEQ ID NO: 211675 - DNA, 20 bp, Artificial Sequence
  Description of Artificial Sequence: Synthetic oligonucleotide
  Target: LAMA2; (-) strand; PAM type: YTN; PAM sequence: TTG
attcttttttcagagatagg

SEQ ID NO: 211676 - DNA, 20 bp, Artificial Sequence
  Description of Artificial Sequence: Synthetic oligonucleotide
  Target: LAMA2; (-) strand; PAM type: YTN; PAM sequence: TTT
gattcttttttcagagatag

SEQ ID NO: 211677 - DNA, 20 bp, Artificial Sequence
  Description of Artificial Sequence: Synthetic oligonucleotide
  Target: LAMA2; (-) strand; PAM type: YTN; PAM sequence: CTT
tgattcttttttcagagata

SEQ ID NO: 211678 - DNA, 20 bp, Artificial Sequence
  Description of Artificial Sequence: Synthetic oligonucleotide
  Target: LAMA2; (-) strand; PAM type: YTN; PAM sequence: TTA
aggcctttgattcttttttc

SEQ ID NO: 211679 - DNA, 20 bp, Artificial Sequence
  Description of Artificial Sequence: Synthetic oligonucleotide
  Target: LAMA2; (-) strand; PAM type: YTN; PAM sequence: CTT
aaggcctttgattctttttt

SEQ ID NO: 211680 - DNA, 20 bp, Artificial Sequence
  Description of Artificial Sequence: Synthetic oligonucleotide
  Target: LAMA2; (-) strand; PAM type: YTN; PAM sequence: TTC
ttaaggcctttgattctttt

SEQ ID NO: 211681 - DNA, 20 bp, Artificial Sequence
  Description of Artificial Sequence: Synthetic oligonucleotide
  Target: LAMA2; (-) strand; PAM type: YTN; PAM sequence: TTT
cttaaggcctttgattcttt

SEQ ID NO: 211682 - DNA, 20 bp, Artificial Sequence
  Description of Artificial Sequence: Synthetic oligonucleotide
  Target: LAMA2; (-) strand; PAM type: YTN; PAM sequence: CTG
aggtaaaaataaaatatttc

SEQ ID NO: 211683 - DNA, 20 bp, Artificial Sequence
  Description of Artificial Sequence: Synthetic oligonucleotide
  Target: LAMA2; (-) strand; PAM type: YTN; PAM sequence: TTC
tgaggtaaaaataaaatatt

SEQ ID NO: 211684 - DNA, 20 bp, Artificial Sequence
  Description of Artificial Sequence: Synthetic oligonucleotide
  Target: LAMA2; (-) strand; PAM type: YTN; PAM sequence: TTT
ctgaggtaaaaataaaatat

SEQ ID NO: 211685 - DNA, 20 bp, Artificial Sequence
  Description of Artificial Sequence: Synthetic oligonucleotide
  Target: LAMA2; (-) strand; PAM type: YTN; PAM sequence: TTT
tctgaggtaaaaataaaata

SEQ ID NO: 211686 - DNA, 20 bp, Artificial Sequence
  Description of Artificial Sequence: Synthetic oligonucleotide
  Target: LAMA2; (-) strand; PAM type: YTN; PAM sequence: TTA
aattttctgaggtaaaaata

SEQ ID NO: 211687 - DNA, 20 bp, Artificial Sequence
  Description of Artificial Sequence: Synthetic oligonucleotide
  Target: LAMA2; (-) strand; PAM type: YTN; PAM sequence: TTT
aaattttctgaggtaaaaat

SEQ ID NO: 211688 - DNA, 20 bp, Artificial Sequence
  Description of Artificial Sequence: Synthetic oligonucleotide
  Target: LAMA2; (-) strand; PAM type: YTN; PAM sequence: TTT
taaattttctgaggtaaaaa

SEQ ID NO: 211689 - DNA, 20 bp, Artificial Sequence
  Description of Artificial Sequence: Synthetic oligonucleotide
  Target: LAMA2; (-) strand; PAM type: YTN; PAM sequence: TTT
ttaaattttctgaggtaaaa

SEQ ID NO: 211690 - DNA, 20 bp, Artificial Sequence
  Description of Artificial Sequence: Synthetic oligonucleotide
  Target: LAMA2; (-) strand; PAM type: YTN; PAM sequence: TTA
atttttaaattttctgaggt

SEQ ID NO: 211691 - DNA, 20 bp, Artificial Sequence
  Description of Artificial Sequence: Synthetic oligonucleotide
  Target: LAMA2; (-) strand; PAM type: YTN; PAM sequence: CTA
agttaatttttaaattttct

SEQ ID NO: 211692 - DNA, 20 bp, Artificial Sequence
  Description of Artificial Sequence: Synthetic oligonucleotide
  Target: LAMA2; (-) strand; PAM type: YTN; PAM sequence: CTC
taagttaatttttaaatttt

SEQ ID NO: 211693 - DNA, 20 bp, Artificial Sequence
  Description of Artificial Sequence: Synthetic oligonucleotide
  Target: LAMA2; (-) strand; PAM type: YTN; PAM sequence: TTA
gctctaagttaatttttaaa

SEQ ID NO: 211694 - DNA, 20 bp, Artificial Sequence
  Description of Artificial Sequence: Synthetic oligonucleotide
  Target: LAMA2; (-) strand; PAM type: YTN; PAM sequence: TTT
agctctaagttaatttttaa

SEQ ID NO: 211695 - DNA, 20 bp, Artificial Sequence
  Description of Artificial Sequence: Synthetic oligonucleotide
  Target: LAMA2; (-) strand; PAM type: YTN; PAM sequence: CTA
tttagctctaagttaatttt

SEQ ID NO: 211696 - DNA, 20 bp, Artificial Sequence
  Description of Artificial Sequence: Synthetic oligonucleotide
  Target: LAMA2; (-) strand; PAM type: YTN; PAM sequence: CTA
cacataatgaaacccaaact

SEQ ID NO: 211697 - DNA, 20 bp, Artificial Sequence
  Description of Artificial Sequence: Synthetic oligonucleotide
  Target: LAMA2; (-) strand; PAM type: YTN; PAM sequence: TTC
tacacataatgaaacccaaa

SEQ ID NO: 211698 - DNA, 20 bp, Artificial Sequence
  Description of Artificial Sequence: Synthetic oligonucleotide
  Target: LAMA2; (-) strand; PAM type: YTN; PAM sequence: TTT
ctacacataatgaaacccaa

SEQ ID NO: 211699 - DNA, 20 bp, Artificial Sequence
  Description of Artificial Sequence: Synthetic oligonucleotide
  Target: LAMA2; (-) strand; PAM type: YTN; PAM sequence: TTC
atttctacacataatgaaac

SEQ ID NO: 211700 - DNA, 20 bp, Artificial Sequence
  Description of Artificial Sequence: Synthetic oligonucleotide
  Target: LAMA2; (-) strand; PAM type: YTN; PAM sequence: TTG
caagattcatttctacacat

SEQ ID NO: 211701 - DNA, 20 bp, Artificial Sequence
  Description of Artificial Sequence: Synthetic oligonucleotide
  Target: LAMA2; (-) strand; PAM type: YTN; PAM sequence: CTG
ttgcaagattcatttctaca

SEQ ID NO: 211702 - DNA, 20 bp, Artificial Sequence
  Description of Artificial Sequence: Synthetic oligonucleotide
  Target: LAMA2; (-) strand; PAM type: YTN; PAM sequence: TTA
ctgttgcaagattcatttct

SEQ ID NO: 211703 - DNA, 20 bp, Artificial Sequence
  Description of Artificial Sequence: Synthetic oligonucleotide
  Target: LAMA2; (-) strand; PAM type: YTN; PAM sequence: CTG
ttactgttgcaagattcatt

SEQ ID NO: 211704 - DNA, 20 bp, Artificial Sequence
  Description of Artificial Sequence: Synthetic oligonucleotide
  Target: LAMA2; (-) strand; PAM type: YTN; PAM sequence: TTA
taatgtgtaatgggaaactg

SEQ ID NO: 211705 - DNA, 20 bp, Artificial Sequence
  Description of Artificial Sequence: Synthetic oligonucleotide
  Target: LAMA2; (-) strand; PAM type: YTN; PAM sequence: CTT
ataatgtgtaatgggaaact

SEQ ID NO: 211706 - DNA, 20 bp, Artificial Sequence
  Description of Artificial Sequence: Synthetic oligonucleotide
  Target: LAMA2; (-) strand; PAM type: YTN; PAM sequence: CTC
aaaacagacacttataatgt

SEQ ID NO: 211707 - DNA, 20 bp, Artificial Sequence
  Description of Artificial Sequence: Synthetic oligonucleotide
  Target: LAMA2; (-) strand; PAM type: YTN; PAM sequence: TTA
ctcaaaacagacacttataa

SEQ ID NO: 211708 - DNA, 20 bp, Artificial Sequence
  Description of Artificial Sequence: Synthetic oligonucleotide
  Target: LAMA2; (-) strand; PAM type: YTN; PAM sequence: TTT
actcaaaacagacacttata

SEQ ID NO: 211709 - DNA, 20 bp, Artificial Sequence
  Description of Artificial Sequence: Synthetic oligonucleotide
  Target: LAMA2; (-) strand; PAM type: YTN; PAM sequence: CTC
aacaaatttactcaaaacag

SEQ ID NO: 211710 - DNA, 20 bp, Artificial Sequence
  Description of Artificial Sequence: Synthetic oligonucleotide
  Target: LAMA2; (-) strand; PAM type: YTN; PAM sequence: CTC
ctcaacaaatttactcaaaa

SEQ ID NO: 211711 - DNA, 20 bp, Artificial Sequence
  Description of Artificial Sequence: Synthetic oligonucleotide
  Target: LAMA2; (-) strand; PAM type: YTN; PAM sequence: TTA
gactcctcaacaaatttact

SEQ ID NO: 211712 - DNA, 20 bp, Artificial Sequence
  Description of Artificial Sequence: Synthetic oligonucleotide
  Target: LAMA2; (-) strand; PAM type: YTN; PAM sequence: CTA
aattagactcctcaacaaat

SEQ ID NO: 211713 - DNA, 20 bp, Artificial Sequence
  Description of Artificial Sequence: Synthetic oligonucleotide
  Target: LAMA2; (-) strand; PAM type: YTN; PAM sequence: TTC
aaactaaattagactcctca

SEQ ID NO: 211714 - DNA, 20 bp, Artificial Sequence
  Description of Artificial Sequence: Synthetic oligonucleotide
  Target: LAMA2; (-) strand; PAM type: YTN; PAM sequence: TTC
ccagtgattcaaactaaatt

SEQ ID NO: 211715 - DNA, 20 bp, Artificial Sequence
  Description of Artificial Sequence: Synthetic oligonucleotide
  Target: LAMA2; (-) strand; PAM type: YTN; PAM sequence: TTT
cccagtgattcaaactaaat

SEQ ID NO: 211716 - DNA, 20 bp, Artificial Sequence
  Description of Artificial Sequence: Synthetic oligonucleotide
  Target: LAMA2; (-) strand; PAM type: YTN; PAM sequence: TTT
tcccagtgattcaaactaaa

SEQ ID NO: 211717 - DNA, 20 bp, Artificial Sequence
  Description of Artificial Sequence: Synthetic oligonucleotide
  Target: LAMA2; (-) strand; PAM type: YTN; PAM sequence: CTT
ttcccagtgattcaaactaa

SEQ ID NO: 211718 - DNA, 20 bp, Artificial Sequence
  Description of Artificial Sequence: Synthetic oligonucleotide
  Target: LAMA2; (-) strand; PAM type: YTN; PAM sequence: TTG
tgtcttttcccagtgattca

SEQ ID NO: 211719 - DNA, 20 bp, Artificial Sequence
  Description of Artificial Sequence: Synthetic oligonucleotide
  Target: LAMA2; (-) strand; PAM type: YTN; PAM sequence: CTC
aattgtgtcttttcccagtg

SEQ ID NO: 211720 - DNA, 20 bp, Artificial Sequence
  Description of Artificial Sequence: Synthetic oligonucleotide
  Target: LAMA2; (-) strand; PAM type: YTN; PAM sequence: TTA
taaaacctcaattgtgtctt

SEQ ID NO: 211721 - DNA, 20 bp, Artificial Sequence
  Description of Artificial Sequence: Synthetic oligonucleotide
  Target: LAMA2; (-) strand; PAM type: YTN; PAM sequence: TTT
ataaaacctcaattgtgtct

SEQ ID NO: 211722 - DNA, 20 bp, Artificial Sequence
  Description of Artificial Sequence: Synthetic oligonucleotide
  Target: LAMA2; (-) strand; PAM type: YTN; PAM sequence: TTT
tataaaacctcaattgtgtc

SEQ ID NO: 211723 - DNA, 20 bp, Artificial Sequence
  Description of Artificial Sequence: Synthetic oligonucleotide
  Target: LAMA2; (-) strand; PAM type: YTN; PAM sequence: TTA
cattttataaaacctcaatt

SEQ ID NO: 211724 - DNA, 20 bp, Artificial Sequence
  Description of Artificial Sequence: Synthetic oligonucleotide
  Target: LAMA2; (-) strand; PAM type: YTN; PAM sequence: TTT
acattttataaaacctcaat

SEQ ID NO: 211725 - DNA, 20 bp, Artificial Sequence
  Description of Artificial Sequence: Synthetic oligonucleotide
  Target: LAMA2; (-) strand; PAM type: YTN; PAM sequence: TTT
tacattttataaaacctcaa

SEQ ID NO: 211726 - DNA, 20 bp, Artificial Sequence
  Description of Artificial Sequence: Synthetic oligonucleotide
  Target: LAMA2; (-) strand; PAM type: YTN; PAM sequence: TTT
ttacattttataaaacctca

SEQ ID NO: 211727 - DNA, 20 bp, Artificial Sequence
  Description of Artificial Sequence: Synthetic oligonucleotide
  Target: LAMA2; (-) strand; PAM type: YTN; PAM sequence: TTT
tttacattttataaaacctc

SEQ ID NO: 211728 - DNA, 20 bp, Artificial Sequence
  Description of Artificial Sequence: Synthetic oligonucleotide
  Target: LAMA2; (-) strand; PAM type: YTN; PAM sequence: TTG
attttttacattttataaaa

SEQ ID NO: 211729 - DNA, 20 bp, Artificial Sequence
  Description of Artificial Sequence: Synthetic oligonucleotide
  Target: LAMA2; (-) strand; PAM type: YTN; PAM sequence: TTT
gattttttacattttataaa

SEQ ID NO: 211730 - DNA, 20 bp, Artificial Sequence
  Description of Artificial Sequence: Synthetic oligonucleotide
  Target: LAMA2; (-) strand; PAM type: YTN; PAM sequence: TTC
atttgattttttacatttta

SEQ ID NO: 211731 - DNA, 20 bp, Artificial Sequence
  Description of Artificial Sequence: Synthetic oligonucleotide
  Target: LAMA2; (-) strand; PAM type: YTN; PAM sequence: TTA
tgtaaaaaagtggaagtaca

SEQ ID NO: 211732 - DNA, 20 bp, Artificial Sequence
  Description of Artificial Sequence: Synthetic oligonucleotide
  Target: LAMA2; (-) strand; PAM type: YTN; PAM sequence: TTT
atgtaaaaaagtggaagtac

SEQ ID NO: 211733 - DNA, 20 bp, Artificial Sequence
  Description of Artificial Sequence: Synthetic oligonucleotide
  Target: LAMA2; (-) strand; PAM type: YTN; PAM sequence: CTT
tatgtaaaaaagtggaagta

SEQ ID NO: 211734 - DNA, 20 bp, Artificial Sequence
  Description of Artificial Sequence: Synthetic oligonucleotide
  Target: LAMA2; (-) strand; PAM type: YTN; PAM sequence: CTA
gaagtggaagatgtacttta

SEQ ID NO: 211735 - DNA, 20 bp, Artificial Sequence
  Description of Artificial Sequence: Synthetic oligonucleotide
  Target: LAMA2; (-) strand; PAM type: YTN; PAM sequence: TTG
taactagaagtggaagatgt

SEQ ID NO: 211736 - DNA, 20 bp, Artificial Sequence
  Description of Artificial Sequence: Synthetic oligonucleotide
  Target: LAMA2; (-) strand; PAM type: YTN; PAM sequence: TTT
gtaactagaagtggaagatg

SEQ ID NO: 211737 - DNA, 20 bp, Artificial Sequence
  Description of Artificial Sequence: Synthetic oligonucleotide
  Target: LAMA2; (-) strand; PAM type: YTN; PAM sequence: TTT
tgtaactagaagtggaagat

SEQ ID NO: 211738 - DNA, 20 bp, Artificial Sequence
  Description of Artificial Sequence: Synthetic oligonucleotide
  Target: LAMA2; (-) strand; PAM type: YTN; PAM sequence: TTT
ttgtaactagaagtggaaga

SEQ ID NO: 211739 - DNA, 20 bp, Artificial Sequence
  Description of Artificial Sequence: Synthetic oligonucleotide
  Target: LAMA2; (-) strand; PAM type: YTN; PAM sequence: TTT
tttgtaactagaagtggaag

SEQ ID NO: 211740 - DNA, 20 bp, Artificial Sequence
  Description of Artificial Sequence: Synthetic oligonucleotide
  Target: LAMA2; (-) strand; PAM type: YTN; PAM sequence: CTC
aagtgagaaaaaaaaaattt

SEQ ID NO: 211741 - DNA, 20 bp, Artificial Sequence
  Description of Artificial Sequence: Synthetic oligonucleotide
  Target: LAMA2; (-) strand; PAM type: YTN; PAM sequence: CTA
cagataaacgactcaagtga

SEQ ID NO: 211742 - DNA, 20 bp, Artificial Sequence
  Description of Artificial Sequence: Synthetic oligonucleotide
  Target: LAMA2; (-) strand; PAM type: YTN; PAM sequence: TTA
ctacagataaacgactcaag

SEQ ID NO: 211743 - DNA, 20 bp, Artificial Sequence
  Description of Artificial Sequence: Synthetic oligonucleotide
  Target: LAMA2; (-) strand; PAM type: YTN; PAM sequence: CTT
actacagataaacgactcaa

SEQ ID NO: 211744 - DNA, 20 bp, Artificial Sequence
  Description of Artificial Sequence: Synthetic oligonucleotide
  Target: LAMA2; (-) strand; PAM type: YTN; PAM sequence: TTA
cttactacagataaacgact

SEQ ID NO: 211745 - DNA, 20 bp, Artificial Sequence
  Description of Artificial Sequence: Synthetic oligonucleotide
  Target: LAMA2; (-) strand; PAM type: YTN; PAM sequence: TTT
acttactacagataaacgac

SEQ ID NO: 211746 - DNA, 20 bp, Artificial Sequence
  Description of Artificial Sequence: Synthetic oligonucleotide
  Target: LAMA2; (-) strand; PAM type: YTN; PAM sequence: TTC
ccaaatttacttactacaga

SEQ ID NO: 211747 - DNA, 20 bp, Artificial Sequence
  Description of Artificial Sequence: Synthetic oligonucleotide
  Target: LAMA2; (-) strand; PAM type: YTN; PAM sequence: TTT
cccaaatttacttactacag

SEQ ID NO: 211748 - DNA, 20 bp, Artificial Sequence
  Description of Artificial Sequence: Synthetic oligonucleotide
  Target: LAMA2; (-) strand; PAM type: YTN; PAM sequence: TTT
tcccaaatttacttactaca

SEQ ID NO: 211749 - DNA, 20 bp, Artificial Sequence
  Description of Artificial Sequence: Synthetic oligonucleotide
  Target: LAMA2; (-) strand; PAM type: YTN; PAM sequence: CTT
ttcccaaatttacttactac

SEQ ID NO: 211750 - DNA, 20 bp, Artificial Sequence
  Description of Artificial Sequence: Synthetic oligonucleotide
  Target: LAMA2; (-) strand; PAM type: YTN; PAM sequence: TTG
cacttttcccaaatttactt

SEQ ID NO: 211751 - DNA, 20 bp, Artificial Sequence
  Description of Artificial Sequence: Synthetic oligonucleotide
  Target: LAMA2; (-) strand; PAM type: YTN; PAM sequence: CTT
gcacttttcccaaatttact

SEQ ID NO: 211752 - DNA, 20 bp, Artificial Sequence
  Description of Artificial Sequence: Synthetic oligonucleotide
  Target: LAMA2; (-) strand; PAM type: YTN; PAM sequence: TTA
aatgcaaaacaatgtatatg

SEQ ID NO: 211753 - DNA, 20 bp, Artificial Sequence
  Description of Artificial Sequence: Synthetic oligonucleotide
  Target: LAMA2; (-) strand; PAM type: YTN; PAM sequence: TTT
aaatgcaaaacaatgtatat

SEQ ID NO: 211754 - DNA, 20 bp, Artificial Sequence
  Description of Artificial Sequence: Synthetic oligonucleotide
  Target: LAMA2; (-) strand; PAM type: YTN; PAM sequence: TTT
taaatgcaaaacaatgtata

SEQ ID NO: 211755 - DNA, 20 bp, Artificial Sequence
  Description of Artificial Sequence: Synthetic oligonucleotide
  Target: LAMA2; (-) strand; PAM type: YTN; PAM sequence: CTT
ttaaatgcaaaacaatgtat

SEQ ID NO: 211756 - DNA, 20 bp, Artificial Sequence
  Description of Artificial Sequence: Synthetic oligonucleotide
  Target: LAMA2; (-) strand; PAM type: YTN; PAM sequence: TTC
ttttaaatgcaaaacaatgt

SEQ ID NO: 211757 - DNA, 20 bp, Artificial Sequence
  Description of Artificial Sequence: Synthetic oligonucleotide
  Target: LAMA2; (-) strand; PAM type: YTN; PAM sequence: TTT
cttttaaatgcaaaacaatg

SEQ ID NO: 211758 - DNA, 20 bp, Artificial Sequence
  Description of Artificial Sequence: Synthetic oligonucleotide
  Target: LAMA2; (-) strand; PAM type: YTN; PAM sequence: TTT
tcttttaaatgcaaaacaat

SEQ ID NO: 211759 - DNA, 20 bp, Artificial Sequence
  Description of Artificial Sequence: Synthetic oligonucleotide
  Target: LAMA2; (-) strand; PAM type: YTN; PAM sequence: CTT
ttcttttaaatgcaaaacaa

SEQ ID NO: 211760 - DNA, 20 bp, Artificial Sequence
  Description of Artificial Sequence: Synthetic oligonucleotide
  Target: LAMA2; (-) strand; PAM type: YTN; PAM sequence: TTA
tcacttttcttttaaatgca

SEQ ID NO: 211761 - DNA, 20 bp, Artificial Sequence
  Description of Artificial Sequence: Synthetic oligonucleotide
  Target: LAMA2; (-) strand; PAM type: YTN; PAM sequence: TTG
aacattatcacttttctttt

SEQ ID NO: 211762 - DNA, 20 bp, Artificial Sequence
  Description of Artificial Sequence: Synthetic oligonucleotide
  Target: LAMA2; (-) strand; PAM type: YTN; PAM sequence: TTT
gaacattatcacttttcttt

SEQ ID NO: 211763 - DNA, 20 bp, Artificial Sequence
  Description of Artificial Sequence: Synthetic oligonucleotide
  Target: LAMA2; (-) strand; PAM type: YTN; PAM sequence: TTG
taaatagcatgggtttgaac

SEQ ID NO: 211764 - DNA, 20 bp, Artificial Sequence
  Description of Artificial Sequence: Synthetic oligonucleotide
  Target: LAMA2; (-) strand; PAM type: YTN; PAM sequence: TTT
gtaaatagcatgggtttgaa

SEQ ID NO: 211765 - DNA, 20 bp, Artificial Sequence
  Description of Artificial Sequence: Synthetic oligonucleotide
  Target: LAMA2; (-) strand; PAM type: YTN; PAM sequence: TTT
tgtaaatagcatgggtttga

SEQ ID NO: 211766 - DNA, 20 bp, Artificial Sequence
  Description of Artificial Sequence: Synthetic oligonucleotide
  Target: LAMA2; (-) strand; PAM type: YTN; PAM sequence: TTT
ttgtaaatagcatgggtttg

SEQ ID NO: 211767 - DNA, 20 bp, Artificial Sequence
  Description of Artificial Sequence: Synthetic oligonucleotide
  Target: LAMA2; (-) strand; PAM type: YTN; PAM sequence: TTG
atttttgtaaatagcatggg

SEQ ID NO: 211768 - DNA, 20 bp, Artificial Sequence
  Description of Artificial Sequence: Synthetic oligonucleotide
  Target: LAMA2; (-) strand; PAM type: YTN; PAM sequence: TTT
gatttttgtaaatagcatgg

SEQ ID NO: 211769 - DNA, 20 bp, Artificial Sequence
  Description of Artificial Sequence: Synthetic oligonucleotide
  Target: LAMA2; (-) strand; PAM type: YTN; PAM sequence: TTT
tgatttttgtaaatagcatg

SEQ ID NO: 211770 - DNA, 20 bp, Artificial Sequence
  Description of Artificial Sequence: Synthetic oligonucleotide
  Target: LAMA2; (-) strand; PAM type: YTN; PAM sequence: CTT
ttgatttttgtaaatagcat

SEQ ID NO: 211771 - DNA, 20 bp, Artificial Sequence
  Description of Artificial Sequence: Synthetic oligonucleotide
  Target: LAMA2; (-) strand; PAM type: YTN; PAM sequence: TTG
agcttttgatttttgtaaat

SEQ ID NO: 211772 - DNA, 20 bp, Artificial Sequence
  Description of Artificial Sequence: Synthetic oligonucleotide
  Target: LAMA2; (-) strand; PAM type: YTN; PAM sequence: TTT
gagcttttgatttttgtaaa

SEQ ID NO: 211773 - DNA, 20 bp, Artificial Sequence
  Description of Artificial Sequence: Synthetic oligonucleotide
  Target: LAMA2; (-) strand; PAM type: YTN; PAM sequence: TTC
atgatttgagcttttgattt

SEQ ID NO: 211774 - DNA, 20 bp, Artificial Sequence
  Description of Artificial Sequence: Synthetic oligonucleotide
  Target: LAMA2; (-) strand; PAM type: YTN; PAM sequence: TTA
acacaaacagaattcatgat

SEQ ID NO: 211775 - DNA, 20 bp, Artificial Sequence
  Description of Artificial Sequence: Synthetic oligonucleotide
  Target: LAMA2; (-) strand; PAM type: YTN; PAM sequence: CTT
aacacaaacagaattcatga

SEQ ID NO: 211776 - DNA, 20 bp, Artificial Sequence
  Description of Artificial Sequence: Synthetic oligonucleotide
  Target: LAMA2; (-) strand; PAM type: YTN; PAM sequence: TTA
aatccttaacacaaacagaa

SEQ ID NO: 211777 - DNA, 20 bp, Artificial Sequence
  Description of Artificial Sequence: Synthetic oligonucleotide
  Target: LAMA2; (-) strand; PAM type: YTN; PAM sequence: TTT
aaatccttaacacaaacaga

SEQ ID NO: 211778 - DNA, 20 bp, Artificial Sequence
  Description of Artificial Sequence: Synthetic oligonucleotide
  Target: LAMA2; (-) strand; PAM type: YTN; PAM sequence: TTT
taaatccttaacacaaacag

SEQ ID NO: 211779 - DNA, 20 bp, Artificial Sequence
  Description of Artificial Sequence: Synthetic oligonucleotide
  Target: LAMA2; (-) strand; PAM type: YTN; PAM sequence: TTT
ttaaatccttaacacaaaca

SEQ ID NO: 211780 - DNA, 20 bp, Artificial Sequence
  Description of Artificial Sequence: Synthetic oligonucleotide
  Target: LAMA2; (-) strand; PAM type: YTN; PAM sequence: TTT
tttaaatccttaacacaaac

SEQ ID NO: 211781 - DNA, 20 bp, Artificial Sequence
  Description of Artificial Sequence: Synthetic oligonucleotide
  Target: LAMA2; (-) strand; PAM type: YTN; PAM sequence: TTT
ttttaaatccttaacacaaa

SEQ ID NO: 211782 - DNA, 20 bp, Artificial Sequence
  Description of Artificial Sequence: Synthetic oligonucleotide
  Target: LAMA2; (-) strand; PAM type: YTN; PAM sequence: CTA
tttttttaaatccttaacac

SEQ ID NO: 211783 - DNA, 20 bp, Artificial Sequence
  Description of Artificial Sequence: Synthetic oligonucleotide
  Target: LAMA2; (-) strand; PAM type: YTN; PAM sequence: CTC
acgccactatttttttaaat

SEQ ID NO: 211784 - DNA, 20 bp, Artificial Sequence
  Description of Artificial Sequence: Synthetic oligonucleotide
  Target: LAMA2; (-) strand; PAM type: YTN; PAM sequence: TTC
tcacgccactatttttttaa

SEQ ID NO: 211785 - DNA, 20 bp, Artificial Sequence
  Description of Artificial Sequence: Synthetic oligonucleotide
  Target: LAMA2; (-) strand; PAM type: YTN; PAM sequence: TTG
aagagcaataaccattctca

SEQ ID NO: 211786 - DNA, 20 bp, Artificial Sequence
  Description of Artificial Sequence: Synthetic oligonucleotide
  Target: LAMA2; (-) strand; PAM type: YTN; PAM sequence: TTA
ttgaagagcaataaccattc

SEQ ID NO: 211787 - DNA, 20 bp, Artificial Sequence
  Description of Artificial Sequence: Synthetic oligonucleotide
  Target: LAMA2; (-) strand; PAM type: YTN; PAM sequence: TTT
attgaagagcaataaccatt

SEQ ID NO: 211788 - DNA, 20 bp, Artificial Sequence
  Description of Artificial Sequence: Synthetic oligonucleotide
  Target: LAMA2; (-) strand; PAM type: YTN; PAM sequence: CTT
tattgaagagcaataaccat

SEQ ID NO: 211789 - DNA, 20 bp, Artificial Sequence
  Description of Artificial Sequence: Synthetic oligonucleotide
  Target: LAMA2; (-) strand; PAM type: YTN; PAM sequence: CTA
tctttattgaagagcaataa

SEQ ID NO: 211790 - DNA, 20 bp, Artificial Sequence
  Description of Artificial Sequence: Synthetic oligonucleotide
  Target: LAMA2; (-) strand; PAM type: YTN; PAM sequence: CTC
tatctttattgaagagcaat

SEQ ID NO: 211791 - DNA, 20 bp, Artificial Sequence
  Description of Artificial Sequence: Synthetic oligonucleotide
  Target: LAMA2; (-) strand; PAM type: YTN; PAM sequence: TTA
aagcaaaacgtggtatctct

SEQ ID NO: 211792 - DNA, 20 bp, Artificial Sequence
  Description of Artificial Sequence: Synthetic oligonucleotide
  Target: LAMA2; (-) strand; PAM type: YTN; PAM sequence: CTA
gatatgttaaagcaaaacgt

SEQ ID NO: 211793 - DNA, 20 bp, Artificial Sequence
  Description of Artificial Sequence: Synthetic oligonucleotide
  Target: LAMA2; (-) strand; PAM type: YTN; PAM sequence: CTC
tagatatgttaaagcaaaac

SEQ ID NO: 211794 - DNA, 20 bp, Artificial Sequence
  Description of Artificial Sequence: Synthetic oligonucleotide
  Target: LAMA2; (-) strand; PAM type: YTN; PAM sequence: TTG
cctctagatatgttaaagca

SEQ ID NO: 211795 - DNA, 20 bp, Artificial Sequence
  Description of Artificial Sequence: Synthetic oligonucleotide
  Target: LAMA2; (-) strand; PAM type: YTN; PAM sequence: CTA
tcgatgaaaaagttgcctct

SEQ ID NO: 211796 - DNA, 20 bp, Artificial Sequence
  Description of Artificial Sequence: Synthetic oligonucleotide
  Target: LAMA2; (-) strand; PAM type: YTN; PAM sequence: CTA
ataaagctatcgatgaaaaa

SEQ ID NO: 211797 - DNA, 20 bp, Artificial Sequence
  Description of Artificial Sequence: Synthetic oligonucleotide
  Target: LAMA2; (-) strand; PAM type: YTN; PAM sequence: CTA
ctaataaagctatcgatgaa

SEQ ID NO: 211798 - DNA, 20 bp, Artificial Sequence
  Description of Artificial Sequence: Synthetic oligonucleotide
  Target: LAMA2; (-) strand; PAM type: YTN; PAM sequence: TTG
acctactaataaagctatcg

SEQ ID NO: 211799 - DNA, 20 bp, Artificial Sequence
  Description of Artificial Sequence: Synthetic oligonucleotide
  Target: LAMA2; (-) strand; PAM type: YTN; PAM sequence: CTT
gacctactaataaagctatc

SEQ ID NO: 211800 - DNA, 20 bp, Artificial Sequence
  Description of Artificial Sequence: Synthetic oligonucleotide
  Target: LAMA2; (-) strand; PAM type: YTN; PAM sequence: CTC
cttgacctactaataaagct

SEQ ID NO: 211801 - DNA, 20 bp, Artificial Sequence
  Description of Artificial Sequence: Synthetic oligonucleotide
  Target: LAMA2; (-) strand; PAM type: YTN; PAM sequence: TTC
tccttgacctactaataaag

SEQ ID NO: 211802 - DNA, 20 bp, Artificial Sequence
  Description of Artificial Sequence: Synthetic oligonucleotide
  Target: LAMA2; (-) strand; PAM type: YTN; PAM sequence: TTT
ctccttgacctactaataaa

SEQ ID NO: 211803 - DNA, 20 bp, Artificial Sequence
  Description of Artificial Sequence: Synthetic oligonucleotide
  Target: LAMA2; (-) strand; PAM type: YTN; PAM sequence: TTA
ggtatgatttctccttgacc

SEQ ID NO: 211804 - DNA, 20 bp, Artificial Sequence
  Description of Artificial Sequence: Synthetic oligonucleotide
  Target: LAMA2; (-) strand; PAM type: YTN; PAM sequence: CTT
aggtatgatttctccttgac

SEQ ID NO: 211805 - DNA, 20 bp, Artificial Sequence
  Description of Artificial Sequence: Synthetic oligonucleotide
  Target: LAMA2; (-) strand; PAM type: YTN; PAM sequence: CTA
cttaggtatgatttctcctt

SEQ ID NO: 211806 - DNA, 20 bp, Artificial Sequence
  Description of Artificial Sequence: Synthetic oligonucleotide
  Target: LAMA2; (-) strand; PAM type: YTN; PAM sequence: TTC
tacttaggtatgatttctcc

SEQ ID NO: 211807 - DNA, 20 bp, Artificial Sequence
  Description of Artificial Sequence: Synthetic oligonucleotide
  Target: LAMA2; (-) strand; PAM type: YTN; PAM sequence: TTT
ctacttaggtatgatttctc

SEQ ID NO: 211808 - DNA, 20 bp, Artificial Sequence
  Description of Artificial Sequence: Synthetic oligonucleotide
  Target: LAMA2; (-) strand; PAM type: YTN; PAM sequence: CTT
tctacttaggtatgatttct

SEQ ID NO: 211809 - DNA, 20 bp, Artificial Sequence
  Description of Artificial Sequence: Synthetic oligonucleotide
  Target: LAMA2; (-) strand; PAM type: YTN; PAM sequence: CTC
cacggacctttctacttagg

SEQ ID NO: 211810 - DNA, 20 bp, Artificial Sequence
  Description of Artificial Sequence: Synthetic oligonucleotide
  Target: LAMA2; (-) strand; PAM type: YTN; PAM sequence: TTC
tccacggacctttctactta

SEQ ID NO: 211811 - DNA, 20 bp, Artificial Sequence
  Description of Artificial Sequence: Synthetic oligonucleotide
  Target: LAMA2; (-) strand; PAM type: YTN; PAM sequence: TTT
ctccacggacctttctactt

SEQ ID NO: 211812 - DNA, 20 bp, Artificial Sequence
  Description of Artificial Sequence: Synthetic oligonucleotide
  Target: LAMA2; (-) strand; PAM type: YTN; PAM sequence: TTT
tctccacggacctttctact

SEQ ID NO: 211813 - DNA, 20 bp, Artificial Sequence
  Description of Artificial Sequence: Synthetic oligonucleotide
  Target: LAMA2; (-) strand; PAM type: YTN; PAM sequence: CTT
ttctccacggacctttctac

SEQ ID NO: 211814 - DNA, 20 bp, Artificial Sequence
  Description of Artificial Sequence: Synthetic oligonucleotide
  Target: LAMA2; (-) strand; PAM type: YTN; PAM sequence: CTC
ttttctccacggacctttct

SEQ ID NO: 211815 - DNA, 20 bp, Artificial Sequence
  Description of Artificial Sequence: Synthetic oligonucleotide
  Target: LAMA2; (-) strand; PAM type: YTN; PAM sequence: TTG
tctcttttctccacggacct

SEQ ID NO: 211816 - DNA, 20 bp, Artificial Sequence
  Description of Artificial Sequence: Synthetic oligonucleotide
  Target: LAMA2; (-) strand; PAM type: YTN; PAM sequence: TTT
gtctcttttctccacggacc

SEQ ID NO: 211817 - DNA, 20 bp, Artificial Sequence
  Description of Artificial Sequence: Synthetic oligonucleotide
  Target: LAMA2; (-) strand; PAM type: YTN; PAM sequence: CTG
atatggtttgtctcttttct

SEQ ID NO: 211818 - DNA, 20 bp, Artificial Sequence
  Description of Artificial Sequence: Synthetic oligonucleotide
  Target: LAMA2; (-) strand; PAM type: YTN; PAM sequence: CTC
tgatatggtttgtctctttt

SEQ ID NO: 211819 - DNA, 20 bp, Artificial Sequence
  Description of Artificial Sequence: Synthetic oligonucleotide
  Target: LAMA2; (-) strand; PAM type: YTN; PAM sequence: TTA
actctgatatggtttgtctc

SEQ ID NO: 211820 - DNA, 20 bp, Artificial Sequence
  Description of Artificial Sequence: Synthetic oligonucleotide
  Target: LAMA2; (-) strand; PAM type: YTN; PAM sequence: TTT
aactctgatatggtttgtct

SEQ ID NO: 211821 - DNA, 20 bp, Artificial Sequence
  Description of Artificial Sequence: Synthetic oligonucleotide
  Target: LAMA2; (-) strand; PAM type: YTN; PAM sequence: TTT
taactctgatatggtttgtc

SEQ ID NO: 211822 - DNA, 20 bp, Artificial Sequence
  Description of Artificial Sequence: Synthetic oligonucleotide
  Target: LAMA2; (-) strand; PAM type: YTN; PAM sequence: TTA
attttaactctgatatggtt

SEQ ID NO: 211823 - DNA, 20 bp, Artificial Sequence
  Description of Artificial Sequence: Synthetic oligonucleotide
  Target: LAMA2; (-) strand; PAM type: YTN; PAM sequence: TTT
aattttaactctgatatggt

SEQ ID NO: 211824 - DNA, 20 bp, Artificial Sequence
  Description of Artificial Sequence: Synthetic oligonucleotide
  Target: LAMA2; (-) strand; PAM type: YTN; PAM sequence: TTC
aatttaattttaactctgat

SEQ ID NO: 211825 - DNA, 20 bp, Artificial Sequence
  Description of Artificial Sequence: Synthetic oligonucleotide
  Target: LAMA2; (-) strand; PAM type: YTN; PAM sequence: TTT
caatttaattttaactctga

SEQ ID NO: 211826 - DNA, 20 bp, Artificial Sequence
  Description of Artificial Sequence: Synthetic oligonucleotide
  Target: LAMA2; (-) strand; PAM type: YTN; PAM sequence: TTT
tcaatttaattttaactctg

SEQ ID NO: 211827 - DNA, 20 bp, Artificial Sequence
  Description of Artificial Sequence: Synthetic oligonucleotide
  Target: LAMA2; (-) strand; PAM type: YTN; PAM sequence: TTT
ttcaatttaattttaactct

SEQ ID NO: 211828 - DNA, 20 bp, Artificial Sequence
  Description of Artificial Sequence: Synthetic oligonucleotide
  Target: LAMA2; (-) strand; PAM type: YTN; PAM sequence: TTT
tttcaatttaattttaactc

SEQ ID NO: 211829 - DNA, 20 bp, Artificial Sequence
  Description of Artificial Sequence: Synthetic oligonucleotide
  Target: LAMA2; (-) strand; PAM type: YTN; PAM sequence: TTA
aattttttcaatttaatttt

SEQ ID NO: 211830 - DNA, 20 bp, Artificial Sequence
  Description of Artificial Sequence: Synthetic oligonucleotide
  Target: LAMA2; (-) strand; PAM type: YTN; PAM sequence: TTT
aaattttttcaatttaattt

SEQ ID NO: 211831 - DNA, 20 bp, Artificial Sequence
  Description of Artificial Sequence: Synthetic oligonucleotide
  Target: LAMA2; (-) strand; PAM type: YTN; PAM sequence: TTG
atttaaattttttcaattta

SEQ ID NO: 211832 - DNA, 20 bp, Artificial Sequence
  Description of Artificial Sequence: Synthetic oligonucleotide
  Target: LAMA2; (-) strand; PAM type: YTN; PAM sequence: CTT
gatttaaattttttcaattt

SEQ ID NO: 211833 - DNA, 20 bp, Artificial Sequence
  Description of Artificial Sequence: Synthetic oligonucleotide
  Target: LAMA2; (-) strand; PAM type: YTN; PAM sequence: TTC
cttgatttaaattttttcaa

SEQ ID NO: 211834 - DNA, 20 bp, Artificial Sequence
  Description of Artificial Sequence: Synthetic oligonucleotide
  Target: LAMA2; (-) strand; PAM type: YTN; PAM sequence: TTT
ccttgatttaaattttttca

SEQ ID NO: 211835 - DNA, 20 bp, Artificial Sequence
  Description of Artificial Sequence: Synthetic oligonucleotide
  Target: LAMA2; (-) strand; PAM type: YTN; PAM sequence: TTG
cacatcatatcgaaagaagt

SEQ ID NO: 211836 - DNA, 20 bp, Artificial Sequence
  Description of Artificial Sequence: Synthetic oligonucleotide
  Target: LAMA2; (-) strand; PAM type: YTN; PAM sequence: TTT
gcacatcatatcgaaagaag

SEQ ID NO: 211837 - DNA, 20 bp, Artificial Sequence
  Description of Artificial Sequence: Synthetic oligonucleotide
  Target: LAMA2; (-) strand; PAM type: YTN; PAM sequence: TTT
tgcacatcatatcgaaagaa

SEQ ID NO: 211838 - DNA, 20 bp, Artificial Sequence
  Description of Artificial Sequence: Synthetic oligonucleotide
  Target: LAMA2; (-) strand; PAM type: YTN; PAM sequence: TTA
aaatgcatgattttgcacat

SEQ ID NO: 211839 - DNA, 20 bp, Artificial Sequence
  Description of Artificial Sequence: Synthetic oligonucleotide
  Target: LAMA2; (-) strand; PAM type: YTN; PAM sequence: TTT
aaaatgcatgattttgcaca

SEQ ID NO: 211840 - DNA, 20 bp, Artificial Sequence
  Description of Artificial Sequence: Synthetic oligonucleotide
  Target: LAMA2; (-) strand; PAM type: YTN; PAM sequence: TTC
ccatttaaaatgcatgattt

SEQ ID NO: 211841 - DNA, 20 bp, Artificial Sequence
  Description of Artificial Sequence: Synthetic oligonucleotide
  Target: LAMA2; (-) strand; PAM type: YTN; PAM sequence: TTT
cccatttaaaatgcatgatt

SEQ ID NO: 211842 - DNA, 20 bp, Artificial Sequence
  Description of Artificial Sequence: Synthetic oligonucleotide
  Target: LAMA2; (-) strand; PAM type: YTN; PAM sequence: TTC
ccatttcccatttaaaatgc

SEQ ID NO: 211843 - DNA, 20 bp, Artificial Sequence
  Description of Artificial Sequence: Synthetic oligonucleotide
  Target: LAMA2; (-) strand; PAM type: YTN; PAM sequence: TTT
cccatttcccatttaaaatg

SEQ ID NO: 211844 - DNA, 20 bp, Artificial Sequence
  Description of Artificial Sequence: Synthetic oligonucleotide
  Target: LAMA2; (-) strand; PAM type: YTN; PAM sequence: CTA
tgaaatttcccatttcccat

SEQ ID NO: 211845 - DNA, 20 bp, Artificial Sequence
  Description of Artificial Sequence: Synthetic oligonucleotide
  Target: LAMA2; (-) strand; PAM type: YTN; PAM sequence: CTA
agaagctatgaaatttccca

SEQ ID NO: 211846 - DNA, 20 bp, Artificial Sequence
  Description of Artificial Sequence: Synthetic oligonucleotide
  Target: LAMA2; (-) strand; PAM type: YTN; PAM sequence: TTG
ctaagaagctatgaaatttc

SEQ ID NO: 211847 - DNA, 20 bp, Artificial Sequence
  Description of Artificial Sequence: Synthetic oligonucleotide
  Target: LAMA2; (-) strand; PAM type: YTN; PAM sequence: CTC
acatcattgctaagaagcta

SEQ ID NO: 211848 - DNA, 20 bp, Artificial Sequence
  Description of Artificial Sequence: Synthetic oligonucleotide
  Target: LAMA2; (-) strand; PAM type: YTN; PAM sequence: CTG
catccacccagaccacagag

SEQ ID NO: 211849 - DNA, 20 bp, Artificial Sequence
  Description of Artificial Sequence: Synthetic oligonucleotide
  Target: LAMA2; (-) strand; PAM type: YTN; PAM sequence: TTA
aatgagcaaaagcacccaca

SEQ ID NO: 211850 - DNA, 20 bp, Artificial Sequence
  Description of Artificial Sequence: Synthetic oligonucleotide
  Target: LAMA2; (-) strand; PAM type: YTN; PAM sequence: CTT
aaatgagcaaaagcacccac

SEQ ID NO: 211851 - DNA, 20 bp, Artificial Sequence
  Description of Artificial Sequence: Synthetic oligonucleotide
  Target: LAMA2; (-) strand; PAM type: YTN; PAM sequence: TTC
cttaaatgagcaaaagcacc

SEQ ID NO: 211852 - DNA, 20 bp, Artificial Sequence
  Description of Artificial Sequence: Synthetic oligonucleotide
  Target: LAMA2; (-) strand; PAM type: YTN; PAM sequence: TTT
ccttaaatgagcaaaagcac

SEQ ID NO: 211853 - DNA, 20 bp, Artificial Sequence
  Description of Artificial Sequence: Synthetic oligonucleotide
  Target: LAMA2; (-) strand; PAM type: YTN; PAM sequence: TTC
aaatgcaatttccttaaatg

SEQ ID NO: 211854 - DNA, 20 bp, Artificial Sequence
  Description of Artificial Sequence: Synthetic oligonucleotide
  Target: LAMA2; (-) strand; PAM type: YTN; PAM sequence: TTT
caaatgcaatttccttaaat

SEQ ID NO: 211855 - DNA, 20 bp, Artificial Sequence
  Description of Artificial Sequence: Synthetic oligonucleotide
  Target: LAMA2; (-) strand; PAM type: YTN; PAM sequence: TTG
agaatgtttcaaatgcaatt

SEQ ID NO: 211856 - DNA, 20 bp, Artificial Sequence
  Description of Artificial Sequence: Synthetic oligonucleotide
  Target: LAMA2; (-) strand; PAM type: YTN; PAM sequence: CTA
cataatgtattgagaatgtt

SEQ ID NO: 211857 - DNA, 20 bp, Artificial Sequence
  Description of Artificial Sequence: Synthetic oligonucleotide
  Target: LAMA2; (-) strand; PAM type: YTN; PAM sequence: TTG
tggctacataatgtattgag

SEQ ID NO: 211858 - DNA, 20 bp, Artificial Sequence
  Description of Artificial Sequence: Synthetic oligonucleotide
  Target: LAMA2; (-) strand; PAM type: YTN; PAM sequence: CTT
gtggctacataatgtattga

SEQ ID NO: 211859 - DNA, 20 bp, Artificial Sequence
  Description of Artificial Sequence: Synthetic oligonucleotide
  Target: LAMA2; (-) strand; PAM type: YTN; PAM sequence: TTC
ttgtggctacataatgtatt

SEQ ID NO: 211860 - DNA, 20 bp, Artificial Sequence
  Description of Artificial Sequence: Synthetic oligonucleotide
  Target: LAMA2; (-) strand; PAM type: YTN; PAM sequence: TTT
cttgtggctacataatgtat

SEQ ID NO: 211861 - DNA, 20 bp, Artificial Sequence
  Description of Artificial Sequence: Synthetic oligonucleotide
  Target: LAMA2; (-) strand; PAM type: YTN; PAM sequence: TTT
tcttgtggctacataatgta

SEQ ID NO: 211862 - DNA, 20 bp, Artificial Sequence
  Description of Artificial Sequence: Synthetic oligonucleotide
  Target: LAMA2; (-) strand; PAM type: YTN; PAM sequence: CTA
taaattttcttgtggctaca

SEQ ID NO: 211863 - DNA, 20 bp, Artificial Sequence
  Description of Artificial Sequence: Synthetic oligonucleotide
  Target: LAMA2; (-) strand; PAM type: YTN; PAM sequence: TTC
caccaaaaagaaatcactat

SEQ ID NO: 211864 - DNA, 20 bp, Artificial Sequence
  Description of Artificial Sequence: Synthetic oligonucleotide
  Target: LAMA2; (-) strand; PAM type: YTN; PAM sequence: TTG
ttccaccaaaaagaaatcac

SEQ ID NO: 211865 - DNA, 20 bp, Artificial Sequence
  Description of Artificial Sequence: Synthetic oligonucleotide
  Target: LAMA2; (-) strand; PAM type: YTN; PAM sequence: TTT
gttccaccaaaaagaaatca

SEQ ID NO: 211866 - DNA, 20 bp, Artificial Sequence
  Description of Artificial Sequence: Synthetic oligonucleotide
  Target: LAMA2; (-) strand; PAM type: YTN; PAM sequence: CTT
tgttccaccaaaaagaaatc

SEQ ID NO: 211867 - DNA, 20 bp, Artificial Sequence
  Description of Artificial Sequence: Synthetic oligonucleotide
  Target: LAMA2; (-) strand; PAM type: YTN; PAM sequence: CTG
gaaaagagcatatactttgt

SEQ ID NO: 211868 - DNA, 20 bp, Artificial Sequence
  Description of Artificial Sequence: Synthetic oligonucleotide
  Target: LAMA2; (-) strand; PAM type: YTN; PAM sequence: CTG
agctggaaaagagcatatac

SEQ ID NO: 211869 - DNA, 20 bp, Artificial Sequence
  Description of Artificial Sequence: Synthetic oligonucleotide
  Target: LAMA2; (-) strand; PAM type: YTN; PAM sequence: CTG
gaaaaggatcctgagctgga

SEQ ID NO: 211870 - DNA, 20 bp, Artificial Sequence
  Description of Artificial Sequence: Synthetic oligonucleotide
  Target: LAMA2; (-) strand; PAM type: YTN; PAM sequence: TTA
agtgtaggaagactggaaaa

SEQ ID NO: 211871 - DNA, 20 bp, Artificial Sequence
  Description of Artificial Sequence: Synthetic oligonucleotide
  Target: LAMA2; (-) strand; PAM type: YTN; PAM sequence: CTG
ttaagtgtaggaagactgga

SEQ ID NO: 211872 - DNA, 20 bp, Artificial Sequence
  Description of Artificial Sequence: Synthetic oligonucleotide
  Target: LAMA2; (-) strand; PAM type: YTN; PAM sequence: CTG
gctgttaagtgtaggaagac

SEQ ID NO: 211873 - DNA, 20 bp, Artificial Sequence
  Description of Artificial Sequence: Synthetic oligonucleotide
  Target: LAMA2; (-) strand; PAM type: YTN; PAM sequence: TTG
tactggctgttaagtgtagg

SEQ ID NO: 211874 - DNA, 20 bp, Artificial Sequence
  Description of Artificial Sequence: Synthetic oligonucleotide
  Target: LAMA2; (-) strand; PAM type: YTN; PAM sequence: TTT
gtactggctgttaagtgtag

SEQ ID NO: 211875 - DNA, 20 bp, Artificial Sequence
  Description of Artificial Sequence: Synthetic oligonucleotide
  Target: LAMA2; (-) strand; PAM type: YTN; PAM sequence: CTA
agtttgtactggctgttaag

SEQ ID NO: 211876 - DNA, 20 bp, Artificial Sequence
  Description of Artificial Sequence: Synthetic oligonucleotide
  Target: LAMA2; (-) strand; PAM type: YTN; PAM sequence: CTA
tggactaagtttgtactggc

SEQ ID NO: 211877 - DNA, 20 bp, Artificial Sequence
  Description of Artificial Sequence: Synthetic oligonucleotide
  Target: LAMA2; (-) strand; PAM type: YTN; PAM sequence: TTC
tatggactaagtttgtactg

SEQ ID NO: 211878 - DNA, 20 bp, Artificial Sequence
  Description of Artificial Sequence: Synthetic oligonucleotide
  Target: LAMA2; (-) strand; PAM type: YTN; PAM sequence: CTG
tgcacaacaaatacgttcta

SEQ ID NO: 211879 - DNA, 20 bp, Artificial Sequence
  Description of Artificial Sequence: Synthetic oligonucleotide
  Target: LAMA2; (-) strand; PAM type: YTN; PAM sequence: TTG
tgcaggtctgtgcacaacaa

SEQ ID NO: 211880 - DNA, 20 bp, Artificial Sequence
  Description of Artificial Sequence: Synthetic oligonucleotide
  Target: LAMA2; (-) strand; PAM type: YTN; PAM sequence: TTT
gtgcaggtctgtgcacaaca

SEQ ID NO: 211881 - DNA, 20 bp, Artificial Sequence
  Description of Artificial Sequence: Synthetic oligonucleotide
  Target: LAMA2; (-) strand; PAM type: YTN; PAM sequence: TTG
catgtgtgtgtgtttgtgca

SEQ ID NO: 211882 - DNA, 20 bp, Artificial Sequence
  Description of Artificial Sequence: Synthetic oligonucleotide
  Target: LAMA2; (-) strand; PAM type: YTN; PAM sequence: CTT
gcatgtgtgtgtgtttgtgc

SEQ ID NO: 211883 - DNA, 20 bp, Artificial Sequence
  Description of Artificial Sequence: Synthetic oligonucleotide
  Target: LAMA2; (-) strand; PAM type: YTN; PAM sequence: TTC
gtgaaaccttgcatgtgtgt

SEQ ID NO: 211884 - DNA, 20 bp, Artificial Sequence
  Description of Artificial Sequence: Synthetic oligonucleotide
  Target: LAMA2; (-) strand; PAM type: YTN; PAM sequence: CTG
attcgtgaaaccttgcatgt

SEQ ID NO: 211885 - DNA, 20 bp, Artificial Sequence
  Description of Artificial Sequence: Synthetic oligonucleotide
  Target: LAMA2; (-) strand; PAM type: YTN; PAM sequence: TTG
acacatacacaaaatacata

SEQ ID NO: 211886 - DNA, 20 bp, Artificial Sequence
  Description of Artificial Sequence: Synthetic oligonucleotide
  Target: LAMA2; (-) strand; PAM type: YTN; PAM sequence: TTT
gacacatacacaaaatacat

SEQ ID NO: 211887 - DNA, 20 bp, Artificial Sequence
  Description of Artificial Sequence: Synthetic oligonucleotide
  Target: LAMA2; (-) strand; PAM type: YTN; PAM sequence: CTA
agtttgacacatacacaaaa

SEQ ID NO: 211888 - DNA, 20 bp, Artificial Sequence
  Description of Artificial Sequence: Synthetic oligonucleotide
  Target: LAMA2; (-) strand; PAM type: YTN; PAM sequence: TTG
atggctaagtttgacacata

SEQ ID NO: 211889 - DNA, 20 bp, Artificial Sequence
  Description of Artificial Sequence: Synthetic oligonucleotide
  Target: LAMA2; (-) strand; PAM type: YTN; PAM sequence: TTC
cagttgatggctaagtttga

SEQ ID NO: 211890 - DNA, 20 bp, Artificial Sequence
  Description of Artificial Sequence: Synthetic oligonucleotide
  Target: LAMA2; (-) strand; PAM type: YTN; PAM sequence: CTA
aaacacaaattccagttgat

SEQ ID NO: 211891 - DNA, 20 bp, Artificial Sequence
  Description of Artificial Sequence: Synthetic oligonucleotide
  Target: LAMA2; (-) strand; PAM type: YTN; PAM sequence: CTG
atgaggtaaatcagcatcca

SEQ ID NO: 211892 - DNA, 20 bp, Artificial Sequence
  Description of Artificial Sequence: Synthetic oligonucleotide
  Target: LAMA2; (-) strand; PAM type: YTN; PAM sequence: TTA
ctgatgaggtaaatcagcat

SEQ ID NO: 211893 - DNA, 20 bp, Artificial Sequence
  Description of Artificial Sequence: Synthetic oligonucleotide
  Target: LAMA2; (-) strand; PAM type: YTN; PAM sequence: TTT
actgatgaggtaaatcagca

SEQ ID NO: 211894 - DNA, 20 bp, Artificial Sequence
  Description of Artificial Sequence: Synthetic oligonucleotide
  Target: LAMA2; (-) strand; PAM type: YTN; PAM sequence: TTT
tactgatgaggtaaatcagc

SEQ ID NO: 211895 - DNA, 20 bp, Artificial Sequence
  Description of Artificial Sequence: Synthetic oligonucleotide
  Target: LAMA2; (-) strand; PAM type: YTN; PAM sequence: CTA
gggagagtaagtgaagggca

SEQ ID NO: 211896 - DNA, 20 bp, Artificial Sequence
  Description of Artificial Sequence: Synthetic oligonucleotide
  Target: LAMA2; (-) strand; PAM type: YTN; PAM sequence: CTA
tgtctagggagagtaagtga

SEQ ID NO: 211897 - DNA, 20 bp, Artificial Sequence
  Description of Artificial Sequence: Synthetic oligonucleotide
  Target: LAMA2; (-) strand; PAM type: YTN; PAM sequence: TTA
cggaaaatagtctatgtcta

SEQ ID NO: 211898 - DNA, 20 bp, Artificial Sequence
  Description of Artificial Sequence: Synthetic oligonucleotide
  Target: LAMA2; (-) strand; PAM type: YTN; PAM sequence: TTT
acggaaaatagtctatgtct

SEQ ID NO: 211899 - DNA, 20 bp, Artificial Sequence
  Description of Artificial Sequence: Synthetic oligonucleotide
  Target: LAMA2; (-) strand; PAM type: YTN; PAM sequence: TTT
tacggaaaatagtctatgtc

SEQ ID NO: 211900 - DNA, 20 bp, Artificial Sequence
  Description of Artificial Sequence: Synthetic oligonucleotide
  Target: LAMA2; (-) strand; PAM type: YTN; PAM sequence: CTA
acatattttacggaaaatag

SEQ ID NO: 211901 - DNA, 20 bp, Artificial Sequence
  Description of Artificial Sequence: Synthetic oligonucleotide
  Target: LAMA2; (-) strand; PAM type: YTN; PAM sequence: TTA
aatatgaaatcactaacata

SEQ ID NO: 211902 - DNA, 20 bp, Artificial Sequence
  Description of Artificial Sequence: Synthetic oligonucleotide
  Target: LAMA2; (-) strand; PAM type: YTN; PAM sequence: TTC
catatcacattaaatatgaa

SEQ ID NO: 211903 - DNA, 20 bp, Artificial Sequence
  Description of Artificial Sequence: Synthetic oligonucleotide
  Target: LAMA2; (-) strand; PAM type: YTN; PAM sequence: CTA
ttccatatcacattaaatat

SEQ ID NO: 211904 - DNA, 20 bp, Artificial Sequence
  Description of Artificial Sequence: Synthetic oligonucleotide
  Target: LAMA2; (-) strand; PAM type: YTN; PAM sequence: TTC
tattccatatcacattaaat

SEQ ID NO: 211905 - DNA, 20 bp, Artificial Sequence
  Description of Artificial Sequence: Synthetic oligonucleotide
  Target: LAMA2; (-) strand; PAM type: YTN; PAM sequence: CTC
attctattccatatcacatt

SEQ ID NO: 211906 - DNA, 20 bp, Artificial Sequence
  Description of Artificial Sequence: Synthetic oligonucleotide
  Target: LAMA2; (-) strand; PAM type: YTN; PAM sequence: CTC
tcattctattccatatcaca

SEQ ID NO: 211907 - DNA, 20 bp, Artificial Sequence
  Description of Artificial Sequence: Synthetic oligonucleotide
  Target: LAMA2; (-) strand; PAM type: YTN; PAM sequence: TTC
acacaacctctcattctatt

SEQ ID NO: 211908 - DNA, 20 bp, Artificial Sequence
  Description of Artificial Sequence: Synthetic oligonucleotide
  Target: LAMA2; (-) strand; PAM type: YTN; PAM sequence: TTT
cacacaacctctcattctat

SEQ ID NO: 211909 - DNA, 20 bp, Artificial Sequence
  Description of Artificial Sequence: Synthetic oligonucleotide
  Target: LAMA2; (-) strand; PAM type: YTN; PAM sequence: TTA
atttcacacaacctctcatt

SEQ ID NO: 211910 - DNA, 20 bp, Artificial Sequence
  Description of Artificial Sequence: Synthetic oligonucleotide
  Target: LAMA2; (-) strand; PAM type: YTN; PAM sequence: TTT
aatttcacacaacctctcat

SEQ ID NO: 211911 - DNA, 20 bp, Artificial Sequence
  Description of Artificial Sequence: Synthetic oligonucleotide
  Target: LAMA2; (-) strand; PAM type: YTN; PAM sequence: TTT
taatttcacacaacctctca

SEQ ID NO: 211912 - DNA, 20 bp, Artificial Sequence
  Description of Artificial Sequence: Synthetic oligonucleotide
  Target: LAMA2; (-) strand; PAM type: YTN; PAM sequence: TTG
atatcatgattttaatttca

SEQ ID NO: 211913 - DNA, 20 bp, Artificial Sequence
  Description of Artificial Sequence: Synthetic oligonucleotide
  Target: LAMA2; (-) strand; PAM type: YTN; PAM sequence: CTG
catgacagaaagataattga

SEQ ID NO: 211914 - DNA, 20 bp, Artificial Sequence
  Description of Artificial Sequence: Synthetic oligonucleotide
  Target: LAMA2; (-) strand; PAM type: YTN; PAM sequence: TTC
tgcatgacagaaagataatt

SEQ ID NO: 211915 - DNA, 20 bp, Artificial Sequence
  Description of Artificial Sequence: Synthetic oligonucleotide
  Target: LAMA2; (-) strand; PAM type: YTN; PAM sequence: TTA
ttctgcatgacagaaagata

SEQ ID NO: 211916 - DNA, 20 bp, Artificial Sequence
  Description of Artificial Sequence: Synthetic oligonucleotide
  Target: LAMA2; (-) strand; PAM type: YTN; PAM sequence: TTT
attctgcatgacagaaagat

SEQ ID NO: 211917 - DNA, 20 bp, Artificial Sequence
  Description of Artificial Sequence: Synthetic oligonucleotide
  Target: LAMA2; (-) strand; PAM type: YTN; PAM sequence: TTT
tattctgcatgacagaaaga

SEQ ID NO: 211918 - DNA, 20 bp, Artificial Sequence
  Description of Artificial Sequence: Synthetic oligonucleotide
  Target: LAMA2; (-) strand; PAM type: YTN; PAM sequence: TTA
ttttattctgcatgacagaa

SEQ ID NO: 211919 - DNA, 20 bp, Artificial Sequence
  Description of Artificial Sequence: Synthetic oligonucleotide
  Target: LAMA2; (-) strand; PAM type: YTN; PAM sequence: CTT
attttattctgcatgacaga

SEQ ID NO: 211920 - DNA, 20 bp, Artificial Sequence
  Description of Artificial Sequence: Synthetic oligonucleotide
  Target: LAMA2; (-) strand; PAM type: YTN; PAM sequence: TTG
tcaaaacacttattttattc

SEQ ID NO: 211921 - DNA, 20 bp, Artificial Sequence
  Description of Artificial Sequence: Synthetic oligonucleotide
  Target: LAMA2; (-) strand; PAM type: YTN; PAM sequence: CTT
gtcaaaacacttattttatt

SEQ ID NO: 211922 - DNA, 20 bp, Artificial Sequence
  Description of Artificial Sequence: Synthetic oligonucleotide
  Target: LAMA2; (-) strand; PAM type: YTN; PAM sequence: TTA
tatcttgtcaaaacacttat

SEQ ID NO: 211923 - DNA, 20 bp, Artificial Sequence
  Description of Artificial Sequence: Synthetic oligonucleotide
  Target: LAMA2; (-) strand; PAM type: YTN; PAM sequence: TTT
atatcttgtcaaaacactta

SEQ ID NO: 211924 - DNA, 20 bp, Artificial Sequence
  Description of Artificial Sequence: Synthetic oligonucleotide
  Target: LAMA2; (-) strand; PAM type: YTN; PAM sequence: TTT
tatatcttgtcaaaacactt

SEQ ID NO: 211925 - DNA, 20 bp, Artificial Sequence
  Description of Artificial Sequence: Synthetic oligonucleotide
  Target: LAMA2; (-) strand; PAM type: YTN; PAM sequence: TTT
ttatatcttgtcaaaacact

SEQ ID NO: 211926 - DNA, 20 bp, Artificial Sequence
  Description of Artificial Sequence: Synthetic oligonucleotide
  Target: LAMA2; (-) strand; PAM type: YTN; PAM sequence: TTT
tttatatcttgtcaaaacac

SEQ ID NO: 211927 - DNA, 20 bp, Artificial Sequence
  Description of Artificial Sequence: Synthetic oligonucleotide
  Target: LAMA2; (-) strand; PAM type: YTN; PAM sequence: TTA
ccataaatattttttatatc

SEQ ID NO: 211928 - DNA, 20 bp, Artificial Sequence
  Description of Artificial Sequence: Synthetic oligonucleotide
  Target: LAMA2; (-) strand; PAM type: YTN; PAM sequence: TTA
attaccataaatatttttta

SEQ ID NO: 211929 - DNA, 20 bp, Artificial Sequence
  Description of Artificial Sequence: Synthetic oligonucleotide
  Target: LAMA2; (-) strand; PAM type: YTN; PAM sequence: CTT
aattaccataaatatttttt

SEQ ID NO: 211930 - DNA, 20 bp, Artificial Sequence
  Description of Artificial Sequence: Synthetic oligonucleotide
  Target: LAMA2; (-) strand; PAM type: YTN; PAM sequence: CTG
atacagtatgaatgtactta

SEQ ID NO: 211931 - DNA, 20 bp, Artificial Sequence
  Description of Artificial Sequence: Synthetic oligonucleotide
  Target: LAMA2; (-) strand; PAM type: YTN; PAM sequence: TTA
gctgatacagtatgaatgta

SEQ ID NO: 211932 - DNA, 20 bp, Artificial Sequence
  Description of Artificial Sequence: Synthetic oligonucleotide
  Target: LAMA2; (-) strand; PAM type: YTN; PAM sequence: TTT
agctgatacagtatgaatgt

SEQ ID NO: 211933 - DNA, 20 bp, Artificial Sequence
  Description of Artificial Sequence: Synthetic oligonucleotide
  Target: LAMA2; (-) strand; PAM type: YTN; PAM sequence: CTA
caaatttagctgatacagta

SEQ ID NO: 211934 - DNA, 20 bp, Artificial Sequence
  Description of Artificial Sequence: Synthetic oligonucleotide
  Target: LAMA2; (-) strand; PAM type: YTN; PAM sequence: TTC
tacaaatttagctgatacag

SEQ ID NO: 211935 - DNA, 20 bp, Artificial Sequence
  Description of Artificial Sequence: Synthetic oligonucleotide
  Target: LAMA2; (-) strand; PAM type: YTN; PAM sequence: TTA
atacagaaatcaatattcta

SEQ ID NO: 211936 - DNA, 20 bp, Artificial Sequence
  Description of Artificial Sequence: Synthetic oligonucleotide
  Target: LAMA2; (-) strand; PAM type: YTN; PAM sequence: TTT
aatacagaaatcaatattct

SEQ ID NO: 211937 - DNA, 20 bp, Artificial Sequence
  Description of Artificial Sequence: Synthetic oligonucleotide
  Target: LAMA2; (-) strand; PAM type: YTN; PAM sequence: TTA
cataatttaatacagaaatc

SEQ ID NO: 211938 - DNA, 20 bp, Artificial Sequence
  Description of Artificial Sequence: Synthetic oligonucleotide
  Target: LAMA2; (-) strand; PAM type: YTN; PAM sequence: TTA
aaatgttacataatttaata

SEQ ID NO: 211939 - DNA, 20 bp, Artificial Sequence
  Description of Artificial Sequence: Synthetic oligonucleotide
  Target: LAMA2; (-) strand; PAM type: YTN; PAM sequence: TTA
attaaaatgttacataattt

SEQ ID NO: 211940 - DNA, 20 bp, Artificial Sequence
  Description of Artificial Sequence: Synthetic oligonucleotide
  Target: LAMA2; (-) strand; PAM type: YTN; PAM sequence: TTT
aattaaaatgttacataatt

SEQ ID NO: 211941 - DNA, 20 bp, Artificial Sequence
  Description of Artificial Sequence: Synthetic oligonucleotide
  Target: LAMA2; (-) strand; PAM type: YTN; PAM sequence: TTT
taattaaaatgttacataat

SEQ ID NO: 211942 - DNA, 20 bp, Artificial Sequence
  Description of Artificial Sequence: Synthetic oligonucleotide
  Target: LAMA2; (-) strand; PAM type: YTN; PAM sequence: TTA
ttttaattaaaatgttacat

SEQ ID NO: 211943 - DNA, 20 bp, Artificial Sequence
  Description of Artificial Sequence: Synthetic oligonucleotide
  Target: LAMA2; (-) strand; PAM type: YTN; PAM sequence: TTT
attttaattaaaatgttaca

SEQ ID NO: 211944 - DNA, 20 bp, Artificial Sequence
  Description of Artificial Sequence: Synthetic oligonucleotide
  Target: LAMA2; (-) strand; PAM type: YTN; PAM sequence: CTC
gacaatatatttattttaat

SEQ ID NO: 211945 - DNA, 20 bp, Artificial Sequence
  Description of Artificial Sequence: Synthetic oligonucleotide
  Target: LAMA2; (-) strand; PAM type: YTN; PAM sequence: CTC
acaactcgacaatatattta

SEQ ID NO: 211946 - DNA, 20 bp, Artificial Sequence
  Description of Artificial Sequence: Synthetic oligonucleotide
  Target: LAMA2; (-) strand; PAM type: YTN; PAM sequence: CTG
ctcacaactcgacaatatat

SEQ ID NO: 211947 - DNA, 20 bp, Artificial Sequence
  Description of Artificial Sequence: Synthetic oligonucleotide
  Target: LAMA2; (-) strand; PAM type: YTN; PAM sequence: CTG
tgctgctcacaactcgacaa

SEQ ID NO: 211948 - DNA, 20 bp, Artificial Sequence
  Description of Artificial Sequence: Synthetic oligonucleotide
  Target: LAMA2; (-) strand; PAM type: YTN; PAM sequence: TTA
ccactgtgctgctcacaact

SEQ ID NO: 211949 - DNA, 20 bp, Artificial Sequence
  Description of Artificial Sequence: Synthetic oligonucleotide
  Target: LAMA2; (-) strand; PAM type: YTN; PAM sequence: CTT
accactgtgctgctcacaac

SEQ ID NO: 211950 - DNA, 20 bp, Artificial Sequence
  Description of Artificial Sequence: Synthetic oligonucleotide
  Target: LAMA2; (-) strand; PAM type: YTN; PAM sequence: TTC
ttaccactgtgctgctcaca

SEQ ID NO: 211951 - DNA, 20 bp, Artificial Sequence
  Description of Artificial Sequence: Synthetic oligonucleotide
  Target: LAMA2; (-) strand; PAM type: YTN; PAM sequence: TTC
atgcaaaatattcttaccac

SEQ ID NO: 211952 - DNA, 20 bp, Artificial Sequence
  Description of Artificial Sequence: Synthetic oligonucleotide
  Target: LAMA2; (-) strand; PAM type: YTN; PAM sequence: CTT
catgcaaaatattcttacca

SEQ ID NO: 211953 - DNA, 20 bp, Artificial Sequence
  Description of Artificial Sequence: Synthetic oligonucleotide
  Target: LAMA2; (-) strand; PAM type: YTN; PAM sequence: TTA
tgtaaccatcttcatgcaaa

SEQ ID NO: 211954 - DNA, 20 bp, Artificial Sequence
  Description of Artificial Sequence: Synthetic oligonucleotide
  Target: LAMA2; (-) strand; PAM type: YTN; PAM sequence: TTT
atgtaaccatcttcatgcaa

SEQ ID NO: 211955 - DNA, 20 bp, Artificial Sequence
  Description of Artificial Sequence: Synthetic oligonucleotide
  Target: LAMA2; (-) strand; PAM type: YTN; PAM sequence: TTA
gtgcatatttatgtaaccat

SEQ ID NO: 211956 - DNA, 20 bp, Artificial Sequence
  Description of Artificial Sequence: Synthetic oligonucleotide
  Target: LAMA2; (-) strand; PAM type: YTN; PAM sequence: TTT
agtgcatatttatgtaacca

SEQ ID NO: 211957 - DNA, 20 bp, Artificial Sequence
  Description of Artificial Sequence: Synthetic oligonucleotide
  Target: LAMA2; (-) strand; PAM type: YTN; PAM sequence: TTT
tagtgcatatttatgtaacc

SEQ ID NO: 211958 - DNA, 20 bp, Artificial Sequence
  Description of Artificial Sequence: Synthetic oligonucleotide
  Target: LAMA2; (-) strand; PAM type: YTN; PAM sequence: CTC
aattttagtgcatatttatg

SEQ ID NO: 211959 - DNA, 20 bp, Artificial Sequence
  Description of Artificial Sequence: Synthetic oligonucleotide
  Target: LAMA2; (-) strand; PAM type: YTN; PAM sequence: TTA
gactcaattttagtgcatat

SEQ ID NO: 211960 - DNA, 20 bp, Artificial Sequence
  Description of Artificial Sequence: Synthetic oligonucleotide
  Target: LAMA2; (-) strand; PAM type: YTN; PAM sequence: TTG
cagttagactcaattttagt

SEQ ID NO: 211961 - DNA, 20 bp, Artificial Sequence
  Description of Artificial Sequence: Synthetic oligonucleotide
  Target: LAMA2; (-) strand; PAM type: YTN; PAM sequence: TTT
gcagttagactcaattttag

SEQ ID NO: 211962 - DNA, 20 bp, Artificial Sequence
  Description of Artificial Sequence: Synthetic oligonucleotide
  Target: LAMA2; (-) strand; PAM type: YTN; PAM sequence: TTT
tgcagttagactcaatttta

SEQ ID NO: 211963 - DNA, 20 bp, Artificial Sequence
  Description of Artificial Sequence: Synthetic oligonucleotide
  Target: LAMA2; (-) strand; PAM type: YTN; PAM sequence: TTT
ttgcagttagactcaatttt

SEQ ID NO: 211964 - DNA, 20 bp, Artificial Sequence
  Description of Artificial Sequence: Synthetic oligonucleotide
  Target: LAMA2; (-) strand; PAM type: YTN; PAM sequence: TTT
tttgcagttagactcaattt

SEQ ID NO: 211965 - DNA, 20 bp, Artificial Sequence
  Description of Artificial Sequence: Synthetic oligonucleotide
  Target: LAMA2; (-) strand; PAM type: YTN; PAM sequence: TTT
ttttgcagttagactcaatt

SEQ ID NO: 211966 - DNA, 20 bp, Artificial Sequence
  Description of Artificial Sequence: Synthetic oligonucleotide
  Target: LAMA2; (-) strand; PAM type: YTN; PAM sequence: TTC
atttttttgcagttagactc

SEQ ID NO: 211967 - DNA, 20 bp, Artificial Sequence
  Description of Artificial Sequence: Synthetic oligonucleotide
  Target: LAMA2; (-) strand; PAM type: YTN; PAM sequence: CTG
cattcatttttttgcagtta

SEQ ID NO: 211968 - DNA, 20 bp, Artificial Sequence
  Description of Artificial Sequence: Synthetic oligonucleotide
  Target: LAMA2; (-) strand; PAM type: YTN; PAM sequence: CTA
ctgcattcatttttttgcag

SEQ ID NO: 211969 - DNA, 20 bp, Artificial Sequence
  Description of Artificial Sequence: Synthetic oligonucleotide
  Target: LAMA2; (-) strand; PAM type: YTN; PAM sequence: CTA
aatgtgtagctactgcattc

SEQ ID NO: 211970 - DNA, 20 bp, Artificial Sequence
  Description of Artificial Sequence: Synthetic oligonucleotide
  Target: LAMA2; (-) strand; PAM type: YTN; PAM sequence: TTC
taaatgtgtagctactgcat

SEQ ID NO: 211971 - DNA, 20 bp, Artificial Sequence
  Description of Artificial Sequence: Synthetic oligonucleotide
  Target: LAMA2; (-) strand; PAM type: YTN; PAM sequence: TTT
ctaaatgtgtagctactgca

SEQ ID NO: 211972 - DNA, 20 bp, Artificial Sequence
  Description of Artificial Sequence: Synthetic oligonucleotide
  Target: LAMA2; (-) strand; PAM type: YTN; PAM sequence: CTT
tctaaatgtgtagctactgc

SEQ ID NO: 211973 - DNA, 20 bp, Artificial Sequence
  Description of Artificial Sequence: Synthetic oligonucleotide
  Target: LAMA2; (-) strand; PAM type: YTN; PAM sequence: TTC
tttctaaatgtgtagctact

SEQ ID NO: 211974 - DNA, 20 bp, Artificial Sequence
  Description of Artificial Sequence: Synthetic oligonucleotide
  Target: LAMA2; (-) strand; PAM type: YTN; PAM sequence: CTT
ctttctaaatgtgtagctac

SEQ ID NO: 211975 - DNA, 20 bp, Artificial Sequence
  Description of Artificial Sequence: Synthetic oligonucleotide
  Target: LAMA2; (-) strand; PAM type: YTN; PAM sequence: TTA
gaacttctttctaaatgtgt

SEQ ID NO: 211976 - DNA, 20 bp, Artificial Sequence
  Description of Artificial Sequence: Synthetic oligonucleotide
  Target: LAMA2; (-) strand; PAM type: YTN; PAM sequence: CTT
agaacttctttctaaatgtg

SEQ ID NO: 211977 - DNA, 20 bp, Artificial Sequence
  Description of Artificial Sequence: Synthetic oligonucleotide
  Target: LAMA2; (-) strand; PAM type: YTN; PAM sequence: TTC
ttagaacttctttctaaatg

SEQ ID NO: 211978 - DNA, 20 bp, Artificial Sequence
  Description of Artificial Sequence: Synthetic oligonucleotide
  Target: LAMA2; (-) strand; PAM type: YTN; PAM sequence: TTA
ttcttagaacttctttctaa

SEQ ID NO: 211979 - DNA, 20 bp, Artificial Sequence
  Description of Artificial Sequence: Synthetic oligonucleotide
  Target: LAMA2; (-) strand; PAM type: YTN; PAM sequence: TTT
attcttagaacttctttcta

SEQ ID NO: 211980 - DNA, 20 bp, Artificial Sequence
  Description of Artificial Sequence: Synthetic oligonucleotide
  Target: LAMA2; (-) strand; PAM type: YTN; PAM sequence: CTT
tattcttagaacttctttct

SEQ ID NO: 211981 - DNA, 20 bp, Artificial Sequence
  Description of Artificial Sequence: Synthetic oligonucleotide
  Target: LAMA2; (-) strand; PAM type: YTN; PAM sequence: CTG
ctttattcttagaacttctt

SEQ ID NO: 211982 - DNA, 20 bp, Artificial Sequence
  Description of Artificial Sequence: Synthetic oligonucleotide
  Target: LAMA2; (-) strand; PAM type: YTN; PAM sequence: TTG
taaactgctttattcttaga

SEQ ID NO: 211983 - DNA, 20 bp, Artificial Sequence
  Description of Artificial Sequence: Synthetic oligonucleotide
  Target: LAMA2; (-) strand; PAM type: YTN; PAM sequence: TTT
gtaaactgctttattcttag

SEQ ID NO: 211984 - DNA, 20 bp, Artificial Sequence
  Description of Artificial Sequence: Synthetic oligonucleotide
  Target: LAMA2; (-) strand; PAM type: YTN; PAM sequence: TTG
tttgtaaactgctttattct

SEQ ID NO: 211985 - DNA, 20 bp, Artificial Sequence
  Description of Artificial Sequence: Synthetic oligonucleotide
  Target: LAMA2; (-) strand; PAM type: YTN; PAM sequence: TTT
gtttgtaaactgctttattc

SEQ ID NO: 211986 - DNA, 20 bp, Artificial Sequence
  Description of Artificial Sequence: Synthetic oligonucleotide
  Target: LAMA2; (-) strand; PAM type: YTN; PAM sequence: CTA
tttgtttgtaaactgcttta

SEQ ID NO: 211987 - DNA, 20 bp, Artificial Sequence
  Description of Artificial Sequence: Synthetic oligonucleotide
  Target: LAMA2; (-) strand; PAM type: YTN; PAM sequence: CTA
acaaagcatatacatgtata

SEQ ID NO: 211988 - DNA, 20 bp, Artificial Sequence
  Description of Artificial Sequence: Synthetic oligonucleotide
  Target: LAMA2; (-) strand; PAM type: YTN; PAM sequence: TTC
taacaaagcatatacatgta

SEQ ID NO: 211989 - DNA, 20 bp, Artificial Sequence
  Description of Artificial Sequence: Synthetic oligonucleotide
  Target: LAMA2; (-) strand; PAM type: YTN; PAM sequence: CTT
ctaacaaagcatatacatgt

SEQ ID NO: 211990 - DNA, 20 bp, Artificial Sequence
  Description of Artificial Sequence: Synthetic oligonucleotide
  Target: LAMA2; (-) strand; PAM type: YTN; PAM sequence: TTC
ttctaacaaagcatatacat

SEQ ID NO: 211991 - DNA, 20 bp, Artificial Sequence
  Description of Artificial Sequence: Synthetic oligonucleotide
  Target: LAMA2; (-) strand; PAM type: YTN; PAM sequence: TTT
cttctaacaaagcatataca

SEQ ID NO: 211992 - DNA, 20 bp, Artificial Sequence
  Description of Artificial Sequence: Synthetic oligonucleotide
  Target: LAMA2; (-) strand; PAM type: YTN; PAM sequence: CTT
tcttctaacaaagcatatac

SEQ ID NO: 211993 - DNA, 20 bp, Artificial Sequence
  Description of Artificial Sequence: Synthetic oligonucleotide
  Target: LAMA2; (-) strand; PAM type: YTN; PAM sequence: CTC
tttcttctaacaaagcatat

SEQ ID NO: 211994 - DNA, 20 bp, Artificial Sequence
  Description of Artificial Sequence: Synthetic oligonucleotide
  Target: LAMA2; (-) strand; PAM type: YTN; PAM sequence: TTC
tctttcttctaacaaagcat

SEQ ID NO: 211995 - DNA, 20 bp, Artificial Sequence
  Description of Artificial Sequence: Synthetic oligonucleotide
  Target: LAMA2; (-) strand; PAM type: YTN; PAM sequence: CTC
acaataaattctctttcttc

SEQ ID NO: 211996 - DNA, 20 bp, Artificial Sequence
  Description of Artificial Sequence: Synthetic oligonucleotide
  Target: LAMA2; (-) strand; PAM type: YTN; PAM sequence: TTA
aagtatcccactcacaataa

SEQ ID NO: 211997 - DNA, 20 bp, Artificial Sequence
  Description of Artificial Sequence: Synthetic oligonucleotide
  Target: LAMA2; (-) strand; PAM type: YTN; PAM sequence: CTG
aaagagttaaagtatcccac

SEQ ID NO: 211998 - DNA, 20 bp, Artificial Sequence
  Description of Artificial Sequence: Synthetic oligonucleotide
  Target: LAMA2; (-) strand; PAM type: YTN; PAM sequence: TTA
acatctgaaagagttaaagt

SEQ ID NO: 211999 - DNA, 20 bp, Artificial Sequence
  Description of Artificial Sequence: Synthetic oligonucleotide
  Target: LAMA2; (-) strand; PAM type: YTN; PAM sequence: CTT
aacatctgaaagagttaaag

SEQ ID NO: 212000 - DNA, 20 bp, Artificial Sequence
  Description of Artificial Sequence: Synthetic oligonucleotide
  Target: LAMA2; (-) strand; PAM type: YTN; PAM sequence: TTG
ggaaatagaatccttaacat

SEQ ID NO: 212001 - DNA, 20 bp, Artificial Sequence
  Description of Artificial Sequence: Synthetic oligonucleotide
  Target: LAMA2; (-) strand; PAM type: YTN; PAM sequence: TTT
gggaaatagaatccttaaca

SEQ ID NO: 212002 - DNA, 20 bp, Artificial Sequence
  Description of Artificial Sequence: Synthetic oligonucleotide
  Target: LAMA2; (-) strand; PAM type: YTN; PAM sequence: TTA
tttgggaaatagaatcctta

SEQ ID NO: 212003 - DNA, 20 bp, Artificial Sequence
  Description of Artificial Sequence: Synthetic oligonucleotide
  Target: LAMA2; (-) strand; PAM type: YTN; PAM sequence: TTA
catgaatgaagttatttggg

SEQ ID NO: 212004 - DNA, 20 bp, Artificial Sequence
  Description of Artificial Sequence: Synthetic oligonucleotide
  Target: LAMA2; (-) strand; PAM type: YTN; PAM sequence: CTT
acatgaatgaagttatttgg

SEQ ID NO: 212005 - DNA, 20 bp, Artificial Sequence
  Description of Artificial Sequence: Synthetic oligonucleotide
  Target: LAMA2; (-) strand; PAM type: YTN; PAM sequence: TTC
ttacatgaatgaagttattt

SEQ ID NO: 212006 - DNA, 20 bp, Artificial Sequence
  Description of Artificial Sequence: Synthetic oligonucleotide
  Target: LAMA2; (-) strand; PAM type: YTN; PAM sequence: CTT
cttacatgaatgaagttatt

SEQ ID NO: 212007 - DNA, 20 bp, Artificial Sequence
  Description of Artificial Sequence: Synthetic oligonucleotide
  Target: LAMA2; (-) strand; PAM type: YTN; PAM sequence: CTC
acatgaaatatacttcttac

SEQ ID NO: 212008 - DNA, 20 bp, Artificial Sequence
  Description of Artificial Sequence: Synthetic oligonucleotide
  Target: LAMA2; (-) strand; PAM type: YTN; PAM sequence: CTG
actcacatgaaatatacttc

SEQ ID NO: 212009 - DNA, 20 bp, Artificial Sequence
  Description of Artificial Sequence: Synthetic oligonucleotide
  Target: LAMA2; (-) strand; PAM type: YTN; PAM sequence: CTA
gagaataaaacctgactcac

SEQ ID NO: 212010 - DNA, 20 bp, Artificial Sequence
  Description of Artificial Sequence: Synthetic oligonucleotide
  Target: LAMA2; (-) strand; PAM type: YTN; PAM sequence: TTA
gaaaacacctagagaataaa

SEQ ID NO: 212011 - DNA, 20 bp, Artificial Sequence
  Description of Artificial Sequence: Synthetic oligonucleotide
  Target: LAMA2; (-) strand; PAM type: YTN; PAM sequence: TTC
ccacattagaaaacacctag

SEQ ID NO: 212012 - DNA, 20 bp, Artificial Sequence
  Description of Artificial Sequence: Synthetic oligonucleotide
  Target: LAMA2; (-) strand; PAM type: YTN; PAM sequence: TTT
cccacattagaaaacaccta

SEQ ID NO: 212013 - DNA, 20 bp, Artificial Sequence
  Description of Artificial Sequence: Synthetic oligonucleotide
  Target: LAMA2; (-) strand; PAM type: YTN; PAM sequence: CTT
tcccacattagaaaacacct

SEQ ID NO: 212014 - DNA, 20 bp, Artificial Sequence
  Description of Artificial Sequence: Synthetic oligonucleotide
  Target: LAMA2; (-) strand; PAM type: YTN; PAM sequence: TTC
actttcccacattagaaaac

SEQ ID NO: 212015 - DNA, 20 bp, Artificial Sequence
  Description of Artificial Sequence: Synthetic oligonucleotide
  Target: LAMA2; (-) strand; PAM type: YTN; PAM sequence: TTT
cactttcccacattagaaaa

SEQ ID NO: 212016 - DNA, 20 bp, Artificial Sequence
  Description of Artificial Sequence: Synthetic oligonucleotide
  Target: LAMA2; (-) strand; PAM type: YTN; PAM sequence: TTG
tatttcactttcccacatta

SEQ ID NO: 212017 - DNA, 20 bp, Artificial Sequence
  Description of Artificial Sequence: Synthetic oligonucleotide
  Target: LAMA2; (-) strand; PAM type: YTN; PAM sequence: CTT
gtatttcactttcccacatt

SEQ ID NO: 212018 - DNA, 20 bp, Artificial Sequence
  Description of Artificial Sequence: Synthetic oligonucleotide
  Target: LAMA2; (-) strand; PAM type: YTN; PAM sequence: TTC
aaacccttgtatttcacttt

SEQ ID NO: 212019 - DNA, 20 bp, Artificial Sequence
  Description of Artificial Sequence: Synthetic oligonucleotide
  Target: LAMA2; (-) strand; PAM type: YTN; PAM sequence: TTT
caaacccttgtatttcactt

SEQ ID NO: 212020 - DNA, 20 bp, Artificial Sequence
  Description of Artificial Sequence: Synthetic oligonucleotide
  Target: LAMA2; (-) strand; PAM type: YTN; PAM sequence: CTG
catccccagaaccatttcaa

SEQ ID NO: 212021 - DNA, 20 bp, Artificial Sequence
  Description of Artificial Sequence: Synthetic oligonucleotide
  Target: LAMA2; (-) strand; PAM type: YTN; PAM sequence: CTG
acaggaaagactgcatcccc

SEQ ID NO: 212022 - DNA, 20 bp, Artificial Sequence
  Description of Artificial Sequence: Synthetic oligonucleotide
  Target: LAMA2; (-) strand; PAM type: YTN; PAM sequence: CTG
gaatctgacaggaaagactg

SEQ ID NO: 212023 - DNA, 20 bp, Artificial Sequence
  Description of Artificial Sequence: Synthetic oligonucleotide
  Target: LAMA2; (-) strand; PAM type: YTN; PAM sequence: CTG
ctggaatctgacaggaaaga

SEQ ID NO: 212024 - DNA, 20 bp, Artificial Sequence
  Description of Artificial Sequence: Synthetic oligonucleotide
  Target: LAMA2; (-) strand; PAM type: YTN; PAM sequence: TTA
tatcagcatctgctggaatc

SEQ ID NO: 212025 - DNA, 20 bp, Artificial Sequence
  Description of Artificial Sequence: Synthetic oligonucleotide
  Target: LAMA2; (-) strand; PAM type: YTN; PAM sequence: TTA
aattatatcagcatctgctg

SEQ ID NO: 212026 - DNA, 20 bp, Artificial Sequence
  Description of Artificial Sequence: Synthetic oligonucleotide
  Target: LAMA2; (-) strand; PAM type: YTN; PAM sequence: TTC
cacgaatattaaattatatc

SEQ ID NO: 212027 - DNA, 20 bp, Artificial Sequence
  Description of Artificial Sequence: Synthetic oligonucleotide
  Target: LAMA2; (-) strand; PAM type: YTN; PAM sequence: CTT
ccacgaatattaaattatat

SEQ ID NO: 212028 - DNA, 20 bp, Artificial Sequence
  Description of Artificial Sequence: Synthetic oligonucleotide
  Target: LAMA2; (-) strand; PAM type: YTN; PAM sequence: CTG
tcttccacgaatattaaatt

SEQ ID NO: 212029 - DNA, 20 bp, Artificial Sequence
  Description of Artificial Sequence: Synthetic oligonucleotide
  Target: LAMA2; (-) strand; PAM type: YTN; PAM sequence: TTG
ccctgtcttccacgaatatt

SEQ ID NO: 212030 - DNA, 20 bp, Artificial Sequence
  Description of Artificial Sequence: Synthetic oligonucleotide
  Target: LAMA2; (-) strand; PAM type: YTN; PAM sequence: TTT
gccctgtcttccacgaatat

SEQ ID NO: 212031 - DNA, 20 bp, Artificial Sequence
  Description of Artificial Sequence: Synthetic oligonucleotide
  Target: LAMA2; (-) strand; PAM type: YTN; PAM sequence: CTA
tatttgccctgtcttccacg

SEQ ID NO: 212032 - DNA, 20 bp, Artificial Sequence
  Description of Artificial Sequence: Synthetic oligonucleotide
  Target: LAMA2; (-) strand; PAM type: YTN; PAM sequence: TTC
tatatttgccctgtcttcca

SEQ ID NO: 212033 - DNA, 20 bp, Artificial Sequence
  Description of Artificial Sequence: Synthetic oligonucleotide
  Target: LAMA2; (-) strand; PAM type: YTN; PAM sequence: CTA
ttctatatttgccctgtctt

SEQ ID NO: 212034 - DNA, 20 bp, Artificial Sequence
  Description of Artificial Sequence: Synthetic oligonucleotide
  Target: LAMA2; (-) strand; PAM type: YTN; PAM sequence: TTG
atgctattctatatttgccc

SEQ ID NO: 212035 - DNA, 20 bp, Artificial Sequence
  Description of Artificial Sequence: Synthetic oligonucleotide
  Target: LAMA2; (-) strand; PAM type: YTN; PAM sequence: TTT
gatgctattctatatttgcc

SEQ ID NO: 212036 - DNA, 20 bp, Artificial Sequence
  Description of Artificial Sequence: Synthetic oligonucleotide
  Target: LAMA2; (-) strand; PAM type: YTN; PAM sequence: CTG
caaaatcaatttgatgctat

SEQ ID NO: 212037 - DNA, 20 bp, Artificial Sequence
  Description of Artificial Sequence: Synthetic oligonucleotide
  Target: LAMA2; (-) strand; PAM type: YTN; PAM sequence: CTC
tgcaaaatcaatttgatgct

SEQ ID NO: 212038 - DNA, 20 bp, Artificial Sequence
  Description of Artificial Sequence: Synthetic oligonucleotide
  Target: LAMA2; (-) strand; PAM type: YTN; PAM sequence: TTG
aaaactctgcaaaatcaatt

SEQ ID NO: 212039 - DNA, 20 bp, Artificial Sequence
  Description of Artificial Sequence: Synthetic oligonucleotide
  Target: LAMA2; (-) strand; PAM type: YTN; PAM sequence: CTT
gaaaactctgcaaaatcaat

SEQ ID NO: 212040 - DNA, 20 bp, Artificial Sequence
  Description of Artificial Sequence: Synthetic oligonucleotide
  Target: LAMA2; (-) strand; PAM type: YTN; PAM sequence: CTG
gcttgaaaactctgcaaaat

SEQ ID NO: 212041 - DNA, 20 bp, Artificial Sequence
  Description of Artificial Sequence: Synthetic oligonucleotide
  Target: LAMA2; (-) strand; PAM type: YTN; PAM sequence: TTC
catgtaaatgccaagggaca

SEQ ID NO: 212042 - DNA, 20 bp, Artificial Sequence
  Description of Artificial Sequence: Synthetic oligonucleotide
  Target: LAMA2; (-) strand; PAM type: YTN; PAM sequence: CTT
ccatgtaaatgccaagggac

SEQ ID NO: 212043 - DNA, 20 bp, Artificial Sequence
  Description of Artificial Sequence: Synthetic oligonucleotide
  Target: LAMA2; (-) strand; PAM type: YTN; PAM sequence: TTC
ttccatgtaaatgccaaggg

SEQ ID NO: 212044 - DNA, 20 bp, Artificial Sequence
  Description of Artificial Sequence: Synthetic oligonucleotide
  Target: LAMA2; (-) strand; PAM type: YTN; PAM sequence: CTT
cttccatgtaaatgccaagg

SEQ ID NO: 212045 - DNA, 20 bp, Artificial Sequence
  Description of Artificial Sequence: Synthetic oligonucleotide
  Target: LAMA2; (-) strand; PAM type: YTN; PAM sequence: TTG
gtacacagtagacttcttcc

SEQ ID NO: 212046 - DNA, 20 bp, Artificial Sequence
  Description of Artificial Sequence: Synthetic oligonucleotide
  Target: LAMA2; (-) strand; PAM type: YTN; PAM sequence: CTT
ggtacacagtagacttcttc

SEQ ID NO: 212047 - DNA, 20 bp, Artificial Sequence
  Description of Artificial Sequence: Synthetic oligonucleotide
  Target: LAMA2; (-) strand; PAM type: YTN; PAM sequence: TTA
cacacaaaaatatgcaactt

SEQ ID NO: 212048 - DNA, 20 bp, Artificial Sequence
  Description of Artificial Sequence: Synthetic oligonucleotide
  Target: LAMA2; (-) strand; PAM type: YTN; PAM sequence: CTT
acacacaaaaatatgcaact

SEQ ID NO: 212049 - DNA, 20 bp, Artificial Sequence
  Description of Artificial Sequence: Synthetic oligonucleotide
  Target: LAMA2; (-) strand; PAM type: YTN; PAM sequence: CTG
agaacttacacacaaaaata

SEQ ID NO: 212050 - DNA, 20 bp, Artificial Sequence
  Description of Artificial Sequence: Synthetic oligonucleotide
  Target: LAMA2; (-) strand; PAM type: YTN; PAM sequence: CTA
cataccatggctgagaactt

SEQ ID NO: 212051 - DNA, 20 bp, Artificial Sequence
  Description of Artificial Sequence: Synthetic oligonucleotide
  Target: LAMA2; (-) strand; PAM type: YTN; PAM sequence: CTG
tcaaaacaccaatgactaca

SEQ ID NO: 212052 - DNA, 20 bp, Artificial Sequence
  Description of Artificial Sequence: Synthetic oligonucleotide
  Target: LAMA2; (-) strand; PAM type: YTN; PAM sequence: CTG
agcagatggctgtcaaaaca

SEQ ID NO: 212053 - DNA, 20 bp, Artificial Sequence
  Description of Artificial Sequence: Synthetic oligonucleotide
  Target: LAMA2; (-) strand; PAM type: YTN; PAM sequence: CTG
aacagagaaataaaggtctg

SEQ ID NO: 212054 - DNA, 20 bp, Artificial Sequence
  Description of Artificial Sequence: Synthetic oligonucleotide
  Target: LAMA2; (-) strand; PAM type: YTN; PAM sequence: TTA
tggctgaacagagaaataaa

SEQ ID NO: 212055 - DNA, 20 bp, Artificial Sequence
  Description of Artificial Sequence: Synthetic oligonucleotide
  Target: LAMA2; (-) strand; PAM type: YTN; PAM sequence: TTA
gttatggctgaacagagaaa

SEQ ID NO: 212056 - DNA, 20 bp, Artificial Sequence
  Description of Artificial Sequence: Synthetic oligonucleotide
  Target: LAMA2; (-) strand; PAM type: YTN; PAM sequence: TTT
agttatggctgaacagagaa

SEQ ID NO: 212057 - DNA, 20 bp, Artificial Sequence
  Description of Artificial Sequence: Synthetic oligonucleotide
  Target: LAMA2; (-) strand; PAM type: YTN; PAM sequence: TTT
tagttatggctgaacagaga

SEQ ID NO: 212058 - DNA, 20 bp, Artificial Sequence
  Description of Artificial Sequence: Synthetic oligonucleotide
  Target: LAMA2; (-) strand; PAM type: YTN; PAM sequence: TTC
aattttagttatggctgaac

SEQ ID NO: 212059 - DNA, 20 bp, Artificial Sequence
  Description of Artificial Sequence: Synthetic oligonucleotide
  Target: LAMA2; (-) strand; PAM type: YTN; PAM sequence: TTG
aaaaatgttcaattttagtt

SEQ ID NO: 212060 - DNA, 20 bp, Artificial Sequence
  Description of Artificial Sequence: Synthetic oligonucleotide
  Target: LAMA2; (-) strand; PAM type: YTN; PAM sequence: TTT
gaaaaatgttcaattttagt

SEQ ID NO: 212061 - DNA, 20 bp, Artificial Sequence
  Description of Artificial Sequence: Synthetic oligonucleotide
  Target: LAMA2; (-) strand; PAM type: YTN; PAM sequence: CTG
gaacatttgaaaaatgttca

SEQ ID NO: 212062 - DNA, 20 bp, Artificial Sequence
  Description of Artificial Sequence: Synthetic oligonucleotide
  Target: LAMA2; (-) strand; PAM type: YTN; PAM sequence: CTA
cctggaacatttgaaaaatg

SEQ ID NO: 212063 - DNA, 20 bp, Artificial Sequence
  Description of Artificial Sequence: Synthetic oligonucleotide
  Target: LAMA2; (-) strand; PAM type: YTN; PAM sequence: TTG
aaactacctggaacatttga

SEQ ID NO: 212064 - DNA, 20 bp, Artificial Sequence
  Description of Artificial Sequence: Synthetic oligonucleotide
  Target: LAMA2; (-) strand; PAM type: YTN; PAM sequence: TTA
aaattgaaactacctggaac

SEQ ID NO: 212065 - DNA, 20 bp, Artificial Sequence
  Description of Artificial Sequence: Synthetic oligonucleotide
  Target: LAMA2; (-) strand; PAM type: YTN; PAM sequence: CTT
aaaattgaaactacctggaa

SEQ ID NO: 212066 - DNA, 20 bp, Artificial Sequence
  Description of Artificial Sequence: Synthetic oligonucleotide
  Target: LAMA2; (-) strand; PAM type: YTN; PAM sequence: TTA
tcttaaaattgaaactacct

SEQ ID NO: 212067 - DNA, 20 bp, Artificial Sequence
  Description of Artificial Sequence: Synthetic oligonucleotide
  Target: LAMA2; (-) strand; PAM type: YTN; PAM sequence: CTG
ttatcttaaaattgaaacta

SEQ ID NO: 212068 - DNA, 20 bp, Artificial Sequence
  Description of Artificial Sequence: Synthetic oligonucleotide
  Target: LAMA2; (-) strand; PAM type: YTN; PAM sequence: TTC
tgttatcttaaaattgaaac

SEQ ID NO: 212069 - DNA, 20 bp, Artificial Sequence
  Description of Artificial Sequence: Synthetic oligonucleotide
  Target: LAMA2; (-) strand; PAM type: YTN; PAM sequence: TTT
ctgttatcttaaaattgaaa

SEQ ID NO: 212070 - DNA, 20 bp, Artificial Sequence
  Description of Artificial Sequence: Synthetic oligonucleotide
  Target: LAMA2; (-) strand; PAM type: YTN; PAM sequence: TTT
tctgttatcttaaaattgaa

SEQ ID NO: 212071 - DNA, 20 bp, Artificial Sequence
  Description of Artificial Sequence: Synthetic oligonucleotide
  Target: LAMA2; (-) strand; PAM type: YTN; PAM sequence: CTA
gttttctgttatcttaaaat

SEQ ID NO: 212072 - DNA, 20 bp, Artificial Sequence
  Description of Artificial Sequence: Synthetic oligonucleotide
  Target: LAMA2; (-) strand; PAM type: YTN; PAM sequence: TTG
aatactagttttctgttatc

SEQ ID NO: 212073 - DNA, 20 bp, Artificial Sequence
  Description of Artificial Sequence: Synthetic oligonucleotide
  Target: LAMA2; (-) strand; PAM type: YTN; PAM sequence: TTA
accattgaatactagttttc

SEQ ID NO: 212074 - DNA, 20 bp, Artificial Sequence
  Description of Artificial Sequence: Synthetic oligonucleotide
  Target: LAMA2; (-) strand; PAM type: YTN; PAM sequence: TTT
aaccattgaatactagtttt

SEQ ID NO: 212075 - DNA, 20 bp, Artificial Sequence
  Description of Artificial Sequence: Synthetic oligonucleotide
  Target: LAMA2; (-) strand; PAM type: YTN; PAM sequence: TTT
taaccattgaatactagttt

SEQ ID NO: 212076 - DNA, 20 bp, Artificial Sequence
  Description of Artificial Sequence: Synthetic oligonucleotide
  Target: LAMA2; (-) strand; PAM type: YTN; PAM sequence: TTT
ttaaccattgaatactagtt

SEQ ID NO: 212077 - DNA, 20 bp, Artificial Sequence
  Description of Artificial Sequence: Synthetic oligonucleotide
  Target: LAMA2; (-) strand; PAM type: YTN; PAM sequence: CTT
tttaaccattgaatactagt

SEQ ID NO: 212078 - DNA, 20 bp, Artificial Sequence
  Description of Artificial Sequence: Synthetic oligonucleotide
  Target: LAMA2; (-) strand; PAM type: YTN; PAM sequence: TTC
tttttaaccattgaatacta

SEQ ID NO: 212079 - DNA, 20 bp, Artificial Sequence
  Description of Artificial Sequence: Synthetic oligonucleotide
  Target: LAMA2; (-) strand; PAM type: YTN; PAM sequence: TTT
ctttttaaccattgaatact

SEQ ID NO: 212080 - DNA, 20 bp, Artificial Sequence
  Description of Artificial Sequence: Synthetic oligonucleotide
  Target: LAMA2; (-) strand; PAM type: YTN; PAM sequence: TTT
tctttttaaccattgaatac

SEQ ID NO: 212081 - DNA, 20 bp, Artificial Sequence
  Description of Artificial Sequence: Synthetic oligonucleotide
  Target: LAMA2; (-) strand; PAM type: YTN; PAM sequence: TTT
ttctttttaaccattgaata

SEQ ID NO: 212082 - DNA, 20 bp, Artificial Sequence
  Description of Artificial Sequence: Synthetic oligonucleotide
  Target: LAMA2; (-) strand; PAM type: YTN; PAM sequence: TTT
tttctttttaaccattgaat

SEQ ID NO: 212083 - DNA, 20 bp, Artificial Sequence
  Description of Artificial Sequence: Synthetic oligonucleotide
  Target: LAMA2; (-) strand; PAM type: YTN; PAM sequence: TTT
ttttctttttaaccattgaa

SEQ ID NO: 212084 - DNA, 20 bp, Artificial Sequence
  Description of Artificial Sequence: Synthetic oligonucleotide
  Target: LAMA2; (-) strand; PAM type: YTN; PAM sequence: CTT
tttttctttttaaccattga

SEQ ID NO: 212085 - DNA, 20 bp, Artificial Sequence
  Description of Artificial Sequence: Synthetic oligonucleotide
  Target: LAMA2; (-) strand; PAM type: YTN; PAM sequence: TTG
ctttttttctttttaaccat

SEQ ID NO: 212086 - DNA, 20 bp, Artificial Sequence
  Description of Artificial Sequence: Synthetic oligonucleotide
  Target: LAMA2; (-) strand; PAM type: YTN; PAM sequence: CTA
agccaaagataggtattgct

SEQ ID NO: 212087 - DNA, 20 bp, Artificial Sequence
  Description of Artificial Sequence: Synthetic oligonucleotide
  Target: LAMA2; (-) strand; PAM type: YTN; PAM sequence: TTA
ctaagccaaagataggtatt

SEQ ID NO: 212088 - DNA, 20 bp, Artificial Sequence
  Description of Artificial Sequence: Synthetic oligonucleotide
  Target: LAMA2; (-) strand; PAM type: YTN; PAM sequence: TTA
ttactaagccaaagataggt

SEQ ID NO: 212089 - DNA, 20 bp, Artificial Sequence
  Description of Artificial Sequence: Synthetic oligonucleotide
  Target: LAMA2; (-) strand; PAM type: YTN; PAM sequence: TTA
ggggttattactaagccaaa

SEQ ID NO: 212090 - DNA, 20 bp, Artificial Sequence
  Description of Artificial Sequence: Synthetic oligonucleotide
  Target: LAMA2; (-) strand; PAM type: YTN; PAM sequence: TTT
aggggttattactaagccaa

SEQ ID NO: 212091 - DNA, 20 bp, Artificial Sequence
  Description of Artificial Sequence: Synthetic oligonucleotide
  Target: LAMA2; (-) strand; PAM type: YTN; PAM sequence: TTC
aatttaggggttattactaa

SEQ ID NO: 212092 - DNA, 20 bp, Artificial Sequence
  Description of Artificial Sequence: Synthetic oligonucleotide
  Target: LAMA2; (-) strand; PAM type: YTN; PAM sequence: TTT
caatttaggggttattacta

SEQ ID NO: 212093 - DNA, 20 bp, Artificial Sequence
  Description of Artificial Sequence: Synthetic oligonucleotide
  Target: LAMA2; (-) strand; PAM type: YTN; PAM sequence: CTT
tcaatttaggggttattact

SEQ ID NO: 212094 - DNA, 20 bp, Artificial Sequence
  Description of Artificial Sequence: Synthetic oligonucleotide
  Target: LAMA2; (-) strand; PAM type: YTN; PAM sequence: TTA
actttcaatttaggggttat

SEQ ID NO: 212095 - DNA, 20 bp, Artificial Sequence
  Description of Artificial Sequence: Synthetic oligonucleotide
  Target: LAMA2; (-) strand; PAM type: YTN; PAM sequence: TTA
taagaaattaactttcaatt

SEQ ID NO: 212096 - DNA, 20 bp, Artificial Sequence
  Description of Artificial Sequence: Synthetic oligonucleotide
  Target: LAMA2; (-) strand; PAM type: YTN; PAM sequence: TTT
ataagaaattaactttcaat

SEQ ID NO: 212097 - DNA, 20 bp, Artificial Sequence
  Description of Artificial Sequence: Synthetic oligonucleotide
  Target: LAMA2; (-) strand; PAM type: YTN; PAM sequence: CTA
tttataagaaattaactttc

SEQ ID NO: 212098 - DNA, 20 bp, Artificial Sequence
  Description of Artificial Sequence: Synthetic oligonucleotide
  Target: LAMA2; (-) strand; PAM type: YTN; PAM sequence: CTG
ctatttataagaaattaact

SEQ ID NO: 212099 - DNA, 20 bp, Artificial Sequence
  Description of Artificial Sequence: Synthetic oligonucleotide
  Target: LAMA2; (-) strand; PAM type: YTN; PAM sequence: TTG
cactgctatttataagaaat

SEQ ID NO: 212100 - DNA, 20 bp, Artificial Sequence
  Description of Artificial Sequence: Synthetic oligonucleotide
  Target: LAMA2; (-) strand; PAM type: YTN; PAM sequence: TTT
gcactgctatttataagaaa

SEQ ID NO: 212101 - DNA, 20 bp, Artificial Sequence
  Description of Artificial Sequence: Synthetic oligonucleotide
  Target: LAMA2; (-) strand; PAM type: YTN; PAM sequence: TTT
tgcactgctatttataagaa

SEQ ID NO: 212102 - DNA, 20 bp, Artificial Sequence
  Description of Artificial Sequence: Synthetic oligonucleotide
  Target: LAMA2; (-) strand; PAM type: YTN; PAM sequence: TTC
attttgcactgctatttata

SEQ ID NO: 212103 - DNA, 20 bp, Artificial Sequence
  Description of Artificial Sequence: Synthetic oligonucleotide
  Target: LAMA2; (-) strand; PAM type: YTN; PAM sequence: TTG
ttcattttgcactgctattt

SEQ ID NO: 212104 - DNA, 20 bp, Artificial Sequence
  Description of Artificial Sequence: Synthetic oligonucleotide
  Target: LAMA2; (-) strand; PAM type: YTN; PAM sequence: TTT
gttcattttgcactgctatt

SEQ ID NO: 212105 - DNA, 20 bp, Artificial Sequence
  Description of Artificial Sequence: Synthetic oligonucleotide
  Target: LAMA2; (-) strand; PAM type: YTN; PAM sequence: CTC
aaagtttgttcattttgcac

SEQ ID NO: 212106 - DNA, 20 bp, Artificial Sequence
  Description of Artificial Sequence: Synthetic oligonucleotide
  Target: LAMA2; (-) strand; PAM type: YTN; PAM sequence: TTC
tcaaagtttgttcattttgc

SEQ ID NO: 212107 - DNA, 20 bp, Artificial Sequence
  Description of Artificial Sequence: Synthetic oligonucleotide
  Target: LAMA2; (-) strand; PAM type: YTN; PAM sequence: CTG
ttctcaaagtttgttcattt

SEQ ID NO: 212108 - DNA, 20 bp, Artificial Sequence
  Description of Artificial Sequence: Synthetic oligonucleotide
  Target: LAMA2; (-) strand; PAM type: YTN; PAM sequence: CTC
tgttctcaaagtttgttcat

SEQ ID NO: 212109 - DNA, 20 bp, Artificial Sequence
  Description of Artificial Sequence: Synthetic oligonucleotide
  Target: LAMA2; (-) strand; PAM type: YTN; PAM sequence: TTG
ataataaggtgaggcctctg

SEQ ID NO: 212110 - DNA, 20 bp, Artificial Sequence
  Description of Artificial Sequence: Synthetic oligonucleotide
  Target: LAMA2; (-) strand; PAM type: YTN; PAM sequence: TTT
gataataaggtgaggcctct

SEQ ID NO: 212111 - DNA, 20 bp, Artificial Sequence
  Description of Artificial Sequence: Synthetic oligonucleotide
  Target: LAMA2; (-) strand; PAM type: YTN; PAM sequence: CTC
atttgataataaggtgaggc

SEQ ID NO: 212112 - DNA, 20 bp, Artificial Sequence
  Description of Artificial Sequence: Synthetic oligonucleotide
  Target: LAMA2; (-) strand; PAM type: YTN; PAM sequence: TTA
aaacaaactcatttgataat

SEQ ID NO: 212113 - DNA, 20 bp, Artificial Sequence
  Description of Artificial Sequence: Synthetic oligonucleotide
  Target: LAMA2; (-) strand; PAM type: YTN; PAM sequence: TTC
cacatgattaaaacaaactc

SEQ ID NO: 212114 - DNA, 20 bp, Artificial Sequence
  Description of Artificial Sequence: Synthetic oligonucleotide
  Target: LAMA2; (-) strand; PAM type: YTN; PAM sequence: CTT
ccacatgattaaaacaaact

SEQ ID NO: 212115 - DNA, 20 bp, Artificial Sequence
  Description of Artificial Sequence: Synthetic oligonucleotide
  Target: LAMA2; (-) strand; PAM type: YTN; PAM sequence: CTG
agagccttccacatgattaa

SEQ ID NO: 212116 - DNA, 20 bp, Artificial Sequence
  Description of Artificial Sequence: Synthetic oligonucleotide
  Target: LAMA2; (-) strand; PAM type: YTN; PAM sequence: CTA
gctgagagccttccacatga

SEQ ID NO: 212117 - DNA, 20 bp, Artificial Sequence
  Description of Artificial Sequence: Synthetic oligonucleotide
  Target: LAMA2; (-) strand; PAM type: YTN; PAM sequence: CTC
agtgtctagctgagagcctt

SEQ ID NO: 212118 - DNA, 20 bp, Artificial Sequence
  Description of Artificial Sequence: Synthetic oligonucleotide
  Target: LAMA2; (-) strand; PAM type: YTN; PAM sequence: TTC
ctcagtgtctagctgagagc

SEQ ID NO: 212119 - DNA, 20 bp, Artificial Sequence
  Description of Artificial Sequence: Synthetic oligonucleotide
  Target: LAMA2; (-) strand; PAM type: YTN; PAM sequence: CTT
cctcagtgtctagctgagag

SEQ ID NO: 212120 - DNA, 20 bp, Artificial Sequence
  Description of Artificial Sequence: Synthetic oligonucleotide
  Target: LAMA2; (-) strand; PAM type: YTN; PAM sequence: CTA
taacttcctcagtgtctagc

SEQ ID NO: 212121 - DNA, 20 bp, Artificial Sequence
  Description of Artificial Sequence: Synthetic oligonucleotide
  Target: LAMA2; (-) strand; PAM type: YTN; PAM sequence: TTC
tataacttcctcagtgtcta

SEQ ID NO: 212122 - DNA, 20 bp, Artificial Sequence
  Description of Artificial Sequence: Synthetic oligonucleotide
  Target: LAMA2; (-) strand; PAM type: YTN; PAM sequence: TTT
ctataacttcctcagtgtct

SEQ ID NO: 212123 - DNA, 20 bp, Artificial Sequence
  Description of Artificial Sequence: Synthetic oligonucleotide
  Target: LAMA2; (-) strand; PAM type: YTN; PAM sequence: TTA
cccatttctataacttcctc

SEQ ID NO: 212124 - DNA, 20 bp, Artificial Sequence
  Description of Artificial Sequence: Synthetic oligonucleotide
  Target: LAMA2; (-) strand; PAM type: YTN; PAM sequence: TTG
gaattacccatttctataac

SEQ ID NO: 212125 - DNA, 20 bp, Artificial Sequence
  Description of Artificial Sequence: Synthetic oligonucleotide
  Target: LAMA2; (-) strand; PAM type: YTN; PAM sequence: CTT
ggaattacccatttctataa

SEQ ID NO: 212126 - DNA, 20 bp, Artificial Sequence
  Description of Artificial Sequence: Synthetic oligonucleotide
  Target: LAMA2; (-) strand; PAM type: YTN; PAM sequence: TTC
accttggaattacccatttc

SEQ ID NO: 212127 - DNA, 20 bp, Artificial Sequence
  Description of Artificial Sequence: Synthetic oligonucleotide
  Target: LAMA2; (-) strand; PAM type: YTN; PAM sequence: TTG
gaacattcaccttggaatta

SEQ ID NO: 212128 - DNA, 20 bp, Artificial Sequence
  Description of Artificial Sequence: Synthetic oligonucleotide
  Target: LAMA2; (-) strand; PAM type: YTN; PAM sequence: CTT
ggaacattcaccttggaatt

SEQ ID NO: 212129 - DNA, 20 bp, Artificial Sequence
  Description of Artificial Sequence: Synthetic oligonucleotide
  Target: LAMA2; (-) strand; PAM type: YTN; PAM sequence: CTA
tccttggaacattcaccttg

SEQ ID NO: 212130 - DNA, 20 bp, Artificial Sequence
  Description of Artificial Sequence: Synthetic oligonucleotide
  Target: LAMA2; (-) strand; PAM type: YTN; PAM sequence: TTA
tgtataagacatagctatcc

SEQ ID NO: 212131 - DNA, 20 bp, Artificial Sequence
  Description of Artificial Sequence: Synthetic oligonucleotide
  Target: LAMA2; (-) strand; PAM type: YTN; PAM sequence: TTG
ttatgtataagacatagcta

SEQ ID NO: 212132 - DNA, 20 bp, Artificial Sequence
  Description of Artificial Sequence: Synthetic oligonucleotide
  Target: LAMA2; (-) strand; PAM type: YTN; PAM sequence: CTT
gttatgtataagacatagct

SEQ ID NO: 212133 - DNA, 20 bp, Artificial Sequence
  Description of Artificial Sequence: Synthetic oligonucleotide
  Target: LAMA2; (-) strand; PAM type: YTN; PAM sequence: TTC
agcaaataatgatgaagtgc

SEQ ID NO: 212134 - DNA, 20 bp, Artificial Sequence
  Description of Artificial Sequence: Synthetic oligonucleotide
  Target: LAMA2; (-) strand; PAM type: YTN; PAM sequence: TTC
attcagcaaataatgatgaa

SEQ ID NO: 212135 - DNA, 20 bp, Artificial Sequence
  Description of Artificial Sequence: Synthetic oligonucleotide
  Target: LAMA2; (-) strand; PAM type: YTN; PAM sequence: CTA
acatacgcattcattcagca

SEQ ID NO: 212136 - DNA, 20 bp, Artificial Sequence
  Description of Artificial Sequence: Synthetic oligonucleotide
  Target: LAMA2; (-) strand; PAM type: YTN; PAM sequence: TTC
taacatacgcattcattcag

SEQ ID NO: 212137 - DNA, 20 bp, Artificial Sequence
  Description of Artificial Sequence: Synthetic oligonucleotide
  Target: LAMA2; (-) strand; PAM type: YTN; PAM sequence: TTA
catatggattctaacatacg

SEQ ID NO: 212138 - DNA, 20 bp, Artificial Sequence
  Description of Artificial Sequence: Synthetic oligonucleotide
  Target: LAMA2; (-) strand; PAM type: YTN; PAM sequence: CTA
ttacatatggattctaacat

SEQ ID NO: 212139 - DNA, 20 bp, Artificial Sequence
  Description of Artificial Sequence: Synthetic oligonucleotide
  Target: LAMA2; (-) strand; PAM type: YTN; PAM sequence: CTA
tcagtggggtgaaaatatgt

SEQ ID NO: 212140 - DNA, 20 bp, Artificial Sequence
  Description of Artificial Sequence: Synthetic oligonucleotide
  Target: LAMA2; (-) strand; PAM type: YTN; PAM sequence: TTA
aaaactatcagtggggtgaa

SEQ ID NO: 212141 - DNA, 20 bp, Artificial Sequence
  Description of Artificial Sequence: Synthetic oligonucleotide
  Target: LAMA2; (-) strand; PAM type: YTN; PAM sequence: CTC
cacatattaaaaactatcag

SEQ ID NO: 212142 - DNA, 20 bp, Artificial Sequence
  Description of Artificial Sequence: Synthetic oligonucleotide
  Target: LAMA2; (-) strand; PAM type: YTN; PAM sequence: CTC
acccacaaaaaacacagaga

SEQ ID NO: 212143 - DNA, 20 bp, Artificial Sequence
  Description of Artificial Sequence: Synthetic oligonucleotide
  Target: LAMA2; (-) strand; PAM type: YTN; PAM sequence: CTA
catatctcacccacaaaaaa

SEQ ID NO: 212144 - DNA, 20 bp, Artificial Sequence
  Description of Artificial Sequence: Synthetic oligonucleotide
  Target: LAMA2; (-) strand; PAM type: YTN; PAM sequence: TTA
gcctacatatctcacccaca

SEQ ID NO: 212145 - DNA, 20 bp, Artificial Sequence
  Description of Artificial Sequence: Synthetic oligonucleotide
  Target: LAMA2; (-) strand; PAM type: YTN; PAM sequence: TTA
cgacatgttagcctacatat

SEQ ID NO: 212146 - DNA, 20 bp, Artificial Sequence
  Description of Artificial Sequence: Synthetic oligonucleotide
  Target: LAMA2; (-) strand; PAM type: YTN; PAM sequence: CTT
acgacatgttagcctacata

SEQ ID NO: 212147 - DNA, 20 bp, Artificial Sequence
  Description of Artificial Sequence: Synthetic oligonucleotide
  Target: LAMA2; (-) strand; PAM type: YTN; PAM sequence: TTC
acttacgacatgttagccta

SEQ ID NO: 212148 - DNA, 20 bp, Artificial Sequence
  Description of Artificial Sequence: Synthetic oligonucleotide
  Target: LAMA2; (-) strand; PAM type: YTN; PAM sequence: TTC
attcacttacgacatgttag

SEQ ID NO: 212149 - DNA, 20 bp, Artificial Sequence
  Description of Artificial Sequence: Synthetic oligonucleotide
  Target: LAMA2; (-) strand; PAM type: YTN; PAM sequence: TTT
cattcacttacgacatgtta

SEQ ID NO: 212150 - DNA, 20 bp, Artificial Sequence
  Description of Artificial Sequence: Synthetic oligonucleotide
  Target: LAMA2; (-) strand; PAM type: YTN; PAM sequence: TTA
tcaaacacagtttcattcac

SEQ ID NO: 212151 - DNA, 20 bp, Artificial Sequence
  Description of Artificial Sequence: Synthetic oligonucleotide
  Target: LAMA2; (-) strand; PAM type: YTN; PAM sequence: CTT
atcaaacacagtttcattca

SEQ ID NO: 212152 - DNA, 20 bp, Artificial Sequence
  Description of Artificial Sequence: Synthetic oligonucleotide
  Target: LAMA2; (-) strand; PAM type: YTN; PAM sequence: TTC
ttatcaaacacagtttcatt

SEQ ID NO: 212153 - DNA, 20 bp, Artificial Sequence
  Description of Artificial Sequence: Synthetic oligonucleotide
  Target: LAMA2; (-) strand; PAM type: YTN; PAM sequence: TTG
acagttcttatcaaacacag

SEQ ID NO: 212154 - DNA, 20 bp, Artificial Sequence
  Description of Artificial Sequence: Synthetic oligonucleotide
  Target: LAMA2; (-) strand; PAM type: YTN; PAM sequence: CTT
gacagttcttatcaaacaca

SEQ ID NO: 212155 - DNA, 20 bp, Artificial Sequence
  Description of Artificial Sequence: Synthetic oligonucleotide
  Target: LAMA2; (-) strand; PAM type: YTN; PAM sequence: CTA
gcacaccaataggtgcatag

SEQ ID NO: 212156 - DNA, 20 bp, Artificial Sequence
  Description of Artificial Sequence: Synthetic oligonucleotide
  Target: LAMA2; (-) strand; PAM type: YTN; PAM sequence: TTC
agaatgtctagcacaccaat

SEQ ID NO: 212157 - DNA, 20 bp, Artificial Sequence
  Description of Artificial Sequence: Synthetic oligonucleotide
  Target: LAMA2; (-) strand; PAM type: YTN; PAM sequence: CTT
cagaatgtctagcacaccaa

SEQ ID NO: 212158 - DNA, 20 bp, Artificial Sequence
  Description of Artificial Sequence: Synthetic oligonucleotide
  Target: LAMA2; (-) strand; PAM type: YTN; PAM sequence: CTG
aatcttcagaatgtctagca

SEQ ID NO: 212159 - DNA, 20 bp, Artificial Sequence
  Description of Artificial Sequence: Synthetic oligonucleotide
  Target: LAMA2; (-) strand; PAM type: YTN; PAM sequence: TTC
tgaatcttcagaatgtctag

SEQ ID NO: 212160 - DNA, 20 bp, Artificial Sequence
  Description of Artificial Sequence: Synthetic oligonucleotide
  Target: LAMA2; (-) strand; PAM type: YTN; PAM sequence: CTT
ctgaatcttcagaatgtcta

SEQ ID NO: 212161 - DNA, 20 bp, Artificial Sequence
  Description of Artificial Sequence: Synthetic oligonucleotide
  Target: LAMA2; (-) strand; PAM type: YTN; PAM sequence: TTC
ttctgaatcttcagaatgtc

SEQ ID NO: 212162 - DNA, 20 bp, Artificial Sequence
  Description of Artificial Sequence: Synthetic oligonucleotide
  Target: LAMA2; (-) strand; PAM type: YTN; PAM sequence: CTT
cttctgaatcttcagaatgt

SEQ ID NO: 212163 - DNA, 20 bp, Artificial Sequence
  Description of Artificial Sequence: Synthetic oligonucleotide
  Target: LAMA2; (-) strand; PAM type: YTN; PAM sequence: TTG
tatacttcttctgaatcttc

SEQ ID NO: 212164 - DNA, 20 bp, Artificial Sequence
  Description of Artificial Sequence: Synthetic oligonucleotide
  Target: LAMA2; (-) strand; PAM type: YTN; PAM sequence: TTA
gaaataatgttgtatacttc

SEQ ID NO: 212165 - DNA, 20 bp, Artificial Sequence
  Description of Artificial Sequence: Synthetic oligonucleotide
  Target: LAMA2; (-) strand; PAM type: YTN; PAM sequence: CTG
tagatgtaatcataacatta

SEQ ID NO: 212166 - DNA, 20 bp, Artificial Sequence
  Description of Artificial Sequence: Synthetic oligonucleotide
  Target: LAMA2; (-) strand; PAM type: YTN; PAM sequence: TTG
tctgtagatgtaatcataac

SEQ ID NO: 212167 - DNA, 20 bp, Artificial Sequence
  Description of Artificial Sequence: Synthetic oligonucleotide
  Target: LAMA2; (-) strand; PAM type: YTN; PAM sequence: TTT
gtctgtagatgtaatcataa

SEQ ID NO: 212168 - DNA, 20 bp, Artificial Sequence
  Description of Artificial Sequence: Synthetic oligonucleotide
  Target: LAMA2; (-) strand; PAM type: YTN; PAM sequence: CTT
tgtctgtagatgtaatcata

SEQ ID NO: 212169 - DNA, 20 bp, Artificial Sequence
  Description of Artificial Sequence: Synthetic oligonucleotide
  Target: LAMA2; (-) strand; PAM type: YTN; PAM sequence: TTC
tttgtctgtagatgtaatca

SEQ ID NO: 212170 - DNA, 20 bp, Artificial Sequence
  Description of Artificial Sequence: Synthetic oligonucleotide
  Target: LAMA2; (-) strand; PAM type: YTN; PAM sequence: TTG
attctttgtctgtagatgta

SEQ ID NO: 212171 - DNA, 20 bp, Artificial Sequence
  Description of Artificial Sequence: Synthetic oligonucleotide
  Target: LAMA2; (-) strand; PAM type: YTN; PAM sequence: TTT
gattctttgtctgtagatgt

SEQ ID NO: 212172 - DNA, 20 bp, Artificial Sequence
  Description of Artificial Sequence: Synthetic oligonucleotide
  Target: LAMA2; (-) strand; PAM type: YTN; PAM sequence: TTG
tttgattctttgtctgtaga

SEQ ID NO: 212173 - DNA, 20 bp, Artificial Sequence
  Description of Artificial Sequence: Synthetic oligonucleotide
  Target: LAMA2; (-) strand; PAM type: YTN; PAM sequence: TTA
aaaagaatcattgtttgatt

SEQ ID NO: 212174 - DNA, 20 bp, Artificial Sequence
  Description of Artificial Sequence: Synthetic oligonucleotide
  Target: LAMA2; (-) strand; PAM type: YTN; PAM sequence: TTA
ccattaaaaagaatcattgt

SEQ ID NO: 212175 - DNA, 20 bp, Artificial Sequence
  Description of Artificial Sequence: Synthetic oligonucleotide
  Target: LAMA2; (-) strand; PAM type: YTN; PAM sequence: TTA
aaaaacacaagttaccatta

SEQ ID NO: 212176 - DNA, 20 bp, Artificial Sequence
  Description of Artificial Sequence: Synthetic oligonucleotide
  Target: LAMA2; (-) strand; PAM type: YTN; PAM sequence: TTA
acattaaaaaacacaagtta

SEQ ID NO: 212177 - DNA, 20 bp, Artificial Sequence
  Description of Artificial Sequence: Synthetic oligonucleotide
  Target: LAMA2; (-) strand; PAM type: YTN; PAM sequence: TTT
aacattaaaaaacacaagtt

SEQ ID NO: 212178 - DNA, 20 bp, Artificial Sequence
  Description of Artificial Sequence: Synthetic oligonucleotide
  Target: LAMA2; (-) strand; PAM type: YTN; PAM sequence: CTT
taacattaaaaaacacaagt

SEQ ID NO: 212179 - DNA, 20 bp, Artificial Sequence
  Description of Artificial Sequence: Synthetic oligonucleotide
  Target: LAMA2; (-) strand; PAM type: YTN; PAM sequence: TTG
gcccatatctttaacattaa

SEQ ID NO: 212180 - DNA, 20 bp, Artificial Sequence
  Description of Artificial Sequence: Synthetic oligonucleotide
  Target: LAMA2; (-) strand; PAM type: YTN; PAM sequence: TTT
ggcccatatctttaacatta

SEQ ID NO: 212181 - DNA, 20 bp, Artificial Sequence
  Description of Artificial Sequence: Synthetic oligonucleotide
  Target: LAMA2; (-) strand; PAM type: YTN; PAM sequence: TTA
tcatttggcccatatcttta

SEQ ID NO: 212182 - DNA, 20 bp, Artificial Sequence
  Description of Artificial Sequence: Synthetic oligonucleotide
  Target: LAMA2; (-) strand; PAM type: YTN; PAM sequence: TTT
atcatttggcccatatcttt

SEQ ID NO: 212183 - DNA, 20 bp, Artificial Sequence
  Description of Artificial Sequence: Synthetic oligonucleotide
  Target: LAMA2; (-) strand; PAM type: YTN; PAM sequence: CTT
tatcatttggcccatatctt

SEQ ID NO: 212184 - DNA, 20 bp, Artificial Sequence
  Description of Artificial Sequence: Synthetic oligonucleotide
  Target: LAMA2; (-) strand; PAM type: YTN; PAM sequence: TTC
tttatcatttggcccatatc

SEQ ID NO: 212185 - DNA, 20 bp, Artificial Sequence
  Description of Artificial Sequence: Synthetic oligonucleotide
  Target: LAMA2; (-) strand; PAM type: YTN; PAM sequence: CTG
ttctttatcatttggcccat

SEQ ID NO: 212186 - DNA, 20 bp, Artificial Sequence
  Description of Artificial Sequence: Synthetic oligonucleotide
  Target: LAMA2; (-) strand; PAM type: YTN; PAM sequence: TTC
ctgttctttatcatttggcc

SEQ ID NO: 212187 - DNA, 20 bp, Artificial Sequence
  Description of Artificial Sequence: Synthetic oligonucleotide
  Target: LAMA2; (-) strand; PAM type: YTN; PAM sequence: TTT
cctgttctttatcatttggc

SEQ ID NO: 212188 - DNA, 20 bp, Artificial Sequence
  Description of Artificial Sequence: Synthetic oligonucleotide
  Target: LAMA2; (-) strand; PAM type: YTN; PAM sequence: TTT
tcctgttctttatcatttgg

SEQ ID NO: 212189 - DNA, 20 bp, Artificial Sequence
  Description of Artificial Sequence: Synthetic oligonucleotide
  Target: LAMA2; (-) strand; PAM type: YTN; PAM sequence: CTT
ttcctgttctttatcatttg

SEQ ID NO: 212190 - DNA, 20 bp, Artificial Sequence
  Description of Artificial Sequence: Synthetic oligonucleotide
  Target: LAMA2; (-) strand; PAM type: YTN; PAM sequence: CTC
atcttttcctgttctttatc

SEQ ID NO: 212191 - DNA, 20 bp, Artificial Sequence
  Description of Artificial Sequence: Synthetic oligonucleotide
  Target: LAMA2; (-) strand; PAM type: YTN; PAM sequence: CTG
atagagaaaaaaactcatct

SEQ ID NO: 212192 - DNA, 20 bp, Artificial Sequence
  Description of Artificial Sequence: Synthetic oligonucleotide
  Target: LAMA2; (-) strand; PAM type: YTN; PAM sequence: TTC
tgatagagaaaaaaactcat

SEQ ID NO: 212193 - DNA, 20 bp, Artificial Sequence
  Description of Artificial Sequence: Synthetic oligonucleotide
  Target: LAMA2; (-) strand; PAM type: YTN; PAM sequence: CTT
ctgatagagaaaaaaactca

SEQ ID NO: 212194 - DNA, 20 bp, Artificial Sequence
  Description of Artificial Sequence: Synthetic oligonucleotide
  Target: LAMA2; (-) strand; PAM type: YTN; PAM sequence: CTA
tccttctgatagagaaaaaa

SEQ ID NO: 212195 - DNA, 20 bp, Artificial Sequence
  Description of Artificial Sequence: Synthetic oligonucleotide
  Target: LAMA2; (-) strand; PAM type: YTN; PAM sequence: CTC
aaaatctatccttctgatag

SEQ ID NO: 212196 - DNA, 20 bp, Artificial Sequence
  Description of Artificial Sequence: Synthetic oligonucleotide
  Target: LAMA2; (-) strand; PAM type: YTN; PAM sequence: TTA
gctcaaaatctatccttctg

SEQ ID NO: 212197 - DNA, 20 bp, Artificial Sequence
  Description of Artificial Sequence: Synthetic oligonucleotide
  Target: LAMA2; (-) strand; PAM type: YTN; PAM sequence: TTC
aagattagctcaaaatctat

SEQ ID NO: 212198 - DNA, 20 bp, Artificial Sequence
  Description of Artificial Sequence: Synthetic oligonucleotide
  Target: LAMA2; (-) strand; PAM type: YTN; PAM sequence: TTT
caagattagctcaaaatcta

SEQ ID NO: 212199 - DNA, 20 bp, Artificial Sequence
  Description of Artificial Sequence: Synthetic oligonucleotide
  Target: LAMA2; (-) strand; PAM type: YTN; PAM sequence: CTT
tcaagattagctcaaaatct

SEQ ID NO: 212200 - DNA, 20 bp, Artificial Sequence
  Description of Artificial Sequence: Synthetic oligonucleotide
  Target: LAMA2; (-) strand; PAM type: YTN; PAM sequence: TTC
tttcaagattagctcaaaat

SEQ ID NO: 212201 - DNA, 20 bp, Artificial Sequence
  Description of Artificial Sequence: Synthetic oligonucleotide
  Target: LAMA2; (-) strand; PAM type: YTN; PAM sequence: TTT
ctttcaagattagctcaaaa

SEQ ID NO: 212202 - DNA, 20 bp, Artificial Sequence
  Description of Artificial Sequence: Synthetic oligonucleotide
  Target: LAMA2; (-) strand; PAM type: YTN; PAM sequence: TTA
gtatttctttcaagattagc

SEQ ID NO: 212203 - DNA, 20 bp, Artificial Sequence
  Description of Artificial Sequence: Synthetic oligonucleotide
  Target: LAMA2; (-) strand; PAM type: YTN; PAM sequence: TTT
agtatttctttcaagattag

SEQ ID NO: 212204 - DNA, 20 bp, Artificial Sequence
  Description of Artificial Sequence: Synthetic oligonucleotide
  Target: LAMA2; (-) strand; PAM type: YTN; PAM sequence: CTA
aatttagtatttctttcaag

SEQ ID NO: 212205 - DNA, 20 bp, Artificial Sequence
  Description of Artificial Sequence: Synthetic oligonucleotide
  Target: LAMA2; (-) strand; PAM type: YTN; PAM sequence: CTC
cataagtctaaatttagtat

SEQ ID NO: 212206 - DNA, 20 bp, Artificial Sequence
  Description of Artificial Sequence: Synthetic oligonucleotide
  Target: LAMA2; (-) strand; PAM type: YTN; PAM sequence: TTC
tccataagtctaaatttagt

SEQ ID NO: 212207 - DNA, 20 bp, Artificial Sequence
  Description of Artificial Sequence: Synthetic oligonucleotide
  Target: LAMA2; (-) strand; PAM type: YTN; PAM sequence: TTA
ttctccataagtctaaattt

SEQ ID NO: 212208 - DNA, 20 bp, Artificial Sequence
  Description of Artificial Sequence: Synthetic oligonucleotide
  Target: LAMA2; (-) strand; PAM type: YTN; PAM sequence: CTA
aattattctccataagtcta

SEQ ID NO: 212209 - DNA, 20 bp, Artificial Sequence
  Description of Artificial Sequence: Synthetic oligonucleotide
  Target: LAMA2; (-) strand; PAM type: YTN; PAM sequence: TTC
ctaaattattctccataagt

SEQ ID NO: 212210 - DNA, 20 bp, Artificial Sequence
  Description of Artificial Sequence: Synthetic oligonucleotide
  Target: LAMA2; (-) strand; PAM type: YTN; PAM sequence: TTT
cctaaattattctccataag

SEQ ID NO: 212211 - DNA, 20 bp, Artificial Sequence
  Description of Artificial Sequence: Synthetic oligonucleotide
  Target: LAMA2; (-) strand; PAM type: YTN; PAM sequence: CTT
tcctaaattattctccataa

SEQ ID NO: 212212 - DNA, 20 bp, Artificial Sequence
  Description of Artificial Sequence: Synthetic oligonucleotide
  Target: LAMA2; (-) strand; PAM type: YTN; PAM sequence: TTG
ctttcctaaattattctcca

SEQ ID NO: 212213 - DNA, 20 bp, Artificial Sequence
  Description of Artificial Sequence: Synthetic oligonucleotide
  Target: LAMA2; (-) strand; PAM type: YTN; PAM sequence: TTC
aattgctttcctaaattatt

SEQ ID NO: 212214 - DNA, 20 bp, Artificial Sequence
  Description of Artificial Sequence: Synthetic oligonucleotide
  Target: LAMA2; (-) strand; PAM type: YTN; PAM sequence: CTG
ggtagtgttcaattgctttc

SEQ ID NO: 212215 - DNA, 20 bp, Artificial Sequence
  Description of Artificial Sequence: Synthetic oligonucleotide
  Target: LAMA2; (-) strand; PAM type: YTN; PAM sequence: CTC
ccctgggtagtgttcaattg

SEQ ID NO: 212216 - DNA, 20 bp, Artificial Sequence
  Description of Artificial Sequence: Synthetic oligonucleotide
  Target: LAMA2; (-) strand; PAM type: YTN; PAM sequence: TTC
ccacctcccctgggtagtgt

SEQ ID NO: 212217 - DNA, 20 bp, Artificial Sequence
  Description of Artificial Sequence: Synthetic oligonucleotide
  Target: LAMA2; (-) strand; PAM type: YTN; PAM sequence: CTT
cccacctcccctgggtagtg

SEQ ID NO: 212218 - DNA, 20 bp, Artificial Sequence
  Description of Artificial Sequence: Synthetic oligonucleotide
  Target: LAMA2; (-) strand; PAM type: YTN; PAM sequence: CTC
acttcccacctcccctgggt

SEQ ID NO: 212219 - DNA, 20 bp, Artificial Sequence
  Description of Artificial Sequence: Synthetic oligonucleotide
  Target: LAMA2; (-) strand; PAM type: YTN; PAM sequence: CTG
aacacagcatctcacttccc

SEQ ID NO: 212220 - DNA, 20 bp, Artificial Sequence
  Description of Artificial Sequence: Synthetic oligonucleotide
  Target: LAMA2; (-) strand; PAM type: YTN; PAM sequence: CTC
tgaacacagcatctcacttc

SEQ ID NO: 212221 - DNA, 20 bp, Artificial Sequence
  Description of Artificial Sequence: Synthetic oligonucleotide
  Target: LAMA2; (-) strand; PAM type: YTN; PAM sequence: CTC
actctgaacacagcatctca

SEQ ID NO: 212222 - DNA, 20 bp, Artificial Sequence
  Description of Artificial Sequence: Synthetic oligonucleotide
  Target: LAMA2; (-) strand; PAM type: YTN; PAM sequence: TTA
tctcactctgaacacagcat

SEQ ID NO: 212223 - DNA, 20 bp, Artificial Sequence
  Description of Artificial Sequence: Synthetic oligonucleotide
  Target: LAMA2; (-) strand; PAM type: YTN; PAM sequence: CTT
atctcactctgaacacagca

SEQ ID NO: 212224 - DNA, 20 bp, Artificial Sequence
  Description of Artificial Sequence: Synthetic oligonucleotide
  Target: LAMA2; (-) strand; PAM type: YTN; PAM sequence: TTC
cttatctcactctgaacaca

SEQ ID NO: 212225 - DNA, 20 bp, Artificial Sequence
  Description of Artificial Sequence: Synthetic oligonucleotide
  Target: LAMA2; (-) strand; PAM type: YTN; PAM sequence: TTT
ccttatctcactctgaacac

SEQ ID NO: 212226 - DNA, 20 bp, Artificial Sequence
  Description of Artificial Sequence: Synthetic oligonucleotide
  Target: LAMA2; (-) strand; PAM type: YTN; PAM sequence: TTA
tttccttatctcactctgaa

SEQ ID NO: 212227 - DNA, 20 bp, Artificial Sequence
  Description of Artificial Sequence: Synthetic oligonucleotide
  Target: LAMA2; (-) strand; PAM type: YTN; PAM sequence: CTG
gtcaaattatttccttatct

SEQ ID NO: 212228 - DNA, 20 bp, Artificial Sequence
  Description of Artificial Sequence: Synthetic oligonucleotide
  Target: LAMA2; (-) strand; PAM type: YTN; PAM sequence: CTC
tggtcaaattatttccttat

SEQ ID NO: 212229 - DNA, 20 bp, Artificial Sequence
  Description of Artificial Sequence: Synthetic oligonucleotide
  Target: LAMA2; (-) strand; PAM type: YTN; PAM sequence: TTA
aaatcccatgctctggtcaa

SEQ ID NO: 212230 - DNA, 20 bp, Artificial Sequence
  Description of Artificial Sequence: Synthetic oligonucleotide
  Target: LAMA2; (-) strand; PAM type: YTN; PAM sequence: CTC
aattaaaatcccatgctctg

SEQ ID NO: 212231 - DNA, 20 bp, Artificial Sequence
  Description of Artificial Sequence: Synthetic oligonucleotide
  Target: LAMA2; (-) strand; PAM type: YTN; PAM sequence: TTC
tcaattaaaatcccatgctc

SEQ ID NO: 212232 - DNA, 20 bp, Artificial Sequence
  Description of Artificial Sequence: Synthetic oligonucleotide
  Target: LAMA2; (-) strand; PAM type: YTN; PAM sequence: TTA
atattctcaattaaaatccc

SEQ ID NO: 212233 - DNA, 20 bp, Artificial Sequence
  Description of Artificial Sequence: Synthetic oligonucleotide
  Target: LAMA2; (-) strand; PAM type: YTN; PAM sequence: CTT
aatattctcaattaaaatcc

SEQ ID NO: 212234 - DNA, 20 bp, Artificial Sequence
  Description of Artificial Sequence: Synthetic oligonucleotide
  Target: LAMA2; (-) strand; PAM type: YTN; PAM sequence: CTC
ttaatattctcaattaaaat

SEQ ID NO: 212235 - DNA, 20 bp, Artificial Sequence
  Description of Artificial Sequence: Synthetic oligonucleotide
  Target: LAMA2; (-) strand; PAM type: YTN; PAM sequence: TTA
tctcttaatattctcaatta

SEQ ID NO: 212236 - DNA, 20 bp, Artificial Sequence
  Description of Artificial Sequence: Synthetic oligonucleotide
  Target: LAMA2; (-) strand; PAM type: YTN; PAM sequence: TTT
atctcttaatattctcaatt

SEQ ID NO: 212237 - DNA, 20 bp, Artificial Sequence
  Description of Artificial Sequence: Synthetic oligonucleotide
  Target: LAMA2; (-) strand; PAM type: YTN; PAM sequence: TTT
tatctcttaatattctcaat

SEQ ID NO: 212238 - DNA, 20 bp, Artificial Sequence
  Description of Artificial Sequence: Synthetic oligonucleotide
  Target: LAMA2; (-) strand; PAM type: YTN; PAM sequence: TTA
taattttatctcttaatatt

SEQ ID NO: 212239 - DNA, 20 bp, Artificial Sequence
  Description of Artificial Sequence: Synthetic oligonucleotide
  Target: LAMA2; (-) strand; PAM type: YTN; PAM sequence: TTA
ttataattttatctcttaat

SEQ ID NO: 212240 - DNA, 20 bp, Artificial Sequence
  Description of Artificial Sequence: Synthetic oligonucleotide
  Target: LAMA2; (-) strand; PAM type: YTN; PAM sequence: TTT
attataattttatctcttaa

SEQ ID NO: 212241 - DNA, 20 bp, Artificial Sequence
  Description of Artificial Sequence: Synthetic oligonucleotide
  Target: LAMA2; (-) strand; PAM type: YTN; PAM sequence: CTA
catttattataattttatct

SEQ ID NO: 212242 - DNA, 20 bp, Artificial Sequence
  Description of Artificial Sequence: Synthetic oligonucleotide
  Target: LAMA2; (-) strand; PAM type: YTN; PAM sequence: TTC
cctacatttattataatttt

SEQ ID NO: 212243 - DNA, 20 bp, Artificial Sequence
  Description of Artificial Sequence: Synthetic oligonucleotide
  Target: LAMA2; (-) strand; PAM type: YTN; PAM sequence: CTT
ccctacatttattataattt

SEQ ID NO: 212244 - DNA, 20 bp, Artificial Sequence
  Description of Artificial Sequence: Synthetic oligonucleotide
  Target: LAMA2; (-) strand; PAM type: YTN; PAM sequence: CTG
atacaccttccctacattta

SEQ ID NO: 212245 - DNA, 20 bp, Artificial Sequence
  Description of Artificial Sequence: Synthetic oligonucleotide
  Target: LAMA2; (-) strand; PAM type: YTN; PAM sequence: CTC
tgatacaccttccctacatt

SEQ ID NO: 212246 - DNA, 20 bp, Artificial Sequence
  Description of Artificial Sequence: Synthetic oligonucleotide
  Target: LAMA2; (-) strand; PAM type: YTN; PAM sequence: CTC
actctgatacaccttcccta

SEQ ID NO: 212247 - DNA, 20 bp, Artificial Sequence
  Description of Artificial Sequence: Synthetic oligonucleotide
  Target: LAMA2; (-) strand; PAM type: YTN; PAM sequence: TTC
aagtatagtatatcataatc

SEQ ID NO: 212248 - DNA, 20 bp, Artificial Sequence
  Description of Artificial Sequence: Synthetic oligonucleotide
  Target: LAMA2; (-) strand; PAM type: YTN; PAM sequence: TTT
caagtatagtatatcataat

SEQ ID NO: 212249 - DNA, 20 bp, Artificial Sequence
  Description of Artificial Sequence: Synthetic oligonucleotide
  Target: LAMA2; (-) strand; PAM type: YTN; PAM sequence: TTA
gatatttcaagtatagtata

SEQ ID NO: 212250 - DNA, 20 bp, Artificial Sequence
  Description of Artificial Sequence: Synthetic oligonucleotide
  Target: LAMA2; (-) strand; PAM type: YTN; PAM sequence: TTT
agatatttcaagtatagtat

SEQ ID NO: 212251 - DNA, 20 bp, Artificial Sequence
  Description of Artificial Sequence: Synthetic oligonucleotide
  Target: LAMA2; (-) strand; PAM type: YTN; PAM sequence: TTC
atttagatatttcaagtata

SEQ ID NO: 212252 - DNA, 20 bp, Artificial Sequence
  Description of Artificial Sequence: Synthetic oligonucleotide
  Target: LAMA2; (-) strand; PAM type: YTN; PAM sequence: CTT
catttagatatttcaagtat

SEQ ID NO: 212253 - DNA, 20 bp, Artificial Sequence
  Description of Artificial Sequence: Synthetic oligonucleotide
  Target: LAMA2; (-) strand; PAM type: YTN; PAM sequence: TTA
gagtaaacataaatacttca

SEQ ID NO: 212254 - DNA, 20 bp, Artificial Sequence
  Description of Artificial Sequence: Synthetic oligonucleotide
  Target: LAMA2; (-) strand; PAM type: YTN; PAM sequence: TTT
agagtaaacataaatacttc

SEQ ID NO: 212255 - DNA, 20 bp, Artificial Sequence
  Description of Artificial Sequence: Synthetic oligonucleotide
  Target: LAMA2; (-) strand; PAM type: YTN; PAM sequence: TTT
tagagtaaacataaatactt

SEQ ID NO: 212256 - DNA, 20 bp, Artificial Sequence
  Description of Artificial Sequence: Synthetic oligonucleotide
  Target: LAMA2; (-) strand; PAM type: YTN; PAM sequence: CTT
ttagagtaaacataaatact

SEQ ID NO: 212257 - DNA, 20 bp, Artificial Sequence
  Description of Artificial Sequence: Synthetic oligonucleotide
  Target: LAMA2; (-) strand; PAM type: YTN; PAM sequence: TTG
acttttagagtaaacataaa

SEQ ID NO: 212258 - DNA, 20 bp, Artificial Sequence
  Description of Artificial Sequence: Synthetic oligonucleotide
  Target: LAMA2; (-) strand; PAM type: YTN; PAM sequence: CTT
gacttttagagtaaacataa

SEQ ID NO: 212259 - DNA, 20 bp, Artificial Sequence
  Description of Artificial Sequence: Synthetic oligonucleotide
  Target: LAMA2; (-) strand; PAM type: YTN; PAM sequence: CTC
acttgacttttagagtaaac

SEQ ID NO: 212260 - DNA, 20 bp, Artificial Sequence
  Description of Artificial Sequence: Synthetic oligonucleotide
  Target: LAMA2; (-) strand; PAM type: YTN; PAM sequence: CTC
tcacttgacttttagagtaa

SEQ ID NO: 212261 - DNA, 20 bp, Artificial Sequence
  Description of Artificial Sequence: Synthetic oligonucleotide
  Target: LAMA2; (-) strand; PAM type: YTN; PAM sequence: CTC
tctcacttgacttttagagt

SEQ ID NO: 212262 - DNA, 20 bp, Artificial Sequence
  Description of Artificial Sequence: Synthetic oligonucleotide
  Target: LAMA2; (-) strand; PAM type: YTN; PAM sequence: CTC
cagaatctctctcacttgac

SEQ ID NO: 212263 - DNA, 20 bp, Artificial Sequence
  Description of Artificial Sequence: Synthetic oligonucleotide
  Target: LAMA2; (-) strand; PAM type: YTN; PAM sequence: CTC
actccagaatctctctcact

SEQ ID NO: 212264 - DNA, 20 bp, Artificial Sequence
  Description of Artificial Sequence: Synthetic oligonucleotide
  Target: LAMA2; (-) strand; PAM type: YTN; PAM sequence: TTG
tctcactccagaatctctct

SEQ ID NO: 212265 - DNA, 20 bp, Artificial Sequence
  Description of Artificial Sequence: Synthetic oligonucleotide
  Target: LAMA2; (-) strand; PAM type: YTN; PAM sequence: CTT
gtctcactccagaatctctc

SEQ ID NO: 212266 - DNA, 20 bp, Artificial Sequence
  Description of Artificial Sequence: Synthetic oligonucleotide
  Target: LAMA2; (-) strand; PAM type: YTN; PAM sequence: TTC
ttgtctcactccagaatctc

SEQ ID NO: 212267 - DNA, 20 bp, Artificial Sequence
  Description of Artificial Sequence: Synthetic oligonucleotide
  Target: LAMA2; (-) strand; PAM type: YTN; PAM sequence: CTC
acattcttgtctcactccag

SEQ ID NO: 212268 - DNA, 20 bp, Artificial Sequence
  Description of Artificial Sequence: Synthetic oligonucleotide
  Target: LAMA2; (-) strand; PAM type: YTN; PAM sequence: TTC
ctcacattcttgtctcactc

SEQ ID NO: 212269 - DNA, 20 bp, Artificial Sequence
  Description of Artificial Sequence: Synthetic oligonucleotide
  Target: LAMA2; (-) strand; PAM type: YTN; PAM sequence: CTC
cacagaagtccccattcctc

SEQ ID NO: 212270 - DNA, 20 bp, Artificial Sequence
  Description of Artificial Sequence: Synthetic oligonucleotide
  Target: LAMA2; (-) strand; PAM type: YTN; PAM sequence: TTA
aactccacagaagtccccat

SEQ ID NO: 212271 - DNA, 20 bp, Artificial Sequence
  Description of Artificial Sequence: Synthetic oligonucleotide
  Target: LAMA2; (-) strand; PAM type: YTN; PAM sequence: CTA
tagattaaactccacagaag

SEQ ID NO: 212272 - DNA, 20 bp, Artificial Sequence
  Description of Artificial Sequence: Synthetic oligonucleotide
  Target: LAMA2; (-) strand; PAM type: YTN; PAM sequence: TTA
ctatagattaaactccacag

SEQ ID NO: 212273 - DNA, 20 bp, Artificial Sequence
  Description of Artificial Sequence: Synthetic oligonucleotide
  Target: LAMA2; (-) strand; PAM type: YTN; PAM sequence: TTC
atgtgcattactatagatta

SEQ ID NO: 212274 - DNA, 20 bp, Artificial Sequence
  Description of Artificial Sequence: Synthetic oligonucleotide
  Target: LAMA2; (-) strand; PAM type: YTN; PAM sequence: TTA
tcagattcatgtgcattact

SEQ ID NO: 212275 - DNA, 20 bp, Artificial Sequence
  Description of Artificial Sequence: Synthetic oligonucleotide
  Target: LAMA2; (-) strand; PAM type: YTN; PAM sequence: TTT
atcagattcatgtgcattac

SEQ ID NO: 212276 - DNA, 20 bp, Artificial Sequence
  Description of Artificial Sequence: Synthetic oligonucleotide
  Target: LAMA2; (-) strand; PAM type: YTN; PAM sequence: TTA
taataatttatcagattcat

SEQ ID NO: 212277 - DNA, 20 bp, Artificial Sequence
  Description of Artificial Sequence: Synthetic oligonucleotide
  Target: LAMA2; (-) strand; PAM type: YTN; PAM sequence: CTA
aaagcaaagattataataat

SEQ ID NO: 212278 - DNA, 20 bp, Artificial Sequence
  Description of Artificial Sequence: Synthetic oligonucleotide
  Target: LAMA2; (-) strand; PAM type: YTN; PAM sequence: CTA
ctaaaagcaaagattataat

SEQ ID NO: 212279 - DNA, 20 bp, Artificial Sequence
  Description of Artificial Sequence: Synthetic oligonucleotide
  Target: LAMA2; (-) strand; PAM type: YTN; PAM sequence: TTC
tactaaaagcaaagattata

SEQ ID NO: 212280 - DNA, 20 bp, Artificial Sequence
  Description of Artificial Sequence: Synthetic oligonucleotide
  Target: LAMA2; (-) strand; PAM type: YTN; PAM sequence: TTT
ctactaaaagcaaagattat

SEQ ID NO: 212281 - DNA, 20 bp, Artificial Sequence
  Description of Artificial Sequence: Synthetic oligonucleotide
  Target: LAMA2; (-) strand; PAM type: YTN; PAM sequence: CTA
aatccccatttctactaaaa

SEQ ID NO: 212282 - DNA, 20 bp, Artificial Sequence
  Description of Artificial Sequence: Synthetic oligonucleotide
  Target: LAMA2; (-) strand; PAM type: YTN; PAM sequence: CTC
taaatccccatttctactaa

SEQ ID NO: 212283 - DNA, 20 bp, Artificial Sequence
  Description of Artificial Sequence: Synthetic oligonucleotide
  Target: LAMA2; (-) strand; PAM type: YTN; PAM sequence: CTG
atgtactctaaatccccatt

SEQ ID NO: 212284 - DNA, 20 bp, Artificial Sequence
  Description of Artificial Sequence: Synthetic oligonucleotide
  Target: LAMA2; (-) strand; PAM type: YTN; PAM sequence: CTG
tactgatgtactctaaatcc

SEQ ID NO: 212285 - DNA, 20 bp, Artificial Sequence
  Description of Artificial Sequence: Synthetic oligonucleotide
  Target: LAMA2; (-) strand; PAM type: YTN; PAM sequence: TTC
gccacctgtactgatgtact

SEQ ID NO: 212286 - DNA, 20 bp, Artificial Sequence
  Description of Artificial Sequence: Synthetic oligonucleotide
  Target: LAMA2; (-) strand; PAM type: YTN; PAM sequence: TTT
cgccacctgtactgatgtac

SEQ ID NO: 212287 - DNA, 20 bp, Artificial Sequence
  Description of Artificial Sequence: Synthetic oligonucleotide
  Target: LAMA2; (-) strand; PAM type: YTN; PAM sequence: TTT
tcgccacctgtactgatgta

SEQ ID NO: 212288 - DNA, 20 bp, Artificial Sequence
  Description of Artificial Sequence: Synthetic oligonucleotide
  Target: LAMA2; (-) strand; PAM type: YTN; PAM sequence: TTT
ttcgccacctgtactgatgt

SEQ ID NO: 212289 - DNA, 20 bp, Artificial Sequence
  Description of Artificial Sequence: Synthetic oligonucleotide
  Target: LAMA2; (-) strand; PAM type: YTN; PAM sequence: TTC
acatttttcgccacctgtac

SEQ ID NO: 212290 - DNA, 20 bp, Artificial Sequence
  Description of Artificial Sequence: Synthetic oligonucleotide
  Target: LAMA2; (-) strand; PAM type: YTN; PAM sequence: TTA
aattcacatttttcgccacc

SEQ ID NO: 212291 - DNA, 20 bp, Artificial Sequence
  Description of Artificial Sequence: Synthetic oligonucleotide
  Target: LAMA2; (-) strand; PAM type: YTN; PAM sequence: TTT
aaattcacatttttcgccac

SEQ ID NO: 212292 - DNA, 20 bp, Artificial Sequence
  Description of Artificial Sequence: Synthetic oligonucleotide
  Target: LAMA2; (-) strand; PAM type: YTN; PAM sequence: TTT
taaattcacatttttcgcca

SEQ ID NO: 212293 - DNA, 20 bp, Artificial Sequence
  Description of Artificial Sequence: Synthetic oligonucleotide
  Target: LAMA2; (-) strand; PAM type: YTN; PAM sequence: TTC
aaaatatgttttaaattcac

SEQ ID NO: 212294 - DNA, 20 bp, Artificial Sequence
  Description of Artificial Sequence: Synthetic oligonucleotide
  Target: LAMA2; (-) strand; PAM type: YTN; PAM sequence: TTT
caaaatatgttttaaattca

SEQ ID NO: 212295 - DNA, 20 bp, Artificial Sequence
  Description of Artificial Sequence: Synthetic oligonucleotide
  Target: LAMA2; (-) strand; PAM type: YTN; PAM sequence: TTT
tcaaaatatgttttaaattc

SEQ ID NO: 212296 - DNA, 20 bp, Artificial Sequence
  Description of Artificial Sequence: Synthetic oligonucleotide
  Target: LAMA2; (-) strand; PAM type: YTN; PAM sequence: TTT
ttcaaaatatgttttaaatt

SEQ ID NO: 212297 - DNA, 20 bp, Artificial Sequence
  Description of Artificial Sequence: Synthetic oligonucleotide
  Target: LAMA2; (-) strand; PAM type: YTN; PAM sequence: TTG
tttttcaaaatatgttttaa

SEQ ID NO: 212298 - DNA, 20 bp, Artificial Sequence
  Description of Artificial Sequence: Synthetic oligonucleotide
  Target: LAMA2; (-) strand; PAM type: YTN; PAM sequence: CTT
gtttttcaaaatatgtttta

SEQ ID NO: 212299 - DNA, 20 bp, Artificial Sequence
  Description of Artificial Sequence: Synthetic oligonucleotide
  Target: LAMA2; (-) strand; PAM type: YTN; PAM sequence: TTA
tccttgtttttcaaaatatg

SEQ ID NO: 212300 - DNA, 20 bp, Artificial Sequence
  Description of Artificial Sequence: Synthetic oligonucleotide
  Target: LAMA2; (-) strand; PAM type: YTN; PAM sequence: CTT
atccttgtttttcaaaatat

SEQ ID NO: 212301 - DNA, 20 bp, Artificial Sequence
  Description of Artificial Sequence: Synthetic oligonucleotide
  Target: LAMA2; (-) strand; PAM type: YTN; PAM sequence: TTC
ttatccttgtttttcaaaat

SEQ ID NO: 212302 - DNA, 20 bp, Artificial Sequence
  Description of Artificial Sequence: Synthetic oligonucleotide
  Target: LAMA2; (-) strand; PAM type: YTN; PAM sequence: CTA
attcttatccttgtttttca

SEQ ID NO: 212303 - DNA, 20 bp, Artificial Sequence
  Description of Artificial Sequence: Synthetic oligonucleotide
  Target: LAMA2; (-) strand; PAM type: YTN; PAM sequence: TTA
aacactaattcttatccttg

SEQ ID NO: 212304 - DNA, 20 bp, Artificial Sequence
  Description of Artificial Sequence: Synthetic oligonucleotide
  Target: LAMA2; (-) strand; PAM type: YTN; PAM sequence: TTT
aaacactaattcttatcctt

SEQ ID NO: 212305 - DNA, 20 bp, Artificial Sequence
  Description of Artificial Sequence: Synthetic oligonucleotide
  Target: LAMA2; (-) strand; PAM type: YTN; PAM sequence: TTT
taaacactaattcttatcct

SEQ ID NO: 212306 - DNA, 20 bp, Artificial Sequence
  Description of Artificial Sequence: Synthetic oligonucleotide
  Target: LAMA2; (-) strand; PAM type: YTN; PAM sequence: CTT
ttaaacactaattcttatcc

SEQ ID NO: 212307 - DNA, 20 bp, Artificial Sequence
  Description of Artificial Sequence: Synthetic oligonucleotide
  Target: LAMA2; (-) strand; PAM type: YTN; PAM sequence: TTA
gcttttaaacactaattctt

SEQ ID NO: 212308 - DNA, 20 bp, Artificial Sequence
  Description of Artificial Sequence: Synthetic oligonucleotide
  Target: LAMA2; (-) strand; PAM type: YTN; PAM sequence: TTT
agcttttaaacactaattct

SEQ ID NO: 212309 - DNA, 20 bp, Artificial Sequence
  Description of Artificial Sequence: Synthetic oligonucleotide
  Target: LAMA2; (-) strand; PAM type: YTN; PAM sequence: TTT
tagcttttaaacactaattc

SEQ ID NO: 212310 - DNA, 20 bp, Artificial Sequence
  Description of Artificial Sequence: Synthetic oligonucleotide
  Target: LAMA2; (-) strand; PAM type: YTN; PAM sequence: CTT
ttagcttttaaacactaatt

SEQ ID NO: 212311 - DNA, 20 bp, Artificial Sequence
  Description of Artificial Sequence: Synthetic oligonucleotide
  Target: LAMA2; (-) strand; PAM type: YTN; PAM sequence: CTC
ttttagcttttaaacactaa

SEQ ID NO: 212312 - DNA, 20 bp, Artificial Sequence
  Description of Artificial Sequence: Synthetic oligonucleotide
  Target: LAMA2; (-) strand; PAM type: YTN; PAM sequence: TTC
tcttttagcttttaaacact

SEQ ID NO: 212313 - DNA, 20 bp, Artificial Sequence
  Description of Artificial Sequence: Synthetic oligonucleotide
  Target: LAMA2; (-) strand; PAM type: YTN; PAM sequence: CTT
ctcttttagcttttaaacac

SEQ ID NO: 212314 - DNA, 20 bp, Artificial Sequence
  Description of Artificial Sequence: Synthetic oligonucleotide
  Target: LAMA2; (-) strand; PAM type: YTN; PAM sequence: TTC
ttctcttttagcttttaaac

SEQ ID NO: 212315 - DNA, 20 bp, Artificial Sequence
  Description of Artificial Sequence: Synthetic oligonucleotide
  Target: LAMA2; (-) strand; PAM type: YTN; PAM sequence: CTG
acacaaattcttctctttta

SEQ ID NO: 212316 - DNA, 20 bp, Artificial Sequence
  Description of Artificial Sequence: Synthetic oligonucleotide
  Target: LAMA2; (-) strand; PAM type: YTN; PAM sequence: TTG
cagctgacacaaattcttct

SEQ ID NO: 212317 - DNA, 20 bp, Artificial Sequence
  Description of Artificial Sequence: Synthetic oligonucleotide
  Target: LAMA2; (-) strand; PAM type: YTN; PAM sequence: TTT
gcagctgacacaaattcttc

SEQ ID NO: 212318 - DNA, 20 bp, Artificial Sequence
  Description of Artificial Sequence: Synthetic oligonucleotide
  Target: LAMA2; (-) strand; PAM type: YTN; PAM sequence: TTT
tgcagctgacacaaattctt

SEQ ID NO: 212319 - DNA, 20 bp, Artificial Sequence
  Description of Artificial Sequence: Synthetic oligonucleotide
  Target: LAMA2; (-) strand; PAM type: YTN; PAM sequence: TTA
ttttgcagctgacacaaatt

SEQ ID NO: 212320 - DNA, 20 bp, Artificial Sequence
  Description of Artificial Sequence: Synthetic oligonucleotide
  Target: LAMA2; (-) strand; PAM type: YTN; PAM sequence: TTT
attttgcagctgacacaaat

SEQ ID NO: 212321 - DNA, 20 bp, Artificial Sequence
  Description of Artificial Sequence: Synthetic oligonucleotide
  Target: LAMA2; (-) strand; PAM type: YTN; PAM sequence: CTT
tattttgcagctgacacaaa

SEQ ID NO: 212322 - DNA, 20 bp, Artificial Sequence
  Description of Artificial Sequence: Synthetic oligonucleotide
  Target: LAMA2; (-) strand; PAM type: YTN; PAM sequence: TTA
ctttattttgcagctgacac

SEQ ID NO: 212323 - DNA, 20 bp, Artificial Sequence
  Description of Artificial Sequence: Synthetic oligonucleotide
  Target: LAMA2; (-) strand; PAM type: YTN; PAM sequence: TTT
actttattttgcagctgaca

SEQ ID NO: 212324 - DNA, 20 bp, Artificial Sequence
  Description of Artificial Sequence: Synthetic oligonucleotide
  Target: LAMA2; (-) strand; PAM type: YTN; PAM sequence: TTA
tgagcatgtatgtagtgtat

SEQ ID NO: 212325 - DNA, 20 bp, Artificial Sequence
  Description of Artificial Sequence: Synthetic oligonucleotide
  Target: LAMA2; (-) strand; PAM type: YTN; PAM sequence: TTA
aattatgagcatgtatgtag

SEQ ID NO: 212326 - DNA, 20 bp, Artificial Sequence
  Description of Artificial Sequence: Synthetic oligonucleotide
  Target: LAMA2; (-) strand; PAM type: YTN; PAM sequence: TTT
aaattatgagcatgtatgta

SEQ ID NO: 212327 - DNA, 20 bp, Artificial Sequence
  Description of Artificial Sequence: Synthetic oligonucleotide
  Target: LAMA2; (-) strand; PAM type: YTN; PAM sequence: TTC
ataatttaaattatgagcat

SEQ ID NO: 212328 - DNA, 20 bp, Artificial Sequence
  Description of Artificial Sequence: Synthetic oligonucleotide
  Target: LAMA2; (-) strand; PAM type: YTN; PAM sequence: TTA
cacagcagagtgtgataaaa

SEQ ID NO: 212329 - DNA, 20 bp, Artificial Sequence
  Description of Artificial Sequence: Synthetic oligonucleotide
  Target: LAMA2; (-) strand; PAM type: YTN; PAM sequence: CTT
acacagcagagtgtgataaa

SEQ ID NO: 212330 - DNA, 20 bp, Artificial Sequence
  Description of Artificial Sequence: Synthetic oligonucleotide
  Target: LAMA2; (-) strand; PAM type: YTN; PAM sequence: TTA
gaaaaacttacacagcagag

SEQ ID NO: 212331 - DNA, 20 bp, Artificial Sequence
  Description of Artificial Sequence: Synthetic oligonucleotide
  Target: LAMA2; (-) strand; PAM type: YTN; PAM sequence: CTG
atatacaatatgagttagaa

SEQ ID NO: 212332 - DNA, 20 bp, Artificial Sequence
  Description of Artificial Sequence: Synthetic oligonucleotide
  Target: LAMA2; (-) strand; PAM type: YTN; PAM sequence: TTA
atgcaagaatacaacatggc

SEQ ID NO: 212333 - DNA, 20 bp, Artificial Sequence
  Description of Artificial Sequence: Synthetic oligonucleotide
  Target: LAMA2; (-) strand; PAM type: YTN; PAM sequence: TTA
attaatgcaagaatacaaca

SEQ ID NO: 212334 - DNA, 20 bp, Artificial Sequence
  Description of Artificial Sequence: Synthetic oligonucleotide
  Target: LAMA2; (-) strand; PAM type: YTN; PAM sequence: TTA
atgaatacattaattaatgc

SEQ ID NO: 212335 - DNA, 20 bp, Artificial Sequence
  Description of Artificial Sequence: Synthetic oligonucleotide
  Target: LAMA2; (-) strand; PAM type: YTN; PAM sequence: TTT
aatgaatacattaattaatg

SEQ ID NO: 212336 - DNA, 20 bp, Artificial Sequence
  Description of Artificial Sequence: Synthetic oligonucleotide
  Target: LAMA2; (-) strand; PAM type: YTN; PAM sequence: CTG
aagacatatttaatgaatac

SEQ ID NO: 212337 - DNA, 20 bp, Artificial Sequence
  Description of Artificial Sequence: Synthetic oligonucleotide
  Target: LAMA2; (-) strand; PAM type: YTN; PAM sequence: CTG
gacccaaaaaagtactgaag

SEQ ID NO: 212338 - DNA, 20 bp, Artificial Sequence
  Description of Artificial Sequence: Synthetic oligonucleotide
  Target: LAMA2; (-) strand; PAM type: YTN; PAM sequence: CTA
atgtaatgctggacccaaaa

SEQ ID NO: 212339 - DNA, 20 bp, Artificial Sequence
  Description of Artificial Sequence: Synthetic oligonucleotide
  Target: LAMA2; (-) strand; PAM type: YTN; PAM sequence: CTG
cctaatgtaatgctggaccc

SEQ ID NO: 212340 - DNA, 20 bp, Artificial Sequence
  Description of Artificial Sequence: Synthetic oligonucleotide
  Target: LAMA2; (-) strand; PAM type: YTN; PAM sequence: CTG
aataatatatctgcctaatg

SEQ ID NO: 212341 - DNA, 20 bp, Artificial Sequence
  Description of Artificial Sequence: Synthetic oligonucleotide
  Target: LAMA2; (-) strand; PAM type: YTN; PAM sequence: TTG
ctgaataatatatctgccta

SEQ ID NO: 212342 - DNA, 20 bp, Artificial Sequence
  Description of Artificial Sequence: Synthetic oligonucleotide
  Target: LAMA2; (-) strand; PAM type: YTN; PAM sequence: CTT
gctgaataatatatctgcct

SEQ ID NO: 212343 - DNA, 20 bp, Artificial Sequence
  Description of Artificial Sequence: Synthetic oligonucleotide
  Target: LAMA2; (-) strand; PAM type: YTN; PAM sequence: TTG
aaaacttgctgaataatata

SEQ ID NO: 212344 - DNA, 20 bp, Artificial Sequence
  Description of Artificial Sequence: Synthetic oligonucleotide
  Target: LAMA2; (-) strand; PAM type: YTN; PAM sequence: CTA
aattgaaaacttgctgaata

SEQ ID NO: 212345 - DNA, 20 bp, Artificial Sequence
  Description of Artificial Sequence: Synthetic oligonucleotide
  Target: LAMA2; (-) strand; PAM type: YTN; PAM sequence: CTG
aactaaattgaaaacttgct

SEQ ID NO: 212346 - DNA, 20 bp, Artificial Sequence
  Description of Artificial Sequence: Synthetic oligonucleotide
  Target: LAMA2; (-) strand; PAM type: YTN; PAM sequence: TTC
cctgaactaaattgaaaact

SEQ ID NO: 212347 - DNA, 20 bp, Artificial Sequence
  Description of Artificial Sequence: Synthetic oligonucleotide
  Target: LAMA2; (-) strand; PAM type: YTN; PAM sequence: TTT
ccctgaactaaattgaaaac

SEQ ID NO: 212348 - DNA, 20 bp, Artificial Sequence
  Description of Artificial Sequence: Synthetic oligonucleotide
  Target: LAMA2; (-) strand; PAM type: YTN; PAM sequence: CTT
tccctgaactaaattgaaaa

SEQ ID NO: 212349 - DNA, 20 bp, Artificial Sequence
  Description of Artificial Sequence: Synthetic oligonucleotide
  Target: LAMA2; (-) strand; PAM type: YTN; PAM sequence: CTC
tttccctgaactaaattgaa

SEQ ID NO: 212350 - DNA, 20 bp, Artificial Sequence
  Description of Artificial Sequence: Synthetic oligonucleotide
  Target: LAMA2; (-) strand; PAM type: YTN; PAM sequence: TTA
tcatccctctttccctgaac

SEQ ID NO: 212351 - DNA, 20 bp, Artificial Sequence
  Description of Artificial Sequence: Synthetic oligonucleotide
  Target: LAMA2; (-) strand; PAM type: YTN; PAM sequence: TTT
atcatccctctttccctgaa

SEQ ID NO: 212352 - DNA, 20 bp, Artificial Sequence
  Description of Artificial Sequence: Synthetic oligonucleotide
  Target: LAMA2; (-) strand; PAM type: YTN; PAM sequence: CTC
ataataatatttatcatccc

SEQ ID NO: 212353 - DNA, 20 bp, Artificial Sequence
  Description of Artificial Sequence: Synthetic oligonucleotide
  Target: LAMA2; (-) strand; PAM type: YTN; PAM sequence: CTA
aacactcataataatattta

SEQ ID NO: 212354 - DNA, 20 bp, Artificial Sequence
  Description of Artificial Sequence: Synthetic oligonucleotide
  Target: LAMA2; (-) strand; PAM type: YTN; PAM sequence: TTC
taaacactcataataatatt

SEQ ID NO: 212355 - DNA, 20 bp, Artificial Sequence
  Description of Artificial Sequence: Synthetic oligonucleotide
  Target: LAMA2; (-) strand; PAM type: YTN; PAM sequence: TTT
ctaaacactcataataatat

SEQ ID NO: 212356 - DNA, 20 bp, Artificial Sequence
  Description of Artificial Sequence: Synthetic oligonucleotide
  Target: LAMA2; (-) strand; PAM type: YTN; PAM sequence: TTA
atatttctaaacactcataa

SEQ ID NO: 212357 - DNA, 20 bp, Artificial Sequence
  Description of Artificial Sequence: Synthetic oligonucleotide
  Target: LAMA2; (-) strand; PAM type: YTN; PAM sequence: CTT
aatatttctaaacactcata

SEQ ID NO: 212358 - DNA, 20 bp, Artificial Sequence
  Description of Artificial Sequence: Synthetic oligonucleotide
  Target: LAMA2; (-) strand; PAM type: YTN; PAM sequence: TTC
ttaatatttctaaacactca

SEQ ID NO: 212359 - DNA, 20 bp, Artificial Sequence
  Description of Artificial Sequence: Synthetic oligonucleotide
  Target: LAMA2; (-) strand; PAM type: YTN; PAM sequence: TTC
gggttcttaatatttctaaa

SEQ ID NO: 212360 - DNA, 20 bp, Artificial Sequence
  Description of Artificial Sequence: Synthetic oligonucleotide
  Target: LAMA2; (-) strand; PAM type: YTN; PAM sequence: CTG
ataaatggattcgggttctt

SEQ ID NO: 212361 - DNA, 20 bp, Artificial Sequence
  Description of Artificial Sequence: Synthetic oligonucleotide
  Target: LAMA2; (-) strand; PAM type: YTN; PAM sequence: TTA
tgaaactgataaatggattc

SEQ ID NO: 212362 - DNA, 20 bp, Artificial Sequence
  Description of Artificial Sequence: Synthetic oligonucleotide
  Target: LAMA2; (-) strand; PAM type: YTN; PAM sequence: TTG
ttatgaaactgataaatgga

SEQ ID NO: 212363 - DNA, 20 bp, Artificial Sequence
  Description of Artificial Sequence: Synthetic oligonucleotide
  Target: LAMA2; (-) strand; PAM type: YTN; PAM sequence: TTG
aaaatcattgttatgaaact

SEQ ID NO: 212364 - DNA, 20 bp, Artificial Sequence
  Description of Artificial Sequence: Synthetic oligonucleotide
  Target: LAMA2; (-) strand; PAM type: YTN; PAM sequence: CTT
gaaaatcattgttatgaaac

SEQ ID NO: 212365 - DNA, 20 bp, Artificial Sequence
  Description of Artificial Sequence: Synthetic oligonucleotide
  Target: LAMA2; (-) strand; PAM type: YTN; PAM sequence: CTG
tgagaaatgaaacaagcttg

SEQ ID NO: 212366 - DNA, 20 bp, Artificial Sequence
  Description of Artificial Sequence: Synthetic oligonucleotide
  Target: LAMA2; (-) strand; PAM type: YTN; PAM sequence: CTA
ccctgtgagaaatgaaacaa

SEQ ID NO: 212367 - DNA, 20 bp, Artificial Sequence
  Description of Artificial Sequence: Synthetic oligonucleotide
  Target: LAMA2; (-) strand; PAM type: YTN; PAM sequence: TTG
tctaccctgtgagaaatgaa

SEQ ID NO: 212368 - DNA, 20 bp, Artificial Sequence
  Description of Artificial Sequence: Synthetic oligonucleotide
  Target: LAMA2; (-) strand; PAM type: YTN; PAM sequence: TTT
gtctaccctgtgagaaatga

SEQ ID NO: 212369 - DNA, 20 bp, Artificial Sequence
  Description of Artificial Sequence: Synthetic oligonucleotide
  Target: LAMA2; (-) strand; PAM type: YTN; PAM sequence: CTT
tgtctaccctgtgagaaatg

SEQ ID NO: 212370 - DNA, 20 bp, Artificial Sequence
  Description of Artificial Sequence: Synthetic oligonucleotide
  Target: LAMA2; (-) strand; PAM type: YTN; PAM sequence: TTG
tctttgtctaccctgtgaga

SEQ ID NO: 212371 - DNA, 20 bp, Artificial Sequence
  Description of Artificial Sequence: Synthetic oligonucleotide
  Target: LAMA2; (-) strand; PAM type: YTN; PAM sequence: TTT
gtctttgtctaccctgtgag

SEQ ID NO: 212372 - DNA, 20 bp, Artificial Sequence
  Description of Artificial Sequence: Synthetic oligonucleotide
  Target: LAMA2; (-) strand; PAM type: YTN; PAM sequence: TTT
tgtctttgtctaccctgtga

SEQ ID NO: 212373 - DNA, 20 bp, Artificial Sequence
  Description of Artificial Sequence: Synthetic oligonucleotide
  Target: LAMA2; (-) strand; PAM type: YTN; PAM sequence: TTA
tgagatatatattttgtctt

SEQ ID NO: 212374 - DNA, 20 bp, Artificial Sequence
  Description of Artificial Sequence: Synthetic oligonucleotide
  Target: LAMA2; (-) strand; PAM type: YTN; PAM sequence: TTT
atgagatatatattttgtct

SEQ ID NO: 212375 - DNA, 20 bp, Artificial Sequence
  Description of Artificial Sequence: Synthetic oligonucleotide
  Target: LAMA2; (-) strand; PAM type: YTN; PAM sequence: TTT
tatgagatatatattttgtc

SEQ ID NO: 212376 - DNA, 20 bp, Artificial Sequence
  Description of Artificial Sequence: Synthetic oligonucleotide
  Target: LAMA2; (-) strand; PAM type: YTN; PAM sequence: CTT
ttatgagatatatattttgt

SEQ ID NO: 212377 - DNA, 20 bp, Artificial Sequence
  Description of Artificial Sequence: Synthetic oligonucleotide
  Target: LAMA2; (-) strand; PAM type: YTN; PAM sequence: TTA
cttttatgagatatatattt

SEQ ID NO: 212378 - DNA, 20 bp, Artificial Sequence
  Description of Artificial Sequence: Synthetic oligonucleotide
  Target: LAMA2; (-) strand; PAM type: YTN; PAM sequence: TTA
ttacttttatgagatatata

SEQ ID NO: 212379 - DNA, 20 bp, Artificial Sequence
  Description of Artificial Sequence: Synthetic oligonucleotide
  Target: LAMA2; (-) strand; PAM type: YTN; PAM sequence: CTG
gtagattattacttttatga

SEQ ID NO: 212380 - DNA, 20 bp, Artificial Sequence
  Description of Artificial Sequence: Synthetic oligonucleotide
  Target: LAMA2; (-) strand; PAM type: YTN; PAM sequence: CTA
caacaaacatgcctggtaga

SEQ ID NO: 212381 - DNA, 20 bp, Artificial Sequence
  Description of Artificial Sequence: Synthetic oligonucleotide
  Target: LAMA2; (-) strand; PAM type: YTN; PAM sequence: TTG
gctacaacaaacatgcctgg

SEQ ID NO: 212382 - DNA, 20 bp, Artificial Sequence
  Description of Artificial Sequence: Synthetic oligonucleotide
  Target: LAMA2; (-) strand; PAM type: YTN; PAM sequence: CTT
ggctacaacaaacatgcctg

SEQ ID NO: 212383 - DNA, 20 bp, Artificial Sequence
  Description of Artificial Sequence: Synthetic oligonucleotide
  Target: LAMA2; (-) strand; PAM type: YTN; PAM sequence: TTG
cttggctacaacaaacatgc

SEQ ID NO: 212384 - DNA, 20 bp, Artificial Sequence
  Description of Artificial Sequence: Synthetic oligonucleotide
  Target: LAMA2; (-) strand; PAM type: YTN; PAM sequence: TTT
gcttggctacaacaaacatg

SEQ ID NO: 212385 - DNA, 20 bp, Artificial Sequence
  Description of Artificial Sequence: Synthetic oligonucleotide
  Target: LAMA2; (-) strand; PAM type: YTN; PAM sequence: CTA
tatatttgcttggctacaac

SEQ ID NO: 212386 - DNA, 20 bp, Artificial Sequence
  Description of Artificial Sequence: Synthetic oligonucleotide
  Target: LAMA2; (-) strand; PAM type: YTN; PAM sequence: TTC
tatatatttgcttggctaca

SEQ ID NO: 212387 - DNA, 20 bp, Artificial Sequence
  Description of Artificial Sequence: Synthetic oligonucleotide
  Target: LAMA2; (-) strand; PAM type: YTN; PAM sequence: TTA
gaattctatatatttgcttg

SEQ ID NO: 212388 - DNA, 20 bp, Artificial Sequence
  Description of Artificial Sequence: Synthetic oligonucleotide
  Target: LAMA2; (-) strand; PAM type: YTN; PAM sequence: TTT
agaattctatatatttgctt

SEQ ID NO: 212389 - DNA, 20 bp, Artificial Sequence
  Description of Artificial Sequence: Synthetic oligonucleotide
  Target: LAMA2; (-) strand; PAM type: YTN; PAM sequence: TTT
tagaattctatatatttgct

SEQ ID NO: 212390 - DNA, 20 bp, Artificial Sequence
  Description of Artificial Sequence: Synthetic oligonucleotide
  Target: LAMA2; (-) strand; PAM type: YTN; PAM sequence: TTT
ttagaattctatatatttgc

SEQ ID NO: 212391 - DNA, 20 bp, Artificial Sequence
  Description of Artificial Sequence: Synthetic oligonucleotide
  Target: LAMA2; (-) strand; PAM type: YTN; PAM sequence: CTA
taaacaatatttttagaatt

SEQ ID NO: 212392 - DNA, 20 bp, Artificial Sequence
  Description of Artificial Sequence: Synthetic oligonucleotide
  Target: LAMA2; (-) strand; PAM type: YTN; PAM sequence: TTG
aaacaagagctataaacaat

SEQ ID NO: 212393 - DNA, 20 bp, Artificial Sequence
  Description of Artificial Sequence: Synthetic oligonucleotide
  Target: LAMA2; (-) strand; PAM type: YTN; PAM sequence: TTG
tcccaagcatgttgaaacaa

SEQ ID NO: 212394 - DNA, 20 bp, Artificial Sequence
  Description of Artificial Sequence: Synthetic oligonucleotide
  Target: LAMA2; (-) strand; PAM type: YTN; PAM sequence: CTT
gtcccaagcatgttgaaaca

SEQ ID NO: 212395 - DNA, 20 bp, Artificial Sequence
  Description of Artificial Sequence: Synthetic oligonucleotide
  Target: LAMA2; (-) strand; PAM type: YTN; PAM sequence: TTA
acttgtcccaagcatgttga

SEQ ID NO: 212396 - DNA, 20 bp, Artificial Sequence
  Description of Artificial Sequence: Synthetic oligonucleotide
  Target: LAMA2; (-) strand; PAM type: YTN; PAM sequence: CTG
taaacattaacttgtcccaa

SEQ ID NO: 212397 - DNA, 20 bp, Artificial Sequence
  Description of Artificial Sequence: Synthetic oligonucleotide
  Target: LAMA2; (-) strand; PAM type: YTN; PAM sequence: CTC
acaaaactgtaaacattaac

SEQ ID NO: 212398 - DNA, 20 bp, Artificial Sequence
  Description of Artificial Sequence: Synthetic oligonucleotide
  Target: LAMA2; (-) strand; PAM type: YTN; PAM sequence: TTC
actcacaaaactgtaaacat

SEQ ID NO: 212399 - DNA, 20 bp, Artificial Sequence
  Description of Artificial Sequence: Synthetic oligonucleotide
  Target: LAMA2; (-) strand; PAM type: YTN; PAM sequence: TTC
attcactcacaaaactgtaa

SEQ ID NO: 212400 - DNA, 20 bp, Artificial Sequence
  Description of Artificial Sequence: Synthetic oligonucleotide
  Target: LAMA2; (-) strand; PAM type: YTN; PAM sequence: TTC
agtatatagattcattcact

SEQ ID NO: 212401 - DNA, 20 bp, Artificial Sequence
  Description of Artificial Sequence: Synthetic oligonucleotide
  Target: LAMA2; (-) strand; PAM type: YTN; PAM sequence: TTT
cagtatatagattcattcac

SEQ ID NO: 212402 - DNA, 20 bp, Artificial Sequence
  Description of Artificial Sequence: Synthetic oligonucleotide
  Target: LAMA2; (-) strand; PAM type: YTN; PAM sequence: TTT
tcagtatatagattcattca

SEQ ID NO: 212403 - DNA, 20 bp, Artificial Sequence
  Description of Artificial Sequence: Synthetic oligonucleotide
  Target: LAMA2; (-) strand; PAM type: YTN; PAM sequence: TTG
aatgaaatgttttcagtata

SEQ ID NO: 212404 - DNA, 20 bp, Artificial Sequence
  Description of Artificial Sequence: Synthetic oligonucleotide
  Target: LAMA2; (-) strand; PAM type: YTN; PAM sequence: TTA
ttgaatgaaatgttttcagt

SEQ ID NO: 212405 - DNA, 20 bp, Artificial Sequence
  Description of Artificial Sequence: Synthetic oligonucleotide
  Target: LAMA2; (-) strand; PAM type: YTN; PAM sequence: CTT
attgaatgaaatgttttcag

SEQ ID NO: 212406 - DNA, 20 bp, Artificial Sequence
  Description of Artificial Sequence: Synthetic oligonucleotide
  Target: LAMA2; (-) strand; PAM type: YTN; PAM sequence: CTC
aagaaggtcaacttattgaa

SEQ ID NO: 212407 - DNA, 20 bp, Artificial Sequence
  Description of Artificial Sequence: Synthetic oligonucleotide
  Target: LAMA2; (-) strand; PAM type: YTN; PAM sequence: TTC
aaacctcaagaaggtcaact

SEQ ID NO: 212408 - DNA, 20 bp, Artificial Sequence
  Description of Artificial Sequence: Synthetic oligonucleotide
  Target: LAMA2; (-) strand; PAM type: YTN; PAM sequence: TTA
ttcaaacctcaagaaggtca

SEQ ID NO: 212409 - DNA, 20 bp, Artificial Sequence
  Description of Artificial Sequence: Synthetic oligonucleotide
  Target: LAMA2; (-) strand; PAM type: YTN; PAM sequence: TTT
attcaaacctcaagaaggtc

SEQ ID NO: 212410 - DNA, 20 bp, Artificial Sequence
  Description of Artificial Sequence: Synthetic oligonucleotide
  Target: LAMA2; (-) strand; PAM type: YTN; PAM sequence: CTC
caaaatttattcaaacctca

SEQ ID NO: 212411 - DNA, 20 bp, Artificial Sequence
  Description of Artificial Sequence: Synthetic oligonucleotide
  Target: LAMA2; (-) strand; PAM type: YTN; PAM sequence: CTC
aggctccaaaatttattcaa

SEQ ID NO: 212412 - DNA, 20 bp, Artificial Sequence
  Description of Artificial Sequence: Synthetic oligonucleotide
  Target: LAMA2; (-) strand; PAM type: YTN; PAM sequence: TTC
cctcaggctccaaaatttat

SEQ ID NO: 212413 - DNA, 20 bp, Artificial Sequence
  Description of Artificial Sequence: Synthetic oligonucleotide
  Target: LAMA2; (-) strand; PAM type: YTN; PAM sequence: TTG
attccctcaggctccaaaat

SEQ ID NO: 212414 - DNA, 20 bp, Artificial Sequence
  Description of Artificial Sequence: Synthetic oligonucleotide
  Target: LAMA2; (-) strand; PAM type: YTN; PAM sequence: TTA
aaaaccatattgattccctc

SEQ ID NO: 212415 - DNA, 20 bp, Artificial Sequence
  Description of Artificial Sequence: Synthetic oligonucleotide
  Target: LAMA2; (-) strand; PAM type: YTN; PAM sequence: CTT
aaaaaccatattgattccct

SEQ ID NO: 212416 - DNA, 20 bp, Artificial Sequence
  Description of Artificial Sequence: Synthetic oligonucleotide
  Target: LAMA2; (-) strand; PAM type: YTN; PAM sequence: CTA
ggagatcaacttaaaaacca

SEQ ID NO: 212417 - DNA, 20 bp, Artificial Sequence
  Description of Artificial Sequence: Synthetic oligonucleotide
  Target: LAMA2; (-) strand; PAM type: YTN; PAM sequence: TTA
gacatacctaggagatcaac

SEQ ID NO: 212418 - DNA, 20 bp, Artificial Sequence
  Description of Artificial Sequence: Synthetic oligonucleotide
  Target: LAMA2; (-) strand; PAM type: YTN; PAM sequence: CTT
agacatacctaggagatcaa

SEQ ID NO: 212419 - DNA, 20 bp, Artificial Sequence
  Description of Artificial Sequence: Synthetic oligonucleotide
  Target: LAMA2; (-) strand; PAM type: YTN; PAM sequence: TTA
aacttagacatacctaggag

SEQ ID NO: 212420 - DNA, 20 bp, Artificial Sequence
  Description of Artificial Sequence: Synthetic oligonucleotide
  Target: LAMA2; (-) strand; PAM type: YTN; PAM sequence: CTT
aaacttagacatacctagga

SEQ ID NO: 212421 - DNA, 20 bp, Artificial Sequence
  Description of Artificial Sequence: Synthetic oligonucleotide
  Target: LAMA2; (-) strand; PAM type: YTN; PAM sequence: TTA
agaacttaaacttagacata

SEQ ID NO: 212422 - DNA, 20 bp, Artificial Sequence
  Description of Artificial Sequence: Synthetic oligonucleotide
  Target: LAMA2; (-) strand; PAM type: YTN; PAM sequence: TTA
tattaagaacttaaacttag

SEQ ID NO: 212423 - DNA, 20 bp, Artificial Sequence
  Description of Artificial Sequence: Synthetic oligonucleotide
  Target: LAMA2; (-) strand; PAM type: YTN; PAM sequence: TTG
ataattatattaagaactta

SEQ ID NO: 212424 - DNA, 20 bp, Artificial Sequence
  Description of Artificial Sequence: Synthetic oligonucleotide
  Target: LAMA2; (-) strand; PAM type: YTN; PAM sequence: TTA
aaataataaagggttgataa

SEQ ID NO: 212425 - DNA, 20 bp, Artificial Sequence
  Description of Artificial Sequence: Synthetic oligonucleotide
  Target: LAMA2; (-) strand; PAM type: YTN; PAM sequence: TTA
atgtaatgaaatattaaaat

SEQ ID NO: 212426 - DNA, 20 bp, Artificial Sequence
  Description of Artificial Sequence: Synthetic oligonucleotide
  Target: LAMA2; (-) strand; PAM type: YTN; PAM sequence: TTC
caaaagataattaatgtaat

SEQ ID NO: 212427 - DNA, 20 bp, Artificial Sequence
  Description of Artificial Sequence: Synthetic oligonucleotide
  Target: LAMA2; (-) strand; PAM type: YTN; PAM sequence: CTG
atcagtgaaaatattccaaa

SEQ ID NO: 212428 - DNA, 20 bp, Artificial Sequence
  Description of Artificial Sequence: Synthetic oligonucleotide
  Target: LAMA2; (-) strand; PAM type: YTN; PAM sequence: TTA
ctgatcagtgaaaatattcc

SEQ ID NO: 212429 - DNA, 20 bp, Artificial Sequence
  Description of Artificial Sequence: Synthetic oligonucleotide
  Target: LAMA2; (-) strand; PAM type: YTN; PAM sequence: CTA
gaagttactgatcagtgaaa

SEQ ID NO: 212430 - DNA, 20 bp, Artificial Sequence
  Description of Artificial Sequence: Synthetic oligonucleotide
  Target: LAMA2; (-) strand; PAM type: YTN; PAM sequence: TTA
tgactagaagttactgatca

SEQ ID NO: 212431 - DNA, 20 bp, Artificial Sequence
  Description of Artificial Sequence: Synthetic oligonucleotide
  Target: LAMA2; (-) strand; PAM type: YTN; PAM sequence: CTT
atgactagaagttactgatc

SEQ ID NO: 212432 - DNA, 20 bp, Artificial Sequence
  Description of Artificial Sequence: Synthetic oligonucleotide
  Target: LAMA2; (-) strand; PAM type: YTN; PAM sequence: TTG
gtaccagaacggcttatgac

SEQ ID NO: 212433 - DNA, 20 bp, Artificial Sequence
  Description of Artificial Sequence: Synthetic oligonucleotide
  Target: LAMA2; (-) strand; PAM type: YTN; PAM sequence: TTG
atgattggtaccagaacggc

SEQ ID NO: 212434 - DNA, 20 bp, Artificial Sequence
  Description of Artificial Sequence: Synthetic oligonucleotide
  Target: LAMA2; (-) strand; PAM type: YTN; PAM sequence: TTT
gatgattggtaccagaacgg

SEQ ID NO: 212435 - DNA, 20 bp, Artificial Sequence
  Description of Artificial Sequence: Synthetic oligonucleotide
  Target: LAMA2; (-) strand; PAM type: YTN; PAM sequence: TTA
caaatatgaaatttgatgat

SEQ ID NO: 212436 - DNA, 20 bp, Artificial Sequence
  Description of Artificial Sequence: Synthetic oligonucleotide
  Target: LAMA2; (-) strand; PAM type: YTN; PAM sequence: CTT
acaaatatgaaatttgatga

SEQ ID NO: 212437 - DNA, 20 bp, Artificial Sequence
  Description of Artificial Sequence: Synthetic oligonucleotide
  Target: LAMA2; (-) strand; PAM type: YTN; PAM sequence: TTC
ttacaaatatgaaatttgat

SEQ ID NO: 212438 - DNA, 20 bp, Artificial Sequence
  Description of Artificial Sequence: Synthetic oligonucleotide
  Target: LAMA2; (-) strand; PAM type: YTN; PAM sequence: TTT
cttacaaatatgaaatttga

SEQ ID NO: 212439 - DNA, 20 bp, Artificial Sequence
  Description of Artificial Sequence: Synthetic oligonucleotide
  Target: LAMA2; (-) strand; PAM type: YTN; PAM sequence: TTT
tcttacaaatatgaaatttg

SEQ ID NO: 212440 - DNA, 20 bp, Artificial Sequence
  Description of Artificial Sequence: Synthetic oligonucleotide
  Target: LAMA2; (-) strand; PAM type: YTN; PAM sequence: TTT
ttcttacaaatatgaaattt

SEQ ID NO: 212441 - DNA, 20 bp, Artificial Sequence
  Description of Artificial Sequence: Synthetic oligonucleotide
  Target: LAMA2; (-) strand; PAM type: YTN; PAM sequence: TTT
tttcttacaaatatgaaatt

SEQ ID NO: 212442 - DNA, 20 bp, Artificial Sequence
  Description of Artificial Sequence: Synthetic oligonucleotide
  Target: LAMA2; (-) strand; PAM type: YTN; PAM sequence: CTA
gtcattttttcttacaaata

SEQ ID NO: 212443 - DNA, 20 bp, Artificial Sequence
  Description of Artificial Sequence: Synthetic oligonucleotide
  Target: LAMA2; (-) strand; PAM type: YTN; PAM sequence: TTG
ggcatgtcaagacagccaaa

SEQ ID NO: 212444 - DNA, 20 bp, Artificial Sequence
  Description of Artificial Sequence: Synthetic oligonucleotide
  Target: LAMA2; (-) strand; PAM type: YTN; PAM sequence: TTT
gggcatgtcaagacagccaa

SEQ ID NO: 212445 - DNA, 20 bp, Artificial Sequence
  Description of Artificial Sequence: Synthetic oligonucleotide
  Target: LAMA2; (-) strand; PAM type: YTN; PAM sequence: TTG
gtggatttgggcatgtcaag

SEQ ID NO: 212446 - DNA, 20 bp, Artificial Sequence
  Description of Artificial Sequence: Synthetic oligonucleotide
  Target: LAMA2; (-) strand; PAM type: YTN; PAM sequence: CTT
ggtggatttgggcatgtcaa

SEQ ID NO: 212447 - DNA, 20 bp, Artificial Sequence
  Description of Artificial Sequence: Synthetic oligonucleotide
  Target: LAMA2; (-) strand; PAM type: YTN; PAM sequence: TTG
gaagtgagatatatacttgg

SEQ ID NO: 212448 - DNA, 20 bp, Artificial Sequence
  Description of Artificial Sequence: Synthetic oligonucleotide
  Target: LAMA2; (-) strand; PAM type: YTN; PAM sequence: TTT
ggaagtgagatatatacttg

SEQ ID NO: 212449 - DNA, 20 bp, Artificial Sequence
  Description of Artificial Sequence: Synthetic oligonucleotide
  Target: LAMA2; (-) strand; PAM type: YTN; PAM sequence: TTT
tggaagtgagatatatactt

SEQ ID NO: 212450 - DNA, 20 bp, Artificial Sequence
  Description of Artificial Sequence: Synthetic oligonucleotide
  Target: LAMA2; (-) strand; PAM type: YTN; PAM sequence: CTA
ttttggaagtgagatatata

SEQ ID NO: 212451 - DNA, 20 bp, Artificial Sequence
  Description of Artificial Sequence: Synthetic oligonucleotide
  Target: LAMA2; (-) strand; PAM type: YTN; PAM sequence: CTG
agactattttggaagtgaga

SEQ ID NO: 212452 - DNA, 20 bp, Artificial Sequence
  Description of Artificial Sequence: Synthetic oligonucleotide
  Target: LAMA2; (-) strand; PAM type: YTN; PAM sequence: CTA
gaaaacatatcctgagacta

SEQ ID NO: 212453 - DNA, 20 bp, Artificial Sequence
  Description of Artificial Sequence: Synthetic oligonucleotide
  Target: LAMA2; (-) strand; PAM type: YTN; PAM sequence: CTA
agatcatatctagaaaacat

SEQ ID NO: 212454 - DNA, 20 bp, Artificial Sequence
  Description of Artificial Sequence: Synthetic oligonucleotide
  Target: LAMA2; (-) strand; PAM type: YTN; PAM sequence: CTC
catcatctaagatcatatct

SEQ ID NO: 212455 - DNA, 20 bp, Artificial Sequence
  Description of Artificial Sequence: Synthetic oligonucleotide
  Target: LAMA2; (-) strand; PAM type: YTN; PAM sequence: TTA
acaatacactccatcatcta

SEQ ID NO: 212456 - DNA, 20 bp, Artificial Sequence
  Description of Artificial Sequence: Synthetic oligonucleotide
  Target: LAMA2; (-) strand; PAM type: YTN; PAM sequence: TTT
aacaatacactccatcatct

SEQ ID NO: 212457 - DNA, 20 bp, Artificial Sequence
  Description of Artificial Sequence: Synthetic oligonucleotide
  Target: LAMA2; (-) strand; PAM type: YTN; PAM sequence: TTA
atttaacaatacactccatc

SEQ ID NO: 212458 - DNA, 20 bp, Artificial Sequence
  Description of Artificial Sequence: Synthetic oligonucleotide
  Target: LAMA2; (-) strand; PAM type: YTN; PAM sequence: TTG
ttaatttaacaatacactcc

SEQ ID NO: 212459 - DNA, 20 bp, Artificial Sequence
  Description of Artificial Sequence: Synthetic oligonucleotide
  Target: LAMA2; (-) strand; PAM type: YTN; PAM sequence: CTT
gttaatttaacaatacactc

SEQ ID NO: 212460 - DNA, 20 bp, Artificial Sequence
  Description of Artificial Sequence: Synthetic oligonucleotide
  Target: LAMA2; (-) strand; PAM type: YTN; PAM sequence: CTA
cttgttaatttaacaataca

SEQ ID NO: 212461 - DNA, 20 bp, Artificial Sequence
  Description of Artificial Sequence: Synthetic oligonucleotide
  Target: LAMA2; (-) strand; PAM type: YTN; PAM sequence: TTA
tactacttgttaatttaaca

SEQ ID NO: 212462 - DNA, 20 bp, Artificial Sequence
  Description of Artificial Sequence: Synthetic oligonucleotide
  Target: LAMA2; (-) strand; PAM type: YTN; PAM sequence: TTT
atactacttgttaatttaac

SEQ ID NO: 212463 - DNA, 20 bp, Artificial Sequence
  Description of Artificial Sequence: Synthetic oligonucleotide
  Target: LAMA2; (-) strand; PAM type: YTN; PAM sequence: TTT
tatactacttgttaatttaa

SEQ ID NO: 212464 - DNA, 20 bp, Artificial Sequence
  Description of Artificial Sequence: Synthetic oligonucleotide
  Target: LAMA2; (-) strand; PAM type: YTN; PAM sequence: TTT
ttatactacttgttaattta

SEQ ID NO: 212465 - DNA, 20 bp, Artificial Sequence
  Description of Artificial Sequence: Synthetic oligonucleotide
  Target: LAMA2; (-) strand; PAM type: YTN; PAM sequence: CTA
tttttatactacttgttaat

SEQ ID NO: 212466 - DNA, 20 bp, Artificial Sequence
  Description of Artificial Sequence: Synthetic oligonucleotide
  Target: LAMA2; (-) strand; PAM type: YTN; PAM sequence: TTG
tctatttttatactacttgt

SEQ ID NO: 212467 - DNA, 20 bp, Artificial Sequence
  Description of Artificial Sequence: Synthetic oligonucleotide
  Target: LAMA2; (-) strand; PAM type: YTN; PAM sequence: TTT
gtctatttttatactacttg

SEQ ID NO: 212468 - DNA, 20 bp, Artificial Sequence
  Description of Artificial Sequence: Synthetic oligonucleotide
  Target: LAMA2; (-) strand; PAM type: YTN; PAM sequence: TTT
tgtctatttttatactactt

SEQ ID NO: 212469 - DNA, 20 bp, Artificial Sequence
  Description of Artificial Sequence: Synthetic oligonucleotide
  Target: LAMA2; (-) strand; PAM type: YTN; PAM sequence: TTA
ataatattttgtctattttt

SEQ ID NO: 212470 - DNA, 20 bp, Artificial Sequence
  Description of Artificial Sequence: Synthetic oligonucleotide
  Target: LAMA2; (-) strand; PAM type: YTN; PAM sequence: TTT
aataatattttgtctatttt

SEQ ID NO: 212471 - DNA, 20 bp, Artificial Sequence
  Description of Artificial Sequence: Synthetic oligonucleotide
  Target: LAMA2; (-) strand; PAM type: YTN; PAM sequence: TTT
taataatattttgtctattt

SEQ ID NO: 212472 - DNA, 20 bp, Artificial Sequence
  Description of Artificial Sequence: Synthetic oligonucleotide
  Target: LAMA2; (-) strand; PAM type: YTN; PAM sequence: TTT
ttaataatattttgtctatt

SEQ ID NO: 212473 - DNA, 20 bp, Artificial Sequence
  Description of Artificial Sequence: Synthetic oligonucleotide
  Target: LAMA2; (-) strand; PAM type: YTN; PAM sequence: TTG
tatttttaataatattttgt

SEQ ID NO: 212474 - DNA, 20 bp, Artificial Sequence
  Description of Artificial Sequence: Synthetic oligonucleotide
  Target: LAMA2; (-) strand; PAM type: YTN; PAM sequence: CTT
gtatttttaataatattttg

SEQ ID NO: 212475 - DNA, 20 bp, Artificial Sequence
  Description of Artificial Sequence: Synthetic oligonucleotide
  Target: LAMA2; (-) strand; PAM type: YTN; PAM sequence: CTC
cttgtatttttaataatatt

SEQ ID NO: 212476 - DNA, 20 bp, Artificial Sequence
  Description of Artificial Sequence: Synthetic oligonucleotide
  Target: LAMA2; (-) strand; PAM type: YTN; PAM sequence: TTC
tccttgtatttttaataata

SEQ ID NO: 212477 - DNA, 20 bp, Artificial Sequence
  Description of Artificial Sequence: Synthetic oligonucleotide
  Target: LAMA2; (-) strand; PAM type: YTN; PAM sequence: TTT
ctccttgtatttttaataat

SEQ ID NO: 212478 - DNA, 20 bp, Artificial Sequence
  Description of Artificial Sequence: Synthetic oligonucleotide
  Target: LAMA2; (-) strand; PAM type: YTN; PAM sequence: CTT
tctccttgtatttttaataa

SEQ ID NO: 212479 - DNA, 20 bp, Artificial Sequence
  Description of Artificial Sequence: Synthetic oligonucleotide
  Target: LAMA2; (-) strand; PAM type: YTN; PAM sequence: TTC
ctttctccttgtatttttaa

SEQ ID NO: 212480 - DNA, 20 bp, Artificial Sequence
  Description of Artificial Sequence: Synthetic oligonucleotide
  Target: LAMA2; (-) strand; PAM type: YTN; PAM sequence: CTA
acatattcctttctccttgt

SEQ ID NO: 212481 - DNA, 20 bp, Artificial Sequence
  Description of Artificial Sequence: Synthetic oligonucleotide
  Target: LAMA2; (-) strand; PAM type: YTN; PAM sequence: TTC
taacatattcctttctcctt

SEQ ID NO: 212482 - DNA, 20 bp, Artificial Sequence
  Description of Artificial Sequence: Synthetic oligonucleotide
  Target: LAMA2; (-) strand; PAM type: YTN; PAM sequence: TTT
ctaacatattcctttctcct

SEQ ID NO: 212483 - DNA, 20 bp, Artificial Sequence
  Description of Artificial Sequence: Synthetic oligonucleotide
  Target: LAMA2; (-) strand; PAM type: YTN; PAM sequence: TTG
tttctaacatattcctttct

SEQ ID NO: 212484 - DNA, 20 bp, Artificial Sequence
  Description of Artificial Sequence: Synthetic oligonucleotide
  Target: LAMA2; (-) strand; PAM type: YTN; PAM sequence: CTT
gtttctaacatattcctttc

SEQ ID NO: 212485 - DNA, 20 bp, Artificial Sequence
  Description of Artificial Sequence: Synthetic oligonucleotide
  Target: LAMA2; (-) strand; PAM type: YTN; PAM sequence: TTA
cttgtttctaacatattcct

SEQ ID NO: 212486 - DNA, 20 bp, Artificial Sequence
  Description of Artificial Sequence: Synthetic oligonucleotide
  Target: LAMA2; (-) strand; PAM type: YTN; PAM sequence: CTT
acttgtttctaacatattcc

SEQ ID NO: 212487 - DNA, 20 bp, Artificial Sequence
  Description of Artificial Sequence: Synthetic oligonucleotide
  Target: LAMA2; (-) strand; PAM type: YTN; PAM sequence: TTC
ttacttgtttctaacatatt

SEQ ID NO: 212488 - DNA, 20 bp, Artificial Sequence
  Description of Artificial Sequence: Synthetic oligonucleotide
  Target: LAMA2; (-) strand; PAM type: YTN; PAM sequence: CTT
cttacttgtttctaacatat

SEQ ID NO: 212489 - DNA, 20 bp, Artificial Sequence
  Description of Artificial Sequence: Synthetic oligonucleotide
  Target: LAMA2; (-) strand; PAM type: YTN; PAM sequence: TTC
catatggaacttcttacttg

SEQ ID NO: 212490 - DNA, 20 bp, Artificial Sequence
  Description of Artificial Sequence: Synthetic oligonucleotide
  Target: LAMA2; (-) strand; PAM type: YTN; PAM sequence: TTT
ccatatggaacttcttactt

SEQ ID NO: 212491 - DNA, 20 bp, Artificial Sequence
  Description of Artificial Sequence: Synthetic oligonucleotide
  Target: LAMA2; (-) strand; PAM type: YTN; PAM sequence: TTT
tccatatggaacttcttact

SEQ ID NO: 212492 - DNA, 20 bp, Artificial Sequence
  Description of Artificial Sequence: Synthetic oligonucleotide
  Target: LAMA2; (-) strand; PAM type: YTN; PAM sequence: TTA
tcagttttccatatggaact

SEQ ID NO: 212493 - DNA, 20 bp, Artificial Sequence
  Description of Artificial Sequence: Synthetic oligonucleotide
  Target: LAMA2; (-) strand; PAM type: YTN; PAM sequence: CTT
atcagttttccatatggaac

SEQ ID NO: 212494 - DNA, 20 bp, Artificial Sequence
  Description of Artificial Sequence: Synthetic oligonucleotide
  Target: LAMA2; (-) strand; PAM type: YTN; PAM sequence: TTG
cttatcagttttccatatgg

SEQ ID NO: 212495 - DNA, 20 bp, Artificial Sequence
  Description of Artificial Sequence: Synthetic oligonucleotide
  Target: LAMA2; (-) strand; PAM type: YTN; PAM sequence: CTA
aaaaattgcttatcagtttt

SEQ ID NO: 212496 - DNA, 20 bp, Artificial Sequence
  Description of Artificial Sequence: Synthetic oligonucleotide
  Target: LAMA2; (-) strand; PAM type: YTN; PAM sequence: TTC
taaaaaattgcttatcagtt

SEQ ID NO: 212497 - DNA, 20 bp, Artificial Sequence
  Description of Artificial Sequence: Synthetic oligonucleotide
  Target: LAMA2; (-) strand; PAM type: YTN; PAM sequence: CTT
ctaaaaaattgcttatcagt

SEQ ID NO: 212498 - DNA, 20 bp, Artificial Sequence
  Description of Artificial Sequence: Synthetic oligonucleotide
  Target: LAMA2; (-) strand; PAM type: YTN; PAM sequence: TTG
cttctaaaaaattgcttatc

SEQ ID NO: 212499 - DNA, 20 bp, Artificial Sequence
  Description of Artificial Sequence: Synthetic oligonucleotide
  Target: LAMA2; (-) strand; PAM type: YTN; PAM sequence: TTT
gcttctaaaaaattgcttat

SEQ ID NO: 212500 - DNA, 20 bp, Artificial Sequence
  Description of Artificial Sequence: Synthetic oligonucleotide
  Target: LAMA2; (-) strand; PAM type: YTN; PAM sequence: TTT
tgcttctaaaaaattgctta

SEQ ID NO: 212501 - DNA, 20 bp, Artificial Sequence
  Description of Artificial Sequence: Synthetic oligonucleotide
  Target: LAMA2; (-) strand; PAM type: YTN; PAM sequence: TTT
ttgcttctaaaaaattgctt

SEQ ID NO: 212502 - DNA, 20 bp, Artificial Sequence
  Description of Artificial Sequence: Synthetic oligonucleotide
  Target: LAMA2; (-) strand; PAM type: YTN; PAM sequence: TTA
gcgtcatgagatttttgctt

SEQ ID NO: 212503 - DNA, 20 bp, Artificial Sequence
  Description of Artificial Sequence: Synthetic oligonucleotide
  Target: LAMA2; (-) strand; PAM type: YTN; PAM sequence: TTT
agcgtcatgagatttttgct

SEQ ID NO: 212504 - DNA, 20 bp, Artificial Sequence
  Description of Artificial Sequence: Synthetic oligonucleotide
  Target: LAMA2; (-) strand; PAM type: YTN; PAM sequence: TTT
tagcgtcatgagatttttgc

SEQ ID NO: 212505 - DNA, 20 bp, Artificial Sequence
  Description of Artificial Sequence: Synthetic oligonucleotide
  Target: LAMA2; (-) strand; PAM type: YTN; PAM sequence: TTG
ttttagcgtcatgagatttt

SEQ ID NO: 212506 - DNA, 20 bp, Artificial Sequence
  Description of Artificial Sequence: Synthetic oligonucleotide
  Target: LAMA2; (-) strand; PAM type: YTN; PAM sequence: CTT
gttttagcgtcatgagattt

SEQ ID NO: 212507 - DNA, 20 bp, Artificial Sequence
  Description of Artificial Sequence: Synthetic oligonucleotide
  Target: LAMA2; (-) strand; PAM type: YTN; PAM sequence: TTC
atcatcttgttttagcgtca

SEQ ID NO: 212508 - DNA, 20 bp, Artificial Sequence
  Description of Artificial Sequence: Synthetic oligonucleotide
  Target: LAMA2; (-) strand; PAM type: YTN; PAM sequence: CTT
catcatcttgttttagcgtc

SEQ ID NO: 212509 - DNA, 20 bp, Artificial Sequence
  Description of Artificial Sequence: Synthetic oligonucleotide
  Target: LAMA2; (-) strand; PAM type: YTN; PAM sequence: TTC
ttcatcatcttgttttagcg

SEQ ID NO: 212510 - DNA, 20 bp, Artificial Sequence
  Description of Artificial Sequence: Synthetic oligonucleotide
  Target: LAMA2; (-) strand; PAM type: YTN; PAM sequence: TTT
cttcatcatcttgttttagc

SEQ ID NO: 212511 - DNA, 20 bp, Artificial Sequence
  Description of Artificial Sequence: Synthetic oligonucleotide
  Target: LAMA2; (-) strand; PAM type: YTN; PAM sequence: TTG
cacacagagtaatttcttca

SEQ ID NO: 212512 - DNA, 20 bp, Artificial Sequence
  Description of Artificial Sequence: Synthetic oligonucleotide
  Target: LAMA2; (-) strand; PAM type: YTN; PAM sequence: CTT
gcacacagagtaatttcttc

SEQ ID NO: 212513 - DNA, 20 bp, Artificial Sequence
  Description of Artificial Sequence: Synthetic oligonucleotide
  Target: LAMA2; (-) strand; PAM type: YTN; PAM sequence: CTC
cacacttgcacacagagtaa

SEQ ID NO: 212514 - DNA, 20 bp, Artificial Sequence
  Description of Artificial Sequence: Synthetic oligonucleotide
  Target: LAMA2; (-) strand; PAM type: YTN; PAM sequence: TTC
tccacacttgcacacagagt

SEQ ID NO: 212515 - DNA, 20 bp, Artificial Sequence
  Description of Artificial Sequence: Synthetic oligonucleotide
  Target: LAMA2; (-) strand; PAM type: YTN; PAM sequence: TTT
ctccacacttgcacacagag

SEQ ID NO: 212516 - DNA, 20 bp, Artificial Sequence
  Description of Artificial Sequence: Synthetic oligonucleotide
  Target: LAMA2; (-) strand; PAM type: YTN; PAM sequence: TTT
tctccacacttgcacacaga

SEQ ID NO: 212517 - DNA, 20 bp, Artificial Sequence
  Description of Artificial Sequence: Synthetic oligonucleotide
  Target: LAMA2; (-) strand; PAM type: YTN; PAM sequence: TTT
ttctccacacttgcacacag

SEQ ID NO: 212518 - DNA, 20 bp, Artificial Sequence
  Description of Artificial Sequence: Synthetic oligonucleotide
  Target: LAMA2; (-) strand; PAM type: YTN; PAM sequence: CTA
tttttctccacacttgcaca

SEQ ID NO: 212519 - DNA, 20 bp, Artificial Sequence
  Description of Artificial Sequence: Synthetic oligonucleotide
  Target: LAMA2; (-) strand; PAM type: YTN; PAM sequence: CTA
tggtatcacaagctattttt

SEQ ID NO: 212520 - DNA, 20 bp, Artificial Sequence
  Description of Artificial Sequence: Synthetic oligonucleotide
  Target: LAMA2; (-) strand; PAM type: YTN; PAM sequence: CTA
agatcactatggtatcacaa

SEQ ID NO: 212521 - DNA, 20 bp, Artificial Sequence
  Description of Artificial Sequence: Synthetic oligonucleotide
  Target: LAMA2; (-) strand; PAM type: YTN; PAM sequence: CTC
taagatcactatggtatcac

SEQ ID NO: 212522 - DNA, 20 bp, Artificial Sequence
  Description of Artificial Sequence: Synthetic oligonucleotide
  Target: LAMA2; (-) strand; PAM type: YTN; PAM sequence: CTG
atgtataatgagctctaaga

SEQ ID NO: 212523 - DNA, 20 bp, Artificial Sequence
  Description of Artificial Sequence: Synthetic oligonucleotide
  Target: LAMA2; (-) strand; PAM type: YTN; PAM sequence: TTG
ctgatgtataatgagctcta

SEQ ID NO: 212524 - DNA, 20 bp, Artificial Sequence
  Description of Artificial Sequence: Synthetic oligonucleotide
  Target: LAMA2; (-) strand; PAM type: YTN; PAM sequence: TTC
attgctgatgtataatgagc

SEQ ID NO: 212525 - DNA, 20 bp, Artificial Sequence
  Description of Artificial Sequence: Synthetic oligonucleotide
  Target: LAMA2; (-) strand; PAM type: YTN; PAM sequence: CTT
cattgctgatgtataatgag

SEQ ID NO: 212526 - DNA, 20 bp, Artificial Sequence
  Description of Artificial Sequence: Synthetic oligonucleotide
  Target: LAMA2; (-) strand; PAM type: YTN; PAM sequence: CTC
ttcattgctgatgtataatg

SEQ ID NO: 212527 - DNA, 20 bp, Artificial Sequence
  Description of Artificial Sequence: Synthetic oligonucleotide
  Target: LAMA2; (-) strand; PAM type: YTN; PAM sequence: TTA
aagctcttcattgctgatgt

SEQ ID NO: 212528 - DNA, 20 bp, Artificial Sequence
  Description of Artificial Sequence: Synthetic oligonucleotide
  Target: LAMA2; (-) strand; PAM type: YTN; PAM sequence: TTG
catggtagttaaagctcttc

SEQ ID NO: 212529 - DNA, 20 bp, Artificial Sequence
  Description of Artificial Sequence: Synthetic oligonucleotide
  Target: LAMA2; (-) strand; PAM type: YTN; PAM sequence: TTA
attgcatggtagttaaagct

SEQ ID NO: 212530 - DNA, 20 bp, Artificial Sequence
  Description of Artificial Sequence: Synthetic oligonucleotide
  Target: LAMA2; (-) strand; PAM type: YTN; PAM sequence: TTT
aattgcatggtagttaaagc

SEQ ID NO: 212531 - DNA, 20 bp, Artificial Sequence
  Description of Artificial Sequence: Synthetic oligonucleotide
  Target: LAMA2; (-) strand; PAM type: YTN; PAM sequence: TTT
taattgcatggtagttaaag

SEQ ID NO: 212532 - DNA, 20 bp, Artificial Sequence
  Description of Artificial Sequence: Synthetic oligonucleotide
  Target: LAMA2; (-) strand; PAM type: YTN; PAM sequence: CTA
gtattttaattgcatggtag

SEQ ID NO: 212533 - DNA, 20 bp, Artificial Sequence
  Description of Artificial Sequence: Synthetic oligonucleotide
  Target: LAMA2; (-) strand; PAM type: YTN; PAM sequence: CTC
tagtattttaattgcatggt

SEQ ID NO: 212534 - DNA, 20 bp, Artificial Sequence
  Description of Artificial Sequence: Synthetic oligonucleotide
  Target: LAMA2; (-) strand; PAM type: YTN; PAM sequence: CTC
tctagtattttaattgcatg

SEQ ID NO: 212535 - DNA, 20 bp, Artificial Sequence
  Description of Artificial Sequence: Synthetic oligonucleotide
  Target: LAMA2; (-) strand; PAM type: YTN; PAM sequence: TTA
tactctctagtattttaatt

SEQ ID NO: 212536 - DNA, 20 bp, Artificial Sequence
  Description of Artificial Sequence: Synthetic oligonucleotide
  Target: LAMA2; (-) strand; PAM type: YTN; PAM sequence: TTT
atactctctagtattttaat

SEQ ID NO: 212537 - DNA, 20 bp, Artificial Sequence
  Description of Artificial Sequence: Synthetic oligonucleotide
  Target: LAMA2; (-) strand; PAM type: YTN; PAM sequence: TTA
tttatactctctagtatttt

SEQ ID NO: 212538 - DNA, 20 bp, Artificial Sequence
  Description of Artificial Sequence: Synthetic oligonucleotide
  Target: LAMA2; (-) strand; PAM type: YTN; PAM sequence: CTT
atttatactctctagtattt

SEQ ID NO: 212539 - DNA, 20 bp, Artificial Sequence
  Description of Artificial Sequence: Synthetic oligonucleotide
  Target: LAMA2; (-) strand; PAM type: YTN; PAM sequence: CTG
ccacatacacatggtacaat

SEQ ID NO: 212540 - DNA, 20 bp, Artificial Sequence
  Description of Artificial Sequence: Synthetic oligonucleotide
  Target: LAMA2; (-) strand; PAM type: YTN; PAM sequence: TTA
tatgctgccacatacacatg

SEQ ID NO: 212541 - DNA, 20 bp, Artificial Sequence
  Description of Artificial Sequence: Synthetic oligonucleotide
  Target: LAMA2; (-) strand; PAM type: YTN; PAM sequence: TTT
atatgctgccacatacacat

SEQ ID NO: 212542 - DNA, 20 bp, Artificial Sequence
  Description of Artificial Sequence: Synthetic oligonucleotide
  Target: LAMA2; (-) strand; PAM type: YTN; PAM sequence: TTT
tatatgctgccacatacaca

SEQ ID NO: 212543 - DNA, 20 bp, Artificial Sequence
  Description of Artificial Sequence: Synthetic oligonucleotide
  Target: LAMA2; (-) strand; PAM type: YTN; PAM sequence: TTT
ttatatgctgccacatacac

SEQ ID NO: 212544 - DNA, 20 bp, Artificial Sequence
  Description of Artificial Sequence: Synthetic oligonucleotide
  Target: LAMA2; (-) strand; PAM type: YTN; PAM sequence: CTG
agtttttatatgctgccaca

SEQ ID NO: 212545 - DNA, 20 bp, Artificial Sequence
  Description of Artificial Sequence: Synthetic oligonucleotide
  Target: LAMA2; (-) strand; PAM type: YTN; PAM sequence: TTC
tgagtttttatatgctgcca

SEQ ID NO: 212546 - DNA, 20 bp, Artificial Sequence
  Description of Artificial Sequence: Synthetic oligonucleotide
  Target: LAMA2; (-) strand; PAM type: YTN; PAM sequence: CTT
ctgagtttttatatgctgcc

SEQ ID NO: 212547 - DNA, 20 bp, Artificial Sequence
  Description of Artificial Sequence: Synthetic oligonucleotide
  Target: LAMA2; (-) strand; PAM type: YTN; PAM sequence: TTC
cacttctgagtttttatatg

SEQ ID NO: 212548 - DNA, 20 bp, Artificial Sequence
  Description of Artificial Sequence: Synthetic oligonucleotide
  Target: LAMA2; (-) strand; PAM type: YTN; PAM sequence: CTT
ccacttctgagtttttatat

SEQ ID NO: 212549 - DNA, 20 bp, Artificial Sequence
  Description of Artificial Sequence: Synthetic oligonucleotide
  Target: LAMA2; (-) strand; PAM type: YTN; PAM sequence: TTC
cttccacttctgagttttta

SEQ ID NO: 212550 - DNA, 20 bp, Artificial Sequence
  Description of Artificial Sequence: Synthetic oligonucleotide
  Target: LAMA2; (-) strand; PAM type: YTN; PAM sequence: CTA
aaattccttccacttctgag

SEQ ID NO: 212551 - DNA, 20 bp, Artificial Sequence
  Description of Artificial Sequence: Synthetic oligonucleotide
  Target: LAMA2; (-) strand; PAM type: YTN; PAM sequence: TTG
actaaaattccttccacttc

SEQ ID NO: 212552 - DNA, 20 bp, Artificial Sequence
  Description of Artificial Sequence: Synthetic oligonucleotide
  Target: LAMA2; (-) strand; PAM type: YTN; PAM sequence: CTT
gactaaaattccttccactt

SEQ ID NO: 212553 - DNA, 20 bp, Artificial Sequence
  Description of Artificial Sequence: Synthetic oligonucleotide
  Target: LAMA2; (-) strand; PAM type: YTN; PAM sequence: TTC
aagagtaacacttgactaaa

SEQ ID NO: 212554 - DNA, 20 bp, Artificial Sequence
  Description of Artificial Sequence: Synthetic oligonucleotide
  Target: LAMA2; (-) strand; PAM type: YTN; PAM sequence: TTT
caagagtaacacttgactaa

SEQ ID NO: 212555 - DNA, 20 bp, Artificial Sequence
  Description of Artificial Sequence: Synthetic oligonucleotide
  Target: LAMA2; (-) strand; PAM type: YTN; PAM sequence: TTT
tcaagagtaacacttgacta

SEQ ID NO: 212556 - DNA, 20 bp, Artificial Sequence
  Description of Artificial Sequence: Synthetic oligonucleotide
  Target: LAMA2; (-) strand; PAM type: YTN; PAM sequence: TTT
ttcaagagtaacacttgact

SEQ ID NO: 212557 - DNA, 20 bp, Artificial Sequence
  Description of Artificial Sequence: Synthetic oligonucleotide
  Target: LAMA2; (-) strand; PAM type: YTN; PAM sequence: CTT
tttcaagagtaacacttgac

SEQ ID NO: 212558 - DNA, 20 bp, Artificial Sequence
  Description of Artificial Sequence: Synthetic oligonucleotide
  Target: LAMA2; (-) strand; PAM type: YTN; PAM sequence: TTG
ctttttcaagagtaacactt

SEQ ID NO: 212559 - DNA, 20 bp, Artificial Sequence
  Description of Artificial Sequence: Synthetic oligonucleotide
  Target: LAMA2; (-) strand; PAM type: YTN; PAM sequence: TTT
gctttttcaagagtaacact

SEQ ID NO: 212560 - DNA, 20 bp, Artificial Sequence
  Description of Artificial Sequence: Synthetic oligonucleotide
  Target: LAMA2; (-) strand; PAM type: YTN; PAM sequence: CTA
atccgtttgctttttcaaga

SEQ ID NO: 212561 - DNA, 20 bp, Artificial Sequence
  Description of Artificial Sequence: Synthetic oligonucleotide
  Target: LAMA2; (-) strand; PAM type: YTN; PAM sequence: TTC
ctaatccgtttgctttttca

SEQ ID NO: 212562 - DNA, 20 bp, Artificial Sequence
  Description of Artificial Sequence: Synthetic oligonucleotide
  Target: LAMA2; (-) strand; PAM type: YTN; PAM sequence: TTA
aatattcctaatccgtttgc

SEQ ID NO: 212563 - DNA, 20 bp, Artificial Sequence
  Description of Artificial Sequence: Synthetic oligonucleotide
  Target: LAMA2; (-) strand; PAM type: YTN; PAM sequence: CTC
caattaaatattcctaatcc

SEQ ID NO: 212564 - DNA, 20 bp, Artificial Sequence
  Description of Artificial Sequence: Synthetic oligonucleotide
  Target: LAMA2; (-) strand; PAM type: YTN; PAM sequence: TTC
tccaattaaatattcctaat

SEQ ID NO: 212565 - DNA, 20 bp, Artificial Sequence
  Description of Artificial Sequence: Synthetic oligonucleotide
  Target: LAMA2; (-) strand; PAM type: YTN; PAM sequence: TTG
ttctccaattaaatattcct

SEQ ID NO: 212566 - DNA, 20 bp, Artificial Sequence
  Description of Artificial Sequence: Synthetic oligonucleotide
  Target: LAMA2; (-) strand; PAM type: YTN; PAM sequence: CTA
tgttgttctccaattaaata

SEQ ID NO: 212567 - DNA, 20 bp, Artificial Sequence
  Description of Artificial Sequence: Synthetic oligonucleotide
  Target: LAMA2; (-) strand; PAM type: YTN; PAM sequence: TTA
cagaaggtgtctatgttgtt

SEQ ID NO: 212568 - DNA, 20 bp, Artificial Sequence
  Description of Artificial Sequence: Synthetic oligonucleotide
  Target: LAMA2; (-) strand; PAM type: YTN; PAM sequence: TTG
aataatattacagaaggtgt

SEQ ID NO: 212569 - DNA, 20 bp, Artificial Sequence
  Description of Artificial Sequence: Synthetic oligonucleotide
  Target: LAMA2; (-) strand; PAM type: YTN; PAM sequence: CTT
gaataatattacagaaggtg

SEQ ID NO: 212570 - DNA, 20 bp, Artificial Sequence
  Description of Artificial Sequence: Synthetic oligonucleotide
  Target: LAMA2; (-) strand; PAM type: YTN; PAM sequence: TTA
cttgaataatattacagaag

SEQ ID NO: 212571 - DNA, 20 bp, Artificial Sequence
  Description of Artificial Sequence: Synthetic oligonucleotide
  Target: LAMA2; (-) strand; PAM type: YTN; PAM sequence: CTT
acttgaataatattacagaa

SEQ ID NO: 212572 - DNA, 20 bp, Artificial Sequence
  Description of Artificial Sequence: Synthetic oligonucleotide
  Target: LAMA2; (-) strand; PAM type: YTN; PAM sequence: TTC
ttacttgaataatattacag

SEQ ID NO: 212573 - DNA, 20 bp, Artificial Sequence
  Description of Artificial Sequence: Synthetic oligonucleotide
  Target: LAMA2; (-) strand; PAM type: YTN; PAM sequence: CTA
taagtaagatgtccaaaatg

SEQ ID NO: 212574 - DNA, 20 bp, Artificial Sequence
  Description of Artificial Sequence: Synthetic oligonucleotide
  Target: LAMA2; (-) strand; PAM type: YTN; PAM sequence: CTG
actataagtaagatgtccaa

SEQ ID NO: 212575 - DNA, 20 bp, Artificial Sequence
  Description of Artificial Sequence: Synthetic oligonucleotide
  Target: LAMA2; (-) strand; PAM type: YTN; PAM sequence: TTG
agaatcaatctgactataag

SEQ ID NO: 212576 - DNA, 20 bp, Artificial Sequence
  Description of Artificial Sequence: Synthetic oligonucleotide
  Target: LAMA2; (-) strand; PAM type: YTN; PAM sequence: TTT
gagaatcaatctgactataa

SEQ ID NO: 212577 - DNA, 20 bp, Artificial Sequence
  Description of Artificial Sequence: Synthetic oligonucleotide
  Target: LAMA2; (-) strand; PAM type: YTN; PAM sequence: TTT
tgagaatcaatctgactata

SEQ ID NO: 212578 - DNA, 20 bp, Artificial Sequence
  Description of Artificial Sequence: Synthetic oligonucleotide
  Target: LAMA2; (-) strand; PAM type: YTN; PAM sequence: TTA
aaaagtgttttgagaatcaa

SEQ ID NO: 212579 - DNA, 20 bp, Artificial Sequence
  Description of Artificial Sequence: Synthetic oligonucleotide
  Target: LAMA2; (-) strand; PAM type: YTN; PAM sequence: TTT
aaaaagtgttttgagaatca

SEQ ID NO: 212580 - DNA, 20 bp, Artificial Sequence
  Description of Artificial Sequence: Synthetic oligonucleotide
  Target: LAMA2; (-) strand; PAM type: YTN; PAM sequence: CTA
gacatttaaaaagtgttttg

SEQ ID NO: 212581 - DNA, 20 bp, Artificial Sequence
  Description of Artificial Sequence: Synthetic oligonucleotide
  Target: LAMA2; (-) strand; PAM type: YTN; PAM sequence: TTC
tagacatttaaaaagtgttt

SEQ ID NO: 212582 - DNA, 20 bp, Artificial Sequence
  Description of Artificial Sequence: Synthetic oligonucleotide
  Target: LAMA2; (-) strand; PAM type: YTN; PAM sequence: TTT
ctagacatttaaaaagtgtt

SEQ ID NO: 212583 - DNA, 20 bp, Artificial Sequence
  Description of Artificial Sequence: Synthetic oligonucleotide
  Target: LAMA2; (-) strand; PAM type: YTN; PAM sequence: TTG
taaatatttctagacattta

SEQ ID NO: 212584 - DNA, 20 bp, Artificial Sequence
  Description of Artificial Sequence: Synthetic oligonucleotide
  Target: LAMA2; (-) strand; PAM type: YTN; PAM sequence: CTC
aggataaataccattgtaaa

SEQ ID NO: 212585 - DNA, 20 bp, Artificial Sequence
  Description of Artificial Sequence: Synthetic oligonucleotide
  Target: LAMA2; (-) strand; PAM type: YTN; PAM sequence: TTC
tcaggataaataccattgta

SEQ ID NO: 212586 - DNA, 20 bp, Artificial Sequence
  Description of Artificial Sequence: Synthetic oligonucleotide
  Target: LAMA2; (-) strand; PAM type: YTN; PAM sequence: TTT
ctcaggataaataccattgt

SEQ ID NO: 212587 - DNA, 20 bp, Artificial Sequence
  Description of Artificial Sequence: Synthetic oligonucleotide
  Target: LAMA2; (-) strand; PAM type: YTN; PAM sequence: TTA
gcatttctcaggataaatac

SEQ ID NO: 212588 - DNA, 20 bp, Artificial Sequence
  Description of Artificial Sequence: Synthetic oligonucleotide
  Target: LAMA2; (-) strand; PAM type: YTN; PAM sequence: TTT
agcatttctcaggataaata

SEQ ID NO: 212589 - DNA, 20 bp, Artificial Sequence
  Description of Artificial Sequence: Synthetic oligonucleotide
  Target: LAMA2; (-) strand; PAM type: YTN; PAM sequence: TTT
tagcatttctcaggataaat

SEQ ID NO: 212590 - DNA, 20 bp, Artificial Sequence
  Description of Artificial Sequence: Synthetic oligonucleotide
  Target: LAMA2; (-) strand; PAM type: YTN; PAM sequence: TTT
ttagcatttctcaggataaa

SEQ ID NO: 212591 - DNA, 20 bp, Artificial Sequence
  Description of Artificial Sequence: Synthetic oligonucleotide
  Target: LAMA2; (-) strand; PAM type: YTN; PAM sequence: TTT
tttagcatttctcaggataa

SEQ ID NO: 212592 - DNA, 20 bp, Artificial Sequence
  Description of Artificial Sequence: Synthetic oligonucleotide
  Target: LAMA2; (-) strand; PAM type: YTN; PAM sequence: TTT
ttttagcatttctcaggata

SEQ ID NO: 212593 - DNA, 20 bp, Artificial Sequence
  Description of Artificial Sequence: Synthetic oligonucleotide
  Target: LAMA2; (-) strand; PAM type: YTN; PAM sequence: TTT
tttttagcatttctcaggat

SEQ ID NO: 212594 - DNA, 20 bp, Artificial Sequence
  Description of Artificial Sequence: Synthetic oligonucleotide
  Target: LAMA2; (-) strand; PAM type: YTN; PAM sequence: CTA
attttttttagcatttctca

SEQ ID NO: 212595 - DNA, 20 bp, Artificial Sequence
  Description of Artificial Sequence: Synthetic oligonucleotide
  Target: LAMA2; (-) strand; PAM type: YTN; PAM sequence: TTC
taattttttttagcatttct

SEQ ID NO: 212596 - DNA, 20 bp, Artificial Sequence
  Description of Artificial Sequence: Synthetic oligonucleotide
  Target: LAMA2; (-) strand; PAM type: YTN; PAM sequence: TTT
ctaattttttttagcatttc

SEQ ID NO: 212597 - DNA, 20 bp, Artificial Sequence
  Description of Artificial Sequence: Synthetic oligonucleotide
  Target: LAMA2; (-) strand; PAM type: YTN; PAM sequence: TTT
tctaattttttttagcattt

SEQ ID NO: 212598 - DNA, 20 bp, Artificial Sequence
  Description of Artificial Sequence: Synthetic oligonucleotide
  Target: LAMA2; (-) strand; PAM type: YTN; PAM sequence: TTA
cattttctaattttttttag

SEQ ID NO: 212599 - DNA, 20 bp, Artificial Sequence
  Description of Artificial Sequence: Synthetic oligonucleotide
  Target: LAMA2; (-) strand; PAM type: YTN; PAM sequence: TTT
acattttctaatttttttta

SEQ ID NO: 212600 - DNA, 20 bp, Artificial Sequence
  Description of Artificial Sequence: Synthetic oligonucleotide
  Target: LAMA2; (-) strand; PAM type: YTN; PAM sequence: CTT
tacattttctaatttttttt

SEQ ID NO: 212601 - DNA, 20 bp, Artificial Sequence
  Description of Artificial Sequence: Synthetic oligonucleotide
  Target: LAMA2; (-) strand; PAM type: YTN; PAM sequence: TTC
agtcacctttacattttcta

SEQ ID NO: 212602 - DNA, 20 bp, Artificial Sequence
  Description of Artificial Sequence: Synthetic oligonucleotide
  Target: LAMA2; (-) strand; PAM type: YTN; PAM sequence: CTT
cagtcacctttacattttct

SEQ ID NO: 212603 - DNA, 20 bp, Artificial Sequence
  Description of Artificial Sequence: Synthetic oligonucleotide
  Target: LAMA2; (-) strand; PAM type: YTN; PAM sequence: CTA
acttcagtcacctttacatt

SEQ ID NO: 212604 - DNA, 20 bp, Artificial Sequence
  Description of Artificial Sequence: Synthetic oligonucleotide
  Target: LAMA2; (-) strand; PAM type: YTN; PAM sequence: TTC
ctaacttcagtcacctttac

SEQ ID NO: 212605 - DNA, 20 bp, Artificial Sequence
  Description of Artificial Sequence: Synthetic oligonucleotide
  Target: LAMA2; (-) strand; PAM type: YTN; PAM sequence: TTT
cctaacttcagtcaccttta

SEQ ID NO: 212606 - DNA, 20 bp, Artificial Sequence
  Description of Artificial Sequence: Synthetic oligonucleotide
  Target: LAMA2; (-) strand; PAM type: YTN; PAM sequence: TTA
tttcctaacttcagtcacct

SEQ ID NO: 212607 - DNA, 20 bp, Artificial Sequence
  Description of Artificial Sequence: Synthetic oligonucleotide
  Target: LAMA2; (-) strand; PAM type: YTN; PAM sequence: TTA
tgttatttcctaacttcagt

SEQ ID NO: 212608 - DNA, 20 bp, Artificial Sequence
  Description of Artificial Sequence: Synthetic oligonucleotide
  Target: LAMA2; (-) strand; PAM type: YTN; PAM sequence: TTT
atgttatttcctaacttcag

SEQ ID NO: 212609 - DNA, 20 bp, Artificial Sequence
  Description of Artificial Sequence: Synthetic oligonucleotide
  Target: LAMA2; (-) strand; PAM type: YTN; PAM sequence: TTT
tatgttatttcctaacttca

SEQ ID NO: 212610 - DNA, 20 bp, Artificial Sequence
  Description of Artificial Sequence: Synthetic oligonucleotide
  Target: LAMA2; (-) strand; PAM type: YTN; PAM sequence: TTA
ccaattttatgttatttcct

SEQ ID NO: 212611 - DNA, 20 bp, Artificial Sequence
  Description of Artificial Sequence: Synthetic oligonucleotide
  Target: LAMA2; (-) strand; PAM type: YTN; PAM sequence: CTC
atcattaccaattttatgtt

SEQ ID NO: 212612 - DNA, 20 bp, Artificial Sequence
  Description of Artificial Sequence: Synthetic oligonucleotide
  Target: LAMA2; (-) strand; PAM type: YTN; PAM sequence: TTG
ctcatcattaccaattttat

SEQ ID NO: 212613 - DNA, 20 bp, Artificial Sequence
  Description of Artificial Sequence: Synthetic oligonucleotide
  Target: LAMA2; (-) strand; PAM type: YTN; PAM sequence: TTA
agaaaattgctcatcattac

SEQ ID NO: 212614 - DNA, 20 bp, Artificial Sequence
  Description of Artificial Sequence: Synthetic oligonucleotide
  Target: LAMA2; (-) strand; PAM type: YTN; PAM sequence: TTA
tgaacagccattaagaaaat

SEQ ID NO: 212615 - DNA, 20 bp, Artificial Sequence
  Description of Artificial Sequence: Synthetic oligonucleotide
  Target: LAMA2; (-) strand; PAM type: YTN; PAM sequence: TTC
cagttatgaacagccattaa

SEQ ID NO: 212616 - DNA, 20 bp, Artificial Sequence
  Description of Artificial Sequence: Synthetic oligonucleotide
  Target: LAMA2; (-) strand; PAM type: YTN; PAM sequence: TTT
ccagttatgaacagccatta

SEQ ID NO: 212617 - DNA, 20 bp, Artificial Sequence
  Description of Artificial Sequence: Synthetic oligonucleotide
  Target: LAMA2; (-) strand; PAM type: YTN; PAM sequence: TTT
tccagttatgaacagccatt

SEQ ID NO: 212618 - DNA, 20 bp, Artificial Sequence
  Description of Artificial Sequence: Synthetic oligonucleotide
  Target: LAMA2; (-) strand; PAM type: YTN; PAM sequence: TTT
ttccagttatgaacagccat

SEQ ID NO: 212619 - DNA, 20 bp, Artificial Sequence
  Description of Artificial Sequence: Synthetic oligonucleotide
  Target: LAMA2; (-) strand; PAM type: YTN; PAM sequence: TTT
tttccagttatgaacagcca

SEQ ID NO: 212620 - DNA, 20 bp, Artificial Sequence
  Description of Artificial Sequence: Synthetic oligonucleotide
  Target: LAMA2; (-) strand; PAM type: YTN; PAM sequence: TTT
ttttccagttatgaacagcc

SEQ ID NO: 212621 - DNA, 20 bp, Artificial Sequence
  Description of Artificial Sequence: Synthetic oligonucleotide
  Target: LAMA2; (-) strand; PAM type: YTN; PAM sequence: CTG
tttttttccagttatgaaca

SEQ ID NO: 212622 - DNA, 20 bp, Artificial Sequence
  Description of Artificial Sequence: Synthetic oligonucleotide
  Target: LAMA2; (-) strand; PAM type: YTN; PAM sequence: TTC
ggagcatatctgtttttttc

SEQ ID NO: 212623 - DNA, 20 bp, Artificial Sequence
  Description of Artificial Sequence: Synthetic oligonucleotide
  Target: LAMA2; (-) strand; PAM type: YTN; PAM sequence: TTT
cggagcatatctgttttttt

SEQ ID NO: 212624 - DNA, 20 bp, Artificial Sequence
  Description of Artificial Sequence: Synthetic oligonucleotide
  Target: LAMA2; (-) strand; PAM type: YTN; PAM sequence: TTC
atatatttcggagcatatct

SEQ ID NO: 212625 - DNA, 20 bp, Artificial Sequence
  Description of Artificial Sequence: Synthetic oligonucleotide
  Target: LAMA2; (-) strand; PAM type: YTN; PAM sequence: CTC
acaattcatatatttcggag

SEQ ID NO: 212626 - DNA, 20 bp, Artificial Sequence
  Description of Artificial Sequence: Synthetic oligonucleotide
  Target: LAMA2; (-) strand; PAM type: YTN; PAM sequence: TTA
tctcacaattcatatatttc

SEQ ID NO: 212627 - DNA, 20 bp, Artificial Sequence
  Description of Artificial Sequence: Synthetic oligonucleotide
  Target: LAMA2; (-) strand; PAM type: YTN; PAM sequence: TTT
atctcacaattcatatattt

SEQ ID NO: 212628 - DNA, 20 bp, Artificial Sequence
  Description of Artificial Sequence: Synthetic oligonucleotide
  Target: LAMA2; (-) strand; PAM type: YTN; PAM sequence: CTG
cagtttatctcacaattcat

SEQ ID NO: 212629 - DNA, 20 bp, Artificial Sequence
  Description of Artificial Sequence: Synthetic oligonucleotide
  Target: LAMA2; (-) strand; PAM type: YTN; PAM sequence: TTA
ctgcagtttatctcacaatt

SEQ ID NO: 212630 - DNA, 20 bp, Artificial Sequence
  Description of Artificial Sequence: Synthetic oligonucleotide
  Target: LAMA2; (-) strand; PAM type: YTN; PAM sequence: TTT
actgcagtttatctcacaat

SEQ ID NO: 212631 - DNA, 20 bp, Artificial Sequence
  Description of Artificial Sequence: Synthetic oligonucleotide
  Target: LAMA2; (-) strand; PAM type: YTN; PAM sequence: TTT
tactgcagtttatctcacaa

SEQ ID NO: 212632 - DNA, 20 bp, Artificial Sequence
  Description of Artificial Sequence: Synthetic oligonucleotide
  Target: LAMA2; (-) strand; PAM type: YTN; PAM sequence: CTT
ttactgcagtttatctcaca

SEQ ID NO: 212633 - DNA, 20 bp, Artificial Sequence
  Description of Artificial Sequence: Synthetic oligonucleotide
  Target: LAMA2; (-) strand; PAM type: YTN; PAM sequence: TTG
gggtcttttactgcagttta

SEQ ID NO: 212634 - DNA, 20 bp, Artificial Sequence
  Description of Artificial Sequence: Synthetic oligonucleotide
  Target: LAMA2; (-) strand; PAM type: YTN; PAM sequence: CTT
ggggtcttttactgcagttt

SEQ ID NO: 212635 - DNA, 20 bp, Artificial Sequence
  Description of Artificial Sequence: Synthetic oligonucleotide
  Target: LAMA2; (-) strand; PAM type: YTN; PAM sequence: TTC
ttggggtcttttactgcagt

SEQ ID NO: 212636 - DNA, 20 bp, Artificial Sequence
  Description of Artificial Sequence: Synthetic oligonucleotide
  Target: LAMA2; (-) strand; PAM type: YTN; PAM sequence: TTT
cttggggtcttttactgcag

SEQ ID NO: 212637 - DNA, 20 bp, Artificial Sequence
  Description of Artificial Sequence: Synthetic oligonucleotide
  Target: LAMA2; (-) strand; PAM type: YTN; PAM sequence: CTC
aatttcttggggtcttttac

SEQ ID NO: 212638 - DNA, 20 bp, Artificial Sequence
  Description of Artificial Sequence: Synthetic oligonucleotide
  Target: LAMA2; (-) strand; PAM type: YTN; PAM sequence: TTC
cctcaatttcttggggtctt

SEQ ID NO: 212639 - DNA, 20 bp, Artificial Sequence
  Description of Artificial Sequence: Synthetic oligonucleotide
  Target: LAMA2; (-) strand; PAM type: YTN; PAM sequence: TTT
ccctcaatttcttggggtct

SEQ ID NO: 212640 - DNA, 20 bp, Artificial Sequence
  Description of Artificial Sequence: Synthetic oligonucleotide
  Target: LAMA2; (-) strand; PAM type: YTN; PAM sequence: TTC
catagtttccctcaatttct

SEQ ID NO: 212641 - DNA, 20 bp, Artificial Sequence
  Description of Artificial Sequence: Synthetic oligonucleotide
  Target: LAMA2; (-) strand; PAM type: YTN; PAM sequence: TTT
ccatagtttccctcaatttc

SEQ ID NO: 212642 - DNA, 20 bp, Artificial Sequence
  Description of Artificial Sequence: Synthetic oligonucleotide
  Target: LAMA2; (-) strand; PAM type: YTN; PAM sequence: CTA
caatcatttccatagtttcc

SEQ ID NO: 212643 - DNA, 20 bp, Artificial Sequence
  Description of Artificial Sequence: Synthetic oligonucleotide
  Target: LAMA2; (-) strand; PAM type: YTN; PAM sequence: TTG
ctacaatcatttccatagtt

SEQ ID NO: 212644 - DNA, 20 bp, Artificial Sequence
  Description of Artificial Sequence: Synthetic oligonucleotide
  Target: LAMA2; (-) strand; PAM type: YTN; PAM sequence: CTT
gctacaatcatttccatagt

SEQ ID NO: 212645 - DNA, 20 bp, Artificial Sequence
  Description of Artificial Sequence: Synthetic oligonucleotide
  Target: LAMA2; (-) strand; PAM type: YTN; PAM sequence: CTA
ccacttgctacaatcatttc

SEQ ID NO: 212646 - DNA, 20 bp, Artificial Sequence
  Description of Artificial Sequence: Synthetic oligonucleotide
  Target: LAMA2; (-) strand; PAM type: YTN; PAM sequence: TTG
ctaccacttgctacaatcat

SEQ ID NO: 212647 - DNA, 20 bp, Artificial Sequence
  Description of Artificial Sequence: Synthetic oligonucleotide
  Target: LAMA2; (-) strand; PAM type: YTN; PAM sequence: CTT
gctaccacttgctacaatca

SEQ ID NO: 212648 - DNA, 20 bp, Artificial Sequence
  Description of Artificial Sequence: Synthetic oligonucleotide
  Target: LAMA2; (-) strand; PAM type: YTN; PAM sequence: TTC
aaaatgcaaacaaaaatagc

SEQ ID NO: 212649 - DNA, 20 bp, Artificial Sequence
  Description of Artificial Sequence: Synthetic oligonucleotide
  Target: LAMA2; (-) strand; PAM type: YTN; PAM sequence: TTT
caaaatgcaaacaaaaatag

SEQ ID NO: 212650 - DNA, 20 bp, Artificial Sequence
  Description of Artificial Sequence: Synthetic oligonucleotide
  Target: LAMA2; (-) strand; PAM type: YTN; PAM sequence: CTT
tcaaaatgcaaacaaaaata

SEQ ID NO: 212651 - DNA, 20 bp, Artificial Sequence
  Description of Artificial Sequence: Synthetic oligonucleotide
  Target: LAMA2; (-) strand; PAM type: YTN; PAM sequence: CTG
ctttcaaaatgcaaacaaaa

SEQ ID NO: 212652 - DNA, 20 bp, Artificial Sequence
  Description of Artificial Sequence: Synthetic oligonucleotide
  Target: LAMA2; (-) strand; PAM type: YTN; PAM sequence: CTA
aaaactgctttcaaaatgca

SEQ ID NO: 212653 - DNA, 20 bp, Artificial Sequence
  Description of Artificial Sequence: Synthetic oligonucleotide
  Target: LAMA2; (-) strand; PAM type: YTN; PAM sequence: TTC
taaaaactgctttcaaaatg

SEQ ID NO: 212654 - DNA, 20 bp, Artificial Sequence
  Description of Artificial Sequence: Synthetic oligonucleotide
  Target: LAMA2; (-) strand; PAM type: YTN; PAM sequence: TTT
ctaaaaactgctttcaaaat

SEQ ID NO: 212655 - DNA, 20 bp, Artificial Sequence
  Description of Artificial Sequence: Synthetic oligonucleotide
  Target: LAMA2; (-) strand; PAM type: YTN; PAM sequence: TTA
gaaatttctaaaaactgctt

SEQ ID NO: 212656 - DNA, 20 bp, Artificial Sequence
  Description of Artificial Sequence: Synthetic oligonucleotide
  Target: LAMA2; (-) strand; PAM type: YTN; PAM sequence: TTC
aaaattagaaatttctaaaa

SEQ ID NO: 212657 - DNA, 20 bp, Artificial Sequence
  Description of Artificial Sequence: Synthetic oligonucleotide
  Target: LAMA2; (-) strand; PAM type: YTN; PAM sequence: TTT
caaaattagaaatttctaaa

SEQ ID NO: 212658 - DNA, 20 bp, Artificial Sequence
  Description of Artificial Sequence: Synthetic oligonucleotide
  Target: LAMA2; (-) strand; PAM type: YTN; PAM sequence: TTT
tcaaaattagaaatttctaa

SEQ ID NO: 212659 - DNA, 20 bp, Artificial Sequence
  Description of Artificial Sequence: Synthetic oligonucleotide
  Target: LAMA2; (-) strand; PAM type: YTN; PAM sequence: TTA
agattttcaaaattagaaat

SEQ ID NO: 212660 - DNA, 20 bp, Artificial Sequence
  Description of Artificial Sequence: Synthetic oligonucleotide
  Target: LAMA2; (-) strand; PAM type: YTN; PAM sequence: TTT
aagattttcaaaattagaaa

SEQ ID NO: 212661 - DNA, 20 bp, Artificial Sequence
  Description of Artificial Sequence: Synthetic oligonucleotide
  Target: LAMA2; (-) strand; PAM type: YTN; PAM sequence: CTA
aaaatcaatttaagattttc

SEQ ID NO: 212662 - DNA, 20 bp, Artificial Sequence
  Description of Artificial Sequence: Synthetic oligonucleotide
  Target: LAMA2; (-) strand; PAM type: YTN; PAM sequence: TTC
ctaaaaatcaatttaagatt

SEQ ID NO: 212663 - DNA, 20 bp, Artificial Sequence
  Description of Artificial Sequence: Synthetic oligonucleotide
  Target: LAMA2; (-) strand; PAM type: YTN; PAM sequence: CTG
agaaaaaagtagccccagaa

SEQ ID NO: 212664 - DNA, 20 bp, Artificial Sequence
  Description of Artificial Sequence: Synthetic oligonucleotide
  Target: LAMA2; (-) strand; PAM type: YTN; PAM sequence: CTA
gaggtctgagaaaaaagtag

SEQ ID NO: 212665 - DNA, 20 bp, Artificial Sequence
  Description of Artificial Sequence: Synthetic oligonucleotide
  Target: LAMA2; (-) strand; PAM type: YTN; PAM sequence: TTG
ccctagaggtctgagaaaaa

SEQ ID NO: 212666 - DNA, 20 bp, Artificial Sequence
  Description of Artificial Sequence: Synthetic oligonucleotide
  Target: LAMA2; (-) strand; PAM type: YTN; PAM sequence: TTG
gttgccctagaggtctgaga

SEQ ID NO: 212667 - DNA, 20 bp, Artificial Sequence
  Description of Artificial Sequence: Synthetic oligonucleotide
  Target: LAMA2; (-) strand; PAM type: YTN; PAM sequence: CTA
caattggttgccctagaggt

SEQ ID NO: 212668 - DNA, 20 bp, Artificial Sequence
  Description of Artificial Sequence: Synthetic oligonucleotide
  Target: LAMA2; (-) strand; PAM type: YTN; PAM sequence: CTC
tacaattggttgccctagag

SEQ ID NO: 212669 - DNA, 20 bp, Artificial Sequence
  Description of Artificial Sequence: Synthetic oligonucleotide
  Target: LAMA2; (-) strand; PAM type: YTN; PAM sequence: TTA
acagaagggggaagtctcta

SEQ ID NO: 212670 - DNA, 20 bp, Artificial Sequence
  Description of Artificial Sequence: Synthetic oligonucleotide
  Target: LAMA2; (-) strand; PAM type: YTN; PAM sequence: CTG
agtcaattaacagaaggggg

SEQ ID NO: 212671 - DNA, 20 bp, Artificial Sequence
  Description of Artificial Sequence: Synthetic oligonucleotide
  Target: LAMA2; (-) strand; PAM type: YTN; PAM sequence: TTA
atatgtaagcagatctgagt

SEQ ID NO: 212672 - DNA, 20 bp, Artificial Sequence
  Description of Artificial Sequence: Synthetic oligonucleotide
  Target: LAMA2; (-) strand; PAM type: YTN; PAM sequence: TTT
aatatgtaagcagatctgag

SEQ ID NO: 212673 - DNA, 20 bp, Artificial Sequence
  Description of Artificial Sequence: Synthetic oligonucleotide
  Target: LAMA2; (-) strand; PAM type: YTN; PAM sequence: CTT
taatatgtaagcagatctga

SEQ ID NO: 212674 - DNA, 20 bp, Artificial Sequence
  Description of Artificial Sequence: Synthetic oligonucleotide
  Target: LAMA2; (-) strand; PAM type: YTN; PAM sequence: CTG
agaaccagaggtggccttta

SEQ ID NO: 212675 - DNA, 20 bp, Artificial Sequence
  Description of Artificial Sequence: Synthetic oligonucleotide
  Target: LAMA2; (-) strand; PAM type: YTN; PAM sequence: TTC
cagctgagaaccagaggtgg

SEQ ID NO: 212676 - DNA, 20 bp, Artificial Sequence
  Description of Artificial Sequence: Synthetic oligonucleotide
  Target: LAMA2; (-) strand; PAM type: YTN; PAM sequence: TTT
ccagctgagaaccagaggtg

SEQ ID NO: 212677 - DNA, 20 bp, Artificial Sequence
  Description of Artificial Sequence: Synthetic oligonucleotide
  Target: LAMA2; (-) strand; PAM type: YTN; PAM sequence: TTT
tccagctgagaaccagaggt

SEQ ID NO: 212678 - DNA, 20 bp, Artificial Sequence
  Description of Artificial Sequence: Synthetic oligonucleotide
  Target: LAMA2; (-) strand; PAM type: YTN; PAM sequence: TTT
ttccagctgagaaccagagg

SEQ ID NO: 212679 - DNA, 20 bp, Artificial Sequence
  Description of Artificial Sequence: Synthetic oligonucleotide
  Target: LAMA2; (-) strand; PAM type: YTN; PAM sequence: TTT
tttccagctgagaaccagag

SEQ ID NO: 212680 - DNA, 20 bp, Artificial Sequence
  Description of Artificial Sequence: Synthetic oligonucleotide
  Target: LAMA2; (-) strand; PAM type: YTN; PAM sequence: CTT
ttttccagctgagaaccaga

SEQ ID NO: 212681 - DNA, 20 bp, Artificial Sequence
  Description of Artificial Sequence: Synthetic oligonucleotide
  Target: LAMA2; (-) strand; PAM type: YTN; PAM sequence: CTC
ttttttccagctgagaacca

SEQ ID NO: 212682 - DNA, 20 bp, Artificial Sequence
  Description of Artificial Sequence: Synthetic oligonucleotide
  Target: LAMA2; (-) strand; PAM type: YTN; PAM sequence: TTC
aaaagggaggaactcttttt

SEQ ID NO: 212683 - DNA, 20 bp, Artificial Sequence
  Description of Artificial Sequence: Synthetic oligonucleotide
  Target: LAMA2; (-) strand; PAM type: YTN; PAM sequence: TTT
caaaagggaggaactctttt

SEQ ID NO: 212684 - DNA, 20 bp, Artificial Sequence
  Description of Artificial Sequence: Synthetic oligonucleotide
  Target: LAMA2; (-) strand; PAM type: YTN; PAM sequence: CTG
tttcaaaagggaggaactct

SEQ ID NO: 212685 - DNA, 20 bp, Artificial Sequence
  Description of Artificial Sequence: Synthetic oligonucleotide
  Target: LAMA2; (-) strand; PAM type: YTN; PAM sequence: CTG
agtcaactgtttcaaaaggg

SEQ ID NO: 212686 - DNA, 20 bp, Artificial Sequence
  Description of Artificial Sequence: Synthetic oligonucleotide
  Target: LAMA2; (-) strand; PAM type: YTN; PAM sequence: TTC
tgagtcaactgtttcaaaag

SEQ ID NO: 212687 - DNA, 20 bp, Artificial Sequence
  Description of Artificial Sequence: Synthetic oligonucleotide
  Target: LAMA2; (-) strand; PAM type: YTN; PAM sequence: CTG
attctgagtcaactgtttca

SEQ ID NO: 212688 - DNA, 20 bp, Artificial Sequence
  Description of Artificial Sequence: Synthetic oligonucleotide
  Target: LAMA2; (-) strand; PAM type: YTN; PAM sequence: CTG
aaaggaaggaactgattctg

SEQ ID NO: 212689 - DNA, 20 bp, Artificial Sequence
  Description of Artificial Sequence: Synthetic oligonucleotide
  Target: LAMA2; (-) strand; PAM type: YTN; PAM sequence: TTA
aagataaggatctgaaagga

SEQ ID NO: 212690 - DNA, 20 bp, Artificial Sequence
  Description of Artificial Sequence: Synthetic oligonucleotide
  Target: LAMA2; (-) strand; PAM type: YTN; PAM sequence: TTA
gaagacaaagtaattaaaga

SEQ ID NO: 212691 - DNA, 20 bp, Artificial Sequence
  Description of Artificial Sequence: Synthetic oligonucleotide
  Target: LAMA2; (-) strand; PAM type: YTN; PAM sequence: TTA
ggaccccaggttagaagaca

SEQ ID NO: 212692 - DNA, 20 bp, Artificial Sequence
  Description of Artificial Sequence: Synthetic oligonucleotide
  Target: LAMA2; (-) strand; PAM type: YTN; PAM sequence: CTA
ggcaaagattaggaccccag

SEQ ID NO: 212693 - DNA, 20 bp, Artificial Sequence
  Description of Artificial Sequence: Synthetic oligonucleotide
  Target: LAMA2; (-) strand; PAM type: YTN; PAM sequence: TTC
ctaggcaaagattaggaccc

SEQ ID NO: 212694 - DNA, 20 bp, Artificial Sequence
  Description of Artificial Sequence: Synthetic oligonucleotide
  Target: LAMA2; (-) strand; PAM type: YTN; PAM sequence: TTA
aattcctaggcaaagattag

SEQ ID NO: 212695 - DNA, 20 bp, Artificial Sequence
  Description of Artificial Sequence: Synthetic oligonucleotide
  Target: LAMA2; (-) strand; PAM type: YTN; PAM sequence: TTT
aaattcctaggcaaagatta

SEQ ID NO: 212696 - DNA, 20 bp, Artificial Sequence
  Description of Artificial Sequence: Synthetic oligonucleotide
  Target: LAMA2; (-) strand; PAM type: YTN; PAM sequence: CTT
taaattcctaggcaaagatt

SEQ ID NO: 212697 - DNA, 20 bp, Artificial Sequence
  Description of Artificial Sequence: Synthetic oligonucleotide
  Target: LAMA2; (-) strand; PAM type: YTN; PAM sequence: TTA
ctttaaattcctaggcaaag

SEQ ID NO: 212698 - DNA, 20 bp, Artificial Sequence
  Description of Artificial Sequence: Synthetic oligonucleotide
  Target: LAMA2; (-) strand; PAM type: YTN; PAM sequence: TTT
actttaaattcctaggcaaa

SEQ ID NO: 212699 - DNA, 20 bp, Artificial Sequence
  Description of Artificial Sequence: Synthetic oligonucleotide
  Target: LAMA2; (-) strand; PAM type: YTN; PAM sequence: CTT
tactttaaattcctaggcaa

SEQ ID NO: 212700 - DNA, 20 bp, Artificial Sequence
  Description of Artificial Sequence: Synthetic oligonucleotide
  Target: LAMA2; (-) strand; PAM type: YTN; PAM sequence: TTC
ggccaatctttactttaaat

SEQ ID NO: 212701 - DNA, 20 bp, Artificial Sequence
  Description of Artificial Sequence: Synthetic oligonucleotide
  Target: LAMA2; (-) strand; PAM type: YTN; PAM sequence: CTA
aagtaaaggtagatacaagt

SEQ ID NO: 212702 - DNA, 20 bp, Artificial Sequence
  Description of Artificial Sequence: Synthetic oligonucleotide
  Target: LAMA2; (-) strand; PAM type: YTN; PAM sequence: CTA
gaggccacgcccagagggtg

SEQ ID NO: 212703 - DNA, 20 bp, Artificial Sequence
  Description of Artificial Sequence: Synthetic oligonucleotide
  Target: LAMA2; (-) strand; PAM type: YTN; PAM sequence: CTG
gctagaggccacgcccagag

SEQ ID NO: 212704 - DNA, 20 bp, Artificial Sequence
  Description of Artificial Sequence: Synthetic oligonucleotide
  Target: LAMA2; (-) strand; PAM type: YTN; PAM sequence: CTC
aaagtgagactggctagagg

SEQ ID NO: 212705 - DNA, 20 bp, Artificial Sequence
  Description of Artificial Sequence: Synthetic oligonucleotide
  Target: LAMA2; (-) strand; PAM type: YTN; PAM sequence: TTC
aaagatactcaaagtgagac

SEQ ID NO: 212706 - DNA, 20 bp, Artificial Sequence
  Description of Artificial Sequence: Synthetic oligonucleotide
  Target: LAMA2; (-) strand; PAM type: YTN; PAM sequence: TTT
caaagatactcaaagtgaga

SEQ ID NO: 212707 - DNA, 20 bp, Artificial Sequence
  Description of Artificial Sequence: Synthetic oligonucleotide
  Target: LAMA2; (-) strand; PAM type: YTN; PAM sequence: TTG
acaataaggagagagtttca

SEQ ID NO: 212708 - DNA, 20 bp, Artificial Sequence
  Description of Artificial Sequence: Synthetic oligonucleotide
  Target: LAMA2; (-) strand; PAM type: YTN; PAM sequence: TTA
aaaaaaataatcaaagtaag

SEQ ID NO: 212709 - DNA, 20 bp, Artificial Sequence
  Description of Artificial Sequence: Synthetic oligonucleotide
  Target: LAMA2; (-) strand; PAM type: YTN; PAM sequence: TTA
aattaaaaaaaataatcaaa

SEQ ID NO: 212710 - DNA, 20 bp, Artificial Sequence
  Description of Artificial Sequence: Synthetic oligonucleotide
  Target: LAMA2; (-) strand; PAM type: YTN; PAM sequence: TTG
gaaacattaaattaaaaaaa

SEQ ID NO: 212711 - DNA, 20 bp, Artificial Sequence
  Description of Artificial Sequence: Synthetic oligonucleotide
  Target: LAMA2; (-) strand; PAM type: YTN; PAM sequence: CTA
cattggaaacattaaattaa

SEQ ID NO: 212712 - DNA, 20 bp, Artificial Sequence
  Description of Artificial Sequence: Synthetic oligonucleotide
  Target: LAMA2; (-) strand; PAM type: YTN; PAM sequence: TTC
tacattggaaacattaaatt

SEQ ID NO: 212713 - DNA, 20 bp, Artificial Sequence
  Description of Artificial Sequence: Synthetic oligonucleotide
  Target: LAMA2; (-) strand; PAM type: YTN; PAM sequence: TTT
ctacattggaaacattaaat

SEQ ID NO: 212714 - DNA, 20 bp, Artificial Sequence
  Description of Artificial Sequence: Synthetic oligonucleotide
  Target: LAMA2; (-) strand; PAM type: YTN; PAM sequence: TTG
agatgtatttctacattgga

SEQ ID NO: 212715 - DNA, 20 bp, Artificial Sequence
  Description of Artificial Sequence: Synthetic oligonucleotide
  Target: LAMA2; (-) strand; PAM type: YTN; PAM sequence: TTT
gagatgtatttctacattgg

SEQ ID NO: 212716 - DNA, 20 bp, Artificial Sequence
  Description of Artificial Sequence: Synthetic oligonucleotide
  Target: LAMA2; (-) strand; PAM type: YTN; PAM sequence: TTT
tgagatgtatttctacattg

SEQ ID NO: 212717 - DNA, 20 bp, Artificial Sequence
  Description of Artificial Sequence: Synthetic oligonucleotide
  Target: LAMA2; (-) strand; PAM type: YTN; PAM sequence: TTT
ttgagatgtatttctacatt

SEQ ID NO: 212718 - DNA, 20 bp, Artificial Sequence
  Description of Artificial Sequence: Synthetic oligonucleotide
  Target: LAMA2; (-) strand; PAM type: YTN; PAM sequence: CTG
cataatttttgagatgtatt

SEQ ID NO: 212719 - DNA, 20 bp, Artificial Sequence
  Description of Artificial Sequence: Synthetic oligonucleotide
  Target: LAMA2; (-) strand; PAM type: YTN; PAM sequence: TTC
tgcataatttttgagatgta

SEQ ID NO: 212720 - DNA, 20 bp, Artificial Sequence
  Description of Artificial Sequence: Synthetic oligonucleotide
  Target: LAMA2; (-) strand; PAM type: YTN; PAM sequence: CTT
ctgcataatttttgagatgt

SEQ ID NO: 212721 - DNA, 20 bp, Artificial Sequence
  Description of Artificial Sequence: Synthetic oligonucleotide
  Target: LAMA2; (-) strand; PAM type: YTN; PAM sequence: TTA
tatgatagaacttctgcata

SEQ ID NO: 212722 - DNA, 20 bp, Artificial Sequence
  Description of Artificial Sequence: Synthetic oligonucleotide
  Target: LAMA2; (-) strand; PAM type: YTN; PAM sequence: TTC
agacccatgcaagaacatta

SEQ ID NO: 212723 - DNA, 20 bp, Artificial Sequence
  Description of Artificial Sequence: Synthetic oligonucleotide
  Target: LAMA2; (-) strand; PAM type: YTN; PAM sequence: CTT
cagacccatgcaagaacatt

SEQ ID NO: 212724 - DNA, 20 bp, Artificial Sequence
  Description of Artificial Sequence: Synthetic oligonucleotide
  Target: LAMA2; (-) strand; PAM type: YTN; PAM sequence: TTC
aaagagcttcagacccatgc

SEQ ID NO: 212725 - DNA, 20 bp, Artificial Sequence
  Description of Artificial Sequence: Synthetic oligonucleotide
  Target: LAMA2; (-) strand; PAM type: YTN; PAM sequence: CTT
caaagagcttcagacccatg

SEQ ID NO: 212726 - DNA, 20 bp, Artificial Sequence
  Description of Artificial Sequence: Synthetic oligonucleotide
  Target: LAMA2; (-) strand; PAM type: YTN; PAM sequence: TTG
ccttcaaagagcttcagacc

SEQ ID NO: 212727 - DNA, 20 bp, Artificial Sequence
  Description of Artificial Sequence: Synthetic oligonucleotide
  Target: LAMA2; (-) strand; PAM type: YTN; PAM sequence: CTT
gccttcaaagagcttcagac

SEQ ID NO: 212728 - DNA, 20 bp, Artificial Sequence
  Description of Artificial Sequence: Synthetic oligonucleotide
  Target: LAMA2; (-) strand; PAM type: YTN; PAM sequence: TTA
cacaacaatgaacaacatag

SEQ ID NO: 212729 - DNA, 20 bp, Artificial Sequence
  Description of Artificial Sequence: Synthetic oligonucleotide
  Target: LAMA2; (-) strand; PAM type: YTN; PAM sequence: CTA
ggcagtaattacacaacaat

SEQ ID NO: 212730 - DNA, 20 bp, Artificial Sequence
  Description of Artificial Sequence: Synthetic oligonucleotide
  Target: LAMA2; (-) strand; PAM type: YTN; PAM sequence: CTC
atctaggcagtaattacaca

SEQ ID NO: 212731 - DNA, 20 bp, Artificial Sequence
  Description of Artificial Sequence: Synthetic oligonucleotide
  Target: LAMA2; (-) strand; PAM type: YTN; PAM sequence: TTC
caagtactcatctaggcagt

SEQ ID NO: 212732 - DNA, 20 bp, Artificial Sequence
  Description of Artificial Sequence: Synthetic oligonucleotide
  Target: LAMA2; (-) strand; PAM type: YTN; PAM sequence: TTT
ccaagtactcatctaggcag

SEQ ID NO: 212733 - DNA, 20 bp, Artificial Sequence
  Description of Artificial Sequence: Synthetic oligonucleotide
  Target: LAMA2; (-) strand; PAM type: YTN; PAM sequence: CTT
tccaagtactcatctaggca

SEQ ID NO: 212734 - DNA, 20 bp, Artificial Sequence
  Description of Artificial Sequence: Synthetic oligonucleotide
  Target: LAMA2; (-) strand; PAM type: YTN; PAM sequence: CTC
cacctttccaagtactcatc

SEQ ID NO: 212735 - DNA, 20 bp, Artificial Sequence
  Description of Artificial Sequence: Synthetic oligonucleotide
  Target: LAMA2; (-) strand; PAM type: YTN; PAM sequence: TTG
aatcactccacctttccaag

SEQ ID NO: 212736 - DNA, 20 bp, Artificial Sequence
  Description of Artificial Sequence: Synthetic oligonucleotide
  Target: LAMA2; (-) strand; PAM type: YTN; PAM sequence: TTC
attgaatcactccacctttc

SEQ ID NO: 212737 - DNA, 20 bp, Artificial Sequence
  Description of Artificial Sequence: Synthetic oligonucleotide
  Target: LAMA2; (-) strand; PAM type: YTN; PAM sequence: CTA
tatgcaacacatattcattg

SEQ ID NO: 212738 - DNA, 20 bp, Artificial Sequence
  Description of Artificial Sequence: Synthetic oligonucleotide
  Target: LAMA2; (-) strand; PAM type: YTN; PAM sequence: TTA
aactatatgcaacacatatt

SEQ ID NO: 212739 - DNA, 20 bp, Artificial Sequence
  Description of Artificial Sequence: Synthetic oligonucleotide
  Target: LAMA2; (-) strand; PAM type: YTN; PAM sequence: CTT
aaactatatgcaacacatat

SEQ ID NO: 212740 - DNA, 20 bp, Artificial Sequence
  Description of Artificial Sequence: Synthetic oligonucleotide
  Target: LAMA2; (-) strand; PAM type: YTN; PAM sequence: TTC
ttaaactatatgcaacacat

SEQ ID NO: 212741 - DNA, 20 bp, Artificial Sequence
  Description of Artificial Sequence: Synthetic oligonucleotide
  Target: LAMA2; (-) strand; PAM type: YTN; PAM sequence: CTT
cttaaactatatgcaacaca

SEQ ID NO: 212742 - DNA, 20 bp, Artificial Sequence
  Description of Artificial Sequence: Synthetic oligonucleotide
  Target: LAMA2; (-) strand; PAM type: YTN; PAM sequence: TTC
ttcttaaactatatgcaaca

SEQ ID NO: 212743 - DNA, 20 bp, Artificial Sequence
  Description of Artificial Sequence: Synthetic oligonucleotide
  Target: LAMA2; (-) strand; PAM type: YTN; PAM sequence: TTC
cagtcccagttcttcttaaa

SEQ ID NO: 212744 - DNA, 20 bp, Artificial Sequence
  Description of Artificial Sequence: Synthetic oligonucleotide
  Target: LAMA2; (-) strand; PAM type: YTN; PAM sequence: CTA
attccagtcccagttcttct

SEQ ID NO: 212745 - DNA, 20 bp, Artificial Sequence
  Description of Artificial Sequence: Synthetic oligonucleotide
  Target: LAMA2; (-) strand; PAM type: YTN; PAM sequence: TTC
taattccagtcccagttctt

SEQ ID NO: 212746 - DNA, 20 bp, Artificial Sequence
  Description of Artificial Sequence: Synthetic oligonucleotide
  Target: LAMA2; (-) strand; PAM type: YTN; PAM sequence: TTT
ctaattccagtcccagttct

SEQ ID NO: 212747 - DNA, 20 bp, Artificial Sequence
  Description of Artificial Sequence: Synthetic oligonucleotide
  Target: LAMA2; (-) strand; PAM type: YTN; PAM sequence: CTA
aagacggaacatgtgtttct

SEQ ID NO: 212748 - DNA, 20 bp, Artificial Sequence
  Description of Artificial Sequence: Synthetic oligonucleotide
  Target: LAMA2; (-) strand; PAM type: YTN; PAM sequence: TTG
ctaaagacggaacatgtgtt

SEQ ID NO: 212749 - DNA, 20 bp, Artificial Sequence
  Description of Artificial Sequence: Synthetic oligonucleotide
  Target: LAMA2; (-) strand; PAM type: YTN; PAM sequence: TTT
gctaaagacggaacatgtgt

SEQ ID NO: 212750 - DNA, 20 bp, Artificial Sequence
  Description of Artificial Sequence: Synthetic oligonucleotide
  Target: LAMA2; (-) strand; PAM type: YTN; PAM sequence: TTA
gtaatgatgggtgatttgct

SEQ ID NO: 212751 - DNA, 20 bp, Artificial Sequence
  Description of Artificial Sequence: Synthetic oligonucleotide
  Target: LAMA2; (-) strand; PAM type: YTN; PAM sequence: CTC
aatatcatagataaaataat

SEQ ID NO: 212752 - DNA, 20 bp, Artificial Sequence
  Description of Artificial Sequence: Synthetic oligonucleotide
  Target: LAMA2; (-) strand; PAM type: YTN; PAM sequence: TTG
ctcaatatcatagataaaat

SEQ ID NO: 212753 - DNA, 20 bp, Artificial Sequence
  Description of Artificial Sequence: Synthetic oligonucleotide
  Target: LAMA2; (-) strand; PAM type: YTN; PAM sequence: CTT
gctcaatatcatagataaaa

SEQ ID NO: 212754 - DNA, 20 bp, Artificial Sequence
  Description of Artificial Sequence: Synthetic oligonucleotide
  Target: LAMA2; (-) strand; PAM type: YTN; PAM sequence: TTA
cttgctcaatatcatagata

SEQ ID NO: 212755 - DNA, 20 bp, Artificial Sequence
  Description of Artificial Sequence: Synthetic oligonucleotide
  Target: LAMA2; (-) strand; PAM type: YTN; PAM sequence: CTA
taatatagatgggataggca

SEQ ID NO: 212756 - DNA, 20 bp, Artificial Sequence
  Description of Artificial Sequence: Synthetic oligonucleotide
  Target: LAMA2; (-) strand; PAM type: YTN; PAM sequence: TTC
caacaaagctataatataga

SEQ ID NO: 212757 - DNA, 20 bp, Artificial Sequence
  Description of Artificial Sequence: Synthetic oligonucleotide
  Target: LAMA2; (-) strand; PAM type: YTN; PAM sequence: CTT
ccaacaaagctataatatag

SEQ ID NO: 212758 - DNA, 20 bp, Artificial Sequence
  Description of Artificial Sequence: Synthetic oligonucleotide
  Target: LAMA2; (-) strand; PAM type: YTN; PAM sequence: TTG
agtcttccaacaaagctata

SEQ ID NO: 212759 - DNA, 20 bp, Artificial Sequence
  Description of Artificial Sequence: Synthetic oligonucleotide
  Target: LAMA2; (-) strand; PAM type: YTN; PAM sequence: CTT
gagtcttccaacaaagctat

SEQ ID NO: 212760 - DNA, 20 bp, Artificial Sequence
  Description of Artificial Sequence: Synthetic oligonucleotide
  Target: LAMA2; (-) strand; PAM type: YTN; PAM sequence: TTA
tcccttgagtcttccaacaa

SEQ ID NO: 212761 - DNA, 20 bp, Artificial Sequence
  Description of Artificial Sequence: Synthetic oligonucleotide
  Target: LAMA2; (-) strand; PAM type: YTN; PAM sequence: TTT
atcccttgagtcttccaaca

SEQ ID NO: 212762 - DNA, 20 bp, Artificial Sequence
  Description of Artificial Sequence: Synthetic oligonucleotide
  Target: LAMA2; (-) strand; PAM type: YTN; PAM sequence: CTT
tatcccttgagtcttccaac

SEQ ID NO: 212763 - DNA, 20 bp, Artificial Sequence
  Description of Artificial Sequence: Synthetic oligonucleotide
  Target: LAMA2; (-) strand; PAM type: YTN; PAM sequence: TTC
actttatcccttgagtcttc

SEQ ID NO: 212764 - DNA, 20 bp, Artificial Sequence
  Description of Artificial Sequence: Synthetic oligonucleotide
  Target: LAMA2; (-) strand; PAM type: YTN; PAM sequence: TTT
cactttatcccttgagtctt

SEQ ID NO: 212765 - DNA, 20 bp, Artificial Sequence
  Description of Artificial Sequence: Synthetic oligonucleotide
  Target: LAMA2; (-) strand; PAM type: YTN; PAM sequence: TTT
tcactttatcccttgagtct

SEQ ID NO: 212766 - DNA, 20 bp, Artificial Sequence
  Description of Artificial Sequence: Synthetic oligonucleotide
  Target: LAMA2; (-) strand; PAM type: YTN; PAM sequence: CTA
caaagcattttcactttatc

SEQ ID NO: 212767 - DNA, 20 bp, Artificial Sequence
  Description of Artificial Sequence: Synthetic oligonucleotide
  Target: LAMA2; (-) strand; PAM type: YTN; PAM sequence: CTC
tacaaagcattttcacttta

SEQ ID NO: 212768 - DNA, 20 bp, Artificial Sequence
  Description of Artificial Sequence: Synthetic oligonucleotide
  Target: LAMA2; (-) strand; PAM type: YTN; PAM sequence: CTG
aactctacaaagcattttca

SEQ ID NO: 212769 - DNA, 20 bp, Artificial Sequence
  Description of Artificial Sequence: Synthetic oligonucleotide
  Target: LAMA2; (-) strand; PAM type: YTN; PAM sequence: TTG
accataataaatgtgtagca

SEQ ID NO: 212770 - DNA, 20 bp, Artificial Sequence
  Description of Artificial Sequence: Synthetic oligonucleotide
  Target: LAMA2; (-) strand; PAM type: YTN; PAM sequence: TTC
attgaccataataaatgtgt

SEQ ID NO: 212771 - DNA, 20 bp, Artificial Sequence
  Description of Artificial Sequence: Synthetic oligonucleotide
  Target: LAMA2; (-) strand; PAM type: YTN; PAM sequence: TTG
ggtaatgcagttcattgacc

SEQ ID NO: 212772 - DNA, 20 bp, Artificial Sequence
  Description of Artificial Sequence: Synthetic oligonucleotide
  Target: LAMA2; (-) strand; PAM type: YTN; PAM sequence: TTT
gggtaatgcagttcattgac

SEQ ID NO: 212773 - DNA, 20 bp, Artificial Sequence
  Description of Artificial Sequence: Synthetic oligonucleotide
  Target: LAMA2; (-) strand; PAM type: YTN; PAM sequence: TTG
gtttgggtaatgcagttcat

SEQ ID NO: 212774 - DNA, 20 bp, Artificial Sequence
  Description of Artificial Sequence: Synthetic oligonucleotide
  Target: LAMA2; (-) strand; PAM type: YTN; PAM sequence: TTA
atgttggtttgggtaatgca

SEQ ID NO: 212775 - DNA, 20 bp, Artificial Sequence
  Description of Artificial Sequence: Synthetic oligonucleotide
  Target: LAMA2; (-) strand; PAM type: YTN; PAM sequence: TTA
tgtacaattaatgttggttt

SEQ ID NO: 212776 - DNA, 20 bp, Artificial Sequence
  Description of Artificial Sequence: Synthetic oligonucleotide
  Target: LAMA2; (-) strand; PAM type: YTN; PAM sequence: TTG
tcacatgttatgtacaatta

SEQ ID NO: 212777 - DNA, 20 bp, Artificial Sequence
  Description of Artificial Sequence: Synthetic oligonucleotide
  Target: LAMA2; (-) strand; PAM type: YTN; PAM sequence: TTT
gtcacatgttatgtacaatt

SEQ ID NO: 212778 - DNA, 20 bp, Artificial Sequence
  Description of Artificial Sequence: Synthetic oligonucleotide
  Target: LAMA2; (-) strand; PAM type: YTN; PAM sequence: CTT
tgtcacatgttatgtacaat

SEQ ID NO: 212779 - DNA, 20 bp, Artificial Sequence
  Description of Artificial Sequence: Synthetic oligonucleotide
  Target: LAMA2; (-) strand; PAM type: YTN; PAM sequence: TTC
tttgtcacatgttatgtaca

SEQ ID NO: 212780 - DNA, 20 bp, Artificial Sequence
  Description of Artificial Sequence: Synthetic oligonucleotide
  Target: LAMA2; (-) strand; PAM type: YTN; PAM sequence: TTT
ctttgtcacatgttatgtac

SEQ ID NO: 212781 - DNA, 20 bp, Artificial Sequence
  Description of Artificial Sequence: Synthetic oligonucleotide
  Target: LAMA2; (-) strand; PAM type: YTN; PAM sequence: CTT
tctttgtcacatgttatgta

SEQ ID NO: 212782 - DNA, 20 bp, Artificial Sequence
  Description of Artificial Sequence: Synthetic oligonucleotide
  Target: LAMA2; (-) strand; PAM type: YTN; PAM sequence: CTC
caaaaccataagcctttctt

SEQ ID NO: 212783 - DNA, 20 bp, Artificial Sequence
  Description of Artificial Sequence: Synthetic oligonucleotide
  Target: LAMA2; (-) strand; PAM type: YTN; PAM sequence: CTA
aaataaacaaactccaaaac

SEQ ID NO: 212784 - DNA, 20 bp, Artificial Sequence
  Description of Artificial Sequence: Synthetic oligonucleotide
  Target: LAMA2; (-) strand; PAM type: YTN; PAM sequence: TTC
taaaataaacaaactccaaa

SEQ ID NO: 212785 - DNA, 20 bp, Artificial Sequence
  Description of Artificial Sequence: Synthetic oligonucleotide
  Target: LAMA2; (-) strand; PAM type: YTN; PAM sequence: CTT
ctaaaataaacaaactccaa

SEQ ID NO: 212786 - DNA, 20 bp, Artificial Sequence
  Description of Artificial Sequence: Synthetic oligonucleotide
  Target: LAMA2; (-) strand; PAM type: YTN; PAM sequence: CTG
gtcttctaaaataaacaaac

SEQ ID NO: 212787 - DNA, 20 bp, Artificial Sequence
  Description of Artificial Sequence: Synthetic oligonucleotide
  Target: LAMA2; (-) strand; PAM type: YTN; PAM sequence: TTA
tctggtcttctaaaataaac

SEQ ID NO: 212788 - DNA, 20 bp, Artificial Sequence
  Description of Artificial Sequence: Synthetic oligonucleotide
  Target: LAMA2; (-) strand; PAM type: YTN; PAM sequence: TTT
atctggtcttctaaaataaa

SEQ ID NO: 212789 - DNA, 20 bp, Artificial Sequence
  Description of Artificial Sequence: Synthetic oligonucleotide
  Target: LAMA2; (-) strand; PAM type: YTN; PAM sequence: CTA
gtttatctggtcttctaaaa

SEQ ID NO: 212790 - DNA, 20 bp, Artificial Sequence
  Description of Artificial Sequence: Synthetic oligonucleotide
  Target: LAMA2; (-) strand; PAM type: YTN; PAM sequence: TTC
tagtttatctggtcttctaa

SEQ ID NO: 212791 - DNA, 20 bp, Artificial Sequence
  Description of Artificial Sequence: Synthetic oligonucleotide
  Target: LAMA2; (-) strand; PAM type: YTN; PAM sequence: TTG
ttctagtttatctggtcttc

SEQ ID NO: 212792 - DNA, 20 bp, Artificial Sequence
  Description of Artificial Sequence: Synthetic oligonucleotide
  Target: LAMA2; (-) strand; PAM type: YTN; PAM sequence: TTT
gttctagtttatctggtctt

SEQ ID NO: 212793 - DNA, 20 bp, Artificial Sequence
  Description of Artificial Sequence: Synthetic oligonucleotide
  Target: LAMA2; (-) strand; PAM type: YTN; PAM sequence: TTC
atggaaaatatttgttctag

SEQ ID NO: 212794 - DNA, 20 bp, Artificial Sequence
  Description of Artificial Sequence: Synthetic oligonucleotide
  Target: LAMA2; (-) strand; PAM type: YTN; PAM sequence: CTT
catggaaaatatttgttcta

SEQ ID NO: 212795 - DNA, 20 bp, Artificial Sequence
  Description of Artificial Sequence: Synthetic oligonucleotide
  Target: LAMA2; (-) strand; PAM type: YTN; PAM sequence: TTC
ttcatggaaaatatttgttc

SEQ ID NO: 212796 - DNA, 20 bp, Artificial Sequence
  Description of Artificial Sequence: Synthetic oligonucleotide
  Target: LAMA2; (-) strand; PAM type: YTN; PAM sequence: CTT
cttcatggaaaatatttgtt

SEQ ID NO: 212797 - DNA, 20 bp, Artificial Sequence
  Description of Artificial Sequence: Synthetic oligonucleotide
  Target: LAMA2; (-) strand; PAM type: YTN; PAM sequence: CTA
acacgaaaaaaaacttcttc

SEQ ID NO: 212798 - DNA, 20 bp, Artificial Sequence
  Description of Artificial Sequence: Synthetic oligonucleotide
  Target: LAMA2; (-) strand; PAM type: YTN; PAM sequence: TTC
taacacgaaaaaaaacttct

SEQ ID NO: 212799 - DNA, 20 bp, Artificial Sequence
  Description of Artificial Sequence: Synthetic oligonucleotide
  Target: LAMA2; (-) strand; PAM type: YTN; PAM sequence: TTA
atcacatgagttctaacacg

SEQ ID NO: 212800 - DNA, 20 bp, Artificial Sequence
  Description of Artificial Sequence: Synthetic oligonucleotide
  Target: LAMA2; (-) strand; PAM type: YTN; PAM sequence: TTT
aatcacatgagttctaacac

SEQ ID NO: 212801 - DNA, 20 bp, Artificial Sequence
  Description of Artificial Sequence: Synthetic oligonucleotide
  Target: LAMA2; (-) strand; PAM type: YTN; PAM sequence: TTG
tgaatcaatttaatcacatg

SEQ ID NO: 212802 - DNA, 20 bp, Artificial Sequence
  Description of Artificial Sequence: Synthetic oligonucleotide
  Target: LAMA2; (-) strand; PAM type: YTN; PAM sequence: TTT
gtgaatcaatttaatcacat

SEQ ID NO: 212803 - DNA, 20 bp, Artificial Sequence
  Description of Artificial Sequence: Synthetic oligonucleotide
  Target: LAMA2; (-) strand; PAM type: YTN; PAM sequence: TTT
tgtgaatcaatttaatcaca

SEQ ID NO: 212804 - DNA, 20 bp, Artificial Sequence
  Description of Artificial Sequence: Synthetic oligonucleotide
  Target: LAMA2; (-) strand; PAM type: YTN; PAM sequence: CTC
aaattttgtgaatcaattta

SEQ ID NO: 212805 - DNA, 20 bp, Artificial Sequence
  Description of Artificial Sequence: Synthetic oligonucleotide
  Target: LAMA2; (-) strand; PAM type: YTN; PAM sequence: TTA
ataaatgacctcaaattttg

SEQ ID NO: 212806 - DNA, 20 bp, Artificial Sequence
  Description of Artificial Sequence: Synthetic oligonucleotide
  Target: LAMA2; (-) strand; PAM type: YTN; PAM sequence: TTC
ataaaattaataaatgacct

SEQ ID NO: 212807 - DNA, 20 bp, Artificial Sequence
  Description of Artificial Sequence: Synthetic oligonucleotide
  Target: LAMA2; (-) strand; PAM type: YTN; PAM sequence: CTC
agtaaaatattcataaaatt

SEQ ID NO: 212808 - DNA, 20 bp, Artificial Sequence
  Description of Artificial Sequence: Synthetic oligonucleotide
  Target: LAMA2; (-) strand; PAM type: YTN; PAM sequence: CTG
acatcatataggtgctcagt

SEQ ID NO: 212809 - DNA, 20 bp, Artificial Sequence
  Description of Artificial Sequence: Synthetic oligonucleotide
  Target: LAMA2; (-) strand; PAM type: YTN; PAM sequence: TTA
gagtcactgacatcatatag

SEQ ID NO: 212810 - DNA, 20 bp, Artificial Sequence
  Description of Artificial Sequence: Synthetic oligonucleotide
  Target: LAMA2; (-) strand; PAM type: YTN; PAM sequence: TTC
agagacaattagagtcactg

SEQ ID NO: 212811 - DNA, 20 bp, Artificial Sequence
  Description of Artificial Sequence: Synthetic oligonucleotide
  Target: LAMA2; (-) strand; PAM type: YTN; PAM sequence: TTT
cagagacaattagagtcact

SEQ ID NO: 212812 - DNA, 20 bp, Artificial Sequence
  Description of Artificial Sequence: Synthetic oligonucleotide
  Target: LAMA2; (-) strand; PAM type: YTN; PAM sequence: TTT
tcagagacaattagagtcac

SEQ ID NO: 212813 - DNA, 20 bp, Artificial Sequence
  Description of Artificial Sequence: Synthetic oligonucleotide
  Target: LAMA2; (-) strand; PAM type: YTN; PAM sequence: TTA
ttttcagagacaattagagt

SEQ ID NO: 212814 - DNA, 20 bp, Artificial Sequence
  Description of Artificial Sequence: Synthetic oligonucleotide
  Target: LAMA2; (-) strand; PAM type: YTN; PAM sequence: TTT
attttcagagacaattagag

SEQ ID NO: 212815 - DNA, 20 bp, Artificial Sequence
  Description of Artificial Sequence: Synthetic oligonucleotide
  Target: LAMA2; (-) strand; PAM type: YTN; PAM sequence: TTT
tattttcagagacaattaga

SEQ ID NO: 212816 - DNA, 20 bp, Artificial Sequence
  Description of Artificial Sequence: Synthetic oligonucleotide
  Target: LAMA2; (-) strand; PAM type: YTN; PAM sequence: TTT
ttattttcagagacaattag

SEQ ID NO: 212817 - DNA, 20 bp, Artificial Sequence
  Description of Artificial Sequence: Synthetic oligonucleotide
  Target: LAMA2; (-) strand; PAM type: YTN; PAM sequence: CTT
tttattttcagagacaatta

SEQ ID NO: 212818 - DNA, 20 bp, Artificial Sequence
  Description of Artificial Sequence: Synthetic oligonucleotide
  Target: LAMA2; (-) strand; PAM type: YTN; PAM sequence: TTA
atctttttattttcagagac

SEQ ID NO: 212819 - DNA, 20 bp, Artificial Sequence
  Description of Artificial Sequence: Synthetic oligonucleotide
  Target: LAMA2; (-) strand; PAM type: YTN; PAM sequence: TTA
ttaatctttttattttcaga

SEQ ID NO: 212820 - DNA, 20 bp, Artificial Sequence
  Description of Artificial Sequence: Synthetic oligonucleotide
  Target: LAMA2; (-) strand; PAM type: YTN; PAM sequence: TTT
attaatctttttattttcag

SEQ ID NO: 212821 - DNA, 20 bp, Artificial Sequence
  Description of Artificial Sequence: Synthetic oligonucleotide
  Target: LAMA2; (-) strand; PAM type: YTN; PAM sequence: TTG
aaggcagaagccatgattta

SEQ ID NO: 212822 - DNA, 20 bp, Artificial Sequence
  Description of Artificial Sequence: Synthetic oligonucleotide
  Target: LAMA2; (-) strand; PAM type: YTN; PAM sequence: CTT
gaaggcagaagccatgattt

SEQ ID NO: 212823 - DNA, 20 bp, Artificial Sequence
  Description of Artificial Sequence: Synthetic oligonucleotide
  Target: LAMA2; (-) strand; PAM type: YTN; PAM sequence: TTC
cttgaaggcagaagccatga

SEQ ID NO: 212824 - DNA, 20 bp, Artificial Sequence
  Description of Artificial Sequence: Synthetic oligonucleotide
  Target: LAMA2; (-) strand; PAM type: YTN; PAM sequence: CTA
agttccttgaaggcagaagc

SEQ ID NO: 212825 - DNA, 20 bp, Artificial Sequence
  Description of Artificial Sequence: Synthetic oligonucleotide
  Target: LAMA2; (-) strand; PAM type: YTN; PAM sequence: CTC
taagttccttgaaggcagaa

SEQ ID NO: 212826 - DNA, 20 bp, Artificial Sequence
  Description of Artificial Sequence: Synthetic oligonucleotide
  Target: LAMA2; (-) strand; PAM type: YTN; PAM sequence: CTA
aactctaagttccttgaagg

SEQ ID NO: 212827 - DNA, 20 bp, Artificial Sequence
  Description of Artificial Sequence: Synthetic oligonucleotide
  Target: LAMA2; (-) strand; PAM type: YTN; PAM sequence: CTA
taaccactaaactctaagtt

SEQ ID NO: 212828 - DNA, 20 bp, Artificial Sequence
  Description of Artificial Sequence: Synthetic oligonucleotide
  Target: LAMA2; (-) strand; PAM type: YTN; PAM sequence: TTC
tataaccactaaactctaag

SEQ ID NO: 212829 - DNA, 20 bp, Artificial Sequence
  Description of Artificial Sequence: Synthetic oligonucleotide
  Target: LAMA2; (-) strand; PAM type: YTN; PAM sequence: TTA
aaccaacattctataaccac

SEQ ID NO: 212830 - DNA, 20 bp, Artificial Sequence
  Description of Artificial Sequence: Synthetic oligonucleotide
  Target: LAMA2; (-) strand; PAM type: YTN; PAM sequence: TTT
aaaccaacattctataacca

SEQ ID NO: 212831 - DNA, 20 bp, Artificial Sequence
  Description of Artificial Sequence: Synthetic oligonucleotide
  Target: LAMA2; (-) strand; PAM type: YTN; PAM sequence: TTT
taaaccaacattctataacc

SEQ ID NO: 212832 - DNA, 20 bp, Artificial Sequence
  Description of Artificial Sequence: Synthetic oligonucleotide
  Target: LAMA2; (-) strand; PAM type: YTN; PAM sequence: TTT
ttaaaccaacattctataac

SEQ ID NO: 212833 - DNA, 20 bp, Artificial Sequence
  Description of Artificial Sequence: Synthetic oligonucleotide
  Target: LAMA2; (-) strand; PAM type: YTN; PAM sequence: TTT
tttaaaccaacattctataa

SEQ ID NO: 212834 - DNA, 20 bp, Artificial Sequence
  Description of Artificial Sequence: Synthetic oligonucleotide
  Target: LAMA2; (-) strand; PAM type: YTN; PAM sequence: TTT
ttttaaaccaacattctata

SEQ ID NO: 212835 - DNA, 20 bp, Artificial Sequence
  Description of Artificial Sequence: Synthetic oligonucleotide
  Target: LAMA2; (-) strand; PAM type: YTN; PAM sequence: TTT
tttttaaaccaacattctat

SEQ ID NO: 212836 - DNA, 20 bp, Artificial Sequence
  Description of Artificial Sequence: Synthetic oligonucleotide
  Target: LAMA2; (-) strand; PAM type: YTN; PAM sequence: TTG
ccattttttttaaaccaaca

SEQ ID NO: 212837 - DNA, 20 bp, Artificial Sequence
  Description of Artificial Sequence: Synthetic oligonucleotide
  Target: LAMA2; (-) strand; PAM type: YTN; PAM sequence: TTT
gccattttttttaaaccaac

SEQ ID NO: 212838 - DNA, 20 bp, Artificial Sequence
  Description of Artificial Sequence: Synthetic oligonucleotide
  Target: LAMA2; (-) strand; PAM type: YTN; PAM sequence: TTT
tgccattttttttaaaccaa

SEQ ID NO: 212839 - DNA, 20 bp, Artificial Sequence
  Description of Artificial Sequence: Synthetic oligonucleotide
  Target: LAMA2; (-) strand; PAM type: YTN; PAM sequence: TTT
ttgccattttttttaaacca

SEQ ID NO: 212840 - DNA, 20 bp, Artificial Sequence
  Description of Artificial Sequence: Synthetic oligonucleotide
  Target: LAMA2; (-) strand; PAM type: YTN; PAM sequence: TTA
tttttgccattttttttaaa

SEQ ID NO: 212841 - DNA, 20 bp, Artificial Sequence
  Description of Artificial Sequence: Synthetic oligonucleotide
  Target: LAMA2; (-) strand; PAM type: YTN; PAM sequence: TTT
atttttgccattttttttaa

SEQ ID NO: 212842 - DNA, 20 bp, Artificial Sequence
  Description of Artificial Sequence: Synthetic oligonucleotide
  Target: LAMA2; (-) strand; PAM type: YTN; PAM sequence: TTT
tatttttgccatttttttta

SEQ ID NO: 212843 - DNA, 20 bp, Artificial Sequence
  Description of Artificial Sequence: Synthetic oligonucleotide
  Target: LAMA2; (-) strand; PAM type: YTN; PAM sequence: TTG
tcagaattttatttttgcca

SEQ ID NO: 212844 - DNA, 20 bp, Artificial Sequence
  Description of Artificial Sequence: Synthetic oligonucleotide
  Target: LAMA2; (-) strand; PAM type: YTN; PAM sequence: TTT
gtcagaattttatttttgcc

SEQ ID NO: 212845 - DNA, 20 bp, Artificial Sequence
  Description of Artificial Sequence: Synthetic oligonucleotide
  Target: LAMA2; (-) strand; PAM type: YTN; PAM sequence: TTT
tgtcagaattttatttttgc

SEQ ID NO: 212846 - DNA, 20 bp, Artificial Sequence
  Description of Artificial Sequence: Synthetic oligonucleotide
  Target: LAMA2; (-) strand; PAM type: YTN; PAM sequence: TTT
ttgtcagaattttatttttg

SEQ ID NO: 212847 - DNA, 20 bp, Artificial Sequence
  Description of Artificial Sequence: Synthetic oligonucleotide
  Target: LAMA2; (-) strand; PAM type: YTN; PAM sequence: TTA
tgagtttttgtcagaatttt

SEQ ID NO: 212848 - DNA, 20 bp, Artificial Sequence
  Description of Artificial Sequence: Synthetic oligonucleotide
  Target: LAMA2; (-) strand; PAM type: YTN; PAM sequence: CTC
agatattatgagtttttgtc

SEQ ID NO: 212849 - DNA, 20 bp, Artificial Sequence
  Description of Artificial Sequence: Synthetic oligonucleotide
  Target: LAMA2; (-) strand; PAM type: YTN; PAM sequence: CTC
tcagatattatgagtttttg

SEQ ID NO: 212850 - DNA, 20 bp, Artificial Sequence
  Description of Artificial Sequence: Synthetic oligonucleotide
  Target: LAMA2; (-) strand; PAM type: YTN; PAM sequence: TTA
gcaagcacatataaactctc

SEQ ID NO: 212851 - DNA, 20 bp, Artificial Sequence
  Description of Artificial Sequence: Synthetic oligonucleotide
  Target: LAMA2; (-) strand; PAM type: YTN; PAM sequence: TTT
agcaagcacatataaactct

SEQ ID NO: 212852 - DNA, 20 bp, Artificial Sequence
  Description of Artificial Sequence: Synthetic oligonucleotide
  Target: LAMA2; (-) strand; PAM type: YTN; PAM sequence: TTC
atttagcaagcacatataaa

SEQ ID NO: 212853 - DNA, 20 bp, Artificial Sequence
  Description of Artificial Sequence: Synthetic oligonucleotide
  Target: LAMA2; (-) strand; PAM type: YTN; PAM sequence: TTT
catttagcaagcacatataa

SEQ ID NO: 212854 - DNA, 20 bp, Artificial Sequence
  Description of Artificial Sequence: Synthetic oligonucleotide
  Target: LAMA2; (-) strand; PAM type: YTN; PAM sequence: TTT
tcatttagcaagcacatata

SEQ ID NO: 212855 - DNA, 20 bp, Artificial Sequence
  Description of Artificial Sequence: Synthetic oligonucleotide
  Target: LAMA2; (-) strand; PAM type: YTN; PAM sequence: CTT
ttcatttagcaagcacatat

SEQ ID NO: 212856 - DNA, 20 bp, Artificial Sequence
  Description of Artificial Sequence: Synthetic oligonucleotide
  Target: LAMA2; (-) strand; PAM type: YTN; PAM sequence: TTC
ttttcatttagcaagcacat

SEQ ID NO: 212857 - DNA, 20 bp, Artificial Sequence
  Description of Artificial Sequence: Synthetic oligonucleotide
  Target: LAMA2; (-) strand; PAM type: YTN; PAM sequence: CTA
ataattcttttcatttagca

SEQ ID NO: 212858 - DNA, 20 bp, Artificial Sequence
  Description of Artificial Sequence: Synthetic oligonucleotide
  Target: LAMA2; (-) strand; PAM type: YTN; PAM sequence: TTG
ctaataattcttttcattta

SEQ ID NO: 212859 - DNA, 20 bp, Artificial Sequence
  Description of Artificial Sequence: Synthetic oligonucleotide
  Target: LAMA2; (-) strand; PAM type: YTN; PAM sequence: TTC
agcatagtattgctaataat

SEQ ID NO: 212860 - DNA, 20 bp, Artificial Sequence
  Description of Artificial Sequence: Synthetic oligonucleotide
  Target: LAMA2; (-) strand; PAM type: YTN; PAM sequence: TTA
cagtcattcagcatagtatt

SEQ ID NO: 212861 - DNA, 20 bp, Artificial Sequence
  Description of Artificial Sequence: Synthetic oligonucleotide
  Target: LAMA2; (-) strand; PAM type: YTN; PAM sequence: TTT
acagtcattcagcatagtat

SEQ ID NO: 212862 - DNA, 20 bp, Artificial Sequence
  Description of Artificial Sequence: Synthetic oligonucleotide
  Target: LAMA2; (-) strand; PAM type: YTN; PAM sequence: TTT
tacagtcattcagcatagta

SEQ ID NO: 212863 - DNA, 20 bp, Artificial Sequence
  Description of Artificial Sequence: Synthetic oligonucleotide
  Target: LAMA2; (-) strand; PAM type: YTN; PAM sequence: TTC
aagtaaaaagtcagcatttt

SEQ ID NO: 212864 - DNA, 20 bp, Artificial Sequence
  Description of Artificial Sequence: Synthetic oligonucleotide
  Target: LAMA2; (-) strand; PAM type: YTN; PAM sequence: TTT
caagtaaaaagtcagcattt

SEQ ID NO: 212865 - DNA, 20 bp, Artificial Sequence
  Description of Artificial Sequence: Synthetic oligonucleotide
  Target: LAMA2; (-) strand; PAM type: YTN; PAM sequence: TTG
taaatatttcaagtaaaaag

SEQ ID NO: 212866 - DNA, 20 bp, Artificial Sequence
  Description of Artificial Sequence: Synthetic oligonucleotide
  Target: LAMA2; (-) strand; PAM type: YTN; PAM sequence: CTT
gtaaatatttcaagtaaaaa

SEQ ID NO: 212867 - DNA, 20 bp, Artificial Sequence
  Description of Artificial Sequence: Synthetic oligonucleotide
  Target: LAMA2; (-) strand; PAM type: YTN; PAM sequence: CTC
ttgtaaatatttcaagtaaa

SEQ ID NO: 212868 - DNA, 20 bp, Artificial Sequence
  Description of Artificial Sequence: Synthetic oligonucleotide
  Target: LAMA2; (-) strand; PAM type: YTN; PAM sequence: TTC
ctcttgtaaatatttcaagt

SEQ ID NO: 212869 - DNA, 20 bp, Artificial Sequence
  Description of Artificial Sequence: Synthetic oligonucleotide
  Target: LAMA2; (-) strand; PAM type: YTN; PAM sequence: TTT
cctcttgtaaatatttcaag

SEQ ID NO: 212870 - DNA, 20 bp, Artificial Sequence
  Description of Artificial Sequence: Synthetic oligonucleotide
  Target: LAMA2; (-) strand; PAM type: YTN; PAM sequence: CTG
tttcctcttgtaaatatttc

SEQ ID NO: 212871 - DNA, 20 bp, Artificial Sequence
  Description of Artificial Sequence: Synthetic oligonucleotide
  Target: LAMA2; (-) strand; PAM type: YTN; PAM sequence: TTC
tgtttcctcttgtaaatatt

SEQ ID NO: 212872 - DNA, 20 bp, Artificial Sequence
  Description of Artificial Sequence: Synthetic oligonucleotide
  Target: LAMA2; (-) strand; PAM type: YTN; PAM sequence: TTG
aacacacacataaatatgca

SEQ ID NO: 212873 - DNA, 20 bp, Artificial Sequence
  Description of Artificial Sequence: Synthetic oligonucleotide
  Target: LAMA2; (-) strand; PAM type: YTN; PAM sequence: TTT
gaacacacacataaatatgc

SEQ ID NO: 212874 - DNA, 20 bp, Artificial Sequence
  Description of Artificial Sequence: Synthetic oligonucleotide
  Target: LAMA2; (-) strand; PAM type: YTN; PAM sequence: CTG
tttgaacacacacataaata

SEQ ID NO: 212875 - DNA, 20 bp, Artificial Sequence
  Description of Artificial Sequence: Synthetic oligonucleotide
  Target: LAMA2; (-) strand; PAM type: YTN; PAM sequence: CTA
gcagctgtttgaacacacac

SEQ ID NO: 212876 - DNA, 20 bp, Artificial Sequence
  Description of Artificial Sequence: Synthetic oligonucleotide
  Target: LAMA2; (-) strand; PAM type: YTN; PAM sequence: CTC
tagcagctgtttgaacacac

SEQ ID NO: 212877 - DNA, 20 bp, Artificial Sequence
  Description of Artificial Sequence: Synthetic oligonucleotide
  Target: LAMA2; (-) strand; PAM type: YTN; PAM sequence: TTC
tctagcagctgtttgaacac

SEQ ID NO: 212878 - DNA, 20 bp, Artificial Sequence
  Description of Artificial Sequence: Synthetic oligonucleotide
  Target: LAMA2; (-) strand; PAM type: YTN; PAM sequence: TTG
ttctctagcagctgtttgaa

SEQ ID NO: 212879 - DNA, 20 bp, Artificial Sequence
  Description of Artificial Sequence: Synthetic oligonucleotide
  Target: LAMA2; (-) strand; PAM type: YTN; PAM sequence: TTT
gttctctagcagctgtttga

SEQ ID NO: 212880 - DNA, 20 bp, Artificial Sequence
  Description of Artificial Sequence: Synthetic oligonucleotide
  Target: LAMA2; (-) strand; PAM type: YTN; PAM sequence: CTT
tgttctctagcagctgtttg

SEQ ID NO: 212881 - DNA, 20 bp, Artificial Sequence
  Description of Artificial Sequence: Synthetic oligonucleotide
  Target: LAMA2; (-) strand; PAM type: YTN; PAM sequence: TTA
tagcaaaacactttgttctc

SEQ ID NO: 212882 - DNA, 20 bp, Artificial Sequence
  Description of Artificial Sequence: Synthetic oligonucleotide
  Target: LAMA2; (-) strand; PAM type: YTN; PAM sequence: TTT
atagcaaaacactttgttct

SEQ ID NO: 212883 - DNA, 20 bp, Artificial Sequence
  Description of Artificial Sequence: Synthetic oligonucleotide
  Target: LAMA2; (-) strand; PAM type: YTN; PAM sequence: TTG
acagtgtttatagcaaaaca

SEQ ID NO: 212884 - DNA, 20 bp, Artificial Sequence
  Description of Artificial Sequence: Synthetic oligonucleotide
  Target: LAMA2; (-) strand; PAM type: YTN; PAM sequence: TTT
gacagtgtttatagcaaaac

SEQ ID NO: 212885 - DNA, 20 bp, Artificial Sequence
  Description of Artificial Sequence: Synthetic oligonucleotide
  Target: LAMA2; (-) strand; PAM type: YTN; PAM sequence: TTC
acagtgagatttgacagtgt

SEQ ID NO: 212886 - DNA, 20 bp, Artificial Sequence
  Description of Artificial Sequence: Synthetic oligonucleotide
  Target: LAMA2; (-) strand; PAM type: YTN; PAM sequence: TTT
cacagtgagatttgacagtg

SEQ ID NO: 212887 - DNA, 20 bp, Artificial Sequence
  Description of Artificial Sequence: Synthetic oligonucleotide
  Target: LAMA2; (-) strand; PAM type: YTN; PAM sequence: TTT
tcacagtgagatttgacagt

SEQ ID NO: 212888 - DNA, 20 bp, Artificial Sequence
  Description of Artificial Sequence: Synthetic oligonucleotide
  Target: LAMA2; (-) strand; PAM type: YTN; PAM sequence: TTT
ttcacagtgagatttgacag

SEQ ID NO: 212889 - DNA, 20 bp, Artificial Sequence
  Description of Artificial Sequence: Synthetic oligonucleotide
  Target: LAMA2; (-) strand; PAM type: YTN; PAM sequence: TTT
tttcacagtgagatttgaca

SEQ ID NO: 212890 - DNA, 20 bp, Artificial Sequence
  Description of Artificial Sequence: Synthetic oligonucleotide
  Target: LAMA2; (-) strand; PAM type: YTN; PAM sequence: TTT
ttttcacagtgagatttgac

SEQ ID NO: 212891 - DNA, 20 bp, Artificial Sequence
  Description of Artificial Sequence: Synthetic oligonucleotide
  Target: LAMA2; (-) strand; PAM type: YTN; PAM sequence: TTA
tagacaaatttttttcacag

SEQ ID NO: 212892 - DNA, 20 bp, Artificial Sequence
  Description of Artificial Sequence: Synthetic oligonucleotide
  Target: LAMA2; (-) strand; PAM type: YTN; PAM sequence: TTT
atagacaaatttttttcaca

SEQ ID NO: 212893 - DNA, 20 bp, Artificial Sequence
  Description of Artificial Sequence: Synthetic oligonucleotide
  Target: LAMA2; (-) strand; PAM type: YTN; PAM sequence: TTT
tatagacaaatttttttcac

SEQ ID NO: 212894 - DNA, 20 bp, Artificial Sequence
  Description of Artificial Sequence: Synthetic oligonucleotide
  Target: LAMA2; (-) strand; PAM type: YTN; PAM sequence: TTG
ttttatagacaaattttttt

SEQ ID NO: 212895 - DNA, 20 bp, Artificial Sequence
  Description of Artificial Sequence: Synthetic oligonucleotide
  Target: LAMA2; (-) strand; PAM type: YTN; PAM sequence: CTT
gttttatagacaaatttttt

SEQ ID NO: 212896 - DNA, 20 bp, Artificial Sequence
  Description of Artificial Sequence: Synthetic oligonucleotide
  Target: LAMA2; (-) strand; PAM type: YTN; PAM sequence: CTA
tgaaaatacttgttttatag

SEQ ID NO: 212897 - DNA, 20 bp, Artificial Sequence
  Description of Artificial Sequence: Synthetic oligonucleotide
  Target: LAMA2; (-) strand; PAM type: YTN; PAM sequence: TTA
gtatatctatgaaaatactt

SEQ ID NO: 212898 - DNA, 20 bp, Artificial Sequence
  Description of Artificial Sequence: Synthetic oligonucleotide
  Target: LAMA2; (-) strand; PAM type: YTN; PAM sequence: TTT
agtatatctatgaaaatact

SEQ ID NO: 212899 - DNA, 20 bp, Artificial Sequence
  Description of Artificial Sequence: Synthetic oligonucleotide
  Target: LAMA2; (-) strand; PAM type: YTN; PAM sequence: CTT
tagtatatctatgaaaatac

SEQ ID NO: 212900 - DNA, 20 bp, Artificial Sequence
  Description of Artificial Sequence: Synthetic oligonucleotide
  Target: LAMA2; (-) strand; PAM type: YTN; PAM sequence: CTA
tgcagctttagtatatctat

SEQ ID NO: 212901 - DNA, 20 bp, Artificial Sequence
  Description of Artificial Sequence: Synthetic oligonucleotide
  Target: LAMA2; (-) strand; PAM type: YTN; PAM sequence: TTC
tatgcagctttagtatatct

SEQ ID NO: 212902 - DNA, 20 bp, Artificial Sequence
  Description of Artificial Sequence: Synthetic oligonucleotide
  Target: LAMA2; (-) strand; PAM type: YTN; PAM sequence: CTA
taaaagcaaattctatgcag

SEQ ID NO: 212903 - DNA, 20 bp, Artificial Sequence
  Description of Artificial Sequence: Synthetic oligonucleotide
  Target: LAMA2; (-) strand; PAM type: YTN; PAM sequence: TTA
tgctataaaagcaaattcta

SEQ ID NO: 212904 - DNA, 20 bp, Artificial Sequence
  Description of Artificial Sequence: Synthetic oligonucleotide
  Target: LAMA2; (-) strand; PAM type: YTN; PAM sequence: TTT
atgctataaaagcaaattct

SEQ ID NO: 212905 - DNA, 20 bp, Artificial Sequence
  Description of Artificial Sequence: Synthetic oligonucleotide
  Target: LAMA2; (-) strand; PAM type: YTN; PAM sequence: TTT
tatgctataaaagcaaattc

SEQ ID NO: 212906 - DNA, 20 bp, Artificial Sequence
  Description of Artificial Sequence: Synthetic oligonucleotide
  Target: LAMA2; (-) strand; PAM type: YTN; PAM sequence: CTG
ttttatgctataaaagcaaa

SEQ ID NO: 212907 - DNA, 20 bp, Artificial Sequence
  Description of Artificial Sequence: Synthetic oligonucleotide
  Target: LAMA2; (-) strand; PAM type: YTN; PAM sequence: TTC
tgttttatgctataaaagca

SEQ ID NO: 212908 - DNA, 20 bp, Artificial Sequence
  Description of Artificial Sequence: Synthetic oligonucleotide
  Target: LAMA2; (-) strand; PAM type: YTN; PAM sequence: CTA
attctgttttatgctataaa

SEQ ID NO: 212909 - DNA, 20 bp, Artificial Sequence
  Description of Artificial Sequence: Synthetic oligonucleotide
  Target: LAMA2; (-) strand; PAM type: YTN; PAM sequence: CTC
aagcatctaattctgtttta

SEQ ID NO: 212910 - DNA, 20 bp, Artificial Sequence
  Description of Artificial Sequence: Synthetic oligonucleotide
  Target: LAMA2; (-) strand; PAM type: YTN; PAM sequence: CTG
actcaagcatctaattctgt

SEQ ID NO: 212911 - DNA, 20 bp, Artificial Sequence
  Description of Artificial Sequence: Synthetic oligonucleotide
  Target: LAMA2; (-) strand; PAM type: YTN; PAM sequence: TTC
atagctgactcaagcatcta

SEQ ID NO: 212912 - DNA, 20 bp, Artificial Sequence
  Description of Artificial Sequence: Synthetic oligonucleotide
  Target: LAMA2; (-) strand; PAM type: YTN; PAM sequence: TTT
catagctgactcaagcatct

SEQ ID NO: 212913 - DNA, 20 bp, Artificial Sequence
  Description of Artificial Sequence: Synthetic oligonucleotide
  Target: LAMA2; (-) strand; PAM type: YTN; PAM sequence: TTG
catgaaaaagtatttcatag

SEQ ID NO: 212914 - DNA, 20 bp, Artificial Sequence
  Description of Artificial Sequence: Synthetic oligonucleotide
  Target: LAMA2; (-) strand; PAM type: YTN; PAM sequence: TTA
gaatgagtgttgcatgaaaa

SEQ ID NO: 212915 - DNA, 20 bp, Artificial Sequence
  Description of Artificial Sequence: Synthetic oligonucleotide
  Target: LAMA2; (-) strand; PAM type: YTN; PAM sequence: CTA
atgcatagtgtaaagaatta

SEQ ID NO: 212916 - DNA, 20 bp, Artificial Sequence
  Description of Artificial Sequence: Synthetic oligonucleotide
  Target: LAMA2; (-) strand; PAM type: YTN; PAM sequence: CTC
agcctaatgcatagtgtaaa

SEQ ID NO: 212917 - DNA, 20 bp, Artificial Sequence
  Description of Artificial Sequence: Synthetic oligonucleotide
  Target: LAMA2; (-) strand; PAM type: YTN; PAM sequence: TTA
caccaggcctcagcctaatg

SEQ ID NO: 212918 - DNA, 20 bp, Artificial Sequence
  Description of Artificial Sequence: Synthetic oligonucleotide
  Target: LAMA2; (-) strand; PAM type: YTN; PAM sequence: TTC
aaattacaccaggcctcagc

SEQ ID NO: 212919 - DNA, 20 bp, Artificial Sequence
  Description of Artificial Sequence: Synthetic oligonucleotide
  Target: LAMA2; (-) strand; PAM type: YTN; PAM sequence: TTT
caaattacaccaggcctcag

SEQ ID NO: 212920 - DNA, 20 bp, Artificial Sequence
  Description of Artificial Sequence: Synthetic oligonucleotide
  Target: LAMA2; (-) strand; PAM type: YTN; PAM sequence: CTT
tcaaattacaccaggcctca

SEQ ID NO: 212921 - DNA, 20 bp, Artificial Sequence
  Description of Artificial Sequence: Synthetic oligonucleotide
  Target: LAMA2; (-) strand; PAM type: YTN; PAM sequence: TTA
tcactttcaaattacaccag

SEQ ID NO: 212922 - DNA, 20 bp, Artificial Sequence
  Description of Artificial Sequence: Synthetic oligonucleotide
  Target: LAMA2; (-) strand; PAM type: YTN; PAM sequence: TTG
cattatcactttcaaattac

SEQ ID NO: 212923 - DNA, 20 bp, Artificial Sequence
  Description of Artificial Sequence: Synthetic oligonucleotide
  Target: LAMA2; (-) strand; PAM type: YTN; PAM sequence: CTA
ttgcattatcactttcaaat

SEQ ID NO: 212924 - DNA, 20 bp, Artificial Sequence
  Description of Artificial Sequence: Synthetic oligonucleotide
  Target: LAMA2; (-) strand; PAM type: YTN; PAM sequence: CTC
tattgcattatcactttcaa

SEQ ID NO: 212925 - DNA, 20 bp, Artificial Sequence
  Description of Artificial Sequence: Synthetic oligonucleotide
  Target: LAMA2; (-) strand; PAM type: YTN; PAM sequence: TTC
tctattgcattatcactttc

SEQ ID NO: 212926 - DNA, 20 bp, Artificial Sequence
  Description of Artificial Sequence: Synthetic oligonucleotide
  Target: LAMA2; (-) strand; PAM type: YTN; PAM sequence: TTT
ctctattgcattatcacttt

SEQ ID NO: 212927 - DNA, 20 bp, Artificial Sequence
  Description of Artificial Sequence: Synthetic oligonucleotide
  Target: LAMA2; (-) strand; PAM type: YTN; PAM sequence: CTG
gaatttctctattgcattat

SEQ ID NO: 212928 - DNA, 20 bp, Artificial Sequence
  Description of Artificial Sequence: Synthetic oligonucleotide
  Target: LAMA2; (-) strand; PAM type: YTN; PAM sequence: TTC
tggaatttctctattgcatt

SEQ ID NO: 212929 - DNA, 20 bp, Artificial Sequence
  Description of Artificial Sequence: Synthetic oligonucleotide
  Target: LAMA2; (-) strand; PAM type: YTN; PAM sequence: CTT
ctggaatttctctattgcat

SEQ ID NO: 212930 - DNA, 20 bp, Artificial Sequence
  Description of Artificial Sequence: Synthetic oligonucleotide
  Target: LAMA2; (-) strand; PAM type: YTN; PAM sequence: TTC
cccccacccccagcttctgg

SEQ ID NO: 212931 - DNA, 20 bp, Artificial Sequence
  Description of Artificial Sequence: Synthetic oligonucleotide
  Target: LAMA2; (-) strand; PAM type: YTN; PAM sequence: CTA
ttccccccacccccagcttc

SEQ ID NO: 212932 - DNA, 20 bp, Artificial Sequence
  Description of Artificial Sequence: Synthetic oligonucleotide
  Target: LAMA2; (-) strand; PAM type: YTN; PAM sequence: TTG
caatatccagtctattcccc

SEQ ID NO: 212933 - DNA, 20 bp, Artificial Sequence
  Description of Artificial Sequence: Synthetic oligonucleotide
  Target: LAMA2; (-) strand; PAM type: YTN; PAM sequence: TTT
gcaatatccagtctattccc

SEQ ID NO: 212934 - DNA, 20 bp, Artificial Sequence
  Description of Artificial Sequence: Synthetic oligonucleotide
  Target: LAMA2; (-) strand; PAM type: YTN; PAM sequence: TTT
tgcaatatccagtctattcc

SEQ ID NO: 212935 - DNA, 20 bp, Artificial Sequence
  Description of Artificial Sequence: Synthetic oligonucleotide
  Target: LAMA2; (-) strand; PAM type: YTN; PAM sequence: CTG
atgcattttgcaatatccag

SEQ ID NO: 212936 - DNA, 20 bp, Artificial Sequence
  Description of Artificial Sequence: Synthetic oligonucleotide
  Target: LAMA2; (-) strand; PAM type: YTN; PAM sequence: CTA
actgatgcattttgcaatat

SEQ ID NO: 212937 - DNA, 20 bp, Artificial Sequence
  Description of Artificial Sequence: Synthetic oligonucleotide
  Target: LAMA2; (-) strand; PAM type: YTN; PAM sequence: TTG
actaactgatgcattttgca

SEQ ID NO: 212938 - DNA, 20 bp, Artificial Sequence
  Description of Artificial Sequence: Synthetic oligonucleotide
  Target: LAMA2; (-) strand; PAM type: YTN; PAM sequence: TTG
attgactaactgatgcattt

SEQ ID NO: 212939 - DNA, 20 bp, Artificial Sequence
  Description of Artificial Sequence: Synthetic oligonucleotide
  Target: LAMA2; (-) strand; PAM type: YTN; PAM sequence: TTT
gattgactaactgatgcatt

SEQ ID NO: 212940 - DNA, 20 bp, Artificial Sequence
  Description of Artificial Sequence: Synthetic oligonucleotide
  Target: LAMA2; (-) strand; PAM type: YTN; PAM sequence: TTA
ggagtttgattgactaactg

SEQ ID NO: 212941 - DNA, 20 bp, Artificial Sequence
  Description of Artificial Sequence: Synthetic oligonucleotide
  Target: LAMA2; (-) strand; PAM type: YTN; PAM sequence: TTG
ataaattaggagtttgattg

SEQ ID NO: 212942 - DNA, 20 bp, Artificial Sequence
  Description of Artificial Sequence: Synthetic oligonucleotide
  Target: LAMA2; (-) strand; PAM type: YTN; PAM sequence: TTG
gttgataaattaggagtttg

SEQ ID NO: 212943 - DNA, 20 bp, Artificial Sequence
  Description of Artificial Sequence: Synthetic oligonucleotide
  Target: LAMA2; (-) strand; PAM type: YTN; PAM sequence: TTT
ggttgataaattaggagttt

SEQ ID NO: 212944 - DNA, 20 bp, Artificial Sequence
  Description of Artificial Sequence: Synthetic oligonucleotide
  Target: LAMA2; (-) strand; PAM type: YTN; PAM sequence: TTG
gtttggttgataaattagga

SEQ ID NO: 212945 - DNA, 20 bp, Artificial Sequence
  Description of Artificial Sequence: Synthetic oligonucleotide
  Target: LAMA2; (-) strand; PAM type: YTN; PAM sequence: TTA
ggttggtttggttgataaat

SEQ ID NO: 212946 - DNA, 20 bp, Artificial Sequence
  Description of Artificial Sequence: Synthetic oligonucleotide
  Target: LAMA2; (-) strand; PAM type: YTN; PAM sequence: CTA
tgggattaggttggtttggt

SEQ ID NO: 212947 - DNA, 20 bp, Artificial Sequence
  Description of Artificial Sequence: Synthetic oligonucleotide
  Target: LAMA2; (-) strand; PAM type: YTN; PAM sequence: CTC
tatgggattaggttggtttg

SEQ ID NO: 212948 - DNA, 20 bp, Artificial Sequence
  Description of Artificial Sequence: Synthetic oligonucleotide
  Target: LAMA2; (-) strand; PAM type: YTN; PAM sequence: TTC
tctatgggattaggttggtt

SEQ ID NO: 212949 - DNA, 20 bp, Artificial Sequence
  Description of Artificial Sequence: Synthetic oligonucleotide
  Target: LAMA2; (-) strand; PAM type: YTN; PAM sequence: TTG
aattctctatgggattaggt

SEQ ID NO: 212950 - DNA, 20 bp, Artificial Sequence
  Description of Artificial Sequence: Synthetic oligonucleotide
  Target: LAMA2; (-) strand; PAM type: YTN; PAM sequence: TTT
gaattctctatgggattagg

SEQ ID NO: 212951 - DNA, 20 bp, Artificial Sequence
  Description of Artificial Sequence: Synthetic oligonucleotide
  Target: LAMA2; (-) strand; PAM type: YTN; PAM sequence: CTT
tgaattctctatgggattag

SEQ ID NO: 212952 - DNA, 20 bp, Artificial Sequence
  Description of Artificial Sequence: Synthetic oligonucleotide
  Target: LAMA2; (-) strand; PAM type: YTN; PAM sequence: TTC
gtgagtcactttgaattctc

SEQ ID NO: 212953 - DNA, 20 bp, Artificial Sequence
  Description of Artificial Sequence: Synthetic oligonucleotide
  Target: LAMA2; (-) strand; PAM type: YTN; PAM sequence: TTT
cgtgagtcactttgaattct

SEQ ID NO: 212954 - DNA, 20 bp, Artificial Sequence
  Description of Artificial Sequence: Synthetic oligonucleotide
  Target: LAMA2; (-) strand; PAM type: YTN; PAM sequence: TTT
tcgtgagtcactttgaattc

SEQ ID NO: 212955 - DNA, 20 bp, Artificial Sequence
  Description of Artificial Sequence: Synthetic oligonucleotide
  Target: LAMA2; (-) strand; PAM type: YTN; PAM sequence: CTT
ttcgtgagtcactttgaatt

SEQ ID NO: 212956 - DNA, 20 bp, Artificial Sequence
  Description of Artificial Sequence: Synthetic oligonucleotide
  Target: LAMA2; (-) strand; PAM type: YTN; PAM sequence: TTG
tgtgtcttttcgtgagtcac

SEQ ID NO: 212957 - DNA, 20 bp, Artificial Sequence
  Description of Artificial Sequence: Synthetic oligonucleotide
  Target: LAMA2; (-) strand; PAM type: YTN; PAM sequence: TTT
gtgtgtcttttcgtgagtca

SEQ ID NO: 212958 - DNA, 20 bp, Artificial Sequence
  Description of Artificial Sequence: Synthetic oligonucleotide
  Target: LAMA2; (-) strand; PAM type: YTN; PAM sequence: TTT
tgtgtgtcttttcgtgagtc

SEQ ID NO: 212959 - DNA, 20 bp, Artificial Sequence
  Description of Artificial Sequence: Synthetic oligonucleotide
  Target: LAMA2; (-) strand; PAM type: YTN; PAM sequence: CTT
ttgtgtgtcttttcgtgagt

SEQ ID NO: 212960 - DNA, 20 bp, Artificial Sequence
  Description of Artificial Sequence: Synthetic oligonucleotide
  Target: LAMA2; (-) strand; PAM type: YTN; PAM sequence: TTC
ttttgtgtgtcttttcgtga

SEQ ID NO: 212961 - DNA, 20 bp, Artificial Sequence
  Description of Artificial Sequence: Synthetic oligonucleotide
  Target: LAMA2; (-) strand; PAM type: YTN; PAM sequence: CTT
cttttgtgtgtcttttcgtg

SEQ ID NO: 212962 - DNA, 20 bp, Artificial Sequence
  Description of Artificial Sequence: Synthetic oligonucleotide
  Target: LAMA2; (-) strand; PAM type: YTN; PAM sequence: TTC
ttcttttgtgtgtcttttcg

SEQ ID NO: 212963 - DNA, 20 bp, Artificial Sequence
  Description of Artificial Sequence: Synthetic oligonucleotide
  Target: LAMA2; (-) strand; PAM type: YTN; PAM sequence: TTT
cttcttttgtgtgtcttttc

SEQ ID NO: 212964 - DNA, 20 bp, Artificial Sequence
  Description of Artificial Sequence: Synthetic oligonucleotide
  Target: LAMA2; (-) strand; PAM type: YTN; PAM sequence: TTG
gaaaataaacaaaacatttc

SEQ ID NO: 212965 - DNA, 20 bp, Artificial Sequence
  Description of Artificial Sequence: Synthetic oligonucleotide
  Target: LAMA2; (-) strand; PAM type: YTN; PAM sequence: CTT
ggaaaataaacaaaacattt

SEQ ID NO: 212966 - DNA, 20 bp, Artificial Sequence
  Description of Artificial Sequence: Synthetic oligonucleotide
  Target: LAMA2; (-) strand; PAM type: YTN; PAM sequence: TTC
catcttggaaaataaacaaa

SEQ ID NO: 212967 - DNA, 20 bp, Artificial Sequence
  Description of Artificial Sequence: Synthetic oligonucleotide
  Target: LAMA2; (-) strand; PAM type: YTN; PAM sequence: TTT
ccatcttggaaaataaacaa

SEQ ID NO: 212968 - DNA, 20 bp, Artificial Sequence
  Description of Artificial Sequence: Synthetic oligonucleotide
  Target: LAMA2; (-) strand; PAM type: YTN; PAM sequence: TTT
tccatcttggaaaataaaca

SEQ ID NO: 212969 - DNA, 20 bp, Artificial Sequence
  Description of Artificial Sequence: Synthetic oligonucleotide
  Target: LAMA2; (-) strand; PAM type: YTN; PAM sequence: TTA
cattttccatcttggaaaat

SEQ ID NO: 212970 - DNA, 20 bp, Artificial Sequence
  Description of Artificial Sequence: Synthetic oligonucleotide
  Target: LAMA2; (-) strand; PAM type: YTN; PAM sequence: TTT
acattttccatcttggaaaa

SEQ ID NO: 212971 - DNA, 20 bp, Artificial Sequence
  Description of Artificial Sequence: Synthetic oligonucleotide
  Target: LAMA2; (-) strand; PAM type: YTN; PAM sequence: CTG
gatagtttacattttccatc

SEQ ID NO: 212972 - DNA, 20 bp, Artificial Sequence
  Description of Artificial Sequence: Synthetic oligonucleotide
  Target: LAMA2; (-) strand; PAM type: YTN; PAM sequence: CTC
tggatagtttacattttcca

SEQ ID NO: 212973 - DNA, 20 bp, Artificial Sequence
  Description of Artificial Sequence: Synthetic oligonucleotide
  Target: LAMA2; (-) strand; PAM type: YTN; PAM sequence: CTG
tcctctggatagtttacatt

SEQ ID NO: 212974 - DNA, 20 bp, Artificial Sequence
  Description of Artificial Sequence: Synthetic oligonucleotide
  Target: LAMA2; (-) strand; PAM type: YTN; PAM sequence: CTA
aacccataccactgtcctct

SEQ ID NO: 212975 - DNA, 20 bp, Artificial Sequence
  Description of Artificial Sequence: Synthetic oligonucleotide
  Target: LAMA2; (-) strand; PAM type: YTN; PAM sequence: TTC
taaacccataccactgtcct

SEQ ID NO: 212976 - DNA, 20 bp, Artificial Sequence
  Description of Artificial Sequence: Synthetic oligonucleotide
  Target: LAMA2; (-) strand; PAM type: YTN; PAM sequence: TTT
ctaaacccataccactgtcc

SEQ ID NO: 212977 - DNA, 20 bp, Artificial Sequence
  Description of Artificial Sequence: Synthetic oligonucleotide
  Target: LAMA2; (-) strand; PAM type: YTN; PAM sequence: CTT
tctaaacccataccactgtc

SEQ ID NO: 212978 - DNA, 20 bp, Artificial Sequence
  Description of Artificial Sequence: Synthetic oligonucleotide
  Target: LAMA2; (-) strand; PAM type: YTN; PAM sequence: TTG
tctttctaaacccataccac

SEQ ID NO: 212979 - DNA, 20 bp, Artificial Sequence
  Description of Artificial Sequence: Synthetic oligonucleotide
  Target: LAMA2; (-) strand; PAM type: YTN; PAM sequence: TTG
tgtgaattgtctttctaaac

SEQ ID NO: 212980 - DNA, 20 bp, Artificial Sequence
  Description of Artificial Sequence: Synthetic oligonucleotide
  Target: LAMA2; (-) strand; PAM type: YTN; PAM sequence: TTA
ttgtgtgaattgtctttcta

SEQ ID NO: 212981 - DNA, 20 bp, Artificial Sequence
  Description of Artificial Sequence: Synthetic oligonucleotide
  Target: LAMA2; (-) strand; PAM type: YTN; PAM sequence: TTT
attgtgtgaattgtctttct

SEQ ID NO: 212982 - DNA, 20 bp, Artificial Sequence
  Description of Artificial Sequence: Synthetic oligonucleotide
  Target: LAMA2; (-) strand; PAM type: YTN; PAM sequence: TTA
aaatttattgtgtgaattgt

SEQ ID NO: 212983 - DNA, 20 bp, Artificial Sequence
  Description of Artificial Sequence: Synthetic oligonucleotide
  Target: LAMA2; (-) strand; PAM type: YTN; PAM sequence: CTT
aaaatttattgtgtgaattg

SEQ ID NO: 212984 - DNA, 20 bp, Artificial Sequence
  Description of Artificial Sequence: Synthetic oligonucleotide
  Target: LAMA2; (-) strand; PAM type: YTN; PAM sequence: TTC
cttaaaatttattgtgtgaa

SEQ ID NO: 212985 - DNA, 20 bp, Artificial Sequence
  Description of Artificial Sequence: Synthetic oligonucleotide
  Target: LAMA2; (-) strand; PAM type: YTN; PAM sequence: TTT
ccttaaaatttattgtgtga

SEQ ID NO: 212986 - DNA, 20 bp, Artificial Sequence
  Description of Artificial Sequence: Synthetic oligonucleotide
  Target: LAMA2; (-) strand; PAM type: YTN; PAM sequence: TTA
tttccttaaaatttattgtg

SEQ ID NO: 212987 - DNA, 20 bp, Artificial Sequence
  Description of Artificial Sequence: Synthetic oligonucleotide
  Target: LAMA2; (-) strand; PAM type: YTN; PAM sequence: CTA
aaaccattatttccttaaaa

SEQ ID NO: 212988 - DNA, 20 bp, Artificial Sequence
  Description of Artificial Sequence: Synthetic oligonucleotide
  Target: LAMA2; (-) strand; PAM type: YTN; PAM sequence: TTA
gcatcaaagactaaaaccat

SEQ ID NO: 212989 - DNA, 20 bp, Artificial Sequence
  Description of Artificial Sequence: Synthetic oligonucleotide
  Target: LAMA2; (-) strand; PAM type: YTN; PAM sequence: TTG
gaagcccagaaataatgtta

SEQ ID NO: 212990 - DNA, 20 bp, Artificial Sequence
  Description of Artificial Sequence: Synthetic oligonucleotide
  Target: LAMA2; (-) strand; PAM type: YTN; PAM sequence: CTT
ggaagcccagaaataatgtt

SEQ ID NO: 212991 - DNA, 20 bp, Artificial Sequence
  Description of Artificial Sequence: Synthetic oligonucleotide
  Target: LAMA2; (-) strand; PAM type: YTN; PAM sequence: TTA
gtgacttggaagcccagaaa

SEQ ID NO: 212992 - DNA, 20 bp, Artificial Sequence
  Description of Artificial Sequence: Synthetic oligonucleotide
  Target: LAMA2; (-) strand; PAM type: YTN; PAM sequence: TTT
agtgacttggaagcccagaa

SEQ ID NO: 212993 - DNA, 20 bp, Artificial Sequence
  Description of Artificial Sequence: Synthetic oligonucleotide
  Target: LAMA2; (-) strand; PAM type: YTN; PAM sequence: TTT
tagtgacttggaagcccaga

SEQ ID NO: 212994 - DNA, 20 bp, Artificial Sequence
  Description of Artificial Sequence: Synthetic oligonucleotide
  Target: LAMA2; (-) strand; PAM type: YTN; PAM sequence: TTG
ttttagtgacttggaagccc

SEQ ID NO: 212995 - DNA, 20 bp, Artificial Sequence
  Description of Artificial Sequence: Synthetic oligonucleotide
  Target: LAMA2; (-) strand; PAM type: YTN; PAM sequence: TTA
aaaagatgtatgtattgttt

SEQ ID NO: 212996 - DNA, 20 bp, Artificial Sequence
  Description of Artificial Sequence: Synthetic oligonucleotide
  Target: LAMA2; (-) strand; PAM type: YTN; PAM sequence: TTT
aaaaagatgtatgtattgtt

SEQ ID NO: 212997 - DNA, 20 bp, Artificial Sequence
  Description of Artificial Sequence: Synthetic oligonucleotide
  Target: LAMA2; (-) strand; PAM type: YTN; PAM sequence: TTT
taaaaagatgtatgtattgt

SEQ ID NO: 212998 - DNA, 20 bp, Artificial Sequence
  Description of Artificial Sequence: Synthetic oligonucleotide
  Target: LAMA2; (-) strand; PAM type: YTN; PAM sequence: CTA
aaacacaaaaccaaacaaca

SEQ ID NO: 212999 - DNA, 20 bp, Artificial Sequence
  Description of Artificial Sequence: Synthetic oligonucleotide
  Target: LAMA2; (-) strand; PAM type: YTN; PAM sequence: TTG
tcagaaaataaaaagactaa

SEQ ID NO: 213000 - DNA, 20 bp, Artificial Sequence
  Description of Artificial Sequence: Synthetic oligonucleotide
  Target: LAMA2; (-) strand; PAM type: YTN; PAM sequence: TTT
gtcagaaaataaaaagacta

SEQ ID NO: 213001 - DNA, 20 bp, Artificial Sequence
  Description of Artificial Sequence: Synthetic oligonucleotide
  Target: LAMA2; (-) strand; PAM type: YTN; PAM sequence: TTT
tgtcagaaaataaaaagact

SEQ ID NO: 213002 - DNA, 20 bp, Artificial Sequence
  Description of Artificial Sequence: Synthetic oligonucleotide
  Target: LAMA2; (-) strand; PAM type: YTN; PAM sequence: CTT
ttgtcagaaaataaaaagac

SEQ ID NO: 213003 - DNA, 20 bp, Artificial Sequence
  Description of Artificial Sequence: Synthetic oligonucleotide
  Target: LAMA2; (-) strand; PAM type: YTN; PAM sequence: TTC
ttttgtcagaaaataaaaag

SEQ ID NO: 213004 - DNA, 20 bp, Artificial Sequence
  Description of Artificial Sequence: Synthetic oligonucleotide
  Target: LAMA2; (-) strand; PAM type: YTN; PAM sequence: TTT
cttttgtcagaaaataaaaa

SEQ ID NO: 213005 - DNA, 20 bp, Artificial Sequence
  Description of Artificial Sequence: Synthetic oligonucleotide
  Target: LAMA2; (-) strand; PAM type: YTN; PAM sequence: CTT
tcttttgtcagaaaataaaa

SEQ ID NO: 213006 - DNA, 20 bp, Artificial Sequence
  Description of Artificial Sequence: Synthetic oligonucleotide
  Target: LAMA2; (-) strand; PAM type: YTN; PAM sequence: CTG
gagacatggcaaactttctt

SEQ ID NO: 213007 - DNA, 20 bp, Artificial Sequence
  Description of Artificial Sequence: Synthetic oligonucleotide
  Target: LAMA2; (-) strand; PAM type: YTN; PAM sequence: TTC
tggagacatggcaaactttc

SEQ ID NO: 213008 - DNA, 20 bp, Artificial Sequence
  Description of Artificial Sequence: Synthetic oligonucleotide
  Target: LAMA2; (-) strand; PAM type: YTN; PAM sequence: CTG
ttctggagacatggcaaact

SEQ ID NO: 213009 - DNA, 20 bp, Artificial Sequence
  Description of Artificial Sequence: Synthetic oligonucleotide
  Target: LAMA2; (-) strand; PAM type: YTN; PAM sequence: TTG
tgtgcctgttctggagacat

SEQ ID NO: 213010 - DNA, 20 bp, Artificial Sequence
  Description of Artificial Sequence: Synthetic oligonucleotide
  Target: LAMA2; (-) strand; PAM type: YTN; PAM sequence: TTA
gtacataaattgtgtgcctg

SEQ ID NO: 213011 - DNA, 20 bp, Artificial Sequence
  Description of Artificial Sequence: Synthetic oligonucleotide
  Target: LAMA2; (-) strand; PAM type: YTN; PAM sequence: TTT
agtacataaattgtgtgcct

SEQ ID NO: 213012 - DNA, 20 bp, Artificial Sequence
  Description of Artificial Sequence: Synthetic oligonucleotide
  Target: LAMA2; (-) strand; PAM type: YTN; PAM sequence: TTC
atatcaggatttagtacata

SEQ ID NO: 213013 - DNA, 20 bp, Artificial Sequence
  Description of Artificial Sequence: Synthetic oligonucleotide
  Target: LAMA2; (-) strand; PAM type: YTN; PAM sequence: TTC
aaaaaaaaagaaaagaaaag

SEQ ID NO: 213014 - DNA, 20 bp, Artificial Sequence
  Description of Artificial Sequence: Synthetic oligonucleotide
  Target: LAMA2; (-) strand; PAM type: YTN; PAM sequence: TTT
caaaaaaaaagaaaagaaaa

SEQ ID NO: 213015 - DNA, 20 bp, Artificial Sequence
  Description of Artificial Sequence: Synthetic oligonucleotide
  Target: LAMA2; (-) strand; PAM type: YTN; PAM sequence: CTC
catttcaaaaaaaaagaaaa

SEQ ID NO: 213016 - DNA, 20 bp, Artificial Sequence
  Description of Artificial Sequence: Synthetic oligonucleotide
  Target: LAMA2; (-) strand; PAM type: YTN; PAM sequence: CTG
ggcaacagagtaagactcca

SEQ ID NO: 213017 - DNA, 20 bp, Artificial Sequence
  Description of Artificial Sequence: Synthetic oligonucleotide
  Target: LAMA2; (-) strand; PAM type: YTN; PAM sequence: CTC
cagcctgggcaacagagtaa

SEQ ID NO: 213018 - DNA, 20 bp, Artificial Sequence
  Description of Artificial Sequence: Synthetic oligonucleotide
  Target: LAMA2; (-) strand; PAM type: YTN; PAM sequence: CTG
tactccagcctgggcaacag

SEQ ID NO: 213019 - DNA, 20 bp, Artificial Sequence
  Description of Artificial Sequence: Synthetic oligonucleotide
  Target: LAMA2; (-) strand; PAM type: YTN; PAM sequence: TTG
cagagatcgtgccactgtac

SEQ ID NO: 213020 - DNA, 20 bp, Artificial Sequence
  Description of Artificial Sequence: Synthetic oligonucleotide
  Target: LAMA2; (-) strand; PAM type: YTN; PAM sequence: TTG
aacccaggaggtagaggttg

SEQ ID NO: 213021 - DNA, 20 bp, Artificial Sequence
  Description of Artificial Sequence: Synthetic oligonucleotide
  Target: LAMA2; (-) strand; PAM type: YTN; PAM sequence: TTT
gaacccaggaggtagaggtt

SEQ ID NO: 213022 - DNA, 20 bp, Artificial Sequence
  Description of Artificial Sequence: Synthetic oligonucleotide
  Target: LAMA2; (-) strand; PAM type: YTN; PAM sequence: TTT
tgaacccaggaggtagaggt

SEQ ID NO: 213023 - DNA, 20 bp, Artificial Sequence
  Description of Artificial Sequence: Synthetic oligonucleotide
  Target: LAMA2; (-) strand; PAM type: YTN; PAM sequence: CTC
gggaggataaggcaggagaa

SEQ ID NO: 213024 - DNA, 20 bp, Artificial Sequence
  Description of Artificial Sequence: Synthetic oligonucleotide
  Target: LAMA2; (-) strand; PAM type: YTN; PAM sequence: CTA
ctcgggaggataaggcagga

SEQ ID NO: 213025 - DNA, 20 bp, Artificial Sequence
  Description of Artificial Sequence: Synthetic oligonucleotide
  Target: LAMA2; (-) strand; PAM type: YTN; PAM sequence: CTG
taatcccagctactcgggag

SEQ ID NO: 213026 - DNA, 20 bp, Artificial Sequence
  Description of Artificial Sequence: Synthetic oligonucleotide
  Target: LAMA2; (-) strand; PAM type: YTN; PAM sequence: TTG
gccaggcatggtagtgtatg

SEQ ID NO: 213027 - DNA, 20 bp, Artificial Sequence
  Description of Artificial Sequence: Synthetic oligonucleotide
  Target: LAMA2; (-) strand; PAM type: YTN; PAM sequence: CTA
aaaatacaaaaattggccag

SEQ ID NO: 213028 - DNA, 20 bp, Artificial Sequence
  Description of Artificial Sequence: Synthetic oligonucleotide
  Target: LAMA2; (-) strand; PAM type: YTN; PAM sequence: CTA
ctaaaaatacaaaaattggc

SEQ ID NO: 213029 - DNA, 20 bp, Artificial Sequence
  Description of Artificial Sequence: Synthetic oligonucleotide
  Target: LAMA2; (-) strand; PAM type: YTN; PAM sequence: CTC
tactaaaaatacaaaaattg

SEQ ID NO: 213030 - DNA, 20 bp, Artificial Sequence
  Description of Artificial Sequence: Synthetic oligonucleotide
  Target: LAMA2; (-) strand; PAM type: YTN; PAM sequence: CTG
tctctactaaaaatacaaaa

SEQ ID NO: 213031 - DNA, 20 bp, Artificial Sequence
  Description of Artificial Sequence: Synthetic oligonucleotide
  Target: LAMA2; (-) strand; PAM type: YTN; PAM sequence: CTG
gccaacatggccaaaccctg

SEQ ID NO: 213032 - DNA, 20 bp, Artificial Sequence
  Description of Artificial Sequence: Synthetic oligonucleotide
  Target: LAMA2; (-) strand; PAM type: YTN; PAM sequence: TTC
aagaccagcctggccaacat

SEQ ID NO: 213033 - DNA, 20 bp, Artificial Sequence
  Description of Artificial Sequence: Synthetic oligonucleotide
  Target: LAMA2; (-) strand; PAM type: YTN; PAM sequence: CTG
agtaggagttcaagaccagc

SEQ ID NO: 213034 - DNA, 20 bp, Artificial Sequence
  Description of Artificial Sequence: Synthetic oligonucleotide
  Target: LAMA2; (-) strand; PAM type: YTN; PAM sequence: TTG
ggaggccgaggcaggaggat

SEQ ID NO: 213035 - DNA, 20 bp, Artificial Sequence
  Description of Artificial Sequence: Synthetic oligonucleotide
  Target: LAMA2; (-) strand; PAM type: YTN; PAM sequence: TTT
gggaggccgaggcaggagga

SEQ ID NO: 213036 - DNA, 20 bp, Artificial Sequence
  Description of Artificial Sequence: Synthetic oligonucleotide
  Target: LAMA2; (-) strand; PAM type: YTN; PAM sequence: CTT
tgggaggccgaggcaggagg

SEQ ID NO: 213037 - DNA, 20 bp, Artificial Sequence
  Description of Artificial Sequence: Synthetic oligonucleotide
  Target: LAMA2; (-) strand; PAM type: YTN; PAM sequence: CTG
taatcccagcactttgggag

SEQ ID NO: 213038 - DNA, 20 bp, Artificial Sequence
  Description of Artificial Sequence: Synthetic oligonucleotide
  Target: LAMA2; (-) strand; PAM type: YTN; PAM sequence: CTC
acgcctgtaatcccagcact

SEQ ID NO: 213039 - DNA, 20 bp, Artificial Sequence
  Description of Artificial Sequence: Synthetic oligonucleotide
  Target: LAMA2; (-) strand; PAM type: YTN; PAM sequence: CTG
gtggctcacgcctgtaatcc

SEQ ID NO: 213040 - DNA, 20 bp, Artificial Sequence
  Description of Artificial Sequence: Synthetic oligonucleotide
  Target: LAMA2; (-) strand; PAM type: YTN; PAM sequence: TTC
atatcagaggatgggcctgg

SEQ ID NO: 213041 - DNA, 20 bp, Artificial Sequence
  Description of Artificial Sequence: Synthetic oligonucleotide
  Target: LAMA2; (-) strand; PAM type: YTN; PAM sequence: CTC
caataagaaattcatatcag

SEQ ID NO: 213042 - DNA, 20 bp, Artificial Sequence
  Description of Artificial Sequence: Synthetic oligonucleotide
  Target: LAMA2; (-) strand; PAM type: YTN; PAM sequence: TTC
tccaataagaaattcatatc

SEQ ID NO: 213043 - DNA, 20 bp, Artificial Sequence
  Description of Artificial Sequence: Synthetic oligonucleotide
  Target: LAMA2; (-) strand; PAM type: YTN; PAM sequence: CTG
gacacataaagggattctcc

SEQ ID NO: 213044 - DNA, 20 bp, Artificial Sequence
  Description of Artificial Sequence: Synthetic oligonucleotide
  Target: LAMA2; (-) strand; PAM type: YTN; PAM sequence: CTA
ccacagggctggacacataa

SEQ ID NO: 213045 - DNA, 20 bp, Artificial Sequence
  Description of Artificial Sequence: Synthetic oligonucleotide
  Target: LAMA2; (-) strand; PAM type: YTN; PAM sequence: CTC
agagcctaccacagggctgg

SEQ ID NO: 213046 - DNA, 20 bp, Artificial Sequence
  Description of Artificial Sequence: Synthetic oligonucleotide
  Target: LAMA2; (-) strand; PAM type: YTN; PAM sequence: TTC
tcagagcctaccacagggct

SEQ ID NO: 213047 - DNA, 20 bp, Artificial Sequence
  Description of Artificial Sequence: Synthetic oligonucleotide
  Target: LAMA2; (-) strand; PAM type: YTN; PAM sequence: CTA
tattctcagagcctaccaca

SEQ ID NO: 213048 - DNA, 20 bp, Artificial Sequence
  Description of Artificial Sequence: Synthetic oligonucleotide
  Target: LAMA2; (-) strand; PAM type: YTN; PAM sequence: TTA
ctatattctcagagcctacc

SEQ ID NO: 213049 - DNA, 20 bp, Artificial Sequence
  Description of Artificial Sequence: Synthetic oligonucleotide
  Target: LAMA2; (-) strand; PAM type: YTN; PAM sequence: TTC
attactatattctcagagcc

SEQ ID NO: 213050 - DNA, 20 bp, Artificial Sequence
  Description of Artificial Sequence: Synthetic oligonucleotide
  Target: LAMA2; (-) strand; PAM type: YTN; PAM sequence: TTG
ttcattactatattctcaga

SEQ ID NO: 213051 - DNA, 20 bp, Artificial Sequence
  Description of Artificial Sequence: Synthetic oligonucleotide
  Target: LAMA2; (-) strand; PAM type: YTN; PAM sequence: CTT
gttcattactatattctcag

SEQ ID NO: 213052 - DNA, 20 bp, Artificial Sequence
  Description of Artificial Sequence: Synthetic oligonucleotide
  Target: LAMA2; (-) strand; PAM type: YTN; PAM sequence: TTA
ccttgttcattactatattc

SEQ ID NO: 213053 - DNA, 20 bp, Artificial Sequence
  Description of Artificial Sequence: Synthetic oligonucleotide
  Target: LAMA2; (-) strand; PAM type: YTN; PAM sequence: TTT
accttgttcattactatatt

SEQ ID NO: 213054 - DNA, 20 bp, Artificial Sequence
  Description of Artificial Sequence: Synthetic oligonucleotide
  Target: LAMA2; (-) strand; PAM type: YTN; PAM sequence: TTG
tttaccttgttcattactat

SEQ ID NO: 213055 - DNA, 20 bp, Artificial Sequence
  Description of Artificial Sequence: Synthetic oligonucleotide
  Target: LAMA2; (-) strand; PAM type: YTN; PAM sequence: TTT
gtttaccttgttcattacta

SEQ ID NO: 213056 - DNA, 20 bp, Artificial Sequence
  Description of Artificial Sequence: Synthetic oligonucleotide
  Target: LAMA2; (-) strand; PAM type: YTN; PAM sequence: TTT
tgtttaccttgttcattact

SEQ ID NO: 213057 - DNA, 20 bp, Artificial Sequence
  Description of Artificial Sequence: Synthetic oligonucleotide
  Target: LAMA2; (-) strand; PAM type: YTN; PAM sequence: CTA
tgtatgttttgtttaccttg

SEQ ID NO: 213058 - DNA, 20 bp, Artificial Sequence
  Description of Artificial Sequence: Synthetic oligonucleotide
  Target: LAMA2; (-) strand; PAM type: YTN; PAM sequence: TTC
atgatgggagagactatgta

SEQ ID NO: 213059 - DNA, 20 bp, Artificial Sequence
  Description of Artificial Sequence: Synthetic oligonucleotide
  Target: LAMA2; (-) strand; PAM type: YTN; PAM sequence: CTT
catgatgggagagactatgt

SEQ ID NO: 213060 - DNA, 20 bp, Artificial Sequence
  Description of Artificial Sequence: Synthetic oligonucleotide
  Target: LAMA2; (-) strand; PAM type: YTN; PAM sequence: CTG
gaacgtaagcttcatgatgg

SEQ ID NO: 213061 - DNA, 20 bp, Artificial Sequence
  Description of Artificial Sequence: Synthetic oligonucleotide
  Target: LAMA2; (-) strand; PAM type: YTN; PAM sequence: TTG
ctggaacgtaagcttcatga

SEQ ID NO: 213062 - DNA, 20 bp, Artificial Sequence
  Description of Artificial Sequence: Synthetic oligonucleotide
  Target: LAMA2; (-) strand; PAM type: YTN; PAM sequence: CTT
gctggaacgtaagcttcatg

SEQ ID NO: 213063 - DNA, 20 bp, Artificial Sequence
  Description of Artificial Sequence: Synthetic oligonucleotide
  Target: LAMA2; (-) strand; PAM type: YTN; PAM sequence: TTC
cttgctggaacgtaagcttc

SEQ ID NO: 213064 - DNA, 20 bp, Artificial Sequence
  Description of Artificial Sequence: Synthetic oligonucleotide
  Target: LAMA2; (-) strand; PAM type: YTN; PAM sequence: CTT
ccttgctggaacgtaagctt

SEQ ID NO: 213065 - DNA, 20 bp, Artificial Sequence
  Description of Artificial Sequence: Synthetic oligonucleotide
  Target: LAMA2; (-) strand; PAM type: YTN; PAM sequence: CTA
gcttccttgctggaacgtaa

SEQ ID NO: 213066 - DNA, 20 bp, Artificial Sequence
  Description of Artificial Sequence: Synthetic oligonucleotide
  Target: LAMA2; (-) strand; PAM type: YTN; PAM sequence: TTG
aaggtctagcttccttgctg

SEQ ID NO: 213067 - DNA, 20 bp, Artificial Sequence
  Description of Artificial Sequence: Synthetic oligonucleotide
  Target: LAMA2; (-) strand; PAM type: YTN; PAM sequence: CTA
ttgaaggtctagcttccttg

SEQ ID NO: 213068 - DNA, 20 bp, Artificial Sequence
  Description of Artificial Sequence: Synthetic oligonucleotide
  Target: LAMA2; (-) strand; PAM type: YTN; PAM sequence: TTA
tctattgaaggtctagcttc

SEQ ID NO: 213069 - DNA, 20 bp, Artificial Sequence
  Description of Artificial Sequence: Synthetic oligonucleotide
  Target: LAMA2; (-) strand; PAM type: YTN; PAM sequence: TTA
aatgataattatctattgaa

SEQ ID NO: 213070 - DNA, 20 bp, Artificial Sequence
  Description of Artificial Sequence: Synthetic oligonucleotide
  Target: LAMA2; (-) strand; PAM type: YTN; PAM sequence: TTT
aaatgataattatctattga

SEQ ID NO: 213071 - DNA, 20 bp, Artificial Sequence
  Description of Artificial Sequence: Synthetic oligonucleotide
  Target: LAMA2; (-) strand; PAM type: YTN; PAM sequence: TTT
taaatgataattatctattg

SEQ ID NO: 213072 - DNA, 20 bp, Artificial Sequence
  Description of Artificial Sequence: Synthetic oligonucleotide
  Target: LAMA2; (-) strand; PAM type: YTN; PAM sequence: TTA
caaggtataattttaaatga

SEQ ID NO: 213073 - DNA, 20 bp, Artificial Sequence
  Description of Artificial Sequence: Synthetic oligonucleotide
  Target: LAMA2; (-) strand; PAM type: YTN; PAM sequence: CTG
attacaaggtataattttaa

SEQ ID NO: 213074 - DNA, 20 bp, Artificial Sequence
  Description of Artificial Sequence: Synthetic oligonucleotide
  Target: LAMA2; (-) strand; PAM type: YTN; PAM sequence: TTG
catagcactgattacaaggt

SEQ ID NO: 213075 - DNA, 20 bp, Artificial Sequence
  Description of Artificial Sequence: Synthetic oligonucleotide
  Target: LAMA2; (-) strand; PAM type: YTN; PAM sequence: CTT
gcatagcactgattacaagg

SEQ ID NO: 213076 - DNA, 20 bp, Artificial Sequence
  Description of Artificial Sequence: Synthetic oligonucleotide
  Target: LAMA2; (-) strand; PAM type: YTN; PAM sequence: TTC
ttgcatagcactgattacaa

SEQ ID NO: 213077 - DNA, 20 bp, Artificial Sequence
  Description of Artificial Sequence: Synthetic oligonucleotide
  Target: LAMA2; (-) strand; PAM type: YTN; PAM sequence: TTT
cttgcatagcactgattaca

SEQ ID NO: 213078 - DNA, 20 bp, Artificial Sequence
  Description of Artificial Sequence: Synthetic oligonucleotide
  Target: LAMA2; (-) strand; PAM type: YTN; PAM sequence: TTT
tcttgcatagcactgattac

SEQ ID NO: 213079 - DNA, 20 bp, Artificial Sequence
  Description of Artificial Sequence: Synthetic oligonucleotide
  Target: LAMA2; (-) strand; PAM type: YTN; PAM sequence: TTT
ttcttgcatagcactgatta

SEQ ID NO: 213080 - DNA, 20 bp, Artificial Sequence
  Description of Artificial Sequence: Synthetic oligonucleotide
  Target: LAMA2; (-) strand; PAM type: YTN; PAM sequence: TTA
tttttcttgcatagcactga

SEQ ID NO: 213081 - DNA, 20 bp, Artificial Sequence
  Description of Artificial Sequence: Synthetic oligonucleotide
  Target: LAMA2; (-) strand; PAM type: YTN; PAM sequence: CTT
atttttcttgcatagcactg

SEQ ID NO: 213082 - DNA, 20 bp, Artificial Sequence
  Description of Artificial Sequence: Synthetic oligonucleotide
  Target: LAMA2; (-) strand; PAM type: YTN; PAM sequence: CTG
ccttatttttcttgcatagc

SEQ ID NO: 213083 - DNA, 20 bp, Artificial Sequence
  Description of Artificial Sequence: Synthetic oligonucleotide
  Target: LAMA2; (-) strand; PAM type: YTN; PAM sequence: TTC
tgccttatttttcttgcata

SEQ ID NO: 213084 - DNA, 20 bp, Artificial Sequence
  Description of Artificial Sequence: Synthetic oligonucleotide
  Target: LAMA2; (-) strand; PAM type: YTN; PAM sequence: CTA
attctgccttatttttcttg

SEQ ID NO: 213085 - DNA, 20 bp, Artificial Sequence
  Description of Artificial Sequence: Synthetic oligonucleotide
  Target: LAMA2; (-) strand; PAM type: YTN; PAM sequence: TTA
cagcccctaattctgcctta

SEQ ID NO: 213086 - DNA, 20 bp, Artificial Sequence
  Description of Artificial Sequence: Synthetic oligonucleotide
  Target: LAMA2; (-) strand; PAM type: YTN; PAM sequence: TTC
attacagcccctaattctgc

SEQ ID NO: 213087 - DNA, 20 bp, Artificial Sequence
  Description of Artificial Sequence: Synthetic oligonucleotide
  Target: LAMA2; (-) strand; PAM type: YTN; PAM sequence: CTT
cattacagcccctaattctg

SEQ ID NO: 213088 - DNA, 20 bp, Artificial Sequence
  Description of Artificial Sequence: Synthetic oligonucleotide
  Target: LAMA2; (-) strand; PAM type: YTN; PAM sequence: TTG
taaacaggtccttcattaca

SEQ ID NO: 213089 - DNA, 20 bp, Artificial Sequence
  Description of Artificial Sequence: Synthetic oligonucleotide
  Target: LAMA2; (-) strand; PAM type: YTN; PAM sequence: TTT
gtaaacaggtccttcattac

SEQ ID NO: 213090 - DNA, 20 bp, Artificial Sequence
  Description of Artificial Sequence: Synthetic oligonucleotide
  Target: LAMA2; (-) strand; PAM type: YTN; PAM sequence: CTT
tgtaaacaggtccttcatta

SEQ ID NO: 213091 - DNA, 20 bp, Artificial Sequence
  Description of Artificial Sequence: Synthetic oligonucleotide
  Target: LAMA2; (-) strand; PAM type: YTN; PAM sequence: CTA
atgctttgtaaacaggtcct

SEQ ID NO: 213092 - DNA, 20 bp, Artificial Sequence
  Description of Artificial Sequence: Synthetic oligonucleotide
  Target: LAMA2; (-) strand; PAM type: YTN; PAM sequence: TTC
ctaatgctttgtaaacaggt

SEQ ID NO: 213093 - DNA, 20 bp, Artificial Sequence
  Description of Artificial Sequence: Synthetic oligonucleotide
  Target: LAMA2; (-) strand; PAM type: YTN; PAM sequence: TTT
cctaatgctttgtaaacagg

SEQ ID NO: 213094 - DNA, 20 bp, Artificial Sequence
  Description of Artificial Sequence: Synthetic oligonucleotide
  Target: LAMA2; (-) strand; PAM type: YTN; PAM sequence: CTT
tcctaatgctttgtaaacag

SEQ ID NO: 213095 - DNA, 20 bp, Artificial Sequence
  Description of Artificial Sequence: Synthetic oligonucleotide
  Target: LAMA2; (-) strand; PAM type: YTN; PAM sequence: CTC
catgagggctttcctaatgc

SEQ ID NO: 213096 - DNA, 20 bp, Artificial Sequence
  Description of Artificial Sequence: Synthetic oligonucleotide
  Target: LAMA2; (-) strand; PAM type: YTN; PAM sequence: TTC
ctccatgagggctttcctaa

SEQ ID NO: 213097 - DNA, 20 bp, Artificial Sequence
  Description of Artificial Sequence: Synthetic oligonucleotide
  Target: LAMA2; (-) strand; PAM type: YTN; PAM sequence: TTT
cctccatgagggctttccta

SEQ ID NO: 213098 - DNA, 20 bp, Artificial Sequence
  Description of Artificial Sequence: Synthetic oligonucleotide
  Target: LAMA2; (-) strand; PAM type: YTN; PAM sequence: TTA
tttcctccatgagggctttc

SEQ ID NO: 213099 - DNA, 20 bp, Artificial Sequence
  Description of Artificial Sequence: Synthetic oligonucleotide
  Target: LAMA2; (-) strand; PAM type: YTN; PAM sequence: CTT
atttcctccatgagggcttt

SEQ ID NO: 213100 - DNA, 20 bp, Artificial Sequence
  Description of Artificial Sequence: Synthetic oligonucleotide
  Target: LAMA2; (-) strand; PAM type: YTN; PAM sequence: TTG
tcttatttcctccatgaggg

SEQ ID NO: 213101 - DNA, 20 bp, Artificial Sequence
  Description of Artificial Sequence: Synthetic oligonucleotide
  Target: LAMA2; (-) strand; PAM type: YTN; PAM sequence: CTT
gtcttatttcctccatgagg

SEQ ID NO: 213102 - DNA, 20 bp, Artificial Sequence
  Description of Artificial Sequence: Synthetic oligonucleotide
  Target: LAMA2; (-) strand; PAM type: YTN; PAM sequence: TTC
cttgtcttatttcctccatg

SEQ ID NO: 213103 - DNA, 20 bp, Artificial Sequence
  Description of Artificial Sequence: Synthetic oligonucleotide
  Target: LAMA2; (-) strand; PAM type: YTN; PAM sequence: CTT
ccttgtcttatttcctccat

SEQ ID NO: 213104 - DNA, 20 bp, Artificial Sequence
  Description of Artificial Sequence: Synthetic oligonucleotide
  Target: LAMA2; (-) strand; PAM type: YTN; PAM sequence: TTC
ttccttgtcttatttcctcc

SEQ ID NO: 213105 - DNA, 20 bp, Artificial Sequence
  Description of Artificial Sequence: Synthetic oligonucleotide
  Target: LAMA2; (-) strand; PAM type: YTN; PAM sequence: TTT
cttccttgtcttatttcctc

SEQ ID NO: 213106 - DNA, 20 bp, Artificial Sequence
  Description of Artificial Sequence: Synthetic oligonucleotide
  Target: LAMA2; (-) strand; PAM type: YTN; PAM sequence: TTC
acaagtgtttcttccttgtc

SEQ ID NO: 213107 - DNA, 20 bp, Artificial Sequence
  Description of Artificial Sequence: Synthetic oligonucleotide
  Target: LAMA2; (-) strand; PAM type: YTN; PAM sequence: TTG
ttcacaagtgtttcttcctt

SEQ ID NO: 213108 - DNA, 20 bp, Artificial Sequence
  Description of Artificial Sequence: Synthetic oligonucleotide
  Target: LAMA2; (-) strand; PAM type: YTN; PAM sequence: CTA
ttgttcacaagtgtttcttc

SEQ ID NO: 213109 - DNA, 20 bp, Artificial Sequence
  Description of Artificial Sequence: Synthetic oligonucleotide
  Target: LAMA2; (-) strand; PAM type: YTN; PAM sequence: TTC
ctattgttcacaagtgtttc

SEQ ID NO: 213110 - DNA, 20 bp, Artificial Sequence
  Description of Artificial Sequence: Synthetic oligonucleotide
  Target: LAMA2; (-) strand; PAM type: YTN; PAM sequence: CTT
cctattgttcacaagtgttt

SEQ ID NO: 213111 - DNA, 20 bp, Artificial Sequence
  Description of Artificial Sequence: Synthetic oligonucleotide
  Target: LAMA2; (-) strand; PAM type: YTN; PAM sequence: TTC
acataccttcctattgttca

SEQ ID NO: 213112 - DNA, 20 bp, Artificial Sequence
  Description of Artificial Sequence: Synthetic oligonucleotide
  Target: LAMA2; (-) strand; PAM type: YTN; PAM sequence: CTT
cacataccttcctattgttc

SEQ ID NO: 213113 - DNA, 20 bp, Artificial Sequence
  Description of Artificial Sequence: Synthetic oligonucleotide
  Target: LAMA2; (-) strand; PAM type: YTN; PAM sequence: TTC
acttcacataccttcctatt

SEQ ID NO: 213114 - DNA, 20 bp, Artificial Sequence
  Description of Artificial Sequence: Synthetic oligonucleotide
  Target: LAMA2; (-) strand; PAM type: YTN; PAM sequence: CTT
cacttcacataccttcctat

SEQ ID NO: 213115 - DNA, 20 bp, Artificial Sequence
  Description of Artificial Sequence: Synthetic oligonucleotide
  Target: LAMA2; (-) strand; PAM type: YTN; PAM sequence: CTC
cttcacttcacataccttcc

SEQ ID NO: 213116 - DNA, 20 bp, Artificial Sequence
  Description of Artificial Sequence: Synthetic oligonucleotide
  Target: LAMA2; (-) strand; PAM type: YTN; PAM sequence: TTA
acgctccttcacttcacata

SEQ ID NO: 213117 - DNA, 20 bp, Artificial Sequence
  Description of Artificial Sequence: Synthetic oligonucleotide
  Target: LAMA2; (-) strand; PAM type: YTN; PAM sequence: CTT
aacgctccttcacttcacat

SEQ ID NO: 213118 - DNA, 20 bp, Artificial Sequence
  Description of Artificial Sequence: Synthetic oligonucleotide
  Target: LAMA2; (-) strand; PAM type: YTN; PAM sequence: TTC
cttaacgctccttcacttca

SEQ ID NO: 213119 - DNA, 20 bp, Artificial Sequence
  Description of Artificial Sequence: Synthetic oligonucleotide
  Target: LAMA2; (-) strand; PAM type: YTN; PAM sequence: CTG
ttccttaacgctccttcact

SEQ ID NO: 213120 - DNA, 20 bp, Artificial Sequence
  Description of Artificial Sequence: Synthetic oligonucleotide
  Target: LAMA2; (-) strand; PAM type: YTN; PAM sequence: CTC
tgttccttaacgctccttca

SEQ ID NO: 213121 - DNA, 20 bp, Artificial Sequence
  Description of Artificial Sequence: Synthetic oligonucleotide
  Target: LAMA2; (-) strand; PAM type: YTN; PAM sequence: CTA
gaaatctctgttccttaacg

SEQ ID NO: 213122 - DNA, 20 bp, Artificial Sequence
  Description of Artificial Sequence: Synthetic oligonucleotide
  Target: LAMA2; (-) strand; PAM type: YTN; PAM sequence: TTG
tctagaaatctctgttcctt

SEQ ID NO: 213123 - DNA, 20 bp, Artificial Sequence
  Description of Artificial Sequence: Synthetic oligonucleotide
  Target: LAMA2; (-) strand; PAM type: YTN; PAM sequence: CTT
gtctagaaatctctgttcct

SEQ ID NO: 213124 - DNA, 20 bp, Artificial Sequence
  Description of Artificial Sequence: Synthetic oligonucleotide
  Target: LAMA2; (-) strand; PAM type: YTN; PAM sequence: TTA
gggcttgtctagaaatctct

SEQ ID NO: 213125 - DNA, 20 bp, Artificial Sequence
  Description of Artificial Sequence: Synthetic oligonucleotide
  Target: LAMA2; (-) strand; PAM type: YTN; PAM sequence: CTT
agggcttgtctagaaatctc

SEQ ID NO: 213126 - DNA, 20 bp, Artificial Sequence
  Description of Artificial Sequence: Synthetic oligonucleotide
  Target: LAMA2; (-) strand; PAM type: YTN; PAM sequence: TTG
cttagggcttgtctagaaat

SEQ ID NO: 213127 - DNA, 20 bp, Artificial Sequence
  Description of Artificial Sequence: Synthetic oligonucleotide
  Target: LAMA2; (-) strand; PAM type: YTN; PAM sequence: CTT
gcttagggcttgtctagaaa

SEQ ID NO: 213128 - DNA, 20 bp, Artificial Sequence
  Description of Artificial Sequence: Synthetic oligonucleotide
  Target: LAMA2; (-) strand; PAM type: YTN; PAM sequence: TTC
cttgcttagggcttgtctag

SEQ ID NO: 213129 - DNA, 20 bp, Artificial Sequence
  Description of Artificial Sequence: Synthetic oligonucleotide
  Target: LAMA2; (-) strand; PAM type: YTN; PAM sequence: TTT
ccttgcttagggcttgtcta

SEQ ID NO: 213130 - DNA, 20 bp, Artificial Sequence
  Description of Artificial Sequence: Synthetic oligonucleotide
  Target: LAMA2; (-) strand; PAM type: YTN; PAM sequence: TTT
tccttgcttagggcttgtct

SEQ ID NO: 213131 - DNA, 20 bp, Artificial Sequence
  Description of Artificial Sequence: Synthetic oligonucleotide
  Target: LAMA2; (-) strand; PAM type: YTN; PAM sequence: TTT
ttccttgcttagggcttgtc

SEQ ID NO: 213132 - DNA, 20 bp, Artificial Sequence
  Description of Artificial Sequence: Synthetic oligonucleotide
  Target: LAMA2; (-) strand; PAM type: YTN; PAM sequence: CTT
tttccttgcttagggcttgt

SEQ ID NO: 213133 - DNA, 20 bp, Artificial Sequence
  Description of Artificial Sequence: Synthetic oligonucleotide
  Target: LAMA2; (-) strand; PAM type: YTN; PAM sequence: CTG
ctttttccttgcttagggct

SEQ ID NO: 213134 - DNA, 20 bp, Artificial Sequence
  Description of Artificial Sequence: Synthetic oligonucleotide
  Target: LAMA2; (-) strand; PAM type: YTN; PAM sequence: CTC
tgctttttccttgcttaggg

SEQ ID NO: 213135 - DNA, 20 bp, Artificial Sequence
  Description of Artificial Sequence: Synthetic oligonucleotide
  Target: LAMA2; (-) strand; PAM type: YTN; PAM sequence: CTA
gaataaagctctgctttttc

SEQ ID NO: 213136 - DNA, 20 bp, Artificial Sequence
  Description of Artificial Sequence: Synthetic oligonucleotide
  Target: LAMA2; (-) strand; PAM type: YTN; PAM sequence: TTC
tagaataaagctctgctttt

SEQ ID NO: 213137 - DNA, 20 bp, Artificial Sequence
  Description of Artificial Sequence: Synthetic oligonucleotide
  Target: LAMA2; (-) strand; PAM type: YTN; PAM sequence: TTA
gtccgattctagaataaagc

SEQ ID NO: 213138 - DNA, 20 bp, Artificial Sequence
  Description of Artificial Sequence: Synthetic oligonucleotide
  Target: LAMA2; (-) strand; PAM type: YTN; PAM sequence: TTT
agtccgattctagaataaag

SEQ ID NO: 213139 - DNA, 20 bp, Artificial Sequence
  Description of Artificial Sequence: Synthetic oligonucleotide
  Target: LAMA2; (-) strand; PAM type: YTN; PAM sequence: CTT
tagtccgattctagaataaa

SEQ ID NO: 213140 - DNA, 20 bp, Artificial Sequence
  Description of Artificial Sequence: Synthetic oligonucleotide
  Target: LAMA2; (-) strand; PAM type: YTN; PAM sequence: CTG
cctttagtccgattctagaa

SEQ ID NO: 213141 - DNA, 20 bp, Artificial Sequence
  Description of Artificial Sequence: Synthetic oligonucleotide
  Target: LAMA2; (-) strand; PAM type: YTN; PAM sequence: TTC
aacgaatactgcctttagtc

SEQ ID NO: 213142 - DNA, 20 bp, Artificial Sequence
  Description of Artificial Sequence: Synthetic oligonucleotide
  Target: LAMA2; (-) strand; PAM type: YTN; PAM sequence: CTG
atcacattcaacgaatactg

SEQ ID NO: 213143 - DNA, 20 bp, Artificial Sequence
  Description of Artificial Sequence: Synthetic oligonucleotide
  Target: LAMA2; (-) strand; PAM type: YTN; PAM sequence: CTC
tgatcacattcaacgaatac

SEQ ID NO: 213144 - DNA, 20 bp, Artificial Sequence
  Description of Artificial Sequence: Synthetic oligonucleotide
  Target: LAMA2; (-) strand; PAM type: YTN; PAM sequence: TTA
caatgtcctctgatcacatt

SEQ ID NO: 213145 - DNA, 20 bp, Artificial Sequence
  Description of Artificial Sequence: Synthetic oligonucleotide
  Target: LAMA2; (-) strand; PAM type: YTN; PAM sequence: CTT
acaatgtcctctgatcacat

SEQ ID NO: 213146 - DNA, 20 bp, Artificial Sequence
  Description of Artificial Sequence: Synthetic oligonucleotide
  Target: LAMA2; (-) strand; PAM type: YTN; PAM sequence: CTG
gcttacaatgtcctctgatc

SEQ ID NO: 213147 - DNA, 20 bp, Artificial Sequence
  Description of Artificial Sequence: Synthetic oligonucleotide
  Target: LAMA2; (-) strand; PAM type: YTN; PAM sequence: TTA
tcctggcttacaatgtcctc

SEQ ID NO: 213148 - DNA, 20 bp, Artificial Sequence
  Description of Artificial Sequence: Synthetic oligonucleotide
  Target: LAMA2; (-) strand; PAM type: YTN; PAM sequence: TTC
aaaatgattatcctggctta

SEQ ID NO: 213149 - DNA, 20 bp, Artificial Sequence
  Description of Artificial Sequence: Synthetic oligonucleotide
  Target: LAMA2; (-) strand; PAM type: YTN; PAM sequence: TTA
aaattcaaaatgattatcct

SEQ ID NO: 213150 - DNA, 20 bp, Artificial Sequence
  Description of Artificial Sequence: Synthetic oligonucleotide
  Target: LAMA2; (-) strand; PAM type: YTN; PAM sequence: CTA
ggttaaaattcaaaatgatt

SEQ ID NO: 213151 - DNA, 20 bp, Artificial Sequence
  Description of Artificial Sequence: Synthetic oligonucleotide
  Target: LAMA2; (-) strand; PAM type: YTN; PAM sequence: TTG
tacctaggttaaaattcaaa

SEQ ID NO: 213152 - DNA, 20 bp, Artificial Sequence
  Description of Artificial Sequence: Synthetic oligonucleotide
  Target: LAMA2; (-) strand; PAM type: YTN; PAM sequence: TTA
aaaatagatcataattgtac

SEQ ID NO: 213153 - DNA, 20 bp, Artificial Sequence
  Description of Artificial Sequence: Synthetic oligonucleotide
  Target: LAMA2; (-) strand; PAM type: YTN; PAM sequence: CTT
aaaaatagatcataattgta

SEQ ID NO: 213154 - DNA, 20 bp, Artificial Sequence
  Description of Artificial Sequence: Synthetic oligonucleotide
  Target: LAMA2; (-) strand; PAM type: YTN; PAM sequence: TTC
ttaaaaatagatcataattg

SEQ ID NO: 213155 - DNA, 20 bp, Artificial Sequence
  Description of Artificial Sequence: Synthetic oligonucleotide
  Target: LAMA2; (-) strand; PAM type: YTN; PAM sequence: CTT
cttaaaaatagatcataatt

SEQ ID NO: 213156 - DNA, 20 bp, Artificial Sequence
  Description of Artificial Sequence: Synthetic oligonucleotide
  Target: LAMA2; (-) strand; PAM type: YTN; PAM sequence: CTG
atcaagtcagtcttcttaaa

SEQ ID NO: 213157 - DNA, 20 bp, Artificial Sequence
  Description of Artificial Sequence: Synthetic oligonucleotide
  Target: LAMA2; (-) strand; PAM type: YTN; PAM sequence: TTC
aaatctgatcaagtcagtct

SEQ ID NO: 213158 - DNA, 20 bp, Artificial Sequence
  Description of Artificial Sequence: Synthetic oligonucleotide
  Target: LAMA2; (-) strand; PAM type: YTN; PAM sequence: TTA
agattcaaatctgatcaagt

SEQ ID NO: 213159 - DNA, 20 bp, Artificial Sequence
  Description of Artificial Sequence: Synthetic oligonucleotide
  Target: LAMA2; (-) strand; PAM type: YTN; PAM sequence: CTT
aagattcaaatctgatcaag

SEQ ID NO: 213160 - DNA, 20 bp, Artificial Sequence
  Description of Artificial Sequence: Synthetic oligonucleotide
  Target: LAMA2; (-) strand; PAM type: YTN; PAM sequence: TTC
ttaagattcaaatctgatca

SEQ ID NO: 213161 - DNA, 20 bp, Artificial Sequence
  Description of Artificial Sequence: Synthetic oligonucleotide
  Target: LAMA2; (-) strand; PAM type: YTN; PAM sequence: TTT
cttaagattcaaatctgatc

SEQ ID NO: 213162 - DNA, 20 bp, Artificial Sequence
  Description of Artificial Sequence: Synthetic oligonucleotide
  Target: LAMA2; (-) strand; PAM type: YTN; PAM sequence: TTT
tcttaagattcaaatctgat

SEQ ID NO: 213163 - DNA, 20 bp, Artificial Sequence
  Description of Artificial Sequence: Synthetic oligonucleotide
  Target: LAMA2; (-) strand; PAM type: YTN; PAM sequence: TTA
cataatgagttttcttaaga

SEQ ID NO: 213164 - DNA, 20 bp, Artificial Sequence
  Description of Artificial Sequence: Synthetic oligonucleotide
  Target: LAMA2; (-) strand; PAM type: YTN; PAM sequence: TTT
acataatgagttttcttaag

SEQ ID NO: 213165 - DNA, 20 bp, Artificial Sequence
  Description of Artificial Sequence: Synthetic oligonucleotide
  Target: LAMA2; (-) strand; PAM type: YTN; PAM sequence: TTT
tacataatgagttttcttaa

SEQ ID NO: 213166 - DNA, 20 bp, Artificial Sequence
  Description of Artificial Sequence: Synthetic oligonucleotide
  Target: LAMA2; (-) strand; PAM type: YTN; PAM sequence: TTT
ttacataatgagttttctta

SEQ ID NO: 213167 - DNA, 20 bp, Artificial Sequence
  Description of Artificial Sequence: Synthetic oligonucleotide
  Target: LAMA2; (-) strand; PAM type: YTN; PAM sequence: TTT
tttacataatgagttttctt

SEQ ID NO: 213168 - DNA, 20 bp, Artificial Sequence
  Description of Artificial Sequence: Synthetic oligonucleotide
  Target: LAMA2; (-) strand; PAM type: YTN; PAM sequence: TTT
ttttacataatgagttttct

SEQ ID NO: 213169 - DNA, 20 bp, Artificial Sequence
  Description of Artificial Sequence: Synthetic oligonucleotide
  Target: LAMA2; (-) strand; PAM type: YTN; PAM sequence: CTT
tttttacataatgagttttc

SEQ ID NO: 213170 - DNA, 20 bp, Artificial Sequence
  Description of Artificial Sequence: Synthetic oligonucleotide
  Target: LAMA2; (-) strand; PAM type: YTN; PAM sequence: TTA
gccctttttttacataatga

SEQ ID NO: 213171 - DNA, 20 bp, Artificial Sequence
  Description of Artificial Sequence: Synthetic oligonucleotide
  Target: LAMA2; (-) strand; PAM type: YTN; PAM sequence: TTT
agccctttttttacataatg

SEQ ID NO: 213172 - DNA, 20 bp, Artificial Sequence
  Description of Artificial Sequence: Synthetic oligonucleotide
  Target: LAMA2; (-) strand; PAM type: YTN; PAM sequence: CTT
tagccctttttttacataat

SEQ ID NO: 213173 - DNA, 20 bp, Artificial Sequence
  Description of Artificial Sequence: Synthetic oligonucleotide
  Target: LAMA2; (-) strand; PAM type: YTN; PAM sequence: TTC
tttagccctttttttacata

SEQ ID NO: 213174 - DNA, 20 bp, Artificial Sequence
  Description of Artificial Sequence: Synthetic oligonucleotide
  Target: LAMA2; (-) strand; PAM type: YTN; PAM sequence: TTT
ctttagccctttttttacat

SEQ ID NO: 213175 - DNA, 20 bp, Artificial Sequence
  Description of Artificial Sequence: Synthetic oligonucleotide
  Target: LAMA2; (-) strand; PAM type: YTN; PAM sequence: CTT
tctttagccctttttttaca

SEQ ID NO: 213176 - DNA, 20 bp, Artificial Sequence
  Description of Artificial Sequence: Synthetic oligonucleotide
  Target: LAMA2; (-) strand; PAM type: YTN; PAM sequence: TTA
tcctttctttagcccttttt

SEQ ID NO: 213177 - DNA, 20 bp, Artificial Sequence
  Description of Artificial Sequence: Synthetic oligonucleotide
  Target: LAMA2; (-) strand; PAM type: YTN; PAM sequence: CTT
atcctttctttagccctttt

SEQ ID NO: 213178 - DNA, 20 bp, Artificial Sequence
  Description of Artificial Sequence: Synthetic oligonucleotide
  Target: LAMA2; (-) strand; PAM type: YTN; PAM sequence: CTA
cccttatcctttctttagcc

SEQ ID NO: 213179 - DNA, 20 bp, Artificial Sequence
  Description of Artificial Sequence: Synthetic oligonucleotide
  Target: LAMA2; (-) strand; PAM type: YTN; PAM sequence: CTG
actacccttatcctttcttt

SEQ ID NO: 213180 - DNA, 20 bp, Artificial Sequence
  Description of Artificial Sequence: Synthetic oligonucleotide
  Target: LAMA2; (-) strand; PAM type: YTN; PAM sequence: CTG
ctgactacccttatcctttc

SEQ ID NO: 213181 - DNA, 20 bp, Artificial Sequence
  Description of Artificial Sequence: Synthetic oligonucleotide
  Target: LAMA2; (-) strand; PAM type: YTN; PAM sequence: CTG
aatggcctgctgactaccct

SEQ ID NO: 213182 - DNA, 20 bp, Artificial Sequence
  Description of Artificial Sequence: Synthetic oligonucleotide
  Target: LAMA2; (-) strand; PAM type: YTN; PAM sequence: CTC
ctgaatggcctgctgactac

SEQ ID NO: 213183 - DNA, 20 bp, Artificial Sequence
  Description of Artificial Sequence: Synthetic oligonucleotide
  Target: LAMA2; (-) strand; PAM type: YTN; PAM sequence: CTG
caatagcctcctgaatggcc

SEQ ID NO: 213184 - DNA, 20 bp, Artificial Sequence
  Description of Artificial Sequence: Synthetic oligonucleotide
  Target: LAMA2; (-) strand; PAM type: YTN; PAM sequence: CTG
gacatctgcaatagcctcct

SEQ ID NO: 213185 - DNA, 20 bp, Artificial Sequence
  Description of Artificial Sequence: Synthetic oligonucleotide
  Target: LAMA2; (-) strand; PAM type: YTN; PAM sequence: TTG
taacatctggacatctgcaa

SEQ ID NO: 213186 - DNA, 20 bp, Artificial Sequence
  Description of Artificial Sequence: Synthetic oligonucleotide
  Target: LAMA2; (-) strand; PAM type: YTN; PAM sequence: TTT
gtaacatctggacatctgca

SEQ ID NO: 213187 - DNA, 20 bp, Artificial Sequence
  Description of Artificial Sequence: Synthetic oligonucleotide
  Target: LAMA2; (-) strand; PAM type: YTN; PAM sequence: TTG
gggccaagtcacaagcattt

SEQ ID NO: 213188 - DNA, 20 bp, Artificial Sequence
  Description of Artificial Sequence: Synthetic oligonucleotide
  Target: LAMA2; (-) strand; PAM type: YTN; PAM sequence: CTT
ggggccaagtcacaagcatt

SEQ ID NO: 213189 - DNA, 20 bp, Artificial Sequence
  Description of Artificial Sequence: Synthetic oligonucleotide
  Target: LAMA2; (-) strand; PAM type: YTN; PAM sequence: TTG
ccaatacttggggccaagtc

SEQ ID NO: 213190 - DNA, 20 bp, Artificial Sequence
  Description of Artificial Sequence: Synthetic oligonucleotide
  Target: LAMA2; (-) strand; PAM type: YTN; PAM sequence: CTC
cagggtcattgccaatactt

SEQ ID NO: 213191 - DNA, 20 bp, Artificial Sequence
  Description of Artificial Sequence: Synthetic oligonucleotide
  Target: LAMA2; (-) strand; PAM type: YTN; PAM sequence: CTC
tccagggtcattgccaatac

SEQ ID NO: 213192 - DNA, 20 bp, Artificial Sequence
  Description of Artificial Sequence: Synthetic oligonucleotide
  Target: LAMA2; (-) strand; PAM type: YTN; PAM sequence: TTC
tctccagggtcattgccaat

SEQ ID NO: 213193 - DNA, 20 bp, Artificial Sequence
  Description of Artificial Sequence: Synthetic oligonucleotide
  Target: LAMA2; (-) strand; PAM type: YTN; PAM sequence: CTT
ctctccagggtcattgccaa

SEQ ID NO: 213194 - DNA, 20 bp, Artificial Sequence
  Description of Artificial Sequence: Synthetic oligonucleotide
  Target: LAMA2; (-) strand; PAM type: YTN; PAM sequence: CTG
cttctctccagggtcattgc

SEQ ID NO: 213195 - DNA, 20 bp, Artificial Sequence
  Description of Artificial Sequence: Synthetic oligonucleotide
  Target: LAMA2; (-) strand; PAM type: YTN; PAM sequence: CTC
cgaaataaatatcagatcca

SEQ ID NO: 213196 - DNA, 20 bp, Artificial Sequence
  Description of Artificial Sequence: Synthetic oligonucleotide
  Target: LAMA2; (-) strand; PAM type: YTN; PAM sequence: CTA
actccgaaataaatatcaga

SEQ ID NO: 213197 - DNA, 20 bp, Artificial Sequence
  Description of Artificial Sequence: Synthetic oligonucleotide
  Target: LAMA2; (-) strand; PAM type: YTN; PAM sequence: TTA
tgctaactccgaaataaata

SEQ ID NO: 213198 - DNA, 20 bp, Artificial Sequence
  Description of Artificial Sequence: Synthetic oligonucleotide
  Target: LAMA2; (-) strand; PAM type: YTN; PAM sequence: TTC
atattatgctaactccgaaa

SEQ ID NO: 213199 - DNA, 20 bp, Artificial Sequence
  Description of Artificial Sequence: Synthetic oligonucleotide
  Target: LAMA2; (-) strand; PAM type: YTN; PAM sequence: TTT
catattatgctaactccgaa

SEQ ID NO: 213200 - DNA, 20 bp, Artificial Sequence
  Description of Artificial Sequence: Synthetic oligonucleotide
  Target: LAMA2; (-) strand; PAM type: YTN; PAM sequence: TTG
catcatttcatattatgcta

SEQ ID NO: 213201 - DNA, 20 bp, Artificial Sequence
  Description of Artificial Sequence: Synthetic oligonucleotide
  Target: LAMA2; (-) strand; PAM type: YTN; PAM sequence: TTG
atgccattgcatcatttcat

SEQ ID NO: 213202 - DNA, 20 bp, Artificial Sequence
  Description of Artificial Sequence: Synthetic oligonucleotide
  Target: LAMA2; (-) strand; PAM type: YTN; PAM sequence: TTA
ttgatgccattgcatcattt

SEQ ID NO: 213203 - DNA, 20 bp, Artificial Sequence
  Description of Artificial Sequence: Synthetic oligonucleotide
  Target: LAMA2; (-) strand; PAM type: YTN; PAM sequence: CTC
atagagaaaaccgggagtcg

SEQ ID NO: 213204 - DNA, 20 bp, Artificial Sequence
  Description of Artificial Sequence: Synthetic oligonucleotide
  Target: LAMA2; (-) strand; PAM type: YTN; PAM sequence: TTA
cccacccagtgtctcataga

SEQ ID NO: 213205 - DNA, 20 bp, Artificial Sequence
  Description of Artificial Sequence: Synthetic oligonucleotide
  Target: LAMA2; (-) strand; PAM type: YTN; PAM sequence: TTT
acccacccagtgtctcatag

SEQ ID NO: 213206 - DNA, 20 bp, Artificial Sequence
  Description of Artificial Sequence: Synthetic oligonucleotide
  Target: LAMA2; (-) strand; PAM type: YTN; PAM sequence: TTA
gtttacccacccagtgtctc

SEQ ID NO: 213207 - DNA, 20 bp, Artificial Sequence
  Description of Artificial Sequence: Synthetic oligonucleotide
  Target: LAMA2; (-) strand; PAM type: YTN; PAM sequence: CTT
agtttacccacccagtgtct

SEQ ID NO: 213208 - DNA, 20 bp, Artificial Sequence
  Description of Artificial Sequence: Synthetic oligonucleotide
  Target: LAMA2; (-) strand; PAM type: YTN; PAM sequence: CTC
aacacatcttagtttaccca

SEQ ID NO: 213209 - DNA, 20 bp, Artificial Sequence
  Description of Artificial Sequence: Synthetic oligonucleotide
  Target: LAMA2; (-) strand; PAM type: YTN; PAM sequence: CTC
aagctcaacacatcttagtt

SEQ ID NO: 213210 - DNA, 20 bp, Artificial Sequence
  Description of Artificial Sequence: Synthetic oligonucleotide
  Target: LAMA2; (-) strand; PAM type: YTN; PAM sequence: CTC
tcaagctcaacacatcttag

SEQ ID NO: 213211 - DNA, 20 bp, Artificial Sequence
  Description of Artificial Sequence: Synthetic oligonucleotide
  Target: LAMA2; (-) strand; PAM type: YTN; PAM sequence: TTC
tctcaagctcaacacatctt

SEQ ID NO: 213212 - DNA, 20 bp, Artificial Sequence
  Description of Artificial Sequence: Synthetic oligonucleotide
  Target: LAMA2; (-) strand; PAM type: YTN; PAM sequence: CTG
aattctctcaagctcaacac

SEQ ID NO: 213213 - DNA, 20 bp, Artificial Sequence
  Description of Artificial Sequence: Synthetic oligonucleotide
  Target: LAMA2; (-) strand; PAM type: YTN; PAM sequence: CTC
ctgaattctctcaagctcaa

SEQ ID NO: 213214 - DNA, 20 bp, Artificial Sequence
  Description of Artificial Sequence: Synthetic oligonucleotide
  Target: LAMA2; (-) strand; PAM type: YTN; PAM sequence: CTA
ctcctgaattctctcaagct

SEQ ID NO: 213215 - DNA, 20 bp, Artificial Sequence
  Description of Artificial Sequence: Synthetic oligonucleotide
  Target: LAMA2; (-) strand; PAM type: YTN; PAM sequence: TTA
gctactcctgaattctctca

SEQ ID NO: 213216 - DNA, 20 bp, Artificial Sequence
  Description of Artificial Sequence: Synthetic oligonucleotide
  Target: LAMA2; (-) strand; PAM type: YTN; PAM sequence: TTT
agctactcctgaattctctc

SEQ ID NO: 213217 - DNA, 20 bp, Artificial Sequence
  Description of Artificial Sequence: Synthetic oligonucleotide
  Target: LAMA2; (-) strand; PAM type: YTN; PAM sequence: CTA
atccccacccgaagggacac

SEQ ID NO: 213218 - DNA, 20 bp, Artificial Sequence
  Description of Artificial Sequence: Synthetic oligonucleotide
  Target: LAMA2; (-) strand; PAM type: YTN; PAM sequence: TTC
taatccccacccgaagggac

SEQ ID NO: 213219 - DNA, 20 bp, Artificial Sequence
  Description of Artificial Sequence: Synthetic oligonucleotide
  Target: LAMA2; (-) strand; PAM type: YTN; PAM sequence: TTC
agcgttctaatccccacccg

SEQ ID NO: 213220 - DNA, 20 bp, Artificial Sequence
  Description of Artificial Sequence: Synthetic oligonucleotide
  Target: LAMA2; (-) strand; PAM type: YTN; PAM sequence: TTT
cagcgttctaatccccaccc

SEQ ID NO: 213221 - DNA, 20 bp, Artificial Sequence
  Description of Artificial Sequence: Synthetic oligonucleotide
  Target: LAMA2; (-) strand; PAM type: YTN; PAM sequence: TTT
tcagcgttctaatccccacc

SEQ ID NO: 213222 - DNA, 20 bp, Artificial Sequence
  Description of Artificial Sequence: Synthetic oligonucleotide
  Target: LAMA2; (-) strand; PAM type: YTN; PAM sequence: TTC
gtggttttcagcgttctaat

SEQ ID NO: 213223 - DNA, 20 bp, Artificial Sequence
  Description of Artificial Sequence: Synthetic oligonucleotide
  Target: LAMA2; (-) strand; PAM type: YTN; PAM sequence: CTC
caaagtagagttcgtggttt

SEQ ID NO: 213224 - DNA, 20 bp, Artificial Sequence
  Description of Artificial Sequence: Synthetic oligonucleotide
  Target: LAMA2; (-) strand; PAM type: YTN; PAM sequence: CTC
tccaaagtagagttcgtggt

SEQ ID NO: 213225 - DNA, 20 bp, Artificial Sequence
  Description of Artificial Sequence: Synthetic oligonucleotide
  Target: LAMA2; (-) strand; PAM type: YTN; PAM sequence: TTA
ctctccaaagtagagttcgt

SEQ ID NO: 213226 - DNA, 20 bp, Artificial Sequence
  Description of Artificial Sequence: Synthetic oligonucleotide
  Target: LAMA2; (-) strand; PAM type: YTN; PAM sequence: TTA
atattactctccaaagtaga

SEQ ID NO: 213227 - DNA, 20 bp, Artificial Sequence
  Description of Artificial Sequence: Synthetic oligonucleotide
  Target: LAMA2; (-) strand; PAM type: YTN; PAM sequence: TTT
aatattactctccaaagtag

SEQ ID NO: 213228 - DNA, 20 bp, Artificial Sequence
  Description of Artificial Sequence: Synthetic oligonucleotide
  Target: LAMA2; (-) strand; PAM type: YTN; PAM sequence: CTC
aggaacatcacaaatttaat

SEQ ID NO: 213229 - DNA, 20 bp, Artificial Sequence
  Description of Artificial Sequence: Synthetic oligonucleotide
  Target: LAMA2; (-) strand; PAM type: YTN; PAM sequence: TTA
gacgtctcaggaacatcaca

SEQ ID NO: 213230 - DNA, 20 bp, Artificial Sequence
  Description of Artificial Sequence: Synthetic oligonucleotide
  Target: LAMA2; (-) strand; PAM type: YTN; PAM sequence: TTT
agacgtctcaggaacatcac

SEQ ID NO: 213231 - DNA, 20 bp, Artificial Sequence
  Description of Artificial Sequence: Synthetic oligonucleotide
  Target: LAMA2; (-) strand; PAM type: YTN; PAM sequence: TTT
tagacgtctcaggaacatca

SEQ ID NO: 213232 - DNA, 20 bp, Artificial Sequence
  Description of Artificial Sequence: Synthetic oligonucleotide
  Target: LAMA2; (-) strand; PAM type: YTN; PAM sequence: TTT
ttagacgtctcaggaacatc

SEQ ID NO: 213233 - DNA, 20 bp, Artificial Sequence
  Description of Artificial Sequence: Synthetic oligonucleotide
  Target: LAMA2; (-) strand; PAM type: YTN; PAM sequence: TTT
tttagacgtctcaggaacat

SEQ ID NO: 213234 - DNA, 20 bp, Artificial Sequence
  Description of Artificial Sequence: Synthetic oligonucleotide
  Target: LAMA2; (-) strand; PAM type: YTN; PAM sequence: TTT
ttttagacgtctcaggaaca

SEQ ID NO: 213235 - DNA, 20 bp, Artificial Sequence
  Description of Artificial Sequence: Synthetic oligonucleotide
  Target: LAMA2; (-) strand; PAM type: YTN; PAM sequence: CTC
catttttttagacgtctcag

SEQ ID NO: 213236 - DNA, 20 bp, Artificial Sequence
  Description of Artificial Sequence: Synthetic oligonucleotide
  Target: LAMA2; (-) strand; PAM type: YTN; PAM sequence: TTA
aatctccatttttttagacg

SEQ ID NO: 213237 - DNA, 20 bp, Artificial Sequence
  Description of Artificial Sequence: Synthetic oligonucleotide
  Target: LAMA2; (-) strand; PAM type: YTN; PAM sequence: CTG
gttaaatctccattttttta

SEQ ID NO: 213238 - DNA, 20 bp, Artificial Sequence
  Description of Artificial Sequence: Synthetic oligonucleotide
  Target: LAMA2; (-) strand; PAM type: YTN; PAM sequence: CTA
tatatccaaatgcctggtta

SEQ ID NO: 213239 - DNA, 20 bp, Artificial Sequence
  Description of Artificial Sequence: Synthetic oligonucleotide
  Target: LAMA2; (-) strand; PAM type: YTN; PAM sequence: CTG
aaagtatagagctatatatc

SEQ ID NO: 213240 - DNA, 20 bp, Artificial Sequence
  Description of Artificial Sequence: Synthetic oligonucleotide
  Target: LAMA2; (-) strand; PAM type: YTN; PAM sequence: TTC
tgaaagtatagagctatata

SEQ ID NO: 213241 - DNA, 20 bp, Artificial Sequence
  Description of Artificial Sequence: Synthetic oligonucleotide
  Target: LAMA2; (-) strand; PAM type: YTN; PAM sequence: TTT
ctgaaagtatagagctatat

SEQ ID NO: 213242 - DNA, 20 bp, Artificial Sequence
  Description of Artificial Sequence: Synthetic oligonucleotide
  Target: LAMA2; (-) strand; PAM type: YTN; PAM sequence: CTT
tctgaaagtatagagctata

SEQ ID NO: 213243 - DNA, 20 bp, Artificial Sequence
  Description of Artificial Sequence: Synthetic oligonucleotide
  Target: LAMA2; (-) strand; PAM type: YTN; PAM sequence: CTC
cagaccaggtatctttctga

SEQ ID NO: 213244 - DNA, 20 bp, Artificial Sequence
  Description of Artificial Sequence: Synthetic oligonucleotide
  Target: LAMA2; (-) strand; PAM type: YTN; PAM sequence: TTA
tatctccagaccaggtatct

SEQ ID NO: 213245 - DNA, 20 bp, Artificial Sequence
  Description of Artificial Sequence: Synthetic oligonucleotide
  Target: LAMA2; (-) strand; PAM type: YTN; PAM sequence: CTC
ccaagttatatctccagacc

SEQ ID NO: 213246 - DNA, 20 bp, Artificial Sequence
  Description of Artificial Sequence: Synthetic oligonucleotide
  Target: LAMA2; (-) strand; PAM type: YTN; PAM sequence: CTG
tagagtcaataactcccaag

SEQ ID NO: 213247 - DNA, 20 bp, Artificial Sequence
  Description of Artificial Sequence: Synthetic oligonucleotide
  Target: LAMA2; (-) strand; PAM type: YTN; PAM sequence: TTA
cacaccatctgtagagtcaa

SEQ ID NO: 213248 - DNA, 20 bp, Artificial Sequence
  Description of Artificial Sequence: Synthetic oligonucleotide
  Target: LAMA2; (-) strand; PAM type: YTN; PAM sequence: TTT
acacaccatctgtagagtca

SEQ ID NO: 213249 - DNA, 20 bp, Artificial Sequence
  Description of Artificial Sequence: Synthetic oligonucleotide
  Target: LAMA2; (-) strand; PAM type: YTN; PAM sequence: TTC
caacccatttacacaccatc

SEQ ID NO: 213250 - DNA, 20 bp, Artificial Sequence
  Description of Artificial Sequence: Synthetic oligonucleotide
  Target: LAMA2; (-) strand; PAM type: YTN; PAM sequence: CTT
ccaacccatttacacaccat

SEQ ID NO: 213251 - DNA, 20 bp, Artificial Sequence
  Description of Artificial Sequence: Synthetic oligonucleotide
  Target: LAMA2; (-) strand; PAM type: YTN; PAM sequence: TTA
cccacttccaacccatttac

SEQ ID NO: 213252 - DNA, 20 bp, Artificial Sequence
  Description of Artificial Sequence: Synthetic oligonucleotide
  Target: LAMA2; (-) strand; PAM type: YTN; PAM sequence: CTT
acccacttccaacccattta

SEQ ID NO: 213253 - DNA, 20 bp, Artificial Sequence
  Description of Artificial Sequence: Synthetic oligonucleotide
  Target: LAMA2; (-) strand; PAM type: YTN; PAM sequence: TTC
cccaaatcttacccacttcc

SEQ ID NO: 213254 - DNA, 20 bp, Artificial Sequence
  Description of Artificial Sequence: Synthetic oligonucleotide
  Target: LAMA2; (-) strand; PAM type: YTN; PAM sequence: CTT
ccccaaatcttacccacttc

SEQ ID NO: 213255 - DNA, 20 bp, Artificial Sequence
  Description of Artificial Sequence: Synthetic oligonucleotide
  Target: LAMA2; (-) strand; PAM type: YTN; PAM sequence: CTC
ttccccaaatcttacccact

SEQ ID NO: 213256 - DNA, 20 bp, Artificial Sequence
  Description of Artificial Sequence: Synthetic oligonucleotide
  Target: LAMA2; (-) strand; PAM type: YTN; PAM sequence: TTC
tcttccccaaatcttaccca

SEQ ID NO: 213257 - DNA, 20 bp, Artificial Sequence
  Description of Artificial Sequence: Synthetic oligonucleotide
  Target: LAMA2; (-) strand; PAM type: YTN; PAM sequence: CTT
ctcttccccaaatcttaccc

SEQ ID NO: 213258 - DNA, 20 bp, Artificial Sequence
  Description of Artificial Sequence: Synthetic oligonucleotide
  Target: LAMA2; (-) strand; PAM type: YTN; PAM sequence: TTC
ttctcttccccaaatcttac

SEQ ID NO: 213259 - DNA, 20 bp, Artificial Sequence
  Description of Artificial Sequence: Synthetic oligonucleotide
  Target: LAMA2; (-) strand; PAM type: YTN; PAM sequence: TTC
attcttctcttccccaaatc

SEQ ID NO: 213260 - DNA, 20 bp, Artificial Sequence
  Description of Artificial Sequence: Synthetic oligonucleotide
  Target: LAMA2; (-) strand; PAM type: YTN; PAM sequence: TTT
cattcttctcttccccaaat

SEQ ID NO: 213261 - DNA, 20 bp, Artificial Sequence
  Description of Artificial Sequence: Synthetic oligonucleotide
  Target: LAMA2; (-) strand; PAM type: YTN; PAM sequence: TTA
tttcattcttctcttcccca

SEQ ID NO: 213262 - DNA, 20 bp, Artificial Sequence
  Description of Artificial Sequence: Synthetic oligonucleotide
  Target: LAMA2; (-) strand; PAM type: YTN; PAM sequence: CTT
atttcattcttctcttcccc

SEQ ID NO: 213263 - DNA, 20 bp, Artificial Sequence
  Description of Artificial Sequence: Synthetic oligonucleotide
  Target: LAMA2; (-) strand; PAM type: YTN; PAM sequence: TTC
ttatttcattcttctcttcc

SEQ ID NO: 213264 - DNA, 20 bp, Artificial Sequence
  Description of Artificial Sequence: Synthetic oligonucleotide
  Target: LAMA2; (-) strand; PAM type: YTN; PAM sequence: TTT
cttatttcattcttctcttc

SEQ ID NO: 213265 - DNA, 20 bp, Artificial Sequence
  Description of Artificial Sequence: Synthetic oligonucleotide
  Target: LAMA2; (-) strand; PAM type: YTN; PAM sequence: TTT
tcttatttcattcttctctt

SEQ ID NO: 213266 - DNA, 20 bp, Artificial Sequence
  Description of Artificial Sequence: Synthetic oligonucleotide
  Target: LAMA2; (-) strand; PAM type: YTN; PAM sequence: CTG
gatcattttcttatttcatt

SEQ ID NO: 213267 - DNA, 20 bp, Artificial Sequence
  Description of Artificial Sequence: Synthetic oligonucleotide
  Target: LAMA2; (-) strand; PAM type: YTN; PAM sequence: TTA
atcctggatcattttcttat

SEQ ID NO: 213268 - DNA, 20 bp, Artificial Sequence
  Description of Artificial Sequence: Synthetic oligonucleotide
  Target: LAMA2; (-) strand; PAM type: YTN; PAM sequence: CTT
aatcctggatcattttctta

SEQ ID NO: 213269 - DNA, 20 bp, Artificial Sequence
  Description of Artificial Sequence: Synthetic oligonucleotide
  Target: LAMA2; (-) strand; PAM type: YTN; PAM sequence: CTC
agggcttaatcctggatcat

SEQ ID NO: 213270 - DNA, 20 bp, Artificial Sequence
  Description of Artificial Sequence: Synthetic oligonucleotide
  Target: LAMA2; (-) strand; PAM type: YTN; PAM sequence: TTC
ctcagggcttaatcctggat

SEQ ID NO: 213271 - DNA, 20 bp, Artificial Sequence
  Description of Artificial Sequence: Synthetic oligonucleotide
  Target: LAMA2; (-) strand; PAM type: YTN; PAM sequence: TTA
tcgttcctcagggcttaatc

SEQ ID NO: 213272 - DNA, 20 bp, Artificial Sequence
  Description of Artificial Sequence: Synthetic oligonucleotide
  Target: LAMA2; (-) strand; PAM type: YTN; PAM sequence: CTA
ttatcgttcctcagggctta

SEQ ID NO: 213273 - DNA, 20 bp, Artificial Sequence
  Description of Artificial Sequence: Synthetic oligonucleotide
  Target: LAMA2; (-) strand; PAM type: YTN; PAM sequence: TTA
tcagtaactattatcgttcc

SEQ ID NO: 213274 - DNA, 20 bp, Artificial Sequence
  Description of Artificial Sequence: Synthetic oligonucleotide
  Target: LAMA2; (-) strand; PAM type: YTN; PAM sequence: TTT
atcagtaactattatcgttc

SEQ ID NO: 213275 - DNA, 20 bp, Artificial Sequence
  Description of Artificial Sequence: Synthetic oligonucleotide
  Target: LAMA2; (-) strand; PAM type: YTN; PAM sequence: TTT
tatcagtaactattatcgtt

SEQ ID NO: 213276 - DNA, 20 bp, Artificial Sequence
  Description of Artificial Sequence: Synthetic oligonucleotide
  Target: LAMA2; (-) strand; PAM type: YTN; PAM sequence: TTT
ttatcagtaactattatcgt

SEQ ID NO: 213277 - DNA, 20 bp, Artificial Sequence
  Description of Artificial Sequence: Synthetic oligonucleotide
  Target: LAMA2; (-) strand; PAM type: YTN; PAM sequence: TTT
tttatcagtaactattatcg

SEQ ID NO: 213278 - DNA, 20 bp, Artificial Sequence
  Description of Artificial Sequence: Synthetic oligonucleotide
  Target: LAMA2; (-) strand; PAM type: YTN; PAM sequence: TTT
ttttatcagtaactattatc

SEQ ID NO: 213279 - DNA, 20 bp, Artificial Sequence
  Description of Artificial Sequence: Synthetic oligonucleotide
  Target: LAMA2; (-) strand; PAM type: YTN; PAM sequence: TTT
tttttatcagtaactattat

SEQ ID NO: 213280 - DNA, 20 bp, Artificial Sequence
  Description of Artificial Sequence: Synthetic oligonucleotide
  Target: LAMA2; (-) strand; PAM type: YTN; PAM sequence: TTT
ttttttatcagtaactatta

SEQ ID NO: 213281 - DNA, 20 bp, Artificial Sequence
  Description of Artificial Sequence: Synthetic oligonucleotide
  Target: LAMA2; (-) strand; PAM type: YTN; PAM sequence: TTT
tttttttatcagtaactatt

SEQ ID NO: 213282 - DNA, 20 bp, Artificial Sequence
  Description of Artificial Sequence: Synthetic oligonucleotide
  Target: LAMA2; (-) strand; PAM type: YTN; PAM sequence: TTT
ttttttttatcagtaactat

SEQ ID NO: 213283 - DNA, 20 bp, Artificial Sequence
  Description of Artificial Sequence: Synthetic oligonucleotide
  Target: LAMA2; (-) strand; PAM type: YTN; PAM sequence: TTT
tttttttttatcagtaacta

SEQ ID NO: 213284 - DNA, 20 bp, Artificial Sequence
  Description of Artificial Sequence: Synthetic oligonucleotide
  Target: LAMA2; (-) strand; PAM type: YTN; PAM sequence: TTT
ttttttttttatcagtaact

SEQ ID NO: 213285 - DNA, 20 bp, Artificial Sequence
  Description of Artificial Sequence: Synthetic oligonucleotide
  Target: LAMA2; (-) strand; PAM type: YTN; PAM sequence: CTT
tttttttttttatcagtaac

SEQ ID NO: 213286 - DNA, 20 bp, Artificial Sequence
  Description of Artificial Sequence: Synthetic oligonucleotide
  Target: LAMA2; (-) strand; PAM type: YTN; PAM sequence: TTC
tttttttttttttatcagta

SEQ ID NO: 213287 - DNA, 20 bp, Artificial Sequence
  Description of Artificial Sequence: Synthetic oligonucleotide
  Target: LAMA2; (-) strand; PAM type: YTN; PAM sequence: TTT
ctttttttttttttatcagt

SEQ ID NO: 213288 - DNA, 20 bp, Artificial Sequence
  Description of Artificial Sequence: Synthetic oligonucleotide
  Target: LAMA2; (-) strand; PAM type: YTN; PAM sequence: TTT
tctttttttttttttatcag

SEQ ID NO: 213289 - DNA, 20 bp, Artificial Sequence
  Description of Artificial Sequence: Synthetic oligonucleotide
  Target: LAMA2; (-) strand; PAM type: YTN; PAM sequence: CTT
ttctttttttttttttatca

SEQ ID NO: 213290 - DNA, 20 bp, Artificial Sequence
  Description of Artificial Sequence: Synthetic oligonucleotide
  Target: LAMA2; (-) strand; PAM type: YTN; PAM sequence: TTC
ttttctttttttttttttat

SEQ ID NO: 213291 - DNA, 20 bp, Artificial Sequence
  Description of Artificial Sequence: Synthetic oligonucleotide
  Target: LAMA2; (-) strand; PAM type: YTN; PAM sequence: TTC
attcttttcttttttttttt

SEQ ID NO: 213292 - DNA, 20 bp, Artificial Sequence
  Description of Artificial Sequence: Synthetic oligonucleotide
  Target: LAMA2; (-) strand; PAM type: YTN; PAM sequence: CTT
cattcttttctttttttttt

SEQ ID NO: 213293 - DNA, 20 bp, Artificial Sequence
  Description of Artificial Sequence: Synthetic oligonucleotide
  Target: LAMA2; (-) strand; PAM type: YTN; PAM sequence: TTA
cttcattcttttcttttttt

SEQ ID NO: 213294 - DNA, 20 bp, Artificial Sequence
  Description of Artificial Sequence: Synthetic oligonucleotide
  Target: LAMA2; (-) strand; PAM type: YTN; PAM sequence: TTT
acttcattcttttctttttt

SEQ ID NO: 213295 - DNA, 20 bp, Artificial Sequence
  Description of Artificial Sequence: Synthetic oligonucleotide
  Target: LAMA2; (-) strand; PAM type: YTN; PAM sequence: TTC
atttacttcattcttttctt

SEQ ID NO: 213296 - DNA, 20 bp, Artificial Sequence
  Description of Artificial Sequence: Synthetic oligonucleotide
  Target: LAMA2; (-) strand; PAM type: YTN; PAM sequence: TTA
gaaaaaatgaaacagaaaag

SEQ ID NO: 213297 - DNA, 20 bp, Artificial Sequence
  Description of Artificial Sequence: Synthetic oligonucleotide
  Target: LAMA2; (-) strand; PAM type: YTN; PAM sequence: CTT
agaaaaaatgaaacagaaaa

SEQ ID NO: 213298 - DNA, 20 bp, Artificial Sequence
  Description of Artificial Sequence: Synthetic oligonucleotide
  Target: LAMA2; (-) strand; PAM type: YTN; PAM sequence: TTA
aaagacttagaaaaaatgaa

SEQ ID NO: 213299 - DNA, 20 bp, Artificial Sequence
  Description of Artificial Sequence: Synthetic oligonucleotide
  Target: LAMA2; (-) strand; PAM type: YTN; PAM sequence: CTT
aaaagacttagaaaaaatga

SEQ ID NO: 213300 - DNA, 20 bp, Artificial Sequence
  Description of Artificial Sequence: Synthetic oligonucleotide
  Target: LAMA2; (-) strand; PAM type: YTN; PAM sequence: CTG
gcttaaaagacttagaaaaa

SEQ ID NO: 213301 - DNA, 20 bp, Artificial Sequence
  Description of Artificial Sequence: Synthetic oligonucleotide
  Target: LAMA2; (-) strand; PAM type: YTN; PAM sequence: CTC
tggcttaaaagacttagaaa

SEQ ID NO: 213302 - DNA, 20 bp, Artificial Sequence
  Description of Artificial Sequence: Synthetic oligonucleotide
  Target: LAMA2; (-) strand; PAM type: YTN; PAM sequence: TTC
tctggcttaaaagacttaga

SEQ ID NO: 213303 - DNA, 20 bp, Artificial Sequence
  Description of Artificial Sequence: Synthetic oligonucleotide
  Target: LAMA2; (-) strand; PAM type: YTN; PAM sequence: TTT
ctctggcttaaaagacttag

SEQ ID NO: 213304 - DNA, 20 bp, Artificial Sequence
  Description of Artificial Sequence: Synthetic oligonucleotide
  Target: LAMA2; (-) strand; PAM type: YTN; PAM sequence: TTT
tctctggcttaaaagactta

SEQ ID NO: 213305 - DNA, 20 bp, Artificial Sequence
  Description of Artificial Sequence: Synthetic oligonucleotide
  Target: LAMA2; (-) strand; PAM type: YTN; PAM sequence: TTA
tgttttctctggcttaaaag

SEQ ID NO: 213306 - DNA, 20 bp, Artificial Sequence
  Description of Artificial Sequence: Synthetic oligonucleotide
  Target: LAMA2; (-) strand; PAM type: YTN; PAM sequence: TTC
cacattatgttttctctggc

SEQ ID NO: 213307 - DNA, 20 bp, Artificial Sequence
  Description of Artificial Sequence: Synthetic oligonucleotide
  Target: LAMA2; (-) strand; PAM type: YTN; PAM sequence: CTG
ttccacattatgttttctct

SEQ ID NO: 213308 - DNA, 20 bp, Artificial Sequence
  Description of Artificial Sequence: Synthetic oligonucleotide
  Target: LAMA2; (-) strand; PAM type: YTN; PAM sequence: CTA
gtgataaaacacacataaaa

SEQ ID NO: 213309 - DNA, 20 bp, Artificial Sequence
  Description of Artificial Sequence: Synthetic oligonucleotide
  Target: LAMA2; (-) strand; PAM type: YTN; PAM sequence: CTC
tagtgataaaacacacataa

SEQ ID NO: 213310 - DNA, 20 bp, Artificial Sequence
  Description of Artificial Sequence: Synthetic oligonucleotide
  Target: LAMA2; (-) strand; PAM type: YTN; PAM sequence: TTA
tctctagtgataaaacacac

SEQ ID NO: 213311 - DNA, 20 bp, Artificial Sequence
  Description of Artificial Sequence: Synthetic oligonucleotide
  Target: LAMA2; (-) strand; PAM type: YTN; PAM sequence: CTT
atctctagtgataaaacaca

SEQ ID NO: 213312 - DNA, 20 bp, Artificial Sequence
  Description of Artificial Sequence: Synthetic oligonucleotide
  Target: LAMA2; (-) strand; PAM type: YTN; PAM sequence: TTC
ttatctctagtgataaaaca

SEQ ID NO: 213313 - DNA, 20 bp, Artificial Sequence
  Description of Artificial Sequence: Synthetic oligonucleotide
  Target: LAMA2; (-) strand; PAM type: YTN; PAM sequence: TTT
cttatctctagtgataaaac

SEQ ID NO: 213314 - DNA, 20 bp, Artificial Sequence
  Description of Artificial Sequence: Synthetic oligonucleotide
  Target: LAMA2; (-) strand; PAM type: YTN; PAM sequence: TTG
acaatttcttatctctagtg

SEQ ID NO: 213315 - DNA, 20 bp, Artificial Sequence
  Description of Artificial Sequence: Synthetic oligonucleotide
  Target: LAMA2; (-) strand; PAM type: YTN; PAM sequence: CTT
gacaatttcttatctctagt

SEQ ID NO: 213316 - DNA, 20 bp, Artificial Sequence
  Description of Artificial Sequence: Synthetic oligonucleotide
  Target: LAMA2; (-) strand; PAM type: YTN; PAM sequence: TTA
aggacagcttgacaatttct

SEQ ID NO: 213317 - DNA, 20 bp, Artificial Sequence
  Description of Artificial Sequence: Synthetic oligonucleotide
  Target: LAMA2; (-) strand; PAM type: YTN; PAM sequence: CTT
aaggacagcttgacaatttc

SEQ ID NO: 213318 - DNA, 20 bp, Artificial Sequence
  Description of Artificial Sequence: Synthetic oligonucleotide
  Target: LAMA2; (-) strand; PAM type: YTN; PAM sequence: CTG
gtccttaaggacagcttgac

SEQ ID NO: 213319 - DNA, 20 bp, Artificial Sequence
  Description of Artificial Sequence: Synthetic oligonucleotide
  Target: LAMA2; (-) strand; PAM type: YTN; PAM sequence: CTC
cctggtccttaaggacagct

SEQ ID NO: 213320 - DNA, 20 bp, Artificial Sequence
  Description of Artificial Sequence: Synthetic oligonucleotide
  Target: LAMA2; (-) strand; PAM type: YTN; PAM sequence: TTC
cccatgggccctccctggtc

SEQ ID NO: 213321 - DNA, 20 bp, Artificial Sequence
  Description of Artificial Sequence: Synthetic oligonucleotide
  Target: LAMA2; (-) strand; PAM type: YTN; PAM sequence: CTG
ttccccatgggccctccctg

SEQ ID NO: 213322 - DNA, 20 bp, Artificial Sequence
  Description of Artificial Sequence: Synthetic oligonucleotide
  Target: LAMA2; (-) strand; PAM type: YTN; PAM sequence: TTG
atgaatacaacagcatcagg

SEQ ID NO: 213323 - DNA, 20 bp, Artificial Sequence
  Description of Artificial Sequence: Synthetic oligonucleotide
  Target: LAMA2; (-) strand; PAM type: YTN; PAM sequence: TTT
gatgaatacaacagcatcag

SEQ ID NO: 213324 - DNA, 20 bp, Artificial Sequence
  Description of Artificial Sequence: Synthetic oligonucleotide
  Target: LAMA2; (-) strand; PAM type: YTN; PAM sequence: CTT
tgatgaatacaacagcatca

SEQ ID NO: 213325 - DNA, 20 bp, Artificial Sequence
  Description of Artificial Sequence: Synthetic oligonucleotide
  Target: LAMA2; (-) strand; PAM type: YTN; PAM sequence: CTA
tgctttgatgaatacaacag

SEQ ID NO: 213326 - DNA, 20 bp, Artificial Sequence
  Description of Artificial Sequence: Synthetic oligonucleotide
  Target: LAMA2; (-) strand; PAM type: YTN; PAM sequence: CTC
atctatgctttgatgaatac

SEQ ID NO: 213327 - DNA, 20 bp, Artificial Sequence
  Description of Artificial Sequence: Synthetic oligonucleotide
  Target: LAMA2; (-) strand; PAM type: YTN; PAM sequence: CTC
aaacaaaaatatcagaagag

SEQ ID NO: 213328 - DNA, 20 bp, Artificial Sequence
  Description of Artificial Sequence: Synthetic oligonucleotide
  Target: LAMA2; (-) strand; PAM type: YTN; PAM sequence: TTC
ctcaaacaaaaatatcagaa

SEQ ID NO: 213329 - DNA, 20 bp, Artificial Sequence
  Description of Artificial Sequence: Synthetic oligonucleotide
  Target: LAMA2; (-) strand; PAM type: YTN; PAM sequence: TTC
atgttcctcaaacaaaaata

SEQ ID NO: 213330 - DNA, 20 bp, Artificial Sequence
  Description of Artificial Sequence: Synthetic oligonucleotide
  Target: LAMA2; (-) strand; PAM type: YTN; PAM sequence: TTA
tattcatgttcctcaaacaa

SEQ ID NO: 213331 - DNA, 20 bp, Artificial Sequence
  Description of Artificial Sequence: Synthetic oligonucleotide
  Target: LAMA2; (-) strand; PAM type: YTN; PAM sequence: CTT
atattcatgttcctcaaaca

SEQ ID NO: 213332 - DNA, 20 bp, Artificial Sequence
  Description of Artificial Sequence: Synthetic oligonucleotide
  Target: LAMA2; (-) strand; PAM type: YTN; PAM sequence: CTA
ggagcatgagcttatattca

SEQ ID NO: 213333 - DNA, 20 bp, Artificial Sequence
  Description of Artificial Sequence: Synthetic oligonucleotide
  Target: LAMA2; (-) strand; PAM type: YTN; PAM sequence: CTA
tgctaggagcatgagcttat

SEQ ID NO: 213334 - DNA, 20 bp, Artificial Sequence
  Description of Artificial Sequence: Synthetic oligonucleotide
  Target: LAMA2; (-) strand; PAM type: YTN; PAM sequence: TTG
ctatgctaggagcatgagct

SEQ ID NO: 213335 - DNA, 20 bp, Artificial Sequence
  Description of Artificial Sequence: Synthetic oligonucleotide
  Target: LAMA2; (-) strand; PAM type: YTN; PAM sequence: CTA
attgctatgctaggagcatg

SEQ ID NO: 213336 - DNA, 20 bp, Artificial Sequence
  Description of Artificial Sequence: Synthetic oligonucleotide
  Target: LAMA2; (-) strand; PAM type: YTN; PAM sequence: CTA
aactaattgctatgctagga

SEQ ID NO: 213337 - DNA, 20 bp, Artificial Sequence
  Description of Artificial Sequence: Synthetic oligonucleotide
  Target: LAMA2; (-) strand; PAM type: YTN; PAM sequence: CTC
taaactaattgctatgctag

SEQ ID NO: 213338 - DNA, 20 bp, Artificial Sequence
  Description of Artificial Sequence: Synthetic oligonucleotide
  Target: LAMA2; (-) strand; PAM type: YTN; PAM sequence: TTC
aaaaaataaaaataaaacaa

SEQ ID NO: 213339 - DNA, 20 bp, Artificial Sequence
  Description of Artificial Sequence: Synthetic oligonucleotide
  Target: LAMA2; (-) strand; PAM type: YTN; PAM sequence: TTA
ataattcaaaaaataaaaat

SEQ ID NO: 213340 - DNA, 20 bp, Artificial Sequence
  Description of Artificial Sequence: Synthetic oligonucleotide
  Target: LAMA2; (-) strand; PAM type: YTN; PAM sequence: CTG
cagttaataattcaaaaaat

SEQ ID NO: 213341 - DNA, 20 bp, Artificial Sequence
  Description of Artificial Sequence: Synthetic oligonucleotide
  Target: LAMA2; (-) strand; PAM type: YTN; PAM sequence: TTG
tctgcagttaataattcaaa

SEQ ID NO: 213342 - DNA, 20 bp, Artificial Sequence
  Description of Artificial Sequence: Synthetic oligonucleotide
  Target: LAMA2; (-) strand; PAM type: YTN; PAM sequence: TTT
gtctgcagttaataattcaa

SEQ ID NO: 213343 - DNA, 20 bp, Artificial Sequence
  Description of Artificial Sequence: Synthetic oligonucleotide
  Target: LAMA2; (-) strand; PAM type: YTN; PAM sequence: CTT
tgtctgcagttaataattca

SEQ ID NO: 213344 - DNA, 20 bp, Artificial Sequence
  Description of Artificial Sequence: Synthetic oligonucleotide
  Target: LAMA2; (-) strand; PAM type: YTN; PAM sequence: TTA
gggctttgtctgcagttaat

SEQ ID NO: 213345 - DNA, 20 bp, Artificial Sequence
  Description of Artificial Sequence: Synthetic oligonucleotide
  Target: LAMA2; (-) strand; PAM type: YTN; PAM sequence: TTT
agggctttgtctgcagttaa

SEQ ID NO: 213346 - DNA, 20 bp, Artificial Sequence
  Description of Artificial Sequence: Synthetic oligonucleotide
  Target: LAMA2; (-) strand; PAM type: YTN; PAM sequence: TTG
tgatatagaaaacaaaaaaa

SEQ ID NO: 213347 - DNA, 20 bp, Artificial Sequence
  Description of Artificial Sequence: Synthetic oligonucleotide
  Target: LAMA2; (-) strand; PAM type: YTN; PAM sequence: CTT
gtgatatagaaaacaaaaaa

SEQ ID NO: 213348 - DNA, 20 bp, Artificial Sequence
  Description of Artificial Sequence: Synthetic oligonucleotide
  Target: LAMA2; (-) strand; PAM type: YTN; PAM sequence: TTA
aaccaaaaaaaggtacttgt

SEQ ID NO: 213349 - DNA, 20 bp, Artificial Sequence
  Description of Artificial Sequence: Synthetic oligonucleotide
  Target: LAMA2; (-) strand; PAM type: YTN; PAM sequence: CTT
aaaccaaaaaaaggtacttg

SEQ ID NO: 213350 - DNA, 20 bp, Artificial Sequence
  Description of Artificial Sequence: Synthetic oligonucleotide
  Target: LAMA2; (-) strand; PAM type: YTN; PAM sequence: TTA
gaaccttaaaccaaaaaaag

SEQ ID NO: 213351 - DNA, 20 bp, Artificial Sequence
  Description of Artificial Sequence: Synthetic oligonucleotide
  Target: LAMA2; (-) strand; PAM type: YTN; PAM sequence: TTT
agaaccttaaaccaaaaaaa

SEQ ID NO: 213352 - DNA, 20 bp, Artificial Sequence
  Description of Artificial Sequence: Synthetic oligonucleotide
  Target: LAMA2; (-) strand; PAM type: YTN; PAM sequence: TTC
aagtcacggaaaatgaaatt

SEQ ID NO: 213353 - DNA, 20 bp, Artificial Sequence
  Description of Artificial Sequence: Synthetic oligonucleotide
  Target: LAMA2; (-) strand; PAM type: YTN; PAM sequence: TTT
caagtcacggaaaatgaaat

SEQ ID NO: 213354 - DNA, 20 bp, Artificial Sequence
  Description of Artificial Sequence: Synthetic oligonucleotide
  Target: LAMA2; (-) strand; PAM type: YTN; PAM sequence: CTC
aaaatataaagcaaggagag

SEQ ID NO: 213355 - DNA, 20 bp, Artificial Sequence
  Description of Artificial Sequence: Synthetic oligonucleotide
  Target: LAMA2; (-) strand; PAM type: YTN; PAM sequence: TTA
gtgtgtaaactcaaaatata

SEQ ID NO: 213356 - DNA, 20 bp, Artificial Sequence
  Description of Artificial Sequence: Synthetic oligonucleotide
  Target: LAMA2; (-) strand; PAM type: YTN; PAM sequence: TTG
gcaggttagtgtgtaaactc

SEQ ID NO: 213357 - DNA, 20 bp, Artificial Sequence
  Description of Artificial Sequence: Synthetic oligonucleotide
  Target: LAMA2; (-) strand; PAM type: YTN; PAM sequence: TTT
ggcaggttagtgtgtaaact

SEQ ID NO: 213358 - DNA, 20 bp, Artificial Sequence
  Description of Artificial Sequence: Synthetic oligonucleotide
  Target: LAMA2; (-) strand; PAM type: YTN; PAM sequence: CTT
tggcaggttagtgtgtaaac

SEQ ID NO: 213359 - DNA, 20 bp, Artificial Sequence
  Description of Artificial Sequence: Synthetic oligonucleotide
  Target: LAMA2; (-) strand; PAM type: YTN; PAM sequence: CTC
tttggcaggttagtgtgtaa

SEQ ID NO: 213360 - DNA, 20 bp, Artificial Sequence
  Description of Artificial Sequence: Synthetic oligonucleotide
  Target: LAMA2; (-) strand; PAM type: YTN; PAM sequence: CTA
gatgtctctttggcaggtta

SEQ ID NO: 213361 - DNA, 20 bp, Artificial Sequence
  Description of Artificial Sequence: Synthetic oligonucleotide
  Target: LAMA2; (-) strand; PAM type: YTN; PAM sequence: CTA
taaactagatgtctctttgg

SEQ ID NO: 213362 - DNA, 20 bp, Artificial Sequence
  Description of Artificial Sequence: Synthetic oligonucleotide
  Target: LAMA2; (-) strand; PAM type: YTN; PAM sequence: TTC
caaaatcaagcctataaact

SEQ ID NO: 213363 - DNA, 20 bp, Artificial Sequence
  Description of Artificial Sequence: Synthetic oligonucleotide
  Target: LAMA2; (-) strand; PAM type: YTN; PAM sequence: CTT
ccaaaatcaagcctataaac

SEQ ID NO: 213364 - DNA, 20 bp, Artificial Sequence
  Description of Artificial Sequence: Synthetic oligonucleotide
  Target: LAMA2; (-) strand; PAM type: YTN; PAM sequence: TTC
ttccaaaatcaagcctataa

SEQ ID NO: 213365 - DNA, 20 bp, Artificial Sequence
  Description of Artificial Sequence: Synthetic oligonucleotide
  Target: LAMA2; (-) strand; PAM type: YTN; PAM sequence: TTT
cttccaaaatcaagcctata

SEQ ID NO: 213366 - DNA, 20 bp, Artificial Sequence
  Description of Artificial Sequence: Synthetic oligonucleotide
  Target: LAMA2; (-) strand; PAM type: YTN; PAM sequence: CTT
tcttccaaaatcaagcctat

SEQ ID NO: 213367 - DNA, 20 bp, Artificial Sequence
  Description of Artificial Sequence: Synthetic oligonucleotide
  Target: LAMA2; (-) strand; PAM type: YTN; PAM sequence: CTG
tctttcttccaaaatcaagc

SEQ ID NO: 213368 - DNA, 20 bp, Artificial Sequence
  Description of Artificial Sequence: Synthetic oligonucleotide
  Target: LAMA2; (-) strand; PAM type: YTN; PAM sequence: TTC
tgtctttcttccaaaatcaa

SEQ ID NO: 213369 - DNA, 20 bp, Artificial Sequence
  Description of Artificial Sequence: Synthetic oligonucleotide
  Target: LAMA2; (-) strand; PAM type: YTN; PAM sequence: CTT
ctgtctttcttccaaaatca

SEQ ID NO: 213370 - DNA, 20 bp, Artificial Sequence
  Description of Artificial Sequence: Synthetic oligonucleotide
  Target: LAMA2; (-) strand; PAM type: YTN; PAM sequence: CTC
ttctgtctttcttccaaaat

SEQ ID NO: 213371 - DNA, 20 bp, Artificial Sequence
  Description of Artificial Sequence: Synthetic oligonucleotide
  Target: LAMA2; (-) strand; PAM type: YTN; PAM sequence: CTC
tcttctgtctttcttccaaa

SEQ ID NO: 213372 - DNA, 20 bp, Artificial Sequence
  Description of Artificial Sequence: Synthetic oligonucleotide
  Target: LAMA2; (-) strand; PAM type: YTN; PAM sequence: CTG
ctctcttctgtctttcttcc

SEQ ID NO: 213373 - DNA, 20 bp, Artificial Sequence
  Description of Artificial Sequence: Synthetic oligonucleotide
  Target: LAMA2; (-) strand; PAM type: YTN; PAM sequence: TTC
agtatctgctctcttctgtc

SEQ ID NO: 213374 - DNA, 20 bp, Artificial Sequence
  Description of Artificial Sequence: Synthetic oligonucleotide
  Target: LAMA2; (-) strand; PAM type: YTN; PAM sequence: TTC
atcaatatcagcggaacata

SEQ ID NO: 213375 - DNA, 20 bp, Artificial Sequence
  Description of Artificial Sequence: Synthetic oligonucleotide
  Target: LAMA2; (-) strand; PAM type: YTN; PAM sequence: CTT
catcaatatcagcggaacat

SEQ ID NO: 213376 - DNA, 20 bp, Artificial Sequence
  Description of Artificial Sequence: Synthetic oligonucleotide
  Target: LAMA2; (-) strand; PAM type: YTN; PAM sequence: CTC
acttcatcaatatcagcgga

SEQ ID NO: 213377 - DNA, 20 bp, Artificial Sequence
  Description of Artificial Sequence: Synthetic oligonucleotide
  Target: LAMA2; (-) strand; PAM type: YTN; PAM sequence: TTC
caacctcacttcatcaatat

SEQ ID NO: 213378 - DNA, 20 bp, Artificial Sequence
  Description of Artificial Sequence: Synthetic oligonucleotide
  Target: LAMA2; (-) strand; PAM type: YTN; PAM sequence: CTT
ccaacctcacttcatcaata

SEQ ID NO: 213379 - DNA, 20 bp, Artificial Sequence
  Description of Artificial Sequence: Synthetic oligonucleotide
  Target: LAMA2; (-) strand; PAM type: YTN; PAM sequence: TTC
ttccaacctcacttcatcaa

SEQ ID NO: 213380 - DNA, 20 bp, Artificial Sequence
  Description of Artificial Sequence: Synthetic oligonucleotide
  Target: LAMA2; (-) strand; PAM type: YTN; PAM sequence: CTT
cttccaacctcacttcatca

SEQ ID NO: 213381 - DNA, 20 bp, Artificial Sequence
  Description of Artificial Sequence: Synthetic oligonucleotide
  Target: LAMA2; (-) strand; PAM type: YTN; PAM sequence: TTC
caagcttcttccaacctcac

SEQ ID NO: 213382 - DNA, 20 bp, Artificial Sequence
  Description of Artificial Sequence: Synthetic oligonucleotide
  Target: LAMA2; (-) strand; PAM type: YTN; PAM sequence: CTT
ccaagcttcttccaacctca

SEQ ID NO: 213383 - DNA, 20 bp, Artificial Sequence
  Description of Artificial Sequence: Synthetic oligonucleotide
  Target: LAMA2; (-) strand; PAM type: YTN; PAM sequence: CTG
cttccaagcttcttccaacc

SEQ ID NO: 213384 - DNA, 20 bp, Artificial Sequence
  Description of Artificial Sequence: Synthetic oligonucleotide
  Target: LAMA2; (-) strand; PAM type: YTN; PAM sequence: TTG
gagagaaatagactgcttcc

SEQ ID NO: 213385 - DNA, 20 bp, Artificial Sequence
  Description of Artificial Sequence: Synthetic oligonucleotide
  Target: LAMA2; (-) strand; PAM type: YTN; PAM sequence: TTC
atagagggggtggcagttgg

SEQ ID NO: 213386 - DNA, 20 bp, Artificial Sequence
  Description of Artificial Sequence: Synthetic oligonucleotide
  Target: LAMA2; (-) strand; PAM type: YTN; PAM sequence: TTC
cagcataagggtacccaaaa

SEQ ID NO: 213387 - DNA, 20 bp, Artificial Sequence
  Description of Artificial Sequence: Synthetic oligonucleotide
  Target: LAMA2; (-) strand; PAM type: YTN; PAM sequence: TTG
gaatgttccagcataagggt

SEQ ID NO: 213388 - DNA, 20 bp, Artificial Sequence
  Description of Artificial Sequence: Synthetic oligonucleotide
  Target: LAMA2; (-) strand; PAM type: YTN; PAM sequence: TTT
ggaatgttccagcataaggg

SEQ ID NO: 213389 - DNA, 20 bp, Artificial Sequence
  Description of Artificial Sequence: Synthetic oligonucleotide
  Target: LAMA2; (-) strand; PAM type: YTN; PAM sequence: TTA
tttggaatgttccagcataa

SEQ ID NO: 213390 - DNA, 20 bp, Artificial Sequence
  Description of Artificial Sequence: Synthetic oligonucleotide
  Target: LAMA2; (-) strand; PAM type: YTN; PAM sequence: CTT
atttggaatgttccagcata

SEQ ID NO: 213391 - DNA, 20 bp, Artificial Sequence
  Description of Artificial Sequence: Synthetic oligonucleotide
  Target: LAMA2; (-) strand; PAM type: YTN; PAM sequence: CTG
gggcacttatttggaatgtt

SEQ ID NO: 213392 - DNA, 20 bp, Artificial Sequence
  Description of Artificial Sequence: Synthetic oligonucleotide
  Target: LAMA2; (-) strand; PAM type: YTN; PAM sequence: TTA
tgagaaaaaaaaaaaaccca

SEQ ID NO: 213393 - DNA, 20 bp, Artificial Sequence
  Description of Artificial Sequence: Synthetic oligonucleotide
  Target: LAMA2; (-) strand; PAM type: YTN; PAM sequence: TTC
agaatcattatgagaaaaaa

SEQ ID NO: 213394 - DNA, 20 bp, Artificial Sequence
  Description of Artificial Sequence: Synthetic oligonucleotide
  Target: LAMA2; (-) strand; PAM type: YTN; PAM sequence: TTT
cagaatcattatgagaaaaa

SEQ ID NO: 213395 - DNA, 20 bp, Artificial Sequence
  Description of Artificial Sequence: Synthetic oligonucleotide
  Target: LAMA2; (-) strand; PAM type: YTN; PAM sequence: CTT
tcagaatcattatgagaaaa

SEQ ID NO: 213396 - DNA, 20 bp, Artificial Sequence
  Description of Artificial Sequence: Synthetic oligonucleotide
  Target: LAMA2; (-) strand; PAM type: YTN; PAM sequence: CTA
aatcatcccaaaggctttca

SEQ ID NO: 213397 - DNA, 20 bp, Artificial Sequence
  Description of Artificial Sequence: Synthetic oligonucleotide
  Target: LAMA2; (-) strand; PAM type: YTN; PAM sequence: TTG
tagaacaatcctaaatcatc

SEQ ID NO: 213398 - DNA, 20 bp, Artificial Sequence
  Description of Artificial Sequence: Synthetic oligonucleotide
  Target: LAMA2; (-) strand; PAM type: YTN; PAM sequence: CTT
gtagaacaatcctaaatcat

SEQ ID NO: 213399 - DNA, 20 bp, Artificial Sequence
  Description of Artificial Sequence: Synthetic oligonucleotide
  Target: LAMA2; (-) strand; PAM type: YTN; PAM sequence: TTC
cacttgtagaacaatcctaa

SEQ ID NO: 213400 - DNA, 20 bp, Artificial Sequence
  Description of Artificial Sequence: Synthetic oligonucleotide
  Target: LAMA2; (-) strand; PAM type: YTN; PAM sequence: TTA
tgttccacttgtagaacaat

SEQ ID NO: 213401 - DNA, 20 bp, Artificial Sequence
  Description of Artificial Sequence: Synthetic oligonucleotide
  Target: LAMA2; (-) strand; PAM type: YTN; PAM sequence: TTT
atgttccacttgtagaacaa

SEQ ID NO: 213402 - DNA, 20 bp, Artificial Sequence
  Description of Artificial Sequence: Synthetic oligonucleotide
  Target: LAMA2; (-) strand; PAM type: YTN; PAM sequence: TTG
gtttatgttccacttgtaga

SEQ ID NO: 213403 - DNA, 20 bp, Artificial Sequence
  Description of Artificial Sequence: Synthetic oligonucleotide
  Target: LAMA2; (-) strand; PAM type: YTN; PAM sequence: TTT
ggtttatgttccacttgtag

SEQ ID NO: 213404 - DNA, 20 bp, Artificial Sequence
  Description of Artificial Sequence: Synthetic oligonucleotide
  Target: LAMA2; (-) strand; PAM type: YTN; PAM sequence: TTT
tggtttatgttccacttgta

SEQ ID NO: 213405 - DNA, 20 bp, Artificial Sequence
  Description of Artificial Sequence: Synthetic oligonucleotide
  Target: LAMA2; (-) strand; PAM type: YTN; PAM sequence: TTG
ttttggtttatgttccactt

SEQ ID NO: 213406 - DNA, 20 bp, Artificial Sequence
  Description of Artificial Sequence: Synthetic oligonucleotide
  Target: LAMA2; (-) strand; PAM type: YTN; PAM sequence: TTT
gttttggtttatgttccact

SEQ ID NO: 213407 - DNA, 20 bp, Artificial Sequence
  Description of Artificial Sequence: Synthetic oligonucleotide
  Target: LAMA2; (-) strand; PAM type: YTN; PAM sequence: CTT
tgttttggtttatgttccac

SEQ ID NO: 213408 - DNA, 20 bp, Artificial Sequence
  Description of Artificial Sequence: Synthetic oligonucleotide
  Target: LAMA2; (-) strand; PAM type: YTN; PAM sequence: CTG
ctttgttttggtttatgttc

SEQ ID NO: 213409 - DNA, 20 bp, Artificial Sequence
  Description of Artificial Sequence: Synthetic oligonucleotide
  Target: LAMA2; (-) strand; PAM type: YTN; PAM sequence: TTA
gagtccacgaactgctttgt

SEQ ID NO: 213410 - DNA, 20 bp, Artificial Sequence
  Description of Artificial Sequence: Synthetic oligonucleotide
  Target: LAMA2; (-) strand; PAM type: YTN; PAM sequence: TTA
aaattagagtccacgaactg

SEQ ID NO: 213411 - DNA, 20 bp, Artificial Sequence
  Description of Artificial Sequence: Synthetic oligonucleotide
  Target: LAMA2; (-) strand; PAM type: YTN; PAM sequence: TTT
aaaattagagtccacgaact

SEQ ID NO: 213412 - DNA, 20 bp, Artificial Sequence
  Description of Artificial Sequence: Synthetic oligonucleotide
  Target: LAMA2; (-) strand; PAM type: YTN; PAM sequence: CTC
atccatcacccatttaaaat

SEQ ID NO: 213413 - DNA, 20 bp, Artificial Sequence
  Description of Artificial Sequence: Synthetic oligonucleotide
  Target: LAMA2; (-) strand; PAM type: YTN; PAM sequence: TTG
aaatctcatccatcacccat

SEQ ID NO: 213414 - DNA, 20 bp, Artificial Sequence
  Description of Artificial Sequence: Synthetic oligonucleotide
  Target: LAMA2; (-) strand; PAM type: YTN; PAM sequence: TTG
cattgaaatctcatccatca

SEQ ID NO: 213415 - DNA, 20 bp, Artificial Sequence
  Description of Artificial Sequence: Synthetic oligonucleotide
  Target: LAMA2; (-) strand; PAM type: YTN; PAM sequence: TTT
gcattgaaatctcatccatc

SEQ ID NO: 213416 - DNA, 20 bp, Artificial Sequence
  Description of Artificial Sequence: Synthetic oligonucleotide
  Target: LAMA2; (-) strand; PAM type: YTN; PAM sequence: TTA
caatttgcattgaaatctca

SEQ ID NO: 213417 - DNA, 20 bp, Artificial Sequence
  Description of Artificial Sequence: Synthetic oligonucleotide
  Target: LAMA2; (-) strand; PAM type: YTN; PAM sequence: TTT
acaatttgcattgaaatctc

SEQ ID NO: 213418 - DNA, 20 bp, Artificial Sequence
  Description of Artificial Sequence: Synthetic oligonucleotide
  Target: LAMA2; (-) strand; PAM type: YTN; PAM sequence: CTT
tacaatttgcattgaaatct

SEQ ID NO: 213419 - DNA, 20 bp, Artificial Sequence
  Description of Artificial Sequence: Synthetic oligonucleotide
  Target: LAMA2; (-) strand; PAM type: YTN; PAM sequence: TTC
agtctttacaatttgcattg

SEQ ID NO: 213420 - DNA, 20 bp, Artificial Sequence
  Description of Artificial Sequence: Synthetic oligonucleotide
  Target: LAMA2; (-) strand; PAM type: YTN; PAM sequence: TTT
cagtctttacaatttgcatt

SEQ ID NO: 213421 - DNA, 20 bp, Artificial Sequence
  Description of Artificial Sequence: Synthetic oligonucleotide
  Target: LAMA2; (-) strand; PAM type: YTN; PAM sequence: TTT
tcagtctttacaatttgcat

SEQ ID NO: 213422 - DNA, 20 bp, Artificial Sequence
  Description of Artificial Sequence: Synthetic oligonucleotide
  Target: LAMA2; (-) strand; PAM type: YTN; PAM sequence: CTG
gtcacatcattttcagtctt

SEQ ID NO: 213423 - DNA, 20 bp, Artificial Sequence
  Description of Artificial Sequence: Synthetic oligonucleotide
  Target: LAMA2; (-) strand; PAM type: YTN; PAM sequence: CTC
tggtcacatcattttcagtc

SEQ ID NO: 213424 - DNA, 20 bp, Artificial Sequence
  Description of Artificial Sequence: Synthetic oligonucleotide
  Target: LAMA2; (-) strand; PAM type: YTN; PAM sequence: TTC
tctggtcacatcattttcag

SEQ ID NO: 213425 - DNA, 20 bp, Artificial Sequence
  Description of Artificial Sequence: Synthetic oligonucleotide
  Target: LAMA2; (-) strand; PAM type: YTN; PAM sequence: CTT
ctctggtcacatcattttca

SEQ ID NO: 213426 - DNA, 20 bp, Artificial Sequence
  Description of Artificial Sequence: Synthetic oligonucleotide
  Target: LAMA2; (-) strand; PAM type: YTN; PAM sequence: CTA
ggggtcccttctctggtcac

SEQ ID NO: 213427 - DNA, 20 bp, Artificial Sequence
  Description of Artificial Sequence: Synthetic oligonucleotide
  Target: LAMA2; (-) strand; PAM type: YTN; PAM sequence: CTA
tctaggggtcccttctctgg

SEQ ID NO: 213428 - DNA, 20 bp, Artificial Sequence
  Description of Artificial Sequence: Synthetic oligonucleotide
  Target: LAMA2; (-) strand; PAM type: YTN; PAM sequence: TTA
ctatctaggggtcccttctc

SEQ ID NO: 213429 - DNA, 20 bp, Artificial Sequence
  Description of Artificial Sequence: Synthetic oligonucleotide
  Target: LAMA2; (-) strand; PAM type: YTN; PAM sequence: CTT
actatctaggggtcccttct

SEQ ID NO: 213430 - DNA, 20 bp, Artificial Sequence
  Description of Artificial Sequence: Synthetic oligonucleotide
  Target: LAMA2; (-) strand; PAM type: YTN; PAM sequence: TTG
agtacttactatctaggggt

SEQ ID NO: 213431 - DNA, 20 bp, Artificial Sequence
  Description of Artificial Sequence: Synthetic oligonucleotide
  Target: LAMA2; (-) strand; PAM type: YTN; PAM sequence: TTA
ttgagtacttactatctagg

SEQ ID NO: 213432 - DNA, 20 bp, Artificial Sequence
  Description of Artificial Sequence: Synthetic oligonucleotide
  Target: LAMA2; (-) strand; PAM type: YTN; PAM sequence: TTT
attgagtacttactatctag

SEQ ID NO: 213433 - DNA, 20 bp, Artificial Sequence
  Description of Artificial Sequence: Synthetic oligonucleotide
  Target: LAMA2; (-) strand; PAM type: YTN; PAM sequence: CTG
tcatttattgagtacttact

SEQ ID NO: 213434 - DNA, 20 bp, Artificial Sequence
  Description of Artificial Sequence: Synthetic oligonucleotide
  Target: LAMA2; (-) strand; PAM type: YTN; PAM sequence: TTC
tgtcatttattgagtactta

SEQ ID NO: 213435 - DNA, 20 bp, Artificial Sequence
  Description of Artificial Sequence: Synthetic oligonucleotide
  Target: LAMA2; (-) strand; PAM type: YTN; PAM sequence: CTT
ctgtcatttattgagtactt

SEQ ID NO: 213436 - DNA, 20 bp, Artificial Sequence
  Description of Artificial Sequence: Synthetic oligonucleotide
  Target: LAMA2; (-) strand; PAM type: YTN; PAM sequence: CTG
cttctgtcatttattgagta

SEQ ID NO: 213437 - DNA, 20 bp, Artificial Sequence
  Description of Artificial Sequence: Synthetic oligonucleotide
  Target: LAMA2; (-) strand; PAM type: YTN; PAM sequence: CTA
taccctgcttctgtcattta

SEQ ID NO: 213438 - DNA, 20 bp, Artificial Sequence
  Description of Artificial Sequence: Synthetic oligonucleotide
  Target: LAMA2; (-) strand; PAM type: YTN; PAM sequence: TTC
atactataccctgcttctgt

SEQ ID NO: 213439 - DNA, 20 bp, Artificial Sequence
  Description of Artificial Sequence: Synthetic oligonucleotide
  Target: LAMA2; (-) strand; PAM type: YTN; PAM sequence: TTC
ccaagaaacaggttcatact

SEQ ID NO: 213440 - DNA, 20 bp, Artificial Sequence
  Description of Artificial Sequence: Synthetic oligonucleotide
  Target: LAMA2; (-) strand; PAM type: YTN; PAM sequence: TTT
cccaagaaacaggttcatac

SEQ ID NO: 213441 - DNA, 20 bp, Artificial Sequence
  Description of Artificial Sequence: Synthetic oligonucleotide
  Target: LAMA2; (-) strand; PAM type: YTN; PAM sequence: TTT
tcccaagaaacaggttcata

SEQ ID NO: 213442 - DNA, 20 bp, Artificial Sequence
  Description of Artificial Sequence: Synthetic oligonucleotide
  Target: LAMA2; (-) strand; PAM type: YTN; PAM sequence: CTA
ttttcccaagaaacaggttc

SEQ ID NO: 213443 - DNA, 20 bp, Artificial Sequence
  Description of Artificial Sequence: Synthetic oligonucleotide
  Target: LAMA2; (-) strand; PAM type: YTN; PAM sequence: TTC
aagtctattttcccaagaaa

SEQ ID NO: 213444 - DNA, 20 bp, Artificial Sequence
  Description of Artificial Sequence: Synthetic oligonucleotide
  Target: LAMA2; (-) strand; PAM type: YTN; PAM sequence: CTT
caagtctattttcccaagaa

SEQ ID NO: 213445 - DNA, 20 bp, Artificial Sequence
  Description of Artificial Sequence: Synthetic oligonucleotide
  Target: LAMA2; (-) strand; PAM type: YTN; PAM sequence: CTA
acttcaagtctattttccca

SEQ ID NO: 213446 - DNA, 20 bp, Artificial Sequence
  Description of Artificial Sequence: Synthetic oligonucleotide
  Target: LAMA2; (-) strand; PAM type: YTN; PAM sequence: TTG
tctaacttcaagtctatttt

SEQ ID NO: 213447 - DNA, 20 bp, Artificial Sequence
  Description of Artificial Sequence: Synthetic oligonucleotide
  Target: LAMA2; (-) strand; PAM type: YTN; PAM sequence: CTT
gtctaacttcaagtctattt

SEQ ID NO: 213448 - DNA, 20 bp, Artificial Sequence
  Description of Artificial Sequence: Synthetic oligonucleotide
  Target: LAMA2; (-) strand; PAM type: YTN; PAM sequence: TTC
ttgtctaacttcaagtctat

SEQ ID NO: 213449 - DNA, 20 bp, Artificial Sequence
  Description of Artificial Sequence: Synthetic oligonucleotide
  Target: LAMA2; (-) strand; PAM type: YTN; PAM sequence: TTA
aatagattcttgtctaactt

SEQ ID NO: 213450 - DNA, 20 bp, Artificial Sequence
  Description of Artificial Sequence: Synthetic oligonucleotide
  Target: LAMA2; (-) strand; PAM type: YTN; PAM sequence: TTG
attaaatagattcttgtcta

SEQ ID NO: 213451 - DNA, 20 bp, Artificial Sequence
  Description of Artificial Sequence: Synthetic oligonucleotide
  Target: LAMA2; (-) strand; PAM type: YTN; PAM sequence: TTT
gattaaatagattcttgtct

SEQ ID NO: 213452 - DNA, 20 bp, Artificial Sequence
  Description of Artificial Sequence: Synthetic oligonucleotide
  Target: LAMA2; (-) strand; PAM type: YTN; PAM sequence: CTA
gagtttgattaaatagattc

SEQ ID NO: 213453 - DNA, 20 bp, Artificial Sequence
  Description of Artificial Sequence: Synthetic oligonucleotide
  Target: LAMA2; (-) strand; PAM type: YTN; PAM sequence: TTA
gcaaaacatcatatctagag

SEQ ID NO: 213454 - DNA, 20 bp, Artificial Sequence
  Description of Artificial Sequence: Synthetic oligonucleotide
  Target: LAMA2; (-) strand; PAM type: YTN; PAM sequence: CTC
caaaaaaccaaagcaacaaa

SEQ ID NO: 213455 - DNA, 20 bp, Artificial Sequence
  Description of Artificial Sequence: Synthetic oligonucleotide
  Target: LAMA2; (-) strand; PAM type: YTN; PAM sequence: TTG
aagtgcaaaaaaactccaaa

SEQ ID NO: 213456 - DNA, 20 bp, Artificial Sequence
  Description of Artificial Sequence: Synthetic oligonucleotide
  Target: LAMA2; (-) strand; PAM type: YTN; PAM sequence: CTT
gaagtgcaaaaaaactccaa

SEQ ID NO: 213457 - DNA, 20 bp, Artificial Sequence
  Description of Artificial Sequence: Synthetic oligonucleotide
  Target: LAMA2; (-) strand; PAM type: YTN; PAM sequence: TTC
ttgaagtgcaaaaaaactcc

SEQ ID NO: 213458 - DNA, 20 bp, Artificial Sequence
  Description of Artificial Sequence: Synthetic oligonucleotide
  Target: LAMA2; (-) strand; PAM type: YTN; PAM sequence: CTT
cttgaagtgcaaaaaaactc

SEQ ID NO: 213459 - DNA, 20 bp, Artificial Sequence
  Description of Artificial Sequence: Synthetic oligonucleotide
  Target: LAMA2; (-) strand; PAM type: YTN; PAM sequence: CTC
agatcaaaaagacttcttga

SEQ ID NO: 213460 - DNA, 20 bp, Artificial Sequence
  Description of Artificial Sequence: Synthetic oligonucleotide
  Target: LAMA2; (-) strand; PAM type: YTN; PAM sequence: CTA
cctcagatcaaaaagacttc

SEQ ID NO: 213461 - DNA, 20 bp, Artificial Sequence
  Description of Artificial Sequence: Synthetic oligonucleotide
  Target: LAMA2; (-) strand; PAM type: YTN; PAM sequence: CTA
cactacctcagatcaaaaag

SEQ ID NO: 213462 - DNA, 20 bp, Artificial Sequence
  Description of Artificial Sequence: Synthetic oligonucleotide
  Target: LAMA2; (-) strand; PAM type: YTN; PAM sequence: TTG
actacactacctcagatcaa

SEQ ID NO: 213463 - DNA, 20 bp, Artificial Sequence
  Description of Artificial Sequence: Synthetic oligonucleotide
  Target: LAMA2; (-) strand; PAM type: YTN; PAM sequence: TTA
gagttgactacactacctca

SEQ ID NO: 213464 - DNA, 20 bp, Artificial Sequence
  Description of Artificial Sequence: Synthetic oligonucleotide
  Target: LAMA2; (-) strand; PAM type: YTN; PAM sequence: TTA
ataaattagagttgactaca

SEQ ID NO: 213465 - DNA, 20 bp, Artificial Sequence
  Description of Artificial Sequence: Synthetic oligonucleotide
  Target: LAMA2; (-) strand; PAM type: YTN; PAM sequence: CTT
aataaattagagttgactac

SEQ ID NO: 213466 - DNA, 20 bp, Artificial Sequence
  Description of Artificial Sequence: Synthetic oligonucleotide
  Target: LAMA2; (-) strand; PAM type: YTN; PAM sequence: TTC
atgcttaataaattagagtt

SEQ ID NO: 213467 - DNA, 20 bp, Artificial Sequence
  Description of Artificial Sequence: Synthetic oligonucleotide
  Target: LAMA2; (-) strand; PAM type: YTN; PAM sequence: CTT
catgcttaataaattagagt

SEQ ID NO: 213468 - DNA, 20 bp, Artificial Sequence
  Description of Artificial Sequence: Synthetic oligonucleotide
  Target: LAMA2; (-) strand; PAM type: YTN; PAM sequence: CTG
taaccaatcacttcatgctt

SEQ ID NO: 213469 - DNA, 20 bp, Artificial Sequence
  Description of Artificial Sequence: Synthetic oligonucleotide
  Target: LAMA2; (-) strand; PAM type: YTN; PAM sequence: TTA
aaatacctgtaaccaatcac

SEQ ID NO: 213470 - DNA, 20 bp, Artificial Sequence
  Description of Artificial Sequence: Synthetic oligonucleotide
  Target: LAMA2; (-) strand; PAM type: YTN; PAM sequence: TTG
ttaaaatacctgtaaccaat

SEQ ID NO: 213471 - DNA, 20 bp, Artificial Sequence
  Description of Artificial Sequence: Synthetic oligonucleotide
  Target: LAMA2; (-) strand; PAM type: YTN; PAM sequence: CTT
gttaaaatacctgtaaccaa

SEQ ID NO: 213472 - DNA, 20 bp, Artificial Sequence
  Description of Artificial Sequence: Synthetic oligonucleotide
  Target: LAMA2; (-) strand; PAM type: YTN; PAM sequence: CTC
caaatacttgttaaaatacc

SEQ ID NO: 213473 - DNA, 20 bp, Artificial Sequence
  Description of Artificial Sequence: Synthetic oligonucleotide
  Target: LAMA2; (-) strand; PAM type: YTN; PAM sequence: CTC
ctccaaatacttgttaaaat

SEQ ID NO: 213474 - DNA, 20 bp, Artificial Sequence
  Description of Artificial Sequence: Synthetic oligonucleotide
  Target: LAMA2; (-) strand; PAM type: YTN; PAM sequence: TTC
cccaaactcctccaaatact

SEQ ID NO: 213475 - DNA, 20 bp, Artificial Sequence
  Description of Artificial Sequence: Synthetic oligonucleotide
  Target: LAMA2; (-) strand; PAM type: YTN; PAM sequence: CTT
ccccaaactcctccaaatac

SEQ ID NO: 213476 - DNA, 20 bp, Artificial Sequence
  Description of Artificial Sequence: Synthetic oligonucleotide
  Target: LAMA2; (-) strand; PAM type: YTN; PAM sequence: TTC
aacttccccaaactcctcca

SEQ ID NO: 213477 - DNA, 20 bp, Artificial Sequence
  Description of Artificial Sequence: Synthetic oligonucleotide
  Target: LAMA2; (-) strand; PAM type: YTN; PAM sequence: CTT
caacttccccaaactcctcc

SEQ ID NO: 213478 - DNA, 20 bp, Artificial Sequence
  Description of Artificial Sequence: Synthetic oligonucleotide
  Target: LAMA2; (-) strand; PAM type: YTN; PAM sequence: TTC
gtacttcaacttccccaaac

SEQ ID NO: 213479 - DNA, 20 bp, Artificial Sequence
  Description of Artificial Sequence: Synthetic oligonucleotide
  Target: LAMA2; (-) strand; PAM type: YTN; PAM sequence: TTC
aaataatgtgttcgtacttc

SEQ ID NO: 213480 - DNA, 20 bp, Artificial Sequence
  Description of Artificial Sequence: Synthetic oligonucleotide
  Target: LAMA2; (-) strand; PAM type: YTN; PAM sequence: CTT
caaataatgtgttcgtactt

SEQ ID NO: 213481 - DNA, 20 bp, Artificial Sequence
  Description of Artificial Sequence: Synthetic oligonucleotide
  Target: LAMA2; (-) strand; PAM type: YTN; PAM sequence: CTG
taacagtgacttcaaataat

SEQ ID NO: 213482 - DNA, 20 bp, Artificial Sequence
  Description of Artificial Sequence: Synthetic oligonucleotide
  Target: LAMA2; (-) strand; PAM type: YTN; PAM sequence: CTC
tgtaacagtgacttcaaata

SEQ ID NO: 213483 - DNA, 20 bp, Artificial Sequence
  Description of Artificial Sequence: Synthetic oligonucleotide
  Target: LAMA2; (-) strand; PAM type: YTN; PAM sequence: CTA
catcaggaaggacaaaatag

SEQ ID NO: 213484 - DNA, 20 bp, Artificial Sequence
  Description of Artificial Sequence: Synthetic oligonucleotide
  Target: LAMA2; (-) strand; PAM type: YTN; PAM sequence: CTA
atggctacatcaggaaggac

SEQ ID NO: 213485 - DNA, 20 bp, Artificial Sequence
  Description of Artificial Sequence: Synthetic oligonucleotide
  Target: LAMA2; (-) strand; PAM type: YTN; PAM sequence: TTG
taggaacactaatggctaca

SEQ ID NO: 213486 - DNA, 20 bp, Artificial Sequence
  Description of Artificial Sequence: Synthetic oligonucleotide
  Target: LAMA2; (-) strand; PAM type: YTN; PAM sequence: CTT
gtaggaacactaatggctac

SEQ ID NO: 213487 - DNA, 20 bp, Artificial Sequence
  Description of Artificial Sequence: Synthetic oligonucleotide
  Target: LAMA2; (-) strand; PAM type: YTN; PAM sequence: TTC
ttgtaggaacactaatggct

SEQ ID NO: 213488 - DNA, 20 bp, Artificial Sequence
  Description of Artificial Sequence: Synthetic oligonucleotide
  Target: LAMA2; (-) strand; PAM type: YTN; PAM sequence: TTT
cttgtaggaacactaatggc

SEQ ID NO: 213489 - DNA, 20 bp, Artificial Sequence
  Description of Artificial Sequence: Synthetic oligonucleotide
  Target: LAMA2; (-) strand; PAM type: YTN; PAM sequence: CTG
tcatgataatccagatttct

SEQ ID NO: 213490 - DNA, 20 bp, Artificial Sequence
  Description of Artificial Sequence: Synthetic oligonucleotide
  Target: LAMA2; (-) strand; PAM type: YTN; PAM sequence: TTA
aaaaaagaaaaaggaaaaaa

SEQ ID NO: 213491 - DNA, 20 bp, Artificial Sequence
  Description of Artificial Sequence: Synthetic oligonucleotide
  Target: LAMA2; (-) strand; PAM type: YTN; PAM sequence: CTA
aaattaaaaaaagaaaaagg

SEQ ID NO: 213492 - DNA, 20 bp, Artificial Sequence
  Description of Artificial Sequence: Synthetic oligonucleotide
  Target: LAMA2; (-) strand; PAM type: YTN; PAM sequence: CTA
aatctaaaattaaaaaaaga

SEQ ID NO: 213493 - DNA, 20 bp, Artificial Sequence
  Description of Artificial Sequence: Synthetic oligonucleotide
  Target: LAMA2; (-) strand; PAM type: YTN; PAM sequence: TTA
cacaatatacccatgtcaca

SEQ ID NO: 213494 - DNA, 20 bp, Artificial Sequence
  Description of Artificial Sequence: Synthetic oligonucleotide
  Target: LAMA2; (-) strand; PAM type: YTN; PAM sequence: CTC
accattacacaatataccca

SEQ ID NO: 213495 - DNA, 20 bp, Artificial Sequence
  Description of Artificial Sequence: Synthetic oligonucleotide
  Target: LAMA2; (-) strand; PAM type: YTN; PAM sequence: TTC
agtagaagcccaaacctcac

SEQ ID NO: 213496 - DNA, 20 bp, Artificial Sequence
  Description of Artificial Sequence: Synthetic oligonucleotide
  Target: LAMA2; (-) strand; PAM type: YTN; PAM sequence: TTG
ggtgatgggttcagtagaag

SEQ ID NO: 213497 - DNA, 20 bp, Artificial Sequence
  Description of Artificial Sequence: Synthetic oligonucleotide
  Target: LAMA2; (-) strand; PAM type: YTN; PAM sequence: TTT
gggtgatgggttcagtagaa

SEQ ID NO: 213498 - DNA, 20 bp, Artificial Sequence
  Description of Artificial Sequence: Synthetic oligonucleotide
  Target: LAMA2; (-) strand; PAM type: YTN; PAM sequence: TTC
accatttgggtgatgggttc

SEQ ID NO: 213499 - DNA, 20 bp, Artificial Sequence
  Description of Artificial Sequence: Synthetic oligonucleotide
  Target: LAMA2; (-) strand; PAM type: YTN; PAM sequence: CTG
aatacaatgttcaccatttg

SEQ ID NO: 213500 - DNA, 20 bp, Artificial Sequence
  Description of Artificial Sequence: Synthetic oligonucleotide
  Target: LAMA2; (-) strand; PAM type: YTN; PAM sequence: CTG
actgaatacaatgttcacca

SEQ ID NO: 213501 - DNA, 20 bp, Artificial Sequence
  Description of Artificial Sequence: Synthetic oligonucleotide
  Target: LAMA2; (-) strand; PAM type: YTN; PAM sequence: TTA
ctgactgaatacaatgttca

SEQ ID NO: 213502 - DNA, 20 bp, Artificial Sequence
  Description of Artificial Sequence: Synthetic oligonucleotide
  Target: LAMA2; (-) strand; PAM type: YTN; PAM sequence: CTG
aaaaattactgactgaatac

SEQ ID NO: 213503 - DNA, 20 bp, Artificial Sequence
  Description of Artificial Sequence: Synthetic oligonucleotide
  Target: LAMA2; (-) strand; PAM type: YTN; PAM sequence: CTG
ggagaggaatgaggactgaa

SEQ ID NO: 213504 - DNA, 20 bp, Artificial Sequence
  Description of Artificial Sequence: Synthetic oligonucleotide
  Target: LAMA2; (-) strand; PAM type: YTN; PAM sequence: CTA
aacaatggatacacatggaa

SEQ ID NO: 213505 - DNA, 20 bp, Artificial Sequence
  Description of Artificial Sequence: Synthetic oligonucleotide
  Target: LAMA2; (-) strand; PAM type: YTN; PAM sequence: CTA
agtgggagctaaacaatgga

SEQ ID NO: 213506 - DNA, 20 bp, Artificial Sequence
  Description of Artificial Sequence: Synthetic oligonucleotide
  Target: LAMA2; (-) strand; PAM type: YTN; PAM sequence: TTC
taagtgggagctaaacaatg

SEQ ID NO: 213507 - DNA, 20 bp, Artificial Sequence
  Description of Artificial Sequence: Synthetic oligonucleotide
  Target: LAMA2; (-) strand; PAM type: YTN; PAM sequence: CTT
ctaagtgggagctaaacaat

SEQ ID NO: 213508 - DNA, 20 bp, Artificial Sequence
  Description of Artificial Sequence: Synthetic oligonucleotide
  Target: LAMA2; (-) strand; PAM type: YTN; PAM sequence: TTC
acttctaagtgggagctaaa

SEQ ID NO: 213509 - DNA, 20 bp, Artificial Sequence
  Description of Artificial Sequence: Synthetic oligonucleotide
  Target: LAMA2; (-) strand; PAM type: YTN; PAM sequence: TTT
cacttctaagtgggagctaa

SEQ ID NO: 213510 - DNA, 20 bp, Artificial Sequence
  Description of Artificial Sequence: Synthetic oligonucleotide
  Target: LAMA2; (-) strand; PAM type: YTN; PAM sequence: TTT
tcacttctaagtgggagcta

SEQ ID NO: 213511 - DNA, 20 bp, Artificial Sequence
  Description of Artificial Sequence: Synthetic oligonucleotide
  Target: LAMA2; (-) strand; PAM type: YTN; PAM sequence: TTG
aatatgacattttcacttct

SEQ ID NO: 213512 - DNA, 20 bp, Artificial Sequence
  Description of Artificial Sequence: Synthetic oligonucleotide
  Target: LAMA2; (-) strand; PAM type: YTN; PAM sequence: CTC
agaagcagaaaattgaatat

SEQ ID NO: 213513 - DNA, 20 bp, Artificial Sequence
  Description of Artificial Sequence: Synthetic oligonucleotide
  Target: LAMA2; (-) strand; PAM type: YTN; PAM sequence: CTA
agtgaaataactcagaagca

SEQ ID NO: 213514 - DNA, 20 bp, Artificial Sequence
  Description of Artificial Sequence: Synthetic oligonucleotide
  Target: LAMA2; (-) strand; PAM type: YTN; PAM sequence: TTA
tcctaagtgaaataactcag

SEQ ID NO: 213515 - DNA, 20 bp, Artificial Sequence
  Description of Artificial Sequence: Synthetic oligonucleotide
  Target: LAMA2; (-) strand; PAM type: YTN; PAM sequence: CTG
gaggccattatcctaagtga

SEQ ID NO: 213516 - DNA, 20 bp, Artificial Sequence
  Description of Artificial Sequence: Synthetic oligonucleotide
  Target: LAMA2; (-) strand; PAM type: YTN; PAM sequence: TTG
cagcaacatggatggagctg

SEQ ID NO: 213517 - DNA, 20 bp, Artificial Sequence
  Description of Artificial Sequence: Synthetic oligonucleotide
  Target: LAMA2; (-) strand; PAM type: YTN; PAM sequence: TTT
gcagcaacatggatggagct

SEQ ID NO: 213518 - DNA, 20 bp, Artificial Sequence
  Description of Artificial Sequence: Synthetic oligonucleotide
  Target: LAMA2; (-) strand; PAM type: YTN; PAM sequence: CTT
tgcagcaacatggatggagc

SEQ ID NO: 213519 - DNA, 20 bp, Artificial Sequence
  Description of Artificial Sequence: Synthetic oligonucleotide
  Target: LAMA2; (-) strand; PAM type: YTN; PAM sequence: CTG
tgcagccataaaaaataatg

SEQ ID NO: 213520 - DNA, 20 bp, Artificial Sequence
  Description of Artificial Sequence: Synthetic oligonucleotide
  Target: LAMA2; (-) strand; PAM type: YTN; PAM sequence: TTG
gacaaagaaaatgtggtgtg

SEQ ID NO: 213521 - DNA, 20 bp, Artificial Sequence
  Description of Artificial Sequence: Synthetic oligonucleotide
  Target: LAMA2; (-) strand; PAM type: YTN; PAM sequence: TTG
gttggacaaagaaaatgtgg

SEQ ID NO: 213522 - DNA, 20 bp, Artificial Sequence
  Description of Artificial Sequence: Synthetic oligonucleotide
  Target: LAMA2; (-) strand; PAM type: YTN; PAM sequence: CTA
tgtgttggttggacaaagaa

SEQ ID NO: 213523 - DNA, 20 bp, Artificial Sequence
  Description of Artificial Sequence: Synthetic oligonucleotide
  Target: LAMA2; (-) strand; PAM type: YTN; PAM sequence: CTC
aacaatctatgtgttggttg

SEQ ID NO: 213524 - DNA, 20 bp, Artificial Sequence
  Description of Artificial Sequence: Synthetic oligonucleotide
  Target: LAMA2; (-) strand; PAM type: YTN; PAM sequence: CTA
tgtgctcaacaatctatgtg

SEQ ID NO: 213525 - DNA, 20 bp, Artificial Sequence
  Description of Artificial Sequence: Synthetic oligonucleotide
  Target: LAMA2; (-) strand; PAM type: YTN; PAM sequence: CTC
aatctatgtgctcaacaatc

SEQ ID NO: 213526 - DNA, 20 bp, Artificial Sequence
  Description of Artificial Sequence: Synthetic oligonucleotide
  Target: LAMA2; (-) strand; PAM type: YTN; PAM sequence: TTC
acaatagcaaagtcatggac

SEQ ID NO: 213527 - DNA, 20 bp, Artificial Sequence
  Description of Artificial Sequence: Synthetic oligonucleotide
  Target: LAMA2; (-) strand; PAM type: YTN; PAM sequence: CTA
ttcacaatagcaaagtcatg

SEQ ID NO: 213528 - DNA, 20 bp, Artificial Sequence
  Description of Artificial Sequence: Synthetic oligonucleotide
  Target: LAMA2; (-) strand; PAM type: YTN; PAM sequence: TTG
cagcactattcacaatagca

SEQ ID NO: 213529 - DNA, 20 bp, Artificial Sequence
  Description of Artificial Sequence: Synthetic oligonucleotide
  Target: LAMA2; (-) strand; PAM type: YTN; PAM sequence: TTG
ttgcagcactattcacaata

SEQ ID NO: 213530 - DNA, 20 bp, Artificial Sequence
  Description of Artificial Sequence: Synthetic oligonucleotide
  Target: LAMA2; (-) strand; PAM type: YTN; PAM sequence: TTT
gttgcagcactattcacaat

SEQ ID NO: 213531 - DNA, 20 bp, Artificial Sequence
  Description of Artificial Sequence: Synthetic oligonucleotide
  Target: LAMA2; (-) strand; PAM type: YTN; PAM sequence: TTG
tgtgtttgttgcagcactat

SEQ ID NO: 213532 - DNA, 20 bp, Artificial Sequence
  Description of Artificial Sequence: Synthetic oligonucleotide
  Target: LAMA2; (-) strand; PAM type: YTN; PAM sequence: TTT
gtgtgtttgttgcagcacta

SEQ ID NO: 213533 - DNA, 20 bp, Artificial Sequence
  Description of Artificial Sequence: Synthetic oligonucleotide
  Target: LAMA2; (-) strand; PAM type: YTN; PAM sequence: CTA
catttgtgtgtttgttgcag

SEQ ID NO: 213534 - DNA, 20 bp, Artificial Sequence
  Description of Artificial Sequence: Synthetic oligonucleotide
  Target: LAMA2; (-) strand; PAM type: YTN; PAM sequence: CTA
tatcaaaaagacacctacat

SEQ ID NO: 213535 - DNA, 20 bp, Artificial Sequence
  Description of Artificial Sequence: Synthetic oligonucleotide
  Target: LAMA2; (-) strand; PAM type: YTN; PAM sequence: CTA
actatatcaaaaagacacct

SEQ ID NO: 213536 - DNA, 20 bp, Artificial Sequence
  Description of Artificial Sequence: Synthetic oligonucleotide
  Target: LAMA2; (-) strand; PAM type: YTN; PAM sequence: CTA
cccaaaggaaaagaactaac

SEQ ID NO: 213537 - DNA, 20 bp, Artificial Sequence
  Description of Artificial Sequence: Synthetic oligonucleotide
  Target: LAMA2; (-) strand; PAM type: YTN; PAM sequence: CTG
ggtatctacccaaaggaaaa

SEQ ID NO: 213538 - DNA, 20 bp, Artificial Sequence
  Description of Artificial Sequence: Synthetic oligonucleotide
  Target: LAMA2; (-) strand; PAM type: YTN; PAM sequence: TTA
ctgggtatctacccaaagga

SEQ ID NO: 213539 - DNA, 20 bp, Artificial Sequence
  Description of Artificial Sequence: Synthetic oligonucleotide
  Target: LAMA2; (-) strand; PAM type: YTN; PAM sequence: TTG
atatagcaatcccattactg

SEQ ID NO: 213540 - DNA, 20 bp, Artificial Sequence
  Description of Artificial Sequence: Synthetic oligonucleotide
  Target: LAMA2; (-) strand; PAM type: YTN; PAM sequence: TTT
gatatagcaatcccattact

SEQ ID NO: 213541 - DNA, 20 bp, Artificial Sequence
  Description of Artificial Sequence: Synthetic oligonucleotide
  Target: LAMA2; (-) strand; PAM type: YTN; PAM sequence: CTA
tttgatatagcaatcccatt

SEQ ID NO: 213542 - DNA, 20 bp, Artificial Sequence
  Description of Artificial Sequence: Synthetic oligonucleotide
  Target: LAMA2; (-) strand; PAM type: YTN; PAM sequence: CTA
ctatttgatatagcaatccc

SEQ ID NO: 213543 - DNA, 20 bp, Artificial Sequence
  Description of Artificial Sequence: Synthetic oligonucleotide
  Target: LAMA2; (-) strand; PAM type: YTN; PAM sequence: TTA
aagaacaaaaaagagaacta

SEQ ID NO: 213544 - DNA, 20 bp, Artificial Sequence
  Description of Artificial Sequence: Synthetic oligonucleotide
  Target: LAMA2; (-) strand; PAM type: YTN; PAM sequence: CTT
aaagaacaaaaaagagaact

SEQ ID NO: 213545 - DNA, 20 bp, Artificial Sequence
  Description of Artificial Sequence: Synthetic oligonucleotide
  Target: LAMA2; (-) strand; PAM type: YTN; PAM sequence: TTC
ttaaagaacaaaaaagagaa

SEQ ID NO: 213546 - DNA, 20 bp, Artificial Sequence
  Description of Artificial Sequence: Synthetic oligonucleotide
  Target: LAMA2; (-) strand; PAM type: YTN; PAM sequence: CTA
tggaaatcaatatggagagt

SEQ ID NO: 213547 - DNA, 20 bp, Artificial Sequence
  Description of Artificial Sequence: Synthetic oligonucleotide
  Target: LAMA2; (-) strand; PAM type: YTN; PAM sequence: TTC
aacccctatggaaatcaata

SEQ ID NO: 213548 - DNA, 20 bp, Artificial Sequence
  Description of Artificial Sequence: Synthetic oligonucleotide
  Target: LAMA2; (-) strand; PAM type: YTN; PAM sequence: TTA
gttcaacccctatggaaatc

SEQ ID NO: 213549 - DNA, 20 bp, Artificial Sequence
  Description of Artificial Sequence: Synthetic oligonucleotide
  Target: LAMA2; (-) strand; PAM type: YTN; PAM sequence: CTG
gtgggaatgtaaattagttc

SEQ ID NO: 213550 - DNA, 20 bp, Artificial Sequence
  Description of Artificial Sequence: Synthetic oligonucleotide
  Target: LAMA2; (-) strand; PAM type: YTN; PAM sequence: CTG
ctggtgggaatgtaaattag

SEQ ID NO: 213551 - DNA, 20 bp, Artificial Sequence
  Description of Artificial Sequence: Synthetic oligonucleotide
  Target: LAMA2; (-) strand; PAM type: YTN; PAM sequence: TTA
tacgctgctggtgggaatgt

SEQ ID NO: 213552 - DNA, 20 bp, Artificial Sequence
  Description of Artificial Sequence: Synthetic oligonucleotide
  Target: LAMA2; (-) strand; PAM type: YTN; PAM sequence: CTT
atacgctgctggtgggaatg

SEQ ID NO: 213553 - DNA, 20 bp, Artificial Sequence
  Description of Artificial Sequence: Synthetic oligonucleotide
  Target: LAMA2; (-) strand; PAM type: YTN; PAM sequence: TTG
cagagaaaagggaatgctta

SEQ ID NO: 213554 - DNA, 20 bp, Artificial Sequence
  Description of Artificial Sequence: Synthetic oligonucleotide
  Target: LAMA2; (-) strand; PAM type: YTN; PAM sequence: TTA
gatatcggtgaggttgcaga

SEQ ID NO: 213555 - DNA, 20 bp, Artificial Sequence
  Description of Artificial Sequence: Synthetic oligonucleotide
  Target: LAMA2; (-) strand; PAM type: YTN; PAM sequence: TTA
aaaagtcaaaaaatattaga

SEQ ID NO: 213556 - DNA, 20 bp, Artificial Sequence
  Description of Artificial Sequence: Synthetic oligonucleotide
  Target: LAMA2; (-) strand; PAM type: YTN; PAM sequence: CTA
gtattaaaaagtcaaaaaat

SEQ ID NO: 213557 - DNA, 20 bp, Artificial Sequence
  Description of Artificial Sequence: Synthetic oligonucleotide
  Target: LAMA2; (-) strand; PAM type: YTN; PAM sequence: TTA
gaatagctagtattaaaaag

SEQ ID NO: 213558 - DNA, 20 bp, Artificial Sequence
  Description of Artificial Sequence: Synthetic oligonucleotide
  Target: LAMA2; (-) strand; PAM type: YTN; PAM sequence: TTA
aaaccacaatgagataccaa

SEQ ID NO: 213559 - DNA, 20 bp, Artificial Sequence
  Description of Artificial Sequence: Synthetic oligonucleotide
  Target: LAMA2; (-) strand; PAM type: YTN; PAM sequence: CTA
atcatcagggagatgcaaat

SEQ ID NO: 213560 - DNA, 20 bp, Artificial Sequence
  Description of Artificial Sequence: Synthetic oligonucleotide
  Target: LAMA2; (-) strand; PAM type: YTN; PAM sequence: CTC
agtatcactaatcatcaggg

SEQ ID NO: 213561 - DNA, 20 bp, Artificial Sequence
  Description of Artificial Sequence: Synthetic oligonucleotide
  Target: LAMA2; (-) strand; PAM type: YTN; PAM sequence: CTA
aaaaaaaaaaaaagaaaaga

SEQ ID NO: 213562 - DNA, 20 bp, Artificial Sequence
  Description of Artificial Sequence: Synthetic oligonucleotide
  Target: LAMA2; (-) strand; PAM type: YTN; PAM sequence: TTC
taaaaaaaaaaaaaagaaaa

SEQ ID NO: 213563 - DNA, 20 bp, Artificial Sequence
  Description of Artificial Sequence: Synthetic oligonucleotide
  Target: LAMA2; (-) strand; PAM type: YTN; PAM sequence: CTT
ctaaaaaaaaaaaaaagaaa

SEQ ID NO: 213564 - DNA, 20 bp, Artificial Sequence
  Description of Artificial Sequence: Synthetic oligonucleotide
  Target: LAMA2; (-) strand; PAM type: YTN; PAM sequence: TTA
acagacacttctaaaaaaaa

SEQ ID NO: 213565 - DNA, 20 bp, Artificial Sequence
  Description of Artificial Sequence: Synthetic oligonucleotide
  Target: LAMA2; (-) strand; PAM type: YTN; PAM sequence: TTA
aaagtgggcaaaggaaatta

SEQ ID NO: 213566 - DNA, 20 bp, Artificial Sequence
  Description of Artificial Sequence: Synthetic oligonucleotide
  Target: LAMA2; (-) strand; PAM type: YTN; PAM sequence: CTC
cattaaaagtgggcaaagga

SEQ ID NO: 213567 - DNA, 20 bp, Artificial Sequence
  Description of Artificial Sequence: Synthetic oligonucleotide
  Target: LAMA2; (-) strand; PAM type: YTN; PAM sequence: TTA
aatcaacaagaaaaaaacaa

SEQ ID NO: 213568 - DNA, 20 bp, Artificial Sequence
  Description of Artificial Sequence: Synthetic oligonucleotide
  Target: LAMA2; (-) strand; PAM type: YTN; PAM sequence: CTT
aaatcaacaagaaaaaaaca

SEQ ID NO: 213569 - DNA, 20 bp, Artificial Sequence
  Description of Artificial Sequence: Synthetic oligonucleotide
  Target: LAMA2; (-) strand; PAM type: YTN; PAM sequence: CTA
taagaaacttaaatcaacaa

SEQ ID NO: 213570 - DNA, 20 bp, Artificial Sequence
  Description of Artificial Sequence: Synthetic oligonucleotide
  Target: LAMA2; (-) strand; PAM type: YTN; PAM sequence: CTA
atatccagaaactataagaa

SEQ ID NO: 213571 - DNA, 20 bp, Artificial Sequence
  Description of Artificial Sequence: Synthetic oligonucleotide
  Target: LAMA2; (-) strand; PAM type: YTN; PAM sequence: CTG
acaaatgactaatatccaga

SEQ ID NO: 213572 - DNA, 20 bp, Artificial Sequence
  Description of Artificial Sequence: Synthetic oligonucleotide
  Target: LAMA2; (-) strand; PAM type: YTN; PAM sequence: CTG
tgcatctgacaaatgactaa

SEQ ID NO: 213573 - DNA, 20 bp, Artificial Sequence
  Description of Artificial Sequence: Synthetic oligonucleotide
  Target: LAMA2; (-) strand; PAM type: YTN; PAM sequence: CTA
actgtgcatctgacaaatga

SEQ ID NO: 213574 - DNA, 20 bp, Artificial Sequence
  Description of Artificial Sequence: Synthetic oligonucleotide
  Target: LAMA2; (-) strand; PAM type: YTN; PAM sequence: TTG
ctaactgtgcatctgacaaa

SEQ ID NO: 213575 - DNA, 20 bp, Artificial Sequence
  Description of Artificial Sequence: Synthetic oligonucleotide
  Target: LAMA2; (-) strand; PAM type: YTN; PAM sequence: TTT
gctaactgtgcatctgacaa

SEQ ID NO: 213576 - DNA, 20 bp, Artificial Sequence
  Description of Artificial Sequence: Synthetic oligonucleotide
  Target: LAMA2; (-) strand; PAM type: YTN; PAM sequence: CTG
cagaatgacagaaaatattt

SEQ ID NO: 213577 - DNA, 20 bp, Artificial Sequence
  Description of Artificial Sequence: Synthetic oligonucleotide
  Target: LAMA2; (-) strand; PAM type: YTN; PAM sequence: TTA
acaaaataaacagacaactg

SEQ ID NO: 213578 - DNA, 20 bp, Artificial Sequence
  Description of Artificial Sequence: Synthetic oligonucleotide
  Target: LAMA2; (-) strand; PAM type: YTN; PAM sequence: TTG
cacagcaaaataaacaatta

SEQ ID NO: 213579 - DNA, 20 bp, Artificial Sequence
  Description of Artificial Sequence: Synthetic oligonucleotide
  Target: LAMA2; (-) strand; PAM type: YTN; PAM sequence: TTT
gcacagcaaaataaacaatt

SEQ ID NO: 213580 - DNA, 20 bp, Artificial Sequence
  Description of Artificial Sequence: Synthetic oligonucleotide
  Target: LAMA2; (-) strand; PAM type: YTN; PAM sequence: CTA
aacggcgtttgcacagcaaa

SEQ ID NO: 213581 - DNA, 20 bp, Artificial Sequence
  Description of Artificial Sequence: Synthetic oligonucleotide
  Target: LAMA2; (-) strand; PAM type: YTN; PAM sequence: TTA
aactaaacggcgtttgcaca

SEQ ID NO: 213582 - DNA, 20 bp, Artificial Sequence
  Description of Artificial Sequence: Synthetic oligonucleotide
  Target: LAMA2; (-) strand; PAM type: YTN; PAM sequence: TTA
attaaactaaacggcgtttg

SEQ ID NO: 213583 - DNA, 20 bp, Artificial Sequence
  Description of Artificial Sequence: Synthetic oligonucleotide
  Target: LAMA2; (-) strand; PAM type: YTN; PAM sequence: CTT
aattaaactaaacggcgttt

SEQ ID NO: 213584 - DNA, 20 bp, Artificial Sequence
  Description of Artificial Sequence: Synthetic oligonucleotide
  Target: LAMA2; (-) strand; PAM type: YTN; PAM sequence: TTG
caaaagcaaatgcaaaaaaa

SEQ ID NO: 213585 - DNA, 20 bp, Artificial Sequence
  Description of Artificial Sequence: Synthetic oligonucleotide
  Target: LAMA2; (-) strand; PAM type: YTN; PAM sequence: CTA
attgcaaaagcaaatgcaaa

SEQ ID NO: 213586 - DNA, 20 bp, Artificial Sequence
  Description of Artificial Sequence: Synthetic oligonucleotide
  Target: LAMA2; (-) strand; PAM type: YTN; PAM sequence: CTA
agactaattgcaaaagcaaa

SEQ ID NO: 213587 - DNA, 20 bp, Artificial Sequence
  Description of Artificial Sequence: Synthetic oligonucleotide
  Target: LAMA2; (-) strand; PAM type: YTN; PAM sequence: TTA
atgactaagactaattgcaa

SEQ ID NO: 213588 - DNA, 20 bp, Artificial Sequence
  Description of Artificial Sequence: Synthetic oligonucleotide
  Target: LAMA2; (-) strand; PAM type: YTN; PAM sequence: CTA
ggtaaagaattaatgactaa

SEQ ID NO: 213589 - DNA, 20 bp, Artificial Sequence
  Description of Artificial Sequence: Synthetic oligonucleotide
  Target: LAMA2; (-) strand; PAM type: YTN; PAM sequence: TTG
gcctaggtaaagaattaatg

SEQ ID NO: 213590 - DNA, 20 bp, Artificial Sequence
  Description of Artificial Sequence: Synthetic oligonucleotide
  Target: LAMA2; (-) strand; PAM type: YTN; PAM sequence: CTC
gacattggcctaggtaaaga

SEQ ID NO: 213591 - DNA, 20 bp, Artificial Sequence
  Description of Artificial Sequence: Synthetic oligonucleotide
  Target: LAMA2; (-) strand; PAM type: YTN; PAM sequence: TTC
tcgacattggcctaggtaaa

SEQ ID NO: 213592 - DNA, 20 bp, Artificial Sequence
  Description of Artificial Sequence: Synthetic oligonucleotide
  Target: LAMA2; (-) strand; PAM type: YTN; PAM sequence: TTA
ttctcgacattggcctaggt

SEQ ID NO: 213593 - DNA, 20 bp, Artificial Sequence
  Description of Artificial Sequence: Synthetic oligonucleotide
  Target: LAMA2; (-) strand; PAM type: YTN; PAM sequence: CTA
ggaaaaattattctcgacat

SEQ ID NO: 213594 - DNA, 20 bp, Artificial Sequence
  Description of Artificial Sequence: Synthetic oligonucleotide
  Target: LAMA2; (-) strand; PAM type: YTN; PAM sequence: CTG
aaaccataaaaagaaaacct

SEQ ID NO: 213595 - DNA, 20 bp, Artificial Sequence
  Description of Artificial Sequence: Synthetic oligonucleotide
  Target: LAMA2; (-) strand; PAM type: YTN; PAM sequence: TTA
aatgcaagacctgaaaccat

SEQ ID NO: 213596 - DNA, 20 bp, Artificial Sequence
  Description of Artificial Sequence: Synthetic oligonucleotide
  Target: LAMA2; (-) strand; PAM type: YTN; PAM sequence: CTT
aaatgcaagacctgaaacca

SEQ ID NO: 213597 - DNA, 20 bp, Artificial Sequence
  Description of Artificial Sequence: Synthetic oligonucleotide
  Target: LAMA2; (-) strand; PAM type: YTN; PAM sequence: TTA
aagacttaaatgcaagacct

SEQ ID NO: 213598 - DNA, 20 bp, Artificial Sequence
  Description of Artificial Sequence: Synthetic oligonucleotide
  Target: LAMA2; (-) strand; PAM type: YTN; PAM sequence: CTC
aagatcaattaaagacttaa

SEQ ID NO: 213599 - DNA, 20 bp, Artificial Sequence
  Description of Artificial Sequence: Synthetic oligonucleotide
  Target: LAMA2; (-) strand; PAM type: YTN; PAM sequence: TTA
actcaagatcaattaaagac

SEQ ID NO: 213600 - DNA, 20 bp, Artificial Sequence
  Description of Artificial Sequence: Synthetic oligonucleotide
  Target: LAMA2; (-) strand; PAM type: YTN; PAM sequence: CTA
tgtgtcaccatatacaaaaa

SEQ ID NO: 213601 - DNA, 20 bp, Artificial Sequence
  Description of Artificial Sequence: Synthetic oligonucleotide
  Target: LAMA2; (-) strand; PAM type: YTN; PAM sequence: CTG
gaccctatgtgtcaccatat

SEQ ID NO: 213602 - DNA, 20 bp, Artificial Sequence
  Description of Artificial Sequence: Synthetic oligonucleotide
  Target: LAMA2; (-) strand; PAM type: YTN; PAM sequence: CTA
gcggaagaatgaaactggac

SEQ ID NO: 213603 - DNA, 20 bp, Artificial Sequence
  Description of Artificial Sequence: Synthetic oligonucleotide
  Target: LAMA2; (-) strand; PAM type: YTN; PAM sequence: CTG
gctagcggaagaatgaaact

SEQ ID NO: 213604 - DNA, 20 bp, Artificial Sequence
  Description of Artificial Sequence: Synthetic oligonucleotide
  Target: LAMA2; (-) strand; PAM type: YTN; PAM sequence: TTA
ataactggctagcggaagaa

SEQ ID NO: 213605 - DNA, 20 bp, Artificial Sequence
  Description of Artificial Sequence: Synthetic oligonucleotide
  Target: LAMA2; (-) strand; PAM type: YTN; PAM sequence: TTT
aataactggctagcggaaga

SEQ ID NO: 213606 - DNA, 20 bp, Artificial Sequence
  Description of Artificial Sequence: Synthetic oligonucleotide
  Target: LAMA2; (-) strand; PAM type: YTN; PAM sequence: CTA
tttaataactggctagcgga

SEQ ID NO: 213607 - DNA, 20 bp, Artificial Sequence
  Description of Artificial Sequence: Synthetic oligonucleotide
  Target: LAMA2; (-) strand; PAM type: YTN; PAM sequence: TTC
gacaaagtcaataaaaataa

SEQ ID NO: 213608 - DNA, 20 bp, Artificial Sequence
  Description of Artificial Sequence: Synthetic oligonucleotide
  Target: LAMA2; (-) strand; PAM type: YTN; PAM sequence: CTT
cgacaaagtcaataaaaata

SEQ ID NO: 213609 - DNA, 20 bp, Artificial Sequence
  Description of Artificial Sequence: Synthetic oligonucleotide
  Target: LAMA2; (-) strand; PAM type: YTN; PAM sequence: CTA
atcttcgacaaagtcaataa

SEQ ID NO: 213610 - DNA, 20 bp, Artificial Sequence
  Description of Artificial Sequence: Synthetic oligonucleotide
  Target: LAMA2; (-) strand; PAM type: YTN; PAM sequence: CTA
caactaatcttcgacaaagt

SEQ ID NO: 213611 - DNA, 20 bp, Artificial Sequence
  Description of Artificial Sequence: Synthetic oligonucleotide
  Target: LAMA2; (-) strand; PAM type: YTN; PAM sequence: TTC
ctacaactaatcttcgacaa

SEQ ID NO: 213612 - DNA, 20 bp, Artificial Sequence
  Description of Artificial Sequence: Synthetic oligonucleotide
  Target: LAMA2; (-) strand; PAM type: YTN; PAM sequence: CTA
aaacagcatggtaatggtat

SEQ ID NO: 213613 - DNA, 20 bp, Artificial Sequence
  Description of Artificial Sequence: Synthetic oligonucleotide
  Target: LAMA2; (-) strand; PAM type: YTN; PAM sequence: CTA
tagtaactaaaacagcatgg

SEQ ID NO: 213614 - DNA, 20 bp, Artificial Sequence
  Description of Artificial Sequence: Synthetic oligonucleotide
  Target: LAMA2; (-) strand; PAM type: YTN; PAM sequence: CTA
tgaggctatagtaactaaaa

SEQ ID NO: 213615 - DNA, 20 bp, Artificial Sequence
  Description of Artificial Sequence: Synthetic oligonucleotide
  Target: LAMA2; (-) strand; PAM type: YTN; PAM sequence: CTG
agactatgaggctatagtaa

SEQ ID NO: 213616 - DNA, 20 bp, Artificial Sequence
  Description of Artificial Sequence: Synthetic oligonucleotide
  Target: LAMA2; (-) strand; PAM type: YTN; PAM sequence: CTC
tgagactatgaggctatagt

SEQ ID NO: 213617 - DNA, 20 bp, Artificial Sequence
  Description of Artificial Sequence: Synthetic oligonucleotide
  Target: LAMA2; (-) strand; PAM type: YTN; PAM sequence: CTA
tgctctgagactatgaggct

SEQ ID NO: 213618 - DNA, 20 bp, Artificial Sequence
  Description of Artificial Sequence: Synthetic oligonucleotide
  Target: LAMA2; (-) strand; PAM type: YTN; PAM sequence: TTC
acactatgctctgagactat

SEQ ID NO: 213619 - DNA, 20 bp, Artificial Sequence
  Description of Artificial Sequence: Synthetic oligonucleotide
  Target: LAMA2; (-) strand; PAM type: YTN; PAM sequence: CTT
cacactatgctctgagacta

SEQ ID NO: 213620 - DNA, 20 bp, Artificial Sequence
  Description of Artificial Sequence: Synthetic oligonucleotide
  Target: LAMA2; (-) strand; PAM type: YTN; PAM sequence: CTG
acttcacactatgctctgag

SEQ ID NO: 213621 - DNA, 20 bp, Artificial Sequence
  Description of Artificial Sequence: Synthetic oligonucleotide
  Target: LAMA2; (-) strand; PAM type: YTN; PAM sequence: CTG
ggggcatcacatcacctgac

SEQ ID NO: 213622 - DNA, 20 bp, Artificial Sequence
  Description of Artificial Sequence: Synthetic oligonucleotide
  Target: LAMA2; (-) strand; PAM type: YTN; PAM sequence: CTA
agcaaaaagatcaacgctgg

SEQ ID NO: 213623 - DNA, 20 bp, Artificial Sequence
  Description of Artificial Sequence: Synthetic oligonucleotide
  Target: LAMA2; (-) strand; PAM type: YTN; PAM sequence: TTC
taagcaaaaagatcaacgct

SEQ ID NO: 213624 - DNA, 20 bp, Artificial Sequence
  Description of Artificial Sequence: Synthetic oligonucleotide
  Target: LAMA2; (-) strand; PAM type: YTN; PAM sequence: TTA
atatggaaacaaaaaggagc

SEQ ID NO: 213625 - DNA, 20 bp, Artificial Sequence
  Description of Artificial Sequence: Synthetic oligonucleotide
  Target: LAMA2; (-) strand; PAM type: YTN; PAM sequence: CTA
aaattaatatggaaacaaaa

SEQ ID NO: 213626 - DNA, 20 bp, Artificial Sequence
  Description of Artificial Sequence: Synthetic oligonucleotide
  Target: LAMA2; (-) strand; PAM type: YTN; PAM sequence: TTC
taaaattaatatggaaacaa

SEQ ID NO: 213627 - DNA, 20 bp, Artificial Sequence
  Description of Artificial Sequence: Synthetic oligonucleotide
  Target: LAMA2; (-) strand; PAM type: YTN; PAM sequence: TTA
gaaaaaacaattctaaaatt

SEQ ID NO: 213628 - DNA, 20 bp, Artificial Sequence
  Description of Artificial Sequence: Synthetic oligonucleotide
  Target: LAMA2; (-) strand; PAM type: YTN; PAM sequence: TTC
acagaattagaaaaaacaat

SEQ ID NO: 213629 - DNA, 20 bp, Artificial Sequence
  Description of Artificial Sequence: Synthetic oligonucleotide
  Target: LAMA2; (-) strand; PAM type: YTN; PAM sequence: TTT
cacagaattagaaaaaacaa

SEQ ID NO: 213630 - DNA, 20 bp, Artificial Sequence
  Description of Artificial Sequence: Synthetic oligonucleotide
  Target: LAMA2; (-) strand; PAM type: YTN; PAM sequence: TTT
tcacagaattagaaaaaaca

SEQ ID NO: 213631 - DNA, 20 bp, Artificial Sequence
  Description of Artificial Sequence: Synthetic oligonucleotide
  Target: LAMA2; (-) strand; PAM type: YTN; PAM sequence: TTT
ttcacagaattagaaaaaac

SEQ ID NO: 213632 - DNA, 20 bp, Artificial Sequence
  Description of Artificial Sequence: Synthetic oligonucleotide
  Target: LAMA2; (-) strand; PAM type: YTN; PAM sequence: TTA
ccaatgtcatttttcacaga

SEQ ID NO: 213633 - DNA, 20 bp, Artificial Sequence
  Description of Artificial Sequence: Synthetic oligonucleotide
  Target: LAMA2; (-) strand; PAM type: YTN; PAM sequence: CTA
tcaaattaccaatgtcattt

SEQ ID NO: 213634 - DNA, 20 bp, Artificial Sequence
  Description of Artificial Sequence: Synthetic oligonucleotide
  Target: LAMA2; (-) strand; PAM type: YTN; PAM sequence: TTC
agtgcaatccctatcaaatt

SEQ ID NO: 213635 - DNA, 20 bp, Artificial Sequence
  Description of Artificial Sequence: Synthetic oligonucleotide
  Target: LAMA2; (-) strand; PAM type: YTN; PAM sequence: CTA
cagattcagtgcaatcccta

SEQ ID NO: 213636 - DNA, 20 bp, Artificial Sequence
  Description of Artificial Sequence: Synthetic oligonucleotide
  Target: LAMA2; (-) strand; PAM type: YTN; PAM sequence: CTA
cccaaaacaatctacagatt

SEQ ID NO: 213637 - DNA, 20 bp, Artificial Sequence
  Description of Artificial Sequence: Synthetic oligonucleotide
  Target: LAMA2; (-) strand; PAM type: YTN; PAM sequence: CTA
tgctacccaaaacaatctac

SEQ ID NO: 213638 - DNA, 20 bp, Artificial Sequence
  Description of Artificial Sequence: Synthetic oligonucleotide
  Target: LAMA2; (-) strand; PAM type: YTN; PAM sequence: TTA
aaatgactatgctacccaaa

SEQ ID NO: 213639 - DNA, 20 bp, Artificial Sequence
  Description of Artificial Sequence: Synthetic oligonucleotide
  Target: LAMA2; (-) strand; PAM type: YTN; PAM sequence: CTC
atggatagaaagaatcaata

SEQ ID NO: 213640 - DNA, 20 bp, Artificial Sequence
  Description of Artificial Sequence: Synthetic oligonucleotide
  Target: LAMA2; (-) strand; PAM type: YTN; PAM sequence: TTC
catgctcatggatagaaaga

SEQ ID NO: 213641 - DNA, 20 bp, Artificial Sequence
  Description of Artificial Sequence: Synthetic oligonucleotide
  Target: LAMA2; (-) strand; PAM type: YTN; PAM sequence: CTG
aggaaagaaatcataaatga

SEQ ID NO: 213642 - DNA, 20 bp, Artificial Sequence
  Description of Artificial Sequence: Synthetic oligonucleotide
  Target: LAMA2; (-) strand; PAM type: YTN; PAM sequence: TTC
aaaacactgaggaaagaaat

SEQ ID NO: 213643 - DNA, 20 bp, Artificial Sequence
  Description of Artificial Sequence: Synthetic oligonucleotide
  Target: LAMA2; (-) strand; PAM type: YTN; PAM sequence: CTT
caaaacactgaggaaagaaa

SEQ ID NO: 213644 - DNA, 20 bp, Artificial Sequence
  Description of Artificial Sequence: Synthetic oligonucleotide
  Target: LAMA2; (-) strand; PAM type: YTN; PAM sequence: TTC
ttcaaaacactgaggaaaga

SEQ ID NO: 213645 - DNA, 20 bp, Artificial Sequence
  Description of Artificial Sequence: Synthetic oligonucleotide
  Target: LAMA2; (-) strand; PAM type: YTN; PAM sequence: TTT
cttcaaaacactgaggaaag

SEQ ID NO: 213646 - DNA, 20 bp, Artificial Sequence
  Description of Artificial Sequence: Synthetic oligonucleotide
  Target: LAMA2; (-) strand; PAM type: YTN; PAM sequence: TTA
tgatttcttcaaaacactga

SEQ ID NO: 213647 - DNA, 20 bp, Artificial Sequence
  Description of Artificial Sequence: Synthetic oligonucleotide
  Target: LAMA2; (-) strand; PAM type: YTN; PAM sequence: TTG
attatgatttcttcaaaaca

SEQ ID NO: 213648 - DNA, 20 bp, Artificial Sequence
  Description of Artificial Sequence: Synthetic oligonucleotide
  Target: LAMA2; (-) strand; PAM type: YTN; PAM sequence: CTA
ccaggaattgattatgattt

SEQ ID NO: 213649 - DNA, 20 bp, Artificial Sequence
  Description of Artificial Sequence: Synthetic oligonucleotide
  Target: LAMA2; (-) strand; PAM type: YTN; PAM sequence: CTC
taccaggaattgattatgat

SEQ ID NO: 213650 - DNA, 20 bp, Artificial Sequence
  Description of Artificial Sequence: Synthetic oligonucleotide
  Target: LAMA2; (-) strand; PAM type: YTN; PAM sequence: TTA
accaaggaggtaaaagatct

SEQ ID NO: 213651 - DNA, 20 bp, Artificial Sequence
  Description of Artificial Sequence: Synthetic oligonucleotide
  Target: LAMA2; (-) strand; PAM type: YTN; PAM sequence: TTT
aaccaaggaggtaaaagatc

SEQ ID NO: 213652 - DNA, 20 bp, Artificial Sequence
  Description of Artificial Sequence: Synthetic oligonucleotide
  Target: LAMA2; (-) strand; PAM type: YTN; PAM sequence: CTA
ggaatacatttaaccaagga

SEQ ID NO: 213653 - DNA, 20 bp, Artificial Sequence
  Description of Artificial Sequence: Synthetic oligonucleotide
  Target: LAMA2; (-) strand; PAM type: YTN; PAM sequence: TTA
aaagtgaaatacctaggaat

SEQ ID NO: 213654 - DNA, 20 bp, Artificial Sequence
  Description of Artificial Sequence: Synthetic oligonucleotide
  Target: LAMA2; (-) strand; PAM type: YTN; PAM sequence: CTA
ttaaaagtgaaatacctagg

SEQ ID NO: 213655 - DNA, 20 bp, Artificial Sequence
  Description of Artificial Sequence: Synthetic oligonucleotide
  Target: LAMA2; (-) strand; PAM type: YTN; PAM sequence: TTA
gacatacataagaaaataac

SEQ ID NO: 213656 - DNA, 20 bp, Artificial Sequence
  Description of Artificial Sequence: Synthetic oligonucleotide
  Target: LAMA2; (-) strand; PAM type: YTN; PAM sequence: TTT
agacatacataagaaaataa

SEQ ID NO: 213657 - DNA, 20 bp, Artificial Sequence
  Description of Artificial Sequence: Synthetic oligonucleotide
  Target: LAMA2; (-) strand; PAM type: YTN; PAM sequence: TTA
aaatttagacatacataaga

SEQ ID NO: 213658 - DNA, 20 bp, Artificial Sequence
  Description of Artificial Sequence: Synthetic oligonucleotide
  Target: LAMA2; (-) strand; PAM type: YTN; PAM sequence: CTG
tgattaaaatttagacatac

SEQ ID NO: 213659 - DNA, 20 bp, Artificial Sequence
  Description of Artificial Sequence: Synthetic oligonucleotide
  Target: LAMA2; (-) strand; PAM type: YTN; PAM sequence: TTG
ctgtgattaaaatttagaca

SEQ ID NO: 213660 - DNA, 20 bp, Artificial Sequence
  Description of Artificial Sequence: Synthetic oligonucleotide
  Target: LAMA2; (-) strand; PAM type: YTN; PAM sequence: TTT
gctgtgattaaaatttagac

SEQ ID NO: 213661 - DNA, 20 bp, Artificial Sequence
  Description of Artificial Sequence: Synthetic oligonucleotide
  Target: LAMA2; (-) strand; PAM type: YTN; PAM sequence: TTA
caccataaatttgctgtgat

SEQ ID NO: 213662 - DNA, 20 bp, Artificial Sequence
  Description of Artificial Sequence: Synthetic oligonucleotide
  Target: LAMA2; (-) strand; PAM type: YTN; PAM sequence: TTA
agataggattacaccataaa

SEQ ID NO: 213663 - DNA, 20 bp, Artificial Sequence
  Description of Artificial Sequence: Synthetic oligonucleotide
  Target: LAMA2; (-) strand; PAM type: YTN; PAM sequence: CTA
attaagataggattacacca

SEQ ID NO: 213664 - DNA, 20 bp, Artificial Sequence
  Description of Artificial Sequence: Synthetic oligonucleotide
  Target: LAMA2; (-) strand; PAM type: YTN; PAM sequence: TTC
ccaacaaaggacatcatcca

SEQ ID NO: 213665 - DNA, 20 bp, Artificial Sequence
  Description of Artificial Sequence: Synthetic oligonucleotide
  Target: LAMA2; (-) strand; PAM type: YTN; PAM sequence: TTA
aattcccaacaaaggacatc

SEQ ID NO: 213666 - DNA, 20 bp, Artificial Sequence
  Description of Artificial Sequence: Synthetic oligonucleotide
  Target: LAMA2; (-) strand; PAM type: YTN; PAM sequence: TTA
ttaaattcccaacaaaggac

SEQ ID NO: 213667 - DNA, 20 bp, Artificial Sequence
  Description of Artificial Sequence: Synthetic oligonucleotide
  Target: LAMA2; (-) strand; PAM type: YTN; PAM sequence: TTT
attaaattcccaacaaagga

SEQ ID NO: 213668 - DNA, 20 bp, Artificial Sequence
  Description of Artificial Sequence: Synthetic oligonucleotide
  Target: LAMA2; (-) strand; PAM type: YTN; PAM sequence: TTT
tattaaattcccaacaaagg

SEQ ID NO: 213669 - DNA, 20 bp, Artificial Sequence
  Description of Artificial Sequence: Synthetic oligonucleotide
  Target: LAMA2; (-) strand; PAM type: YTN; PAM sequence: TTA
gattttattaaattcccaac

SEQ ID NO: 213670 - DNA, 20 bp, Artificial Sequence
  Description of Artificial Sequence: Synthetic oligonucleotide
  Target: LAMA2; (-) strand; PAM type: YTN; PAM sequence: CTA
agcagtattagattttatta

SEQ ID NO: 213671 - DNA, 20 bp, Artificial Sequence
  Description of Artificial Sequence: Synthetic oligonucleotide
  Target: LAMA2; (-) strand; PAM type: YTN; PAM sequence: TTG
gtccagctaagcagtattag

SEQ ID NO: 213672 - DNA, 20 bp, Artificial Sequence
  Description of Artificial Sequence: Synthetic oligonucleotide
  Target: LAMA2; (-) strand; PAM type: YTN; PAM sequence: CTT
ggtccagctaagcagtatta

SEQ ID NO: 213673 - DNA, 20 bp, Artificial Sequence
  Description of Artificial Sequence: Synthetic oligonucleotide
  Target: LAMA2; (-) strand; PAM type: YTN; PAM sequence: TTA
tccacttggtccagctaagc

SEQ ID NO: 213674 - DNA, 20 bp, Artificial Sequence
  Description of Artificial Sequence: Synthetic oligonucleotide
  Target: LAMA2; (-) strand; PAM type: YTN; PAM sequence: CTT
atccacttggtccagctaag

SEQ ID NO: 213675 - DNA, 20 bp, Artificial Sequence
  Description of Artificial Sequence: Synthetic oligonucleotide
  Target: LAMA2; (-) strand; PAM type: YTN; PAM sequence: TTC
aaatgtcatcttatccactt

SEQ ID NO: 213676 - DNA, 20 bp, Artificial Sequence
  Description of Artificial Sequence: Synthetic oligonucleotide
  Target: LAMA2; (-) strand; PAM type: YTN; PAM sequence: CTA
tggattcaaatgtcatctta

SEQ ID NO: 213677 - DNA, 20 bp, Artificial Sequence
  Description of Artificial Sequence: Synthetic oligonucleotide
  Target: LAMA2; (-) strand; PAM type: YTN; PAM sequence: CTA
caaggtccactatggattca

SEQ ID NO: 213678 - DNA, 20 bp, Artificial Sequence
  Description of Artificial Sequence: Synthetic oligonucleotide
  Target: LAMA2; (-) strand; PAM type: YTN; PAM sequence: CTA
tatagtagatacccaaataa

SEQ ID NO: 213679 - DNA, 20 bp, Artificial Sequence
  Description of Artificial Sequence: Synthetic oligonucleotide
  Target: LAMA2; (-) strand; PAM type: YTN; PAM sequence: CTC
tatatagtagatacccaaat

SEQ ID NO: 213680 - DNA, 20 bp, Artificial Sequence
  Description of Artificial Sequence: Synthetic oligonucleotide
  Target: LAMA2; (-) strand; PAM type: YTN; PAM sequence: TTC
tctatatagtagatacccaa

SEQ ID NO: 213681 - DNA, 20 bp, Artificial Sequence
  Description of Artificial Sequence: Synthetic oligonucleotide
  Target: LAMA2; (-) strand; PAM type: YTN; PAM sequence: TTT
ctctatatagtagataccca

SEQ ID NO: 213682 - DNA, 20 bp, Artificial Sequence
  Description of Artificial Sequence: Synthetic oligonucleotide
  Target: LAMA2; (-) strand; PAM type: YTN; PAM sequence: TTT
tctctatatagtagataccc

SEQ ID NO: 213683 - DNA, 20 bp, Artificial Sequence
  Description of Artificial Sequence: Synthetic oligonucleotide
  Target: LAMA2; (-) strand; PAM type: YTN; PAM sequence: TTA
tagaataccaatgttttctc

SEQ ID NO: 213684 - DNA, 20 bp, Artificial Sequence
  Description of Artificial Sequence: Synthetic oligonucleotide
  Target: LAMA2; (-) strand; PAM type: YTN; PAM sequence: TTT
atagaataccaatgttttct

SEQ ID NO: 213685 - DNA, 20 bp, Artificial Sequence
  Description of Artificial Sequence: Synthetic oligonucleotide
  Target: LAMA2; (-) strand; PAM type: YTN; PAM sequence: TTA
ggcatgtttatagaatacca

SEQ ID NO: 213686 - DNA, 20 bp, Artificial Sequence
  Description of Artificial Sequence: Synthetic oligonucleotide
  Target: LAMA2; (-) strand; PAM type: YTN; PAM sequence: CTT
aggcatgtttatagaatacc

SEQ ID NO: 213687 - DNA, 20 bp, Artificial Sequence
  Description of Artificial Sequence: Synthetic oligonucleotide
  Target: LAMA2; (-) strand; PAM type: YTN; PAM sequence: CTC
caatggatcttaggcatgtt

SEQ ID NO: 213688 - DNA, 20 bp, Artificial Sequence
  Description of Artificial Sequence: Synthetic oligonucleotide
  Target: LAMA2; (-) strand; PAM type: YTN; PAM sequence: CTA
accatacatactccaatgga

SEQ ID NO: 213689 - DNA, 20 bp, Artificial Sequence
  Description of Artificial Sequence: Synthetic oligonucleotide
  Target: LAMA2; (-) strand; PAM type: YTN; PAM sequence: TTG
taaccaaaaagaaaataaac

SEQ ID NO: 213690 - DNA, 20 bp, Artificial Sequence
  Description of Artificial Sequence: Synthetic oligonucleotide
  Target: LAMA2; (-) strand; PAM type: YTN; PAM sequence: TTA
ttgtaaccaaaaagaaaata

SEQ ID NO: 213691 - DNA, 20 bp, Artificial Sequence
  Description of Artificial Sequence: Synthetic oligonucleotide
  Target: LAMA2; (-) strand; PAM type: YTN; PAM sequence: TTT
attgtaaccaaaaagaaaat

SEQ ID NO: 213692 - DNA, 20 bp, Artificial Sequence
  Description of Artificial Sequence: Synthetic oligonucleotide
  Target: LAMA2; (-) strand; PAM type: YTN; PAM sequence: TTT
tattgtaaccaaaaagaaaa

SEQ ID NO: 213693 - DNA, 20 bp, Artificial Sequence
  Description of Artificial Sequence: Synthetic oligonucleotide
  Target: LAMA2; (-) strand; PAM type: YTN; PAM sequence: TTT
ttattgtaaccaaaaagaaa

SEQ ID NO: 213694 - DNA, 20 bp, Artificial Sequence
  Description of Artificial Sequence: Synthetic oligonucleotide
  Target: LAMA2; (-) strand; PAM type: YTN; PAM sequence: TTA
agtatttttattgtaaccaa

SEQ ID NO: 213695 - DNA, 20 bp, Artificial Sequence
  Description of Artificial Sequence: Synthetic oligonucleotide
  Target: LAMA2; (-) strand; PAM type: YTN; PAM sequence: TTA
cagtgaaaatgttaagtatt

SEQ ID NO: 213696 - DNA, 20 bp, Artificial Sequence
  Description of Artificial Sequence: Synthetic oligonucleotide
  Target: LAMA2; (-) strand; PAM type: YTN; PAM sequence: TTC
caaacaggttacagtgaaaa

SEQ ID NO: 213697 - DNA, 20 bp, Artificial Sequence
  Description of Artificial Sequence: Synthetic oligonucleotide
  Target: LAMA2; (-) strand; PAM type: YTN; PAM sequence: CTT
ccaaacaggttacagtgaaa

SEQ ID NO: 213698 - DNA, 20 bp, Artificial Sequence
  Description of Artificial Sequence: Synthetic oligonucleotide
  Target: LAMA2; (-) strand; PAM type: YTN; PAM sequence: TTC
cttccaaacaggttacagtg

SEQ ID NO: 213699 - DNA, 20 bp, Artificial Sequence
  Description of Artificial Sequence: Synthetic oligonucleotide
  Target: LAMA2; (-) strand; PAM type: YTN; PAM sequence: CTT
ccttccaaacaggttacagt

SEQ ID NO: 213700 - DNA, 20 bp, Artificial Sequence
  Description of Artificial Sequence: Synthetic oligonucleotide
  Target: LAMA2; (-) strand; PAM type: YTN; PAM sequence: CTC
ttccttccaaacaggttaca

SEQ ID NO: 213701 - DNA, 20 bp, Artificial Sequence
  Description of Artificial Sequence: Synthetic oligonucleotide
  Target: LAMA2; (-) strand; PAM type: YTN; PAM sequence: CTC
tcttccttccaaacaggtta

SEQ ID NO: 213702 - DNA, 20 bp, Artificial Sequence
  Description of Artificial Sequence: Synthetic oligonucleotide
  Target: LAMA2; (-) strand; PAM type: YTN; PAM sequence: TTA
ctctcttccttccaaacagg

SEQ ID NO: 213703 - DNA, 20 bp, Artificial Sequence
  Description of Artificial Sequence: Synthetic oligonucleotide
  Target: LAMA2; (-) strand; PAM type: YTN; PAM sequence: CTT
actctcttccttccaaacag

SEQ ID NO: 213704 - DNA, 20 bp, Artificial Sequence
  Description of Artificial Sequence: Synthetic oligonucleotide
  Target: LAMA2; (-) strand; PAM type: YTN; PAM sequence: TTG
cttactctcttccttccaaa

SEQ ID NO: 213705 - DNA, 20 bp, Artificial Sequence
  Description of Artificial Sequence: Synthetic oligonucleotide
  Target: LAMA2; (-) strand; PAM type: YTN; PAM sequence: TTA
aaattgcttactctcttcct

SEQ ID NO: 213706 - DNA, 20 bp, Artificial Sequence
  Description of Artificial Sequence: Synthetic oligonucleotide
  Target: LAMA2; (-) strand; PAM type: YTN; PAM sequence: TTT
aaaattgcttactctcttcc

SEQ ID NO: 213707 - DNA, 20 bp, Artificial Sequence
  Description of Artificial Sequence: Synthetic oligonucleotide
  Target: LAMA2; (-) strand; PAM type: YTN; PAM sequence: TTT
taaaattgcttactctcttc

SEQ ID NO: 213708 - DNA, 20 bp, Artificial Sequence
  Description of Artificial Sequence: Synthetic oligonucleotide
  Target: LAMA2; (-) strand; PAM type: YTN; PAM sequence: TTT
ttaaaattgcttactctctt

SEQ ID NO: 213709 - DNA, 20 bp, Artificial Sequence
  Description of Artificial Sequence: Synthetic oligonucleotide
  Target: LAMA2; (-) strand; PAM type: YTN; PAM sequence: TTA
atttttaaaattgcttactc

SEQ ID NO: 213710 - DNA, 20 bp, Artificial Sequence
  Description of Artificial Sequence: Synthetic oligonucleotide
  Target: LAMA2; (-) strand; PAM type: YTN; PAM sequence: TTG
aattaatttttaaaattgct

SEQ ID NO: 213711 - DNA, 20 bp, Artificial Sequence
  Description of Artificial Sequence: Synthetic oligonucleotide
  Target: LAMA2; (-) strand; PAM type: YTN; PAM sequence: CTG
ttgaattaatttttaaaatt

SEQ ID NO: 213712 - DNA, 20 bp, Artificial Sequence
  Description of Artificial Sequence: Synthetic oligonucleotide
  Target: LAMA2; (-) strand; PAM type: YTN; PAM sequence: CTC
tgttgaattaatttttaaaa

SEQ ID NO: 213713 - DNA, 20 bp, Artificial Sequence
  Description of Artificial Sequence: Synthetic oligonucleotide
  Target: LAMA2; (-) strand; PAM type: YTN; PAM sequence: TTC
tctgttgaattaatttttaa

SEQ ID NO: 213714 - DNA, 20 bp, Artificial Sequence
  Description of Artificial Sequence: Synthetic oligonucleotide
  Target: LAMA2; (-) strand; PAM type: YTN; PAM sequence: TTT
ctctgttgaattaattttta

SEQ ID NO: 213715 - DNA, 20 bp, Artificial Sequence
  Description of Artificial Sequence: Synthetic oligonucleotide
  Target: LAMA2; (-) strand; PAM type: YTN; PAM sequence: TTA
atcagaaaaagtagtacatg

SEQ ID NO: 213716 - DNA, 20 bp, Artificial Sequence
  Description of Artificial Sequence: Synthetic oligonucleotide
  Target: LAMA2; (-) strand; PAM type: YTN; PAM sequence: TTT
aatcagaaaaagtagtacat

SEQ ID NO: 213717 - DNA, 20 bp, Artificial Sequence
  Description of Artificial Sequence: Synthetic oligonucleotide
  Target: LAMA2; (-) strand; PAM type: YTN; PAM sequence: TTT
taatcagaaaaagtagtaca

SEQ ID NO: 213718 - DNA, 20 bp, Artificial Sequence
  Description of Artificial Sequence: Synthetic oligonucleotide
  Target: LAMA2; (-) strand; PAM type: YTN; PAM sequence: TTT
ttaatcagaaaaagtagtac

SEQ ID NO: 213719 - DNA, 20 bp, Artificial Sequence
  Description of Artificial Sequence: Synthetic oligonucleotide
  Target: LAMA2; (-) strand; PAM type: YTN; PAM sequence: TTT
tttaatcagaaaaagtagta

SEQ ID NO: 213720 - DNA, 20 bp, Artificial Sequence
  Description of Artificial Sequence: Synthetic oligonucleotide
  Target: LAMA2; (-) strand; PAM type: YTN; PAM sequence: TTT
ttttaatcagaaaaagtagt

SEQ ID NO: 213721 - DNA, 20 bp, Artificial Sequence
  Description of Artificial Sequence: Synthetic oligonucleotide
  Target: LAMA2; (-) strand; PAM type: YTN; PAM sequence: TTT
tttttaatcagaaaaagtag

SEQ ID NO: 213722 - DNA, 20 bp, Artificial Sequence
  Description of Artificial Sequence: Synthetic oligonucleotide
  Target: LAMA2; (-) strand; PAM type: YTN; PAM sequence: TTT
ttttttaatcagaaaaagta

SEQ ID NO: 213723 - DNA, 20 bp, Artificial Sequence
  Description of Artificial Sequence: Synthetic oligonucleotide
  Target: LAMA2; (-) strand; PAM type: YTN; PAM sequence: TTT
tttttttaatcagaaaaagt

SEQ ID NO: 213724 - DNA, 20 bp, Artificial Sequence
  Description of Artificial Sequence: Synthetic oligonucleotide
  Target: LAMA2; (-) strand; PAM type: YTN; PAM sequence: TTT
ttttttttaatcagaaaaag

SEQ ID NO: 213725 - DNA, 20 bp, Artificial Sequence
  Description of Artificial Sequence: Synthetic oligonucleotide
  Target: LAMA2; (-) strand; PAM type: YTN; PAM sequence: CTT
tttttttttaatcagaaaaa

SEQ ID NO: 213726 - DNA, 20 bp, Artificial Sequence
  Description of Artificial Sequence: Synthetic oligonucleotide
  Target: LAMA2; (-) strand; PAM type: YTN; PAM sequence: TTC
tttttttttttaatcagaaa

SEQ ID NO: 213727 - DNA, 20 bp, Artificial Sequence
  Description of Artificial Sequence: Synthetic oligonucleotide
  Target: LAMA2; (-) strand; PAM type: YTN; PAM sequence: CTT
ctttttttttttaatcagaa

SEQ ID NO: 213728 - DNA, 20 bp, Artificial Sequence
  Description of Artificial Sequence: Synthetic oligonucleotide
  Target: LAMA2; (-) strand; PAM type: YTN; PAM sequence: TTC
ttctttttttttttaatcag

SEQ ID NO: 213729 - DNA, 20 bp, Artificial Sequence
  Description of Artificial Sequence: Synthetic oligonucleotide
  Target: LAMA2; (-) strand; PAM type: YTN; PAM sequence: CTT
cttctttttttttttaatca

SEQ ID NO: 213730 - DNA, 20 bp, Artificial Sequence
  Description of Artificial Sequence: Synthetic oligonucleotide
  Target: LAMA2; (-) strand; PAM type: YTN; PAM sequence: TTC
ttcttctttttttttttaat

SEQ ID NO: 213731 - DNA, 20 bp, Artificial Sequence
  Description of Artificial Sequence: Synthetic oligonucleotide
  Target: LAMA2; (-) strand; PAM type: YTN; PAM sequence: CTT
cttcttctttttttttttaa

SEQ ID NO: 213732 - DNA, 20 bp, Artificial Sequence
  Description of Artificial Sequence: Synthetic oligonucleotide
  Target: LAMA2; (-) strand; PAM type: YTN; PAM sequence: TTC
ttcttcttcttttttttttt

SEQ ID NO: 213733 - DNA, 20 bp, Artificial Sequence
  Description of Artificial Sequence: Synthetic oligonucleotide
  Target: LAMA2; (-) strand; PAM type: YTN; PAM sequence: TTT
cttcttcttctttttttttt

SEQ ID NO: 213734 - DNA, 20 bp, Artificial Sequence
  Description of Artificial Sequence: Synthetic oligonucleotide
  Target: LAMA2; (-) strand; PAM type: YTN; PAM sequence: TTT
tcttcttcttcttttttttt

SEQ ID NO: 213735 - DNA, 20 bp, Artificial Sequence
  Description of Artificial Sequence: Synthetic oligonucleotide
  Target: LAMA2; (-) strand; PAM type: YTN; PAM sequence: CTT
ttcttcttcttctttttttt

SEQ ID NO: 213736 - DNA, 20 bp, Artificial Sequence
  Description of Artificial Sequence: Synthetic oligonucleotide
  Target: LAMA2; (-) strand; PAM type: YTN; PAM sequence: CTC
ttttcttcttcttctttttt

SEQ ID NO: 213737 - DNA, 20 bp, Artificial Sequence
  Description of Artificial Sequence: Synthetic oligonucleotide
  Target: LAMA2; (-) strand; PAM type: YTN; PAM sequence: CTG
tgggctcttttcttcttctt

SEQ ID NO: 213738 - DNA, 20 bp, Artificial Sequence
  Description of Artificial Sequence: Synthetic oligonucleotide
  Target: LAMA2; (-) strand; PAM type: YTN; PAM sequence: CTG
ctgtgggctcttttcttctt

SEQ ID NO: 213739 - DNA, 20 bp, Artificial Sequence
  Description of Artificial Sequence: Synthetic oligonucleotide
  Target: LAMA2; (-) strand; PAM type: YTN; PAM sequence: CTG
agctgctgtgggctcttttc

SEQ ID NO: 213740 - DNA, 20 bp, Artificial Sequence
  Description of Artificial Sequence: Synthetic oligonucleotide
  Target: LAMA2; (-) strand; PAM type: YTN; PAM sequence: TTC
tgagctgctgtgggctcttt

SEQ ID NO: 213741 - DNA, 20 bp, Artificial Sequence
  Description of Artificial Sequence: Synthetic oligonucleotide
  Target: LAMA2; (-) strand; PAM type: YTN; PAM sequence: CTT
ctgagctgctgtgggctctt

SEQ ID NO: 213742 - DNA, 20 bp, Artificial Sequence
  Description of Artificial Sequence: Synthetic oligonucleotide
  Target: LAMA2; (-) strand; PAM type: YTN; PAM sequence: TTG
gaggcttctgagctgctgtg

SEQ ID NO: 213743 - DNA, 20 bp, Artificial Sequence
  Description of Artificial Sequence: Synthetic oligonucleotide
  Target: LAMA2; (-) strand; PAM type: YTN; PAM sequence: TTT
ggaggcttctgagctgctgt

SEQ ID NO: 213744 - DNA, 20 bp, Artificial Sequence
  Description of Artificial Sequence: Synthetic oligonucleotide
  Target: LAMA2; (-) strand; PAM type: YTN; PAM sequence: TTT
tggaggcttctgagctgctg

SEQ ID NO: 213745 - DNA, 20 bp, Artificial Sequence
  Description of Artificial Sequence: Synthetic oligonucleotide
  Target: LAMA2; (-) strand; PAM type: YTN; PAM sequence: TTT
ttggaggcttctgagctgct

SEQ ID NO: 213746 - DNA, 20 bp, Artificial Sequence
  Description of Artificial Sequence: Synthetic oligonucleotide
  Target: LAMA2; (-) strand; PAM type: YTN; PAM sequence: CTA
aaataaaagagtatttttgg

SEQ ID NO: 213747 - DNA, 20 bp, Artificial Sequence
  Description of Artificial Sequence: Synthetic oligonucleotide
  Target: LAMA2; (-) strand; PAM type: YTN; PAM sequence: TTC
taaaataaaagagtattttt

SEQ ID NO: 213748 - DNA, 20 bp, Artificial Sequence
  Description of Artificial Sequence: Synthetic oligonucleotide
  Target: LAMA2; (-) strand; PAM type: YTN; PAM sequence: CTT
ctaaaataaaagagtatttt

SEQ ID NO: 213749 - DNA, 20 bp, Artificial Sequence
  Description of Artificial Sequence: Synthetic oligonucleotide
  Target: LAMA2; (-) strand; PAM type: YTN; PAM sequence: TTC
agcttctaaaataaaagagt

SEQ ID NO: 213750 - DNA, 20 bp, Artificial Sequence
  Description of Artificial Sequence: Synthetic oligonucleotide
  Target: LAMA2; (-) strand; PAM type: YTN; PAM sequence: TTT
cagcttctaaaataaaagag

SEQ ID NO: 213751 - DNA, 20 bp, Artificial Sequence
  Description of Artificial Sequence: Synthetic oligonucleotide
  Target: LAMA2; (-) strand; PAM type: YTN; PAM sequence: TTT
tcagcttctaaaataaaaga

SEQ ID NO: 213752 - DNA, 20 bp, Artificial Sequence
  Description of Artificial Sequence: Synthetic oligonucleotide
  Target: LAMA2; (-) strand; PAM type: YTN; PAM sequence: CTT
ttcagcttctaaaataaaag

SEQ ID NO: 213753 - DNA, 20 bp, Artificial Sequence
  Description of Artificial Sequence: Synthetic oligonucleotide
  Target: LAMA2; (-) strand; PAM type: YTN; PAM sequence: CTG
cccttttcagcttctaaaat

SEQ ID NO: 213754 - DNA, 20 bp, Artificial Sequence
  Description of Artificial Sequence: Synthetic oligonucleotide
  Target: LAMA2; (-) strand; PAM type: YTN; PAM sequence: TTA
gatctgcccttttcagcttc

SEQ ID NO: 213755 - DNA, 20 bp, Artificial Sequence
  Description of Artificial Sequence: Synthetic oligonucleotide
  Target: LAMA2; (-) strand; PAM type: YTN; PAM sequence: TTA
gttagatctgcccttttcag

SEQ ID NO: 213756 - DNA, 20 bp, Artificial Sequence
  Description of Artificial Sequence: Synthetic oligonucleotide
  Target: LAMA2; (-) strand; PAM type: YTN; PAM sequence: TTG
taccattagttagatctgcc

SEQ ID NO: 213757 - DNA, 20 bp, Artificial Sequence
  Description of Artificial Sequence: Synthetic oligonucleotide
  Target: LAMA2; (-) strand; PAM type: YTN; PAM sequence: CTT
gtaccattagttagatctgc

SEQ ID NO: 213758 - DNA, 20 bp, Artificial Sequence
  Description of Artificial Sequence: Synthetic oligonucleotide
  Target: LAMA2; (-) strand; PAM type: YTN; PAM sequence: TTG
tcttgtaccattagttagat

SEQ ID NO: 213759 - DNA, 20 bp, Artificial Sequence
  Description of Artificial Sequence: Synthetic oligonucleotide
  Target: LAMA2; (-) strand; PAM type: YTN; PAM sequence: TTT
gtcttgtaccattagttaga

SEQ ID NO: 213760 - DNA, 20 bp, Artificial Sequence
  Description of Artificial Sequence: Synthetic oligonucleotide
  Target: LAMA2; (-) strand; PAM type: YTN; PAM sequence: TTC
aatttgtcttgtaccattag

SEQ ID NO: 213761 - DNA, 20 bp, Artificial Sequence
  Description of Artificial Sequence: Synthetic oligonucleotide
  Target: LAMA2; (-) strand; PAM type: YTN; PAM sequence: TTT
caatttgtcttgtaccatta

SEQ ID NO: 213762 - DNA, 20 bp, Artificial Sequence
  Description of Artificial Sequence: Synthetic oligonucleotide
  Target: LAMA2; (-) strand; PAM type: YTN; PAM sequence: CTT
tcaatttgtcttgtaccatt

SEQ ID NO: 213763 - DNA, 20 bp, Artificial Sequence
  Description of Artificial Sequence: Synthetic oligonucleotide
  Target: LAMA2; (-) strand; PAM type: YTN; PAM sequence: TTA
taggactttcaatttgtctt

SEQ ID NO: 213764 - DNA, 20 bp, Artificial Sequence
  Description of Artificial Sequence: Synthetic oligonucleotide
  Target: LAMA2; (-) strand; PAM type: YTN; PAM sequence: TTT
ataggactttcaatttgtct

SEQ ID NO: 213765 - DNA, 20 bp, Artificial Sequence
  Description of Artificial Sequence: Synthetic oligonucleotide
  Target: LAMA2; (-) strand; PAM type: YTN; PAM sequence: CTG
tttataggactttcaatttg

SEQ ID NO: 213766 - DNA, 20 bp, Artificial Sequence
  Description of Artificial Sequence: Synthetic oligonucleotide
  Target: LAMA2; (-) strand; PAM type: YTN; PAM sequence: TTC
ctgtttataggactttcaat

SEQ ID NO: 213767 - DNA, 20 bp, Artificial Sequence
  Description of Artificial Sequence: Synthetic oligonucleotide
  Target: LAMA2; (-) strand; PAM type: YTN; PAM sequence: CTA
ttcctgtttataggactttc

SEQ ID NO: 213768 - DNA, 20 bp, Artificial Sequence
  Description of Artificial Sequence: Synthetic oligonucleotide
  Target: LAMA2; (-) strand; PAM type: YTN; PAM sequence: TTC
tattcctgtttataggactt

SEQ ID NO: 213769 - DNA, 20 bp, Artificial Sequence
  Description of Artificial Sequence: Synthetic oligonucleotide
  Target: LAMA2; (-) strand; PAM type: YTN; PAM sequence: TTC
agaagcaaacaaaaccaaag

SEQ ID NO: 213770 - DNA, 20 bp, Artificial Sequence
  Description of Artificial Sequence: Synthetic oligonucleotide
  Target: LAMA2; (-) strand; PAM type: YTN; PAM sequence: TTG
ttcagaagcaaacaaaacca

SEQ ID NO: 213771 - DNA, 20 bp, Artificial Sequence
  Description of Artificial Sequence: Synthetic oligonucleotide
  Target: LAMA2; (-) strand; PAM type: YTN; PAM sequence: TTG
aatccagttgttcagaagca

SEQ ID NO: 213772 - DNA, 20 bp, Artificial Sequence
  Description of Artificial Sequence: Synthetic oligonucleotide
  Target: LAMA2; (-) strand; PAM type: YTN; PAM sequence: CTG
gggggaaagaaagaaggttg

SEQ ID NO: 213773 - DNA, 20 bp, Artificial Sequence
  Description of Artificial Sequence: Synthetic oligonucleotide
  Target: LAMA2; (-) strand; PAM type: YTN; PAM sequence: CTA
agagctggggggaaagaaag

SEQ ID NO: 213774 - DNA, 20 bp, Artificial Sequence
  Description of Artificial Sequence: Synthetic oligonucleotide
  Target: LAMA2; (-) strand; PAM type: YTN; PAM sequence: CTG
acacaacaatgcctaagagc

SEQ ID NO: 213775 - DNA, 20 bp, Artificial Sequence
  Description of Artificial Sequence: Synthetic oligonucleotide
  Target: LAMA2; (-) strand; PAM type: YTN; PAM sequence: CTG
tcctgacacaacaatgccta

SEQ ID NO: 213776 - DNA, 20 bp, Artificial Sequence
  Description of Artificial Sequence: Synthetic oligonucleotide
  Target: LAMA2; (-) strand; PAM type: YTN; PAM sequence: TTG
aaccatagctgtcctgacac

SEQ ID NO: 213777 - DNA, 20 bp, Artificial Sequence
  Description of Artificial Sequence: Synthetic oligonucleotide
  Target: LAMA2; (-) strand; PAM type: YTN; PAM sequence: TTT
gaaccatagctgtcctgaca

SEQ ID NO: 213778 - DNA, 20 bp, Artificial Sequence
  Description of Artificial Sequence: Synthetic oligonucleotide
  Target: LAMA2; (-) strand; PAM type: YTN; PAM sequence: CTG
gaaaatcagcccaatttgaa

SEQ ID NO: 213779 - DNA, 20 bp, Artificial Sequence
  Description of Artificial Sequence: Synthetic oligonucleotide
  Target: LAMA2; (-) strand; PAM type: YTN; PAM sequence: TTA
atagaactggaaaatcagcc

SEQ ID NO: 213780 - DNA, 20 bp, Artificial Sequence
  Description of Artificial Sequence: Synthetic oligonucleotide
  Target: LAMA2; (-) strand; PAM type: YTN; PAM sequence: TTT
aatagaactggaaaatcagc

SEQ ID NO: 213781 - DNA, 20 bp, Artificial Sequence
  Description of Artificial Sequence: Synthetic oligonucleotide
  Target: LAMA2; (-) strand; PAM type: YTN; PAM sequence: TTG
atccacgatgcagatgaagg

SEQ ID NO: 213782 - DNA, 20 bp, Artificial Sequence
  Description of Artificial Sequence: Synthetic oligonucleotide
  Target: LAMA2; (-) strand; PAM type: YTN; PAM sequence: TTT
gatccacgatgcagatgaag

SEQ ID NO: 213783 - DNA, 20 bp, Artificial Sequence
  Description of Artificial Sequence: Synthetic oligonucleotide
  Target: LAMA2; (-) strand; PAM type: YTN; PAM sequence: TTA
atgtatttgatccacgatgc

SEQ ID NO: 213784 - DNA, 20 bp, Artificial Sequence
  Description of Artificial Sequence: Synthetic oligonucleotide
  Target: LAMA2; (-) strand; PAM type: YTN; PAM sequence: CTA
gttaatgtatttgatccacg

SEQ ID NO: 213785 - DNA, 20 bp, Artificial Sequence
  Description of Artificial Sequence: Synthetic oligonucleotide
  Target: LAMA2; (-) strand; PAM type: YTN; PAM sequence: CTG
cagacagctagttaatgtat

SEQ ID NO: 213786 - DNA, 20 bp, Artificial Sequence
  Description of Artificial Sequence: Synthetic oligonucleotide
  Target: LAMA2; (-) strand; PAM type: YTN; PAM sequence: CTG
tgcactgcagacagctagtt

SEQ ID NO: 213787 - DNA, 20 bp, Artificial Sequence
  Description of Artificial Sequence: Synthetic oligonucleotide
  Target: LAMA2; (-) strand; PAM type: YTN; PAM sequence: TTC
cagctgtgcactgcagacag

SEQ ID NO: 213788 - DNA, 20 bp, Artificial Sequence
  Description of Artificial Sequence: Synthetic oligonucleotide
  Target: LAMA2; (-) strand; PAM type: YTN; PAM sequence: TTT
ccagctgtgcactgcagaca

SEQ ID NO: 213789 - DNA, 20 bp, Artificial Sequence
  Description of Artificial Sequence: Synthetic oligonucleotide
  Target: LAMA2; (-) strand; PAM type: YTN; PAM sequence: TTG
gtataaaacaaaaatggcac

SEQ ID NO: 213790 - DNA, 20 bp, Artificial Sequence
  Description of Artificial Sequence: Synthetic oligonucleotide
  Target: LAMA2; (-) strand; PAM type: YTN; PAM sequence: CTA
tgtgggtgtgtcagagcata

SEQ ID NO: 213791 - DNA, 20 bp, Artificial Sequence
  Description of Artificial Sequence: Synthetic oligonucleotide
  Target: LAMA2; (-) strand; PAM type: YTN; PAM sequence: CTG
agctatgtgggtgtgtcaga

SEQ ID NO: 213792 - DNA, 20 bp, Artificial Sequence
  Description of Artificial Sequence: Synthetic oligonucleotide
  Target: LAMA2; (-) strand; PAM type: YTN; PAM sequence: CTG
aaatcctgagctatgtgggt

SEQ ID NO: 213793 - DNA, 20 bp, Artificial Sequence
  Description of Artificial Sequence: Synthetic oligonucleotide
  Target: LAMA2; (-) strand; PAM type: YTN; PAM sequence: CTG
ctgaaatcctgagctatgtg

SEQ ID NO: 213794 - DNA, 20 bp, Artificial Sequence
  Description of Artificial Sequence: Synthetic oligonucleotide
  Target: LAMA2; (-) strand; PAM type: YTN; PAM sequence: TTG
actgctgaaatcctgagcta

SEQ ID NO: 213795 - DNA, 20 bp, Artificial Sequence
  Description of Artificial Sequence: Synthetic oligonucleotide
  Target: LAMA2; (-) strand; PAM type: YTN; PAM sequence: CTA
tcaaggaagaaaaggagata

SEQ ID NO: 213796 - DNA, 20 bp, Artificial Sequence
  Description of Artificial Sequence: Synthetic oligonucleotide
  Target: LAMA2; (-) strand; PAM type: YTN; PAM sequence: CTA
agacctatcaaggaagaaaa

SEQ ID NO: 213797 - DNA, 20 bp, Artificial Sequence
  Description of Artificial Sequence: Synthetic oligonucleotide
  Target: LAMA2; (-) strand; PAM type: YTN; PAM sequence: TTC
taagacctatcaaggaagaa

SEQ ID NO: 213798 - DNA, 20 bp, Artificial Sequence
  Description of Artificial Sequence: Synthetic oligonucleotide
  Target: LAMA2; (-) strand; PAM type: YTN; PAM sequence: TTA
aaatgttctaagacctatca

SEQ ID NO: 213799 - DNA, 20 bp, Artificial Sequence
  Description of Artificial Sequence: Synthetic oligonucleotide
  Target: LAMA2; (-) strand; PAM type: YTN; PAM sequence: TTT
aaaatgttctaagacctatc

SEQ ID NO: 213800 - DNA, 20 bp, Artificial Sequence
  Description of Artificial Sequence: Synthetic oligonucleotide
  Target: LAMA2; (-) strand; PAM type: YTN; PAM sequence: TTA
aaagacaaaagagaatacac

SEQ ID NO: 213801 - DNA, 20 bp, Artificial Sequence
  Description of Artificial Sequence: Synthetic oligonucleotide
  Target: LAMA2; (-) strand; PAM type: YTN; PAM sequence: TTT
aaaagacaaaagagaataca

SEQ ID NO: 213802 - DNA, 20 bp, Artificial Sequence
  Description of Artificial Sequence: Synthetic oligonucleotide
  Target: LAMA2; (-) strand; PAM type: YTN; PAM sequence: TTC
aatatttaaaagacaaaaga

SEQ ID NO: 213803 - DNA, 20 bp, Artificial Sequence
  Description of Artificial Sequence: Synthetic oligonucleotide
  Target: LAMA2; (-) strand; PAM type: YTN; PAM sequence: TTG
caagtgattcaatatttaaa

SEQ ID NO: 213804 - DNA, 20 bp, Artificial Sequence
  Description of Artificial Sequence: Synthetic oligonucleotide
  Target: LAMA2; (-) strand; PAM type: YTN; PAM sequence: TTT
gcaagtgattcaatatttaa

SEQ ID NO: 213805 - DNA, 20 bp, Artificial Sequence
  Description of Artificial Sequence: Synthetic oligonucleotide
  Target: LAMA2; (-) strand; PAM type: YTN; PAM sequence: TTC
atgcaagcagagatgtttgc

SEQ ID NO: 213806 - DNA, 20 bp, Artificial Sequence
  Description of Artificial Sequence: Synthetic oligonucleotide
  Target: LAMA2; (-) strand; PAM type: YTN; PAM sequence: TTG
aaaaatattcatgcaagcag

SEQ ID NO: 213807 - DNA, 20 bp, Artificial Sequence
  Description of Artificial Sequence: Synthetic oligonucleotide
  Target: LAMA2; (-) strand; PAM type: YTN; PAM sequence: TTT
gaaaaatattcatgcaagca

SEQ ID NO: 213808 - DNA, 20 bp, Artificial Sequence
  Description of Artificial Sequence: Synthetic oligonucleotide
  Target: LAMA2; (-) strand; PAM type: YTN; PAM sequence: TTT
tgaaaaatattcatgcaagc

SEQ ID NO: 213809 - DNA, 20 bp, Artificial Sequence
  Description of Artificial Sequence: Synthetic oligonucleotide
  Target: LAMA2; (-) strand; PAM type: YTN; PAM sequence: CTA
tggagcattttgaaaaatat

SEQ ID NO: 213810 - DNA, 20 bp, Artificial Sequence
  Description of Artificial Sequence: Synthetic oligonucleotide
  Target: LAMA2; (-) strand; PAM type: YTN; PAM sequence: CTA
ggtctatggagcattttgaa

SEQ ID NO: 213811 - DNA, 20 bp, Artificial Sequence
  Description of Artificial Sequence: Synthetic oligonucleotide
  Target: LAMA2; (-) strand; PAM type: YTN; PAM sequence: TTC
taggtctatggagcattttg

SEQ ID NO: 213812 - DNA, 20 bp, Artificial Sequence
  Description of Artificial Sequence: Synthetic oligonucleotide
  Target: LAMA2; (-) strand; PAM type: YTN; PAM sequence: CTT
ctaggtctatggagcatttt

SEQ ID NO: 213813 - DNA, 20 bp, Artificial Sequence
  Description of Artificial Sequence: Synthetic oligonucleotide
  Target: LAMA2; (-) strand; PAM type: YTN; PAM sequence: TTC
agcttctaggtctatggagc

SEQ ID NO: 213814 - DNA, 20 bp, Artificial Sequence
  Description of Artificial Sequence: Synthetic oligonucleotide
  Target: LAMA2; (-) strand; PAM type: YTN; PAM sequence: TTT
cagcttctaggtctatggag

SEQ ID NO: 213815 - DNA, 20 bp, Artificial Sequence
  Description of Artificial Sequence: Synthetic oligonucleotide
  Target: LAMA2; (-) strand; PAM type: YTN; PAM sequence: TTC
catttcagcttctaggtcta

SEQ ID NO: 213816 - DNA, 20 bp, Artificial Sequence
  Description of Artificial Sequence: Synthetic oligonucleotide
  Target: LAMA2; (-) strand; PAM type: YTN; PAM sequence: TTT
ccatttcagcttctaggtct

SEQ ID NO: 213817 - DNA, 20 bp, Artificial Sequence
  Description of Artificial Sequence: Synthetic oligonucleotide
  Target: LAMA2; (-) strand; PAM type: YTN; PAM sequence: CTT
tccatttcagcttctaggtc

SEQ ID NO: 213818 - DNA, 20 bp, Artificial Sequence
  Description of Artificial Sequence: Synthetic oligonucleotide
  Target: LAMA2; (-) strand; PAM type: YTN; PAM sequence: CTA
actttccatttcagcttcta

SEQ ID NO: 213819 - DNA, 20 bp, Artificial Sequence
  Description of Artificial Sequence: Synthetic oligonucleotide
  Target: LAMA2; (-) strand; PAM type: YTN; PAM sequence: TTC
taactttccatttcagcttc

SEQ ID NO: 213820 - DNA, 20 bp, Artificial Sequence
  Description of Artificial Sequence: Synthetic oligonucleotide
  Target: LAMA2; (-) strand; PAM type: YTN; PAM sequence: TTG
aatgattctaactttccatt

SEQ ID NO: 213821 - DNA, 20 bp, Artificial Sequence
  Description of Artificial Sequence: Synthetic oligonucleotide
  Target: LAMA2; (-) strand; PAM type: YTN; PAM sequence: TTT
gaatgattctaactttccat

SEQ ID NO: 213822 - DNA, 20 bp, Artificial Sequence
  Description of Artificial Sequence: Synthetic oligonucleotide
  Target: LAMA2; (-) strand; PAM type: YTN; PAM sequence: TTG
tgtttgaatgattctaactt

SEQ ID NO: 213823 - DNA, 20 bp, Artificial Sequence
  Description of Artificial Sequence: Synthetic oligonucleotide
  Target: LAMA2; (-) strand; PAM type: YTN; PAM sequence: TTT
gtgtttgaatgattctaact

SEQ ID NO: 213824 - DNA, 20 bp, Artificial Sequence
  Description of Artificial Sequence: Synthetic oligonucleotide
  Target: LAMA2; (-) strand; PAM type: YTN; PAM sequence: CTC
aaaggaataaaatcaaaatt

SEQ ID NO: 213825 - DNA, 20 bp, Artificial Sequence
  Description of Artificial Sequence: Synthetic oligonucleotide
  Target: LAMA2; (-) strand; PAM type: YTN; PAM sequence: CTC
tcaaaggaataaaatcaaaa

SEQ ID NO: 213826 - DNA, 20 bp, Artificial Sequence
  Description of Artificial Sequence: Synthetic oligonucleotide
  Target: LAMA2; (-) strand; PAM type: YTN; PAM sequence: CTA
ccatctctcaaaggaataaa

SEQ ID NO: 213827 - DNA, 20 bp, Artificial Sequence
  Description of Artificial Sequence: Synthetic oligonucleotide
  Target: LAMA2; (-) strand; PAM type: YTN; PAM sequence: TTC
atgccaatcacctaccatct

SEQ ID NO: 213828 - DNA, 20 bp, Artificial Sequence
  Description of Artificial Sequence: Synthetic oligonucleotide
  Target: LAMA2; (-) strand; PAM type: YTN; PAM sequence: TTT
catgccaatcacctaccatc

SEQ ID NO: 213829 - DNA, 20 bp, Artificial Sequence
  Description of Artificial Sequence: Synthetic oligonucleotide
  Target: LAMA2; (-) strand; PAM type: YTN; PAM sequence: CTA
tttcatgccaatcacctacc

SEQ ID NO: 213830 - DNA, 20 bp, Artificial Sequence
  Description of Artificial Sequence: Synthetic oligonucleotide
  Target: LAMA2; (-) strand; PAM type: YTN; PAM sequence: CTG
ctatttcatgccaatcacct

SEQ ID NO: 213831 - DNA, 20 bp, Artificial Sequence
  Description of Artificial Sequence: Synthetic oligonucleotide
  Target: LAMA2; (-) strand; PAM type: YTN; PAM sequence: TTA
tcctgctatttcatgccaat

SEQ ID NO: 213832 - DNA, 20 bp, Artificial Sequence
  Description of Artificial Sequence: Synthetic oligonucleotide
  Target: LAMA2; (-) strand; PAM type: YTN; PAM sequence: TTT
atcctgctatttcatgccaa

SEQ ID NO: 213833 - DNA, 20 bp, Artificial Sequence
  Description of Artificial Sequence: Synthetic oligonucleotide
  Target: LAMA2; (-) strand; PAM type: YTN; PAM sequence: TTG
gtagacaatatttatcctgc

SEQ ID NO: 213834 - DNA, 20 bp, Artificial Sequence
  Description of Artificial Sequence: Synthetic oligonucleotide
  Target: LAMA2; (-) strand; PAM type: YTN; PAM sequence: TTT
ggtagacaatatttatcctg

SEQ ID NO: 213835 - DNA, 20 bp, Artificial Sequence
  Description of Artificial Sequence: Synthetic oligonucleotide
  Target: LAMA2; (-) strand; PAM type: YTN; PAM sequence: TTT
tggtagacaatatttatcct

SEQ ID NO: 213836 - DNA, 20 bp, Artificial Sequence
  Description of Artificial Sequence: Synthetic oligonucleotide
  Target: LAMA2; (-) strand; PAM type: YTN; PAM sequence: CTT
ttggtagacaatatttatcc

SEQ ID NO: 213837 - DNA, 20 bp, Artificial Sequence
  Description of Artificial Sequence: Synthetic oligonucleotide
  Target: LAMA2; (-) strand; PAM type: YTN; PAM sequence: TTA
cttttggtagacaatattta

SEQ ID NO: 213838 - DNA, 20 bp, Artificial Sequence
  Description of Artificial Sequence: Synthetic oligonucleotide
  Target: LAMA2; (-) strand; PAM type: YTN; PAM sequence: CTT
acttttggtagacaatattt

SEQ ID NO: 213839 - DNA, 20 bp, Artificial Sequence
  Description of Artificial Sequence: Synthetic oligonucleotide
  Target: LAMA2; (-) strand; PAM type: YTN; PAM sequence: CTC
atcttacttttggtagacaa

SEQ ID NO: 213840 - DNA, 20 bp, Artificial Sequence
  Description of Artificial Sequence: Synthetic oligonucleotide
  Target: LAMA2; (-) strand; PAM type: YTN; PAM sequence: CTC
tcatcttacttttggtagac

SEQ ID NO: 213841 - DNA, 20 bp, Artificial Sequence
  Description of Artificial Sequence: Synthetic oligonucleotide
  Target: LAMA2; (-) strand; PAM type: YTN; PAM sequence: CTC
tctcatcttacttttggtag

SEQ ID NO: 213842 - DNA, 20 bp, Artificial Sequence
  Description of Artificial Sequence: Synthetic oligonucleotide
  Target: LAMA2; (-) strand; PAM type: YTN; PAM sequence: CTC
tctctcatcttacttttggt

SEQ ID NO: 213843 - DNA, 20 bp, Artificial Sequence
  Description of Artificial Sequence: Synthetic oligonucleotide
  Target: LAMA2; (-) strand; PAM type: YTN; PAM sequence: CTC
tctctctcatcttacttttg

SEQ ID NO: 213844 - DNA, 20 bp, Artificial Sequence
  Description of Artificial Sequence: Synthetic oligonucleotide
  Target: LAMA2; (-) strand; PAM type: YTN; PAM sequence: TTC
ctctctctctcatcttactt

SEQ ID NO: 213845 - DNA, 20 bp, Artificial Sequence
  Description of Artificial Sequence: Synthetic oligonucleotide
  Target: LAMA2; (-) strand; PAM type: YTN; PAM sequence: CTT
cctctctctctcatcttact

SEQ ID NO: 213846 - DNA, 20 bp, Artificial Sequence
  Description of Artificial Sequence: Synthetic oligonucleotide
  Target: LAMA2; (-) strand; PAM type: YTN; PAM sequence: CTG
tcttcctctctctctcatct

SEQ ID NO: 213847 - DNA, 20 bp, Artificial Sequence
  Description of Artificial Sequence: Synthetic oligonucleotide
  Target: LAMA2; (-) strand; PAM type: YTN; PAM sequence: CTC
tgtcttcctctctctctcat

SEQ ID NO: 213848 - DNA, 20 bp, Artificial Sequence
  Description of Artificial Sequence: Synthetic oligonucleotide
  Target: LAMA2; (-) strand; PAM type: YTN; PAM sequence: CTC
tctgtcttcctctctctctc

SEQ ID NO: 213849 - DNA, 20 bp, Artificial Sequence
  Description of Artificial Sequence: Synthetic oligonucleotide
  Target: LAMA2; (-) strand; PAM type: YTN; PAM sequence: CTG
tctctctgtcttcctctctc

SEQ ID NO: 213850 - DNA, 20 bp, Artificial Sequence
  Description of Artificial Sequence: Synthetic oligonucleotide
  Target: LAMA2; (-) strand; PAM type: YTN; PAM sequence: CTC
tgtctctctgtcttcctctc

SEQ ID NO: 213851 - DNA, 20 bp, Artificial Sequence
  Description of Artificial Sequence: Synthetic oligonucleotide
  Target: LAMA2; (-) strand; PAM type: YTN; PAM sequence: CTG
tctctgtctctctgtcttcc

SEQ ID NO: 213852 - DNA, 20 bp, Artificial Sequence
  Description of Artificial Sequence: Synthetic oligonucleotide
  Target: LAMA2; (-) strand; PAM type: YTN; PAM sequence: TTC
tgtctctgtctctctgtctt

SEQ ID NO: 213853 - DNA, 20 bp, Artificial Sequence
  Description of Artificial Sequence: Synthetic oligonucleotide
  Target: LAMA2; (-) strand; PAM type: YTN; PAM sequence: TTT
ctgtctctgtctctctgtct

SEQ ID NO: 213854 - DNA, 20 bp, Artificial Sequence
  Description of Artificial Sequence: Synthetic oligonucleotide
  Target: LAMA2; (-) strand; PAM type: YTN; PAM sequence: CTT
tctgtctctgtctctctgtc

SEQ ID NO: 213855 - DNA, 20 bp, Artificial Sequence
  Description of Artificial Sequence: Synthetic oligonucleotide
  Target: LAMA2; (-) strand; PAM type: YTN; PAM sequence: TTA
tcctttctgtctctgtctct

SEQ ID NO: 213856 - DNA, 20 bp, Artificial Sequence
  Description of Artificial Sequence: Synthetic oligonucleotide
  Target: LAMA2; (-) strand; PAM type: YTN; PAM sequence: CTT
atcctttctgtctctgtctc

SEQ ID NO: 213857 - DNA, 20 bp, Artificial Sequence
  Description of Artificial Sequence: Synthetic oligonucleotide
  Target: LAMA2; (-) strand; PAM type: YTN; PAM sequence: CTG
atccttatcctttctgtctc

SEQ ID NO: 213858 - DNA, 20 bp, Artificial Sequence
  Description of Artificial Sequence: Synthetic oligonucleotide
  Target: LAMA2; (-) strand; PAM type: YTN; PAM sequence: TTA
caataatacatggctgatcc

SEQ ID NO: 213859 - DNA, 20 bp, Artificial Sequence
  Description of Artificial Sequence: Synthetic oligonucleotide
  Target: LAMA2; (-) strand; PAM type: YTN; PAM sequence: TTT
acaataatacatggctgatc

SEQ ID NO: 213860 - DNA, 20 bp, Artificial Sequence
  Description of Artificial Sequence: Synthetic oligonucleotide
  Target: LAMA2; (-) strand; PAM type: YTN; PAM sequence: CTG
tttacaataatacatggctg

SEQ ID NO: 213861 - DNA, 20 bp, Artificial Sequence
  Description of Artificial Sequence: Synthetic oligonucleotide
  Target: LAMA2; (-) strand; PAM type: YTN; PAM sequence: CTA
agatatcatatactgtttac

SEQ ID NO: 213862 - DNA, 20 bp, Artificial Sequence
  Description of Artificial Sequence: Synthetic oligonucleotide
  Target: LAMA2; (-) strand; PAM type: YTN; PAM sequence: CTC
taagatatcatatactgttt

SEQ ID NO: 213863 - DNA, 20 bp, Artificial Sequence
  Description of Artificial Sequence: Synthetic oligonucleotide
  Target: LAMA2; (-) strand; PAM type: YTN; PAM sequence: TTA
aaataatctctaagatatca

SEQ ID NO: 213864 - DNA, 20 bp, Artificial Sequence
  Description of Artificial Sequence: Synthetic oligonucleotide
  Target: LAMA2; (-) strand; PAM type: YTN; PAM sequence: TTT
aaaataatctctaagatatc

SEQ ID NO: 213865 - DNA, 20 bp, Artificial Sequence
  Description of Artificial Sequence: Synthetic oligonucleotide
  Target: LAMA2; (-) strand; PAM type: YTN; PAM sequence: TTT
taaaataatctctaagatat

SEQ ID NO: 213866 - DNA, 20 bp, Artificial Sequence
  Description of Artificial Sequence: Synthetic oligonucleotide
  Target: LAMA2; (-) strand; PAM type: YTN; PAM sequence: TTC
attttaaaataatctctaag

SEQ ID NO: 213867 - DNA, 20 bp, Artificial Sequence
  Description of Artificial Sequence: Synthetic oligonucleotide
  Target: LAMA2; (-) strand; PAM type: YTN; PAM sequence: TTC
aatatattcattttaaaata

SEQ ID NO: 213868 - DNA, 20 bp, Artificial Sequence
  Description of Artificial Sequence: Synthetic oligonucleotide
  Target: LAMA2; (-) strand; PAM type: YTN; PAM sequence: CTT
caatatattcattttaaaat

SEQ ID NO: 213869 - DNA, 20 bp, Artificial Sequence
  Description of Artificial Sequence: Synthetic oligonucleotide
  Target: LAMA2; (-) strand; PAM type: YTN; PAM sequence: TTC
acttcaatatattcatttta

SEQ ID NO: 213870 - DNA, 20 bp, Artificial Sequence
  Description of Artificial Sequence: Synthetic oligonucleotide
  Target: LAMA2; (-) strand; PAM type: YTN; PAM sequence: TTC
agtcaatgcaacaattcact

SEQ ID NO: 213871 - DNA, 20 bp, Artificial Sequence
  Description of Artificial Sequence: Synthetic oligonucleotide
  Target: LAMA2; (-) strand; PAM type: YTN; PAM sequence: CTA
tggaaaagccattcagtcaa

SEQ ID NO: 213872 - DNA, 20 bp, Artificial Sequence
  Description of Artificial Sequence: Synthetic oligonucleotide
  Target: LAMA2; (-) strand; PAM type: YTN; PAM sequence: TTC
tatggaaaagccattcagtc

SEQ ID NO: 213873 - DNA, 20 bp, Artificial Sequence
  Description of Artificial Sequence: Synthetic oligonucleotide
  Target: LAMA2; (-) strand; PAM type: YTN; PAM sequence: TTT
ctatggaaaagccattcagt

SEQ ID NO: 213874 - DNA, 20 bp, Artificial Sequence
  Description of Artificial Sequence: Synthetic oligonucleotide
  Target: LAMA2; (-) strand; PAM type: YTN; PAM sequence: CTT
tctatggaaaagccattcag

SEQ ID NO: 213875 - DNA, 20 bp, Artificial Sequence
  Description of Artificial Sequence: Synthetic oligonucleotide
  Target: LAMA2; (-) strand; PAM type: YTN; PAM sequence: CTG
gagtctttctatggaaaagc

SEQ ID NO: 213876 - DNA, 20 bp, Artificial Sequence
  Description of Artificial Sequence: Synthetic oligonucleotide
  Target: LAMA2; (-) strand; PAM type: YTN; PAM sequence: CTG
atgatagctggagtctttct

SEQ ID NO: 213877 - DNA, 20 bp, Artificial Sequence
  Description of Artificial Sequence: Synthetic oligonucleotide
  Target: LAMA2; (-) strand; PAM type: YTN; PAM sequence: TTG
ataactgatgatagctggag

SEQ ID NO: 213878 - DNA, 20 bp, Artificial Sequence
  Description of Artificial Sequence: Synthetic oligonucleotide
  Target: LAMA2; (-) strand; PAM type: YTN; PAM sequence: TTG
taaagaccaccaataatgta

SEQ ID NO: 213879 - DNA, 20 bp, Artificial Sequence
  Description of Artificial Sequence: Synthetic oligonucleotide
  Target: LAMA2; (-) strand; PAM type: YTN; PAM sequence: TTT
gtaaagaccaccaataatgt

SEQ ID NO: 213880 - DNA, 20 bp, Artificial Sequence
  Description of Artificial Sequence: Synthetic oligonucleotide
  Target: LAMA2; (-) strand; PAM type: YTN; PAM sequence: TTA
tagtcaagtttgtaaagacc

SEQ ID NO: 213881 - DNA, 20 bp, Artificial Sequence
  Description of Artificial Sequence: Synthetic oligonucleotide
  Target: LAMA2; (-) strand; PAM type: YTN; PAM sequence: TTT
atagtcaagtttgtaaagac

SEQ ID NO: 213882 - DNA, 20 bp, Artificial Sequence
  Description of Artificial Sequence: Synthetic oligonucleotide
  Target: LAMA2; (-) strand; PAM type: YTN; PAM sequence: CTC
aacatttatagtcaagtttg

SEQ ID NO: 213883 - DNA, 20 bp, Artificial Sequence
  Description of Artificial Sequence: Synthetic oligonucleotide
  Target: LAMA2; (-) strand; PAM type: YTN; PAM sequence: CTC
gaaaaatgtctcaacattta

SEQ ID NO: 213884 - DNA, 20 bp, Artificial Sequence
  Description of Artificial Sequence: Synthetic oligonucleotide
  Target: LAMA2; (-) strand; PAM type: YTN; PAM sequence: TTC
tcgaaaaatgtctcaacatt

SEQ ID NO: 213885 - DNA, 20 bp, Artificial Sequence
  Description of Artificial Sequence: Synthetic oligonucleotide
  Target: LAMA2; (-) strand; PAM type: YTN; PAM sequence: TTT
ctcgaaaaatgtctcaacat

SEQ ID NO: 213886 - DNA, 20 bp, Artificial Sequence
  Description of Artificial Sequence: Synthetic oligonucleotide
  Target: LAMA2; (-) strand; PAM type: YTN; PAM sequence: TTA
tacacacacatacacacaca

SEQ ID NO: 213887 - DNA, 20 bp, Artificial Sequence
  Description of Artificial Sequence: Synthetic oligonucleotide
  Target: LAMA2; (-) strand; PAM type: YTN; PAM sequence: CTT
atacacacacatacacacac

SEQ ID NO: 213888 - DNA, 20 bp, Artificial Sequence
  Description of Artificial Sequence: Synthetic oligonucleotide
  Target: LAMA2; (-) strand; PAM type: YTN; PAM sequence: CTA
acatgcggagataccaatag

SEQ ID NO: 213889 - DNA, 20 bp, Artificial Sequence
  Description of Artificial Sequence: Synthetic oligonucleotide
  Target: LAMA2; (-) strand; PAM type: YTN; PAM sequence: TTA
actaacatgcggagatacca

SEQ ID NO: 213890 - DNA, 20 bp, Artificial Sequence
  Description of Artificial Sequence: Synthetic oligonucleotide
  Target: LAMA2; (-) strand; PAM type: YTN; PAM sequence: TTT
aactaacatgcggagatacc

SEQ ID NO: 213891 - DNA, 20 bp, Artificial Sequence
  Description of Artificial Sequence: Synthetic oligonucleotide
  Target: LAMA2; (-) strand; PAM type: YTN; PAM sequence: TTT
taactaacatgcggagatac

SEQ ID NO: 213892 - DNA, 20 bp, Artificial Sequence
  Description of Artificial Sequence: Synthetic oligonucleotide
  Target: LAMA2; (-) strand; PAM type: YTN; PAM sequence: TTT
ttaactaacatgcggagata

SEQ ID NO: 213893 - DNA, 20 bp, Artificial Sequence
  Description of Artificial Sequence: Synthetic oligonucleotide
  Target: LAMA2; (-) strand; PAM type: YTN; PAM sequence: TTA
tatttttaactaacatgcgg

SEQ ID NO: 213894 - DNA, 20 bp, Artificial Sequence
  Description of Artificial Sequence: Synthetic oligonucleotide
  Target: LAMA2; (-) strand; PAM type: YTN; PAM sequence: TTA
ttatatttttaactaacatg

SEQ ID NO: 213895 - DNA, 20 bp, Artificial Sequence
  Description of Artificial Sequence: Synthetic oligonucleotide
  Target: LAMA2; (-) strand; PAM type: YTN; PAM sequence: TTG
gcatattattatatttttaa

SEQ ID NO: 213896 - DNA, 20 bp, Artificial Sequence
  Description of Artificial Sequence: Synthetic oligonucleotide
  Target: LAMA2; (-) strand; PAM type: YTN; PAM sequence: CTT
ggcatattattatattttta

SEQ ID NO: 213897 - DNA, 20 bp, Artificial Sequence
  Description of Artificial Sequence: Synthetic oligonucleotide
  Target: LAMA2; (-) strand; PAM type: YTN; PAM sequence: TTG
tccgtacttggcatattatt

SEQ ID NO: 213898 - DNA, 20 bp, Artificial Sequence
  Description of Artificial Sequence: Synthetic oligonucleotide
  Target: LAMA2; (-) strand; PAM type: YTN; PAM sequence: TTC
attgtccgtacttggcatat

SEQ ID NO: 213899 - DNA, 20 bp, Artificial Sequence
  Description of Artificial Sequence: Synthetic oligonucleotide
  Target: LAMA2; (-) strand; PAM type: YTN; PAM sequence: CTT
cattgtccgtacttggcata

SEQ ID NO: 213900 - DNA, 20 bp, Artificial Sequence
  Description of Artificial Sequence: Synthetic oligonucleotide
  Target: LAMA2; (-) strand; PAM type: YTN; PAM sequence: CTG
tcttcattgtccgtacttgg

SEQ ID NO: 213901 - DNA, 20 bp, Artificial Sequence
  Description of Artificial Sequence: Synthetic oligonucleotide
  Target: LAMA2; (-) strand; PAM type: YTN; PAM sequence: TTG
tggagtagctgtcttcattg

SEQ ID NO: 213902 - DNA, 20 bp, Artificial Sequence
  Description of Artificial Sequence: Synthetic oligonucleotide
  Target: LAMA2; (-) strand; PAM type: YTN; PAM sequence: TTA
aatgaatattgtggagtagc

SEQ ID NO: 213903 - DNA, 20 bp, Artificial Sequence
  Description of Artificial Sequence: Synthetic oligonucleotide
  Target: LAMA2; (-) strand; PAM type: YTN; PAM sequence: TTA
aattaaatgaatattgtgga

SEQ ID NO: 213904 - DNA, 20 bp, Artificial Sequence
  Description of Artificial Sequence: Synthetic oligonucleotide
  Target: LAMA2; (-) strand; PAM type: YTN; PAM sequence: CTC
aaaaaaaaaaaaaaaaatta

SEQ ID NO: 213905 - DNA, 20 bp, Artificial Sequence
  Description of Artificial Sequence: Synthetic oligonucleotide
  Target: LAMA2; (-) strand; PAM type: YTN; PAM sequence: CTC
cgtctcaaaaaaaaaaaaaa

SEQ ID NO: 213906 - DNA, 20 bp, Artificial Sequence
  Description of Artificial Sequence: Synthetic oligonucleotide
  Target: LAMA2; (-) strand; PAM type: YTN; PAM sequence: CTG
ggcgacagagcgagactccg

SEQ ID NO: 213907 - DNA, 20 bp, Artificial Sequence
  Description of Artificial Sequence: Synthetic oligonucleotide
  Target: LAMA2; (-) strand; PAM type: YTN; PAM sequence: CTC
catccagcctgggcgacaga

SEQ ID NO: 213908 - DNA, 20 bp, Artificial Sequence
  Description of Artificial Sequence: Synthetic oligonucleotide
  Target: LAMA2; (-) strand; PAM type: YTN; PAM sequence: CTG
cactccatccagcctgggcg

SEQ ID NO: 213909 - DNA, 20 bp, Artificial Sequence
  Description of Artificial Sequence: Synthetic oligonucleotide
  Target: LAMA2; (-) strand; PAM type: YTN; PAM sequence: TTG
cagtgagcagagatcgcgcc

SEQ ID NO: 213910 - DNA, 20 bp, Artificial Sequence
  Description of Artificial Sequence: Synthetic oligonucleotide
  Target: LAMA2; (-) strand; PAM type: YTN; PAM sequence: CTT
gcagtgagcagagatcgcgc

SEQ ID NO: 213911 - DNA, 20 bp, Artificial Sequence
  Description of Artificial Sequence: Synthetic oligonucleotide
  Target: LAMA2; (-) strand; PAM type: YTN; PAM sequence: CTG
ggaggcggagcttgcagtga

SEQ ID NO: 213912 - DNA, 20 bp, Artificial Sequence
  Description of Artificial Sequence: Synthetic oligonucleotide
  Target: LAMA2; (-) strand; PAM type: YTN; PAM sequence: CTG
aggcgggagaatggcgtgaa

SEQ ID NO: 213913 - DNA, 20 bp, Artificial Sequence
  Description of Artificial Sequence: Synthetic oligonucleotide
  Target: LAMA2; (-) strand; PAM type: YTN; PAM sequence: CTC
gggaggctgaggcgggagaa

SEQ ID NO: 213914 - DNA, 20 bp, Artificial Sequence
  Description of Artificial Sequence: Synthetic oligonucleotide
  Target: LAMA2; (-) strand; PAM type: YTN; PAM sequence: CTA
ctcgggaggctgaggcggga

SEQ ID NO: 213915 - DNA, 20 bp, Artificial Sequence
  Description of Artificial Sequence: Synthetic oligonucleotide
  Target: LAMA2; (-) strand; PAM type: YTN; PAM sequence: TTG
cagctactcgggaggctgag

SEQ ID NO: 213916 - DNA, 20 bp, Artificial Sequence
  Description of Artificial Sequence: Synthetic oligonucleotide
  Target: LAMA2; (-) strand; PAM type: YTN; PAM sequence: CTG
tagttgcagctactcgggag

SEQ ID NO: 213917 - DNA, 20 bp, Artificial Sequence
  Description of Artificial Sequence: Synthetic oligonucleotide
  Target: LAMA2; (-) strand; PAM type: YTN; PAM sequence: TTA
gccaggtgtggtggcaagca

SEQ ID NO: 213918 - DNA, 20 bp, Artificial Sequence
  Description of Artificial Sequence: Synthetic oligonucleotide
  Target: LAMA2; (-) strand; PAM type: YTN; PAM sequence: CTA
aaaatacaaaaaattagcca

SEQ ID NO: 213919 - DNA, 20 bp, Artificial Sequence
  Description of Artificial Sequence: Synthetic oligonucleotide
  Target: LAMA2; (-) strand; PAM type: YTN; PAM sequence: CTA
ctaaaaatacaaaaaattag

SEQ ID NO: 213920 - DNA, 20 bp, Artificial Sequence
  Description of Artificial Sequence: Synthetic oligonucleotide
  Target: LAMA2; (-) strand; PAM type: YTN; PAM sequence: CTC
tactaaaaatacaaaaaatt

SEQ ID NO: 213921 - DNA, 20 bp, Artificial Sequence
  Description of Artificial Sequence: Synthetic oligonucleotide
  Target: LAMA2; (-) strand; PAM type: YTN; PAM sequence: CTG
tctctactaaaaatacaaaa

SEQ ID NO: 213922 - DNA, 20 bp, Artificial Sequence
  Description of Artificial Sequence: Synthetic oligonucleotide
  Target: LAMA2; (-) strand; PAM type: YTN; PAM sequence: CTA
acacggtgaaaccctgtctc

SEQ ID NO: 213923 - DNA, 20 bp, Artificial Sequence
  Description of Artificial Sequence: Synthetic oligonucleotide
  Target: LAMA2; (-) strand; PAM type: YTN; PAM sequence: CTG
gctaacacggtgaaaccctg

SEQ ID NO: 213924 - DNA, 20 bp, Artificial Sequence
  Description of Artificial Sequence: Synthetic oligonucleotide
  Target: LAMA2; (-) strand; PAM type: YTN; PAM sequence: TTG
ggaggccaaggtgggcagat

SEQ ID NO: 213925 - DNA, 20 bp, Artificial Sequence
  Description of Artificial Sequence: Synthetic oligonucleotide
  Target: LAMA2; (-) strand; PAM type: YTN; PAM sequence: TTT
gggaggccaaggtgggcaga

SEQ ID NO: 213926 - DNA, 20 bp, Artificial Sequence
  Description of Artificial Sequence: Synthetic oligonucleotide
  Target: LAMA2; (-) strand; PAM type: YTN; PAM sequence: CTT
tgggaggccaaggtgggcag

SEQ ID NO: 213927 - DNA, 20 bp, Artificial Sequence
  Description of Artificial Sequence: Synthetic oligonucleotide
  Target: LAMA2; (-) strand; PAM type: YTN; PAM sequence: CTA
cactttgggaggccaaggtg

SEQ ID NO: 213928 - DNA, 20 bp, Artificial Sequence
  Description of Artificial Sequence: Synthetic oligonucleotide
  Target: LAMA2; (-) strand; PAM type: YTN; PAM sequence: TTA
aactacactttgggaggcca

SEQ ID NO: 213929 - DNA, 20 bp, Artificial Sequence
  Description of Artificial Sequence: Synthetic oligonucleotide
  Target: LAMA2; (-) strand; PAM type: YTN; PAM sequence: TTA
aatattaaactacactttgg

SEQ ID NO: 213930 - DNA, 20 bp, Artificial Sequence
  Description of Artificial Sequence: Synthetic oligonucleotide
  Target: LAMA2; (-) strand; PAM type: YTN; PAM sequence: CTT
aaatattaaactacactttg

SEQ ID NO: 213931 - DNA, 20 bp, Artificial Sequence
  Description of Artificial Sequence: Synthetic oligonucleotide
  Target: LAMA2; (-) strand; PAM type: YTN; PAM sequence: TTA
tcagcttaaatattaaacta

SEQ ID NO: 213932 - DNA, 20 bp, Artificial Sequence
  Description of Artificial Sequence: Synthetic oligonucleotide
  Target: LAMA2; (-) strand; PAM type: YTN; PAM sequence: TTT
atcagcttaaatattaaact

SEQ ID NO: 213933 - DNA, 20 bp, Artificial Sequence
  Description of Artificial Sequence: Synthetic oligonucleotide
  Target: LAMA2; (-) strand; PAM type: YTN; PAM sequence: TTT
tatcagcttaaatattaaac

SEQ ID NO: 213934 - DNA, 20 bp, Artificial Sequence
  Description of Artificial Sequence: Synthetic oligonucleotide
  Target: LAMA2; (-) strand; PAM type: YTN; PAM sequence: TTG
ttttatcagcttaaatatta

SEQ ID NO: 213935 - DNA, 20 bp, Artificial Sequence
  Description of Artificial Sequence: Synthetic oligonucleotide
  Target: LAMA2; (-) strand; PAM type: YTN; PAM sequence: CTT
gttttatcagcttaaatatt

SEQ ID NO: 213936 - DNA, 20 bp, Artificial Sequence
  Description of Artificial Sequence: Synthetic oligonucleotide
  Target: LAMA2; (-) strand; PAM type: YTN; PAM sequence: TTC
ttgttttatcagcttaaata

SEQ ID NO: 213937 - DNA, 20 bp, Artificial Sequence
  Description of Artificial Sequence: Synthetic oligonucleotide
  Target: LAMA2; (-) strand; PAM type: YTN; PAM sequence: TTT
cttgttttatcagcttaaat

SEQ ID NO: 213938 - DNA, 20 bp, Artificial Sequence
  Description of Artificial Sequence: Synthetic oligonucleotide
  Target: LAMA2; (-) strand; PAM type: YTN; PAM sequence: TTT
tcttgttttatcagcttaaa

SEQ ID NO: 213939 - DNA, 20 bp, Artificial Sequence
  Description of Artificial Sequence: Synthetic oligonucleotide
  Target: LAMA2; (-) strand; PAM type: YTN; PAM sequence: TTA
aatatattttcttgttttat

SEQ ID NO: 213940 - DNA, 20 bp, Artificial Sequence
  Description of Artificial Sequence: Synthetic oligonucleotide
  Target: LAMA2; (-) strand; PAM type: YTN; PAM sequence: TTT
aaatatattttcttgtttta

SEQ ID NO: 213941 - DNA, 20 bp, Artificial Sequence
  Description of Artificial Sequence: Synthetic oligonucleotide
  Target: LAMA2; (-) strand; PAM type: YTN; PAM sequence: TTT
taaatatattttcttgtttt

SEQ ID NO: 213942 - DNA, 20 bp, Artificial Sequence
  Description of Artificial Sequence: Synthetic oligonucleotide
  Target: LAMA2; (-) strand; PAM type: YTN; PAM sequence: TTT
ttaaatatattttcttgttt

SEQ ID NO: 213943 - DNA, 20 bp, Artificial Sequence
  Description of Artificial Sequence: Synthetic oligonucleotide
  Target: LAMA2; (-) strand; PAM type: YTN; PAM sequence: TTT
tttaaatatattttcttgtt

SEQ ID NO: 213944 - DNA, 20 bp, Artificial Sequence
  Description of Artificial Sequence: Synthetic oligonucleotide
  Target: LAMA2; (-) strand; PAM type: YTN; PAM sequence: CTA
gcaaaaattttttaaatata

SEQ ID NO: 213945 - DNA, 20 bp, Artificial Sequence
  Description of Artificial Sequence: Synthetic oligonucleotide
  Target: LAMA2; (-) strand; PAM type: YTN; PAM sequence: CTA
atgtagtctagcaaaaattt

SEQ ID NO: 213946 - DNA, 20 bp, Artificial Sequence
  Description of Artificial Sequence: Synthetic oligonucleotide
  Target: LAMA2; (-) strand; PAM type: YTN; PAM sequence: TTC
taatgtagtctagcaaaaat

SEQ ID NO: 213947 - DNA, 20 bp, Artificial Sequence
  Description of Artificial Sequence: Synthetic oligonucleotide
  Target: LAMA2; (-) strand; PAM type: YTN; PAM sequence: TTT
ctaatgtagtctagcaaaaa

SEQ ID NO: 213948 - DNA, 20 bp, Artificial Sequence
  Description of Artificial Sequence: Synthetic oligonucleotide
  Target: LAMA2; (-) strand; PAM type: YTN; PAM sequence: CTT
tctaatgtagtctagcaaaa

SEQ ID NO: 213949 - DNA, 20 bp, Artificial Sequence
  Description of Artificial Sequence: Synthetic oligonucleotide
  Target: LAMA2; (-) strand; PAM type: YTN; PAM sequence: TTA
aagaaaatctttctaatgta

SEQ ID NO: 213950 - DNA, 20 bp, Artificial Sequence
  Description of Artificial Sequence: Synthetic oligonucleotide
  Target: LAMA2; (-) strand; PAM type: YTN; PAM sequence: TTT
aaagaaaatctttctaatgt

SEQ ID NO: 213951 - DNA, 20 bp, Artificial Sequence
  Description of Artificial Sequence: Synthetic oligonucleotide
  Target: LAMA2; (-) strand; PAM type: YTN; PAM sequence: CTT
taaagaaaatctttctaatg

SEQ ID NO: 213952 - DNA, 20 bp, Artificial Sequence
  Description of Artificial Sequence: Synthetic oligonucleotide
  Target: LAMA2; (-) strand; PAM type: YTN; PAM sequence: CTC
acatctttaaagaaaatctt

SEQ ID NO: 213953 - DNA, 20 bp, Artificial Sequence
  Description of Artificial Sequence: Synthetic oligonucleotide
  Target: LAMA2; (-) strand; PAM type: YTN; PAM sequence: CTA
gctcacatctttaaagaaaa

SEQ ID NO: 213954 - DNA, 20 bp, Artificial Sequence
  Description of Artificial Sequence: Synthetic oligonucleotide
  Target: LAMA2; (-) strand; PAM type: YTN; PAM sequence: CTA
tctagctcacatctttaaag

SEQ ID NO: 213955 - DNA, 20 bp, Artificial Sequence
  Description of Artificial Sequence: Synthetic oligonucleotide
  Target: LAMA2; (-) strand; PAM type: YTN; PAM sequence: CTC
tatctagctcacatctttaa

SEQ ID NO: 213956 - DNA, 20 bp, Artificial Sequence
  Description of Artificial Sequence: Synthetic oligonucleotide
  Target: LAMA2; (-) strand; PAM type: YTN; PAM sequence: TTA
aaatgacctctatctagctc

SEQ ID NO: 213957 - DNA, 20 bp, Artificial Sequence
  Description of Artificial Sequence: Synthetic oligonucleotide
  Target: LAMA2; (-) strand; PAM type: YTN; PAM sequence: TTT
aaaatgacctctatctagct

SEQ ID NO: 213958 - DNA, 20 bp, Artificial Sequence
  Description of Artificial Sequence: Synthetic oligonucleotide
  Target: LAMA2; (-) strand; PAM type: YTN; PAM sequence: TTT
taaaatgacctctatctagc

SEQ ID NO: 213959 - DNA, 20 bp, Artificial Sequence
  Description of Artificial Sequence: Synthetic oligonucleotide
  Target: LAMA2; (-) strand; PAM type: YTN; PAM sequence: TTG
ataaatcatcattttaaaat

SEQ ID NO: 213960 - DNA, 20 bp, Artificial Sequence
  Description of Artificial Sequence: Synthetic oligonucleotide
  Target: LAMA2; (-) strand; PAM type: YTN; PAM sequence: TTT
gataaatcatcattttaaaa

SEQ ID NO: 213961 - DNA, 20 bp, Artificial Sequence
  Description of Artificial Sequence: Synthetic oligonucleotide
  Target: LAMA2; (-) strand; PAM type: YTN; PAM sequence: CTG
tgtaaaatttgataaatcat

SEQ ID NO: 213962 - DNA, 20 bp, Artificial Sequence
  Description of Artificial Sequence: Synthetic oligonucleotide
  Target: LAMA2; (-) strand; PAM type: YTN; PAM sequence: TTA
actgtgtaaaatttgataaa

SEQ ID NO: 213963 - DNA, 20 bp, Artificial Sequence
  Description of Artificial Sequence: Synthetic oligonucleotide
  Target: LAMA2; (-) strand; PAM type: YTN; PAM sequence: TTT
aactgtgtaaaatttgataa

SEQ ID NO: 213964 - DNA, 20 bp, Artificial Sequence
  Description of Artificial Sequence: Synthetic oligonucleotide
  Target: LAMA2; (-) strand; PAM type: YTN; PAM sequence: CTT
taactgtgtaaaatttgata

SEQ ID NO: 213965 - DNA, 20 bp, Artificial Sequence
  Description of Artificial Sequence: Synthetic oligonucleotide
  Target: LAMA2; (-) strand; PAM type: YTN; PAM sequence: CTA
tctttaactgtgtaaaattt

SEQ ID NO: 213966 - DNA, 20 bp, Artificial Sequence
  Description of Artificial Sequence: Synthetic oligonucleotide
  Target: LAMA2; (-) strand; PAM type: YTN; PAM sequence: TTC
actatctttaactgtgtaaa

SEQ ID NO: 213967 - DNA, 20 bp, Artificial Sequence
  Description of Artificial Sequence: Synthetic oligonucleotide
  Target: LAMA2; (-) strand; PAM type: YTN; PAM sequence: TTT
cactatctttaactgtgtaa

SEQ ID NO: 213968 - DNA, 20 bp, Artificial Sequence
  Description of Artificial Sequence: Synthetic oligonucleotide
  Target: LAMA2; (-) strand; PAM type: YTN; PAM sequence: TTT
tcactatctttaactgtgta

SEQ ID NO: 213969 - DNA, 20 bp, Artificial Sequence
  Description of Artificial Sequence: Synthetic oligonucleotide
  Target: LAMA2; (-) strand; PAM type: YTN; PAM sequence: TTA
ttttcactatctttaactgt

SEQ ID NO: 213970 - DNA, 20 bp, Artificial Sequence
  Description of Artificial Sequence: Synthetic oligonucleotide
  Target: LAMA2; (-) strand; PAM type: YTN; PAM sequence: TTT
attttcactatctttaactg

SEQ ID NO: 213971 - DNA, 20 bp, Artificial Sequence
  Description of Artificial Sequence: Synthetic oligonucleotide
  Target: LAMA2; (-) strand; PAM type: YTN; PAM sequence: CTT
tattttcactatctttaact

SEQ ID NO: 213972 - DNA, 20 bp, Artificial Sequence
  Description of Artificial Sequence: Synthetic oligonucleotide
  Target: LAMA2; (-) strand; PAM type: YTN; PAM sequence: CTC
tttattttcactatctttaa

SEQ ID NO: 213973 - DNA, 20 bp, Artificial Sequence
  Description of Artificial Sequence: Synthetic oligonucleotide
  Target: LAMA2; (-) strand; PAM type: YTN; PAM sequence: TTA
atgtgctctttattttcact

SEQ ID NO: 213974 - DNA, 20 bp, Artificial Sequence
  Description of Artificial Sequence: Synthetic oligonucleotide
  Target: LAMA2; (-) strand; PAM type: YTN; PAM sequence: TTT
aatgtgctctttattttcac

SEQ ID NO: 213975 - DNA, 20 bp, Artificial Sequence
  Description of Artificial Sequence: Synthetic oligonucleotide
  Target: LAMA2; (-) strand; PAM type: YTN; PAM sequence: TTT
taatgtgctctttattttca

SEQ ID NO: 213976 - DNA, 20 bp, Artificial Sequence
  Description of Artificial Sequence: Synthetic oligonucleotide
  Target: LAMA2; (-) strand; PAM type: YTN; PAM sequence: TTT
ttaatgtgctctttattttc

SEQ ID NO: 213977 - DNA, 20 bp, Artificial Sequence
  Description of Artificial Sequence: Synthetic oligonucleotide
  Target: LAMA2; (-) strand; PAM type: YTN; PAM sequence: TTT
tttaatgtgctctttatttt

SEQ ID NO: 213978 - DNA, 20 bp, Artificial Sequence
  Description of Artificial Sequence: Synthetic oligonucleotide
  Target: LAMA2; (-) strand; PAM type: YTN; PAM sequence: TTA
ttttttaatgtgctctttat

SEQ ID NO: 213979 - DNA, 20 bp, Artificial Sequence
  Description of Artificial Sequence: Synthetic oligonucleotide
  Target: LAMA2; (-) strand; PAM type: YTN; PAM sequence: CTA
gttattttttaatgtgctct

SEQ ID NO: 213980 - DNA, 20 bp, Artificial Sequence
  Description of Artificial Sequence: Synthetic oligonucleotide
  Target: LAMA2; (-) strand; PAM type: YTN; PAM sequence: TTC
catctagttattttttaatg

SEQ ID NO: 213981 - DNA, 20 bp, Artificial Sequence
  Description of Artificial Sequence: Synthetic oligonucleotide
  Target: LAMA2; (-) strand; PAM type: YTN; PAM sequence: TTT
ccatctagttattttttaat

SEQ ID NO: 213982 - DNA, 20 bp, Artificial Sequence
  Description of Artificial Sequence: Synthetic oligonucleotide
  Target: LAMA2; (-) strand; PAM type: YTN; PAM sequence: TTC
acagtgaaaatttccatcta

SEQ ID NO: 213983 - DNA, 20 bp, Artificial Sequence
  Description of Artificial Sequence: Synthetic oligonucleotide
  Target: LAMA2; (-) strand; PAM type: YTN; PAM sequence: TTT
cacagtgaaaatttccatct

SEQ ID NO: 213984 - DNA, 20 bp, Artificial Sequence
  Description of Artificial Sequence: Synthetic oligonucleotide
  Target: LAMA2; (-) strand; PAM type: YTN; PAM sequence: CTG
tttcacagtgaaaatttcca

SEQ ID NO: 213985 - DNA, 20 bp, Artificial Sequence
  Description of Artificial Sequence: Synthetic oligonucleotide
  Target: LAMA2; (-) strand; PAM type: YTN; PAM sequence: TTC
tgtttcacagtgaaaatttc

SEQ ID NO: 213986 - DNA, 20 bp, Artificial Sequence
  Description of Artificial Sequence: Synthetic oligonucleotide
  Target: LAMA2; (-) strand; PAM type: YTN; PAM sequence: TTC
agaaattctgtttcacagtg

SEQ ID NO: 213987 - DNA, 20 bp, Artificial Sequence
  Description of Artificial Sequence: Synthetic oligonucleotide
  Target: LAMA2; (-) strand; PAM type: YTN; PAM sequence: CTT
cagaaattctgtttcacagt

SEQ ID NO: 213988 - DNA, 20 bp, Artificial Sequence
  Description of Artificial Sequence: Synthetic oligonucleotide
  Target: LAMA2; (-) strand; PAM type: YTN; PAM sequence: TTG
tacaatgaccatgatcagaa

SEQ ID NO: 213989 - DNA, 20 bp, Artificial Sequence
  Description of Artificial Sequence: Synthetic oligonucleotide
  Target: LAMA2; (-) strand; PAM type: YTN; PAM sequence: CTC
aatggttgtacaatgaccat

SEQ ID NO: 213990 - DNA, 20 bp, Artificial Sequence
  Description of Artificial Sequence: Synthetic oligonucleotide
  Target: LAMA2; (-) strand; PAM type: YTN; PAM sequence: TTA
tacaaagactcaatggttgt

SEQ ID NO: 213991 - DNA, 20 bp, Artificial Sequence
  Description of Artificial Sequence: Synthetic oligonucleotide
  Target: LAMA2; (-) strand; PAM type: YTN; PAM sequence: CTC
acagcaattatacaaagact

SEQ ID NO: 213992 - DNA, 20 bp, Artificial Sequence
  Description of Artificial Sequence: Synthetic oligonucleotide
  Target: LAMA2; (-) strand; PAM type: YTN; PAM sequence: CTA
ctcacagcaattatacaaag

SEQ ID NO: 213993 - DNA, 20 bp, Artificial Sequence
  Description of Artificial Sequence: Synthetic oligonucleotide
  Target: LAMA2; (-) strand; PAM type: YTN; PAM sequence: CTA
tagaaaaaaagtgaagggaa

SEQ ID NO: 213994 - DNA, 20 bp, Artificial Sequence
  Description of Artificial Sequence: Synthetic oligonucleotide
  Target: LAMA2; (-) strand; PAM type: YTN; PAM sequence: TTA
aatatctatagaaaaaaagt

SEQ ID NO: 213995 - DNA, 20 bp, Artificial Sequence
  Description of Artificial Sequence: Synthetic oligonucleotide
  Target: LAMA2; (-) strand; PAM type: YTN; PAM sequence: TTT
aaatatctatagaaaaaaag

SEQ ID NO: 213996 - DNA, 20 bp, Artificial Sequence
  Description of Artificial Sequence: Synthetic oligonucleotide
  Target: LAMA2; (-) strand; PAM type: YTN; PAM sequence: TTC
atttaaatatctatagaaaa

SEQ ID NO: 213997 - DNA, 20 bp, Artificial Sequence
  Description of Artificial Sequence: Synthetic oligonucleotide
  Target: LAMA2; (-) strand; PAM type: YTN; PAM sequence: CTT
catttaaatatctatagaaa

SEQ ID NO: 213998 - DNA, 20 bp, Artificial Sequence
  Description of Artificial Sequence: Synthetic oligonucleotide
  Target: LAMA2; (-) strand; PAM type: YTN; PAM sequence: TTG
cttcatttaaatatctatag

SEQ ID NO: 213999 - DNA, 20 bp, Artificial Sequence
  Description of Artificial Sequence: Synthetic oligonucleotide
  Target: LAMA2; (-) strand; PAM type: YTN; PAM sequence: CTG
acaaaatgaataaatatgta

SEQ ID NO: 214000 - DNA, 20 bp, Artificial Sequence
  Description of Artificial Sequence: Synthetic oligonucleotide
  Target: LAMA2; (-) strand; PAM type: YTN; PAM sequence: TTA
taactgacaaaatgaataaa

SEQ ID NO: 214001 - DNA, 20 bp, Artificial Sequence
  Description of Artificial Sequence: Synthetic oligonucleotide
  Target: LAMA2; (-) strand; PAM type: YTN; PAM sequence: TTG
attataactgacaaaatgaa

SEQ ID NO: 214002 - DNA, 20 bp, Artificial Sequence
  Description of Artificial Sequence: Synthetic oligonucleotide
  Target: LAMA2; (-) strand; PAM type: YTN; PAM sequence: CTT
gattataactgacaaaatga

SEQ ID NO: 214003 - DNA, 20 bp, Artificial Sequence
  Description of Artificial Sequence: Synthetic oligonucleotide
  Target: LAMA2; (-) strand; PAM type: YTN; PAM sequence: TTA
ggatagaataacttgattat

SEQ ID NO: 214004 - DNA, 20 bp, Artificial Sequence
  Description of Artificial Sequence: Synthetic oligonucleotide
  Target: LAMA2; (-) strand; PAM type: YTN; PAM sequence: CTC
acacacagagtgaagataga

SEQ ID NO: 214005 - DNA, 20 bp, Artificial Sequence
  Description of Artificial Sequence: Synthetic oligonucleotide
  Target: LAMA2; (-) strand; PAM type: YTN; PAM sequence: TTA
tgtacacacagactcacaca

SEQ ID NO: 214006 - DNA, 20 bp, Artificial Sequence
  Description of Artificial Sequence: Synthetic oligonucleotide
  Target: LAMA2; (-) strand; PAM type: YTN; PAM sequence: CTC
atgatcaagaaggaagatgg

SEQ ID NO: 214007 - DNA, 20 bp, Artificial Sequence
  Description of Artificial Sequence: Synthetic oligonucleotide
  Target: LAMA2; (-) strand; PAM type: YTN; PAM sequence: TTG
ctcatgatcaagaaggaaga

SEQ ID NO: 214008 - DNA, 20 bp, Artificial Sequence
  Description of Artificial Sequence: Synthetic oligonucleotide
  Target: LAMA2; (-) strand; PAM type: YTN; PAM sequence: CTG
ttgctcatgatcaagaagga

SEQ ID NO: 214009 - DNA, 20 bp, Artificial Sequence
  Description of Artificial Sequence: Synthetic oligonucleotide
  Target: LAMA2; (-) strand; PAM type: YTN; PAM sequence: TTC
ctgttgctcatgatcaagaa

SEQ ID NO: 214010 - DNA, 20 bp, Artificial Sequence
  Description of Artificial Sequence: Synthetic oligonucleotide
  Target: LAMA2; (-) strand; PAM type: YTN; PAM sequence: TTG
gtggttcctgttgctcatga

SEQ ID NO: 214011 - DNA, 20 bp, Artificial Sequence
  Description of Artificial Sequence: Synthetic oligonucleotide
  Target: LAMA2; (-) strand; PAM type: YTN; PAM sequence: TTA
agtaaaatagtattggtggt

SEQ ID NO: 214012 - DNA, 20 bp, Artificial Sequence
  Description of Artificial Sequence: Synthetic oligonucleotide
  Target: LAMA2; (-) strand; PAM type: YTN; PAM sequence: CTT
aagtaaaatagtattggtgg

SEQ ID NO: 214013 - DNA, 20 bp, Artificial Sequence
  Description of Artificial Sequence: Synthetic oligonucleotide
  Target: LAMA2; (-) strand; PAM type: YTN; PAM sequence: TTC
agcttaagtaaaatagtatt

SEQ ID NO: 214014 - DNA, 20 bp, Artificial Sequence
  Description of Artificial Sequence: Synthetic oligonucleotide
  Target: LAMA2; (-) strand; PAM type: YTN; PAM sequence: TTT
cagcttaagtaaaatagtat

SEQ ID NO: 214015 - DNA, 20 bp, Artificial Sequence
  Description of Artificial Sequence: Synthetic oligonucleotide
  Target: LAMA2; (-) strand; PAM type: YTN; PAM sequence: TTC
aaatgtatttcagcttaagt

SEQ ID NO: 214016 - DNA, 20 bp, Artificial Sequence
  Description of Artificial Sequence: Synthetic oligonucleotide
  Target: LAMA2; (-) strand; PAM type: YTN; PAM sequence: TTT
caaatgtatttcagcttaag

SEQ ID NO: 214017 - DNA, 20 bp, Artificial Sequence
  Description of Artificial Sequence: Synthetic oligonucleotide
  Target: LAMA2; (-) strand; PAM type: YTN; PAM sequence: TTA
tatggtatatttcaaatgta

SEQ ID NO: 214018 - DNA, 20 bp, Artificial Sequence
  Description of Artificial Sequence: Synthetic oligonucleotide
  Target: LAMA2; (-) strand; PAM type: YTN; PAM sequence: CTG
caagttatatggtatatttc

SEQ ID NO: 214019 - DNA, 20 bp, Artificial Sequence
  Description of Artificial Sequence: Synthetic oligonucleotide
  Target: LAMA2; (-) strand; PAM type: YTN; PAM sequence: CTC
tgcaagttatatggtatatt

SEQ ID NO: 214020 - DNA, 20 bp, Artificial Sequence
  Description of Artificial Sequence: Synthetic oligonucleotide
  Target: LAMA2; (-) strand; PAM type: YTN; PAM sequence: TTC
ccatcaactctgcaagttat

SEQ ID NO: 214021 - DNA, 20 bp, Artificial Sequence
  Description of Artificial Sequence: Synthetic oligonucleotide
  Target: LAMA2; (-) strand; PAM type: YTN; PAM sequence: TTT
cccatcaactctgcaagtta

SEQ ID NO: 214022 - DNA, 20 bp, Artificial Sequence
  Description of Artificial Sequence: Synthetic oligonucleotide
  Target: LAMA2; (-) strand; PAM type: YTN; PAM sequence: TTT
tcccatcaactctgcaagtt

SEQ ID NO: 214023 - DNA, 20 bp, Artificial Sequence
  Description of Artificial Sequence: Synthetic oligonucleotide
  Target: LAMA2; (-) strand; PAM type: YTN; PAM sequence: TTC
aaattttcccatcaactctg

SEQ ID NO: 214024 - DNA, 20 bp, Artificial Sequence
  Description of Artificial Sequence: Synthetic oligonucleotide
  Target: LAMA2; (-) strand; PAM type: YTN; PAM sequence: TTT
caaattttcccatcaactct

SEQ ID NO: 214025 - DNA, 20 bp, Artificial Sequence
  Description of Artificial Sequence: Synthetic oligonucleotide
  Target: LAMA2; (-) strand; PAM type: YTN; PAM sequence: TTT
tcaaattttcccatcaactc

SEQ ID NO: 214026 - DNA, 20 bp, Artificial Sequence
  Description of Artificial Sequence: Synthetic oligonucleotide
  Target: LAMA2; (-) strand; PAM type: YTN; PAM sequence: CTG
gttttcaaattttcccatca

SEQ ID NO: 214027 - DNA, 20 bp, Artificial Sequence
  Description of Artificial Sequence: Synthetic oligonucleotide
  Target: LAMA2; (-) strand; PAM type: YTN; PAM sequence: CTC
accctggttttcaaattttc

SEQ ID NO: 214028 - DNA, 20 bp, Artificial Sequence
  Description of Artificial Sequence: Synthetic oligonucleotide
  Target: LAMA2; (-) strand; PAM type: YTN; PAM sequence: TTC
tcaccctggttttcaaattt

SEQ ID NO: 214029 - DNA, 20 bp, Artificial Sequence
  Description of Artificial Sequence: Synthetic oligonucleotide
  Target: LAMA2; (-) strand; PAM type: YTN; PAM sequence: CTT
ctcaccctggttttcaaatt

SEQ ID NO: 214030 - DNA, 20 bp, Artificial Sequence
  Description of Artificial Sequence: Synthetic oligonucleotide
  Target: LAMA2; (-) strand; PAM type: YTN; PAM sequence: CTG
ccatcttctcaccctggttt

SEQ ID NO: 214031 - DNA, 20 bp, Artificial Sequence
  Description of Artificial Sequence: Synthetic oligonucleotide
  Target: LAMA2; (-) strand; PAM type: YTN; PAM sequence: TTG
atgtctgccatcttctcacc

SEQ ID NO: 214032 - DNA, 20 bp, Artificial Sequence
  Description of Artificial Sequence: Synthetic oligonucleotide
  Target: LAMA2; (-) strand; PAM type: YTN; PAM sequence: CTT
gatgtctgccatcttctcac

SEQ ID NO: 214033 - DNA, 20 bp, Artificial Sequence
  Description of Artificial Sequence: Synthetic oligonucleotide
  Target: LAMA2; (-) strand; PAM type: YTN; PAM sequence: CTA
gggatgaccttgatgtctgc

SEQ ID NO: 214034 - DNA, 20 bp, Artificial Sequence
  Description of Artificial Sequence: Synthetic oligonucleotide
  Target: LAMA2; (-) strand; PAM type: YTN; PAM sequence: CTG
tacaggtatcaaaacctagg

SEQ ID NO: 214035 - DNA, 20 bp, Artificial Sequence
  Description of Artificial Sequence: Synthetic oligonucleotide
  Target: LAMA2; (-) strand; PAM type: YTN; PAM sequence: TTC
tgtacaggtatcaaaaccta

SEQ ID NO: 214036 - DNA, 20 bp, Artificial Sequence
  Description of Artificial Sequence: Synthetic oligonucleotide
  Target: LAMA2; (-) strand; PAM type: YTN; PAM sequence: CTA
ttctgtacaggtatcaaaac

SEQ ID NO: 214037 - DNA, 20 bp, Artificial Sequence
  Description of Artificial Sequence: Synthetic oligonucleotide
  Target: LAMA2; (-) strand; PAM type: YTN; PAM sequence: CTA
gagagataaggaaaatcaga

SEQ ID NO: 214038 - DNA, 20 bp, Artificial Sequence
  Description of Artificial Sequence: Synthetic oligonucleotide
  Target: LAMA2; (-) strand; PAM type: YTN; PAM sequence: TTA
agcatgtgaagcacagacta

SEQ ID NO: 214039 - DNA, 20 bp, Artificial Sequence
  Description of Artificial Sequence: Synthetic oligonucleotide
  Target: LAMA2; (-) strand; PAM type: YTN; PAM sequence: TTG
aatattaagcatgtgaagca

SEQ ID NO: 214040 - DNA, 20 bp, Artificial Sequence
  Description of Artificial Sequence: Synthetic oligonucleotide
  Target: LAMA2; (-) strand; PAM type: YTN; PAM sequence: TTT
gaatattaagcatgtgaagc

SEQ ID NO: 214041 - DNA, 20 bp, Artificial Sequence
  Description of Artificial Sequence: Synthetic oligonucleotide
  Target: LAMA2; (-) strand; PAM type: YTN; PAM sequence: CTA
ggaatttgaatattaagcat

SEQ ID NO: 214042 - DNA, 20 bp, Artificial Sequence
  Description of Artificial Sequence: Synthetic oligonucleotide
  Target: LAMA2; (-) strand; PAM type: YTN; PAM sequence: TTG
gcctaggaatttgaatatta

SEQ ID NO: 214043 - DNA, 20 bp, Artificial Sequence
  Description of Artificial Sequence: Synthetic oligonucleotide
  Target: LAMA2; (-) strand; PAM type: YTN; PAM sequence: TTT
ggcctaggaatttgaatatt

SEQ ID NO: 214044 - DNA, 20 bp, Artificial Sequence
  Description of Artificial Sequence: Synthetic oligonucleotide
  Target: LAMA2; (-) strand; PAM type: YTN; PAM sequence: CTT
tggcctaggaatttgaatat

SEQ ID NO: 214045 - DNA, 20 bp, Artificial Sequence
  Description of Artificial Sequence: Synthetic oligonucleotide
  Target: LAMA2; (-) strand; PAM type: YTN; PAM sequence: TTA
gggcatgtacatgtgacttt

SEQ ID NO: 214046 - DNA, 20 bp, Artificial Sequence
  Description of Artificial Sequence: Synthetic oligonucleotide
  Target: LAMA2; (-) strand; PAM type: YTN; PAM sequence: CTA
tagcagttagggcatgtaca

SEQ ID NO: 214047 - DNA, 20 bp, Artificial Sequence
  Description of Artificial Sequence: Synthetic oligonucleotide
  Target: LAMA2; (-) strand; PAM type: YTN; PAM sequence: CTA
ccctatagcagttagggcat

SEQ ID NO: 214048 - DNA, 20 bp, Artificial Sequence
  Description of Artificial Sequence: Synthetic oligonucleotide
  Target: LAMA2; (-) strand; PAM type: YTN; PAM sequence: CTC
cctaccctatagcagttagg

SEQ ID NO: 214049 - DNA, 20 bp, Artificial Sequence
  Description of Artificial Sequence: Synthetic oligonucleotide
  Target: LAMA2; (-) strand; PAM type: YTN; PAM sequence: TTC
tccctaccctatagcagtta

SEQ ID NO: 214050 - DNA, 20 bp, Artificial Sequence
  Description of Artificial Sequence: Synthetic oligonucleotide
  Target: LAMA2; (-) strand; PAM type: YTN; PAM sequence: CTT
ctccctaccctatagcagtt

SEQ ID NO: 214051 - DNA, 20 bp, Artificial Sequence
  Description of Artificial Sequence: Synthetic oligonucleotide
  Target: LAMA2; (-) strand; PAM type: YTN; PAM sequence: TTC
ttctccctaccctatagcag

SEQ ID NO: 214052 - DNA, 20 bp, Artificial Sequence
  Description of Artificial Sequence: Synthetic oligonucleotide
  Target: LAMA2; (-) strand; PAM type: YTN; PAM sequence: TTT
cttctccctaccctatagca

SEQ ID NO: 214053 - DNA, 20 bp, Artificial Sequence
  Description of Artificial Sequence: Synthetic oligonucleotide
  Target: LAMA2; (-) strand; PAM type: YTN; PAM sequence: CTT
tcttctccctaccctatagc

SEQ ID NO: 214054 - DNA, 20 bp, Artificial Sequence
  Description of Artificial Sequence: Synthetic oligonucleotide
  Target: LAMA2; (-) strand; PAM type: YTN; PAM sequence: CTG
ccaaggaaatgtaaatagag

SEQ ID NO: 214055 - DNA, 20 bp, Artificial Sequence
  Description of Artificial Sequence: Synthetic oligonucleotide
  Target: LAMA2; (-) strand; PAM type: YTN; PAM sequence: CTC
ctgccaaggaaatgtaaata

SEQ ID NO: 214056 - DNA, 20 bp, Artificial Sequence
  Description of Artificial Sequence: Synthetic oligonucleotide
  Target: LAMA2; (-) strand; PAM type: YTN; PAM sequence: CTA
cctcctgccaaggaaatgta

SEQ ID NO: 214057 - DNA, 20 bp, Artificial Sequence
  Description of Artificial Sequence: Synthetic oligonucleotide
  Target: LAMA2; (-) strand; PAM type: YTN; PAM sequence: TTG
agggtatgcagtgtcctacc

SEQ ID NO: 214058 - DNA, 20 bp, Artificial Sequence
  Description of Artificial Sequence: Synthetic oligonucleotide
  Target: LAMA2; (-) strand; PAM type: YTN; PAM sequence: CTA
ttgagggtatgcagtgtcct

SEQ ID NO: 214059 - DNA, 20 bp, Artificial Sequence
  Description of Artificial Sequence: Synthetic oligonucleotide
  Target: LAMA2; (-) strand; PAM type: YTN; PAM sequence: CTA
ctattgagggtatgcagtgt

SEQ ID NO: 214060 - DNA, 20 bp, Artificial Sequence
  Description of Artificial Sequence: Synthetic oligonucleotide
  Target: LAMA2; (-) strand; PAM type: YTN; PAM sequence: TTG
tgtctactattgagggtatg

SEQ ID NO: 214061 - DNA, 20 bp, Artificial Sequence
  Description of Artificial Sequence: Synthetic oligonucleotide
  Target: LAMA2; (-) strand; PAM type: YTN; PAM sequence: TTG
gcattgtgtctactattgag

SEQ ID NO: 214062 - DNA, 20 bp, Artificial Sequence
  Description of Artificial Sequence: Synthetic oligonucleotide
  Target: LAMA2; (-) strand; PAM type: YTN; PAM sequence: TTG
agtaattggcattgtgtcta

SEQ ID NO: 214063 - DNA, 20 bp, Artificial Sequence
  Description of Artificial Sequence: Synthetic oligonucleotide
  Target: LAMA2; (-) strand; PAM type: YTN; PAM sequence: CTT
gagtaattggcattgtgtct

SEQ ID NO: 214064 - DNA, 20 bp, Artificial Sequence
  Description of Artificial Sequence: Synthetic oligonucleotide
  Target: LAMA2; (-) strand; PAM type: YTN; PAM sequence: TTC
ttgagtaattggcattgtgt

SEQ ID NO: 214065 - DNA, 20 bp, Artificial Sequence
  Description of Artificial Sequence: Synthetic oligonucleotide
  Target: LAMA2; (-) strand; PAM type: YTN; PAM sequence: TTT
cttgagtaattggcattgtg

SEQ ID NO: 214066 - DNA, 20 bp, Artificial Sequence
  Description of Artificial Sequence: Synthetic oligonucleotide
  Target: LAMA2; (-) strand; PAM type: YTN; PAM sequence: TTT
tcttgagtaattggcattgt

SEQ ID NO: 214067 - DNA, 20 bp, Artificial Sequence
  Description of Artificial Sequence: Synthetic oligonucleotide
  Target: LAMA2; (-) strand; PAM type: YTN; PAM sequence: CTT
ttcttgagtaattggcattg

SEQ ID NO: 214068 - DNA, 20 bp, Artificial Sequence
  Description of Artificial Sequence: Synthetic oligonucleotide
  Target: LAMA2; (-) strand; PAM type: YTN; PAM sequence: TTC
ttttcttgagtaattggcat

SEQ ID NO: 214069 - DNA, 20 bp, Artificial Sequence
  Description of Artificial Sequence: Synthetic oligonucleotide
  Target: LAMA2; (-) strand; PAM type: YTN; PAM sequence: TTT
cttttcttgagtaattggca

SEQ ID NO: 214070 - DNA, 20 bp, Artificial Sequence
  Description of Artificial Sequence: Synthetic oligonucleotide
  Target: LAMA2; (-) strand; PAM type: YTN; PAM sequence: CTC
catttcttttcttgagtaat

SEQ ID NO: 214071 - DNA, 20 bp, Artificial Sequence
  Description of Artificial Sequence: Synthetic oligonucleotide
  Target: LAMA2; (-) strand; PAM type: YTN; PAM sequence: TTC
atcctccatttcttttcttg

SEQ ID NO: 214072 - DNA, 20 bp, Artificial Sequence
  Description of Artificial Sequence: Synthetic oligonucleotide
  Target: LAMA2; (-) strand; PAM type: YTN; PAM sequence: CTG
tccaacattcatcctccatt

SEQ ID NO: 214073 - DNA, 20 bp, Artificial Sequence
  Description of Artificial Sequence: Synthetic oligonucleotide
  Target: LAMA2; (-) strand; PAM type: YTN; PAM sequence: TTG
gctgtccaacattcatcctc

SEQ ID NO: 214074 - DNA, 20 bp, Artificial Sequence
  Description of Artificial Sequence: Synthetic oligonucleotide
  Target: LAMA2; (-) strand; PAM type: YTN; PAM sequence: CTT
ggctgtccaacattcatcct

SEQ ID NO: 214075 - DNA, 20 bp, Artificial Sequence
  Description of Artificial Sequence: Synthetic oligonucleotide
  Target: LAMA2; (-) strand; PAM type: YTN; PAM sequence: TTC
ttggctgtccaacattcatc

SEQ ID NO: 214076 - DNA, 20 bp, Artificial Sequence
  Description of Artificial Sequence: Synthetic oligonucleotide
  Target: LAMA2; (-) strand; PAM type: YTN; PAM sequence: TTT
cttggctgtccaacattcat

SEQ ID NO: 214077 - DNA, 20 bp, Artificial Sequence
  Description of Artificial Sequence: Synthetic oligonucleotide
  Target: LAMA2; (-) strand; PAM type: YTN; PAM sequence: TTC
atcatttcttggctgtccaa

SEQ ID NO: 214078 - DNA, 20 bp, Artificial Sequence
  Description of Artificial Sequence: Synthetic oligonucleotide
  Target: LAMA2; (-) strand; PAM type: YTN; PAM sequence: CTT
catcatttcttggctgtcca

SEQ ID NO: 214079 - DNA, 20 bp, Artificial Sequence
  Description of Artificial Sequence: Synthetic oligonucleotide
  Target: LAMA2; (-) strand; PAM type: YTN; PAM sequence: CTA
tatgaaaaatgtggcagacc

SEQ ID NO: 214080 - DNA, 20 bp, Artificial Sequence
  Description of Artificial Sequence: Synthetic oligonucleotide
  Target: LAMA2; (-) strand; PAM type: YTN; PAM sequence: TTC
aaagaaaaagccaacctata

SEQ ID NO: 214081 - DNA, 20 bp, Artificial Sequence
  Description of Artificial Sequence: Synthetic oligonucleotide
  Target: LAMA2; (-) strand; PAM type: YTN; PAM sequence: CTA
agtgaaaacattcaaagaaa

SEQ ID NO: 214082 - DNA, 20 bp, Artificial Sequence
  Description of Artificial Sequence: Synthetic oligonucleotide
  Target: LAMA2; (-) strand; PAM type: YTN; PAM sequence: CTA
gctaagtgaaaacattcaaa

SEQ ID NO: 214083 - DNA, 20 bp, Artificial Sequence
  Description of Artificial Sequence: Synthetic oligonucleotide
  Target: LAMA2; (-) strand; PAM type: YTN; PAM sequence: TTG
gtacactagctaagtgaaaa

SEQ ID NO: 214084 - DNA, 20 bp, Artificial Sequence
  Description of Artificial Sequence: Synthetic oligonucleotide
  Target: LAMA2; (-) strand; PAM type: YTN; PAM sequence: TTT
ggtacactagctaagtgaaa

SEQ ID NO: 214085 - DNA, 20 bp, Artificial Sequence
  Description of Artificial Sequence: Synthetic oligonucleotide
  Target: LAMA2; (-) strand; PAM type: YTN; PAM sequence: TTT
tggtacactagctaagtgaa

SEQ ID NO: 214086 - DNA, 20 bp, Artificial Sequence
  Description of Artificial Sequence: Synthetic oligonucleotide
  Target: LAMA2; (-) strand; PAM type: YTN; PAM sequence: CTG
ttttggtacactagctaagt

SEQ ID NO: 214087 - DNA, 20 bp, Artificial Sequence
  Description of Artificial Sequence: Synthetic oligonucleotide
  Target: LAMA2; (-) strand; PAM type: YTN; PAM sequence: TTG
gtggaaatgtagaactgttt

SEQ ID NO: 214088 - DNA, 20 bp, Artificial Sequence
  Description of Artificial Sequence: Synthetic oligonucleotide
  Target: LAMA2; (-) strand; PAM type: YTN; PAM sequence: TTT
ggtggaaatgtagaactgtt

SEQ ID NO: 214089 - DNA, 20 bp, Artificial Sequence
  Description of Artificial Sequence: Synthetic oligonucleotide
  Target: LAMA2; (-) strand; PAM type: YTN; PAM sequence: TTA
atttggtggaaatgtagaac

SEQ ID NO: 214090 - DNA, 20 bp, Artificial Sequence
  Description of Artificial Sequence: Synthetic oligonucleotide
  Target: LAMA2; (-) strand; PAM type: YTN; PAM sequence: TTT
aatttggtggaaatgtagaa

SEQ ID NO: 214091 - DNA, 20 bp, Artificial Sequence
  Description of Artificial Sequence: Synthetic oligonucleotide
  Target: LAMA2; (-) strand; PAM type: YTN; PAM sequence: CTT
taatttggtggaaatgtaga

SEQ ID NO: 214092 - DNA, 20 bp, Artificial Sequence
  Description of Artificial Sequence: Synthetic oligonucleotide
  Target: LAMA2; (-) strand; PAM type: YTN; PAM sequence: CTA
atcagacctttaatttggtg

SEQ ID NO: 214093 - DNA, 20 bp, Artificial Sequence
  Description of Artificial Sequence: Synthetic oligonucleotide
  Target: LAMA2; (-) strand; PAM type: YTN; PAM sequence: TTA
aactaatcagacctttaatt

SEQ ID NO: 214094 - DNA, 20 bp, Artificial Sequence
  Description of Artificial Sequence: Synthetic oligonucleotide
  Target: LAMA2; (-) strand; PAM type: YTN; PAM sequence: TTG
agaaaaatatggcaaatgaa

SEQ ID NO: 214095 - DNA, 20 bp, Artificial Sequence
  Description of Artificial Sequence: Synthetic oligonucleotide
  Target: LAMA2; (-) strand; PAM type: YTN; PAM sequence: CTT
gagaaaaatatggcaaatga

SEQ ID NO: 214096 - DNA, 20 bp, Artificial Sequence
  Description of Artificial Sequence: Synthetic oligonucleotide
  Target: LAMA2; (-) strand; PAM type: YTN; PAM sequence: TTC
ttgagaaaaatatggcaaat

SEQ ID NO: 214097 - DNA, 20 bp, Artificial Sequence
  Description of Artificial Sequence: Synthetic oligonucleotide
  Target: LAMA2; (-) strand; PAM type: YTN; PAM sequence: TTT
cttgagaaaaatatggcaaa

SEQ ID NO: 214098 - DNA, 20 bp, Artificial Sequence
  Description of Artificial Sequence: Synthetic oligonucleotide
  Target: LAMA2; (-) strand; PAM type: YTN; PAM sequence: CTT
tcttgagaaaaatatggcaa

SEQ ID NO: 214099 - DNA, 20 bp, Artificial Sequence
  Description of Artificial Sequence: Synthetic oligonucleotide
  Target: LAMA2; (-) strand; PAM type: YTN; PAM sequence: CTG
tataatctttcttgagaaaa

SEQ ID NO: 214100 - DNA, 20 bp, Artificial Sequence
  Description of Artificial Sequence: Synthetic oligonucleotide
  Target: LAMA2; (-) strand; PAM type: YTN; PAM sequence: TTC
atgcactgtataatctttct

SEQ ID NO: 214101 - DNA, 20 bp, Artificial Sequence
  Description of Artificial Sequence: Synthetic oligonucleotide
  Target: LAMA2; (-) strand; PAM type: YTN; PAM sequence: CTG
aataagaatgagttcatgca

SEQ ID NO: 214102 - DNA, 20 bp, Artificial Sequence
  Description of Artificial Sequence: Synthetic oligonucleotide
  Target: LAMA2; (-) strand; PAM type: YTN; PAM sequence: TTA
ctgaataagaatgagttcat

SEQ ID NO: 214103 - DNA, 20 bp, Artificial Sequence
  Description of Artificial Sequence: Synthetic oligonucleotide
  Target: LAMA2; (-) strand; PAM type: YTN; PAM sequence: TTT
actgaataagaatgagttca

SEQ ID NO: 214104 - DNA, 20 bp, Artificial Sequence
  Description of Artificial Sequence: Synthetic oligonucleotide
  Target: LAMA2; (-) strand; PAM type: YTN; PAM sequence: TTA
aatttactgaataagaatga

SEQ ID NO: 214105 - DNA, 20 bp, Artificial Sequence
  Description of Artificial Sequence: Synthetic oligonucleotide
  Target: LAMA2; (-) strand; PAM type: YTN; PAM sequence: TTT
aaatttactgaataagaatg

SEQ ID NO: 214106 - DNA, 20 bp, Artificial Sequence
  Description of Artificial Sequence: Synthetic oligonucleotide
  Target: LAMA2; (-) strand; PAM type: YTN; PAM sequence: CTC
aaatttaaatttactgaata

SEQ ID NO: 214107 - DNA, 20 bp, Artificial Sequence
  Description of Artificial Sequence: Synthetic oligonucleotide
  Target: LAMA2; (-) strand; PAM type: YTN; PAM sequence: TTG
gaatataatgccactcaaat

SEQ ID NO: 214108 - DNA, 20 bp, Artificial Sequence
  Description of Artificial Sequence: Synthetic oligonucleotide
  Target: LAMA2; (-) strand; PAM type: YTN; PAM sequence: CTA
gttggaatataatgccactc

SEQ ID NO: 214109 - DNA, 20 bp, Artificial Sequence
  Description of Artificial Sequence: Synthetic oligonucleotide
  Target: LAMA2; (-) strand; PAM type: YTN; PAM sequence: CTG
agggcatggatagcactagt

SEQ ID NO: 214110 - DNA, 20 bp, Artificial Sequence
  Description of Artificial Sequence: Synthetic oligonucleotide
  Target: LAMA2; (-) strand; PAM type: YTN; PAM sequence: TTA
ctgagggcatggatagcact

SEQ ID NO: 214111 - DNA, 20 bp, Artificial Sequence
  Description of Artificial Sequence: Synthetic oligonucleotide
  Target: LAMA2; (-) strand; PAM type: YTN; PAM sequence: CTA
taaaattactgagggcatgg

SEQ ID NO: 214112 - DNA, 20 bp, Artificial Sequence
  Description of Artificial Sequence: Synthetic oligonucleotide
  Target: LAMA2; (-) strand; PAM type: YTN; PAM sequence: CTC
aagtctataaaattactgag

SEQ ID NO: 214113 - DNA, 20 bp, Artificial Sequence
  Description of Artificial Sequence: Synthetic oligonucleotide
  Target: LAMA2; (-) strand; PAM type: YTN; PAM sequence: CTC
tcaagtctataaaattactg

SEQ ID NO: 214114 - DNA, 20 bp, Artificial Sequence
  Description of Artificial Sequence: Synthetic oligonucleotide
  Target: LAMA2; (-) strand; PAM type: YTN; PAM sequence: TTA
cggtggctctcaagtctata

SEQ ID NO: 214115 - DNA, 20 bp, Artificial Sequence
  Description of Artificial Sequence: Synthetic oligonucleotide
  Target: LAMA2; (-) strand; PAM type: YTN; PAM sequence: TTT
acggtggctctcaagtctat

SEQ ID NO: 214116 - DNA, 20 bp, Artificial Sequence
  Description of Artificial Sequence: Synthetic oligonucleotide
  Target: LAMA2; (-) strand; PAM type: YTN; PAM sequence: TTT
tacggtggctctcaagtcta

SEQ ID NO: 214117 - DNA, 20 bp, Artificial Sequence
  Description of Artificial Sequence: Synthetic oligonucleotide
  Target: LAMA2; (-) strand; PAM type: YTN; PAM sequence: TTT
ttacggtggctctcaagtct

SEQ ID NO: 214118 - DNA, 20 bp, Artificial Sequence
  Description of Artificial Sequence: Synthetic oligonucleotide
  Target: LAMA2; (-) strand; PAM type: YTN; PAM sequence: TTT
tttacggtggctctcaagtc

SEQ ID NO: 214119 - DNA, 20 bp, Artificial Sequence
  Description of Artificial Sequence: Synthetic oligonucleotide
  Target: LAMA2; (-) strand; PAM type: YTN; PAM sequence: TTA
gtattttttacggtggctct

SEQ ID NO: 214120 - DNA, 20 bp, Artificial Sequence
  Description of Artificial Sequence: Synthetic oligonucleotide
  Target: LAMA2; (-) strand; PAM type: YTN; PAM sequence: TTT
agtattttttacggtggctc

SEQ ID NO: 214121 - DNA, 20 bp, Artificial Sequence
  Description of Artificial Sequence: Synthetic oligonucleotide
  Target: LAMA2; (-) strand; PAM type: YTN; PAM sequence: CTT
tagtattttttacggtggct

SEQ ID NO: 214122 - DNA, 20 bp, Artificial Sequence
  Description of Artificial Sequence: Synthetic oligonucleotide
  Target: LAMA2; (-) strand; PAM type: YTN; PAM sequence: CTG
taactttagtattttttacg

SEQ ID NO: 214123 - DNA, 20 bp, Artificial Sequence
  Description of Artificial Sequence: Synthetic oligonucleotide
  Target: LAMA2; (-) strand; PAM type: YTN; PAM sequence: CTC
atcatactgtaactttagta

SEQ ID NO: 214124 - DNA, 20 bp, Artificial Sequence
  Description of Artificial Sequence: Synthetic oligonucleotide
  Target: LAMA2; (-) strand; PAM type: YTN; PAM sequence: TTA
gtagaaccctcatcatactg

SEQ ID NO: 214125 - DNA, 20 bp, Artificial Sequence
  Description of Artificial Sequence: Synthetic oligonucleotide
  Target: LAMA2; (-) strand; PAM type: YTN; PAM sequence: TTT
agtagaaccctcatcatact

SEQ ID NO: 214126 - DNA, 20 bp, Artificial Sequence
  Description of Artificial Sequence: Synthetic oligonucleotide
  Target: LAMA2; (-) strand; PAM type: YTN; PAM sequence: TTG
atatttagtagaaccctcat

SEQ ID NO: 214127 - DNA, 20 bp, Artificial Sequence
  Description of Artificial Sequence: Synthetic oligonucleotide
  Target: LAMA2; (-) strand; PAM type: YTN; PAM sequence: TTA
gttgatatttagtagaaccc

SEQ ID NO: 214128 - DNA, 20 bp, Artificial Sequence
  Description of Artificial Sequence: Synthetic oligonucleotide
  Target: LAMA2; (-) strand; PAM type: YTN; PAM sequence: CTT
agttgatatttagtagaacc

SEQ ID NO: 214129 - DNA, 20 bp, Artificial Sequence
  Description of Artificial Sequence: Synthetic oligonucleotide
  Target: LAMA2; (-) strand; PAM type: YTN; PAM sequence: TTA
cttagttgatatttagtaga

SEQ ID NO: 214130 - DNA, 20 bp, Artificial Sequence
  Description of Artificial Sequence: Synthetic oligonucleotide
  Target: LAMA2; (-) strand; PAM type: YTN; PAM sequence: TTG
gtgtccgtatattacttagt

SEQ ID NO: 214131 - DNA, 20 bp, Artificial Sequence
  Description of Artificial Sequence: Synthetic oligonucleotide
  Target: LAMA2; (-) strand; PAM type: YTN; PAM sequence: CTT
ggtgtccgtatattacttag

SEQ ID NO: 214132 - DNA, 20 bp, Artificial Sequence
  Description of Artificial Sequence: Synthetic oligonucleotide
  Target: LAMA2; (-) strand; PAM type: YTN; PAM sequence: TTC
ttggtgtccgtatattactt

SEQ ID NO: 214133 - DNA, 20 bp, Artificial Sequence
  Description of Artificial Sequence: Synthetic oligonucleotide
  Target: LAMA2; (-) strand; PAM type: YTN; PAM sequence: TTT
cttggtgtccgtatattact

SEQ ID NO: 214134 - DNA, 20 bp, Artificial Sequence
  Description of Artificial Sequence: Synthetic oligonucleotide
  Target: LAMA2; (-) strand; PAM type: YTN; PAM sequence: CTT
tcttggtgtccgtatattac

SEQ ID NO: 214135 - DNA, 20 bp, Artificial Sequence
  Description of Artificial Sequence: Synthetic oligonucleotide
  Target: LAMA2; (-) strand; PAM type: YTN; PAM sequence: TTC
tttcttggtgtccgtatatt

SEQ ID NO: 214136 - DNA, 20 bp, Artificial Sequence
  Description of Artificial Sequence: Synthetic oligonucleotide
  Target: LAMA2; (-) strand; PAM type: YTN; PAM sequence: TTT
ctttcttggtgtccgtatat

SEQ ID NO: 214137 - DNA, 20 bp, Artificial Sequence
  Description of Artificial Sequence: Synthetic oligonucleotide
  Target: LAMA2; (-) strand; PAM type: YTN; PAM sequence: CTG
tttctttcttggtgtccgta

SEQ ID NO: 214138 - DNA, 20 bp, Artificial Sequence
  Description of Artificial Sequence: Synthetic oligonucleotide
  Target: LAMA2; (-) strand; PAM type: YTN; PAM sequence: TTC
tgtttctttcttggtgtccg

SEQ ID NO: 214139 - DNA, 20 bp, Artificial Sequence
  Description of Artificial Sequence: Synthetic oligonucleotide
  Target: LAMA2; (-) strand; PAM type: YTN; PAM sequence: TTT
ctgtttctttcttggtgtcc

SEQ ID NO: 214140 - DNA, 20 bp, Artificial Sequence
  Description of Artificial Sequence: Synthetic oligonucleotide
  Target: LAMA2; (-) strand; PAM type: YTN; PAM sequence: TTT
tctgtttctttcttggtgtc

SEQ ID NO: 214141 - DNA, 20 bp, Artificial Sequence
  Description of Artificial Sequence: Synthetic oligonucleotide
  Target: LAMA2; (-) strand; PAM type: YTN; PAM sequence: TTG
ccacacagaattttctgttt

SEQ ID NO: 214142 - DNA, 20 bp, Artificial Sequence
  Description of Artificial Sequence: Synthetic oligonucleotide
  Target: LAMA2; (-) strand; PAM type: YTN; PAM sequence: TTT
gccacacagaattttctgtt

SEQ ID NO: 214143 - DNA, 20 bp, Artificial Sequence
  Description of Artificial Sequence: Synthetic oligonucleotide
  Target: LAMA2; (-) strand; PAM type: YTN; PAM sequence: CTT
tgccacacagaattttctgt

SEQ ID NO: 214144 - DNA, 20 bp, Artificial Sequence
  Description of Artificial Sequence: Synthetic oligonucleotide
  Target: LAMA2; (-) strand; PAM type: YTN; PAM sequence: CTG
actttgccacacagaatttt

SEQ ID NO: 214145 - DNA, 20 bp, Artificial Sequence
  Description of Artificial Sequence: Synthetic oligonucleotide
  Target: LAMA2; (-) strand; PAM type: YTN; PAM sequence: TTC
tgactttgccacacagaatt

SEQ ID NO: 214146 - DNA, 20 bp, Artificial Sequence
  Description of Artificial Sequence: Synthetic oligonucleotide
  Target: LAMA2; (-) strand; PAM type: YTN; PAM sequence: TTT
ctgactttgccacacagaat

SEQ ID NO: 214147 - DNA, 20 bp, Artificial Sequence
  Description of Artificial Sequence: Synthetic oligonucleotide
  Target: LAMA2; (-) strand; PAM type: YTN; PAM sequence: TTT
tctgactttgccacacagaa

SEQ ID NO: 214148 - DNA, 20 bp, Artificial Sequence
  Description of Artificial Sequence: Synthetic oligonucleotide
  Target: LAMA2; (-) strand; PAM type: YTN; PAM sequence: CTG
tgaaagtgttttctgacttt

SEQ ID NO: 214149 - DNA, 20 bp, Artificial Sequence
  Description of Artificial Sequence: Synthetic oligonucleotide
  Target: LAMA2; (-) strand; PAM type: YTN; PAM sequence: CTC
tgtgaaagtgttttctgact

SEQ ID NO: 214150 - DNA, 20 bp, Artificial Sequence
  Description of Artificial Sequence: Synthetic oligonucleotide
  Target: LAMA2; (-) strand; PAM type: YTN; PAM sequence: CTG
ctctgtgaaagtgttttctg

SEQ ID NO: 214151 - DNA, 20 bp, Artificial Sequence
  Description of Artificial Sequence: Synthetic oligonucleotide
  Target: LAMA2; (-) strand; PAM type: YTN; PAM sequence: TTC
cctgctctgtgaaagtgttt

SEQ ID NO: 214152 - DNA, 20 bp, Artificial Sequence
  Description of Artificial Sequence: Synthetic oligonucleotide
  Target: LAMA2; (-) strand; PAM type: YTN; PAM sequence: CTC
aaatattccctgctctgtga

SEQ ID NO: 214153 - DNA, 20 bp, Artificial Sequence
  Description of Artificial Sequence: Synthetic oligonucleotide
  Target: LAMA2; (-) strand; PAM type: YTN; PAM sequence: TTC
atagctcaaatattccctgc

SEQ ID NO: 214154 - DNA, 20 bp, Artificial Sequence
  Description of Artificial Sequence: Synthetic oligonucleotide
  Target: LAMA2; (-) strand; PAM type: YTN; PAM sequence: TTT
catagctcaaatattccctg

SEQ ID NO: 214155 - DNA, 20 bp, Artificial Sequence
  Description of Artificial Sequence: Synthetic oligonucleotide
  Target: LAMA2; (-) strand; PAM type: YTN; PAM sequence: CTT
tcatagctcaaatattccct

SEQ ID NO: 214156 - DNA, 20 bp, Artificial Sequence
  Description of Artificial Sequence: Synthetic oligonucleotide
  Target: LAMA2; (-) strand; PAM type: YTN; PAM sequence: TTC
atctttcatagctcaaatat

SEQ ID NO: 214157 - DNA, 20 bp, Artificial Sequence
  Description of Artificial Sequence: Synthetic oligonucleotide
  Target: LAMA2; (-) strand; PAM type: YTN; PAM sequence: TTG
catgttcatctttcatagct

SEQ ID NO: 214158 - DNA, 20 bp, Artificial Sequence
  Description of Artificial Sequence: Synthetic oligonucleotide
  Target: LAMA2; (-) strand; PAM type: YTN; PAM sequence: TTG
ttgcatgttcatctttcata

SEQ ID NO: 214159 - DNA, 20 bp, Artificial Sequence
  Description of Artificial Sequence: Synthetic oligonucleotide
  Target: LAMA2; (-) strand; PAM type: YTN; PAM sequence: TTT
gttgcatgttcatctttcat

SEQ ID NO: 214160 - DNA, 20 bp, Artificial Sequence
  Description of Artificial Sequence: Synthetic oligonucleotide
  Target: LAMA2; (-) strand; PAM type: YTN; PAM sequence: TTT
tgttgcatgttcatctttca

SEQ ID NO: 214161 - DNA, 20 bp, Artificial Sequence
  Description of Artificial Sequence: Synthetic oligonucleotide
  Target: LAMA2; (-) strand; PAM type: YTN; PAM sequence: TTT
ttgttgcatgttcatctttc

SEQ ID NO: 214162 - DNA, 20 bp, Artificial Sequence
  Description of Artificial Sequence: Synthetic oligonucleotide
  Target: LAMA2; (-) strand; PAM type: YTN; PAM sequence: CTT
tttgttgcatgttcatcttt

SEQ ID NO: 214163 - DNA, 20 bp, Artificial Sequence
  Description of Artificial Sequence: Synthetic oligonucleotide
  Target: LAMA2; (-) strand; PAM type: YTN; PAM sequence: CTC
cctttttgttgcatgttcat

SEQ ID NO: 214164 - DNA, 20 bp, Artificial Sequence
  Description of Artificial Sequence: Synthetic oligonucleotide
  Target: LAMA2; (-) strand; PAM type: YTN; PAM sequence: TTC
tccctttttgttgcatgttc

SEQ ID NO: 214165 - DNA, 20 bp, Artificial Sequence
  Description of Artificial Sequence: Synthetic oligonucleotide
  Target: LAMA2; (-) strand; PAM type: YTN; PAM sequence: TTC
aacaaagaatgttctccctt

SEQ ID NO: 214166 - DNA, 20 bp, Artificial Sequence
  Description of Artificial Sequence: Synthetic oligonucleotide
  Target: LAMA2; (-) strand; PAM type: YTN; PAM sequence: CTT
caacaaagaatgttctccct

SEQ ID NO: 214167 - DNA, 20 bp, Artificial Sequence
  Description of Artificial Sequence: Synthetic oligonucleotide
  Target: LAMA2; (-) strand; PAM type: YTN; PAM sequence: TTG
tcccttcaacaaagaatgtt

SEQ ID NO: 214168 - DNA, 20 bp, Artificial Sequence
  Description of Artificial Sequence: Synthetic oligonucleotide
  Target: LAMA2; (-) strand; PAM type: YTN; PAM sequence: CTT
gtcccttcaacaaagaatgt

SEQ ID NO: 214169 - DNA, 20 bp, Artificial Sequence
  Description of Artificial Sequence: Synthetic oligonucleotide
  Target: LAMA2; (-) strand; PAM type: YTN; PAM sequence: TTA
tcttgtcccttcaacaaaga

SEQ ID NO: 214170 - DNA, 20 bp, Artificial Sequence
  Description of Artificial Sequence: Synthetic oligonucleotide
  Target: LAMA2; (-) strand; PAM type: YTN; PAM sequence: TTG
tgatgacattatcttgtccc

SEQ ID NO: 214171 - DNA, 20 bp, Artificial Sequence
  Description of Artificial Sequence: Synthetic oligonucleotide
  Target: LAMA2; (-) strand; PAM type: YTN; PAM sequence: TTT
gtgatgacattatcttgtcc

SEQ ID NO: 214172 - DNA, 20 bp, Artificial Sequence
  Description of Artificial Sequence: Synthetic oligonucleotide
  Target: LAMA2; (-) strand; PAM type: YTN; PAM sequence: CTT
tgtgatgacattatcttgtc

SEQ ID NO: 214173 - DNA, 20 bp, Artificial Sequence
  Description of Artificial Sequence: Synthetic oligonucleotide
  Target: LAMA2; (-) strand; PAM type: YTN; PAM sequence: TTG
aaaatgctttgtgatgacat

SEQ ID NO: 214174 - DNA, 20 bp, Artificial Sequence
  Description of Artificial Sequence: Synthetic oligonucleotide
  Target: LAMA2; (-) strand; PAM type: YTN; PAM sequence: TTT
gaaaatgctttgtgatgaca

SEQ ID NO: 214175 - DNA, 20 bp, Artificial Sequence
  Description of Artificial Sequence: Synthetic oligonucleotide
  Target: LAMA2; (-) strand; PAM type: YTN; PAM sequence: TTT
tgaaaatgctttgtgatgac

SEQ ID NO: 214176 - DNA, 20 bp, Artificial Sequence
  Description of Artificial Sequence: Synthetic oligonucleotide
  Target: LAMA2; (-) strand; PAM type: YTN; PAM sequence: TTA
caaatatagcaggcattttg

SEQ ID NO: 214177 - DNA, 20 bp, Artificial Sequence
  Description of Artificial Sequence: Synthetic oligonucleotide
  Target: LAMA2; (-) strand; PAM type: YTN; PAM sequence: TTT
acaaatatagcaggcatttt

SEQ ID NO: 214178 - DNA, 20 bp, Artificial Sequence
  Description of Artificial Sequence: Synthetic oligonucleotide
  Target: LAMA2; (-) strand; PAM type: YTN; PAM sequence: CTA
tttacaaatatagcaggcat

SEQ ID NO: 214179 - DNA, 20 bp, Artificial Sequence
  Description of Artificial Sequence: Synthetic oligonucleotide
  Target: LAMA2; (-) strand; PAM type: YTN; PAM sequence: TTC
ctatttacaaatatagcagg

SEQ ID NO: 214180 - DNA, 20 bp, Artificial Sequence
  Description of Artificial Sequence: Synthetic oligonucleotide
  Target: LAMA2; (-) strand; PAM type: YTN; PAM sequence: CTT
cctatttacaaatatagcag

SEQ ID NO: 214181 - DNA, 20 bp, Artificial Sequence
  Description of Artificial Sequence: Synthetic oligonucleotide
  Target: LAMA2; (-) strand; PAM type: YTN; PAM sequence: CTC
ttcctatttacaaatatagc

SEQ ID NO: 214182 - DNA, 20 bp, Artificial Sequence
  Description of Artificial Sequence: Synthetic oligonucleotide
  Target: LAMA2; (-) strand; PAM type: YTN; PAM sequence: CTG
atctcttcctatttacaaat

SEQ ID NO: 214183 - DNA, 20 bp, Artificial Sequence
  Description of Artificial Sequence: Synthetic oligonucleotide
  Target: LAMA2; (-) strand; PAM type: YTN; PAM sequence: CTA
gtgaactgatctcttcctat

SEQ ID NO: 214184 - DNA, 20 bp, Artificial Sequence
  Description of Artificial Sequence: Synthetic oligonucleotide
  Target: LAMA2; (-) strand; PAM type: YTN; PAM sequence: TTA
tacatctagtgaactgatct

SEQ ID NO: 214185 - DNA, 20 bp, Artificial Sequence
  Description of Artificial Sequence: Synthetic oligonucleotide
  Target: LAMA2; (-) strand; PAM type: YTN; PAM sequence: CTT
atacatctagtgaactgatc

SEQ ID NO: 214186 - DNA, 20 bp, Artificial Sequence
  Description of Artificial Sequence: Synthetic oligonucleotide
  Target: LAMA2; (-) strand; PAM type: YTN; PAM sequence: TTC
ttatacatctagtgaactga

SEQ ID NO: 214187 - DNA, 20 bp, Artificial Sequence
  Description of Artificial Sequence: Synthetic oligonucleotide
  Target: LAMA2; (-) strand; PAM type: YTN; PAM sequence: CTT
cttatacatctagtgaactg

SEQ ID NO: 214188 - DNA, 20 bp, Artificial Sequence
  Description of Artificial Sequence: Synthetic oligonucleotide
  Target: LAMA2; (-) strand; PAM type: YTN; PAM sequence: TTC
atgccttcttatacatctag

SEQ ID NO: 214189 - DNA, 20 bp, Artificial Sequence
  Description of Artificial Sequence: Synthetic oligonucleotide
  Target: LAMA2; (-) strand; PAM type: YTN; PAM sequence: CTT
catgccttcttatacatcta

SEQ ID NO: 214190 - DNA, 20 bp, Artificial Sequence
  Description of Artificial Sequence: Synthetic oligonucleotide
  Target: LAMA2; (-) strand; PAM type: YTN; PAM sequence: CTC
cttcatgccttcttatacat

SEQ ID NO: 214191 - DNA, 20 bp, Artificial Sequence
  Description of Artificial Sequence: Synthetic oligonucleotide
  Target: LAMA2; (-) strand; PAM type: YTN; PAM sequence: CTA
tcctccttcatgccttctta

SEQ ID NO: 214192 - DNA, 20 bp, Artificial Sequence
  Description of Artificial Sequence: Synthetic oligonucleotide
  Target: LAMA2; (-) strand; PAM type: YTN; PAM sequence: TTG
ctatcctccttcatgccttc

SEQ ID NO: 214193 - DNA, 20 bp, Artificial Sequence
  Description of Artificial Sequence: Synthetic oligonucleotide
  Target: LAMA2; (-) strand; PAM type: YTN; PAM sequence: CTG
ttgctatcctccttcatgcc

SEQ ID NO: 214194 - DNA, 20 bp, Artificial Sequence
  Description of Artificial Sequence: Synthetic oligonucleotide
  Target: LAMA2; (-) strand; PAM type: YTN; PAM sequence: CTC
atctgttgctatcctccttc

SEQ ID NO: 214195 - DNA, 20 bp, Artificial Sequence
  Description of Artificial Sequence: Synthetic oligonucleotide
  Target: LAMA2; (-) strand; PAM type: YTN; PAM sequence: CTG
aactcatctgttgctatcct

SEQ ID NO: 214196 - DNA, 20 bp, Artificial Sequence
  Description of Artificial Sequence: Synthetic oligonucleotide
  Target: LAMA2; (-) strand; PAM type: YTN; PAM sequence: CTG
tctgaactcatctgttgcta

SEQ ID NO: 214197 - DNA, 20 bp, Artificial Sequence
  Description of Artificial Sequence: Synthetic oligonucleotide
  Target: LAMA2; (-) strand; PAM type: YTN; PAM sequence: CTA
cctgtctgaactcatctgtt

SEQ ID NO: 214198 - DNA, 20 bp, Artificial Sequence
  Description of Artificial Sequence: Synthetic oligonucleotide
  Target: LAMA2; (-) strand; PAM type: YTN; PAM sequence: TTC
tacctgtctgaactcatctg

SEQ ID NO: 214199 - DNA, 20 bp, Artificial Sequence
  Description of Artificial Sequence: Synthetic oligonucleotide
  Target: LAMA2; (-) strand; PAM type: YTN; PAM sequence: TTT
ctacctgtctgaactcatct

SEQ ID NO: 214200 - DNA, 20 bp, Artificial Sequence
  Description of Artificial Sequence: Synthetic oligonucleotide
  Target: LAMA2; (-) strand; PAM type: YTN; PAM sequence: CTT
tctacctgtctgaactcatc

SEQ ID NO: 214201 - DNA, 20 bp, Artificial Sequence
  Description of Artificial Sequence: Synthetic oligonucleotide
  Target: LAMA2; (-) strand; PAM type: YTN; PAM sequence: CTG
ctttctacctgtctgaactc

SEQ ID NO: 214202 - DNA, 20 bp, Artificial Sequence
  Description of Artificial Sequence: Synthetic oligonucleotide
  Target: LAMA2; (-) strand; PAM type: YTN; PAM sequence: TTA
taatcaggcctgctttctac

SEQ ID NO: 214203 - DNA, 20 bp, Artificial Sequence
  Description of Artificial Sequence: Synthetic oligonucleotide
  Target: LAMA2; (-) strand; PAM type: YTN; PAM sequence: TTT
ataatcaggcctgctttcta

SEQ ID NO: 214204 - DNA, 20 bp, Artificial Sequence
  Description of Artificial Sequence: Synthetic oligonucleotide
  Target: LAMA2; (-) strand; PAM type: YTN; PAM sequence: CTA
aacatttataatcaggcctg

SEQ ID NO: 214205 - DNA, 20 bp, Artificial Sequence
  Description of Artificial Sequence: Synthetic oligonucleotide
  Target: LAMA2; (-) strand; PAM type: YTN; PAM sequence: TTG
gtgatctaaacatttataat

SEQ ID NO: 214206 - DNA, 20 bp, Artificial Sequence
  Description of Artificial Sequence: Synthetic oligonucleotide
  Target: LAMA2; (-) strand; PAM type: YTN; PAM sequence: CTT
ggtgatctaaacatttataa

SEQ ID NO: 214207 - DNA, 20 bp, Artificial Sequence
  Description of Artificial Sequence: Synthetic oligonucleotide
  Target: LAMA2; (-) strand; PAM type: YTN; PAM sequence: CTC
cttggtgatctaaacattta

SEQ ID NO: 214208 - DNA, 20 bp, Artificial Sequence
  Description of Artificial Sequence: Synthetic oligonucleotide
  Target: LAMA2; (-) strand; PAM type: YTN; PAM sequence: CTG
tagtgtcgtagacaaactcc

SEQ ID NO: 214209 - DNA, 20 bp, Artificial Sequence
  Description of Artificial Sequence: Synthetic oligonucleotide
  Target: LAMA2; (-) strand; PAM type: YTN; PAM sequence: CTG
tcacctgtagtgtcgtagac

SEQ ID NO: 214210 - DNA, 20 bp, Artificial Sequence
  Description of Artificial Sequence: Synthetic oligonucleotide
  Target: LAMA2; (-) strand; PAM type: YTN; PAM sequence: TTG
cctgtcacctgtagtgtcgt

SEQ ID NO: 214211 - DNA, 20 bp, Artificial Sequence
  Description of Artificial Sequence: Synthetic oligonucleotide
  Target: LAMA2; (-) strand; PAM type: YTN; PAM sequence: TTG
tgagttgcctgtcacctgta

SEQ ID NO: 214212 - DNA, 20 bp, Artificial Sequence
  Description of Artificial Sequence: Synthetic oligonucleotide
  Target: LAMA2; (-) strand; PAM type: YTN; PAM sequence: TTT
gtgagttgcctgtcacctgt

SEQ ID NO: 214213 - DNA, 20 bp, Artificial Sequence
  Description of Artificial Sequence: Synthetic oligonucleotide
  Target: LAMA2; (-) strand; PAM type: YTN; PAM sequence: TTT
tgtgagttgcctgtcacctg

SEQ ID NO: 214214 - DNA, 20 bp, Artificial Sequence
  Description of Artificial Sequence: Synthetic oligonucleotide
  Target: LAMA2; (-) strand; PAM type: YTN; PAM sequence: CTT
ttgtgagttgcctgtcacct

SEQ ID NO: 214215 - DNA, 20 bp, Artificial Sequence
  Description of Artificial Sequence: Synthetic oligonucleotide
  Target: LAMA2; (-) strand; PAM type: YTN; PAM sequence: TTA
aagacttttgtgagttgcct

SEQ ID NO: 214216 - DNA, 20 bp, Artificial Sequence
  Description of Artificial Sequence: Synthetic oligonucleotide
  Target: LAMA2; (-) strand; PAM type: YTN; PAM sequence: TTT
aaagacttttgtgagttgcc

SEQ ID NO: 214217 - DNA, 20 bp, Artificial Sequence
  Description of Artificial Sequence: Synthetic oligonucleotide
  Target: LAMA2; (-) strand; PAM type: YTN; PAM sequence: TTT
taaagacttttgtgagttgc

SEQ ID NO: 214218 - DNA, 20 bp, Artificial Sequence
  Description of Artificial Sequence: Synthetic oligonucleotide
  Target: LAMA2; (-) strand; PAM type: YTN; PAM sequence: TTT
ttaaagacttttgtgagttg

SEQ ID NO: 214219 - DNA, 20 bp, Artificial Sequence
  Description of Artificial Sequence: Synthetic oligonucleotide
  Target: LAMA2; (-) strand; PAM type: YTN; PAM sequence: TTT
tttaaagacttttgtgagtt

SEQ ID NO: 214220 - DNA, 20 bp, Artificial Sequence
  Description of Artificial Sequence: Synthetic oligonucleotide
  Target: LAMA2; (-) strand; PAM type: YTN; PAM sequence: CTT
ttttaaagacttttgtgagt

SEQ ID NO: 214221 - DNA, 20 bp, Artificial Sequence
  Description of Artificial Sequence: Synthetic oligonucleotide
  Target: LAMA2; (-) strand; PAM type: YTN; PAM sequence: TTC
ttttttaaagacttttgtga

SEQ ID NO: 214222 - DNA, 20 bp, Artificial Sequence
  Description of Artificial Sequence: Synthetic oligonucleotide
  Target: LAMA2; (-) strand; PAM type: YTN; PAM sequence: TTT
cttttttaaagacttttgtg

SEQ ID NO: 214223 - DNA, 20 bp, Artificial Sequence
  Description of Artificial Sequence: Synthetic oligonucleotide
  Target: LAMA2; (-) strand; PAM type: YTN; PAM sequence: CTT
tcttttttaaagacttttgt

SEQ ID NO: 214224 - DNA, 20 bp, Artificial Sequence
  Description of Artificial Sequence: Synthetic oligonucleotide
  Target: LAMA2; (-) strand; PAM type: YTN; PAM sequence: CTC
actttcttttttaaagactt

SEQ ID NO: 214225 - DNA, 20 bp, Artificial Sequence
  Description of Artificial Sequence: Synthetic oligonucleotide
  Target: LAMA2; (-) strand; PAM type: YTN; PAM sequence: CTA
aaactcactttcttttttaa

SEQ ID NO: 214226 - DNA, 20 bp, Artificial Sequence
  Description of Artificial Sequence: Synthetic oligonucleotide
  Target: LAMA2; (-) strand; PAM type: YTN; PAM sequence: TTC
cctaaaactcactttctttt

SEQ ID NO: 214227 - DNA, 20 bp, Artificial Sequence
  Description of Artificial Sequence: Synthetic oligonucleotide
  Target: LAMA2; (-) strand; PAM type: YTN; PAM sequence: CTT
ccctaaaactcactttcttt

SEQ ID NO: 214228 - DNA, 20 bp, Artificial Sequence
  Description of Artificial Sequence: Synthetic oligonucleotide
  Target: LAMA2; (-) strand; PAM type: YTN; PAM sequence: TTA
tcttccctaaaactcacttt

SEQ ID NO: 214229 - DNA, 20 bp, Artificial Sequence
  Description of Artificial Sequence: Synthetic oligonucleotide
  Target: LAMA2; (-) strand; PAM type: YTN; PAM sequence: TTG
aaattatcttccctaaaact

SEQ ID NO: 214230 - DNA, 20 bp, Artificial Sequence
  Description of Artificial Sequence: Synthetic oligonucleotide
  Target: LAMA2; (-) strand; PAM type: YTN; PAM sequence: TTG
ttgaaattatcttccctaaa

SEQ ID NO: 214231 - DNA, 20 bp, Artificial Sequence
  Description of Artificial Sequence: Synthetic oligonucleotide
  Target: LAMA2; (-) strand; PAM type: YTN; PAM sequence: TTG
ttgttgaaattatcttccct

SEQ ID NO: 214232 - DNA, 20 bp, Artificial Sequence
  Description of Artificial Sequence: Synthetic oligonucleotide
  Target: LAMA2; (-) strand; PAM type: YTN; PAM sequence: TTC
cccattgttgttgaaattat

SEQ ID NO: 214233 - DNA, 20 bp, Artificial Sequence
  Description of Artificial Sequence: Synthetic oligonucleotide
  Target: LAMA2; (-) strand; PAM type: YTN; PAM sequence: CTT
ccccattgttgttgaaatta

SEQ ID NO: 214234 - DNA, 20 bp, Artificial Sequence
  Description of Artificial Sequence: Synthetic oligonucleotide
  Target: LAMA2; (-) strand; PAM type: YTN; PAM sequence: TTA
atcttccccattgttgttga

SEQ ID NO: 214235 - DNA, 20 bp, Artificial Sequence
  Description of Artificial Sequence: Synthetic oligonucleotide
  Target: LAMA2; (-) strand; PAM type: YTN; PAM sequence: CTC
ccattaatcttccccattgt

SEQ ID NO: 214236 - DNA, 20 bp, Artificial Sequence
  Description of Artificial Sequence: Synthetic oligonucleotide
  Target: LAMA2; (-) strand; PAM type: YTN; PAM sequence: CTA
ctcccattaatcttccccat

SEQ ID NO: 214237 - DNA, 20 bp, Artificial Sequence
  Description of Artificial Sequence: Synthetic oligonucleotide
  Target: LAMA2; (-) strand; PAM type: YTN; PAM sequence: CTC
tactcccattaatcttcccc

SEQ ID NO: 214238 - DNA, 20 bp, Artificial Sequence
  Description of Artificial Sequence: Synthetic oligonucleotide
  Target: LAMA2; (-) strand; PAM type: YTN; PAM sequence: CTG
cgtgactctactcccattaa

SEQ ID NO: 214239 - DNA, 20 bp, Artificial Sequence
  Description of Artificial Sequence: Synthetic oligonucleotide
  Target: LAMA2; (-) strand; PAM type: YTN; PAM sequence: TTC
ctgcgtgactctactcccat

SEQ ID NO: 214240 - DNA, 20 bp, Artificial Sequence
  Description of Artificial Sequence: Synthetic oligonucleotide
  Target: LAMA2; (-) strand; PAM type: YTN; PAM sequence: CTT
cctgcgtgactctactccca

SEQ ID NO: 214241 - DNA, 20 bp, Artificial Sequence
  Description of Artificial Sequence: Synthetic oligonucleotide
  Target: LAMA2; (-) strand; PAM type: YTN; PAM sequence: CTA
gtcttcctgcgtgactctac

SEQ ID NO: 214242 - DNA, 20 bp, Artificial Sequence
  Description of Artificial Sequence: Synthetic oligonucleotide
  Target: LAMA2; (-) strand; PAM type: YTN; PAM sequence: TTC
ctagtcttcctgcgtgactc

SEQ ID NO: 214243 - DNA, 20 bp, Artificial Sequence
  Description of Artificial Sequence: Synthetic oligonucleotide
  Target: LAMA2; (-) strand; PAM type: YTN; PAM sequence: CTT
cctagtcttcctgcgtgact

SEQ ID NO: 214244 - DNA, 20 bp, Artificial Sequence
  Description of Artificial Sequence: Synthetic oligonucleotide
  Target: LAMA2; (-) strand; PAM type: YTN; PAM sequence: CTG
cccttcctagtcttcctgcg

SEQ ID NO: 214245 - DNA, 20 bp, Artificial Sequence
  Description of Artificial Sequence: Synthetic oligonucleotide
  Target: LAMA2; (-) strand; PAM type: YTN; PAM sequence: TTG
agcaccactgcccttcctag

SEQ ID NO: 214246 - DNA, 20 bp, Artificial Sequence
  Description of Artificial Sequence: Synthetic oligonucleotide
  Target: LAMA2; (-) strand; PAM type: YTN; PAM sequence: CTG
gtgccaaacaggttgagcac

SEQ ID NO: 214247 - DNA, 20 bp, Artificial Sequence
  Description of Artificial Sequence: Synthetic oligonucleotide
  Target: LAMA2; (-) strand; PAM type: YTN; PAM sequence: CTG
gtccctggtgccaaacaggt

SEQ ID NO: 214248 - DNA, 20 bp, Artificial Sequence
  Description of Artificial Sequence: Synthetic oligonucleotide
  Target: LAMA2; (-) strand; PAM type: YTN; PAM sequence: TTC
cacaaaactggtccctggtg

SEQ ID NO: 214249 - DNA, 20 bp, Artificial Sequence
  Description of Artificial Sequence: Synthetic oligonucleotide
  Target: LAMA2; (-) strand; PAM type: YTN; PAM sequence: CTT
ccacaaaactggtccctggt

SEQ ID NO: 214250 - DNA, 20 bp, Artificial Sequence
  Description of Artificial Sequence: Synthetic oligonucleotide
  Target: LAMA2; (-) strand; PAM type: YTN; PAM sequence: TTG
tcttccacaaaactggtccc

SEQ ID NO: 214251 - DNA, 20 bp, Artificial Sequence
  Description of Artificial Sequence: Synthetic oligonucleotide
  Target: LAMA2; (-) strand; PAM type: YTN; PAM sequence: CTG
tcaatggaaaaattgtcttc

SEQ ID NO: 214252 - DNA, 20 bp, Artificial Sequence
  Description of Artificial Sequence: Synthetic oligonucleotide
  Target: LAMA2; (-) strand; PAM type: YTN; PAM sequence: CTA
tccctgtcaatggaaaaatt

SEQ ID NO: 214253 - DNA, 20 bp, Artificial Sequence
  Description of Artificial Sequence: Synthetic oligonucleotide
  Target: LAMA2; (-) strand; PAM type: YTN; PAM sequence: CTG
aaaccatccacccctatccc

SEQ ID NO: 214254 - DNA, 20 bp, Artificial Sequence
  Description of Artificial Sequence: Synthetic oligonucleotide
  Target: LAMA2; (-) strand; PAM type: YTN; PAM sequence: TTC
atcctgaaaccatccacccc

SEQ ID NO: 214255 - DNA, 20 bp, Artificial Sequence
  Description of Artificial Sequence: Synthetic oligonucleotide
  Target: LAMA2; (-) strand; PAM type: YTN; PAM sequence: TTT
catcctgaaaccatccaccc

SEQ ID NO: 214256 - DNA, 20 bp, Artificial Sequence
  Description of Artificial Sequence: Synthetic oligonucleotide
  Target: LAMA2; (-) strand; PAM type: YTN; PAM sequence: CTG
aggtggaacagtttcatcct

SEQ ID NO: 214257 - DNA, 20 bp, Artificial Sequence
  Description of Artificial Sequence: Synthetic oligonucleotide
  Target: LAMA2; (-) strand; PAM type: YTN; PAM sequence: CTG
atgatctgaggtggaacagt

SEQ ID NO: 214258 - DNA, 20 bp, Artificial Sequence
  Description of Artificial Sequence: Synthetic oligonucleotide
  Target: LAMA2; (-) strand; PAM type: YTN; PAM sequence: CTA
atggctgatgatctgaggtg

SEQ ID NO: 214259 - DNA, 20 bp, Artificial Sequence
  Description of Artificial Sequence: Synthetic oligonucleotide
  Target: LAMA2; (-) strand; PAM type: YTN; PAM sequence: TTA
taagaatctaatggctgatg

SEQ ID NO: 214260 - DNA, 20 bp, Artificial Sequence
  Description of Artificial Sequence: Synthetic oligonucleotide
  Target: LAMA2; (-) strand; PAM type: YTN; PAM sequence: CTT
ataagaatctaatggctgat

SEQ ID NO: 214261 - DNA, 20 bp, Artificial Sequence
  Description of Artificial Sequence: Synthetic oligonucleotide
  Target: LAMA2; (-) strand; PAM type: YTN; PAM sequence: CTA
cttataagaatctaatggct

SEQ ID NO: 214262 - DNA, 20 bp, Artificial Sequence
  Description of Artificial Sequence: Synthetic oligonucleotide
  Target: LAMA2; (-) strand; PAM type: YTN; PAM sequence: TTG
tgagctacttataagaatct

SEQ ID NO: 214263 - DNA, 20 bp, Artificial Sequence
  Description of Artificial Sequence: Synthetic oligonucleotide
  Target: LAMA2; (-) strand; PAM type: YTN; PAM sequence: CTA
ggttgtgagctacttataag

SEQ ID NO: 214264 - DNA, 20 bp, Artificial Sequence
  Description of Artificial Sequence: Synthetic oligonucleotide
  Target: LAMA2; (-) strand; PAM type: YTN; PAM sequence: CTG
tgcatgcgagggatctaggt

SEQ ID NO: 214265 - DNA, 20 bp, Artificial Sequence
  Description of Artificial Sequence: Synthetic oligonucleotide
  Target: LAMA2; (-) strand; PAM type: YTN; PAM sequence: TTG
tgaactgtgcatgcgaggga

SEQ ID NO: 214266 - DNA, 20 bp, Artificial Sequence
  Description of Artificial Sequence: Synthetic oligonucleotide
  Target: LAMA2; (-) strand; PAM type: YTN; PAM sequence: CTC
acaggaacgtgaaccatatt

SEQ ID NO: 214267 - DNA, 20 bp, Artificial Sequence
  Description of Artificial Sequence: Synthetic oligonucleotide
  Target: LAMA2; (-) strand; PAM type: YTN; PAM sequence: CTC
tcacaggaacgtgaaccata

SEQ ID NO: 214268 - DNA, 20 bp, Artificial Sequence
  Description of Artificial Sequence: Synthetic oligonucleotide
  Target: LAMA2; (-) strand; PAM type: YTN; PAM sequence: TTA
gactctcacaggaacgtgaa

SEQ ID NO: 214269 - DNA, 20 bp, Artificial Sequence
  Description of Artificial Sequence: Synthetic oligonucleotide
  Target: LAMA2; (-) strand; PAM type: YTN; PAM sequence: CTG
tcagataagcaacagcatta

SEQ ID NO: 214270 - DNA, 20 bp, Artificial Sequence
  Description of Artificial Sequence: Synthetic oligonucleotide
  Target: LAMA2; (-) strand; PAM type: YTN; PAM sequence: CTC
ctgtcagataagcaacagca

SEQ ID NO: 214271 - DNA, 20 bp, Artificial Sequence
  Description of Artificial Sequence: Synthetic oligonucleotide
  Target: LAMA2; (-) strand; PAM type: YTN; PAM sequence: CTG
cctcctgtcagataagcaac

SEQ ID NO: 214272 - DNA, 20 bp, Artificial Sequence
  Description of Artificial Sequence: Synthetic oligonucleotide
  Target: LAMA2; (-) strand; PAM type: YTN; PAM sequence: CTC
tgcctcctgtcagataagca

SEQ ID NO: 214273 - DNA, 20 bp, Artificial Sequence
  Description of Artificial Sequence: Synthetic oligonucleotide
  Target: LAMA2; (-) strand; PAM type: YTN; PAM sequence: CTG
agctctgcctcctgtcagat

SEQ ID NO: 214274 - DNA, 20 bp, Artificial Sequence
  Description of Artificial Sequence: Synthetic oligonucleotide
  Target: LAMA2; (-) strand; PAM type: YTN; PAM sequence: TTA
ccacctgagctctgcctcct

SEQ ID NO: 214275 - DNA, 20 bp, Artificial Sequence
  Description of Artificial Sequence: Synthetic oligonucleotide
  Target: LAMA2; (-) strand; PAM type: YTN; PAM sequence: CTG
gcaaacaagcattaccacct

SEQ ID NO: 214276 - DNA, 20 bp, Artificial Sequence
  Description of Artificial Sequence: Synthetic oligonucleotide
  Target: LAMA2; (-) strand; PAM type: YTN; PAM sequence: CTG
cacagcaggaagtgagtggc

SEQ ID NO: 214277 - DNA, 20 bp, Artificial Sequence
  Description of Artificial Sequence: Synthetic oligonucleotide
  Target: LAMA2; (-) strand; PAM type: YTN; PAM sequence: TTA
ggaacagggctgcacagcag

SEQ ID NO: 214278 - DNA, 20 bp, Artificial Sequence
  Description of Artificial Sequence: Synthetic oligonucleotide
  Target: LAMA2; (-) strand; PAM type: YTN; PAM sequence: CTG
ttaggaacagggctgcacag

SEQ ID NO: 214279 - DNA, 20 bp, Artificial Sequence
  Description of Artificial Sequence: Synthetic oligonucleotide
  Target: LAMA2; (-) strand; PAM type: YTN; PAM sequence: CTG
tggcctgttaggaacagggc

SEQ ID NO: 214280 - DNA, 20 bp, Artificial Sequence
  Description of Artificial Sequence: Synthetic oligonucleotide
  Target: LAMA2; (-) strand; PAM type: YTN; PAM sequence: CTG
cagaccagtaccagcctgtg

SEQ ID NO: 214281 - DNA, 20 bp, Artificial Sequence
  Description of Artificial Sequence: Synthetic oligonucleotide
  Target: LAMA2; (-) strand; PAM type: YTN; PAM sequence: CTA
acccggggtccccaacccca

SEQ ID NO: 214282 - DNA, 20 bp, Artificial Sequence
  Description of Artificial Sequence: Synthetic oligonucleotide
  Target: LAMA2; (-) strand; PAM type: YTN; PAM sequence: TTA
cagtagcatcctaacccggg

SEQ ID NO: 214283 - DNA, 20 bp, Artificial Sequence
  Description of Artificial Sequence: Synthetic oligonucleotide
  Target: LAMA2; (-) strand; PAM type: YTN; PAM sequence: TTA
ttacagtagcatcctaaccc

SEQ ID NO: 214284 - DNA, 20 bp, Artificial Sequence
  Description of Artificial Sequence: Synthetic oligonucleotide
  Target: LAMA2; (-) strand; PAM type: YTN; PAM sequence: TTT
attacagtagcatcctaacc

SEQ ID NO: 214285 - DNA, 20 bp, Artificial Sequence
  Description of Artificial Sequence: Synthetic oligonucleotide
  Target: LAMA2; (-) strand; PAM type: YTN; PAM sequence: TTA
catttattacagtagcatcc

SEQ ID NO: 214286 - DNA, 20 bp, Artificial Sequence
  Description of Artificial Sequence: Synthetic oligonucleotide
  Target: LAMA2; (-) strand; PAM type: YTN; PAM sequence: TTT
acatttattacagtagcatc

SEQ ID NO: 214287 - DNA, 20 bp, Artificial Sequence
  Description of Artificial Sequence: Synthetic oligonucleotide
  Target: LAMA2; (-) strand; PAM type: YTN; PAM sequence: CTT
tacatttattacagtagcat

SEQ ID NO: 214288 - DNA, 20 bp, Artificial Sequence
  Description of Artificial Sequence: Synthetic oligonucleotide
  Target: LAMA2; (-) strand; PAM type: YTN; PAM sequence: TTA
ctttacatttattacagtag

SEQ ID NO: 214289 - DNA, 20 bp, Artificial Sequence
  Description of Artificial Sequence: Synthetic oligonucleotide
  Target: LAMA2; (-) strand; PAM type: YTN; PAM sequence: CTT
actttacatttattacagta

SEQ ID NO: 214290 - DNA, 20 bp, Artificial Sequence
  Description of Artificial Sequence: Synthetic oligonucleotide
  Target: LAMA2; (-) strand; PAM type: YTN; PAM sequence: CTA
accttactttacatttatta

SEQ ID NO: 214291 - DNA, 20 bp, Artificial Sequence
  Description of Artificial Sequence: Synthetic oligonucleotide
  Target: LAMA2; (-) strand; PAM type: YTN; PAM sequence: TTC
agatatcctaaccttacttt

SEQ ID NO: 214292 - DNA, 20 bp, Artificial Sequence
  Description of Artificial Sequence: Synthetic oligonucleotide
  Target: LAMA2; (-) strand; PAM type: YTN; PAM sequence: TTA
tattcagatatcctaacctt

SEQ ID NO: 214293 - DNA, 20 bp, Artificial Sequence
  Description of Artificial Sequence: Synthetic oligonucleotide
  Target: LAMA2; (-) strand; PAM type: YTN; PAM sequence: TTT
atattcagatatcctaacct

SEQ ID NO: 214294 - DNA, 20 bp, Artificial Sequence
  Description of Artificial Sequence: Synthetic oligonucleotide
  Target: LAMA2; (-) strand; PAM type: YTN; PAM sequence: CTC
cccgccacacaaacacatca

SEQ ID NO: 214295 - DNA, 20 bp, Artificial Sequence
  Description of Artificial Sequence: Synthetic oligonucleotide
  Target: LAMA2; (-) strand; PAM type: YTN; PAM sequence: CTA
cacacaccgctccccgccac

SEQ ID NO: 214296 - DNA, 20 bp, Artificial Sequence
  Description of Artificial Sequence: Synthetic oligonucleotide
  Target: LAMA2; (-) strand; PAM type: YTN; PAM sequence: TTC
agctacacacaccgctcccc

SEQ ID NO: 214297 - DNA, 20 bp, Artificial Sequence
  Description of Artificial Sequence: Synthetic oligonucleotide
  Target: LAMA2; (-) strand; PAM type: YTN; PAM sequence: CTC
aaattcagctacacacaccg

SEQ ID NO: 214298 - DNA, 20 bp, Artificial Sequence
  Description of Artificial Sequence: Synthetic oligonucleotide
  Target: LAMA2; (-) strand; PAM type: YTN; PAM sequence: CTA
cctcaaattcagctacacac

SEQ ID NO: 214299 - DNA, 20 bp, Artificial Sequence
  Description of Artificial Sequence: Synthetic oligonucleotide
  Target: LAMA2; (-) strand; PAM type: YTN; PAM sequence: CTC
tacctcaaattcagctacac

SEQ ID NO: 214300 - DNA, 20 bp, Artificial Sequence
  Description of Artificial Sequence: Synthetic oligonucleotide
  Target: LAMA2; (-) strand; PAM type: YTN; PAM sequence: TTG
tctctacctcaaattcagct

SEQ ID NO: 214301 - DNA, 20 bp, Artificial Sequence
  Description of Artificial Sequence: Synthetic oligonucleotide
  Target: LAMA2; (-) strand; PAM type: YTN; PAM sequence: TTT
gtctctacctcaaattcagc

SEQ ID NO: 214302 - DNA, 20 bp, Artificial Sequence
  Description of Artificial Sequence: Synthetic oligonucleotide
  Target: LAMA2; (-) strand; PAM type: YTN; PAM sequence: TTT
tgtctctacctcaaattcag

SEQ ID NO: 214303 - DNA, 20 bp, Artificial Sequence
  Description of Artificial Sequence: Synthetic oligonucleotide
  Target: LAMA2; (-) strand; PAM type: YTN; PAM sequence: TTT
ttgtctctacctcaaattca

SEQ ID NO: 214304 - DNA, 20 bp, Artificial Sequence
  Description of Artificial Sequence: Synthetic oligonucleotide
  Target: LAMA2; (-) strand; PAM type: YTN; PAM sequence: CTT
tttgtctctacctcaaattc

SEQ ID NO: 214305 - DNA, 20 bp, Artificial Sequence
  Description of Artificial Sequence: Synthetic oligonucleotide
  Target: LAMA2; (-) strand; PAM type: YTN; PAM sequence: TTA
ctttttgtctctacctcaaa

SEQ ID NO: 214306 - DNA, 20 bp, Artificial Sequence
  Description of Artificial Sequence: Synthetic oligonucleotide
  Target: LAMA2; (-) strand; PAM type: YTN; PAM sequence: TTA
attactttttgtctctacct

SEQ ID NO: 214307 - DNA, 20 bp, Artificial Sequence
  Description of Artificial Sequence: Synthetic oligonucleotide
  Target: LAMA2; (-) strand; PAM type: YTN; PAM sequence: TTT
aattactttttgtctctacc

SEQ ID NO: 214308 - DNA, 20 bp, Artificial Sequence
  Description of Artificial Sequence: Synthetic oligonucleotide
  Target: LAMA2; (-) strand; PAM type: YTN; PAM sequence: TTC
cagtttaattactttttgtc

SEQ ID NO: 214309 - DNA, 20 bp, Artificial Sequence
  Description of Artificial Sequence: Synthetic oligonucleotide
  Target: LAMA2; (-) strand; PAM type: YTN; PAM sequence: CTT
ccagtttaattactttttgt

SEQ ID NO: 214310 - DNA, 20 bp, Artificial Sequence
  Description of Artificial Sequence: Synthetic oligonucleotide
  Target: LAMA2; (-) strand; PAM type: YTN; PAM sequence: CTG
cttccagtttaattactttt

SEQ ID NO: 214311 - DNA, 20 bp, Artificial Sequence
  Description of Artificial Sequence: Synthetic oligonucleotide
  Target: LAMA2; (-) strand; PAM type: YTN; PAM sequence: TTC
tgcttccagtttaattactt

SEQ ID NO: 214312 - DNA, 20 bp, Artificial Sequence
  Description of Artificial Sequence: Synthetic oligonucleotide
  Target: LAMA2; (-) strand; PAM type: YTN; PAM sequence: TTT
ctgcttccagtttaattact

SEQ ID NO: 214313 - DNA, 20 bp, Artificial Sequence
  Description of Artificial Sequence: Synthetic oligonucleotide
  Target: LAMA2; (-) strand; PAM type: YTN; PAM sequence: CTA
agatttctgcttccagttta

SEQ ID NO: 214314 - DNA, 20 bp, Artificial Sequence
  Description of Artificial Sequence: Synthetic oligonucleotide
  Target: LAMA2; (-) strand; PAM type: YTN; PAM sequence: TTC
taagatttctgcttccagtt

SEQ ID NO: 214315 - DNA, 20 bp, Artificial Sequence
  Description of Artificial Sequence: Synthetic oligonucleotide
  Target: LAMA2; (-) strand; PAM type: YTN; PAM sequence: TTC
cccattctaagatttctgct

SEQ ID NO: 214316 - DNA, 20 bp, Artificial Sequence
  Description of Artificial Sequence: Synthetic oligonucleotide
  Target: LAMA2; (-) strand; PAM type: YTN; PAM sequence: TTT
ccccattctaagatttctgc

SEQ ID NO: 214317 - DNA, 20 bp, Artificial Sequence
  Description of Artificial Sequence: Synthetic oligonucleotide
  Target: LAMA2; (-) strand; PAM type: YTN; PAM sequence: TTT
tccccattctaagatttctg

SEQ ID NO: 214318 - DNA, 20 bp, Artificial Sequence
  Description of Artificial Sequence: Synthetic oligonucleotide
  Target: LAMA2; (-) strand; PAM type: YTN; PAM sequence: CTT
ttccccattctaagatttct

SEQ ID NO: 214319 - DNA, 20 bp, Artificial Sequence
  Description of Artificial Sequence: Synthetic oligonucleotide
  Target: LAMA2; (-) strand; PAM type: YTN; PAM sequence: TTA
cttttccccattctaagatt

SEQ ID NO: 214320 - DNA, 20 bp, Artificial Sequence
  Description of Artificial Sequence: Synthetic oligonucleotide
  Target: LAMA2; (-) strand; PAM type: YTN; PAM sequence: CTT
acttttccccattctaagat

SEQ ID NO: 214321 - DNA, 20 bp, Artificial Sequence
  Description of Artificial Sequence: Synthetic oligonucleotide
  Target: LAMA2; (-) strand; PAM type: YTN; PAM sequence: TTG
tgaacaaatatgccttactt

SEQ ID NO: 214322 - DNA, 20 bp, Artificial Sequence
  Description of Artificial Sequence: Synthetic oligonucleotide
  Target: LAMA2; (-) strand; PAM type: YTN; PAM sequence: TTT
gtgaacaaatatgccttact

SEQ ID NO: 214323 - DNA, 20 bp, Artificial Sequence
  Description of Artificial Sequence: Synthetic oligonucleotide
  Target: LAMA2; (-) strand; PAM type: YTN; PAM sequence: CTT
tgtgaacaaatatgccttac

SEQ ID NO: 214324 - DNA, 20 bp, Artificial Sequence
  Description of Artificial Sequence: Synthetic oligonucleotide
  Target: LAMA2; (-) strand; PAM type: YTN; PAM sequence: TTA
aaagatactttgtgaacaaa

SEQ ID NO: 214325 - DNA, 20 bp, Artificial Sequence
  Description of Artificial Sequence: Synthetic oligonucleotide
  Target: LAMA2; (-) strand; PAM type: YTN; PAM sequence: CTC
cacagaaaccagaaaatgtt

SEQ ID NO: 214326 - DNA, 20 bp, Artificial Sequence
  Description of Artificial Sequence: Synthetic oligonucleotide
  Target: LAMA2; (-) strand; PAM type: YTN; PAM sequence: TTA
ataaaatgtgactccacaga

SEQ ID NO: 214327 - DNA, 20 bp, Artificial Sequence
  Description of Artificial Sequence: Synthetic oligonucleotide
  Target: LAMA2; (-) strand; PAM type: YTN; PAM sequence: CTA
ggtagataaatgtcaaccag

SEQ ID NO: 214328 - DNA, 20 bp, Artificial Sequence
  Description of Artificial Sequence: Synthetic oligonucleotide
  Target: LAMA2; (-) strand; PAM type: YTN; PAM sequence: TTC
taggtagataaatgtcaacc

SEQ ID NO: 214329 - DNA, 20 bp, Artificial Sequence
  Description of Artificial Sequence: Synthetic oligonucleotide
  Target: LAMA2; (-) strand; PAM type: YTN; PAM sequence: TTT
ctaggtagataaatgtcaac

SEQ ID NO: 214330 - DNA, 20 bp, Artificial Sequence
  Description of Artificial Sequence: Synthetic oligonucleotide
  Target: LAMA2; (-) strand; PAM type: YTN; PAM sequence: TTT
tctaggtagataaatgtcaa

SEQ ID NO: 214331 - DNA, 20 bp, Artificial Sequence
  Description of Artificial Sequence: Synthetic oligonucleotide
  Target: LAMA2; (-) strand; PAM type: YTN; PAM sequence: TTT
ttctaggtagataaatgtca

SEQ ID NO: 214332 - DNA, 20 bp, Artificial Sequence
  Description of Artificial Sequence: Synthetic oligonucleotide
  Target: LAMA2; (-) strand; PAM type: YTN; PAM sequence: TTT
tttctaggtagataaatgtc

SEQ ID NO: 214333 - DNA, 20 bp, Artificial Sequence
  Description of Artificial Sequence: Synthetic oligonucleotide
  Target: LAMA2; (-) strand; PAM type: YTN; PAM sequence: TTT
ttttctaggtagataaatgt

SEQ ID NO: 214334 - DNA, 20 bp, Artificial Sequence
  Description of Artificial Sequence: Synthetic oligonucleotide
  Target: LAMA2; (-) strand; PAM type: YTN; PAM sequence: CTG
tcatttttttctaggtagat

SEQ ID NO: 214335 - DNA, 20 bp, Artificial Sequence
  Description of Artificial Sequence: Synthetic oligonucleotide
  Target: LAMA2; (-) strand; PAM type: YTN; PAM sequence: TTC
tgtcatttttttctaggtag

SEQ ID NO: 214336 - DNA, 20 bp, Artificial Sequence
  Description of Artificial Sequence: Synthetic oligonucleotide
  Target: LAMA2; (-) strand; PAM type: YTN; PAM sequence: TTT
ctgtcatttttttctaggta

SEQ ID NO: 214337 - DNA, 20 bp, Artificial Sequence
  Description of Artificial Sequence: Synthetic oligonucleotide
  Target: LAMA2; (-) strand; PAM type: YTN; PAM sequence: CTG
aaatttctgtcatttttttc

SEQ ID NO: 214338 - DNA, 20 bp, Artificial Sequence
  Description of Artificial Sequence: Synthetic oligonucleotide
  Target: LAMA2; (-) strand; PAM type: YTN; PAM sequence: TTC
ctgaaatttctgtcattttt

SEQ ID NO: 214339 - DNA, 20 bp, Artificial Sequence
  Description of Artificial Sequence: Synthetic oligonucleotide
  Target: LAMA2; (-) strand; PAM type: YTN; PAM sequence: TTG
ttcctgaaatttctgtcatt

SEQ ID NO: 214340 - DNA, 20 bp, Artificial Sequence
  Description of Artificial Sequence: Synthetic oligonucleotide
  Target: LAMA2; (-) strand; PAM type: YTN; PAM sequence: TTT
gttcctgaaatttctgtcat

SEQ ID NO: 214341 - DNA, 20 bp, Artificial Sequence
  Description of Artificial Sequence: Synthetic oligonucleotide
  Target: LAMA2; (-) strand; PAM type: YTN; PAM sequence: CTT
tgttcctgaaatttctgtca

SEQ ID NO: 214342 - DNA, 20 bp, Artificial Sequence
  Description of Artificial Sequence: Synthetic oligonucleotide
  Target: LAMA2; (-) strand; PAM type: YTN; PAM sequence: TTC
atagtcacctttgttcctga

SEQ ID NO: 214343 - DNA, 20 bp, Artificial Sequence
  Description of Artificial Sequence: Synthetic oligonucleotide
  Target: LAMA2; (-) strand; PAM type: YTN; PAM sequence: CTA
attcatagtcacctttgttc

SEQ ID NO: 214344 - DNA, 20 bp, Artificial Sequence
  Description of Artificial Sequence: Synthetic oligonucleotide
  Target: LAMA2; (-) strand; PAM type: YTN; PAM sequence: TTG
gtacctaattcatagtcacc

SEQ ID NO: 214345 - DNA, 20 bp, Artificial Sequence
  Description of Artificial Sequence: Synthetic oligonucleotide
  Target: LAMA2; (-) strand; PAM type: YTN; PAM sequence: TTC
atgaagatcatccacaaaaa

SEQ ID NO: 214346 - DNA, 20 bp, Artificial Sequence
  Description of Artificial Sequence: Synthetic oligonucleotide
  Target: LAMA2; (-) strand; PAM type: YTN; PAM sequence: CTT
catgaagatcatccacaaaa

SEQ ID NO: 214347 - DNA, 20 bp, Artificial Sequence
  Description of Artificial Sequence: Synthetic oligonucleotide
  Target: LAMA2; (-) strand; PAM type: YTN; PAM sequence: CTG
acttcatgaagatcatccac

SEQ ID NO: 214348 - DNA, 20 bp, Artificial Sequence
  Description of Artificial Sequence: Synthetic oligonucleotide
  Target: LAMA2; (-) strand; PAM type: YTN; PAM sequence: TTG
gctgacttcatgaagatcat

SEQ ID NO: 214349 - DNA, 20 bp, Artificial Sequence
  Description of Artificial Sequence: Synthetic oligonucleotide
  Target: LAMA2; (-) strand; PAM type: YTN; PAM sequence: TTA
ttggctgacttcatgaagat

SEQ ID NO: 214350 - DNA, 20 bp, Artificial Sequence
  Description of Artificial Sequence: Synthetic oligonucleotide
  Target: LAMA2; (-) strand; PAM type: YTN; PAM sequence: CTC
cattattggctgacttcatg

SEQ ID NO: 214351 - DNA, 20 bp, Artificial Sequence
  Description of Artificial Sequence: Synthetic oligonucleotide
  Target: LAMA2; (-) strand; PAM type: YTN; PAM sequence: CTC
atctccattattggctgact

SEQ ID NO: 214352 - DNA, 20 bp, Artificial Sequence
  Description of Artificial Sequence: Synthetic oligonucleotide
  Target: LAMA2; (-) strand; PAM type: YTN; PAM sequence: TTC
cacatactcatctccattat

SEQ ID NO: 214353 - DNA, 20 bp, Artificial Sequence
  Description of Artificial Sequence: Synthetic oligonucleotide
  Target: LAMA2; (-) strand; PAM type: YTN; PAM sequence: TTT
ccacatactcatctccatta

SEQ ID NO: 214354 - DNA, 20 bp, Artificial Sequence
  Description of Artificial Sequence: Synthetic oligonucleotide
  Target: LAMA2; (-) strand; PAM type: YTN; PAM sequence: CTT
tccacatactcatctccatt

SEQ ID NO: 214355 - DNA, 20 bp, Artificial Sequence
  Description of Artificial Sequence: Synthetic oligonucleotide
  Target: LAMA2; (-) strand; PAM type: YTN; PAM sequence: TTC
aaaaagtccaaataatccat

SEQ ID NO: 214356 - DNA, 20 bp, Artificial Sequence
  Description of Artificial Sequence: Synthetic oligonucleotide
  Target: LAMA2; (-) strand; PAM type: YTN; PAM sequence: TTT
caaaaagtccaaataatcca

SEQ ID NO: 214357 - DNA, 20 bp, Artificial Sequence
  Description of Artificial Sequence: Synthetic oligonucleotide
  Target: LAMA2; (-) strand; PAM type: YTN; PAM sequence: TTT
tcaaaaagtccaaataatcc

SEQ ID NO: 214358 - DNA, 20 bp, Artificial Sequence
  Description of Artificial Sequence: Synthetic oligonucleotide
  Target: LAMA2; (-) strand; PAM type: YTN; PAM sequence: CTT
ttcaaaaagtccaaataatc

SEQ ID NO: 214359 - DNA, 20 bp, Artificial Sequence
  Description of Artificial Sequence: Synthetic oligonucleotide
  Target: LAMA2; (-) strand; PAM type: YTN; PAM sequence: TTC
ttttcaaaaagtccaaataa

SEQ ID NO: 214360 - DNA, 20 bp, Artificial Sequence
  Description of Artificial Sequence: Synthetic oligonucleotide
  Target: LAMA2; (-) strand; PAM type: YTN; PAM sequence: CTT
cttttcaaaaagtccaaata

SEQ ID NO: 214361 - DNA, 20 bp, Artificial Sequence
  Description of Artificial Sequence: Synthetic oligonucleotide
  Target: LAMA2; (-) strand; PAM type: YTN; PAM sequence: TTC
acccaataacttcttttcaa

SEQ ID NO: 214362 - DNA, 20 bp, Artificial Sequence
  Description of Artificial Sequence: Synthetic oligonucleotide
  Target: LAMA2; (-) strand; PAM type: YTN; PAM sequence: TTA
caggcatgagccatcatgtt

SEQ ID NO: 214363 - DNA, 20 bp, Artificial Sequence
  Description of Artificial Sequence: Synthetic oligonucleotide
  Target: LAMA2; (-) strand; PAM type: YTN; PAM sequence: TTG
agattacaggcatgagccat

SEQ ID NO: 214364 - DNA, 20 bp, Artificial Sequence
  Description of Artificial Sequence: Synthetic oligonucleotide
  Target: LAMA2; (-) strand; PAM type: YTN; PAM sequence: CTG
ttgagattacaggcatgagc

SEQ ID NO: 214365 - DNA, 20 bp, Artificial Sequence
  Description of Artificial Sequence: Synthetic oligonucleotide
  Target: LAMA2; (-) strand; PAM type: YTN; PAM sequence: CTC
ccaaactgttgagattacag

SEQ ID NO: 214366 - DNA, 20 bp, Artificial Sequence
  Description of Artificial Sequence: Synthetic oligonucleotide
  Target: LAMA2; (-) strand; PAM type: YTN; PAM sequence: CTC
aacctcccaaactgttgaga

SEQ ID NO: 214367 - DNA, 20 bp, Artificial Sequence
  Description of Artificial Sequence: Synthetic oligonucleotide
  Target: LAMA2; (-) strand; PAM type: YTN; PAM sequence: CTC
ccacctcaacctcccaaact

SEQ ID NO: 214368 - DNA, 20 bp, Artificial Sequence
  Description of Artificial Sequence: Synthetic oligonucleotide
  Target: LAMA2; (-) strand; PAM type: YTN; PAM sequence: CTC
aagtgatcctcccacctcaa

SEQ ID NO: 214369 - DNA, 20 bp, Artificial Sequence
  Description of Artificial Sequence: Synthetic oligonucleotide
  Target: LAMA2; (-) strand; PAM type: YTN; PAM sequence: CTG
gcctcaagtgatcctcccac

SEQ ID NO: 214370 - DNA, 20 bp, Artificial Sequence
  Description of Artificial Sequence: Synthetic oligonucleotide
  Target: LAMA2; (-) strand; PAM type: YTN; PAM sequence: CTC
ctggcctcaagtgatcctcc

SEQ ID NO: 214371 - DNA, 20 bp, Artificial Sequence
  Description of Artificial Sequence: Synthetic oligonucleotide
  Target: LAMA2; (-) strand; PAM type: YTN; PAM sequence: CTC
aaactcctggcctcaagtga

SEQ ID NO: 214372 - DNA, 20 bp, Artificial Sequence
  Description of Artificial Sequence: Synthetic oligonucleotide
  Target: LAMA2; (-) strand; PAM type: YTN; PAM sequence: TTA
tctcaaactcctggcctcaa

SEQ ID NO: 214373 - DNA, 20 bp, Artificial Sequence
  Description of Artificial Sequence: Synthetic oligonucleotide
  Target: LAMA2; (-) strand; PAM type: YTN; PAM sequence: TTT
atctcaaactcctggcctca

SEQ ID NO: 214374 - DNA, 20 bp, Artificial Sequence
  Description of Artificial Sequence: Synthetic oligonucleotide
  Target: LAMA2; (-) strand; PAM type: YTN; PAM sequence: TTG
cccaagtttatctcaaactc

SEQ ID NO: 214375 - DNA, 20 bp, Artificial Sequence
  Description of Artificial Sequence: Synthetic oligonucleotide
  Target: LAMA2; (-) strand; PAM type: YTN; PAM sequence: CTG
ttgcccaagtttatctcaaa

SEQ ID NO: 214376 - DNA, 20 bp, Artificial Sequence
  Description of Artificial Sequence: Synthetic oligonucleotide
  Target: LAMA2; (-) strand; PAM type: YTN; PAM sequence: CTC
tgttgcccaagtttatctca

SEQ ID NO: 214377 - DNA, 20 bp, Artificial Sequence
  Description of Artificial Sequence: Synthetic oligonucleotide
  Target: LAMA2; (-) strand; PAM type: YTN; PAM sequence: TTG
ctctgttgcccaagtttatc

SEQ ID NO: 214378 - DNA, 20 bp, Artificial Sequence
  Description of Artificial Sequence: Synthetic oligonucleotide
  Target: LAMA2; (-) strand; PAM type: YTN; PAM sequence: CTT
gctctgttgcccaagtttat

SEQ ID NO: 214379 - DNA, 20 bp, Artificial Sequence
  Description of Artificial Sequence: Synthetic oligonucleotide
  Target: LAMA2; (-) strand; PAM type: YTN; PAM sequence: TTG
taaagatggatcttgctctg

SEQ ID NO: 214380 - DNA, 20 bp, Artificial Sequence
  Description of Artificial Sequence: Synthetic oligonucleotide
  Target: LAMA2; (-) strand; PAM type: YTN; PAM sequence: TTA
ttgtaaagatggatcttgct

SEQ ID NO: 214381 - DNA, 20 bp, Artificial Sequence
  Description of Artificial Sequence: Synthetic oligonucleotide
  Target: LAMA2; (-) strand; PAM type: YTN; PAM sequence: TTA
attattgtaaagatggatct

SEQ ID NO: 214382 - DNA, 20 bp, Artificial Sequence
  Description of Artificial Sequence: Synthetic oligonucleotide
  Target: LAMA2; (-) strand; PAM type: YTN; PAM sequence: TTT
aattattgtaaagatggatc

SEQ ID NO: 214383 - DNA, 20 bp, Artificial Sequence
  Description of Artificial Sequence: Synthetic oligonucleotide
  Target: LAMA2; (-) strand; PAM type: YTN; PAM sequence: TTT
taattattgtaaagatggat

SEQ ID NO: 214384 - DNA, 20 bp, Artificial Sequence
  Description of Artificial Sequence: Synthetic oligonucleotide
  Target: LAMA2; (-) strand; PAM type: YTN; PAM sequence: TTT
ttaattattgtaaagatgga

SEQ ID NO: 214385 - DNA, 20 bp, Artificial Sequence
  Description of Artificial Sequence: Synthetic oligonucleotide
  Target: LAMA2; (-) strand; PAM type: YTN; PAM sequence: TTT
tttaattattgtaaagatgg

SEQ ID NO: 214386 - DNA, 20 bp, Artificial Sequence
  Description of Artificial Sequence: Synthetic oligonucleotide
  Target: LAMA2; (-) strand; PAM type: YTN; PAM sequence: TTT
ttttaattattgtaaagatg

SEQ ID NO: 214387 - DNA, 20 bp, Artificial Sequence
  Description of Artificial Sequence: Synthetic oligonucleotide
  Target: LAMA2; (-) strand; PAM type: YTN; PAM sequence: TTT
tttttaattattgtaaagat

SEQ ID NO: 214388 - DNA, 20 bp, Artificial Sequence
  Description of Artificial Sequence: Synthetic oligonucleotide
  Target: LAMA2; (-) strand; PAM type: YTN; PAM sequence: TTT
ttttttaattattgtaaaga

SEQ ID NO: 214389 - DNA, 20 bp, Artificial Sequence
  Description of Artificial Sequence: Synthetic oligonucleotide
  Target: LAMA2; (-) strand; PAM type: YTN; PAM sequence: TTT
tttttttaattattgtaaag

SEQ ID NO: 214390 - DNA, 20 bp, Artificial Sequence
  Description of Artificial Sequence: Synthetic oligonucleotide
  Target: LAMA2; (-) strand; PAM type: YTN; PAM sequence: CTA
ttttttttttaattattgta

SEQ ID NO: 214391 - DNA, 20 bp, Artificial Sequence
  Description of Artificial Sequence: Synthetic oligonucleotide
  Target: LAMA2; (-) strand; PAM type: YTN; PAM sequence: TTC
tattttttttttaattattg

SEQ ID NO: 214392 - DNA, 20 bp, Artificial Sequence
  Description of Artificial Sequence: Synthetic oligonucleotide
  Target: LAMA2; (-) strand; PAM type: YTN; PAM sequence: TTT
ctattttttttttaattatt

SEQ ID NO: 214393 - DNA, 20 bp, Artificial Sequence
  Description of Artificial Sequence: Synthetic oligonucleotide
  Target: LAMA2; (-) strand; PAM type: YTN; PAM sequence: CTA
atttctattttttttttaat

SEQ ID NO: 214394 - DNA, 20 bp, Artificial Sequence
  Description of Artificial Sequence: Synthetic oligonucleotide
  Target: LAMA2; (-) strand; PAM type: YTN; PAM sequence: CTA
caggtgcaagccatcacata

SEQ ID NO: 214395 - DNA, 20 bp, Artificial Sequence
  Description of Artificial Sequence: Synthetic oligonucleotide
  Target: LAMA2; (-) strand; PAM type: YTN; PAM sequence: CTA
gaactacaggtgcaagccat

SEQ ID NO: 214396 - DNA, 20 bp, Artificial Sequence
  Description of Artificial Sequence: Synthetic oligonucleotide
  Target: LAMA2; (-) strand; PAM type: YTN; PAM sequence: CTG
agtagctagaactacaggtg

SEQ ID NO: 214397 - DNA, 20 bp, Artificial Sequence
  Description of Artificial Sequence: Synthetic oligonucleotide
  Target: LAMA2; (-) strand; PAM type: YTN; PAM sequence: CTG
agcatcctgagtagctagaa

SEQ ID NO: 214398 - DNA, 20 bp, Artificial Sequence
  Description of Artificial Sequence: Synthetic oligonucleotide
  Target: LAMA2; (-) strand; PAM type: YTN; PAM sequence: TTG
cctgagcatcctgagtagct

SEQ ID NO: 214399 - DNA, 20 bp, Artificial Sequence
  Description of Artificial Sequence: Synthetic oligonucleotide
  Target: LAMA2; (-) strand; PAM type: YTN; PAM sequence: CTT
gcctgagcatcctgagtagc

SEQ ID NO: 214400 - DNA, 20 bp, Artificial Sequence
  Description of Artificial Sequence: Synthetic oligonucleotide
  Target: LAMA2; (-) strand; PAM type: YTN; PAM sequence: CTC
ttgcctgagcatcctgagta

SEQ ID NO: 214401 - DNA, 20 bp, Artificial Sequence
  Description of Artificial Sequence: Synthetic oligonucleotide
  Target: LAMA2; (-) strand; PAM type: YTN; PAM sequence: CTC
aagtgatcctcttgcctgag

SEQ ID NO: 214402 - DNA, 20 bp, Artificial Sequence
  Description of Artificial Sequence: Synthetic oligonucleotide
  Target: LAMA2; (-) strand; PAM type: YTN; PAM sequence: CTA
ggctcaagtgatcctcttgc

SEQ ID NO: 214403 - DNA, 20 bp, Artificial Sequence
  Description of Artificial Sequence: Synthetic oligonucleotide
  Target: LAMA2; (-) strand; PAM type: YTN; PAM sequence: CTC
ctaggctcaagtgatcctct

SEQ ID NO: 214404 - DNA, 20 bp, Artificial Sequence
  Description of Artificial Sequence: Synthetic oligonucleotide
  Target: LAMA2; (-) strand; PAM type: YTN; PAM sequence: CTG
cctcctaggctcaagtgatc

SEQ ID NO: 214405 - DNA, 20 bp, Artificial Sequence
  Description of Artificial Sequence: Synthetic oligonucleotide
  Target: LAMA2; (-) strand; PAM type: YTN; PAM sequence: CTC
tgcctcctaggctcaagtga

SEQ ID NO: 214406 - DNA, 20 bp, Artificial Sequence
  Description of Artificial Sequence: Synthetic oligonucleotide
  Target: LAMA2; (-) strand; PAM type: YTN; PAM sequence: CTG
aagcctctgcctcctaggct

SEQ ID NO: 214407 - DNA, 20 bp, Artificial Sequence
  Description of Artificial Sequence: Synthetic oligonucleotide
  Target: LAMA2; (-) strand; PAM type: YTN; PAM sequence: CTG
gagtgcagtggcatgatcat

SEQ ID NO: 214408 - DNA, 20 bp, Artificial Sequence
  Description of Artificial Sequence: Synthetic oligonucleotide
  Target: LAMA2; (-) strand; PAM type: YTN; PAM sequence: TTG
cccaggctggagtgcagtgg

SEQ ID NO: 214409 - DNA, 20 bp, Artificial Sequence
  Description of Artificial Sequence: Synthetic oligonucleotide
  Target: LAMA2; (-) strand; PAM type: YTN; PAM sequence: TTG
ttgcccaggctggagtgcag

SEQ ID NO: 214410 - DNA, 20 bp, Artificial Sequence
  Description of Artificial Sequence: Synthetic oligonucleotide
  Target: LAMA2; (-) strand; PAM type: YTN; PAM sequence: CTT
gttgcccaggctggagtgca

SEQ ID NO: 214411 - DNA, 20 bp, Artificial Sequence
  Description of Artificial Sequence: Synthetic oligonucleotide
  Target: LAMA2; (-) strand; PAM type: YTN; PAM sequence: CTC
ttgttgcccaggctggagtg

SEQ ID NO: 214412 - DNA, 20 bp, Artificial Sequence
  Description of Artificial Sequence: Synthetic oligonucleotide
  Target: LAMA2; (-) strand; PAM type: YTN; PAM sequence: CTC
actcttgttgcccaggctgg

SEQ ID NO: 214413 - DNA, 20 bp, Artificial Sequence
  Description of Artificial Sequence: Synthetic oligonucleotide
  Target: LAMA2; (-) strand; PAM type: YTN; PAM sequence: TTA
agacagggtctcactcttgt

SEQ ID NO: 214414 - DNA, 20 bp, Artificial Sequence
  Description of Artificial Sequence: Synthetic oligonucleotide
  Target: LAMA2; (-) strand; PAM type: YTN; PAM sequence: TTT
aagacagggtctcactcttg

SEQ ID NO: 214415 - DNA, 20 bp, Artificial Sequence
  Description of Artificial Sequence: Synthetic oligonucleotide
  Target: LAMA2; (-) strand; PAM type: YTN; PAM sequence: TTT
taagacagggtctcactctt

SEQ ID NO: 214416 - DNA, 20 bp, Artificial Sequence
  Description of Artificial Sequence: Synthetic oligonucleotide
  Target: LAMA2; (-) strand; PAM type: YTN; PAM sequence: TTT
ttaagacagggtctcactct

SEQ ID NO: 214417 - DNA, 20 bp, Artificial Sequence
  Description of Artificial Sequence: Synthetic oligonucleotide
  Target: LAMA2; (-) strand; PAM type: YTN; PAM sequence: TTT
tttaagacagggtctcactc

SEQ ID NO: 214418 - DNA, 20 bp, Artificial Sequence
  Description of Artificial Sequence: Synthetic oligonucleotide
  Target: LAMA2; (-) strand; PAM type: YTN; PAM sequence: TTT
ttttaagacagggtctcact

SEQ ID NO: 214419 - DNA, 20 bp, Artificial Sequence
  Description of Artificial Sequence: Synthetic oligonucleotide
  Target: LAMA2; (-) strand; PAM type: YTN; PAM sequence: TTA
atttttttaagacagggtct

SEQ ID NO: 214420 - DNA, 20 bp, Artificial Sequence
  Description of Artificial Sequence: Synthetic oligonucleotide
  Target: LAMA2; (-) strand; PAM type: YTN; PAM sequence: TTT
aatttttttaagacagggtc

SEQ ID NO: 214421 - DNA, 20 bp, Artificial Sequence
  Description of Artificial Sequence: Synthetic oligonucleotide
  Target: LAMA2; (-) strand; PAM type: YTN; PAM sequence: TTG
tttaatttttttaagacagg

SEQ ID NO: 214422 - DNA, 20 bp, Artificial Sequence
  Description of Artificial Sequence: Synthetic oligonucleotide
  Target: LAMA2; (-) strand; PAM type: YTN; PAM sequence: TTT
gtttaatttttttaagacag

SEQ ID NO: 214423 - DNA, 20 bp, Artificial Sequence
  Description of Artificial Sequence: Synthetic oligonucleotide
  Target: LAMA2; (-) strand; PAM type: YTN; PAM sequence: TTA
atttgtttaatttttttaag

SEQ ID NO: 214424 - DNA, 20 bp, Artificial Sequence
  Description of Artificial Sequence: Synthetic oligonucleotide
  Target: LAMA2; (-) strand; PAM type: YTN; PAM sequence: TTT
aatttgtttaatttttttaa

SEQ ID NO: 214425 - DNA, 20 bp, Artificial Sequence
  Description of Artificial Sequence: Synthetic oligonucleotide
  Target: LAMA2; (-) strand; PAM type: YTN; PAM sequence: TTT
taatttgtttaattttttta

SEQ ID NO: 214426 - DNA, 20 bp, Artificial Sequence
  Description of Artificial Sequence: Synthetic oligonucleotide
  Target: LAMA2; (-) strand; PAM type: YTN; PAM sequence: TTT
ttaatttgtttaattttttt

SEQ ID NO: 214427 - DNA, 20 bp, Artificial Sequence
  Description of Artificial Sequence: Synthetic oligonucleotide
  Target: LAMA2; (-) strand; PAM type: YTN; PAM sequence: CTT
tttaatttgtttaatttttt

SEQ ID NO: 214428 - DNA, 20 bp, Artificial Sequence
  Description of Artificial Sequence: Synthetic oligonucleotide
  Target: LAMA2; (-) strand; PAM type: YTN; PAM sequence: TTC
tttttaatttgtttaatttt

SEQ ID NO: 214429 - DNA, 20 bp, Artificial Sequence
  Description of Artificial Sequence: Synthetic oligonucleotide
  Target: LAMA2; (-) strand; PAM type: YTN; PAM sequence: TTT
ctttttaatttgtttaattt

SEQ ID NO: 214430 - DNA, 20 bp, Artificial Sequence
  Description of Artificial Sequence: Synthetic oligonucleotide
  Target: LAMA2; (-) strand; PAM type: YTN; PAM sequence: TTC
atttctttttaatttgttta

SEQ ID NO: 214431 - DNA, 20 bp, Artificial Sequence
  Description of Artificial Sequence: Synthetic oligonucleotide
  Target: LAMA2; (-) strand; PAM type: YTN; PAM sequence: CTT
catttctttttaatttgttt

SEQ ID NO: 214432 - DNA, 20 bp, Artificial Sequence
  Description of Artificial Sequence: Synthetic oligonucleotide
  Target: LAMA2; (-) strand; PAM type: YTN; PAM sequence: CTC
aataacttcatttcttttta

SEQ ID NO: 214433 - DNA, 20 bp, Artificial Sequence
  Description of Artificial Sequence: Synthetic oligonucleotide
  Target: LAMA2; (-) strand; PAM type: YTN; PAM sequence: CTG
tcactcaataacttcatttc

SEQ ID NO: 214434 - DNA, 20 bp, Artificial Sequence
  Description of Artificial Sequence: Synthetic oligonucleotide
  Target: LAMA2; (-) strand; PAM type: YTN; PAM sequence: TTA
actgtcactcaataacttca

SEQ ID NO: 214435 - DNA, 20 bp, Artificial Sequence
  Description of Artificial Sequence: Synthetic oligonucleotide
  Target: LAMA2; (-) strand; PAM type: YTN; PAM sequence: TTT
aactgtcactcaataacttc

SEQ ID NO: 214436 - DNA, 20 bp, Artificial Sequence
  Description of Artificial Sequence: Synthetic oligonucleotide
  Target: LAMA2; (-) strand; PAM type: YTN; PAM sequence: CTT
taactgtcactcaataactt

SEQ ID NO: 214437 - DNA, 20 bp, Artificial Sequence
  Description of Artificial Sequence: Synthetic oligonucleotide
  Target: LAMA2; (-) strand; PAM type: YTN; PAM sequence: TTC
tttaactgtcactcaataac

SEQ ID NO: 214438 - DNA, 20 bp, Artificial Sequence
  Description of Artificial Sequence: Synthetic oligonucleotide
  Target: LAMA2; (-) strand; PAM type: YTN; PAM sequence: TTT
ctttaactgtcactcaataa

SEQ ID NO: 214439 - DNA, 20 bp, Artificial Sequence
  Description of Artificial Sequence: Synthetic oligonucleotide
  Target: LAMA2; (-) strand; PAM type: YTN; PAM sequence: TTG
caaatcagtttctttaactg

SEQ ID NO: 214440 - DNA, 20 bp, Artificial Sequence
  Description of Artificial Sequence: Synthetic oligonucleotide
  Target: LAMA2; (-) strand; PAM type: YTN; PAM sequence: CTT
gcaaatcagtttctttaact

SEQ ID NO: 214441 - DNA, 20 bp, Artificial Sequence
  Description of Artificial Sequence: Synthetic oligonucleotide
  Target: LAMA2; (-) strand; PAM type: YTN; PAM sequence: CTG
aaggccacttgcaaatcagt

SEQ ID NO: 214442 - DNA, 20 bp, Artificial Sequence
  Description of Artificial Sequence: Synthetic oligonucleotide
  Target: LAMA2; (-) strand; PAM type: YTN; PAM sequence: CTC
ctgaaggccacttgcaaatc

SEQ ID NO: 214443 - DNA, 20 bp, Artificial Sequence
  Description of Artificial Sequence: Synthetic oligonucleotide
  Target: LAMA2; (-) strand; PAM type: YTN; PAM sequence: CTG
cctcctgaaggccacttgca

SEQ ID NO: 214444 - DNA, 20 bp, Artificial Sequence
  Description of Artificial Sequence: Synthetic oligonucleotide
  Target: LAMA2; (-) strand; PAM type: YTN; PAM sequence: TTC
tgcctcctgaaggccacttg

SEQ ID NO: 214445 - DNA, 20 bp, Artificial Sequence
  Description of Artificial Sequence: Synthetic oligonucleotide
  Target: LAMA2; (-) strand; PAM type: YTN; PAM sequence: CTT
ctgcctcctgaaggccactt

SEQ ID NO: 214446 - DNA, 20 bp, Artificial Sequence
  Description of Artificial Sequence: Synthetic oligonucleotide
  Target: LAMA2; (-) strand; PAM type: YTN; PAM sequence: TTC
ttctgcctcctgaaggccac

SEQ ID NO: 214447 - DNA, 20 bp, Artificial Sequence
  Description of Artificial Sequence: Synthetic oligonucleotide
  Target: LAMA2; (-) strand; PAM type: YTN; PAM sequence: CTT
cttctgcctcctgaaggcca

SEQ ID NO: 214448 - DNA, 20 bp, Artificial Sequence
  Description of Artificial Sequence: Synthetic oligonucleotide
  Target: LAMA2; (-) strand; PAM type: YTN; PAM sequence: CTG
gggaaagacaagtagccttc

SEQ ID NO: 214449 - DNA, 20 bp, Artificial Sequence
  Description of Artificial Sequence: Synthetic oligonucleotide
  Target: LAMA2; (-) strand; PAM type: YTN; PAM sequence: TTC
ataaaatcactggggaaaga

SEQ ID NO: 214450 - DNA, 20 bp, Artificial Sequence
  Description of Artificial Sequence: Synthetic oligonucleotide
  Target: LAMA2; (-) strand; PAM type: YTN; PAM sequence: CTC
aatggattcataaaatcact

SEQ ID NO: 214451 - DNA, 20 bp, Artificial Sequence
  Description of Artificial Sequence: Synthetic oligonucleotide
  Target: LAMA2; (-) strand; PAM type: YTN; PAM sequence: CTC
ctcaatggattcataaaatc

SEQ ID NO: 214452 - DNA, 20 bp, Artificial Sequence
  Description of Artificial Sequence: Synthetic oligonucleotide
  Target: LAMA2; (-) strand; PAM type: YTN; PAM sequence: CTG
cagatctcctcaatggattc

SEQ ID NO: 214453 - DNA, 20 bp, Artificial Sequence
  Description of Artificial Sequence: Synthetic oligonucleotide
  Target: LAMA2; (-) strand; PAM type: YTN; PAM sequence: TTC
tgcagatctcctcaatggat

SEQ ID NO: 214454 - DNA, 20 bp, Artificial Sequence
  Description of Artificial Sequence: Synthetic oligonucleotide
  Target: LAMA2; (-) strand; PAM type: YTN; PAM sequence: CTT
ctgcagatctcctcaatgga

SEQ ID NO: 214455 - DNA, 20 bp, Artificial Sequence
  Description of Artificial Sequence: Synthetic oligonucleotide
  Target: LAMA2; (-) strand; PAM type: YTN; PAM sequence: CTC
cagcagtgacaacacttctg

SEQ ID NO: 214456 - DNA, 20 bp, Artificial Sequence
  Description of Artificial Sequence: Synthetic oligonucleotide
  Target: LAMA2; (-) strand; PAM type: YTN; PAM sequence: TTC
tccagcagtgacaacacttc

SEQ ID NO: 214457 - DNA, 20 bp, Artificial Sequence
  Description of Artificial Sequence: Synthetic oligonucleotide
  Target: LAMA2; (-) strand; PAM type: YTN; PAM sequence: TTT
ctccagcagtgacaacactt

SEQ ID NO: 214458 - DNA, 20 bp, Artificial Sequence
  Description of Artificial Sequence: Synthetic oligonucleotide
  Target: LAMA2; (-) strand; PAM type: YTN; PAM sequence: TTT
tctccagcagtgacaacact

SEQ ID NO: 214459 - DNA, 20 bp, Artificial Sequence
  Description of Artificial Sequence: Synthetic oligonucleotide
  Target: LAMA2; (-) strand; PAM type: YTN; PAM sequence: TTG
gttttctccagcagtgacaa

SEQ ID NO: 214460 - DNA, 20 bp, Artificial Sequence
  Description of Artificial Sequence: Synthetic oligonucleotide
  Target: LAMA2; (-) strand; PAM type: YTN; PAM sequence: CTT
ggttttctccagcagtgaca

SEQ ID NO: 214461 - DNA, 20 bp, Artificial Sequence
  Description of Artificial Sequence: Synthetic oligonucleotide
  Target: LAMA2; (-) strand; PAM type: YTN; PAM sequence: TTG
caagtgaagccttggttttc

SEQ ID NO: 214462 - DNA, 20 bp, Artificial Sequence
  Description of Artificial Sequence: Synthetic oligonucleotide
  Target: LAMA2; (-) strand; PAM type: YTN; PAM sequence: TTT
gcaagtgaagccttggtttt

SEQ ID NO: 214463 - DNA, 20 bp, Artificial Sequence
  Description of Artificial Sequence: Synthetic oligonucleotide
  Target: LAMA2; (-) strand; PAM type: YTN; PAM sequence: TTT
tgcaagtgaagccttggttt

SEQ ID NO: 214464 - DNA, 20 bp, Artificial Sequence
  Description of Artificial Sequence: Synthetic oligonucleotide
  Target: LAMA2; (-) strand; PAM type: YTN; PAM sequence: TTT
ttgcaagtgaagccttggtt

SEQ ID NO: 214465 - DNA, 20 bp, Artificial Sequence
  Description of Artificial Sequence: Synthetic oligonucleotide
  Target: LAMA2; (-) strand; PAM type: YTN; PAM sequence: CTT
tttgcaagtgaagccttggt

SEQ ID NO: 214466 - DNA, 20 bp, Artificial Sequence
  Description of Artificial Sequence: Synthetic oligonucleotide
  Target: LAMA2; (-) strand; PAM type: YTN; PAM sequence: CTC
ctttttgcaagtgaagcctt

SEQ ID NO: 214467 - DNA, 20 bp, Artificial Sequence
  Description of Artificial Sequence: Synthetic oligonucleotide
  Target: LAMA2; (-) strand; PAM type: YTN; PAM sequence: TTA
agaaagtactcctttttgca

SEQ ID NO: 214468 - DNA, 20 bp, Artificial Sequence
  Description of Artificial Sequence: Synthetic oligonucleotide
  Target: LAMA2; (-) strand; PAM type: YTN; PAM sequence: TTT
aagaaagtactcctttttgc

SEQ ID NO: 214469 - DNA, 20 bp, Artificial Sequence
  Description of Artificial Sequence: Synthetic oligonucleotide
  Target: LAMA2; (-) strand; PAM type: YTN; PAM sequence: TTT
taagaaagtactcctttttg

SEQ ID NO: 214470 - DNA, 20 bp, Artificial Sequence
  Description of Artificial Sequence: Synthetic oligonucleotide
  Target: LAMA2; (-) strand; PAM type: YTN; PAM sequence: CTC
agttttaagaaagtactcct

SEQ ID NO: 214471 - DNA, 20 bp, Artificial Sequence
  Description of Artificial Sequence: Synthetic oligonucleotide
  Target: LAMA2; (-) strand; PAM type: YTN; PAM sequence: TTC
tcagttttaagaaagtactc

SEQ ID NO: 214472 - DNA, 20 bp, Artificial Sequence
  Description of Artificial Sequence: Synthetic oligonucleotide
  Target: LAMA2; (-) strand; PAM type: YTN; PAM sequence: TTT
ctcagttttaagaaagtact

SEQ ID NO: 214473 - DNA, 20 bp, Artificial Sequence
  Description of Artificial Sequence: Synthetic oligonucleotide
  Target: LAMA2; (-) strand; PAM type: YTN; PAM sequence: TTC
caaatttctcagttttaaga

SEQ ID NO: 214474 - DNA, 20 bp, Artificial Sequence
  Description of Artificial Sequence: Synthetic oligonucleotide
  Target: LAMA2; (-) strand; PAM type: YTN; PAM sequence: TTT
ccaaatttctcagttttaag

SEQ ID NO: 214475 - DNA, 20 bp, Artificial Sequence
  Description of Artificial Sequence: Synthetic oligonucleotide
  Target: LAMA2; (-) strand; PAM type: YTN; PAM sequence: CTA
tgatatatttccaaatttct

SEQ ID NO: 214476 - DNA, 20 bp, Artificial Sequence
  Description of Artificial Sequence: Synthetic oligonucleotide
  Target: LAMA2; (-) strand; PAM type: YTN; PAM sequence: TTA
caagtcctatgatatatttc

SEQ ID NO: 214477 - DNA, 20 bp, Artificial Sequence
  Description of Artificial Sequence: Synthetic oligonucleotide
  Target: LAMA2; (-) strand; PAM type: YTN; PAM sequence: TTT
acaagtcctatgatatattt

SEQ ID NO: 214478 - DNA, 20 bp, Artificial Sequence
  Description of Artificial Sequence: Synthetic oligonucleotide
  Target: LAMA2; (-) strand; PAM type: YTN; PAM sequence: CTT
tacaagtcctatgatatatt

SEQ ID NO: 214479 - DNA, 20 bp, Artificial Sequence
  Description of Artificial Sequence: Synthetic oligonucleotide
  Target: LAMA2; (-) strand; PAM type: YTN; PAM sequence: TTC
catcatagctttacaagtcc

SEQ ID NO: 214480 - DNA, 20 bp, Artificial Sequence
  Description of Artificial Sequence: Synthetic oligonucleotide
  Target: LAMA2; (-) strand; PAM type: YTN; PAM sequence: CTT
ccatcatagctttacaagtc

SEQ ID NO: 214481 - DNA, 20 bp, Artificial Sequence
  Description of Artificial Sequence: Synthetic oligonucleotide
  Target: LAMA2; (-) strand; PAM type: YTN; PAM sequence: CTA
acttccatcatagctttaca

SEQ ID NO: 214482 - DNA, 20 bp, Artificial Sequence
  Description of Artificial Sequence: Synthetic oligonucleotide
  Target: LAMA2; (-) strand; PAM type: YTN; PAM sequence: CTC
atgggctaacttccatcata

SEQ ID NO: 214483 - DNA, 20 bp, Artificial Sequence
  Description of Artificial Sequence: Synthetic oligonucleotide
  Target: LAMA2; (-) strand; PAM type: YTN; PAM sequence: CTG
taaacacactcatgggctaa

SEQ ID NO: 214484 - DNA, 20 bp, Artificial Sequence
  Description of Artificial Sequence: Synthetic oligonucleotide
  Target: LAMA2; (-) strand; PAM type: YTN; PAM sequence: TTC
tgtaaacacactcatgggct

SEQ ID NO: 214485 - DNA, 20 bp, Artificial Sequence
  Description of Artificial Sequence: Synthetic oligonucleotide
  Target: LAMA2; (-) strand; PAM type: YTN; PAM sequence: CTT
ctgtaaacacactcatgggc

SEQ ID NO: 214486 - DNA, 20 bp, Artificial Sequence
  Description of Artificial Sequence: Synthetic oligonucleotide
  Target: LAMA2; (-) strand; PAM type: YTN; PAM sequence: CTG
ccttctgtaaacacactcat

SEQ ID NO: 214487 - DNA, 20 bp, Artificial Sequence
  Description of Artificial Sequence: Synthetic oligonucleotide
  Target: LAMA2; (-) strand; PAM type: YTN; PAM sequence: CTC
tgccttctgtaaacacactc

SEQ ID NO: 214488 - DNA, 20 bp, Artificial Sequence
  Description of Artificial Sequence: Synthetic oligonucleotide
  Target: LAMA2; (-) strand; PAM type: YTN; PAM sequence: CTA
gctctgccttctgtaaacac

SEQ ID NO: 214489 - DNA, 20 bp, Artificial Sequence
  Description of Artificial Sequence: Synthetic oligonucleotide
  Target: LAMA2; (-) strand; PAM type: YTN; PAM sequence: TTA
tgccatctagctctgccttc

SEQ ID NO: 214490 - DNA, 20 bp, Artificial Sequence
  Description of Artificial Sequence: Synthetic oligonucleotide
  Target: LAMA2; (-) strand; PAM type: YTN; PAM sequence: CTT
atgccatctagctctgcctt

SEQ ID NO: 214491 - DNA, 20 bp, Artificial Sequence
  Description of Artificial Sequence: Synthetic oligonucleotide
  Target: LAMA2; (-) strand; PAM type: YTN; PAM sequence: CTG
agtcttatgccatctagctc

SEQ ID NO: 214492 - DNA, 20 bp, Artificial Sequence
  Description of Artificial Sequence: Synthetic oligonucleotide
  Target: LAMA2; (-) strand; PAM type: YTN; PAM sequence: CTG
catcatccctgagtcttatg

SEQ ID NO: 214493 - DNA, 20 bp, Artificial Sequence
  Description of Artificial Sequence: Synthetic oligonucleotide
  Target: LAMA2; (-) strand; PAM type: YTN; PAM sequence: CTC
ctgcatcatccctgagtctt

SEQ ID NO: 214494 - DNA, 20 bp, Artificial Sequence
  Description of Artificial Sequence: Synthetic oligonucleotide
  Target: LAMA2; (-) strand; PAM type: YTN; PAM sequence: TTA
tcacctcctgcatcatccct

SEQ ID NO: 214495 - DNA, 20 bp, Artificial Sequence
  Description of Artificial Sequence: Synthetic oligonucleotide
  Target: LAMA2; (-) strand; PAM type: YTN; PAM sequence: TTT
atcacctcctgcatcatccc

SEQ ID NO: 214496 - DNA, 20 bp, Artificial Sequence
  Description of Artificial Sequence: Synthetic oligonucleotide
  Target: LAMA2; (-) strand; PAM type: YTN; PAM sequence: CTA
aacaaaaatatttatcacct

SEQ ID NO: 214497 - DNA, 20 bp, Artificial Sequence
  Description of Artificial Sequence: Synthetic oligonucleotide
  Target: LAMA2; (-) strand; PAM type: YTN; PAM sequence: CTC
taaacaaaaatatttatcac

SEQ ID NO: 214498 - DNA, 20 bp, Artificial Sequence
  Description of Artificial Sequence: Synthetic oligonucleotide
  Target: LAMA2; (-) strand; PAM type: YTN; PAM sequence: CTA
ctctaaacaaaaatatttat

SEQ ID NO: 214499 - DNA, 20 bp, Artificial Sequence
  Description of Artificial Sequence: Synthetic oligonucleotide
  Target: LAMA2; (-) strand; PAM type: YTN; PAM sequence: CTC
actactctaaacaaaaatat

SEQ ID NO: 214500 - DNA, 20 bp, Artificial Sequence
  Description of Artificial Sequence: Synthetic oligonucleotide
  Target: LAMA2; (-) strand; PAM type: YTN; PAM sequence: TTC
tcactactctaaacaaaaat

SEQ ID NO: 214501 - DNA, 20 bp, Artificial Sequence
  Description of Artificial Sequence: Synthetic oligonucleotide
  Target: LAMA2; (-) strand; PAM type: YTN; PAM sequence: CTT
ctcactactctaaacaaaaa

SEQ ID NO: 214502 - DNA, 20 bp, Artificial Sequence
  Description of Artificial Sequence: Synthetic oligonucleotide
  Target: LAMA2; (-) strand; PAM type: YTN; PAM sequence: CTC
ttctcactactctaaacaaa

SEQ ID NO: 214503 - DNA, 20 bp, Artificial Sequence
  Description of Artificial Sequence: Synthetic oligonucleotide
  Target: LAMA2; (-) strand; PAM type: YTN; PAM sequence: TTC
actcttctcactactctaaa

SEQ ID NO: 214504 - DNA, 20 bp, Artificial Sequence
  Description of Artificial Sequence: Synthetic oligonucleotide
  Target: LAMA2; (-) strand; PAM type: YTN; PAM sequence: TTT
cactcttctcactactctaa

SEQ ID NO: 214505 - DNA, 20 bp, Artificial Sequence
  Description of Artificial Sequence: Synthetic oligonucleotide
  Target: LAMA2; (-) strand; PAM type: YTN; PAM sequence: CTG
tgtttcactcttctcactac

SEQ ID NO: 214506 - DNA, 20 bp, Artificial Sequence
  Description of Artificial Sequence: Synthetic oligonucleotide
  Target: LAMA2; (-) strand; PAM type: YTN; PAM sequence: CTA
ctgtgtttcactcttctcac

SEQ ID NO: 214507 - DNA, 20 bp, Artificial Sequence
  Description of Artificial Sequence: Synthetic oligonucleotide
  Target: LAMA2; (-) strand; PAM type: YTN; PAM sequence: TTA
aagatctactgtgtttcact

SEQ ID NO: 214508 - DNA, 20 bp, Artificial Sequence
  Description of Artificial Sequence: Synthetic oligonucleotide
  Target: LAMA2; (-) strand; PAM type: YTN; PAM sequence: TTA
ttaaagatctactgtgtttc

SEQ ID NO: 214509 - DNA, 20 bp, Artificial Sequence
  Description of Artificial Sequence: Synthetic oligonucleotide
  Target: LAMA2; (-) strand; PAM type: YTN; PAM sequence: TTA
ttattaaagatctactgtgt

SEQ ID NO: 214510 - DNA, 20 bp, Artificial Sequence
  Description of Artificial Sequence: Synthetic oligonucleotide
  Target: LAMA2; (-) strand; PAM type: YTN; PAM sequence: TTT
attattaaagatctactgtg

SEQ ID NO: 214511 - DNA, 20 bp, Artificial Sequence
  Description of Artificial Sequence: Synthetic oligonucleotide
  Target: LAMA2; (-) strand; PAM type: YTN; PAM sequence: TTT
tattattaaagatctactgt

SEQ ID NO: 214512 - DNA, 20 bp, Artificial Sequence
  Description of Artificial Sequence: Synthetic oligonucleotide
  Target: LAMA2; (-) strand; PAM type: YTN; PAM sequence: TTC
caaatgagtgaaaattttat

SEQ ID NO: 214513 - DNA, 20 bp, Artificial Sequence
  Description of Artificial Sequence: Synthetic oligonucleotide
  Target: LAMA2; (-) strand; PAM type: YTN; PAM sequence: TTC
ataattccaaatgagtgaaa

SEQ ID NO: 214514 - DNA, 20 bp, Artificial Sequence
  Description of Artificial Sequence: Synthetic oligonucleotide
  Target: LAMA2; (-) strand; PAM type: YTN; PAM sequence: TTT
cataattccaaatgagtgaa

SEQ ID NO: 214515 - DNA, 20 bp, Artificial Sequence
  Description of Artificial Sequence: Synthetic oligonucleotide
  Target: LAMA2; (-) strand; PAM type: YTN; PAM sequence: TTT
tcataattccaaatgagtga

SEQ ID NO: 214516 - DNA, 20 bp, Artificial Sequence
  Description of Artificial Sequence: Synthetic oligonucleotide
  Target: LAMA2; (-) strand; PAM type: YTN; PAM sequence: TTC
aaacacaattttcataattc

SEQ ID NO: 214517 - DNA, 20 bp, Artificial Sequence
  Description of Artificial Sequence: Synthetic oligonucleotide
  Target: LAMA2; (-) strand; PAM type: YTN; PAM sequence: TTT
caaacacaattttcataatt

SEQ ID NO: 214518 - DNA, 20 bp, Artificial Sequence
  Description of Artificial Sequence: Synthetic oligonucleotide
  Target: LAMA2; (-) strand; PAM type: YTN; PAM sequence: TTT
tcaaacacaattttcataat

SEQ ID NO: 214519 - DNA, 20 bp, Artificial Sequence
  Description of Artificial Sequence: Synthetic oligonucleotide
  Target: LAMA2; (-) strand; PAM type: YTN; PAM sequence: CTG
gttttcaaacacaattttca

SEQ ID NO: 214520 - DNA, 20 bp, Artificial Sequence
  Description of Artificial Sequence: Synthetic oligonucleotide
  Target: LAMA2; (-) strand; PAM type: YTN; PAM sequence: TTA
aatggcacagctggttttca

SEQ ID NO: 214521 - DNA, 20 bp, Artificial Sequence
  Description of Artificial Sequence: Synthetic oligonucleotide
  Target: LAMA2; (-) strand; PAM type: YTN; PAM sequence: TTT
aaatggcacagctggttttc

SEQ ID NO: 214522 - DNA, 20 bp, Artificial Sequence
  Description of Artificial Sequence: Synthetic oligonucleotide
  Target: LAMA2; (-) strand; PAM type: YTN; PAM sequence: TTA
caaatgaagaaacatatacc

SEQ ID NO: 214523 - DNA, 20 bp, Artificial Sequence
  Description of Artificial Sequence: Synthetic oligonucleotide
  Target: LAMA2; (-) strand; PAM type: YTN; PAM sequence: TTT
acaaatgaagaaacatatac

SEQ ID NO: 214524 - DNA, 20 bp, Artificial Sequence
  Description of Artificial Sequence: Synthetic oligonucleotide
  Target: LAMA2; (-) strand; PAM type: YTN; PAM sequence: TTT
tacaaatgaagaaacatata

SEQ ID NO: 214525 - DNA, 20 bp, Artificial Sequence
  Description of Artificial Sequence: Synthetic oligonucleotide
  Target: LAMA2; (-) strand; PAM type: YTN; PAM sequence: TTG
aattttacaaatgaagaaac

SEQ ID NO: 214526 - DNA, 20 bp, Artificial Sequence
  Description of Artificial Sequence: Synthetic oligonucleotide
  Target: LAMA2; (-) strand; PAM type: YTN; PAM sequence: CTT
gaattttacaaatgaagaaa

SEQ ID NO: 214527 - DNA, 20 bp, Artificial Sequence
  Description of Artificial Sequence: Synthetic oligonucleotide
  Target: LAMA2; (-) strand; PAM type: YTN; PAM sequence: TTC
aaacttgaattttacaaatg

SEQ ID NO: 214528 - DNA, 20 bp, Artificial Sequence
  Description of Artificial Sequence: Synthetic oligonucleotide
  Target: LAMA2; (-) strand; PAM type: YTN; PAM sequence: CTA
gttcaaacttgaattttaca

SEQ ID NO: 214529 - DNA, 20 bp, Artificial Sequence
  Description of Artificial Sequence: Synthetic oligonucleotide
  Target: LAMA2; (-) strand; PAM type: YTN; PAM sequence: TTC
aaagaagcctagttcaaact

SEQ ID NO: 214530 - DNA, 20 bp, Artificial Sequence
  Description of Artificial Sequence: Synthetic oligonucleotide
  Target: LAMA2; (-) strand; PAM type: YTN; PAM sequence: TTA
gttcaaagaagcctagttca

SEQ ID NO: 214531 - DNA, 20 bp, Artificial Sequence
  Description of Artificial Sequence: Synthetic oligonucleotide
  Target: LAMA2; (-) strand; PAM type: YTN; PAM sequence: TTT
agttcaaagaagcctagttc

SEQ ID NO: 214532 - DNA, 20 bp, Artificial Sequence
  Description of Artificial Sequence: Synthetic oligonucleotide
  Target: LAMA2; (-) strand; PAM type: YTN; PAM sequence: CTG
gtggcaagaagaatttagtt

SEQ ID NO: 214533 - DNA, 20 bp, Artificial Sequence
  Description of Artificial Sequence: Synthetic oligonucleotide
  Target: LAMA2; (-) strand; PAM type: YTN; PAM sequence: TTG
tctggtggcaagaagaattt

SEQ ID NO: 214534 - DNA, 20 bp, Artificial Sequence
  Description of Artificial Sequence: Synthetic oligonucleotide
  Target: LAMA2; (-) strand; PAM type: YTN; PAM sequence: TTG
ttgtctggtggcaagaagaa

SEQ ID NO: 214535 - DNA, 20 bp, Artificial Sequence
  Description of Artificial Sequence: Synthetic oligonucleotide
  Target: LAMA2; (-) strand; PAM type: YTN; PAM sequence: CTA
ggtgatgaagaagaaggttg

SEQ ID NO: 214536 - DNA, 20 bp, Artificial Sequence
  Description of Artificial Sequence: Synthetic oligonucleotide
  Target: LAMA2; (-) strand; PAM type: YTN; PAM sequence: CTC
taggtgatgaagaagaaggt

SEQ ID NO: 214537 - DNA, 20 bp, Artificial Sequence
  Description of Artificial Sequence: Synthetic oligonucleotide
  Target: LAMA2; (-) strand; PAM type: YTN; PAM sequence: TTC
ctctaggtgatgaagaagaa

SEQ ID NO: 214538 - DNA, 20 bp, Artificial Sequence
  Description of Artificial Sequence: Synthetic oligonucleotide
  Target: LAMA2; (-) strand; PAM type: YTN; PAM sequence: TTC
aggcaatgttcctctaggtg

SEQ ID NO: 214539 - DNA, 20 bp, Artificial Sequence
  Description of Artificial Sequence: Synthetic oligonucleotide
  Target: LAMA2; (-) strand; PAM type: YTN; PAM sequence: CTT
caggcaatgttcctctaggt

SEQ ID NO: 214540 - DNA, 20 bp, Artificial Sequence
  Description of Artificial Sequence: Synthetic oligonucleotide
  Target: LAMA2; (-) strand; PAM type: YTN; PAM sequence: TTA
ggcttcaggcaatgttcctc

SEQ ID NO: 214541 - DNA, 20 bp, Artificial Sequence
  Description of Artificial Sequence: Synthetic oligonucleotide
  Target: LAMA2; (-) strand; PAM type: YTN; PAM sequence: CTT
aggcttcaggcaatgttcct

SEQ ID NO: 214542 - DNA, 20 bp, Artificial Sequence
  Description of Artificial Sequence: Synthetic oligonucleotide
  Target: LAMA2; (-) strand; PAM type: YTN; PAM sequence: TTC
cttaggcttcaggcaatgtt

SEQ ID NO: 214543 - DNA, 20 bp, Artificial Sequence
  Description of Artificial Sequence: Synthetic oligonucleotide
  Target: LAMA2; (-) strand; PAM type: YTN; PAM sequence: CTT
ccttaggcttcaggcaatgt

SEQ ID NO: 214544 - DNA, 20 bp, Artificial Sequence
  Description of Artificial Sequence: Synthetic oligonucleotide
  Target: LAMA2; (-) strand; PAM type: YTN; PAM sequence: CTG
cttccttaggcttcaggcaa

SEQ ID NO: 214545 - DNA, 20 bp, Artificial Sequence
  Description of Artificial Sequence: Synthetic oligonucleotide
  Target: LAMA2; (-) strand; PAM type: YTN; PAM sequence: CTG
tgtggcacagggaaggctgc

SEQ ID NO: 214546 - DNA, 20 bp, Artificial Sequence
  Description of Artificial Sequence: Synthetic oligonucleotide
  Target: LAMA2; (-) strand; PAM type: YTN; PAM sequence: TTC
tgtgtggcacagggaaggct

SEQ ID NO: 214547 - DNA, 20 bp, Artificial Sequence
  Description of Artificial Sequence: Synthetic oligonucleotide
  Target: LAMA2; (-) strand; PAM type: YTN; PAM sequence: CTT
ctgtgtggcacagggaaggc

SEQ ID NO: 214548 - DNA, 20 bp, Artificial Sequence
  Description of Artificial Sequence: Synthetic oligonucleotide
  Target: LAMA2; (-) strand; PAM type: YTN; PAM sequence: TTA
aggggtcttctgtgtggcac

SEQ ID NO: 214549 - DNA, 20 bp, Artificial Sequence
  Description of Artificial Sequence: Synthetic oligonucleotide
  Target: LAMA2; (-) strand; PAM type: YTN; PAM sequence: TTG
aacaattaaggggtcttctg

SEQ ID NO: 214550 - DNA, 20 bp, Artificial Sequence
  Description of Artificial Sequence: Synthetic oligonucleotide
  Target: LAMA2; (-) strand; PAM type: YTN; PAM sequence: TTC
attgaacaattaaggggtct

SEQ ID NO: 214551 - DNA, 20 bp, Artificial Sequence
  Description of Artificial Sequence: Synthetic oligonucleotide
  Target: LAMA2; (-) strand; PAM type: YTN; PAM sequence: CTA
cacaagtcaatgagaaattc

SEQ ID NO: 214552 - DNA, 20 bp, Artificial Sequence
  Description of Artificial Sequence: Synthetic oligonucleotide
  Target: LAMA2; (-) strand; PAM type: YTN; PAM sequence: TTG
aagcactacacaagtcaatg

SEQ ID NO: 214553 - DNA, 20 bp, Artificial Sequence
  Description of Artificial Sequence: Synthetic oligonucleotide
  Target: LAMA2; (-) strand; PAM type: YTN; PAM sequence: TTT
gaagcactacacaagtcaat

SEQ ID NO: 214554 - DNA, 20 bp, Artificial Sequence
  Description of Artificial Sequence: Synthetic oligonucleotide
  Target: LAMA2; (-) strand; PAM type: YTN; PAM sequence: TTT
tgaagcactacacaagtcaa

SEQ ID NO: 214555 - DNA, 20 bp, Artificial Sequence
  Description of Artificial Sequence: Synthetic oligonucleotide
  Target: LAMA2; (-) strand; PAM type: YTN; PAM sequence: CTT
ttgaagcactacacaagtca

SEQ ID NO: 214556 - DNA, 20 bp, Artificial Sequence
  Description of Artificial Sequence: Synthetic oligonucleotide
  Target: LAMA2; (-) strand; PAM type: YTN; PAM sequence: TTC
ttttgaagcactacacaagt

SEQ ID NO: 214557 - DNA, 20 bp, Artificial Sequence
  Description of Artificial Sequence: Synthetic oligonucleotide
  Target: LAMA2; (-) strand; PAM type: YTN; PAM sequence: TTT
cttttgaagcactacacaag

SEQ ID NO: 214558 - DNA, 20 bp, Artificial Sequence
  Description of Artificial Sequence: Synthetic oligonucleotide
  Target: LAMA2; (-) strand; PAM type: YTN; PAM sequence: TTT
tcttttgaagcactacacaa

SEQ ID NO: 214559 - DNA, 20 bp, Artificial Sequence
  Description of Artificial Sequence: Synthetic oligonucleotide
  Target: LAMA2; (-) strand; PAM type: YTN; PAM sequence: TTG
atgtgtaagtgttttctttt

SEQ ID NO: 214560 - DNA, 20 bp, Artificial Sequence
  Description of Artificial Sequence: Synthetic oligonucleotide
  Target: LAMA2; (-) strand; PAM type: YTN; PAM sequence: TTT
gatgtgtaagtgttttcttt

SEQ ID NO: 214561 - DNA, 20 bp, Artificial Sequence
  Description of Artificial Sequence: Synthetic oligonucleotide
  Target: LAMA2; (-) strand; PAM type: YTN; PAM sequence: TTA
gaatcatgtttgatgtgtaa

SEQ ID NO: 214562 - DNA, 20 bp, Artificial Sequence
  Description of Artificial Sequence: Synthetic oligonucleotide
  Target: LAMA2; (-) strand; PAM type: YTN; PAM sequence: CTT
agaatcatgtttgatgtgta

SEQ ID NO: 214563 - DNA, 20 bp, Artificial Sequence
  Description of Artificial Sequence: Synthetic oligonucleotide
  Target: LAMA2; (-) strand; PAM type: YTN; PAM sequence: TTG
acttagaatcatgtttgatg

SEQ ID NO: 214564 - DNA, 20 bp, Artificial Sequence
  Description of Artificial Sequence: Synthetic oligonucleotide
  Target: LAMA2; (-) strand; PAM type: YTN; PAM sequence: TTT
gacttagaatcatgtttgat

SEQ ID NO: 214565 - DNA, 20 bp, Artificial Sequence
  Description of Artificial Sequence: Synthetic oligonucleotide
  Target: LAMA2; (-) strand; PAM type: YTN; PAM sequence: CTT
tgacttagaatcatgtttga

SEQ ID NO: 214566 - DNA, 20 bp, Artificial Sequence
  Description of Artificial Sequence: Synthetic oligonucleotide
  Target: LAMA2; (-) strand; PAM type: YTN; PAM sequence: CTC
atataaatgaagaactttga

SEQ ID NO: 214567 - DNA, 20 bp, Artificial Sequence
  Description of Artificial Sequence: Synthetic oligonucleotide
  Target: LAMA2; (-) strand; PAM type: YTN; PAM sequence: TTA
atctcatataaatgaagaac

SEQ ID NO: 214568 - DNA, 20 bp, Artificial Sequence
  Description of Artificial Sequence: Synthetic oligonucleotide
  Target: LAMA2; (-) strand; PAM type: YTN; PAM sequence: TTT
aatctcatataaatgaagaa

SEQ ID NO: 214569 - DNA, 20 bp, Artificial Sequence
  Description of Artificial Sequence: Synthetic oligonucleotide
  Target: LAMA2; (-) strand; PAM type: YTN; PAM sequence: CTT
taatctcatataaatgaaga

SEQ ID NO: 214570 - DNA, 20 bp, Artificial Sequence
  Description of Artificial Sequence: Synthetic oligonucleotide
  Target: LAMA2; (-) strand; PAM type: YTN; PAM sequence: TTC
tttaatctcatataaatgaa

SEQ ID NO: 214571 - DNA, 20 bp, Artificial Sequence
  Description of Artificial Sequence: Synthetic oligonucleotide
  Target: LAMA2; (-) strand; PAM type: YTN; PAM sequence: TTC
cagttctttaatctcatata

SEQ ID NO: 214572 - DNA, 20 bp, Artificial Sequence
  Description of Artificial Sequence: Synthetic oligonucleotide
  Target: LAMA2; (-) strand; PAM type: YTN; PAM sequence: TTT
ccagttctttaatctcatat

SEQ ID NO: 214573 - DNA, 20 bp, Artificial Sequence
  Description of Artificial Sequence: Synthetic oligonucleotide
  Target: LAMA2; (-) strand; PAM type: YTN; PAM sequence: TTT
tccagttctttaatctcata

SEQ ID NO: 214574 - DNA, 20 bp, Artificial Sequence
  Description of Artificial Sequence: Synthetic oligonucleotide
  Target: LAMA2; (-) strand; PAM type: YTN; PAM sequence: TTG
tacagttttccagttcttta

SEQ ID NO: 214575 - DNA, 20 bp, Artificial Sequence
  Description of Artificial Sequence: Synthetic oligonucleotide
  Target: LAMA2; (-) strand; PAM type: YTN; PAM sequence: CTT
gtacagttttccagttcttt

SEQ ID NO: 214576 - DNA, 20 bp, Artificial Sequence
  Description of Artificial Sequence: Synthetic oligonucleotide
  Target: LAMA2; (-) strand; PAM type: YTN; PAM sequence: CTC
ttgtacagttttccagttct

SEQ ID NO: 214577 - DNA, 20 bp, Artificial Sequence
  Description of Artificial Sequence: Synthetic oligonucleotide
  Target: LAMA2; (-) strand; PAM type: YTN; PAM sequence: TTC
tcttgtacagttttccagtt

SEQ ID NO: 214578 - DNA, 20 bp, Artificial Sequence
  Description of Artificial Sequence: Synthetic oligonucleotide
  Target: LAMA2; (-) strand; PAM type: YTN; PAM sequence: TTT
ctcttgtacagttttccagt

SEQ ID NO: 214579 - DNA, 20 bp, Artificial Sequence
  Description of Artificial Sequence: Synthetic oligonucleotide
  Target: LAMA2; (-) strand; PAM type: YTN; PAM sequence: CTA
tttctcttgtacagttttcc

SEQ ID NO: 214580 - DNA, 20 bp, Artificial Sequence
  Description of Artificial Sequence: Synthetic oligonucleotide
  Target: LAMA2; (-) strand; PAM type: YTN; PAM sequence: CTG
caatcagcaggtgactattt

SEQ ID NO: 214581 - DNA, 20 bp, Artificial Sequence
  Description of Artificial Sequence: Synthetic oligonucleotide
  Target: LAMA2; (-) strand; PAM type: YTN; PAM sequence: TTC
caagaaacccacaggcctgc

SEQ ID NO: 214582 - DNA, 20 bp, Artificial Sequence
  Description of Artificial Sequence: Synthetic oligonucleotide
  Target: LAMA2; (-) strand; PAM type: YTN; PAM sequence: TTT
ccaagaaacccacaggcctg

SEQ ID NO: 214583 - DNA, 20 bp, Artificial Sequence
  Description of Artificial Sequence: Synthetic oligonucleotide
  Target: LAMA2; (-) strand; PAM type: YTN; PAM sequence: TTT
tccaagaaacccacaggcct

SEQ ID NO: 214584 - DNA, 20 bp, Artificial Sequence
  Description of Artificial Sequence: Synthetic oligonucleotide
  Target: LAMA2; (-) strand; PAM type: YTN; PAM sequence: TTT
ttccaagaaacccacaggcc

SEQ ID NO: 214585 - DNA, 20 bp, Artificial Sequence
  Description of Artificial Sequence: Synthetic oligonucleotide
  Target: LAMA2; (-) strand; PAM type: YTN; PAM sequence: CTG
agtttttccaagaaacccac

SEQ ID NO: 214586 - DNA, 20 bp, Artificial Sequence
  Description of Artificial Sequence: Synthetic oligonucleotide
  Target: LAMA2; (-) strand; PAM type: YTN; PAM sequence: TTG
ctgagtttttccaagaaacc

SEQ ID NO: 214587 - DNA, 20 bp, Artificial Sequence
  Description of Artificial Sequence: Synthetic oligonucleotide
  Target: LAMA2; (-) strand; PAM type: YTN; PAM sequence: CTG
gataagcaaaattgctgagt

SEQ ID NO: 214588 - DNA, 20 bp, Artificial Sequence
  Description of Artificial Sequence: Synthetic oligonucleotide
  Target: LAMA2; (-) strand; PAM type: YTN; PAM sequence: CTG
ggcaaaaagatagtcctgga

SEQ ID NO: 214589 - DNA, 20 bp, Artificial Sequence
  Description of Artificial Sequence: Synthetic oligonucleotide
  Target: LAMA2; (-) strand; PAM type: YTN; PAM sequence: TTC
agaatcagaggaactgggca

SEQ ID NO: 214590 - DNA, 20 bp, Artificial Sequence
  Description of Artificial Sequence: Synthetic oligonucleotide
  Target: LAMA2; (-) strand; PAM type: YTN; PAM sequence: CTT
cagaatcagaggaactgggc

SEQ ID NO: 214591 - DNA, 20 bp, Artificial Sequence
  Description of Artificial Sequence: Synthetic oligonucleotide
  Target: LAMA2; (-) strand; PAM type: YTN; PAM sequence: TTC
cttcagaatcagaggaactg

SEQ ID NO: 214592 - DNA, 20 bp, Artificial Sequence
  Description of Artificial Sequence: Synthetic oligonucleotide
  Target: LAMA2; (-) strand; PAM type: YTN; PAM sequence: CTT
ccttcagaatcagaggaact

SEQ ID NO: 214593 - DNA, 20 bp, Artificial Sequence
  Description of Artificial Sequence: Synthetic oligonucleotide
  Target: LAMA2; (-) strand; PAM type: YTN; PAM sequence: TTC
aacttccttcagaatcagag

SEQ ID NO: 214594 - DNA, 20 bp, Artificial Sequence
  Description of Artificial Sequence: Synthetic oligonucleotide
  Target: LAMA2; (-) strand; PAM type: YTN; PAM sequence: TTT
caacttccttcagaatcaga

SEQ ID NO: 214595 - DNA, 20 bp, Artificial Sequence
  Description of Artificial Sequence: Synthetic oligonucleotide
  Target: LAMA2; (-) strand; PAM type: YTN; PAM sequence: TTT
tcaacttccttcagaatcag

SEQ ID NO: 214596 - DNA, 20 bp, Artificial Sequence
  Description of Artificial Sequence: Synthetic oligonucleotide
  Target: LAMA2; (-) strand; PAM type: YTN; PAM sequence: CTT
ttcaacttccttcagaatca

SEQ ID NO: 214597 - DNA, 20 bp, Artificial Sequence
  Description of Artificial Sequence: Synthetic oligonucleotide
  Target: LAMA2; (-) strand; PAM type: YTN; PAM sequence: CTA
tcttttcaacttccttcaga

SEQ ID NO: 214598 - DNA, 20 bp, Artificial Sequence
  Description of Artificial Sequence: Synthetic oligonucleotide
  Target: LAMA2; (-) strand; PAM type: YTN; PAM sequence: TTG
gatacagcaaaggaaaacta

SEQ ID NO: 214599 - DNA, 20 bp, Artificial Sequence
  Description of Artificial Sequence: Synthetic oligonucleotide
  Target: LAMA2; (-) strand; PAM type: YTN; PAM sequence: TTA
aatcaaatgtagaaaaggat

SEQ ID NO: 214600 - DNA, 20 bp, Artificial Sequence
  Description of Artificial Sequence: Synthetic oligonucleotide
  Target: LAMA2; (-) strand; PAM type: YTN; PAM sequence: CTT
aaatcaaatgtagaaaagga

SEQ ID NO: 214601 - DNA, 20 bp, Artificial Sequence
  Description of Artificial Sequence: Synthetic oligonucleotide
  Target: LAMA2; (-) strand; PAM type: YTN; PAM sequence: TTC
ttaaatcaaatgtagaaaag

SEQ ID NO: 214602 - DNA, 20 bp, Artificial Sequence
  Description of Artificial Sequence: Synthetic oligonucleotide
  Target: LAMA2; (-) strand; PAM type: YTN; PAM sequence: TTT
cttaaatcaaatgtagaaaa

SEQ ID NO: 214603 - DNA, 20 bp, Artificial Sequence
  Description of Artificial Sequence: Synthetic oligonucleotide
  Target: LAMA2; (-) strand; PAM type: YTN; PAM sequence: TTG
acatttcttaaatcaaatgt

SEQ ID NO: 214604 - DNA, 20 bp, Artificial Sequence
  Description of Artificial Sequence: Synthetic oligonucleotide
  Target: LAMA2; (-) strand; PAM type: YTN; PAM sequence: TTA
aattgacatttcttaaatca

SEQ ID NO: 214605 - DNA, 20 bp, Artificial Sequence
  Description of Artificial Sequence: Synthetic oligonucleotide
  Target: LAMA2; (-) strand; PAM type: YTN; PAM sequence: TTC
aatatcagtatcaataaaaa

SEQ ID NO: 214606 - DNA, 20 bp, Artificial Sequence
  Description of Artificial Sequence: Synthetic oligonucleotide
  Target: LAMA2; (-) strand; PAM type: YTN; PAM sequence: TTT
caatatcagtatcaataaaa

SEQ ID NO: 214607 - DNA, 20 bp, Artificial Sequence
  Description of Artificial Sequence: Synthetic oligonucleotide
  Target: LAMA2; (-) strand; PAM type: YTN; PAM sequence: TTT
tcaatatcagtatcaataaa

SEQ ID NO: 214608 - DNA, 20 bp, Artificial Sequence
  Description of Artificial Sequence: Synthetic oligonucleotide
  Target: LAMA2; (-) strand; PAM type: YTN; PAM sequence: TTA
tgtattttcaatatcagtat

SEQ ID NO: 214609 - DNA, 20 bp, Artificial Sequence
  Description of Artificial Sequence: Synthetic oligonucleotide
  Target: LAMA2; (-) strand; PAM type: YTN; PAM sequence: TTT
atgtattttcaatatcagta

SEQ ID NO: 214610 - DNA, 20 bp, Artificial Sequence
  Description of Artificial Sequence: Synthetic oligonucleotide
  Target: LAMA2; (-) strand; PAM type: YTN; PAM sequence: TTT
tatgtattttcaatatcagt

SEQ ID NO: 214611 - DNA, 20 bp, Artificial Sequence
  Description of Artificial Sequence: Synthetic oligonucleotide
  Target: LAMA2; (-) strand; PAM type: YTN; PAM sequence: TTG
gattttatgtattttcaata

SEQ ID NO: 214612 - DNA, 20 bp, Artificial Sequence
  Description of Artificial Sequence: Synthetic oligonucleotide
  Target: LAMA2; (-) strand; PAM type: YTN; PAM sequence: TTT
ggattttatgtattttcaat

SEQ ID NO: 214613 - DNA, 20 bp, Artificial Sequence
  Description of Artificial Sequence: Synthetic oligonucleotide
  Target: LAMA2; (-) strand; PAM type: YTN; PAM sequence: CTT
tggattttatgtattttcaa

SEQ ID NO: 214614 - DNA, 20 bp, Artificial Sequence
  Description of Artificial Sequence: Synthetic oligonucleotide
  Target: LAMA2; (-) strand; PAM type: YTN; PAM sequence: TTC
tttggattttatgtattttc

SEQ ID NO: 214615 - DNA, 20 bp, Artificial Sequence
  Description of Artificial Sequence: Synthetic oligonucleotide
  Target: LAMA2; (-) strand; PAM type: YTN; PAM sequence: CTC
attctttggattttatgtat

SEQ ID NO: 214616 - DNA, 20 bp, Artificial Sequence
  Description of Artificial Sequence: Synthetic oligonucleotide
  Target: LAMA2; (-) strand; PAM type: YTN; PAM sequence: TTA
tctcattctttggattttat

SEQ ID NO: 214617 - DNA, 20 bp, Artificial Sequence
  Description of Artificial Sequence: Synthetic oligonucleotide
  Target: LAMA2; (-) strand; PAM type: YTN; PAM sequence: TTT
atctcattctttggatttta

SEQ ID NO: 214618 - DNA, 20 bp, Artificial Sequence
  Description of Artificial Sequence: Synthetic oligonucleotide
  Target: LAMA2; (-) strand; PAM type: YTN; PAM sequence: CTA
tagaaatatgacacatatgt

SEQ ID NO: 214619 - DNA, 20 bp, Artificial Sequence
  Description of Artificial Sequence: Synthetic oligonucleotide
  Target: LAMA2; (-) strand; PAM type: YTN; PAM sequence: TTG
gtcaaaaaaatctatagaaa

SEQ ID NO: 214620 - DNA, 20 bp, Artificial Sequence
  Description of Artificial Sequence: Synthetic oligonucleotide
  Target: LAMA2; (-) strand; PAM type: YTN; PAM sequence: TTC
aaaataaaatgttggtcaaa

SEQ ID NO: 214621 - DNA, 20 bp, Artificial Sequence
  Description of Artificial Sequence: Synthetic oligonucleotide
  Target: LAMA2; (-) strand; PAM type: YTN; PAM sequence: TTT
caaaataaaatgttggtcaa

SEQ ID NO: 214622 - DNA, 20 bp, Artificial Sequence
  Description of Artificial Sequence: Synthetic oligonucleotide
  Target: LAMA2; (-) strand; PAM type: YTN; PAM sequence: TTT
tcaaaataaaatgttggtca

SEQ ID NO: 214623 - DNA, 20 bp, Artificial Sequence
  Description of Artificial Sequence: Synthetic oligonucleotide
  Target: LAMA2; (-) strand; PAM type: YTN; PAM sequence: TTA
ccaagtgcatgaaaattttc

SEQ ID NO: 214624 - DNA, 20 bp, Artificial Sequence
  Description of Artificial Sequence: Synthetic oligonucleotide
  Target: LAMA2; (-) strand; PAM type: YTN; PAM sequence: CTT
accaagtgcatgaaaatttt

SEQ ID NO: 214625 - DNA, 20 bp, Artificial Sequence
  Description of Artificial Sequence: Synthetic oligonucleotide
  Target: LAMA2; (-) strand; PAM type: YTN; PAM sequence: TTC
aaccttaccaagtgcatgaa

SEQ ID NO: 214626 - DNA, 20 bp, Artificial Sequence
  Description of Artificial Sequence: Synthetic oligonucleotide
  Target: LAMA2; (-) strand; PAM type: YTN; PAM sequence: TTT
caaccttaccaagtgcatga

SEQ ID NO: 214627 - DNA, 20 bp, Artificial Sequence
  Description of Artificial Sequence: Synthetic oligonucleotide
  Target: LAMA2; (-) strand; PAM type: YTN; PAM sequence: CTT
tcaaccttaccaagtgcatg

SEQ ID NO: 214628 - DNA, 20 bp, Artificial Sequence
  Description of Artificial Sequence: Synthetic oligonucleotide
  Target: LAMA2; (-) strand; PAM type: YTN; PAM sequence: TTC
tttcaaccttaccaagtgca

SEQ ID NO: 214629 - DNA, 20 bp, Artificial Sequence
  Description of Artificial Sequence: Synthetic oligonucleotide
  Target: LAMA2; (-) strand; PAM type: YTN; PAM sequence: CTG
tatgattctttcaaccttac

SEQ ID NO: 214630 - DNA, 20 bp, Artificial Sequence
  Description of Artificial Sequence: Synthetic oligonucleotide
  Target: LAMA2; (-) strand; PAM type: YTN; PAM sequence: TTC
actgtatgattctttcaacc

SEQ ID NO: 214631 - DNA, 20 bp, Artificial Sequence
  Description of Artificial Sequence: Synthetic oligonucleotide
  Target: LAMA2; (-) strand; PAM type: YTN; PAM sequence: TTC
gagtacatagtgttcactgt

SEQ ID NO: 214632 - DNA, 20 bp, Artificial Sequence
  Description of Artificial Sequence: Synthetic oligonucleotide
  Target: LAMA2; (-) strand; PAM type: YTN; PAM sequence: TTT
cgagtacatagtgttcactg

SEQ ID NO: 214633 - DNA, 20 bp, Artificial Sequence
  Description of Artificial Sequence: Synthetic oligonucleotide
  Target: LAMA2; (-) strand; PAM type: YTN; PAM sequence: CTA
gatttcgagtacatagtgtt

SEQ ID NO: 214634 - DNA, 20 bp, Artificial Sequence
  Description of Artificial Sequence: Synthetic oligonucleotide
  Target: LAMA2; (-) strand; PAM type: YTN; PAM sequence: TTA
gaatctagatttcgagtaca

SEQ ID NO: 214635 - DNA, 20 bp, Artificial Sequence
  Description of Artificial Sequence: Synthetic oligonucleotide
  Target: LAMA2; (-) strand; PAM type: YTN; PAM sequence: TTT
agaatctagatttcgagtac

SEQ ID NO: 214636 - DNA, 20 bp, Artificial Sequence
  Description of Artificial Sequence: Synthetic oligonucleotide
  Target: LAMA2; (-) strand; PAM type: YTN; PAM sequence: TTT
tagaatctagatttcgagta

SEQ ID NO: 214637 - DNA, 20 bp, Artificial Sequence
  Description of Artificial Sequence: Synthetic oligonucleotide
  Target: LAMA2; (-) strand; PAM type: YTN; PAM sequence: CTA
attttagaatctagatttcg

SEQ ID NO: 214638 - DNA, 20 bp, Artificial Sequence
  Description of Artificial Sequence: Synthetic oligonucleotide
  Target: LAMA2; (-) strand; PAM type: YTN; PAM sequence: TTG
gcctaattttagaatctaga

SEQ ID NO: 214639 - DNA, 20 bp, Artificial Sequence
  Description of Artificial Sequence: Synthetic oligonucleotide
  Target: LAMA2; (-) strand; PAM type: YTN; PAM sequence: CTT
ggcctaattttagaatctag

SEQ ID NO: 214640 - DNA, 20 bp, Artificial Sequence
  Description of Artificial Sequence: Synthetic oligonucleotide
  Target: LAMA2; (-) strand; PAM type: YTN; PAM sequence: CTA
tgcttggcctaattttagaa

SEQ ID NO: 214641 - DNA, 20 bp, Artificial Sequence
  Description of Artificial Sequence: Synthetic oligonucleotide
  Target: LAMA2; (-) strand; PAM type: YTN; PAM sequence: TTA
caggcatcagccactatgct

SEQ ID NO: 214642 - DNA, 20 bp, Artificial Sequence
  Description of Artificial Sequence: Synthetic oligonucleotide
  Target: LAMA2; (-) strand; PAM type: YTN; PAM sequence: CTG
ggattacaggcatcagccac

SEQ ID NO: 214643 - DNA, 20 bp, Artificial Sequence
  Description of Artificial Sequence: Synthetic oligonucleotide
  Target: LAMA2; (-) strand; PAM type: YTN; PAM sequence: CTC
ccaaatccctgggattacag

SEQ ID NO: 214644 - DNA, 20 bp, Artificial Sequence
  Description of Artificial Sequence: Synthetic oligonucleotide
  Target: LAMA2; (-) strand; PAM type: YTN; PAM sequence: CTC
agcctcccaaatccctggga

SEQ ID NO: 214645 - DNA, 20 bp, Artificial Sequence
  Description of Artificial Sequence: Synthetic oligonucleotide
  Target: LAMA2; (-) strand; PAM type: YTN; PAM sequence: CTC
ccacctcagcctcccaaatc

SEQ ID NO: 214646 - DNA, 20 bp, Artificial Sequence
  Description of Artificial Sequence: Synthetic oligonucleotide
  Target: LAMA2; (-) strand; PAM type: YTN; PAM sequence: CTC
aggcaatgctcccacctcag

SEQ ID NO: 214647 - DNA, 20 bp, Artificial Sequence
  Description of Artificial Sequence: Synthetic oligonucleotide
  Target: LAMA2; (-) strand; PAM type: YTN; PAM sequence: CTG
ccctcaggcaatgctcccac

SEQ ID NO: 214648 - DNA, 20 bp, Artificial Sequence
  Description of Artificial Sequence: Synthetic oligonucleotide
  Target: LAMA2; (-) strand; PAM type: YTN; PAM sequence: TTA
aaatcctgccctcaggcaat

SEQ ID NO: 214649 - DNA, 20 bp, Artificial Sequence
  Description of Artificial Sequence: Synthetic oligonucleotide
  Target: LAMA2; (-) strand; PAM type: YTN; PAM sequence: CTT
aaaatcctgccctcaggcaa

SEQ ID NO: 214650 - DNA, 20 bp, Artificial Sequence
  Description of Artificial Sequence: Synthetic oligonucleotide
  Target: LAMA2; (-) strand; PAM type: YTN; PAM sequence: CTG
gtcttaaaatcctgccctca

SEQ ID NO: 214651 - DNA, 20 bp, Artificial Sequence
  Description of Artificial Sequence: Synthetic oligonucleotide
  Target: LAMA2; (-) strand; PAM type: YTN; PAM sequence: TTG
cccatgctggtcttaaaatc

SEQ ID NO: 214652 - DNA, 20 bp, Artificial Sequence
  Description of Artificial Sequence: Synthetic oligonucleotide
  Target: LAMA2; (-) strand; PAM type: YTN; PAM sequence: CTA
tgttgcccatgctggtctta

SEQ ID NO: 214653 - DNA, 20 bp, Artificial Sequence
  Description of Artificial Sequence: Synthetic oligonucleotide
  Target: LAMA2; (-) strand; PAM type: YTN; PAM sequence: CTC
actatgttgcccatgctggt

SEQ ID NO: 214654 - DNA, 20 bp, Artificial Sequence
  Description of Artificial Sequence: Synthetic oligonucleotide
  Target: LAMA2; (-) strand; PAM type: YTN; PAM sequence: TTG
gtagagacatggtctcacta

SEQ ID NO: 214655 - DNA, 20 bp, Artificial Sequence
  Description of Artificial Sequence: Synthetic oligonucleotide
  Target: LAMA2; (-) strand; PAM type: YTN; PAM sequence: TTT
ggtagagacatggtctcact

SEQ ID NO: 214656 - DNA, 20 bp, Artificial Sequence
  Description of Artificial Sequence: Synthetic oligonucleotide
  Target: LAMA2; (-) strand; PAM type: YTN; PAM sequence: TTT
tggtagagacatggtctcac

SEQ ID NO: 214657 - DNA, 20 bp, Artificial Sequence
  Description of Artificial Sequence: Synthetic oligonucleotide
  Target: LAMA2; (-) strand; PAM type: YTN; PAM sequence: TTT
ttggtagagacatggtctca

SEQ ID NO: 214658 - DNA, 20 bp, Artificial Sequence
  Description of Artificial Sequence: Synthetic oligonucleotide
  Target: LAMA2; (-) strand; PAM type: YTN; PAM sequence: TTT
tttggtagagacatggtctc

SEQ ID NO: 214659 - DNA, 20 bp, Artificial Sequence
  Description of Artificial Sequence: Synthetic oligonucleotide
  Target: LAMA2; (-) strand; PAM type: YTN; PAM sequence: TTT
ttttggtagagacatggtct

SEQ ID NO: 214660 - DNA, 20 bp, Artificial Sequence
  Description of Artificial Sequence: Synthetic oligonucleotide
  Target: LAMA2; (-) strand; PAM type: YTN; PAM sequence: TTT
tttttggtagagacatggtc

SEQ ID NO: 214661 - DNA, 20 bp, Artificial Sequence
  Description of Artificial Sequence: Synthetic oligonucleotide
  Target: LAMA2; (-) strand; PAM type: YTN; PAM sequence: CTT
ttttttggtagagacatggt

SEQ ID NO: 214662 - DNA, 20 bp, Artificial Sequence
  Description of Artificial Sequence: Synthetic oligonucleotide
  Target: LAMA2; (-) strand; PAM type: YTN; PAM sequence: TTA
cttttttttggtagagacat

SEQ ID NO: 214663 - DNA, 20 bp, Artificial Sequence
  Description of Artificial Sequence: Synthetic oligonucleotide
  Target: LAMA2; (-) strand; PAM type: YTN; PAM sequence: CTT
acttttttttggtagagaca

SEQ ID NO: 214664 - DNA, 20 bp, Artificial Sequence
  Description of Artificial Sequence: Synthetic oligonucleotide
  Target: LAMA2; (-) strand; PAM type: YTN; PAM sequence: CTG
gccttacttttttttggtag

SEQ ID NO: 214665 - DNA, 20 bp, Artificial Sequence
  Description of Artificial Sequence: Synthetic oligonucleotide
  Target: LAMA2; (-) strand; PAM type: YTN; PAM sequence: CTA
caggcatgcagcaccgtgct

SEQ ID NO: 214666 - DNA, 20 bp, Artificial Sequence
  Description of Artificial Sequence: Synthetic oligonucleotide
  Target: LAMA2; (-) strand; PAM type: YTN; PAM sequence: CTG
taactacaggcatgcagcac

SEQ ID NO: 214667 - DNA, 20 bp, Artificial Sequence
  Description of Artificial Sequence: Synthetic oligonucleotide
  Target: LAMA2; (-) strand; PAM type: YTN; PAM sequence: CTG
agtagctgtaactacaggca

SEQ ID NO: 214668 - DNA, 20 bp, Artificial Sequence
  Description of Artificial Sequence: Synthetic oligonucleotide
  Target: LAMA2; (-) strand; PAM type: YTN; PAM sequence: TTC
ctgagtagctgtaactacag

SEQ ID NO: 214669 - DNA, 20 bp, Artificial Sequence
  Description of Artificial Sequence: Synthetic oligonucleotide
  Target: LAMA2; (-) strand; PAM type: YTN; PAM sequence: CTT
cctgagtagctgtaactaca

SEQ ID NO: 214670 - DNA, 20 bp, Artificial Sequence
  Description of Artificial Sequence: Synthetic oligonucleotide
  Target: LAMA2; (-) strand; PAM type: YTN; PAM sequence: CTC
agcttcctgagtagctgtaa

SEQ ID NO: 214671 - DNA, 20 bp, Artificial Sequence
  Description of Artificial Sequence: Synthetic oligonucleotide
  Target: LAMA2; (-) strand; PAM type: YTN; PAM sequence: CTG
cctcagcttcctgagtagct

SEQ ID NO: 214672 - DNA, 20 bp, Artificial Sequence
  Description of Artificial Sequence: Synthetic oligonucleotide
  Target: LAMA2; (-) strand; PAM type: YTN; PAM sequence: CTC
ctgcctcagcttcctgagta

SEQ ID NO: 214673 - DNA, 20 bp, Artificial Sequence
  Description of Artificial Sequence: Synthetic oligonucleotide
  Target: LAMA2; (-) strand; PAM type: YTN; PAM sequence: CTC
aagcaatcctcctgcctcag

SEQ ID NO: 214674 - DNA, 20 bp, Artificial Sequence
  Description of Artificial Sequence: Synthetic oligonucleotide
  Target: LAMA2; (-) strand; PAM type: YTN; PAM sequence: CTG
ggctcaagcaatcctcctgc

SEQ ID NO: 214675 - DNA, 20 bp, Artificial Sequence
  Description of Artificial Sequence: Synthetic oligonucleotide
  Target: LAMA2; (-) strand; PAM type: YTN; PAM sequence: CTC
ctgggctcaagcaatcctcc

SEQ ID NO: 214676 - DNA, 20 bp, Artificial Sequence
  Description of Artificial Sequence: Synthetic oligonucleotide
  Target: LAMA2; (-) strand; PAM type: YTN; PAM sequence: TTG
aactcctgggctcaagcaat

SEQ ID NO: 214677 - DNA, 20 bp, Artificial Sequence
  Description of Artificial Sequence: Synthetic oligonucleotide
  Target: LAMA2; (-) strand; PAM type: YTN; PAM sequence: CTT
gaactcctgggctcaagcaa

SEQ ID NO: 214678 - DNA, 20 bp, Artificial Sequence
  Description of Artificial Sequence: Synthetic oligonucleotide
  Target: LAMA2; (-) strand; PAM type: YTN; PAM sequence: CTG
taaccttgaactcctgggct

SEQ ID NO: 214679 - DNA, 20 bp, Artificial Sequence
  Description of Artificial Sequence: Synthetic oligonucleotide
  Target: LAMA2; (-) strand; PAM type: YTN; PAM sequence: TTC
actgtaaccttgaactcctg

SEQ ID NO: 214680 - DNA, 20 bp, Artificial Sequence
  Description of Artificial Sequence: Synthetic oligonucleotide
  Target: LAMA2; (-) strand; PAM type: YTN; PAM sequence: CTT
cactgtaaccttgaactcct

SEQ ID NO: 214681 - DNA, 20 bp, Artificial Sequence
  Description of Artificial Sequence: Synthetic oligonucleotide
  Target: LAMA2; (-) strand; PAM type: YTN; PAM sequence: TTA
taatacttcactgtaacctt

SEQ ID NO: 214682 - DNA, 20 bp, Artificial Sequence
  Description of Artificial Sequence: Synthetic oligonucleotide
  Target: LAMA2; (-) strand; PAM type: YTN; PAM sequence: TTG
gagtgcaatagcatgattat

SEQ ID NO: 214683 - DNA, 20 bp, Artificial Sequence
  Description of Artificial Sequence: Synthetic oligonucleotide
  Target: LAMA2; (-) strand; PAM type: YTN; PAM sequence: TTG
cccaggttggagtgcaatag

SEQ ID NO: 214684 - DNA, 20 bp, Artificial Sequence
  Description of Artificial Sequence: Synthetic oligonucleotide
  Target: LAMA2; (-) strand; PAM type: YTN; PAM sequence: CTG
ttgcccaggttggagtgcaa

SEQ ID NO: 214685 - DNA, 20 bp, Artificial Sequence
  Description of Artificial Sequence: Synthetic oligonucleotide
  Target: LAMA2; (-) strand; PAM type: YTN; PAM sequence: TTC
tgttgcccaggttggagtgc

SEQ ID NO: 214686 - DNA, 20 bp, Artificial Sequence
  Description of Artificial Sequence: Synthetic oligonucleotide
  Target: LAMA2; (-) strand; PAM type: YTN; PAM sequence: CTC
attctgttgcccaggttgga

SEQ ID NO: 214687 - DNA, 20 bp, Artificial Sequence
  Description of Artificial Sequence: Synthetic oligonucleotide
  Target: LAMA2; (-) strand; PAM type: YTN; PAM sequence: TTG
agacagggtctcattctgtt

SEQ ID NO: 214688 - DNA, 20 bp, Artificial Sequence
  Description of Artificial Sequence: Synthetic oligonucleotide
  Target: LAMA2; (-) strand; PAM type: YTN; PAM sequence: TTT
gagacagggtctcattctgt

SEQ ID NO: 214689 - DNA, 20 bp, Artificial Sequence
  Description of Artificial Sequence: Synthetic oligonucleotide
  Target: LAMA2; (-) strand; PAM type: YTN; PAM sequence: TTT
tgagacagggtctcattctg

SEQ ID NO: 214690 - DNA, 20 bp, Artificial Sequence
  Description of Artificial Sequence: Synthetic oligonucleotide
  Target: LAMA2; (-) strand; PAM type: YTN; PAM sequence: TTT
ttgagacagggtctcattct

SEQ ID NO: 214691 - DNA, 20 bp, Artificial Sequence
  Description of Artificial Sequence: Synthetic oligonucleotide
  Target: LAMA2; (-) strand; PAM type: YTN; PAM sequence: TTT
tttgagacagggtctcattc

SEQ ID NO: 214692 - DNA, 20 bp, Artificial Sequence
  Description of Artificial Sequence: Synthetic oligonucleotide
  Target: LAMA2; (-) strand; PAM type: YTN; PAM sequence: TTT
ttttgagacagggtctcatt

SEQ ID NO: 214693 - DNA, 20 bp, Artificial Sequence
  Description of Artificial Sequence: Synthetic oligonucleotide
  Target: LAMA2; (-) strand; PAM type: YTN; PAM sequence: TTT
tttttgagacagggtctcat

SEQ ID NO: 214694 - DNA, 20 bp, Artificial Sequence
  Description of Artificial Sequence: Synthetic oligonucleotide
  Target: LAMA2; (-) strand; PAM type: YTN; PAM sequence: TTT
ttttttgagacagggtctca

SEQ ID NO: 214695 - DNA, 20 bp, Artificial Sequence
  Description of Artificial Sequence: Synthetic oligonucleotide
  Target: LAMA2; (-) strand; PAM type: YTN; PAM sequence: TTT
tttttttgagacagggtctc

SEQ ID NO: 214696 - DNA, 20 bp, Artificial Sequence
  Description of Artificial Sequence: Synthetic oligonucleotide
  Target: LAMA2; (-) strand; PAM type: YTN; PAM sequence: TTT
ttttttttgagacagggtct

SEQ ID NO: 214697 - DNA, 20 bp, Artificial Sequence
  Description of Artificial Sequence: Synthetic oligonucleotide
  Target: LAMA2; (-) strand; PAM type: YTN; PAM sequence: TTT
tttttttttgagacagggtc

SEQ ID NO: 214698 - DNA, 20 bp, Artificial Sequence
  Description of Artificial Sequence: Synthetic oligonucleotide
  Target: LAMA2; (-) strand; PAM type: YTN; PAM sequence: TTT
ttttttttttgagacagggt

SEQ ID NO: 214699 - DNA, 20 bp, Artificial Sequence
  Description of Artificial Sequence: Synthetic oligonucleotide
  Target: LAMA2; (-) strand; PAM type: YTN; PAM sequence: TTT
tttttttttttgagacaggg

SEQ ID NO: 214700 - DNA, 20 bp, Artificial Sequence
  Description of Artificial Sequence: Synthetic oligonucleotide
  Target: LAMA2; (-) strand; PAM type: YTN; PAM sequence: CTA
ttttttttttttttgagaca

SEQ ID NO: 214701 - DNA, 20 bp, Artificial Sequence
  Description of Artificial Sequence: Synthetic oligonucleotide
  Target: LAMA2; (-) strand; PAM type: YTN; PAM sequence: TTA
actattttttttttttttga

SEQ ID NO: 214702 - DNA, 20 bp, Artificial Sequence
  Description of Artificial Sequence: Synthetic oligonucleotide
  Target: LAMA2; (-) strand; PAM type: YTN; PAM sequence: CTG
gcattaactatttttttttt

SEQ ID NO: 214703 - DNA, 20 bp, Artificial Sequence
  Description of Artificial Sequence: Synthetic oligonucleotide
  Target: LAMA2; (-) strand; PAM type: YTN; PAM sequence: TTA
caggcatgagtcaccacgcc

SEQ ID NO: 214704 - DNA, 20 bp, Artificial Sequence
  Description of Artificial Sequence: Synthetic oligonucleotide
  Target: LAMA2; (-) strand; PAM type: YTN; PAM sequence: TTA
ggattacaggcatgagtcac

SEQ ID NO: 214705 - DNA, 20 bp, Artificial Sequence
  Description of Artificial Sequence: Synthetic oligonucleotide
  Target: LAMA2; (-) strand; PAM type: YTN; PAM sequence: CTG
aaagtgttaggattacaggc

SEQ ID NO: 214706 - DNA, 20 bp, Artificial Sequence
  Description of Artificial Sequence: Synthetic oligonucleotide
  Target: LAMA2; (-) strand; PAM type: YTN; PAM sequence: CTC
tgaaagtgttaggattacag

SEQ ID NO: 214707 - DNA, 20 bp, Artificial Sequence
  Description of Artificial Sequence: Synthetic oligonucleotide
  Target: LAMA2; (-) strand; PAM type: YTN; PAM sequence: CTC
agcctctgaaagtgttagga

SEQ ID NO: 214708 - DNA, 20 bp, Artificial Sequence
  Description of Artificial Sequence: Synthetic oligonucleotide
  Target: LAMA2; (-) strand; PAM type: YTN; PAM sequence: CTG
cctcagcctctgaaagtgtt

SEQ ID NO: 214709 - DNA, 20 bp, Artificial Sequence
  Description of Artificial Sequence: Synthetic oligonucleotide
  Target: LAMA2; (-) strand; PAM type: YTN; PAM sequence: CTG
atccacctgcctcagcctct

SEQ ID NO: 214710 - DNA, 20 bp, Artificial Sequence
  Description of Artificial Sequence: Synthetic oligonucleotide
  Target: LAMA2; (-) strand; PAM type: YTN; PAM sequence: CTC
aactgatccacctgcctcag

SEQ ID NO: 214711 - DNA, 20 bp, Artificial Sequence
  Description of Artificial Sequence: Synthetic oligonucleotide
  Target: LAMA2; (-) strand; PAM type: YTN; PAM sequence: CTG
acctcaactgatccacctgc

SEQ ID NO: 214712 - DNA, 20 bp, Artificial Sequence
  Description of Artificial Sequence: Synthetic oligonucleotide
  Target: LAMA2; (-) strand; PAM type: YTN; PAM sequence: CTC
ctgacctcaactgatccacc

SEQ ID NO: 214713 - DNA, 20 bp, Artificial Sequence
  Description of Artificial Sequence: Synthetic oligonucleotide
  Target: LAMA2; (-) strand; PAM type: YTN; PAM sequence: TTG
aactcctgacctcaactgat

SEQ ID NO: 214714 - DNA, 20 bp, Artificial Sequence
  Description of Artificial Sequence: Synthetic oligonucleotide
  Target: LAMA2; (-) strand; PAM type: YTN; PAM sequence: TTT
gaactcctgacctcaactga

SEQ ID NO: 214715 - DNA, 20 bp, Artificial Sequence
  Description of Artificial Sequence: Synthetic oligonucleotide
  Target: LAMA2; (-) strand; PAM type: YTN; PAM sequence: TTT
tgaactcctgacctcaactg

SEQ ID NO: 214716 - DNA, 20 bp, Artificial Sequence
  Description of Artificial Sequence: Synthetic oligonucleotide
  Target: LAMA2; (-) strand; PAM type: YTN; PAM sequence: CTG
gttttgaactcctgacctca

SEQ ID NO: 214717 - DNA, 20 bp, Artificial Sequence
  Description of Artificial Sequence: Synthetic oligonucleotide
  Target: LAMA2; (-) strand; PAM type: YTN; PAM sequence: TTG
ccatatcagccaggctggtt

SEQ ID NO: 214718 - DNA, 20 bp, Artificial Sequence
  Description of Artificial Sequence: Synthetic oligonucleotide
  Target: LAMA2; (-) strand; PAM type: YTN; PAM sequence: TTT
gccatatcagccaggctggt

SEQ ID NO: 214719 - DNA, 20 bp, Artificial Sequence
  Description of Artificial Sequence: Synthetic oligonucleotide
  Target: LAMA2; (-) strand; PAM type: YTN; PAM sequence: TTT
tgccatatcagccaggctgg

SEQ ID NO: 214720 - DNA, 20 bp, Artificial Sequence
  Description of Artificial Sequence: Synthetic oligonucleotide
  Target: LAMA2; (-) strand; PAM type: YTN; PAM sequence: TTA
gtagagacggggttttgcca

SEQ ID NO: 214721 - DNA, 20 bp, Artificial Sequence
  Description of Artificial Sequence: Synthetic oligonucleotide
  Target: LAMA2; (-) strand; PAM type: YTN; PAM sequence: TTT
agtagagacggggttttgcc

SEQ ID NO: 214722 - DNA, 20 bp, Artificial Sequence
  Description of Artificial Sequence: Synthetic oligonucleotide
  Target: LAMA2; (-) strand; PAM type: YTN; PAM sequence: TTT
tagtagagacggggttttgc

SEQ ID NO: 214723 - DNA, 20 bp, Artificial Sequence
  Description of Artificial Sequence: Synthetic oligonucleotide
  Target: LAMA2; (-) strand; PAM type: YTN; PAM sequence: TTT
ttagtagagacggggttttg

SEQ ID NO: 214724 - DNA, 20 bp, Artificial Sequence
  Description of Artificial Sequence: Synthetic oligonucleotide
  Target: LAMA2; (-) strand; PAM type: YTN; PAM sequence: TTG
tatttttagtagagacgggg

SEQ ID NO: 214725 - DNA, 20 bp, Artificial Sequence
  Description of Artificial Sequence: Synthetic oligonucleotide
  Target: LAMA2; (-) strand; PAM type: YTN; PAM sequence: TTT
gtatttttagtagagacggg

SEQ ID NO: 214726 - DNA, 20 bp, Artificial Sequence
  Description of Artificial Sequence: Synthetic oligonucleotide
  Target: LAMA2; (-) strand; PAM type: YTN; PAM sequence: TTT
tgtatttttagtagagacgg

SEQ ID NO: 214727 - DNA, 20 bp, Artificial Sequence
  Description of Artificial Sequence: Synthetic oligonucleotide
  Target: LAMA2; (-) strand; PAM type: YTN; PAM sequence: TTT
ttgtatttttagtagagacg

SEQ ID NO: 214728 - DNA, 20 bp, Artificial Sequence
  Description of Artificial Sequence: Synthetic oligonucleotide
  Target: LAMA2; (-) strand; PAM type: YTN; PAM sequence: CTA
atttttgtatttttagtaga

SEQ ID NO: 214729 - DNA, 20 bp, Artificial Sequence
  Description of Artificial Sequence: Synthetic oligonucleotide
  Target: LAMA2; (-) strand; PAM type: YTN; PAM sequence: CTG
ccaccacgcccagctaattt

SEQ ID NO: 214730 - DNA, 20 bp, Artificial Sequence
  Description of Artificial Sequence: Synthetic oligonucleotide
  Target: LAMA2; (-) strand; PAM type: YTN; PAM sequence: TTA
caggagcctgccaccacgcc

SEQ ID NO: 214731 - DNA, 20 bp, Artificial Sequence
  Description of Artificial Sequence: Synthetic oligonucleotide
  Target: LAMA2; (-) strand; PAM type: YTN; PAM sequence: CTG
ggattacaggagcctgccac

SEQ ID NO: 214732 - DNA, 20 bp, Artificial Sequence
  Description of Artificial Sequence: Synthetic oligonucleotide
  Target: LAMA2; (-) strand; PAM type: YTN; PAM sequence: CTC
ccgagtagctgggattacag

SEQ ID NO: 214733 - DNA, 20 bp, Artificial Sequence
  Description of Artificial Sequence: Synthetic oligonucleotide
  Target: LAMA2; (-) strand; PAM type: YTN; PAM sequence: CTC
agcctcccgagtagctggga

SEQ ID NO: 214734 - DNA, 20 bp, Artificial Sequence
  Description of Artificial Sequence: Synthetic oligonucleotide
  Target: LAMA2; (-) strand; PAM type: YTN; PAM sequence: CTG
cctcagcctcccgagtagct

SEQ ID NO: 214735 - DNA, 20 bp, Artificial Sequence
  Description of Artificial Sequence: Synthetic oligonucleotide
  Target: LAMA2; (-) strand; PAM type: YTN; PAM sequence: CTC
ctgcctcagcctcccgagta

SEQ ID NO: 214736 - DNA, 20 bp, Artificial Sequence
  Description of Artificial Sequence: Synthetic oligonucleotide
  Target: LAMA2; (-) strand; PAM type: YTN; PAM sequence: TTC
tcctgcctcagcctcccgag

SEQ ID NO: 214737 - DNA, 20 bp, Artificial Sequence
  Description of Artificial Sequence: Synthetic oligonucleotide
  Target: LAMA2; (-) strand; PAM type: YTN; PAM sequence: TTC
aagtgattctcctgcctcag

SEQ ID NO: 214738 - DNA, 20 bp, Artificial Sequence
  Description of Artificial Sequence: Synthetic oligonucleotide
  Target: LAMA2; (-) strand; PAM type: YTN; PAM sequence: CTC
aggttcaagtgattctcctg

SEQ ID NO: 214739 - DNA, 20 bp, Artificial Sequence
  Description of Artificial Sequence: Synthetic oligonucleotide
  Target: LAMA2; (-) strand; PAM type: YTN; PAM sequence: CTC
tcaggttcaagtgattctcc

SEQ ID NO: 214740 - DNA, 20 bp, Artificial Sequence
  Description of Artificial Sequence: Synthetic oligonucleotide
  Target: LAMA2; (-) strand; PAM type: YTN; PAM sequence: CTC
cgcctctcaggttcaagtga

SEQ ID NO: 214741 - DNA, 20 bp, Artificial Sequence
  Description of Artificial Sequence: Synthetic oligonucleotide
  Target: LAMA2; (-) strand; PAM type: YTN; PAM sequence: CTG
caacctccgcctctcaggtt

SEQ ID NO: 214742 - DNA, 20 bp, Artificial Sequence
  Description of Artificial Sequence: Synthetic oligonucleotide
  Target: LAMA2; (-) strand; PAM type: YTN; PAM sequence: CTC
actgcaacctccgcctctca

SEQ ID NO: 214743 - DNA, 20 bp, Artificial Sequence
  Description of Artificial Sequence: Synthetic oligonucleotide
  Target: LAMA2; (-) strand; PAM type: YTN; PAM sequence: TTG
cccaggatggagtgcagtag

SEQ ID NO: 214744 - DNA, 20 bp, Artificial Sequence
  Description of Artificial Sequence: Synthetic oligonucleotide
  Target: LAMA2; (-) strand; PAM type: YTN; PAM sequence: CTG
ttgcccaggatggagtgcag

SEQ ID NO: 214745 - DNA, 20 bp, Artificial Sequence
  Description of Artificial Sequence: Synthetic oligonucleotide
  Target: LAMA2; (-) strand; PAM type: YTN; PAM sequence: CTC
tgttgcccaggatggagtgc

SEQ ID NO: 214746 - DNA, 20 bp, Artificial Sequence
  Description of Artificial Sequence: Synthetic oligonucleotide
  Target: LAMA2; (-) strand; PAM type: YTN; PAM sequence: CTC
gctctgttgcccaggatgga

SEQ ID NO: 214747 - DNA, 20 bp, Artificial Sequence
  Description of Artificial Sequence: Synthetic oligonucleotide
  Target: LAMA2; (-) strand; PAM type: YTN; PAM sequence: TTG
acatggagtctcgctctgtt

SEQ ID NO: 214748 - DNA, 20 bp, Artificial Sequence
  Description of Artificial Sequence: Synthetic oligonucleotide
  Target: LAMA2; (-) strand; PAM type: YTN; PAM sequence: TTA
ttgacatggagtctcgctct

SEQ ID NO: 214749 - DNA, 20 bp, Artificial Sequence
  Description of Artificial Sequence: Synthetic oligonucleotide
  Target: LAMA2; (-) strand; PAM type: YTN; PAM sequence: CTA
ttattgacatggagtctcgc

SEQ ID NO: 214750 - DNA, 20 bp, Artificial Sequence
  Description of Artificial Sequence: Synthetic oligonucleotide
  Target: LAMA2; (-) strand; PAM type: YTN; PAM sequence: TTA
ctattattgacatggagtct

SEQ ID NO: 214751 - DNA, 20 bp, Artificial Sequence
  Description of Artificial Sequence: Synthetic oligonucleotide
  Target: LAMA2; (-) strand; PAM type: YTN; PAM sequence: TTA
ttactattattgacatggag

SEQ ID NO: 214752 - DNA, 20 bp, Artificial Sequence
  Description of Artificial Sequence: Synthetic oligonucleotide
  Target: LAMA2; (-) strand; PAM type: YTN; PAM sequence: TTA
ttattactattattgacatg

SEQ ID NO: 214753 - DNA, 20 bp, Artificial Sequence
  Description of Artificial Sequence: Synthetic oligonucleotide
  Target: LAMA2; (-) strand; PAM type: YTN; PAM sequence: TTA
ttattattactattattgac

SEQ ID NO: 214754 - DNA, 20 bp, Artificial Sequence
  Description of Artificial Sequence: Synthetic oligonucleotide
  Target: LAMA2; (-) strand; PAM type: YTN; PAM sequence: TTA
tcattattattattactatt

SEQ ID NO: 214755 - DNA, 20 bp, Artificial Sequence
  Description of Artificial Sequence: Synthetic oligonucleotide
  Target: LAMA2; (-) strand; PAM type: YTN; PAM sequence: TTT
atcattattattattactat

SEQ ID NO: 214756 - DNA, 20 bp, Artificial Sequence
  Description of Artificial Sequence: Synthetic oligonucleotide
  Target: LAMA2; (-) strand; PAM type: YTN; PAM sequence: TTA
atttatcattattattatta

SEQ ID NO: 214757 - DNA, 20 bp, Artificial Sequence
  Description of Artificial Sequence: Synthetic oligonucleotide
  Target: LAMA2; (-) strand; PAM type: YTN; PAM sequence: TTA
aattaatttatcattattat

SEQ ID NO: 214758 - DNA, 20 bp, Artificial Sequence
  Description of Artificial Sequence: Synthetic oligonucleotide
  Target: LAMA2; (-) strand; PAM type: YTN; PAM sequence: CTC
aaacatgttaaattaattta

SEQ ID NO: 214759 - DNA, 20 bp, Artificial Sequence
  Description of Artificial Sequence: Synthetic oligonucleotide
  Target: LAMA2; (-) strand; PAM type: YTN; PAM sequence: CTA
ctcaaacatgttaaattaat

SEQ ID NO: 214760 - DNA, 20 bp, Artificial Sequence
  Description of Artificial Sequence: Synthetic oligonucleotide
  Target: LAMA2; (-) strand; PAM type: YTN; PAM sequence: CTC
cctactcaaacatgttaaat

SEQ ID NO: 214761 - DNA, 20 bp, Artificial Sequence
  Description of Artificial Sequence: Synthetic oligonucleotide
  Target: LAMA2; (-) strand; PAM type: YTN; PAM sequence: CTC
ctccctactcaaacatgtta

SEQ ID NO: 214762 - DNA, 20 bp, Artificial Sequence
  Description of Artificial Sequence: Synthetic oligonucleotide
  Target: LAMA2; (-) strand; PAM type: YTN; PAM sequence: TTC
agatggatagatatgtgata

SEQ ID NO: 214763 - DNA, 20 bp, Artificial Sequence
  Description of Artificial Sequence: Synthetic oligonucleotide
  Target: LAMA2; (-) strand; PAM type: YTN; PAM sequence: TTA
tgggtagatatgttcagatg

SEQ ID NO: 214764 - DNA, 20 bp, Artificial Sequence
  Description of Artificial Sequence: Synthetic oligonucleotide
  Target: LAMA2; (-) strand; PAM type: YTN; PAM sequence: TTT
atgggtagatatgttcagat

SEQ ID NO: 214765 - DNA, 20 bp, Artificial Sequence
  Description of Artificial Sequence: Synthetic oligonucleotide
  Target: LAMA2; (-) strand; PAM type: YTN; PAM sequence: TTA
aaagataaaatggatttatg

SEQ ID NO: 214766 - DNA, 20 bp, Artificial Sequence
  Description of Artificial Sequence: Synthetic oligonucleotide
  Target: LAMA2; (-) strand; PAM type: YTN; PAM sequence: TTG
cagtatattaaaagataaaa

SEQ ID NO: 214767 - DNA, 20 bp, Artificial Sequence
  Description of Artificial Sequence: Synthetic oligonucleotide
  Target: LAMA2; (-) strand; PAM type: YTN; PAM sequence: TTT
gcagtatattaaaagataaa

SEQ ID NO: 214768 - DNA, 20 bp, Artificial Sequence
  Description of Artificial Sequence: Synthetic oligonucleotide
  Target: LAMA2; (-) strand; PAM type: YTN; PAM sequence: TTC
atgatcatgtgtataggaat

SEQ ID NO: 214769 - DNA, 20 bp, Artificial Sequence
  Description of Artificial Sequence: Synthetic oligonucleotide
  Target: LAMA2; (-) strand; PAM type: YTN; PAM sequence: TTA
atgatattcatgatcatgtg

SEQ ID NO: 214770 - DNA, 20 bp, Artificial Sequence
  Description of Artificial Sequence: Synthetic oligonucleotide
  Target: LAMA2; (-) strand; PAM type: YTN; PAM sequence: CTC
cagttaatgatattcatgat

SEQ ID NO: 214771 - DNA, 20 bp, Artificial Sequence
  Description of Artificial Sequence: Synthetic oligonucleotide
  Target: LAMA2; (-) strand; PAM type: YTN; PAM sequence: TTA
actccagttaatgatattca

SEQ ID NO: 214772 - DNA, 20 bp, Artificial Sequence
  Description of Artificial Sequence: Synthetic oligonucleotide
  Target: LAMA2; (-) strand; PAM type: YTN; PAM sequence: TTT
aactccagttaatgatattc

SEQ ID NO: 214773 - DNA, 20 bp, Artificial Sequence
  Description of Artificial Sequence: Synthetic oligonucleotide
  Target: LAMA2; (-) strand; PAM type: YTN; PAM sequence: TTA
gcagtatttaactccagtta

SEQ ID NO: 214774 - DNA, 20 bp, Artificial Sequence
  Description of Artificial Sequence: Synthetic oligonucleotide
  Target: LAMA2; (-) strand; PAM type: YTN; PAM sequence: TTG
aaaaaaattagcagtattta

SEQ ID NO: 214775 - DNA, 20 bp, Artificial Sequence
  Description of Artificial Sequence: Synthetic oligonucleotide
  Target: LAMA2; (-) strand; PAM type: YTN; PAM sequence: CTT
gaaaaaaattagcagtattt

SEQ ID NO: 214776 - DNA, 20 bp, Artificial Sequence
  Description of Artificial Sequence: Synthetic oligonucleotide
  Target: LAMA2; (-) strand; PAM type: YTN; PAM sequence: TTG
agcttgaaaaaaattagcag

SEQ ID NO: 214777 - DNA, 20 bp, Artificial Sequence
  Description of Artificial Sequence: Synthetic oligonucleotide
  Target: LAMA2; (-) strand; PAM type: YTN; PAM sequence: TTT
gagcttgaaaaaaattagca

SEQ ID NO: 214778 - DNA, 20 bp, Artificial Sequence
  Description of Artificial Sequence: Synthetic oligonucleotide
  Target: LAMA2; (-) strand; PAM type: YTN; PAM sequence: TTC
aatgtagataaatttgagct

SEQ ID NO: 214779 - DNA, 20 bp, Artificial Sequence
  Description of Artificial Sequence: Synthetic oligonucleotide
  Target: LAMA2; (-) strand; PAM type: YTN; PAM sequence: TTT
caatgtagataaatttgagc

SEQ ID NO: 214780 - DNA, 20 bp, Artificial Sequence
  Description of Artificial Sequence: Synthetic oligonucleotide
  Target: LAMA2; (-) strand; PAM type: YTN; PAM sequence: TTA
tgcatttcaatgtagataaa

SEQ ID NO: 214781 - DNA, 20 bp, Artificial Sequence
  Description of Artificial Sequence: Synthetic oligonucleotide
  Target: LAMA2; (-) strand; PAM type: YTN; PAM sequence: TTT
atgcatttcaatgtagataa

SEQ ID NO: 214782 - DNA, 20 bp, Artificial Sequence
  Description of Artificial Sequence: Synthetic oligonucleotide
  Target: LAMA2; (-) strand; PAM type: YTN; PAM sequence: TTA
cacggggtgataatttatgc

SEQ ID NO: 214783 - DNA, 20 bp, Artificial Sequence
  Description of Artificial Sequence: Synthetic oligonucleotide
  Target: LAMA2; (-) strand; PAM type: YTN; PAM sequence: TTC
agtgagtgaatgttacacgg

SEQ ID NO: 214784 - DNA, 20 bp, Artificial Sequence
  Description of Artificial Sequence: Synthetic oligonucleotide
  Target: LAMA2; (-) strand; PAM type: YTN; PAM sequence: TTA
cattcagtgagtgaatgtta

SEQ ID NO: 214785 - DNA, 20 bp, Artificial Sequence
  Description of Artificial Sequence: Synthetic oligonucleotide
  Target: LAMA2; (-) strand; PAM type: YTN; PAM sequence: TTA
aatattacattcagtgagtg

SEQ ID NO: 214786 - DNA, 20 bp, Artificial Sequence
  Description of Artificial Sequence: Synthetic oligonucleotide
  Target: LAMA2; (-) strand; PAM type: YTN; PAM sequence: TTA
attaaatattacattcagtg

SEQ ID NO: 214787 - DNA, 20 bp, Artificial Sequence
  Description of Artificial Sequence: Synthetic oligonucleotide
  Target: LAMA2; (-) strand; PAM type: YTN; PAM sequence: TTG
ttaattaaatattacattca

SEQ ID NO: 214788 - DNA, 20 bp, Artificial Sequence
  Description of Artificial Sequence: Synthetic oligonucleotide
  Target: LAMA2; (-) strand; PAM type: YTN; PAM sequence: TTT
gttaattaaatattacattc

SEQ ID NO: 214789 - DNA, 20 bp, Artificial Sequence
  Description of Artificial Sequence: Synthetic oligonucleotide
  Target: LAMA2; (-) strand; PAM type: YTN; PAM sequence: TTA
taatggtgtatgtatttgtt

SEQ ID NO: 214790 - DNA, 20 bp, Artificial Sequence
  Description of Artificial Sequence: Synthetic oligonucleotide
  Target: LAMA2; (-) strand; PAM type: YTN; PAM sequence: TTG
tattataatggtgtatgtat

SEQ ID NO: 214791 - DNA, 20 bp, Artificial Sequence
  Description of Artificial Sequence: Synthetic oligonucleotide
  Target: LAMA2; (-) strand; PAM type: YTN; PAM sequence: TTT
gtattataatggtgtatgta

SEQ ID NO: 214792 - DNA, 20 bp, Artificial Sequence
  Description of Artificial Sequence: Synthetic oligonucleotide
  Target: LAMA2; (-) strand; PAM type: YTN; PAM sequence: TTG
atagcagtttgtattataat

SEQ ID NO: 214793 - DNA, 20 bp, Artificial Sequence
  Description of Artificial Sequence: Synthetic oligonucleotide
  Target: LAMA2; (-) strand; PAM type: YTN; PAM sequence: CTT
gatagcagtttgtattataa

SEQ ID NO: 214794 - DNA, 20 bp, Artificial Sequence
  Description of Artificial Sequence: Synthetic oligonucleotide
  Target: LAMA2; (-) strand; PAM type: YTN; PAM sequence: TTC
ttgatagcagtttgtattat

SEQ ID NO: 214795 - DNA, 20 bp, Artificial Sequence
  Description of Artificial Sequence: Synthetic oligonucleotide
  Target: LAMA2; (-) strand; PAM type: YTN; PAM sequence: CTG
ggatgatgataatattcttg

SEQ ID NO: 214796 - DNA, 20 bp, Artificial Sequence
  Description of Artificial Sequence: Synthetic oligonucleotide
  Target: LAMA2; (-) strand; PAM type: YTN; PAM sequence: TTC
tgggatgatgataatattct

SEQ ID NO: 214797 - DNA, 20 bp, Artificial Sequence
  Description of Artificial Sequence: Synthetic oligonucleotide
  Target: LAMA2; (-) strand; PAM type: YTN; PAM sequence: TTT
ctgggatgatgataatattc

SEQ ID NO: 214798 - DNA, 20 bp, Artificial Sequence
  Description of Artificial Sequence: Synthetic oligonucleotide
  Target: LAMA2; (-) strand; PAM type: YTN; PAM sequence: CTG
ggaagaggcataaagaaaat

SEQ ID NO: 214799 - DNA, 20 bp, Artificial Sequence
  Description of Artificial Sequence: Synthetic oligonucleotide
  Target: LAMA2; (-) strand; PAM type: YTN; PAM sequence: CTG
actgggaagaggcataaaga

SEQ ID NO: 214800 - DNA, 20 bp, Artificial Sequence
  Description of Artificial Sequence: Synthetic oligonucleotide
  Target: LAMA2; (-) strand; PAM type: YTN; PAM sequence: TTG
ggggcagagactgactggga

SEQ ID NO: 214801 - DNA, 20 bp, Artificial Sequence
  Description of Artificial Sequence: Synthetic oligonucleotide
  Target: LAMA2; (-) strand; PAM type: YTN; PAM sequence: CTT
gggggcagagactgactggg

SEQ ID NO: 214802 - DNA, 20 bp, Artificial Sequence
  Description of Artificial Sequence: Synthetic oligonucleotide
  Target: LAMA2; (-) strand; PAM type: YTN; PAM sequence: TTG
ggagcttgggggcagagact

SEQ ID NO: 214803 - DNA, 20 bp, Artificial Sequence
  Description of Artificial Sequence: Synthetic oligonucleotide
  Target: LAMA2; (-) strand; PAM type: YTN; PAM sequence: TTT
gggagcttgggggcagagac

SEQ ID NO: 214804 - DNA, 20 bp, Artificial Sequence
  Description of Artificial Sequence: Synthetic oligonucleotide
  Target: LAMA2; (-) strand; PAM type: YTN; PAM sequence: CTT
tgggagcttgggggcagaga

SEQ ID NO: 214805 - DNA, 20 bp, Artificial Sequence
  Description of Artificial Sequence: Synthetic oligonucleotide
  Target: LAMA2; (-) strand; PAM type: YTN; PAM sequence: TTG
cctttgggagcttgggggca

SEQ ID NO: 214806 - DNA, 20 bp, Artificial Sequence
  Description of Artificial Sequence: Synthetic oligonucleotide
  Target: LAMA2; (-) strand; PAM type: YTN; PAM sequence: TTA
ggaaaataaaacaggaaaaa

SEQ ID NO: 214807 - DNA, 20 bp, Artificial Sequence
  Description of Artificial Sequence: Synthetic oligonucleotide
  Target: LAMA2; (-) strand; PAM type: YTN; PAM sequence: TTT
aggaaaataaaacaggaaaa

SEQ ID NO: 214808 - DNA, 20 bp, Artificial Sequence
  Description of Artificial Sequence: Synthetic oligonucleotide
  Target: LAMA2; (-) strand; PAM type: YTN; PAM sequence: TTT
taggaaaataaaacaggaaa

SEQ ID NO: 214809 - DNA, 20 bp, Artificial Sequence
  Description of Artificial Sequence: Synthetic oligonucleotide
  Target: LAMA2; (-) strand; PAM type: YTN; PAM sequence: CTT
ttaggaaaataaaacaggaa

SEQ ID NO: 214810 - DNA, 20 bp, Artificial Sequence
  Description of Artificial Sequence: Synthetic oligonucleotide
  Target: LAMA2; (-) strand; PAM type: YTN; PAM sequence: CTA
atcttttaggaaaataaaac

SEQ ID NO: 214811 - DNA, 20 bp, Artificial Sequence
  Description of Artificial Sequence: Synthetic oligonucleotide
  Target: LAMA2; (-) strand; PAM type: YTN; PAM sequence: TTA
aacatacctaatcttttagg

SEQ ID NO: 214812 - DNA, 20 bp, Artificial Sequence
  Description of Artificial Sequence: Synthetic oligonucleotide
  Target: LAMA2; (-) strand; PAM type: YTN; PAM sequence: TTT
aaacatacctaatcttttag

SEQ ID NO: 214813 - DNA, 20 bp, Artificial Sequence
  Description of Artificial Sequence: Synthetic oligonucleotide
  Target: LAMA2; (-) strand; PAM type: YTN; PAM sequence: TTT
taaacatacctaatctttta

SEQ ID NO: 214814 - DNA, 20 bp, Artificial Sequence
  Description of Artificial Sequence: Synthetic oligonucleotide
  Target: LAMA2; (-) strand; PAM type: YTN; PAM sequence: TTT
ttaaacatacctaatctttt

SEQ ID NO: 214815 - DNA, 20 bp, Artificial Sequence
  Description of Artificial Sequence: Synthetic oligonucleotide
  Target: LAMA2; (-) strand; PAM type: YTN; PAM sequence: CTT
tttaaacatacctaatcttt

SEQ ID NO: 214816 - DNA, 20 bp, Artificial Sequence
  Description of Artificial Sequence: Synthetic oligonucleotide
  Target: LAMA2; (-) strand; PAM type: YTN; PAM sequence: TTA
tatgatctttttaaacatac

SEQ ID NO: 214817 - DNA, 20 bp, Artificial Sequence
  Description of Artificial Sequence: Synthetic oligonucleotide
  Target: LAMA2; (-) strand; PAM type: YTN; PAM sequence: TTT
atatgatctttttaaacata

SEQ ID NO: 214818 - DNA, 20 bp, Artificial Sequence
  Description of Artificial Sequence: Synthetic oligonucleotide
  Target: LAMA2; (-) strand; PAM type: YTN; PAM sequence: TTC
atttatatgatctttttaaa

SEQ ID NO: 214819 - DNA, 20 bp, Artificial Sequence
  Description of Artificial Sequence: Synthetic oligonucleotide
  Target: LAMA2; (-) strand; PAM type: YTN; PAM sequence: TTA
ttcatttatatgatcttttt

SEQ ID NO: 214820 - DNA, 20 bp, Artificial Sequence
  Description of Artificial Sequence: Synthetic oligonucleotide
  Target: LAMA2; (-) strand; PAM type: YTN; PAM sequence: CTA
ttattcatttatatgatctt

SEQ ID NO: 214821 - DNA, 20 bp, Artificial Sequence
  Description of Artificial Sequence: Synthetic oligonucleotide
  Target: LAMA2; (-) strand; PAM type: YTN; PAM sequence: CTC
tattattcatttatatgatc

SEQ ID NO: 214822 - DNA, 20 bp, Artificial Sequence
  Description of Artificial Sequence: Synthetic oligonucleotide
  Target: LAMA2; (-) strand; PAM type: YTN; PAM sequence: TTA
caccaaagagtggatactct

SEQ ID NO: 214823 - DNA, 20 bp, Artificial Sequence
  Description of Artificial Sequence: Synthetic oligonucleotide
  Target: LAMA2; (-) strand; PAM type: YTN; PAM sequence: TTT
acaccaaagagtggatactc

SEQ ID NO: 214824 - DNA, 20 bp, Artificial Sequence
  Description of Artificial Sequence: Synthetic oligonucleotide
  Target: LAMA2; (-) strand; PAM type: YTN; PAM sequence: TTA
tgccacataatataagttta

SEQ ID NO: 214825 - DNA, 20 bp, Artificial Sequence
  Description of Artificial Sequence: Synthetic oligonucleotide
  Target: LAMA2; (-) strand; PAM type: YTN; PAM sequence: CTC
caaaaaggattatgccacat

SEQ ID NO: 214826 - DNA, 20 bp, Artificial Sequence
  Description of Artificial Sequence: Synthetic oligonucleotide
  Target: LAMA2; (-) strand; PAM type: YTN; PAM sequence: CTG
atgactccaaaaaggattat

SEQ ID NO: 214827 - DNA, 20 bp, Artificial Sequence
  Description of Artificial Sequence: Synthetic oligonucleotide
  Target: LAMA2; (-) strand; PAM type: YTN; PAM sequence: CTG
atacacacaacaatgctgat

SEQ ID NO: 214828 - DNA, 20 bp, Artificial Sequence
  Description of Artificial Sequence: Synthetic oligonucleotide
  Target: LAMA2; (-) strand; PAM type: YTN; PAM sequence: TTA
ctgatacacacaacaatgct

SEQ ID NO: 214829 - DNA, 20 bp, Artificial Sequence
  Description of Artificial Sequence: Synthetic oligonucleotide
  Target: LAMA2; (-) strand; PAM type: YTN; PAM sequence: TTC
aacataaaaatggaacaaat

SEQ ID NO: 214830 - DNA, 20 bp, Artificial Sequence
  Description of Artificial Sequence: Synthetic oligonucleotide
  Target: LAMA2; (-) strand; PAM type: YTN; PAM sequence: CTA
ttcaacataaaaatggaaca

SEQ ID NO: 214831 - DNA, 20 bp, Artificial Sequence
  Description of Artificial Sequence: Synthetic oligonucleotide
  Target: LAMA2; (-) strand; PAM type: YTN; PAM sequence: TTA
aacaatgaaatactattcaa

SEQ ID NO: 214832 - DNA, 20 bp, Artificial Sequence
  Description of Artificial Sequence: Synthetic oligonucleotide
  Target: LAMA2; (-) strand; PAM type: YTN; PAM sequence: TTT
aaacaatgaaatactattca

SEQ ID NO: 214833 - DNA, 20 bp, Artificial Sequence
  Description of Artificial Sequence: Synthetic oligonucleotide
  Target: LAMA2; (-) strand; PAM type: YTN; PAM sequence: CTG
tggtgtatttaaacaatgaa

SEQ ID NO: 214834 - DNA, 20 bp, Artificial Sequence
  Description of Artificial Sequence: Synthetic oligonucleotide
  Target: LAMA2; (-) strand; PAM type: YTN; PAM sequence: TTC
catgaatgggggaaatgata

SEQ ID NO: 214835 - DNA, 20 bp, Artificial Sequence
  Description of Artificial Sequence: Synthetic oligonucleotide
  Target: LAMA2; (-) strand; PAM type: YTN; PAM sequence: TTT
ccatgaatgggggaaatgat

SEQ ID NO: 214836 - DNA, 20 bp, Artificial Sequence
  Description of Artificial Sequence: Synthetic oligonucleotide
  Target: LAMA2; (-) strand; PAM type: YTN; PAM sequence: TTA
ggtttccatgaatgggggaa

SEQ ID NO: 214837 - DNA, 20 bp, Artificial Sequence
  Description of Artificial Sequence: Synthetic oligonucleotide
  Target: LAMA2; (-) strand; PAM type: YTN; PAM sequence: CTT
aggtttccatgaatggggga

SEQ ID NO: 214838 - DNA, 20 bp, Artificial Sequence
  Description of Artificial Sequence: Synthetic oligonucleotide
  Target: LAMA2; (-) strand; PAM type: YTN; PAM sequence: CTG
gaaacaccttaggtttccat

SEQ ID NO: 214839 - DNA, 20 bp, Artificial Sequence
  Description of Artificial Sequence: Synthetic oligonucleotide
  Target: LAMA2; (-) strand; PAM type: YTN; PAM sequence: TTA
tcataatagccaaacctgga

SEQ ID NO: 214840 - DNA, 20 bp, Artificial Sequence
  Description of Artificial Sequence: Synthetic oligonucleotide
  Target: LAMA2; (-) strand; PAM type: YTN; PAM sequence: TTT
atcataatagccaaacctgg

SEQ ID NO: 214841 - DNA, 20 bp, Artificial Sequence
  Description of Artificial Sequence: Synthetic oligonucleotide
  Target: LAMA2; (-) strand; PAM type: YTN; PAM sequence: TTT
tatcataatagccaaacctg

SEQ ID NO: 214842 - DNA, 20 bp, Artificial Sequence
  Description of Artificial Sequence: Synthetic oligonucleotide
  Target: LAMA2; (-) strand; PAM type: YTN; PAM sequence: TTT
ttatcataatagccaaacct

SEQ ID NO: 214843 - DNA, 20 bp, Artificial Sequence
  Description of Artificial Sequence: Synthetic oligonucleotide
  Target: LAMA2; (-) strand; PAM type: YTN; PAM sequence: TTC
atagaagtttttatcataat

SEQ ID NO: 214844 - DNA, 20 bp, Artificial Sequence
  Description of Artificial Sequence: Synthetic oligonucleotide
  Target: LAMA2; (-) strand; PAM type: YTN; PAM sequence: CTA
aacaaaaatgttcatagaag

SEQ ID NO: 214845 - DNA, 20 bp, Artificial Sequence
  Description of Artificial Sequence: Synthetic oligonucleotide
  Target: LAMA2; (-) strand; PAM type: YTN; PAM sequence: TTA
aaaagacctaaacaaaaatg

SEQ ID NO: 214846 - DNA, 20 bp, Artificial Sequence
  Description of Artificial Sequence: Synthetic oligonucleotide
  Target: LAMA2; (-) strand; PAM type: YTN; PAM sequence: CTT
aaaaagacctaaacaaaaat

SEQ ID NO: 214847 - DNA, 20 bp, Artificial Sequence
  Description of Artificial Sequence: Synthetic oligonucleotide
  Target: LAMA2; (-) strand; PAM type: YTN; PAM sequence: TTA
catgtccttaaaaagaccta

SEQ ID NO: 214848 - DNA, 20 bp, Artificial Sequence
  Description of Artificial Sequence: Synthetic oligonucleotide
  Target: LAMA2; (-) strand; PAM type: YTN; PAM sequence: TTA
ggtacatatccaagataaat

SEQ ID NO: 214849 - DNA, 20 bp, Artificial Sequence
  Description of Artificial Sequence: Synthetic oligonucleotide
  Target: LAMA2; (-) strand; PAM type: YTN; PAM sequence: CTG
ttaggtacatatccaagata

SEQ ID NO: 214850 - DNA, 20 bp, Artificial Sequence
  Description of Artificial Sequence: Synthetic oligonucleotide
  Target: LAMA2; (-) strand; PAM type: YTN; PAM sequence: TTC
ccctgttaggtacatatcca

SEQ ID NO: 214851 - DNA, 20 bp, Artificial Sequence
  Description of Artificial Sequence: Synthetic oligonucleotide
  Target: LAMA2; (-) strand; PAM type: YTN; PAM sequence: TTT
cccctgttaggtacatatcc

SEQ ID NO: 214852 - DNA, 20 bp, Artificial Sequence
  Description of Artificial Sequence: Synthetic oligonucleotide
  Target: LAMA2; (-) strand; PAM type: YTN; PAM sequence: TTT
tcccctgttaggtacatatc

SEQ ID NO: 214853 - DNA, 20 bp, Artificial Sequence
  Description of Artificial Sequence: Synthetic oligonucleotide
  Target: LAMA2; (-) strand; PAM type: YTN; PAM sequence: TTC
aaattttcccctgttaggta

SEQ ID NO: 214854 - DNA, 20 bp, Artificial Sequence
  Description of Artificial Sequence: Synthetic oligonucleotide
  Target: LAMA2; (-) strand; PAM type: YTN; PAM sequence: CTT
caaattttcccctgttaggt

SEQ ID NO: 214855 - DNA, 20 bp, Artificial Sequence
  Description of Artificial Sequence: Synthetic oligonucleotide
  Target: LAMA2; (-) strand; PAM type: YTN; PAM sequence: TTA
ataaatataaaagtccttca

SEQ ID NO: 214856 - DNA, 20 bp, Artificial Sequence
  Description of Artificial Sequence: Synthetic oligonucleotide
  Target: LAMA2; (-) strand; PAM type: YTN; PAM sequence: TTT
aataaatataaaagtccttc

SEQ ID NO: 214857 - DNA, 20 bp, Artificial Sequence
  Description of Artificial Sequence: Synthetic oligonucleotide
  Target: LAMA2; (-) strand; PAM type: YTN; PAM sequence: TTT
taataaatataaaagtcctt

SEQ ID NO: 214858 - DNA, 20 bp, Artificial Sequence
  Description of Artificial Sequence: Synthetic oligonucleotide
  Target: LAMA2; (-) strand; PAM type: YTN; PAM sequence: TTT
ttaataaatataaaagtcct

SEQ ID NO: 214859 - DNA, 20 bp, Artificial Sequence
  Description of Artificial Sequence: Synthetic oligonucleotide
  Target: LAMA2; (-) strand; PAM type: YTN; PAM sequence: TTA
gaaaacaggtagtttttaat

SEQ ID NO: 214860 - DNA, 20 bp, Artificial Sequence
  Description of Artificial Sequence: Synthetic oligonucleotide
  Target: LAMA2; (-) strand; PAM type: YTN; PAM sequence: TTT
agaaaacaggtagtttttaa

SEQ ID NO: 214861 - DNA, 20 bp, Artificial Sequence
  Description of Artificial Sequence: Synthetic oligonucleotide
  Target: LAMA2; (-) strand; PAM type: YTN; PAM sequence: TTT
tagaaaacaggtagttttta

SEQ ID NO: 214862 - DNA, 20 bp, Artificial Sequence
  Description of Artificial Sequence: Synthetic oligonucleotide
  Target: LAMA2; (-) strand; PAM type: YTN; PAM sequence: CTT
ttagaaaacaggtagttttt

SEQ ID NO: 214863 - DNA, 20 bp, Artificial Sequence
  Description of Artificial Sequence: Synthetic oligonucleotide
  Target: LAMA2; (-) strand; PAM type: YTN; PAM sequence: TTA
gcacaacccttttagaaaac

SEQ ID NO: 214864 - DNA, 20 bp, Artificial Sequence
  Description of Artificial Sequence: Synthetic oligonucleotide
  Target: LAMA2; (-) strand; PAM type: YTN; PAM sequence: TTG
ggaatgtaaattagcacaac

SEQ ID NO: 214865 - DNA, 20 bp, Artificial Sequence
  Description of Artificial Sequence: Synthetic oligonucleotide
  Target: LAMA2; (-) strand; PAM type: YTN; PAM sequence: CTG
ttgggaatgtaaattagcac

SEQ ID NO: 214866 - DNA, 20 bp, Artificial Sequence
  Description of Artificial Sequence: Synthetic oligonucleotide
  Target: LAMA2; (-) strand; PAM type: YTN; PAM sequence: TTG
ctgttgggaatgtaaattag

SEQ ID NO: 214867 - DNA, 20 bp, Artificial Sequence
  Description of Artificial Sequence: Synthetic oligonucleotide
  Target: LAMA2; (-) strand; PAM type: YTN; PAM sequence: CTG
cattgctgttgggaatgtaa

SEQ ID NO: 214868 - DNA, 20 bp, Artificial Sequence
  Description of Artificial Sequence: Synthetic oligonucleotide
  Target: LAMA2; (-) strand; PAM type: YTN; PAM sequence: CTG
ctgcattgctgttgggaatg

SEQ ID NO: 214869 - DNA, 20 bp, Artificial Sequence
  Description of Artificial Sequence: Synthetic oligonucleotide
  Target: LAMA2; (-) strand; PAM type: YTN; PAM sequence: TTG
tagaacaatcaaaagtctgc

SEQ ID NO: 214870 - DNA, 20 bp, Artificial Sequence
  Description of Artificial Sequence: Synthetic oligonucleotide
  Target: LAMA2; (-) strand; PAM type: YTN; PAM sequence: TTT
gtagaacaatcaaaagtctg

SEQ ID NO: 214871 - DNA, 20 bp, Artificial Sequence
  Description of Artificial Sequence: Synthetic oligonucleotide
  Target: LAMA2; (-) strand; PAM type: YTN; PAM sequence: TTA
aaaagtttgtagaacaatca

SEQ ID NO: 214872 - DNA, 20 bp, Artificial Sequence
  Description of Artificial Sequence: Synthetic oligonucleotide
  Target: LAMA2; (-) strand; PAM type: YTN; PAM sequence: TTG
acaacatcaaatattaaaaa

SEQ ID NO: 214873 - DNA, 20 bp, Artificial Sequence
  Description of Artificial Sequence: Synthetic oligonucleotide
  Target: LAMA2; (-) strand; PAM type: YTN; PAM sequence: TTA
aaaagattgacaacatcaaa

SEQ ID NO: 214874 - DNA, 20 bp, Artificial Sequence
  Description of Artificial Sequence: Synthetic oligonucleotide
  Target: LAMA2; (-) strand; PAM type: YTN; PAM sequence: TTA
tattaaaaagattgacaaca

SEQ ID NO: 214875 - DNA, 20 bp, Artificial Sequence
  Description of Artificial Sequence: Synthetic oligonucleotide
  Target: LAMA2; (-) strand; PAM type: YTN; PAM sequence: TTA
aatggcattatattaaaaag

SEQ ID NO: 214876 - DNA, 20 bp, Artificial Sequence
  Description of Artificial Sequence: Synthetic oligonucleotide
  Target: LAMA2; (-) strand; PAM type: YTN; PAM sequence: TTA
gattaaatggcattatatta

SEQ ID NO: 214877 - DNA, 20 bp, Artificial Sequence
  Description of Artificial Sequence: Synthetic oligonucleotide
  Target: LAMA2; (-) strand; PAM type: YTN; PAM sequence: TTT
agattaaatggcattatatt

SEQ ID NO: 214878 - DNA, 20 bp, Artificial Sequence
  Description of Artificial Sequence: Synthetic oligonucleotide
  Target: LAMA2; (-) strand; PAM type: YTN; PAM sequence: TTT
tagattaaatggcattatat

SEQ ID NO: 214879 - DNA, 20 bp, Artificial Sequence
  Description of Artificial Sequence: Synthetic oligonucleotide
  Target: LAMA2; (-) strand; PAM type: YTN; PAM sequence: CTC
atgttttagattaaatggca

SEQ ID NO: 214880 - DNA, 20 bp, Artificial Sequence
  Description of Artificial Sequence: Synthetic oligonucleotide
  Target: LAMA2; (-) strand; PAM type: YTN; PAM sequence: TTC
tcatgttttagattaaatgg

SEQ ID NO: 214881 - DNA, 20 bp, Artificial Sequence
  Description of Artificial Sequence: Synthetic oligonucleotide
  Target: LAMA2; (-) strand; PAM type: YTN; PAM sequence: TTG
acaaagttctcatgttttag

SEQ ID NO: 214882 - DNA, 20 bp, Artificial Sequence
  Description of Artificial Sequence: Synthetic oligonucleotide
  Target: LAMA2; (-) strand; PAM type: YTN; PAM sequence: CTA
tatattgacaaagttctcat

SEQ ID NO: 214883 - DNA, 20 bp, Artificial Sequence
  Description of Artificial Sequence: Synthetic oligonucleotide
  Target: LAMA2; (-) strand; PAM type: YTN; PAM sequence: CTG
gacctatatattgacaaagt

SEQ ID NO: 214884 - DNA, 20 bp, Artificial Sequence
  Description of Artificial Sequence: Synthetic oligonucleotide
  Target: LAMA2; (-) strand; PAM type: YTN; PAM sequence: CTA
taataaagaaatggtgggtg

SEQ ID NO: 214885 - DNA, 20 bp, Artificial Sequence
  Description of Artificial Sequence: Synthetic oligonucleotide
  Target: LAMA2; (-) strand; PAM type: YTN; PAM sequence: TTG
taaatagaatatatatgaca

SEQ ID NO: 214886 - DNA, 20 bp, Artificial Sequence
  Description of Artificial Sequence: Synthetic oligonucleotide
  Target: LAMA2; (-) strand; PAM type: YTN; PAM sequence: TTT
gtaaatagaatatatatgac

SEQ ID NO: 214887 - DNA, 20 bp, Artificial Sequence
  Description of Artificial Sequence: Synthetic oligonucleotide
  Target: LAMA2; (-) strand; PAM type: YTN; PAM sequence: TTG
catatgtttgtaaatagaat

SEQ ID NO: 214888 - DNA, 20 bp, Artificial Sequence
  Description of Artificial Sequence: Synthetic oligonucleotide
  Target: LAMA2; (-) strand; PAM type: YTN; PAM sequence: TTA
aggcaaaaaatcacatcatt

SEQ ID NO: 214889 - DNA, 20 bp, Artificial Sequence
  Description of Artificial Sequence: Synthetic oligonucleotide
  Target: LAMA2; (-) strand; PAM type: YTN; PAM sequence: TTT
aaggcaaaaaatcacatcat

SEQ ID NO: 214890 - DNA, 20 bp, Artificial Sequence
  Description of Artificial Sequence: Synthetic oligonucleotide
  Target: LAMA2; (-) strand; PAM type: YTN; PAM sequence: TTA
atatttaaggcaaaaaatca

SEQ ID NO: 214891 - DNA, 20 bp, Artificial Sequence
  Description of Artificial Sequence: Synthetic oligonucleotide
  Target: LAMA2; (-) strand; PAM type: YTN; PAM sequence: TTA
aatgcatattaatatttaag

SEQ ID NO: 214892 - DNA, 20 bp, Artificial Sequence
  Description of Artificial Sequence: Synthetic oligonucleotide
  Target: LAMA2; (-) strand; PAM type: YTN; PAM sequence: TTT
aaatgcatattaatatttaa

SEQ ID NO: 214893 - DNA, 20 bp, Artificial Sequence
  Description of Artificial Sequence: Synthetic oligonucleotide
  Target: LAMA2; (-) strand; PAM type: YTN; PAM sequence: TTT
taaatgcatattaatattta

SEQ ID NO: 214894 - DNA, 20 bp, Artificial Sequence
  Description of Artificial Sequence: Synthetic oligonucleotide
  Target: LAMA2; (-) strand; PAM type: YTN; PAM sequence: CTT
ttaaatgcatattaatattt

SEQ ID NO: 214895 - DNA, 20 bp, Artificial Sequence
  Description of Artificial Sequence: Synthetic oligonucleotide
  Target: LAMA2; (-) strand; PAM type: YTN; PAM sequence: TTC
ttttaaatgcatattaatat

SEQ ID NO: 214896 - DNA, 20 bp, Artificial Sequence
  Description of Artificial Sequence: Synthetic oligonucleotide
  Target: LAMA2; (-) strand; PAM type: YTN; PAM sequence: TTA
aattcttttaaatgcatatt

SEQ ID NO: 214897 - DNA, 20 bp, Artificial Sequence
  Description of Artificial Sequence: Synthetic oligonucleotide
  Target: LAMA2; (-) strand; PAM type: YTN; PAM sequence: CTG
ttaaattcttttaaatgcat

SEQ ID NO: 214898 - DNA, 20 bp, Artificial Sequence
  Description of Artificial Sequence: Synthetic oligonucleotide
  Target: LAMA2; (-) strand; PAM type: YTN; PAM sequence: TTC
cctgttaaattcttttaaat

SEQ ID NO: 214899 - DNA, 20 bp, Artificial Sequence
  Description of Artificial Sequence: Synthetic oligonucleotide
  Target: LAMA2; (-) strand; PAM type: YTN; PAM sequence: TTT
ccctgttaaattcttttaaa

SEQ ID NO: 214900 - DNA, 20 bp, Artificial Sequence
  Description of Artificial Sequence: Synthetic oligonucleotide
  Target: LAMA2; (-) strand; PAM type: YTN; PAM sequence: TTT
tccctgttaaattcttttaa

SEQ ID NO: 214901 - DNA, 20 bp, Artificial Sequence
  Description of Artificial Sequence: Synthetic oligonucleotide
  Target: LAMA2; (-) strand; PAM type: YTN; PAM sequence: TTT
ttccctgttaaattctttta

SEQ ID NO: 214902 - DNA, 20 bp, Artificial Sequence
  Description of Artificial Sequence: Synthetic oligonucleotide
  Target: LAMA2; (-) strand; PAM type: YTN; PAM sequence: CTT
tttccctgttaaattctttt

SEQ ID NO: 214903 - DNA, 20 bp, Artificial Sequence
  Description of Artificial Sequence: Synthetic oligonucleotide
  Target: LAMA2; (-) strand; PAM type: YTN; PAM sequence: TTG
atgtcaatagactttttccc

SEQ ID NO: 214904 - DNA, 20 bp, Artificial Sequence
  Description of Artificial Sequence: Synthetic oligonucleotide
  Target: LAMA2; (-) strand; PAM type: YTN; PAM sequence: TTT
gatgtcaatagactttttcc

SEQ ID NO: 214905 - DNA, 20 bp, Artificial Sequence
  Description of Artificial Sequence: Synthetic oligonucleotide
  Target: LAMA2; (-) strand; PAM type: YTN; PAM sequence: TTG
gagatgataaaagacagtat

SEQ ID NO: 214906 - DNA, 20 bp, Artificial Sequence
  Description of Artificial Sequence: Synthetic oligonucleotide
  Target: LAMA2; (-) strand; PAM type: YTN; PAM sequence: TTA
atagaaaattggagatgata

SEQ ID NO: 214907 - DNA, 20 bp, Artificial Sequence
  Description of Artificial Sequence: Synthetic oligonucleotide
  Target: LAMA2; (-) strand; PAM type: YTN; PAM sequence: CTA
catgtgattaatagaaaatt

SEQ ID NO: 214908 - DNA, 20 bp, Artificial Sequence
  Description of Artificial Sequence: Synthetic oligonucleotide
  Target: LAMA2; (-) strand; PAM type: YTN; PAM sequence: CTA
gaatgaaaaaaaaatccact

SEQ ID NO: 214909 - DNA, 20 bp, Artificial Sequence
  Description of Artificial Sequence: Synthetic oligonucleotide
  Target: LAMA2; (-) strand; PAM type: YTN; PAM sequence: CTG
aaaaatgtaacacagtatct

SEQ ID NO: 214910 - DNA, 20 bp, Artificial Sequence
  Description of Artificial Sequence: Synthetic oligonucleotide
  Target: LAMA2; (-) strand; PAM type: YTN; PAM sequence: CTG
tgactgaaaaatgtaacaca

SEQ ID NO: 214911 - DNA, 20 bp, Artificial Sequence
  Description of Artificial Sequence: Synthetic oligonucleotide
  Target: LAMA2; (-) strand; PAM type: YTN; PAM sequence: TTC
tgtgactgaaaaatgtaaca

SEQ ID NO: 214912 - DNA, 20 bp, Artificial Sequence
  Description of Artificial Sequence: Synthetic oligonucleotide
  Target: LAMA2; (-) strand; PAM type: YTN; PAM sequence: TTG
aatataaattctgtgactga

SEQ ID NO: 214913 - DNA, 20 bp, Artificial Sequence
  Description of Artificial Sequence: Synthetic oligonucleotide
  Target: LAMA2; (-) strand; PAM type: YTN; PAM sequence: TTG
tagcaaaaaagaaatggtaa

SEQ ID NO: 214914 - DNA, 20 bp, Artificial Sequence
  Description of Artificial Sequence: Synthetic oligonucleotide
  Target: LAMA2; (-) strand; PAM type: YTN; PAM sequence: CTT
gtagcaaaaaagaaatggta

SEQ ID NO: 214915 - DNA, 20 bp, Artificial Sequence
  Description of Artificial Sequence: Synthetic oligonucleotide
  Target: LAMA2; (-) strand; PAM type: YTN; PAM sequence: TTC
ttgtagcaaaaaagaaatgg

SEQ ID NO: 214916 - DNA, 20 bp, Artificial Sequence
  Description of Artificial Sequence: Synthetic oligonucleotide
  Target: LAMA2; (-) strand; PAM type: YTN; PAM sequence: CTC
aaggacatacacacatacga

SEQ ID NO: 214917 - DNA, 20 bp, Artificial Sequence
  Description of Artificial Sequence: Synthetic oligonucleotide
  Target: LAMA2; (-) strand; PAM type: YTN; PAM sequence: CTA
tactcaaggacatacacaca

SEQ ID NO: 214918 - DNA, 20 bp, Artificial Sequence
  Description of Artificial Sequence: Synthetic oligonucleotide
  Target: LAMA2; (-) strand; PAM type: YTN; PAM sequence: TTA
aactatactcaaggacatac

SEQ ID NO: 214919 - DNA, 20 bp, Artificial Sequence
  Description of Artificial Sequence: Synthetic oligonucleotide
  Target: LAMA2; (-) strand; PAM type: YTN; PAM sequence: TTT
aaactatactcaaggacata

SEQ ID NO: 214920 - DNA, 20 bp, Artificial Sequence
  Description of Artificial Sequence: Synthetic oligonucleotide
  Target: LAMA2; (-) strand; PAM type: YTN; PAM sequence: TTT
taaactatactcaaggacat

SEQ ID NO: 214921 - DNA, 20 bp, Artificial Sequence
  Description of Artificial Sequence: Synthetic oligonucleotide
  Target: LAMA2; (-) strand; PAM type: YTN; PAM sequence: CTT
ttaaactatactcaaggaca

SEQ ID NO: 214922 - DNA, 20 bp, Artificial Sequence
  Description of Artificial Sequence: Synthetic oligonucleotide
  Target: LAMA2; (-) strand; PAM type: YTN; PAM sequence: TTC
aagcagcttttaaactatac

SEQ ID NO: 214923 - DNA, 20 bp, Artificial Sequence
  Description of Artificial Sequence: Synthetic oligonucleotide
  Target: LAMA2; (-) strand; PAM type: YTN; PAM sequence: CTT
caagcagcttttaaactata

SEQ ID NO: 214924 - DNA, 20 bp, Artificial Sequence
  Description of Artificial Sequence: Synthetic oligonucleotide
  Target: LAMA2; (-) strand; PAM type: YTN; PAM sequence: TTG
gaataagcaaacaagcatct

SEQ ID NO: 214925 - DNA, 20 bp, Artificial Sequence
  Description of Artificial Sequence: Synthetic oligonucleotide
  Target: LAMA2; (-) strand; PAM type: YTN; PAM sequence: CTG
agatcaaccagatgttggaa

SEQ ID NO: 214926 - DNA, 20 bp, Artificial Sequence
  Description of Artificial Sequence: Synthetic oligonucleotide
  Target: LAMA2; (-) strand; PAM type: YTN; PAM sequence: TTG
tactgagatcaaccagatgt

SEQ ID NO: 214927 - DNA, 20 bp, Artificial Sequence
  Description of Artificial Sequence: Synthetic oligonucleotide
  Target: LAMA2; (-) strand; PAM type: YTN; PAM sequence: TTA
tgagaaaaagcaatcaacgg

SEQ ID NO: 214928 - DNA, 20 bp, Artificial Sequence
  Description of Artificial Sequence: Synthetic oligonucleotide
  Target: LAMA2; (-) strand; PAM type: YTN; PAM sequence: CTT
atgagaaaaagcaatcaacg

SEQ ID NO: 214929 - DNA, 20 bp, Artificial Sequence
  Description of Artificial Sequence: Synthetic oligonucleotide
  Target: LAMA2; (-) strand; PAM type: YTN; PAM sequence: CTC
atacttatgagaaaaagcaa

SEQ ID NO: 214930 - DNA, 20 bp, Artificial Sequence
  Description of Artificial Sequence: Synthetic oligonucleotide
  Target: LAMA2; (-) strand; PAM type: YTN; PAM sequence: CTA
gacatacaaggaagcaataa

SEQ ID NO: 214931 - DNA, 20 bp, Artificial Sequence
  Description of Artificial Sequence: Synthetic oligonucleotide
  Target: LAMA2; (-) strand; PAM type: YTN; PAM sequence: TTA
aaaaaaaatactagacatac

SEQ ID NO: 214932 - DNA, 20 bp, Artificial Sequence
  Description of Artificial Sequence: Synthetic oligonucleotide
  Target: LAMA2; (-) strand; PAM type: YTN; PAM sequence: TTG
caattaaaaaaaaatactag

SEQ ID NO: 214933 - DNA, 20 bp, Artificial Sequence
  Description of Artificial Sequence: Synthetic oligonucleotide
  Target: LAMA2; (-) strand; PAM type: YTN; PAM sequence: TTC
atgacatccaggttgcaatt

SEQ ID NO: 214934 - DNA, 20 bp, Artificial Sequence
  Description of Artificial Sequence: Synthetic oligonucleotide
  Target: LAMA2; (-) strand; PAM type: YTN; PAM sequence: TTA
ttcatgacatccaggttgca

SEQ ID NO: 214935 - DNA, 20 bp, Artificial Sequence
  Description of Artificial Sequence: Synthetic oligonucleotide
  Target: LAMA2; (-) strand; PAM type: YTN; PAM sequence: CTA
ttattcatgacatccaggtt

SEQ ID NO: 214936 - DNA, 20 bp, Artificial Sequence
  Description of Artificial Sequence: Synthetic oligonucleotide
  Target: LAMA2; (-) strand; PAM type: YTN; PAM sequence: CTA
caatgtgctattattcatga

SEQ ID NO: 214937 - DNA, 20 bp, Artificial Sequence
  Description of Artificial Sequence: Synthetic oligonucleotide
  Target: LAMA2; (-) strand; PAM type: YTN; PAM sequence: TTC
tacaatgtgctattattcat

SEQ ID NO: 214938 - DNA, 20 bp, Artificial Sequence
  Description of Artificial Sequence: Synthetic oligonucleotide
  Target: LAMA2; (-) strand; PAM type: YTN; PAM sequence: TTT
ctacaatgtgctattattca

SEQ ID NO: 214939 - DNA, 20 bp, Artificial Sequence
  Description of Artificial Sequence: Synthetic oligonucleotide
  Target: LAMA2; (-) strand; PAM type: YTN; PAM sequence: TTC
agaggaacataacaaaaccc

SEQ ID NO: 214940 - DNA, 20 bp, Artificial Sequence
  Description of Artificial Sequence: Synthetic oligonucleotide
  Target: LAMA2; (-) strand; PAM type: YTN; PAM sequence: CTT
cagaggaacataacaaaacc

SEQ ID NO: 214941 - DNA, 20 bp, Artificial Sequence
  Description of Artificial Sequence: Synthetic oligonucleotide
  Target: LAMA2; (-) strand; PAM type: YTN; PAM sequence: CTC
ttcagaggaacataacaaaa

SEQ ID NO: 214942 - DNA, 20 bp, Artificial Sequence
  Description of Artificial Sequence: Synthetic oligonucleotide
  Target: LAMA2; (-) strand; PAM type: YTN; PAM sequence: CTG
atgcgacaacaaaaaagaat

SEQ ID NO: 214943 - DNA, 20 bp, Artificial Sequence
  Description of Artificial Sequence: Synthetic oligonucleotide
  Target: LAMA2; (-) strand; PAM type: YTN; PAM sequence: TTA
accaactgatgcgacaacaa

SEQ ID NO: 214944 - DNA, 20 bp, Artificial Sequence
  Description of Artificial Sequence: Synthetic oligonucleotide
  Target: LAMA2; (-) strand; PAM type: YTN; PAM sequence: TTG
agcccagtcaagttaaccaa

SEQ ID NO: 214945 - DNA, 20 bp, Artificial Sequence
  Description of Artificial Sequence: Synthetic oligonucleotide
  Target: LAMA2; (-) strand; PAM type: YTN; PAM sequence: TTT
gagcccagtcaagttaacca

SEQ ID NO: 214946 - DNA, 20 bp, Artificial Sequence
  Description of Artificial Sequence: Synthetic oligonucleotide
  Target: LAMA2; (-) strand; PAM type: YTN; PAM sequence: CTT
tgagcccagtcaagttaacc

SEQ ID NO: 214947 - DNA, 20 bp, Artificial Sequence
  Description of Artificial Sequence: Synthetic oligonucleotide
  Target: LAMA2; (-) strand; PAM type: YTN; PAM sequence: TTG
ggactttgagcccagtcaag

SEQ ID NO: 214948 - DNA, 20 bp, Artificial Sequence
  Description of Artificial Sequence: Synthetic oligonucleotide
  Target: LAMA2; (-) strand; PAM type: YTN; PAM sequence: CTA
caggaaagaaaaaagttggg

SEQ ID NO: 214949 - DNA, 20 bp, Artificial Sequence
  Description of Artificial Sequence: Synthetic oligonucleotide
  Target: LAMA2; (-) strand; PAM type: YTN; PAM sequence: CTC
tacaggaaagaaaaaagttg

SEQ ID NO: 214950 - DNA, 20 bp, Artificial Sequence
  Description of Artificial Sequence: Synthetic oligonucleotide
  Target: LAMA2; (-) strand; PAM type: YTN; PAM sequence: CTG
cactctacaggaaagaaaaa

SEQ ID NO: 214951 - DNA, 20 bp, Artificial Sequence
  Description of Artificial Sequence: Synthetic oligonucleotide
  Target: LAMA2; (-) strand; PAM type: YTN; PAM sequence: TTC
tgcactctacaggaaagaaa

SEQ ID NO: 214952 - DNA, 20 bp, Artificial Sequence
  Description of Artificial Sequence: Synthetic oligonucleotide
  Target: LAMA2; (-) strand; PAM type: YTN; PAM sequence: TTA
ggttctgcactctacaggaa

SEQ ID NO: 214953 - DNA, 20 bp, Artificial Sequence
  Description of Artificial Sequence: Synthetic oligonucleotide
  Target: LAMA2; (-) strand; PAM type: YTN; PAM sequence: TTT
aggttctgcactctacagga

SEQ ID NO: 214954 - DNA, 20 bp, Artificial Sequence
  Description of Artificial Sequence: Synthetic oligonucleotide
  Target: LAMA2; (-) strand; PAM type: YTN; PAM sequence: TTT
taggttctgcactctacagg

SEQ ID NO: 214955 - DNA, 20 bp, Artificial Sequence
  Description of Artificial Sequence: Synthetic oligonucleotide
  Target: LAMA2; (-) strand; PAM type: YTN; PAM sequence: CTG
aacagagattttaggttctg

SEQ ID NO: 214956 - DNA, 20 bp, Artificial Sequence
  Description of Artificial Sequence: Synthetic oligonucleotide
  Target: LAMA2; (-) strand; PAM type: YTN; PAM sequence: CTG
aaaaactgaacagagatttt

SEQ ID NO: 214957 - DNA, 20 bp, Artificial Sequence
  Description of Artificial Sequence: Synthetic oligonucleotide
  Target: LAMA2; (-) strand; PAM type: YTN; PAM sequence: CTA
gggctgaaaaactgaacaga

SEQ ID NO: 214958 - DNA, 20 bp, Artificial Sequence
  Description of Artificial Sequence: Synthetic oligonucleotide
  Target: LAMA2; (-) strand; PAM type: YTN; PAM sequence: TTC
caagtagcccagctagggct

SEQ ID NO: 214959 - DNA, 20 bp, Artificial Sequence
  Description of Artificial Sequence: Synthetic oligonucleotide
  Target: LAMA2; (-) strand; PAM type: YTN; PAM sequence: CTA
gtcagattccaagtagccca

SEQ ID NO: 214960 - DNA, 20 bp, Artificial Sequence
  Description of Artificial Sequence: Synthetic oligonucleotide
  Target: LAMA2; (-) strand; PAM type: YTN; PAM sequence: CTG
ccctagtcagattccaagta

SEQ ID NO: 214961 - DNA, 20 bp, Artificial Sequence
  Description of Artificial Sequence: Synthetic oligonucleotide
  Target: LAMA2; (-) strand; PAM type: YTN; PAM sequence: CTA
cacctgccctagtcagattc

SEQ ID NO: 214962 - DNA, 20 bp, Artificial Sequence
  Description of Artificial Sequence: Synthetic oligonucleotide
  Target: LAMA2; (-) strand; PAM type: YTN; PAM sequence: CTG
atgccagacctacacctgcc

SEQ ID NO: 214963 - DNA, 20 bp, Artificial Sequence
  Description of Artificial Sequence: Synthetic oligonucleotide
  Target: LAMA2; (-) strand; PAM type: YTN; PAM sequence: CTC
actgatgccagacctacacc

SEQ ID NO: 214964 - DNA, 20 bp, Artificial Sequence
  Description of Artificial Sequence: Synthetic oligonucleotide
  Target: LAMA2; (-) strand; PAM type: YTN; PAM sequence: TTG
ctcactgatgccagacctac

SEQ ID NO: 214965 - DNA, 20 bp, Artificial Sequence
  Description of Artificial Sequence: Synthetic oligonucleotide
  Target: LAMA2; (-) strand; PAM type: YTN; PAM sequence: CTG
tccaaattgctcactgatgc

SEQ ID NO: 214966 - DNA, 20 bp, Artificial Sequence
  Description of Artificial Sequence: Synthetic oligonucleotide
  Target: LAMA2; (-) strand; PAM type: YTN; PAM sequence: CTC
tgtccaaattgctcactgat

SEQ ID NO: 214967 - DNA, 20 bp, Artificial Sequence
  Description of Artificial Sequence: Synthetic oligonucleotide
  Target: LAMA2; (-) strand; PAM type: YTN; PAM sequence: CTG
tgcataaactctgtccaaat

SEQ ID NO: 214968 - DNA, 20 bp, Artificial Sequence
  Description of Artificial Sequence: Synthetic oligonucleotide
  Target: LAMA2; (-) strand; PAM type: YTN; PAM sequence: CTC
aatctgtgcataaactctgt

SEQ ID NO: 214969 - DNA, 20 bp, Artificial Sequence
  Description of Artificial Sequence: Synthetic oligonucleotide
  Target: LAMA2; (-) strand; PAM type: YTN; PAM sequence: CTA
aaaatagccacagcaggtgt

SEQ ID NO: 214970 - DNA, 20 bp, Artificial Sequence
  Description of Artificial Sequence: Synthetic oligonucleotide
  Target: LAMA2; (-) strand; PAM type: YTN; PAM sequence: CTA
gtgaacaaaactaaaaatag

SEQ ID NO: 214971 - DNA, 20 bp, Artificial Sequence
  Description of Artificial Sequence: Synthetic oligonucleotide
  Target: LAMA2; (-) strand; PAM type: YTN; PAM sequence: TTG
aagaactagtgaacaaaact

SEQ ID NO: 214972 - DNA, 20 bp, Artificial Sequence
  Description of Artificial Sequence: Synthetic oligonucleotide
  Target: LAMA2; (-) strand; PAM type: YTN; PAM sequence: CTT
gaagaactagtgaacaaaac

SEQ ID NO: 214973 - DNA, 20 bp, Artificial Sequence
  Description of Artificial Sequence: Synthetic oligonucleotide
  Target: LAMA2; (-) strand; PAM type: YTN; PAM sequence: CTG
gcttgaagaactagtgaaca

SEQ ID NO: 214974 - DNA, 20 bp, Artificial Sequence
  Description of Artificial Sequence: Synthetic oligonucleotide
  Target: LAMA2; (-) strand; PAM type: YTN; PAM sequence: TTA
ctggcttgaagaactagtga

SEQ ID NO: 214975 - DNA, 20 bp, Artificial Sequence
  Description of Artificial Sequence: Synthetic oligonucleotide
  Target: LAMA2; (-) strand; PAM type: YTN; PAM sequence: TTT
actggcttgaagaactagtg

SEQ ID NO: 214976 - DNA, 20 bp, Artificial Sequence
  Description of Artificial Sequence: Synthetic oligonucleotide
  Target: LAMA2; (-) strand; PAM type: YTN; PAM sequence: TTT
tactggcttgaagaactagt

SEQ ID NO: 214977 - DNA, 20 bp, Artificial Sequence
  Description of Artificial Sequence: Synthetic oligonucleotide
  Target: LAMA2; (-) strand; PAM type: YTN; PAM sequence: CTC
aaatagaaacccacagtttt

SEQ ID NO: 214978 - DNA, 20 bp, Artificial Sequence
  Description of Artificial Sequence: Synthetic oligonucleotide
  Target: LAMA2; (-) strand; PAM type: YTN; PAM sequence: CTA
aaactcaaatagaaacccac

SEQ ID NO: 214979 - DNA, 20 bp, Artificial Sequence
  Description of Artificial Sequence: Synthetic oligonucleotide
  Target: LAMA2; (-) strand; PAM type: YTN; PAM sequence: CTC
cagaatggctaaaactcaaa

SEQ ID NO: 214980 - DNA, 20 bp, Artificial Sequence
  Description of Artificial Sequence: Synthetic oligonucleotide
  Target: LAMA2; (-) strand; PAM type: YTN; PAM sequence: CTG
gatgagctccagaatggcta

SEQ ID NO: 214981 - DNA, 20 bp, Artificial Sequence
  Description of Artificial Sequence: Synthetic oligonucleotide
  Target: LAMA2; (-) strand; PAM type: YTN; PAM sequence: TTA
gaaggaaaaggcactggatg

SEQ ID NO: 214982 - DNA, 20 bp, Artificial Sequence
  Description of Artificial Sequence: Synthetic oligonucleotide
  Target: LAMA2; (-) strand; PAM type: YTN; PAM sequence: CTT
agaaggaaaaggcactggat

SEQ ID NO: 214983 - DNA, 20 bp, Artificial Sequence
  Description of Artificial Sequence: Synthetic oligonucleotide
  Target: LAMA2; (-) strand; PAM type: YTN; PAM sequence: CTA
tgaatacttagaaggaaaag

SEQ ID NO: 214984 - DNA, 20 bp, Artificial Sequence
  Description of Artificial Sequence: Synthetic oligonucleotide
  Target: LAMA2; (-) strand; PAM type: YTN; PAM sequence: CTA
agaacaggtaagccaggaag

SEQ ID NO: 214985 - DNA, 20 bp, Artificial Sequence
  Description of Artificial Sequence: Synthetic oligonucleotide
  Target: LAMA2; (-) strand; PAM type: YTN; PAM sequence: CTG
gagtgcacctaagaacaggt

SEQ ID NO: 214986 - DNA, 20 bp, Artificial Sequence
  Description of Artificial Sequence: Synthetic oligonucleotide
  Target: LAMA2; (-) strand; PAM type: YTN; PAM sequence: TTG
gtgtgtgtatgtatatgtgt

SEQ ID NO: 214987 - DNA, 20 bp, Artificial Sequence
  Description of Artificial Sequence: Synthetic oligonucleotide
  Target: LAMA2; (-) strand; PAM type: YTN; PAM sequence: TTT
ggtgtgtgtatgtatatgtg

SEQ ID NO: 214988 - DNA, 20 bp, Artificial Sequence
  Description of Artificial Sequence: Synthetic oligonucleotide
  Target: LAMA2; (-) strand; PAM type: YTN; PAM sequence: CTG
tgtatatatttggtgtgtgt

SEQ ID NO: 214989 - DNA, 20 bp, Artificial Sequence
  Description of Artificial Sequence: Synthetic oligonucleotide
  Target: LAMA2; (-) strand; PAM type: YTN; PAM sequence: TTC
tgtgtatatatttggtgtgt

SEQ ID NO: 214990 - DNA, 20 bp, Artificial Sequence
  Description of Artificial Sequence: Synthetic oligonucleotide
  Target: LAMA2; (-) strand; PAM type: YTN; PAM sequence: CTA
taaattctgtgtatatattt

SEQ ID NO: 214991 - DNA, 20 bp, Artificial Sequence
  Description of Artificial Sequence: Synthetic oligonucleotide
  Target: LAMA2; (-) strand; PAM type: YTN; PAM sequence: CTC
ccagagataacagctataaa

SEQ ID NO: 214992 - DNA, 20 bp, Artificial Sequence
  Description of Artificial Sequence: Synthetic oligonucleotide
  Target: LAMA2; (-) strand; PAM type: YTN; PAM sequence: TTG
gagcaaagctcccagagata

SEQ ID NO: 214993 - DNA, 20 bp, Artificial Sequence
  Description of Artificial Sequence: Synthetic oligonucleotide
  Target: LAMA2; (-) strand; PAM type: YTN; PAM sequence: TTA
ttggagcaaagctcccagag

SEQ ID NO: 214994 - DNA, 20 bp, Artificial Sequence
  Description of Artificial Sequence: Synthetic oligonucleotide
  Target: LAMA2; (-) strand; PAM type: YTN; PAM sequence: TTT
attggagcaaagctcccaga

SEQ ID NO: 214995 - DNA, 20 bp, Artificial Sequence
  Description of Artificial Sequence: Synthetic oligonucleotide
  Target: LAMA2; (-) strand; PAM type: YTN; PAM sequence: TTT
tattggagcaaagctcccag

SEQ ID NO: 214996 - DNA, 20 bp, Artificial Sequence
  Description of Artificial Sequence: Synthetic oligonucleotide
  Target: LAMA2; (-) strand; PAM type: YTN; PAM sequence: CTT
ttattggagcaaagctccca

SEQ ID NO: 214997 - DNA, 20 bp, Artificial Sequence
  Description of Artificial Sequence: Synthetic oligonucleotide
  Target: LAMA2; (-) strand; PAM type: YTN; PAM sequence: TTG
tgaagtagcttttattggag

SEQ ID NO: 214998 - DNA, 20 bp, Artificial Sequence
  Description of Artificial Sequence: Synthetic oligonucleotide
  Target: LAMA2; (-) strand; PAM type: YTN; PAM sequence: TTA
ataattgtgaagtagctttt

SEQ ID NO: 214999 - DNA, 20 bp, Artificial Sequence
  Description of Artificial Sequence: Synthetic oligonucleotide
  Target: LAMA2; (-) strand; PAM type: YTN; PAM sequence: TTT
aataattgtgaagtagcttt

SEQ ID NO: 215000 - DNA, 20 bp, Artificial Sequence
  Description of Artificial Sequence: Synthetic oligonucleotide
  Target: LAMA2; (-) strand; PAM type: YTN; PAM sequence: TTT
taataattgtgaagtagctt

SEQ ID NO: 215001 - DNA, 20 bp, Artificial Sequence
  Description of Artificial Sequence: Synthetic oligonucleotide
  Target: LAMA2; (-) strand; PAM type: YTN; PAM sequence: TTT
ttaataattgtgaagtagct

SEQ ID NO: 215002 - DNA, 20 bp, Artificial Sequence
  Description of Artificial Sequence: Synthetic oligonucleotide
  Target: LAMA2; (-) strand; PAM type: YTN; PAM sequence: CTA
tttttaataattgtgaagta

SEQ ID NO: 215003 - DNA, 20 bp, Artificial Sequence
  Description of Artificial Sequence: Synthetic oligonucleotide
  Target: LAMA2; (-) strand; PAM type: YTN; PAM sequence: TTC
tatttttaataattgtgaag

SEQ ID NO: 215004 - DNA, 20 bp, Artificial Sequence
  Description of Artificial Sequence: Synthetic oligonucleotide
  Target: LAMA2; (-) strand; PAM type: YTN; PAM sequence: TTA
tggaggttctatttttaata

SEQ ID NO: 215005 - DNA, 20 bp, Artificial Sequence
  Description of Artificial Sequence: Synthetic oligonucleotide
  Target: LAMA2; (-) strand; PAM type: YTN; PAM sequence: CTT
atggaggttctatttttaat

SEQ ID NO: 215006 - DNA, 20 bp, Artificial Sequence
  Description of Artificial Sequence: Synthetic oligonucleotide
  Target: LAMA2; (-) strand; PAM type: YTN; PAM sequence: CTA
cttatggaggttctattttt

SEQ ID NO: 215007 - DNA, 20 bp, Artificial Sequence
  Description of Artificial Sequence: Synthetic oligonucleotide
  Target: LAMA2; (-) strand; PAM type: YTN; PAM sequence: TTA
aaatctacttatggaggttc

SEQ ID NO: 215008 - DNA, 20 bp, Artificial Sequence
  Description of Artificial Sequence: Synthetic oligonucleotide
  Target: LAMA2; (-) strand; PAM type: YTN; PAM sequence: TTT
aaaatctacttatggaggtt

SEQ ID NO: 215009 - DNA, 20 bp, Artificial Sequence
  Description of Artificial Sequence: Synthetic oligonucleotide
  Target: LAMA2; (-) strand; PAM type: YTN; PAM sequence: TTT
taaaatctacttatggaggt

SEQ ID NO: 215010 - DNA, 20 bp, Artificial Sequence
  Description of Artificial Sequence: Synthetic oligonucleotide
  Target: LAMA2; (-) strand; PAM type: YTN; PAM sequence: TTC
aaatggcagaaacattttaa

SEQ ID NO: 215011 - DNA, 20 bp, Artificial Sequence
  Description of Artificial Sequence: Synthetic oligonucleotide
  Target: LAMA2; (-) strand; PAM type: YTN; PAM sequence: TTT
caaatggcagaaacatttta

SEQ ID NO: 215012 - DNA, 20 bp, Artificial Sequence
  Description of Artificial Sequence: Synthetic oligonucleotide
  Target: LAMA2; (-) strand; PAM type: YTN; PAM sequence: TTG
gtttcaaatggcagaaacat

SEQ ID NO: 215013 - DNA, 20 bp, Artificial Sequence
  Description of Artificial Sequence: Synthetic oligonucleotide
  Target: LAMA2; (-) strand; PAM type: YTN; PAM sequence: TTT
ggtttcaaatggcagaaaca

SEQ ID NO: 215014 - DNA, 20 bp, Artificial Sequence
  Description of Artificial Sequence: Synthetic oligonucleotide
  Target: LAMA2; (-) strand; PAM type: YTN; PAM sequence: TTT
tggtttcaaatggcagaaac

SEQ ID NO: 215015 - DNA, 20 bp, Artificial Sequence
  Description of Artificial Sequence: Synthetic oligonucleotide
  Target: LAMA2; (-) strand; PAM type: YTN; PAM sequence: TTT
ttggtttcaaatggcagaaa

SEQ ID NO: 215016 - DNA, 20 bp, Artificial Sequence
  Description of Artificial Sequence: Synthetic oligonucleotide
  Target: LAMA2; (-) strand; PAM type: YTN; PAM sequence: CTT
tttggtttcaaatggcagaa

SEQ ID NO: 215017 - DNA, 20 bp, Artificial Sequence
  Description of Artificial Sequence: Synthetic oligonucleotide
  Target: LAMA2; (-) strand; PAM type: YTN; PAM sequence: CTC
aaaatcccactttttggttt

SEQ ID NO: 215018 - DNA, 20 bp, Artificial Sequence
  Description of Artificial Sequence: Synthetic oligonucleotide
  Target: LAMA2; (-) strand; PAM type: YTN; PAM sequence: TTC
tcaaaatcccactttttggt

SEQ ID NO: 215019 - DNA, 20 bp, Artificial Sequence
  Description of Artificial Sequence: Synthetic oligonucleotide
  Target: LAMA2; (-) strand; PAM type: YTN; PAM sequence: CTA
cattctcaaaatcccacttt

SEQ ID NO: 215020 - DNA, 20 bp, Artificial Sequence
  Description of Artificial Sequence: Synthetic oligonucleotide
  Target: LAMA2; (-) strand; PAM type: YTN; PAM sequence: TTG
atgatctacattctcaaaat

SEQ ID NO: 215021 - DNA, 20 bp, Artificial Sequence
  Description of Artificial Sequence: Synthetic oligonucleotide
  Target: LAMA2; (-) strand; PAM type: YTN; PAM sequence: TTT
gatgatctacattctcaaaa

SEQ ID NO: 215022 - DNA, 20 bp, Artificial Sequence
  Description of Artificial Sequence: Synthetic oligonucleotide
  Target: LAMA2; (-) strand; PAM type: YTN; PAM sequence: TTT
tgatgatctacattctcaaa

SEQ ID NO: 215023 - DNA, 20 bp, Artificial Sequence
  Description of Artificial Sequence: Synthetic oligonucleotide
  Target: LAMA2; (-) strand; PAM type: YTN; PAM sequence: TTG
gcatgattttgatgatctac

SEQ ID NO: 215024 - DNA, 20 bp, Artificial Sequence
  Description of Artificial Sequence: Synthetic oligonucleotide
  Target: LAMA2; (-) strand; PAM type: YTN; PAM sequence: TTC
acacatgttggcatgatttt

SEQ ID NO: 215025 - DNA, 20 bp, Artificial Sequence
  Description of Artificial Sequence: Synthetic oligonucleotide
  Target: LAMA2; (-) strand; PAM type: YTN; PAM sequence: CTC
aaataatgtagtatgttcac

SEQ ID NO: 215026 - DNA, 20 bp, Artificial Sequence
  Description of Artificial Sequence: Synthetic oligonucleotide
  Target: LAMA2; (-) strand; PAM type: YTN; PAM sequence: TTC
tcaaataatgtagtatgttc

SEQ ID NO: 215027 - DNA, 20 bp, Artificial Sequence
  Description of Artificial Sequence: Synthetic oligonucleotide
  Target: LAMA2; (-) strand; PAM type: YTN; PAM sequence: TTT
ctcaaataatgtagtatgtt

SEQ ID NO: 215028 - DNA, 20 bp, Artificial Sequence
  Description of Artificial Sequence: Synthetic oligonucleotide
  Target: LAMA2; (-) strand; PAM type: YTN; PAM sequence: CTT
tctcaaataatgtagtatgt

SEQ ID NO: 215029 - DNA, 20 bp, Artificial Sequence
  Description of Artificial Sequence: Synthetic oligonucleotide
  Target: LAMA2; (-) strand; PAM type: YTN; PAM sequence: TTG
ctttctcaaataatgtagta

SEQ ID NO: 215030 - DNA, 20 bp, Artificial Sequence
  Description of Artificial Sequence: Synthetic oligonucleotide
  Target: LAMA2; (-) strand; PAM type: YTN; PAM sequence: TTT
gctttctcaaataatgtagt

SEQ ID NO: 215031 - DNA, 20 bp, Artificial Sequence
  Description of Artificial Sequence: Synthetic oligonucleotide
  Target: LAMA2; (-) strand; PAM type: YTN; PAM sequence: TTA
taccatatttgctttctcaa

SEQ ID NO: 215032 - DNA, 20 bp, Artificial Sequence
  Description of Artificial Sequence: Synthetic oligonucleotide
  Target: LAMA2; (-) strand; PAM type: YTN; PAM sequence: TTT
ataccatatttgctttctca

SEQ ID NO: 215033 - DNA, 20 bp, Artificial Sequence
  Description of Artificial Sequence: Synthetic oligonucleotide
  Target: LAMA2; (-) strand; PAM type: YTN; PAM sequence: TTG
gatgtgtttataccatattt

SEQ ID NO: 215034 - DNA, 20 bp, Artificial Sequence
  Description of Artificial Sequence: Synthetic oligonucleotide
  Target: LAMA2; (-) strand; PAM type: YTN; PAM sequence: TTT
ggatgtgtttataccatatt

SEQ ID NO: 215035 - DNA, 20 bp, Artificial Sequence
  Description of Artificial Sequence: Synthetic oligonucleotide
  Target: LAMA2; (-) strand; PAM type: YTN; PAM sequence: TTA
tttggatgtgtttataccat

SEQ ID NO: 215036 - DNA, 20 bp, Artificial Sequence
  Description of Artificial Sequence: Synthetic oligonucleotide
  Target: LAMA2; (-) strand; PAM type: YTN; PAM sequence: TTT
atttggatgtgtttatacca

SEQ ID NO: 215037 - DNA, 20 bp, Artificial Sequence
  Description of Artificial Sequence: Synthetic oligonucleotide
  Target: LAMA2; (-) strand; PAM type: YTN; PAM sequence: TTT
tatttggatgtgtttatacc

SEQ ID NO: 215038 - DNA, 20 bp, Artificial Sequence
  Description of Artificial Sequence: Synthetic oligonucleotide
  Target: LAMA2; (-) strand; PAM type: YTN; PAM sequence: TTT
ttatttggatgtgtttatac

SEQ ID NO: 215039 - DNA, 20 bp, Artificial Sequence
  Description of Artificial Sequence: Synthetic oligonucleotide
  Target: LAMA2; (-) strand; PAM type: YTN; PAM sequence: CTG
tttttatttggatgtgttta

SEQ ID NO: 215040 - DNA, 20 bp, Artificial Sequence
  Description of Artificial Sequence: Synthetic oligonucleotide
  Target: LAMA2; (-) strand; PAM type: YTN; PAM sequence: TTC
cactgtttttatttggatgt

SEQ ID NO: 215041 - DNA, 20 bp, Artificial Sequence
  Description of Artificial Sequence: Synthetic oligonucleotide
  Target: LAMA2; (-) strand; PAM type: YTN; PAM sequence: CTT
ccactgtttttatttggatg

SEQ ID NO: 215042 - DNA, 20 bp, Artificial Sequence
  Description of Artificial Sequence: Synthetic oligonucleotide
  Target: LAMA2; (-) strand; PAM type: YTN; PAM sequence: CTA
acttccactgtttttatttg

SEQ ID NO: 215043 - DNA, 20 bp, Artificial Sequence
  Description of Artificial Sequence: Synthetic oligonucleotide
  Target: LAMA2; (-) strand; PAM type: YTN; PAM sequence: TTG
aaaaaaatcacctaacttcc

SEQ ID NO: 215044 - DNA, 20 bp, Artificial Sequence
  Description of Artificial Sequence: Synthetic oligonucleotide
  Target: LAMA2; (-) strand; PAM type: YTN; PAM sequence: TTT
gaaaaaaatcacctaacttc

SEQ ID NO: 215045 - DNA, 20 bp, Artificial Sequence
  Description of Artificial Sequence: Synthetic oligonucleotide
  Target: LAMA2; (-) strand; PAM type: YTN; PAM sequence: CTA
caatatggcaaacatttgaa

SEQ ID NO: 215046 - DNA, 20 bp, Artificial Sequence
  Description of Artificial Sequence: Synthetic oligonucleotide
  Target: LAMA2; (-) strand; PAM type: YTN; PAM sequence: CTG
ctacaatatggcaaacattt

SEQ ID NO: 215047 - DNA, 20 bp, Artificial Sequence
  Description of Artificial Sequence: Synthetic oligonucleotide
  Target: LAMA2; (-) strand; PAM type: YTN; PAM sequence: TTC
tgctacaatatggcaaacat

SEQ ID NO: 215048 - DNA, 20 bp, Artificial Sequence
  Description of Artificial Sequence: Synthetic oligonucleotide
  Target: LAMA2; (-) strand; PAM type: YTN; PAM sequence: CTG
aaattctgctacaatatggc

SEQ ID NO: 215049 - DNA, 20 bp, Artificial Sequence
  Description of Artificial Sequence: Synthetic oligonucleotide
  Target: LAMA2; (-) strand; PAM type: YTN; PAM sequence: TTG
aaaaactgaaattctgctac

SEQ ID NO: 215050 - DNA, 20 bp, Artificial Sequence
  Description of Artificial Sequence: Synthetic oligonucleotide
  Target: LAMA2; (-) strand; PAM type: YTN; PAM sequence: TTT
gaaaaactgaaattctgcta

SEQ ID NO: 215051 - DNA, 20 bp, Artificial Sequence
  Description of Artificial Sequence: Synthetic oligonucleotide
  Target: LAMA2; (-) strand; PAM type: YTN; PAM sequence: CTA
agtgtatatcatgtgaaaat

SEQ ID NO: 215052 - DNA, 20 bp, Artificial Sequence
  Description of Artificial Sequence: Synthetic oligonucleotide
  Target: LAMA2; (-) strand; PAM type: YTN; PAM sequence: CTA
gaaaaaggctaagtgtatat

SEQ ID NO: 215053 - DNA, 20 bp, Artificial Sequence
  Description of Artificial Sequence: Synthetic oligonucleotide
  Target: LAMA2; (-) strand; PAM type: YTN; PAM sequence: CTA
tagtgtatatatatatatat

SEQ ID NO: 215054 - DNA, 20 bp, Artificial Sequence
  Description of Artificial Sequence: Synthetic oligonucleotide
  Target: LAMA2; (-) strand; PAM type: YTN; PAM sequence: TTC
tatagtgtatatatatatat

SEQ ID NO: 215055 - DNA, 20 bp, Artificial Sequence
  Description of Artificial Sequence: Synthetic oligonucleotide
  Target: LAMA2; (-) strand; PAM type: YTN; PAM sequence: CTG
ttctatagtgtatatatata

SEQ ID NO: 215056 - DNA, 20 bp, Artificial Sequence
  Description of Artificial Sequence: Synthetic oligonucleotide
  Target: LAMA2; (-) strand; PAM type: YTN; PAM sequence: TTC
tgttctatagtgtatatata

SEQ ID NO: 215057 - DNA, 20 bp, Artificial Sequence
  Description of Artificial Sequence: Synthetic oligonucleotide
  Target: LAMA2; (-) strand; PAM type: YTN; PAM sequence: TTA
tatatagaataatatattct

SEQ ID NO: 215058 - DNA, 20 bp, Artificial Sequence
  Description of Artificial Sequence: Synthetic oligonucleotide
  Target: LAMA2; (-) strand; PAM type: YTN; PAM sequence: TTC
atattatatatagaataata

SEQ ID NO: 215059 - DNA, 20 bp, Artificial Sequence
  Description of Artificial Sequence: Synthetic oligonucleotide
  Target: LAMA2; (-) strand; PAM type: YTN; PAM sequence: TTA
gaatattcatattatatata

SEQ ID NO: 215060 - DNA, 20 bp, Artificial Sequence
  Description of Artificial Sequence: Synthetic oligonucleotide
  Target: LAMA2; (-) strand; PAM type: YTN; PAM sequence: TTA
gagattagaatattcatatt

SEQ ID NO: 215061 - DNA, 20 bp, Artificial Sequence
  Description of Artificial Sequence: Synthetic oligonucleotide
  Target: LAMA2; (-) strand; PAM type: YTN; PAM sequence: TTA
ttagagattagaatattcat

SEQ ID NO: 215062 - DNA, 20 bp, Artificial Sequence
  Description of Artificial Sequence: Synthetic oligonucleotide
  Target: LAMA2; (-) strand; PAM type: YTN; PAM sequence: TTT
attagagattagaatattca

SEQ ID NO: 215063 - DNA, 20 bp, Artificial Sequence
  Description of Artificial Sequence: Synthetic oligonucleotide
  Target: LAMA2; (-) strand; PAM type: YTN; PAM sequence: TTT
tattagagattagaatattc

SEQ ID NO: 215064 - DNA, 20 bp, Artificial Sequence
  Description of Artificial Sequence: Synthetic oligonucleotide
  Target: LAMA2; (-) strand; PAM type: YTN; PAM sequence: CTA
tgtattttattagagattag

SEQ ID NO: 215065 - DNA, 20 bp, Artificial Sequence
  Description of Artificial Sequence: Synthetic oligonucleotide
  Target: LAMA2; (-) strand; PAM type: YTN; PAM sequence: TTA
tactatgtattttattagag

SEQ ID NO: 215066 - DNA, 20 bp, Artificial Sequence
  Description of Artificial Sequence: Synthetic oligonucleotide
  Target: LAMA2; (-) strand; PAM type: YTN; PAM sequence: TTT
atactatgtattttattaga

SEQ ID NO: 215067 - DNA, 20 bp, Artificial Sequence
  Description of Artificial Sequence: Synthetic oligonucleotide
  Target: LAMA2; (-) strand; PAM type: YTN; PAM sequence: CTG
tttatactatgtattttatt

SEQ ID NO: 215068 - DNA, 20 bp, Artificial Sequence
  Description of Artificial Sequence: Synthetic oligonucleotide
  Target: LAMA2; (-) strand; PAM type: YTN; PAM sequence: TTC
tgtttatactatgtatttta

SEQ ID NO: 215069 - DNA, 20 bp, Artificial Sequence
  Description of Artificial Sequence: Synthetic oligonucleotide
  Target: LAMA2; (-) strand; PAM type: YTN; PAM sequence: CTG
aacaaaaatcaaacaatatt

SEQ ID NO: 215070 - DNA, 20 bp, Artificial Sequence
  Description of Artificial Sequence: Synthetic oligonucleotide
  Target: LAMA2; (-) strand; PAM type: YTN; PAM sequence: TTA
taaggaacaatgtctgaaca

SEQ ID NO: 215071 - DNA, 20 bp, Artificial Sequence
  Description of Artificial Sequence: Synthetic oligonucleotide
  Target: LAMA2; (-) strand; PAM type: YTN; PAM sequence: CTG
gttataaggaacaatgtctg

SEQ ID NO: 215072 - DNA, 20 bp, Artificial Sequence
  Description of Artificial Sequence: Synthetic oligonucleotide
  Target: LAMA2; (-) strand; PAM type: YTN; PAM sequence: TTC
tggttataaggaacaatgtc

SEQ ID NO: 215073 - DNA, 20 bp, Artificial Sequence
  Description of Artificial Sequence: Synthetic oligonucleotide
  Target: LAMA2; (-) strand; PAM type: YTN; PAM sequence: TTG
gagttctggttataaggaac

SEQ ID NO: 215074 - DNA, 20 bp, Artificial Sequence
  Description of Artificial Sequence: Synthetic oligonucleotide
  Target: LAMA2; (-) strand; PAM type: YTN; PAM sequence: TTA
gttggagttctggttataag

SEQ ID NO: 215075 - DNA, 20 bp, Artificial Sequence
  Description of Artificial Sequence: Synthetic oligonucleotide
  Target: LAMA2; (-) strand; PAM type: YTN; PAM sequence: TTT
agttggagttctggttataa

SEQ ID NO: 215076 - DNA, 20 bp, Artificial Sequence
  Description of Artificial Sequence: Synthetic oligonucleotide
  Target: LAMA2; (-) strand; PAM type: YTN; PAM sequence: CTA
aataagtttagttggagttc

SEQ ID NO: 215077 - DNA, 20 bp, Artificial Sequence
  Description of Artificial Sequence: Synthetic oligonucleotide
  Target: LAMA2; (-) strand; PAM type: YTN; PAM sequence: CTA
gactaaataagtttagttgg

SEQ ID NO: 215078 - DNA, 20 bp, Artificial Sequence
  Description of Artificial Sequence: Synthetic oligonucleotide
  Target: LAMA2; (-) strand; PAM type: YTN; PAM sequence: CTG
aatagcactagactaaataa

SEQ ID NO: 215079 - DNA, 20 bp, Artificial Sequence
  Description of Artificial Sequence: Synthetic oligonucleotide
  Target: LAMA2; (-) strand; PAM type: YTN; PAM sequence: TTC
tgaatagcactagactaaat

SEQ ID NO: 215080 - DNA, 20 bp, Artificial Sequence
  Description of Artificial Sequence: Synthetic oligonucleotide
  Target: LAMA2; (-) strand; PAM type: YTN; PAM sequence: TTT
ctgaatagcactagactaaa

SEQ ID NO: 215081 - DNA, 20 bp, Artificial Sequence
  Description of Artificial Sequence: Synthetic oligonucleotide
  Target: LAMA2; (-) strand; PAM type: YTN; PAM sequence: TTT
tctgaatagcactagactaa

SEQ ID NO: 215082 - DNA, 20 bp, Artificial Sequence
  Description of Artificial Sequence: Synthetic oligonucleotide
  Target: LAMA2; (-) strand; PAM type: YTN; PAM sequence: TTT
ttctgaatagcactagacta

SEQ ID NO: 215083 - DNA, 20 bp, Artificial Sequence
  Description of Artificial Sequence: Synthetic oligonucleotide
  Target: LAMA2; (-) strand; PAM type: YTN; PAM sequence: TTT
tttctgaatagcactagact

SEQ ID NO: 215084 - DNA, 20 bp, Artificial Sequence
  Description of Artificial Sequence: Synthetic oligonucleotide
  Target: LAMA2; (-) strand; PAM type: YTN; PAM sequence: TTT
ttttctgaatagcactagac

SEQ ID NO: 215085 - DNA, 20 bp, Artificial Sequence
  Description of Artificial Sequence: Synthetic oligonucleotide
  Target: LAMA2; (-) strand; PAM type: YTN; PAM sequence: TTT
tttttctgaatagcactaga

SEQ ID NO: 215086 - DNA, 20 bp, Artificial Sequence
  Description of Artificial Sequence: Synthetic oligonucleotide
  Target: LAMA2; (-) strand; PAM type: YTN; PAM sequence: TTG
acattttttttctgaatagc

SEQ ID NO: 215087 - DNA, 20 bp, Artificial Sequence
  Description of Artificial Sequence: Synthetic oligonucleotide
  Target: LAMA2; (-) strand; PAM type: YTN; PAM sequence: CTA
tgattgacattttttttctg

SEQ ID NO: 215088 - DNA, 20 bp, Artificial Sequence
  Description of Artificial Sequence: Synthetic oligonucleotide
  Target: LAMA2; (-) strand; PAM type: YTN; PAM sequence: TTA
tccatacaactatgattgac

SEQ ID NO: 215089 - DNA, 20 bp, Artificial Sequence
  Description of Artificial Sequence: Synthetic oligonucleotide
  Target: LAMA2; (-) strand; PAM type: YTN; PAM sequence: TTA
atgacataaaagccagtgat

SEQ ID NO: 215090 - DNA, 20 bp, Artificial Sequence
  Description of Artificial Sequence: Synthetic oligonucleotide
  Target: LAMA2; (-) strand; PAM type: YTN; PAM sequence: CTG
taatgttaatgacataaaag

SEQ ID NO: 215091 - DNA, 20 bp, Artificial Sequence
  Description of Artificial Sequence: Synthetic oligonucleotide
  Target: LAMA2; (-) strand; PAM type: YTN; PAM sequence: TTA
aggtcctgtaatgttaatga

SEQ ID NO: 215092 - DNA, 20 bp, Artificial Sequence
  Description of Artificial Sequence: Synthetic oligonucleotide
  Target: LAMA2; (-) strand; PAM type: YTN; PAM sequence: CTT
aaggtcctgtaatgttaatg

SEQ ID NO: 215093 - DNA, 20 bp, Artificial Sequence
  Description of Artificial Sequence: Synthetic oligonucleotide
  Target: LAMA2; (-) strand; PAM type: YTN; PAM sequence: CTC
aacttaaggtcctgtaatgt

SEQ ID NO: 215094 - DNA, 20 bp, Artificial Sequence
  Description of Artificial Sequence: Synthetic oligonucleotide
  Target: LAMA2; (-) strand; PAM type: YTN; PAM sequence: TTA
actcaacttaaggtcctgta

SEQ ID NO: 215095 - DNA, 20 bp, Artificial Sequence
  Description of Artificial Sequence: Synthetic oligonucleotide
  Target: LAMA2; (-) strand; PAM type: YTN; PAM sequence: CTT
aactcaacttaaggtcctgt

SEQ ID NO: 215096 - DNA, 20 bp, Artificial Sequence
  Description of Artificial Sequence: Synthetic oligonucleotide
  Target: LAMA2; (-) strand; PAM type: YTN; PAM sequence: TTC
ttaactcaacttaaggtcct

SEQ ID NO: 215097 - DNA, 20 bp, Artificial Sequence
  Description of Artificial Sequence: Synthetic oligonucleotide
  Target: LAMA2; (-) strand; PAM type: YTN; PAM sequence: CTT
cttaactcaacttaaggtcc

SEQ ID NO: 215098 - DNA, 20 bp, Artificial Sequence
  Description of Artificial Sequence: Synthetic oligonucleotide
  Target: LAMA2; (-) strand; PAM type: YTN; PAM sequence: TTA
catcttcttaactcaactta

SEQ ID NO: 215099 - DNA, 20 bp, Artificial Sequence
  Description of Artificial Sequence: Synthetic oligonucleotide
  Target: LAMA2; (-) strand; PAM type: YTN; PAM sequence: CTT
acatcttcttaactcaactt

SEQ ID NO: 215100 - DNA, 20 bp, Artificial Sequence
  Description of Artificial Sequence: Synthetic oligonucleotide
  Target: LAMA2; (-) strand; PAM type: YTN; PAM sequence: TTG
acttacatcttcttaactca

SEQ ID NO: 215101 - DNA, 20 bp, Artificial Sequence
  Description of Artificial Sequence: Synthetic oligonucleotide
  Target: LAMA2; (-) strand; PAM type: YTN; PAM sequence: TTA
gagagtattgacttacatct

SEQ ID NO: 215102 - DNA, 20 bp, Artificial Sequence
  Description of Artificial Sequence: Synthetic oligonucleotide
  Target: LAMA2; (-) strand; PAM type: YTN; PAM sequence: TTT
agagagtattgacttacatc

SEQ ID NO: 215103 - DNA, 20 bp, Artificial Sequence
  Description of Artificial Sequence: Synthetic oligonucleotide
  Target: LAMA2; (-) strand; PAM type: YTN; PAM sequence: CTT
tagagagtattgacttacat

SEQ ID NO: 215104 - DNA, 20 bp, Artificial Sequence
  Description of Artificial Sequence: Synthetic oligonucleotide
  Target: LAMA2; (-) strand; PAM type: YTN; PAM sequence: CTG
atgaacctttagagagtatt

SEQ ID NO: 215105 - DNA, 20 bp, Artificial Sequence
  Description of Artificial Sequence: Synthetic oligonucleotide
  Target: LAMA2; (-) strand; PAM type: YTN; PAM sequence: CTA
taaatagctgatgaaccttt

SEQ ID NO: 215106 - DNA, 20 bp, Artificial Sequence
  Description of Artificial Sequence: Synthetic oligonucleotide
  Target: LAMA2; (-) strand; PAM type: YTN; PAM sequence: TTA
actataaatagctgatgaac

SEQ ID NO: 215107 - DNA, 20 bp, Artificial Sequence
  Description of Artificial Sequence: Synthetic oligonucleotide
  Target: LAMA2; (-) strand; PAM type: YTN; PAM sequence: TTA
ggagtgtaaattaactataa

SEQ ID NO: 215108 - DNA, 20 bp, Artificial Sequence
  Description of Artificial Sequence: Synthetic oligonucleotide
  Target: LAMA2; (-) strand; PAM type: YTN; PAM sequence: TTA
tgtaaacattaggagtgtaa

SEQ ID NO: 215109 - DNA, 20 bp, Artificial Sequence
  Description of Artificial Sequence: Synthetic oligonucleotide
  Target: LAMA2; (-) strand; PAM type: YTN; PAM sequence: TTA
agattatgtaaacattagga

SEQ ID NO: 215110 - DNA, 20 bp, Artificial Sequence
  Description of Artificial Sequence: Synthetic oligonucleotide
  Target: LAMA2; (-) strand; PAM type: YTN; PAM sequence: TTG
gttaagattatgtaaacatt

SEQ ID NO: 215111 - DNA, 20 bp, Artificial Sequence
  Description of Artificial Sequence: Synthetic oligonucleotide
  Target: LAMA2; (-) strand; PAM type: YTN; PAM sequence: CTT
ggttaagattatgtaaacat

SEQ ID NO: 215112 - DNA, 20 bp, Artificial Sequence
  Description of Artificial Sequence: Synthetic oligonucleotide
  Target: LAMA2; (-) strand; PAM type: YTN; PAM sequence: TTA
cttggttaagattatgtaaa

SEQ ID NO: 215113 - DNA, 20 bp, Artificial Sequence
  Description of Artificial Sequence: Synthetic oligonucleotide
  Target: LAMA2; (-) strand; PAM type: YTN; PAM sequence: TTC
aatatgtgttacttggttaa

SEQ ID NO: 215114 - DNA, 20 bp, Artificial Sequence
  Description of Artificial Sequence: Synthetic oligonucleotide
  Target: LAMA2; (-) strand; PAM type: YTN; PAM sequence: TTC
catattcaatatgtgttact

SEQ ID NO: 215115 - DNA, 20 bp, Artificial Sequence
  Description of Artificial Sequence: Synthetic oligonucleotide
  Target: LAMA2; (-) strand; PAM type: YTN; PAM sequence: TTT
ccatattcaatatgtgttac

SEQ ID NO: 215116 - DNA, 20 bp, Artificial Sequence
  Description of Artificial Sequence: Synthetic oligonucleotide
  Target: LAMA2; (-) strand; PAM type: YTN; PAM sequence: TTA
tttccatattcaatatgtgt

SEQ ID NO: 215117 - DNA, 20 bp, Artificial Sequence
  Description of Artificial Sequence: Synthetic oligonucleotide
  Target: LAMA2; (-) strand; PAM type: YTN; PAM sequence: TTT
atttccatattcaatatgtg

SEQ ID NO: 215118 - DNA, 20 bp, Artificial Sequence
  Description of Artificial Sequence: Synthetic oligonucleotide
  Target: LAMA2; (-) strand; PAM type: YTN; PAM sequence: TTC
aaaagcaccagggcaatatt

SEQ ID NO: 215119 - DNA, 20 bp, Artificial Sequence
  Description of Artificial Sequence: Synthetic oligonucleotide
  Target: LAMA2; (-) strand; PAM type: YTN; PAM sequence: TTC
ccattcaaaagcaccagggc

SEQ ID NO: 215120 - DNA, 20 bp, Artificial Sequence
  Description of Artificial Sequence: Synthetic oligonucleotide
  Target: LAMA2; (-) strand; PAM type: YTN; PAM sequence: TTA
ttcccattcaaaagcaccag

SEQ ID NO: 215121 - DNA, 20 bp, Artificial Sequence
  Description of Artificial Sequence: Synthetic oligonucleotide
  Target: LAMA2; (-) strand; PAM type: YTN; PAM sequence: CTT
attcccattcaaaagcacca

SEQ ID NO: 215122 - DNA, 20 bp, Artificial Sequence
  Description of Artificial Sequence: Synthetic oligonucleotide
  Target: LAMA2; (-) strand; PAM type: YTN; PAM sequence: CTA
cttattcccattcaaaagca

SEQ ID NO: 215123 - DNA, 20 bp, Artificial Sequence
  Description of Artificial Sequence: Synthetic oligonucleotide
  Target: LAMA2; (-) strand; PAM type: YTN; PAM sequence: CTG
tgcctacttattcccattca

SEQ ID NO: 215124 - DNA, 20 bp, Artificial Sequence
  Description of Artificial Sequence: Synthetic oligonucleotide
  Target: LAMA2; (-) strand; PAM type: YTN; PAM sequence: TTA
tgctgtgcctacttattccc

SEQ ID NO: 215125 - DNA, 20 bp, Artificial Sequence
  Description of Artificial Sequence: Synthetic oligonucleotide
  Target: LAMA2; (-) strand; PAM type: YTN; PAM sequence: CTA
ttatgctgtgcctacttatt

SEQ ID NO: 215126 - DNA, 20 bp, Artificial Sequence
  Description of Artificial Sequence: Synthetic oligonucleotide
  Target: LAMA2; (-) strand; PAM type: YTN; PAM sequence: TTA
aatctattatgctgtgccta

SEQ ID NO: 215127 - DNA, 20 bp, Artificial Sequence
  Description of Artificial Sequence: Synthetic oligonucleotide
  Target: LAMA2; (-) strand; PAM type: YTN; PAM sequence: TTA
tatgttaaatctattatgct

SEQ ID NO: 215128 - DNA, 20 bp, Artificial Sequence
  Description of Artificial Sequence: Synthetic oligonucleotide
  Target: LAMA2; (-) strand; PAM type: YTN; PAM sequence: TTC
attatatgttaaatctatta

SEQ ID NO: 215129 - DNA, 20 bp, Artificial Sequence
  Description of Artificial Sequence: Synthetic oligonucleotide
  Target: LAMA2; (-) strand; PAM type: YTN; PAM sequence: TTT
cattatatgttaaatctatt

SEQ ID NO: 215130 - DNA, 20 bp, Artificial Sequence
  Description of Artificial Sequence: Synthetic oligonucleotide
  Target: LAMA2; (-) strand; PAM type: YTN; PAM sequence: TTT
tcattatatgttaaatctat

SEQ ID NO: 215131 - DNA, 20 bp, Artificial Sequence
  Description of Artificial Sequence: Synthetic oligonucleotide
  Target: LAMA2; (-) strand; PAM type: YTN; PAM sequence: TTG
caacccattttcattatatg

SEQ ID NO: 215132 - DNA, 20 bp, Artificial Sequence
  Description of Artificial Sequence: Synthetic oligonucleotide
  Target: LAMA2; (-) strand; PAM type: YTN; PAM sequence: TTA
tagattgcaacccattttca

SEQ ID NO: 215133 - DNA, 20 bp, Artificial Sequence
  Description of Artificial Sequence: Synthetic oligonucleotide
  Target: LAMA2; (-) strand; PAM type: YTN; PAM sequence: TTA
ttatagattgcaacccattt

SEQ ID NO: 215134 - DNA, 20 bp, Artificial Sequence
  Description of Artificial Sequence: Synthetic oligonucleotide
  Target: LAMA2; (-) strand; PAM type: YTN; PAM sequence: CTT
attatagattgcaacccatt

SEQ ID NO: 215135 - DNA, 20 bp, Artificial Sequence
  Description of Artificial Sequence: Synthetic oligonucleotide
  Target: LAMA2; (-) strand; PAM type: YTN; PAM sequence: TTC
agcatgtcttattatagatt

SEQ ID NO: 215136 - DNA, 20 bp, Artificial Sequence
  Description of Artificial Sequence: Synthetic oligonucleotide
  Target: LAMA2; (-) strand; PAM type: YTN; PAM sequence: CTT
cagcatgtcttattatagat

SEQ ID NO: 215137 - DNA, 20 bp, Artificial Sequence
  Description of Artificial Sequence: Synthetic oligonucleotide
  Target: LAMA2; (-) strand; PAM type: YTN; PAM sequence: TTG
aatcttcagcatgtcttatt

SEQ ID NO: 215138 - DNA, 20 bp, Artificial Sequence
  Description of Artificial Sequence: Synthetic oligonucleotide
  Target: LAMA2; (-) strand; PAM type: YTN; PAM sequence: TTA
ttgaatcttcagcatgtctt

SEQ ID NO: 215139 - DNA, 20 bp, Artificial Sequence
  Description of Artificial Sequence: Synthetic oligonucleotide
  Target: LAMA2; (-) strand; PAM type: YTN; PAM sequence: TTT
attgaatcttcagcatgtct

SEQ ID NO: 215140 - DNA, 20 bp, Artificial Sequence
  Description of Artificial Sequence: Synthetic oligonucleotide
  Target: LAMA2; (-) strand; PAM type: YTN; PAM sequence: TTT
tattgaatcttcagcatgtc

SEQ ID NO: 215141 - DNA, 20 bp, Artificial Sequence
  Description of Artificial Sequence: Synthetic oligonucleotide
  Target: LAMA2; (-) strand; PAM type: YTN; PAM sequence: CTT
ttattgaatcttcagcatgt

SEQ ID NO: 215142 - DNA, 20 bp, Artificial Sequence
  Description of Artificial Sequence: Synthetic oligonucleotide
  Target: LAMA2; (-) strand; PAM type: YTN; PAM sequence: CTG
agcttttattgaatcttcag

SEQ ID NO: 215143 - DNA, 20 bp, Artificial Sequence
  Description of Artificial Sequence: Synthetic oligonucleotide
  Target: LAMA2; (-) strand; PAM type: YTN; PAM sequence: TTG
aagaatgaatcaatatctga

SEQ ID NO: 215144 - DNA, 20 bp, Artificial Sequence
  Description of Artificial Sequence: Synthetic oligonucleotide
  Target: LAMA2; (-) strand; PAM type: YTN; PAM sequence: TTT
gaagaatgaatcaatatctg

SEQ ID NO: 215145 - DNA, 20 bp, Artificial Sequence
  Description of Artificial Sequence: Synthetic oligonucleotide
  Target: LAMA2; (-) strand; PAM type: YTN; PAM sequence: CTA
atgaatgaccaatttgaaga

SEQ ID NO: 215146 - DNA, 20 bp, Artificial Sequence
  Description of Artificial Sequence: Synthetic oligonucleotide
  Target: LAMA2; (-) strand; PAM type: YTN; PAM sequence: TTG
ctaatgaatgaccaatttga

SEQ ID NO: 215147 - DNA, 20 bp, Artificial Sequence
  Description of Artificial Sequence: Synthetic oligonucleotide
  Target: LAMA2; (-) strand; PAM type: YTN; PAM sequence: TTA
gttgctaatgaatgaccaat

SEQ ID NO: 215148 - DNA, 20 bp, Artificial Sequence
  Description of Artificial Sequence: Synthetic oligonucleotide
  Target: LAMA2; (-) strand; PAM type: YTN; PAM sequence: CTC
caattagttgctaatgaatg

SEQ ID NO: 215149 - DNA, 20 bp, Artificial Sequence
  Description of Artificial Sequence: Synthetic oligonucleotide
  Target: LAMA2; (-) strand; PAM type: YTN; PAM sequence: TTG
gtcagcaaaggtctccaatt

SEQ ID NO: 215150 - DNA, 20 bp, Artificial Sequence
  Description of Artificial Sequence: Synthetic oligonucleotide
  Target: LAMA2; (-) strand; PAM type: YTN; PAM sequence: TTA
agcatattggtcagcaaagg

SEQ ID NO: 215151 - DNA, 20 bp, Artificial Sequence
  Description of Artificial Sequence: Synthetic oligonucleotide
  Target: LAMA2; (-) strand; PAM type: YTN; PAM sequence: TTA
aaaatcggttaagcatattg

SEQ ID NO: 215152 - DNA, 20 bp, Artificial Sequence
  Description of Artificial Sequence: Synthetic oligonucleotide
  Target: LAMA2; (-) strand; PAM type: YTN; PAM sequence: TTT
aaaaatcggttaagcatatt

SEQ ID NO: 215153 - DNA, 20 bp, Artificial Sequence
  Description of Artificial Sequence: Synthetic oligonucleotide
  Target: LAMA2; (-) strand; PAM type: YTN; PAM sequence: TTT
taaaaatcggttaagcatat

SEQ ID NO: 215154 - DNA, 20 bp, Artificial Sequence
  Description of Artificial Sequence: Synthetic oligonucleotide
  Target: LAMA2; (-) strand; PAM type: YTN; PAM sequence: TTT
ttaaaaatcggttaagcata

SEQ ID NO: 215155 - DNA, 20 bp, Artificial Sequence
  Description of Artificial Sequence: Synthetic oligonucleotide
  Target: LAMA2; (-) strand; PAM type: YTN; PAM sequence: TTA
tttttaaaaatcggttaagc

SEQ ID NO: 215156 - DNA, 20 bp, Artificial Sequence
  Description of Artificial Sequence: Synthetic oligonucleotide
  Target: LAMA2; (-) strand; PAM type: YTN; PAM sequence: TTT
atttttaaaaatcggttaag

SEQ ID NO: 215157 - DNA, 20 bp, Artificial Sequence
  Description of Artificial Sequence: Synthetic oligonucleotide
  Target: LAMA2; (-) strand; PAM type: YTN; PAM sequence: CTG
tttatttttaaaaatcggtt

SEQ ID NO: 215158 - DNA, 20 bp, Artificial Sequence
  Description of Artificial Sequence: Synthetic oligonucleotide
  Target: LAMA2; (-) strand; PAM type: YTN; PAM sequence: TTG
ctgtttatttttaaaaatcg

SEQ ID NO: 215159 - DNA, 20 bp, Artificial Sequence
  Description of Artificial Sequence: Synthetic oligonucleotide
  Target: LAMA2; (-) strand; PAM type: YTN; PAM sequence: TTT
gctgtttatttttaaaaatc

SEQ ID NO: 215160 - DNA, 20 bp, Artificial Sequence
  Description of Artificial Sequence: Synthetic oligonucleotide
  Target: LAMA2; (-) strand; PAM type: YTN; PAM sequence: TTT
tgctgtttatttttaaaaat

SEQ ID NO: 215161 - DNA, 20 bp, Artificial Sequence
  Description of Artificial Sequence: Synthetic oligonucleotide
  Target: LAMA2; (-) strand; PAM type: YTN; PAM sequence: CTA
ttttgctgtttatttttaaa

SEQ ID NO: 215162 - DNA, 20 bp, Artificial Sequence
  Description of Artificial Sequence: Synthetic oligonucleotide
  Target: LAMA2; (-) strand; PAM type: YTN; PAM sequence: TTG
ctattttgctgtttattttt

SEQ ID NO: 215163 - DNA, 20 bp, Artificial Sequence
  Description of Artificial Sequence: Synthetic oligonucleotide
  Target: LAMA2; (-) strand; PAM type: YTN; PAM sequence: TTC
attgctattttgctgtttat

SEQ ID NO: 215164 - DNA, 20 bp, Artificial Sequence
  Description of Artificial Sequence: Synthetic oligonucleotide
  Target: LAMA2; (-) strand; PAM type: YTN; PAM sequence: TTT
cattgctattttgctgttta

SEQ ID NO: 215165 - DNA, 20 bp, Artificial Sequence
  Description of Artificial Sequence: Synthetic oligonucleotide
  Target: LAMA2; (-) strand; PAM type: YTN; PAM sequence: TTA
tgaaatttcattgctatttt

SEQ ID NO: 215166 - DNA, 20 bp, Artificial Sequence
  Description of Artificial Sequence: Synthetic oligonucleotide
  Target: LAMA2; (-) strand; PAM type: YTN; PAM sequence: TTT
atgaaatttcattgctattt

SEQ ID NO: 215167 - DNA, 20 bp, Artificial Sequence
  Description of Artificial Sequence: Synthetic oligonucleotide
  Target: LAMA2; (-) strand; PAM type: YTN; PAM sequence: CTT
tatgaaatttcattgctatt

SEQ ID NO: 215168 - DNA, 20 bp, Artificial Sequence
  Description of Artificial Sequence: Synthetic oligonucleotide
  Target: LAMA2; (-) strand; PAM type: YTN; PAM sequence: TTG
ctttatgaaatttcattgct

SEQ ID NO: 215169 - DNA, 20 bp, Artificial Sequence
  Description of Artificial Sequence: Synthetic oligonucleotide
  Target: LAMA2; (-) strand; PAM type: YTN; PAM sequence: TTA
tggtcagggaatagttgctt

SEQ ID NO: 215170 - DNA, 20 bp, Artificial Sequence
  Description of Artificial Sequence: Synthetic oligonucleotide
  Target: LAMA2; (-) strand; PAM type: YTN; PAM sequence: TTT
atggtcagggaatagttgct

SEQ ID NO: 215171 - DNA, 20 bp, Artificial Sequence
  Description of Artificial Sequence: Synthetic oligonucleotide
  Target: LAMA2; (-) strand; PAM type: YTN; PAM sequence: TTT
tatggtcagggaatagttgc

SEQ ID NO: 215172 - DNA, 20 bp, Artificial Sequence
  Description of Artificial Sequence: Synthetic oligonucleotide
  Target: LAMA2; (-) strand; PAM type: YTN; PAM sequence: TTG
ttttatggtcagggaatagt

SEQ ID NO: 215173 - DNA, 20 bp, Artificial Sequence
  Description of Artificial Sequence: Synthetic oligonucleotide
  Target: LAMA2; (-) strand; PAM type: YTN; PAM sequence: CTT
gttttatggtcagggaatag

SEQ ID NO: 215174 - DNA, 20 bp, Artificial Sequence
  Description of Artificial Sequence: Synthetic oligonucleotide
  Target: LAMA2; (-) strand; PAM type: YTN; PAM sequence: TTG
ccttgttttatggtcaggga

SEQ ID NO: 215175 - DNA, 20 bp, Artificial Sequence
  Description of Artificial Sequence: Synthetic oligonucleotide
  Target: LAMA2; (-) strand; PAM type: YTN; PAM sequence: TTA
attgccttgttttatggtca

SEQ ID NO: 215176 - DNA, 20 bp, Artificial Sequence
  Description of Artificial Sequence: Synthetic oligonucleotide
  Target: LAMA2; (-) strand; PAM type: YTN; PAM sequence: TTT
aattgccttgttttatggtc

SEQ ID NO: 215177 - DNA, 20 bp, Artificial Sequence
  Description of Artificial Sequence: Synthetic oligonucleotide
  Target: LAMA2; (-) strand; PAM type: YTN; PAM sequence: TTG
cacaatttaattgccttgtt

SEQ ID NO: 215178 - DNA, 20 bp, Artificial Sequence
  Description of Artificial Sequence: Synthetic oligonucleotide
  Target: LAMA2; (-) strand; PAM type: YTN; PAM sequence: TTT
gcacaatttaattgccttgt

SEQ ID NO: 215179 - DNA, 20 bp, Artificial Sequence
  Description of Artificial Sequence: Synthetic oligonucleotide
  Target: LAMA2; (-) strand; PAM type: YTN; PAM sequence: CTT
tgcacaatttaattgccttg

SEQ ID NO: 215180 - DNA, 20 bp, Artificial Sequence
  Description of Artificial Sequence: Synthetic oligonucleotide
  Target: LAMA2; (-) strand; PAM type: YTN; PAM sequence: TTA
acctttgcacaatttaattg

SEQ ID NO: 215181 - DNA, 20 bp, Artificial Sequence
  Description of Artificial Sequence: Synthetic oligonucleotide
  Target: LAMA2; (-) strand; PAM type: YTN; PAM sequence: CTC
aaaattaacctttgcacaat

SEQ ID NO: 215182 - DNA, 20 bp, Artificial Sequence
  Description of Artificial Sequence: Synthetic oligonucleotide
  Target: LAMA2; (-) strand; PAM type: YTN; PAM sequence: TTA
tgtgctcaaaattaaccttt

SEQ ID NO: 215183 - DNA, 20 bp, Artificial Sequence
  Description of Artificial Sequence: Synthetic oligonucleotide
  Target: LAMA2; (-) strand; PAM type: YTN; PAM sequence: CTG
attatgtgctcaaaattaac

SEQ ID NO: 215184 - DNA, 20 bp, Artificial Sequence
  Description of Artificial Sequence: Synthetic oligonucleotide
  Target: LAMA2; (-) strand; PAM type: YTN; PAM sequence: TTA
ctgattatgtgctcaaaatt

SEQ ID NO: 215185 - DNA, 20 bp, Artificial Sequence
  Description of Artificial Sequence: Synthetic oligonucleotide
  Target: LAMA2; (-) strand; PAM type: YTN; PAM sequence: TTA
cagttactgattatgtgctc

SEQ ID NO: 215186 - DNA, 20 bp, Artificial Sequence
  Description of Artificial Sequence: Synthetic oligonucleotide
  Target: LAMA2; (-) strand; PAM type: YTN; PAM sequence: CTA
ttacagttactgattatgtg

SEQ ID NO: 215187 - DNA, 20 bp, Artificial Sequence
  Description of Artificial Sequence: Synthetic oligonucleotide
  Target: LAMA2; (-) strand; PAM type: YTN; PAM sequence: TTC
tattacagttactgattatg

SEQ ID NO: 215188 - DNA, 20 bp, Artificial Sequence
  Description of Artificial Sequence: Synthetic oligonucleotide
  Target: LAMA2; (-) strand; PAM type: YTN; PAM sequence: TTT
ctattacagttactgattat

SEQ ID NO: 215189 - DNA, 20 bp, Artificial Sequence
  Description of Artificial Sequence: Synthetic oligonucleotide
  Target: LAMA2; (-) strand; PAM type: YTN; PAM sequence: TTG
tttctattacagttactgat

SEQ ID NO: 215190 - DNA, 20 bp, Artificial Sequence
  Description of Artificial Sequence: Synthetic oligonucleotide
  Target: LAMA2; (-) strand; PAM type: YTN; PAM sequence: TTT
gtttctattacagttactga

SEQ ID NO: 215191 - DNA, 20 bp, Artificial Sequence
  Description of Artificial Sequence: Synthetic oligonucleotide
  Target: LAMA2; (-) strand; PAM type: YTN; PAM sequence: TTG
atttgtttctattacagtta

SEQ ID NO: 215192 - DNA, 20 bp, Artificial Sequence
  Description of Artificial Sequence: Synthetic oligonucleotide
  Target: LAMA2; (-) strand; PAM type: YTN; PAM sequence: TTT
gatttgtttctattacagtt

SEQ ID NO: 215193 - DNA, 20 bp, Artificial Sequence
  Description of Artificial Sequence: Synthetic oligonucleotide
  Target: LAMA2; (-) strand; PAM type: YTN; PAM sequence: CTT
tgatttgtttctattacagt

SEQ ID NO: 215194 - DNA, 20 bp, Artificial Sequence
  Description of Artificial Sequence: Synthetic oligonucleotide
  Target: LAMA2; (-) strand; PAM type: YTN; PAM sequence: TTC
tttgatttgtttctattaca

SEQ ID NO: 215195 - DNA, 20 bp, Artificial Sequence
  Description of Artificial Sequence: Synthetic oligonucleotide
  Target: LAMA2; (-) strand; PAM type: YTN; PAM sequence: TTT
ctttgatttgtttctattac

SEQ ID NO: 215196 - DNA, 20 bp, Artificial Sequence
  Description of Artificial Sequence: Synthetic oligonucleotide
  Target: LAMA2; (-) strand; PAM type: YTN; PAM sequence: TTT
tctttgatttgtttctatta

SEQ ID NO: 215197 - DNA, 20 bp, Artificial Sequence
  Description of Artificial Sequence: Synthetic oligonucleotide
  Target: LAMA2; (-) strand; PAM type: YTN; PAM sequence: CTT
ttctttgatttgtttctatt

SEQ ID NO: 215198 - DNA, 20 bp, Artificial Sequence
  Description of Artificial Sequence: Synthetic oligonucleotide
  Target: LAMA2; (-) strand; PAM type: YTN; PAM sequence: TTC
ttttctttgatttgtttcta

SEQ ID NO: 215199 - DNA, 20 bp, Artificial Sequence
  Description of Artificial Sequence: Synthetic oligonucleotide
  Target: LAMA2; (-) strand; PAM type: YTN; PAM sequence: TTC
aattcttttctttgatttgt

SEQ ID NO: 215200 - DNA, 20 bp, Artificial Sequence
  Description of Artificial Sequence: Synthetic oligonucleotide
  Target: LAMA2; (-) strand; PAM type: YTN; PAM sequence: TTT
caattcttttctttgatttg

SEQ ID NO: 215201 - DNA, 20 bp, Artificial Sequence
  Description of Artificial Sequence: Synthetic oligonucleotide
  Target: LAMA2; (-) strand; PAM type: YTN; PAM sequence: CTT
tcaattcttttctttgattt

SEQ ID NO: 215202 - DNA, 20 bp, Artificial Sequence
  Description of Artificial Sequence: Synthetic oligonucleotide
  Target: LAMA2; (-) strand; PAM type: YTN; PAM sequence: TTA
ggatctttcaattcttttct

SEQ ID NO: 215203 - DNA, 20 bp, Artificial Sequence
  Description of Artificial Sequence: Synthetic oligonucleotide
  Target: LAMA2; (-) strand; PAM type: YTN; PAM sequence: TTT
aggatctttcaattcttttc

SEQ ID NO: 215204 - DNA, 20 bp, Artificial Sequence
  Description of Artificial Sequence: Synthetic oligonucleotide
  Target: LAMA2; (-) strand; PAM type: YTN; PAM sequence: TTA
catttaggatctttcaattc

SEQ ID NO: 215205 - DNA, 20 bp, Artificial Sequence
  Description of Artificial Sequence: Synthetic oligonucleotide
  Target: LAMA2; (-) strand; PAM type: YTN; PAM sequence: TTT
acatttaggatctttcaatt

SEQ ID NO: 215206 - DNA, 20 bp, Artificial Sequence
  Description of Artificial Sequence: Synthetic oligonucleotide
  Target: LAMA2; (-) strand; PAM type: YTN; PAM sequence: CTA
ataaaatttacatttaggat

SEQ ID NO: 215207 - DNA, 20 bp, Artificial Sequence
  Description of Artificial Sequence: Synthetic oligonucleotide
  Target: LAMA2; (-) strand; PAM type: YTN; PAM sequence: CTA
aagacactaataaaatttac

SEQ ID NO: 215208 - DNA, 20 bp, Artificial Sequence
  Description of Artificial Sequence: Synthetic oligonucleotide
  Target: LAMA2; (-) strand; PAM type: YTN; PAM sequence: CTA
accataaaactaaagacact

SEQ ID NO: 215209 - DNA, 20 bp, Artificial Sequence
  Description of Artificial Sequence: Synthetic oligonucleotide
  Target: LAMA2; (-) strand; PAM type: YTN; PAM sequence: TTC
taaccataaaactaaagaca

SEQ ID NO: 215210 - DNA, 20 bp, Artificial Sequence
  Description of Artificial Sequence: Synthetic oligonucleotide
  Target: LAMA2; (-) strand; PAM type: YTN; PAM sequence: TTT
ctaaccataaaactaaagac

SEQ ID NO: 215211 - DNA, 20 bp, Artificial Sequence
  Description of Artificial Sequence: Synthetic oligonucleotide
  Target: LAMA2; (-) strand; PAM type: YTN; PAM sequence: TTT
tctaaccataaaactaaaga

SEQ ID NO: 215212 - DNA, 20 bp, Artificial Sequence
  Description of Artificial Sequence: Synthetic oligonucleotide
  Target: LAMA2; (-) strand; PAM type: YTN; PAM sequence: TTC
atagagttttctaaccataa

SEQ ID NO: 215213 - DNA, 20 bp, Artificial Sequence
  Description of Artificial Sequence: Synthetic oligonucleotide
  Target: LAMA2; (-) strand; PAM type: YTN; PAM sequence: CTT
catagagttttctaaccata

SEQ ID NO: 215214 - DNA, 20 bp, Artificial Sequence
  Description of Artificial Sequence: Synthetic oligonucleotide
  Target: LAMA2; (-) strand; PAM type: YTN; PAM sequence: TTG
cttcatagagttttctaacc

SEQ ID NO: 215215 - DNA, 20 bp, Artificial Sequence
  Description of Artificial Sequence: Synthetic oligonucleotide
  Target: LAMA2; (-) strand; PAM type: YTN; PAM sequence: TTG
ttgcttcatagagttttcta

SEQ ID NO: 215216 - DNA, 20 bp, Artificial Sequence
  Description of Artificial Sequence: Synthetic oligonucleotide
  Target: LAMA2; (-) strand; PAM type: YTN; PAM sequence: CTC
accatgccattgttgcttca

SEQ ID NO: 215217 - DNA, 20 bp, Artificial Sequence
  Description of Artificial Sequence: Synthetic oligonucleotide
  Target: LAMA2; (-) strand; PAM type: YTN; PAM sequence: TTA
tccctcaccatgccattgtt

SEQ ID NO: 215218 - DNA, 20 bp, Artificial Sequence
  Description of Artificial Sequence: Synthetic oligonucleotide
  Target: LAMA2; (-) strand; PAM type: YTN; PAM sequence: CTT
atccctcaccatgccattgt

SEQ ID NO: 215219 - DNA, 20 bp, Artificial Sequence
  Description of Artificial Sequence: Synthetic oligonucleotide
  Target: LAMA2; (-) strand; PAM type: YTN; PAM sequence: TTA
ataaaacaaataacttatcc

SEQ ID NO: 215220 - DNA, 20 bp, Artificial Sequence
  Description of Artificial Sequence: Synthetic oligonucleotide
  Target: LAMA2; (-) strand; PAM type: YTN; PAM sequence: TTT
aataaaacaaataacttatc

SEQ ID NO: 215221 - DNA, 20 bp, Artificial Sequence
  Description of Artificial Sequence: Synthetic oligonucleotide
  Target: LAMA2; (-) strand; PAM type: YTN; PAM sequence: CTT
taataaaacaaataacttat

SEQ ID NO: 215222 - DNA, 20 bp, Artificial Sequence
  Description of Artificial Sequence: Synthetic oligonucleotide
  Target: LAMA2; (-) strand; PAM type: YTN; PAM sequence: TTA
aatctttaataaaacaaata

SEQ ID NO: 215223 - DNA, 20 bp, Artificial Sequence
  Description of Artificial Sequence: Synthetic oligonucleotide
  Target: LAMA2; (-) strand; PAM type: YTN; PAM sequence: TTT
aaatctttaataaaacaaat

SEQ ID NO: 215224 - DNA, 20 bp, Artificial Sequence
  Description of Artificial Sequence: Synthetic oligonucleotide
  Target: LAMA2; (-) strand; PAM type: YTN; PAM sequence: TTA
tttaaatctttaataaaaca

SEQ ID NO: 215225 - DNA, 20 bp, Artificial Sequence
  Description of Artificial Sequence: Synthetic oligonucleotide
  Target: LAMA2; (-) strand; PAM type: YTN; PAM sequence: CTT
atttaaatctttaataaaac

SEQ ID NO: 215226 - DNA, 20 bp, Artificial Sequence
  Description of Artificial Sequence: Synthetic oligonucleotide
  Target: LAMA2; (-) strand; PAM type: YTN; PAM sequence: TTG
gtaaagcttatttaaatctt

SEQ ID NO: 215227 - DNA, 20 bp, Artificial Sequence
  Description of Artificial Sequence: Synthetic oligonucleotide
  Target: LAMA2; (-) strand; PAM type: YTN; PAM sequence: CTT
ggtaaagcttatttaaatct

SEQ ID NO: 215228 - DNA, 20 bp, Artificial Sequence
  Description of Artificial Sequence: Synthetic oligonucleotide
  Target: LAMA2; (-) strand; PAM type: YTN; PAM sequence: CTG
gtccttggtaaagcttattt

SEQ ID NO: 215229 - DNA, 20 bp, Artificial Sequence
  Description of Artificial Sequence: Synthetic oligonucleotide
  Target: LAMA2; (-) strand; PAM type: YTN; PAM sequence: CTA
aagtagaaccaaaatctggt

SEQ ID NO: 215230 - DNA, 20 bp, Artificial Sequence
  Description of Artificial Sequence: Synthetic oligonucleotide
  Target: LAMA2; (-) strand; PAM type: YTN; PAM sequence: TTG
tcagggcctaaagtagaacc

SEQ ID NO: 215231 - DNA, 20 bp, Artificial Sequence
  Description of Artificial Sequence: Synthetic oligonucleotide
  Target: LAMA2; (-) strand; PAM type: YTN; PAM sequence: CTT
gtcagggcctaaagtagaac

SEQ ID NO: 215232 - DNA, 20 bp, Artificial Sequence
  Description of Artificial Sequence: Synthetic oligonucleotide
  Target: LAMA2; (-) strand; PAM type: YTN; PAM sequence: TTC
ttgtcagggcctaaagtaga

SEQ ID NO: 215233 - DNA, 20 bp, Artificial Sequence
  Description of Artificial Sequence: Synthetic oligonucleotide
  Target: LAMA2; (-) strand; PAM type: YTN; PAM sequence: CTT
cttgtcagggcctaaagtag

SEQ ID NO: 215234 - DNA, 20 bp, Artificial Sequence
  Description of Artificial Sequence: Synthetic oligonucleotide
  Target: LAMA2; (-) strand; PAM type: YTN; PAM sequence: TTA
caagacttcttgtcagggcc

SEQ ID NO: 215235 - DNA, 20 bp, Artificial Sequence
  Description of Artificial Sequence: Synthetic oligonucleotide
  Target: LAMA2; (-) strand; PAM type: YTN; PAM sequence: CTT
acaagacttcttgtcagggc

SEQ ID NO: 215236 - DNA, 20 bp, Artificial Sequence
  Description of Artificial Sequence: Synthetic oligonucleotide
  Target: LAMA2; (-) strand; PAM type: YTN; PAM sequence: TTA
aaaagcttacaagacttctt

SEQ ID NO: 215237 - DNA, 20 bp, Artificial Sequence
  Description of Artificial Sequence: Synthetic oligonucleotide
  Target: LAMA2; (-) strand; PAM type: YTN; PAM sequence: TTT
aaaaagcttacaagacttct

SEQ ID NO: 215238 - DNA, 20 bp, Artificial Sequence
  Description of Artificial Sequence: Synthetic oligonucleotide
  Target: LAMA2; (-) strand; PAM type: YTN; PAM sequence: CTT
taaaaagcttacaagacttc

SEQ ID NO: 215239 - DNA, 20 bp, Artificial Sequence
  Description of Artificial Sequence: Synthetic oligonucleotide
  Target: LAMA2; (-) strand; PAM type: YTN; PAM sequence: CTC
tttaaaaagcttacaagact

SEQ ID NO: 215240 - DNA, 20 bp, Artificial Sequence
  Description of Artificial Sequence: Synthetic oligonucleotide
  Target: LAMA2; (-) strand; PAM type: YTN; PAM sequence: TTG
aagtgagctctttaaaaagc

SEQ ID NO: 215241 - DNA, 20 bp, Artificial Sequence
  Description of Artificial Sequence: Synthetic oligonucleotide
  Target: LAMA2; (-) strand; PAM type: YTN; PAM sequence: TTT
gaagtgagctctttaaaaag

SEQ ID NO: 215242 - DNA, 20 bp, Artificial Sequence
  Description of Artificial Sequence: Synthetic oligonucleotide
  Target: LAMA2; (-) strand; PAM type: YTN; PAM sequence: CTA
tgatttgaagtgagctcttt

SEQ ID NO: 215243 - DNA, 20 bp, Artificial Sequence
  Description of Artificial Sequence: Synthetic oligonucleotide
  Target: LAMA2; (-) strand; PAM type: YTN; PAM sequence: TTG
ataactatgatttgaagtga

SEQ ID NO: 215244 - DNA, 20 bp, Artificial Sequence
  Description of Artificial Sequence: Synthetic oligonucleotide
  Target: LAMA2; (-) strand; PAM type: YTN; PAM sequence: TTA
gtaagattgataactatgat

SEQ ID NO: 215245 - DNA, 20 bp, Artificial Sequence
  Description of Artificial Sequence: Synthetic oligonucleotide
  Target: LAMA2; (-) strand; PAM type: YTN; PAM sequence: TTA
tgaattagtaagattgataa

SEQ ID NO: 215246 - DNA, 20 bp, Artificial Sequence
  Description of Artificial Sequence: Synthetic oligonucleotide
  Target: LAMA2; (-) strand; PAM type: YTN; PAM sequence: CTC
agagaagataaatgatatgt

SEQ ID NO: 215247 - DNA, 20 bp, Artificial Sequence
  Description of Artificial Sequence: Synthetic oligonucleotide
  Target: LAMA2; (-) strand; PAM type: YTN; PAM sequence: TTA
taaaaatgaaggaagtgcag

SEQ ID NO: 215248 - DNA, 20 bp, Artificial Sequence
  Description of Artificial Sequence: Synthetic oligonucleotide
  Target: LAMA2; (-) strand; PAM type: YTN; PAM sequence: TTT
ataaaaatgaaggaagtgca

SEQ ID NO: 215249 - DNA, 20 bp, Artificial Sequence
  Description of Artificial Sequence: Synthetic oligonucleotide
  Target: LAMA2; (-) strand; PAM type: YTN; PAM sequence: CTT
tataaaaatgaaggaagtgc

SEQ ID NO: 215250 - DNA, 20 bp, Artificial Sequence
  Description of Artificial Sequence: Synthetic oligonucleotide
  Target: LAMA2; (-) strand; PAM type: YTN; PAM sequence: TTC
cactttataaaaatgaagga

SEQ ID NO: 215251 - DNA, 20 bp, Artificial Sequence
  Description of Artificial Sequence: Synthetic oligonucleotide
  Target: LAMA2; (-) strand; PAM type: YTN; PAM sequence: TTT
ccactttataaaaatgaagg

SEQ ID NO: 215252 - DNA, 20 bp, Artificial Sequence
  Description of Artificial Sequence: Synthetic oligonucleotide
  Target: LAMA2; (-) strand; PAM type: YTN; PAM sequence: CTT
tccactttataaaaatgaag

SEQ ID NO: 215253 - DNA, 20 bp, Artificial Sequence
  Description of Artificial Sequence: Synthetic oligonucleotide
  Target: LAMA2; (-) strand; PAM type: YTN; PAM sequence: TTC
tttccactttataaaaatga

SEQ ID NO: 215254 - DNA, 20 bp, Artificial Sequence
  Description of Artificial Sequence: Synthetic oligonucleotide
  Target: LAMA2; (-) strand; PAM type: YTN; PAM sequence: TTA
attctttccactttataaaa

SEQ ID NO: 215255 - DNA, 20 bp, Artificial Sequence
  Description of Artificial Sequence: Synthetic oligonucleotide
  Target: LAMA2; (-) strand; PAM type: YTN; PAM sequence: TTA
ttaattctttccactttata

SEQ ID NO: 215256 - DNA, 20 bp, Artificial Sequence
  Description of Artificial Sequence: Synthetic oligonucleotide
  Target: LAMA2; (-) strand; PAM type: YTN; PAM sequence: TTT
attaattctttccactttat

SEQ ID NO: 215257 - DNA, 20 bp, Artificial Sequence
  Description of Artificial Sequence: Synthetic oligonucleotide
  Target: LAMA2; (-) strand; PAM type: YTN; PAM sequence: TTT
tattaattctttccacttta

SEQ ID NO: 215258 - DNA, 20 bp, Artificial Sequence
  Description of Artificial Sequence: Synthetic oligonucleotide
  Target: LAMA2; (-) strand; PAM type: YTN; PAM sequence: TTG
tataaattttattaattctt

SEQ ID NO: 215259 - DNA, 20 bp, Artificial Sequence
  Description of Artificial Sequence: Synthetic oligonucleotide
  Target: LAMA2; (-) strand; PAM type: YTN; PAM sequence: TTC
ccatataacccattgtataa

SEQ ID NO: 215260 - DNA, 20 bp, Artificial Sequence
  Description of Artificial Sequence: Synthetic oligonucleotide
  Target: LAMA2; (-) strand; PAM type: YTN; PAM sequence: TTA
attcccatataacccattgt

SEQ ID NO: 215261 - DNA, 20 bp, Artificial Sequence
  Description of Artificial Sequence: Synthetic oligonucleotide
  Target: LAMA2; (-) strand; PAM type: YTN; PAM sequence: TTT
aattcccatataacccattg

SEQ ID NO: 215262 - DNA, 20 bp, Artificial Sequence
  Description of Artificial Sequence: Synthetic oligonucleotide
  Target: LAMA2; (-) strand; PAM type: YTN; PAM sequence: TTA
tttaattcccatataaccca

SEQ ID NO: 215263 - DNA, 20 bp, Artificial Sequence
  Description of Artificial Sequence: Synthetic oligonucleotide
  Target: LAMA2; (-) strand; PAM type: YTN; PAM sequence: TTC
atattatttaattcccatat

SEQ ID NO: 215264 - DNA, 20 bp, Artificial Sequence
  Description of Artificial Sequence: Synthetic oligonucleotide
  Target: LAMA2; (-) strand; PAM type: YTN; PAM sequence: CTT
catattatttaattcccata

SEQ ID NO: 215265 - DNA, 20 bp, Artificial Sequence
  Description of Artificial Sequence: Synthetic oligonucleotide
  Target: LAMA2; (-) strand; PAM type: YTN; PAM sequence: TTC
ttcatattatttaattccca

SEQ ID NO: 215266 - DNA, 20 bp, Artificial Sequence
  Description of Artificial Sequence: Synthetic oligonucleotide
  Target: LAMA2; (-) strand; PAM type: YTN; PAM sequence: CTA
tattcttcatattatttaat

SEQ ID NO: 215267 - DNA, 20 bp, Artificial Sequence
  Description of Artificial Sequence: Synthetic oligonucleotide
  Target: LAMA2; (-) strand; PAM type: YTN; PAM sequence: TTC
tatattcttcatattattta

SEQ ID NO: 215268 - DNA, 20 bp, Artificial Sequence
  Description of Artificial Sequence: Synthetic oligonucleotide
  Target: LAMA2; (-) strand; PAM type: YTN; PAM sequence: CTA
ttctatattcttcatattat

SEQ ID NO: 215269 - DNA, 20 bp, Artificial Sequence
  Description of Artificial Sequence: Synthetic oligonucleotide
  Target: LAMA2; (-) strand; PAM type: YTN; PAM sequence: CTG
aagctattctatattcttca

SEQ ID NO: 215270 - DNA, 20 bp, Artificial Sequence
  Description of Artificial Sequence: Synthetic oligonucleotide
  Target: LAMA2; (-) strand; PAM type: YTN; PAM sequence: TTC
tgaagctattctatattctt

SEQ ID NO: 215271 - DNA, 20 bp, Artificial Sequence
  Description of Artificial Sequence: Synthetic oligonucleotide
  Target: LAMA2; (-) strand; PAM type: YTN; PAM sequence: TTG
attctgaagctattctatat

SEQ ID NO: 215272 - DNA, 20 bp, Artificial Sequence
  Description of Artificial Sequence: Synthetic oligonucleotide
  Target: LAMA2; (-) strand; PAM type: YTN; PAM sequence: TTA
cagagtacaagaaacattga

SEQ ID NO: 215273 - DNA, 20 bp, Artificial Sequence
  Description of Artificial Sequence: Synthetic oligonucleotide
  Target: LAMA2; (-) strand; PAM type: YTN; PAM sequence: CTA
caaagggattacagagtaca

SEQ ID NO: 215274 - DNA, 20 bp, Artificial Sequence
  Description of Artificial Sequence: Synthetic oligonucleotide
  Target: LAMA2; (-) strand; PAM type: YTN; PAM sequence: TTA
aataaataaagagagcaaaa

SEQ ID NO: 215275 - DNA, 20 bp, Artificial Sequence
  Description of Artificial Sequence: Synthetic oligonucleotide
  Target: LAMA2; (-) strand; PAM type: YTN; PAM sequence: TTA
tcccacataattaaataaat

SEQ ID NO: 215276 - DNA, 20 bp, Artificial Sequence
  Description of Artificial Sequence: Synthetic oligonucleotide
  Target: LAMA2; (-) strand; PAM type: YTN; PAM sequence: TTA
tgtaccaattatcccacata

SEQ ID NO: 215277 - DNA, 20 bp, Artificial Sequence
  Description of Artificial Sequence: Synthetic oligonucleotide
  Target: LAMA2; (-) strand; PAM type: YTN; PAM sequence: TTG
gattatgtaccaattatccc

SEQ ID NO: 215278 - DNA, 20 bp, Artificial Sequence
  Description of Artificial Sequence: Synthetic oligonucleotide
  Target: LAMA2; (-) strand; PAM type: YTN; PAM sequence: TTC
agaaaatatagaattggatt

SEQ ID NO: 215279 - DNA, 20 bp, Artificial Sequence
  Description of Artificial Sequence: Synthetic oligonucleotide
  Target: LAMA2; (-) strand; PAM type: YTN; PAM sequence: TTG
tatgttcagaaaatatagaa

SEQ ID NO: 215280 - DNA, 20 bp, Artificial Sequence
  Description of Artificial Sequence: Synthetic oligonucleotide
  Target: LAMA2; (-) strand; PAM type: YTN; PAM sequence: TTA
tgttgtatgttcagaaaata

SEQ ID NO: 215281 - DNA, 20 bp, Artificial Sequence
  Description of Artificial Sequence: Synthetic oligonucleotide
  Target: LAMA2; (-) strand; PAM type: YTN; PAM sequence: TTT
atgttgtatgttcagaaaat

SEQ ID NO: 215282 - DNA, 20 bp, Artificial Sequence
  Description of Artificial Sequence: Synthetic oligonucleotide
  Target: LAMA2; (-) strand; PAM type: YTN; PAM sequence: CTT
tatgttgtatgttcagaaaa

SEQ ID NO: 215283 - DNA, 20 bp, Artificial Sequence
  Description of Artificial Sequence: Synthetic oligonucleotide
  Target: LAMA2; (-) strand; PAM type: YTN; PAM sequence: TTC
tttatgttgtatgttcagaa

SEQ ID NO: 215284 - DNA, 20 bp, Artificial Sequence
  Description of Artificial Sequence: Synthetic oligonucleotide
  Target: LAMA2; (-) strand; PAM type: YTN; PAM sequence: TTT
ctttatgttgtatgttcaga

SEQ ID NO: 215285 - DNA, 20 bp, Artificial Sequence
  Description of Artificial Sequence: Synthetic oligonucleotide
  Target: LAMA2; (-) strand; PAM type: YTN; PAM sequence: TTT
tctttatgttgtatgttcag

SEQ ID NO: 215286 - DNA, 20 bp, Artificial Sequence
  Description of Artificial Sequence: Synthetic oligonucleotide
  Target: LAMA2; (-) strand; PAM type: YTN; PAM sequence: CTC
agcaatcatgggaggaagcc

SEQ ID NO: 215287 - DNA, 20 bp, Artificial Sequence
  Description of Artificial Sequence: Synthetic oligonucleotide
  Target: LAMA2; (-) strand; PAM type: YTN; PAM sequence: TTC
ccaggcctcagcaatcatgg

SEQ ID NO: 215288 - DNA, 20 bp, Artificial Sequence
  Description of Artificial Sequence: Synthetic oligonucleotide
  Target: LAMA2; (-) strand; PAM type: YTN; PAM sequence: TTT
cccaggcctcagcaatcatg

SEQ ID NO: 215289 - DNA, 20 bp, Artificial Sequence
  Description of Artificial Sequence: Synthetic oligonucleotide
  Target: LAMA2; (-) strand; PAM type: YTN; PAM sequence: CTT
tcccaggcctcagcaatcat

SEQ ID NO: 215290 - DNA, 20 bp, Artificial Sequence
  Description of Artificial Sequence: Synthetic oligonucleotide
  Target: LAMA2; (-) strand; PAM type: YTN; PAM sequence: CTG
tactttcccaggcctcagca

SEQ ID NO: 215291 - DNA, 20 bp, Artificial Sequence
  Description of Artificial Sequence: Synthetic oligonucleotide
  Target: LAMA2; (-) strand; PAM type: YTN; PAM sequence: TTG
gagcaggccaggcctgtact

SEQ ID NO: 215292 - DNA, 20 bp, Artificial Sequence
  Description of Artificial Sequence: Synthetic oligonucleotide
  Target: LAMA2; (-) strand; PAM type: YTN; PAM sequence: CTG
attggagcaggccaggcctg

SEQ ID NO: 215293 - DNA, 20 bp, Artificial Sequence
  Description of Artificial Sequence: Synthetic oligonucleotide
  Target: LAMA2; (-) strand; PAM type: YTN; PAM sequence: CTG
aaagacctgattggagcagg

SEQ ID NO: 215294 - DNA, 20 bp, Artificial Sequence
  Description of Artificial Sequence: Synthetic oligonucleotide
  Target: LAMA2; (-) strand; PAM type: YTN; PAM sequence: CTG
ccctgaaagacctgattgga

SEQ ID NO: 215295 - DNA, 20 bp, Artificial Sequence
  Description of Artificial Sequence: Synthetic oligonucleotide
  Target: LAMA2; (-) strand; PAM type: YTN; PAM sequence: TTG
gtctgccctgaaagacctga

SEQ ID NO: 215296 - DNA, 20 bp, Artificial Sequence
  Description of Artificial Sequence: Synthetic oligonucleotide
  Target: LAMA2; (-) strand; PAM type: YTN; PAM sequence: TTT
ggtctgccctgaaagacctg

SEQ ID NO: 215297 - DNA, 20 bp, Artificial Sequence
  Description of Artificial Sequence: Synthetic oligonucleotide
  Target: LAMA2; (-) strand; PAM type: YTN; PAM sequence: CTT
tggtctgccctgaaagacct

SEQ ID NO: 215298 - DNA, 20 bp, Artificial Sequence
  Description of Artificial Sequence: Synthetic oligonucleotide
  Target: LAMA2; (-) strand; PAM type: YTN; PAM sequence: CTG
ctttggtctgccctgaaaga

SEQ ID NO: 215299 - DNA, 20 bp, Artificial Sequence
  Description of Artificial Sequence: Synthetic oligonucleotide
  Target: LAMA2; (-) strand; PAM type: YTN; PAM sequence: CTG
tgccctgctttggtctgccc

SEQ ID NO: 215300 - DNA, 20 bp, Artificial Sequence
  Description of Artificial Sequence: Synthetic oligonucleotide
  Target: LAMA2; (-) strand; PAM type: YTN; PAM sequence: CTC
cctgtgccctgctttggtct

SEQ ID NO: 215301 - DNA, 20 bp, Artificial Sequence
  Description of Artificial Sequence: Synthetic oligonucleotide
  Target: LAMA2; (-) strand; PAM type: YTN; PAM sequence: TTG
caggtatgggtaagactccc

SEQ ID NO: 215302 - DNA, 20 bp, Artificial Sequence
  Description of Artificial Sequence: Synthetic oligonucleotide
  Target: LAMA2; (-) strand; PAM type: YTN; PAM sequence: TTT
gcaggtatgggtaagactcc

SEQ ID NO: 215303 - DNA, 20 bp, Artificial Sequence
  Description of Artificial Sequence: Synthetic oligonucleotide
  Target: LAMA2; (-) strand; PAM type: YTN; PAM sequence: TTT
tgcaggtatgggtaagactc

SEQ ID NO: 215304 - DNA, 20 bp, Artificial Sequence
  Description of Artificial Sequence: Synthetic oligonucleotide
  Target: LAMA2; (-) strand; PAM type: YTN; PAM sequence: CTG
ttttgcaggtatgggtaaga

SEQ ID NO: 215305 - DNA, 20 bp, Artificial Sequence
  Description of Artificial Sequence: Synthetic oligonucleotide
  Target: LAMA2; (-) strand; PAM type: YTN; PAM sequence: TTC
ctgttttgcaggtatgggta

SEQ ID NO: 215306 - DNA, 20 bp, Artificial Sequence
  Description of Artificial Sequence: Synthetic oligonucleotide
  Target: LAMA2; (-) strand; PAM type: YTN; PAM sequence: CTC
attcctgttttgcaggtatg

SEQ ID NO: 215307 - DNA, 20 bp, Artificial Sequence
  Description of Artificial Sequence: Synthetic oligonucleotide
  Target: LAMA2; (-) strand; PAM type: YTN; PAM sequence: CTG
accatggcctcattcctgtt

SEQ ID NO: 215308 - DNA, 20 bp, Artificial Sequence
  Description of Artificial Sequence: Synthetic oligonucleotide
  Target: LAMA2; (-) strand; PAM type: YTN; PAM sequence: CTG
accctgaccatggcctcatt

SEQ ID NO: 215309 - DNA, 20 bp, Artificial Sequence
  Description of Artificial Sequence: Synthetic oligonucleotide
  Target: LAMA2; (-) strand; PAM type: YTN; PAM sequence: TTC
tgaccctgaccatggcctca

SEQ ID NO: 215310 - DNA, 20 bp, Artificial Sequence
  Description of Artificial Sequence: Synthetic oligonucleotide
  Target: LAMA2; (-) strand; PAM type: YTN; PAM sequence: CTA
gttctgaccctgaccatggc

SEQ ID NO: 215311 - DNA, 20 bp, Artificial Sequence
  Description of Artificial Sequence: Synthetic oligonucleotide
  Target: LAMA2; (-) strand; PAM type: YTN; PAM sequence: CTG
actagttctgaccctgacca

SEQ ID NO: 215312 - DNA, 20 bp, Artificial Sequence
  Description of Artificial Sequence: Synthetic oligonucleotide
  Target: LAMA2; (-) strand; PAM type: YTN; PAM sequence: CTC
agcactgactagttctgacc

SEQ ID NO: 215313 - DNA, 20 bp, Artificial Sequence
  Description of Artificial Sequence: Synthetic oligonucleotide
  Target: LAMA2; (-) strand; PAM type: YTN; PAM sequence: CTC
cctcagcactgactagttct

SEQ ID NO: 215314 - DNA, 20 bp, Artificial Sequence
  Description of Artificial Sequence: Synthetic oligonucleotide
  Target: LAMA2; (-) strand; PAM type: YTN; PAM sequence: CTC
ctccctcagcactgactagt

SEQ ID NO: 215315 - DNA, 20 bp, Artificial Sequence
  Description of Artificial Sequence: Synthetic oligonucleotide
  Target: LAMA2; (-) strand; PAM type: YTN; PAM sequence: TTG
cctcctccctcagcactgac

SEQ ID NO: 215316 - DNA, 20 bp, Artificial Sequence
  Description of Artificial Sequence: Synthetic oligonucleotide
  Target: LAMA2; (-) strand; PAM type: YTN; PAM sequence: TTT
gcctcctccctcagcactga

SEQ ID NO: 215317 - DNA, 20 bp, Artificial Sequence
  Description of Artificial Sequence: Synthetic oligonucleotide
  Target: LAMA2; (-) strand; PAM type: YTN; PAM sequence: TTT
tgcctcctccctcagcactg

SEQ ID NO: 215318 - DNA, 20 bp, Artificial Sequence
  Description of Artificial Sequence: Synthetic oligonucleotide
  Target: LAMA2; (-) strand; PAM type: YTN; PAM sequence: TTT
ttgcctcctccctcagcact

SEQ ID NO: 215319 - DNA, 20 bp, Artificial Sequence
  Description of Artificial Sequence: Synthetic oligonucleotide
  Target: LAMA2; (-) strand; PAM type: YTN; PAM sequence: CTC
ggatttttgcctcctccctc

SEQ ID NO: 215320 - DNA, 20 bp, Artificial Sequence
  Description of Artificial Sequence: Synthetic oligonucleotide
  Target: LAMA2; (-) strand; PAM type: YTN; PAM sequence: CTC
tcggatttttgcctcctccc

SEQ ID NO: 215321 - DNA, 20 bp, Artificial Sequence
  Description of Artificial Sequence: Synthetic oligonucleotide
  Target: LAMA2; (-) strand; PAM type: YTN; PAM sequence: TTC
tctcggatttttgcctcctc

SEQ ID NO: 215322 - DNA, 20 bp, Artificial Sequence
  Description of Artificial Sequence: Synthetic oligonucleotide
  Target: LAMA2; (-) strand; PAM type: YTN; PAM sequence: TTT
ctctcggatttttgcctcct

SEQ ID NO: 215323 - DNA, 20 bp, Artificial Sequence
  Description of Artificial Sequence: Synthetic oligonucleotide
  Target: LAMA2; (-) strand; PAM type: YTN; PAM sequence: TTT
tctctcggatttttgcctcc

SEQ ID NO: 215324 - DNA, 20 bp, Artificial Sequence
  Description of Artificial Sequence: Synthetic oligonucleotide
  Target: LAMA2; (-) strand; PAM type: YTN; PAM sequence: TTT
ttctctcggatttttgcctc

SEQ ID NO: 215325 - DNA, 20 bp, Artificial Sequence
  Description of Artificial Sequence: Synthetic oligonucleotide
  Target: LAMA2; (-) strand; PAM type: YTN; PAM sequence: CTT
tttctctcggatttttgcct

SEQ ID NO: 215326 - DNA, 20 bp, Artificial Sequence
  Description of Artificial Sequence: Synthetic oligonucleotide
  Target: LAMA2; (-) strand; PAM type: YTN; PAM sequence: TTG
tcactttttctctcggattt

SEQ ID NO: 215327 - DNA, 20 bp, Artificial Sequence
  Description of Artificial Sequence: Synthetic oligonucleotide
  Target: LAMA2; (-) strand; PAM type: YTN; PAM sequence: TTC
accagggcattgtcactttt

SEQ ID NO: 215328 - DNA, 20 bp, Artificial Sequence
  Description of Artificial Sequence: Synthetic oligonucleotide
  Target: LAMA2; (-) strand; PAM type: YTN; PAM sequence: CTT
caccagggcattgtcacttt

SEQ ID NO: 215329 - DNA, 20 bp, Artificial Sequence
  Description of Artificial Sequence: Synthetic oligonucleotide
  Target: LAMA2; (-) strand; PAM type: YTN; PAM sequence: CTA
aaacttcaccagggcattgt

SEQ ID NO: 215330 - DNA, 20 bp, Artificial Sequence
  Description of Artificial Sequence: Synthetic oligonucleotide
  Target: LAMA2; (-) strand; PAM type: YTN; PAM sequence: TTC
taaaacttcaccagggcatt

SEQ ID NO: 215331 - DNA, 20 bp, Artificial Sequence
  Description of Artificial Sequence: Synthetic oligonucleotide
  Target: LAMA2; (-) strand; PAM type: YTN; PAM sequence: TTT
ctaaaacttcaccagggcat

SEQ ID NO: 215332 - DNA, 20 bp, Artificial Sequence
  Description of Artificial Sequence: Synthetic oligonucleotide
  Target: LAMA2; (-) strand; PAM type: YTN; PAM sequence: CTA
acatttctaaaacttcacca

SEQ ID NO: 215333 - DNA, 20 bp, Artificial Sequence
  Description of Artificial Sequence: Synthetic oligonucleotide
  Target: LAMA2; (-) strand; PAM type: YTN; PAM sequence: CTC
aggcaggtgctaacatttct

SEQ ID NO: 215334 - DNA, 20 bp, Artificial Sequence
  Description of Artificial Sequence: Synthetic oligonucleotide
  Target: LAMA2; (-) strand; PAM type: YTN; PAM sequence: TTA
cacaaaagccatctcaggca

SEQ ID NO: 215335 - DNA, 20 bp, Artificial Sequence
  Description of Artificial Sequence: Synthetic oligonucleotide
  Target: LAMA2; (-) strand; PAM type: YTN; PAM sequence: CTT
acacaaaagccatctcaggc

SEQ ID NO: 215336 - DNA, 20 bp, Artificial Sequence
  Description of Artificial Sequence: Synthetic oligonucleotide
  Target: LAMA2; (-) strand; PAM type: YTN; PAM sequence: TTA
cttacacaaaagccatctca

SEQ ID NO: 215337 - DNA, 20 bp, Artificial Sequence
  Description of Artificial Sequence: Synthetic oligonucleotide
  Target: LAMA2; (-) strand; PAM type: YTN; PAM sequence: CTT
acttacacaaaagccatctc

SEQ ID NO: 215338 - DNA, 20 bp, Artificial Sequence
  Description of Artificial Sequence: Synthetic oligonucleotide
  Target: LAMA2; (-) strand; PAM type: YTN; PAM sequence: TTC
aaagacagccagcttactta

SEQ ID NO: 215339 - DNA, 20 bp, Artificial Sequence
  Description of Artificial Sequence: Synthetic oligonucleotide
  Target: LAMA2; (-) strand; PAM type: YTN; PAM sequence: CTT
caaagacagccagcttactt

SEQ ID NO: 215340 - DNA, 20 bp, Artificial Sequence
  Description of Artificial Sequence: Synthetic oligonucleotide
  Target: LAMA2; (-) strand; PAM type: YTN; PAM sequence: CTG
cccccttcaaagacagccag

SEQ ID NO: 215341 - DNA, 20 bp, Artificial Sequence
  Description of Artificial Sequence: Synthetic oligonucleotide
  Target: LAMA2; (-) strand; PAM type: YTN; PAM sequence: CTC
catctgcccccttcaaagac

SEQ ID NO: 215342 - DNA, 20 bp, Artificial Sequence
  Description of Artificial Sequence: Synthetic oligonucleotide
  Target: LAMA2; (-) strand; PAM type: YTN; PAM sequence: CTA
gctccatctgcccccttcaa

SEQ ID NO: 215343 - DNA, 20 bp, Artificial Sequence
  Description of Artificial Sequence: Synthetic oligonucleotide
  Target: LAMA2; (-) strand; PAM type: YTN; PAM sequence: TTA
agcagtctagctccatctgc

SEQ ID NO: 215344 - DNA, 20 bp, Artificial Sequence
  Description of Artificial Sequence: Synthetic oligonucleotide
  Target: LAMA2; (-) strand; PAM type: YTN; PAM sequence: TTT
aagcagtctagctccatctg

SEQ ID NO: 215345 - DNA, 20 bp, Artificial Sequence
  Description of Artificial Sequence: Synthetic oligonucleotide
  Target: LAMA2; (-) strand; PAM type: YTN; PAM sequence: TTA
tatgatgagtttaagcagtc

SEQ ID NO: 215346 - DNA, 20 bp, Artificial Sequence
  Description of Artificial Sequence: Synthetic oligonucleotide
  Target: LAMA2; (-) strand; PAM type: YTN; PAM sequence: CTT
atatgatgagtttaagcagt

SEQ ID NO: 215347 - DNA, 20 bp, Artificial Sequence
  Description of Artificial Sequence: Synthetic oligonucleotide
  Target: LAMA2; (-) strand; PAM type: YTN; PAM sequence: CTC
gcttatatgatgagtttaag

SEQ ID NO: 215348 - DNA, 20 bp, Artificial Sequence
  Description of Artificial Sequence: Synthetic oligonucleotide
  Target: LAMA2; (-) strand; PAM type: YTN; PAM sequence: TTG
ctcgcttatatgatgagttt

SEQ ID NO: 215349 - DNA, 20 bp, Artificial Sequence
  Description of Artificial Sequence: Synthetic oligonucleotide
  Target: LAMA2; (-) strand; PAM type: YTN; PAM sequence: CTT
gctcgcttatatgatgagtt

SEQ ID NO: 215350 - DNA, 20 bp, Artificial Sequence
  Description of Artificial Sequence: Synthetic oligonucleotide
  Target: LAMA2; (-) strand; PAM type: YTN; PAM sequence: CTC
ttgctcgcttatatgatgag

SEQ ID NO: 215351 - DNA, 20 bp, Artificial Sequence
  Description of Artificial Sequence: Synthetic oligonucleotide
  Target: LAMA2; (-) strand; PAM type: YTN; PAM sequence: TTC
tcttgctcgcttatatgatg

SEQ ID NO: 215352 - DNA, 20 bp, Artificial Sequence
  Description of Artificial Sequence: Synthetic oligonucleotide
  Target: LAMA2; (-) strand; PAM type: YTN; PAM sequence: CTT
ctcttgctcgcttatatgat

SEQ ID NO: 215353 - DNA, 20 bp, Artificial Sequence
  Description of Artificial Sequence: Synthetic oligonucleotide
  Target: LAMA2; (-) strand; PAM type: YTN; PAM sequence: TTA
tacttctcttgctcgcttat

SEQ ID NO: 215354 - DNA, 20 bp, Artificial Sequence
  Description of Artificial Sequence: Synthetic oligonucleotide
  Target: LAMA2; (-) strand; PAM type: YTN; PAM sequence: TTA
aaggagagcaaaattatact

SEQ ID NO: 215355 - DNA, 20 bp, Artificial Sequence
  Description of Artificial Sequence: Synthetic oligonucleotide
  Target: LAMA2; (-) strand; PAM type: YTN; PAM sequence: TTT
aaaggagagcaaaattatac

SEQ ID NO: 215356 - DNA, 20 bp, Artificial Sequence
  Description of Artificial Sequence: Synthetic oligonucleotide
  Target: LAMA2; (-) strand; PAM type: YTN; PAM sequence: CTG
tttaaaggagagcaaaatta

SEQ ID NO: 215357 - DNA, 20 bp, Artificial Sequence
  Description of Artificial Sequence: Synthetic oligonucleotide
  Target: LAMA2; (-) strand; PAM type: YTN; PAM sequence: TTC
tgtttaaaggagagcaaaat

SEQ ID NO: 215358 - DNA, 20 bp, Artificial Sequence
  Description of Artificial Sequence: Synthetic oligonucleotide
  Target: LAMA2; (-) strand; PAM type: YTN; PAM sequence: CTG
ggaattctgtttaaaggaga

SEQ ID NO: 215359 - DNA, 20 bp, Artificial Sequence
  Description of Artificial Sequence: Synthetic oligonucleotide
  Target: LAMA2; (-) strand; PAM type: YTN; PAM sequence: TTA
cagtatagaaaaataagtag

SEQ ID NO: 215360 - DNA, 20 bp, Artificial Sequence
  Description of Artificial Sequence: Synthetic oligonucleotide
  Target: LAMA2; (-) strand; PAM type: YTN; PAM sequence: TTT
acagtatagaaaaataagta

SEQ ID NO: 215361 - DNA, 20 bp, Artificial Sequence
  Description of Artificial Sequence: Synthetic oligonucleotide
  Target: LAMA2; (-) strand; PAM type: YTN; PAM sequence: TTA
atttacagtatagaaaaata

SEQ ID NO: 215362 - DNA, 20 bp, Artificial Sequence
  Description of Artificial Sequence: Synthetic oligonucleotide
  Target: LAMA2; (-) strand; PAM type: YTN; PAM sequence: TTT
aatttacagtatagaaaaat

SEQ ID NO: 215363 - DNA, 20 bp, Artificial Sequence
  Description of Artificial Sequence: Synthetic oligonucleotide
  Target: LAMA2; (-) strand; PAM type: YTN; PAM sequence: TTA
aaaatttaatttacagtata

SEQ ID NO: 215364 - DNA, 20 bp, Artificial Sequence
  Description of Artificial Sequence: Synthetic oligonucleotide
  Target: LAMA2; (-) strand; PAM type: YTN; PAM sequence: TTT
aaaaatttaatttacagtat

SEQ ID NO: 215365 - DNA, 20 bp, Artificial Sequence
  Description of Artificial Sequence: Synthetic oligonucleotide
  Target: LAMA2; (-) strand; PAM type: YTN; PAM sequence: CTT
taaaaatttaatttacagta

SEQ ID NO: 215366 - DNA, 20 bp, Artificial Sequence
  Description of Artificial Sequence: Synthetic oligonucleotide
  Target: LAMA2; (-) strand; PAM type: YTN; PAM sequence: TTC
tttaaaaatttaatttacag

SEQ ID NO: 215367 - DNA, 20 bp, Artificial Sequence
  Description of Artificial Sequence: Synthetic oligonucleotide
  Target: LAMA2; (-) strand; PAM type: YTN; PAM sequence: CTC
cagttctttaaaaatttaat

SEQ ID NO: 215368 - DNA, 20 bp, Artificial Sequence
  Description of Artificial Sequence: Synthetic oligonucleotide
  Target: LAMA2; (-) strand; PAM type: YTN; PAM sequence: TTC
tccagttctttaaaaattta

SEQ ID NO: 215369 - DNA, 20 bp, Artificial Sequence
  Description of Artificial Sequence: Synthetic oligonucleotide
  Target: LAMA2; (-) strand; PAM type: YTN; PAM sequence: TTT
ctccagttctttaaaaattt

SEQ ID NO: 215370 - DNA, 20 bp, Artificial Sequence
  Description of Artificial Sequence: Synthetic oligonucleotide
  Target: LAMA2; (-) strand; PAM type: YTN; PAM sequence: TTT
tctccagttctttaaaaatt

SEQ ID NO: 215371 - DNA, 20 bp, Artificial Sequence
  Description of Artificial Sequence: Synthetic oligonucleotide
  Target: LAMA2; (-) strand; PAM type: YTN; PAM sequence: CTT
ttctccagttctttaaaaat

SEQ ID NO: 215372 - DNA, 20 bp, Artificial Sequence
  Description of Artificial Sequence: Synthetic oligonucleotide
  Target: LAMA2; (-) strand; PAM type: YTN; PAM sequence: TTA
gtggacttttctccagttct

SEQ ID NO: 215373 - DNA, 20 bp, Artificial Sequence
  Description of Artificial Sequence: Synthetic oligonucleotide
  Target: LAMA2; (-) strand; PAM type: YTN; PAM sequence: TTT
agtggacttttctccagttc

SEQ ID NO: 215374 - DNA, 20 bp, Artificial Sequence
  Description of Artificial Sequence: Synthetic oligonucleotide
  Target: LAMA2; (-) strand; PAM type: YTN; PAM sequence: TTT
tagtggacttttctccagtt

SEQ ID NO: 215375 - DNA, 20 bp, Artificial Sequence
  Description of Artificial Sequence: Synthetic oligonucleotide
  Target: LAMA2; (-) strand; PAM type: YTN; PAM sequence: TTG
ttttagtggacttttctcca

SEQ ID NO: 215376 - DNA, 20 bp, Artificial Sequence
  Description of Artificial Sequence: Synthetic oligonucleotide
  Target: LAMA2; (-) strand; PAM type: YTN; PAM sequence: TTT
gttttagtggacttttctcc

SEQ ID NO: 215377 - DNA, 20 bp, Artificial Sequence
  Description of Artificial Sequence: Synthetic oligonucleotide
  Target: LAMA2; (-) strand; PAM type: YTN; PAM sequence: TTA
gtaatttgttttagtggact

SEQ ID NO: 215378 - DNA, 20 bp, Artificial Sequence
  Description of Artificial Sequence: Synthetic oligonucleotide
  Target: LAMA2; (-) strand; PAM type: YTN; PAM sequence: CTG
ttagtaatttgttttagtgg

SEQ ID NO: 215379 - DNA, 20 bp, Artificial Sequence
  Description of Artificial Sequence: Synthetic oligonucleotide
  Target: LAMA2; (-) strand; PAM type: YTN; PAM sequence: TTG
tcactgttagtaatttgttt

SEQ ID NO: 215380 - DNA, 20 bp, Artificial Sequence
  Description of Artificial Sequence: Synthetic oligonucleotide
  Target: LAMA2; (-) strand; PAM type: YTN; PAM sequence: TTT
gtcactgttagtaatttgtt

SEQ ID NO: 215381 - DNA, 20 bp, Artificial Sequence
  Description of Artificial Sequence: Synthetic oligonucleotide
  Target: LAMA2; (-) strand; PAM type: YTN; PAM sequence: TTA
tttgtcactgttagtaattt

SEQ ID NO: 215382 - DNA, 20 bp, Artificial Sequence
  Description of Artificial Sequence: Synthetic oligonucleotide
  Target: LAMA2; (-) strand; PAM type: YTN; PAM sequence: CTT
atttgtcactgttagtaatt

SEQ ID NO: 215383 - DNA, 20 bp, Artificial Sequence
  Description of Artificial Sequence: Synthetic oligonucleotide
  Target: LAMA2; (-) strand; PAM type: YTN; PAM sequence: CTG
cttatttgtcactgttagta

SEQ ID NO: 215384 - DNA, 20 bp, Artificial Sequence
  Description of Artificial Sequence: Synthetic oligonucleotide
  Target: LAMA2; (-) strand; PAM type: YTN; PAM sequence: TTA
acataaagcactgcttattt

SEQ ID NO: 215385 - DNA, 20 bp, Artificial Sequence
  Description of Artificial Sequence: Synthetic oligonucleotide
  Target: LAMA2; (-) strand; PAM type: YTN; PAM sequence: TTA
catattaacataaagcactg

SEQ ID NO: 215386 - DNA, 20 bp, Artificial Sequence
  Description of Artificial Sequence: Synthetic oligonucleotide
  Target: LAMA2; (-) strand; PAM type: YTN; PAM sequence: CTT
acatattaacataaagcact

SEQ ID NO: 215387 - DNA, 20 bp, Artificial Sequence
  Description of Artificial Sequence: Synthetic oligonucleotide
  Target: LAMA2; (-) strand; PAM type: YTN; PAM sequence: CTA
atacaatggtgcacttacat

SEQ ID NO: 215388 - DNA, 20 bp, Artificial Sequence
  Description of Artificial Sequence: Synthetic oligonucleotide
  Target: LAMA2; (-) strand; PAM type: YTN; PAM sequence: TTA
gtagcatgagaatggactaa

SEQ ID NO: 215389 - DNA, 20 bp, Artificial Sequence
  Description of Artificial Sequence: Synthetic oligonucleotide
  Target: LAMA2; (-) strand; PAM type: YTN; PAM sequence: TTA
ttagtagcatgagaatggac

SEQ ID NO: 215390 - DNA, 20 bp, Artificial Sequence
  Description of Artificial Sequence: Synthetic oligonucleotide
  Target: LAMA2; (-) strand; PAM type: YTN; PAM sequence: TTT
attagtagcatgagaatgga

SEQ ID NO: 215391 - DNA, 20 bp, Artificial Sequence
  Description of Artificial Sequence: Synthetic oligonucleotide
  Target: LAMA2; (-) strand; PAM type: YTN; PAM sequence: CTT
tattagtagcatgagaatgg

SEQ ID NO: 215392 - DNA, 20 bp, Artificial Sequence
  Description of Artificial Sequence: Synthetic oligonucleotide
  Target: LAMA2; (-) strand; PAM type: YTN; PAM sequence: TTG
ggtatgtctttattagtagc

SEQ ID NO: 215393 - DNA, 20 bp, Artificial Sequence
  Description of Artificial Sequence: Synthetic oligonucleotide
  Target: LAMA2; (-) strand; PAM type: YTN; PAM sequence: CTT
gggtatgtctttattagtag

SEQ ID NO: 215394 - DNA, 20 bp, Artificial Sequence
  Description of Artificial Sequence: Synthetic oligonucleotide
  Target: LAMA2; (-) strand; PAM type: YTN; PAM sequence: TTA
tccagtcttgggtatgtctt

SEQ ID NO: 215395 - DNA, 20 bp, Artificial Sequence
  Description of Artificial Sequence: Synthetic oligonucleotide
  Target: LAMA2; (-) strand; PAM type: YTN; PAM sequence: CTA
taaattatccagtcttgggt

SEQ ID NO: 215396 - DNA, 20 bp, Artificial Sequence
  Description of Artificial Sequence: Synthetic oligonucleotide
  Target: LAMA2; (-) strand; PAM type: YTN; PAM sequence: CTC
tataaattatccagtcttgg

SEQ ID NO: 215397 - DNA, 20 bp, Artificial Sequence
  Description of Artificial Sequence: Synthetic oligonucleotide
  Target: LAMA2; (-) strand; PAM type: YTN; PAM sequence: TTC
tctataaattatccagtctt

SEQ ID NO: 215398 - DNA, 20 bp, Artificial Sequence
  Description of Artificial Sequence: Synthetic oligonucleotide
  Target: LAMA2; (-) strand; PAM type: YTN; PAM sequence: TTT
ctctataaattatccagtct

SEQ ID NO: 215399 - DNA, 20 bp, Artificial Sequence
  Description of Artificial Sequence: Synthetic oligonucleotide
  Target: LAMA2; (-) strand; PAM type: YTN; PAM sequence: TTT
tctctataaattatccagtc

SEQ ID NO: 215400 - DNA, 20 bp, Artificial Sequence
  Description of Artificial Sequence: Synthetic oligonucleotide
  Target: LAMA2; (-) strand; PAM type: YTN; PAM sequence: TTT
ttctctataaattatccagt

SEQ ID NO: 215401 - DNA, 20 bp, Artificial Sequence
  Description of Artificial Sequence: Synthetic oligonucleotide
  Target: LAMA2; (-) strand; PAM type: YTN; PAM sequence: CTA
tttttctctataaattatcc

SEQ ID NO: 215402 - DNA, 20 bp, Artificial Sequence
  Description of Artificial Sequence: Synthetic oligonucleotide
  Target: LAMA2; (-) strand; PAM type: YTN; PAM sequence: TTA
aacctatttttctctataaa

SEQ ID NO: 215403 - DNA, 20 bp, Artificial Sequence
  Description of Artificial Sequence: Synthetic oligonucleotide
  Target: LAMA2; (-) strand; PAM type: YTN; PAM sequence: CTA
ttaaacctatttttctctat

SEQ ID NO: 215404 - DNA, 20 bp, Artificial Sequence
  Description of Artificial Sequence: Synthetic oligonucleotide
  Target: LAMA2; (-) strand; PAM type: YTN; PAM sequence: CTG
tgagtctattaaacctattt

SEQ ID NO: 215405 - DNA, 20 bp, Artificial Sequence
  Description of Artificial Sequence: Synthetic oligonucleotide
  Target: LAMA2; (-) strand; PAM type: YTN; PAM sequence: CTC
cccagccatgtggaactgtg

SEQ ID NO: 215406 - DNA, 20 bp, Artificial Sequence
  Description of Artificial Sequence: Synthetic oligonucleotide
  Target: LAMA2; (-) strand; PAM type: YTN; PAM sequence: TTG
tgagacctccccagccatgt

SEQ ID NO: 215407 - DNA, 20 bp, Artificial Sequence
  Description of Artificial Sequence: Synthetic oligonucleotide
  Target: LAMA2; (-) strand; PAM type: YTN; PAM sequence: TTC
caccatgattgtgagacctc

SEQ ID NO: 215408 - DNA, 20 bp, Artificial Sequence
  Description of Artificial Sequence: Synthetic oligonucleotide
  Target: LAMA2; (-) strand; PAM type: YTN; PAM sequence: CTT
ccaccatgattgtgagacct

SEQ ID NO: 215409 - DNA, 20 bp, Artificial Sequence
  Description of Artificial Sequence: Synthetic oligonucleotide
  Target: LAMA2; (-) strand; PAM type: YTN; PAM sequence: TTG
ccttccaccatgattgtgag

SEQ ID NO: 215410 - DNA, 20 bp, Artificial Sequence
  Description of Artificial Sequence: Synthetic oligonucleotide
  Target: LAMA2; (-) strand; PAM type: YTN; PAM sequence: TTT
gccttccaccatgattgtga

SEQ ID NO: 215411 - DNA, 20 bp, Artificial Sequence
  Description of Artificial Sequence: Synthetic oligonucleotide
  Target: LAMA2; (-) strand; PAM type: YTN; PAM sequence: CTT
tgccttccaccatgattgtg

SEQ ID NO: 215412 - DNA, 20 bp, Artificial Sequence
  Description of Artificial Sequence: Synthetic oligonucleotide
  Target: LAMA2; (-) strand; PAM type: YTN; PAM sequence: TTC
tttgccttccaccatgattg

SEQ ID NO: 215413 - DNA, 20 bp, Artificial Sequence
  Description of Artificial Sequence: Synthetic oligonucleotide
  Target: LAMA2; (-) strand; PAM type: YTN; PAM sequence: CTT
ctttgccttccaccatgatt

SEQ ID NO: 215414 - DNA, 20 bp, Artificial Sequence
  Description of Artificial Sequence: Synthetic oligonucleotide
  Target: LAMA2; (-) strand; PAM type: YTN; PAM sequence: TTA
cttctttgccttccaccatg

SEQ ID NO: 215415 - DNA, 20 bp, Artificial Sequence
  Description of Artificial Sequence: Synthetic oligonucleotide
  Target: LAMA2; (-) strand; PAM type: YTN; PAM sequence: TTG
ttacttctttgccttccacc

SEQ ID NO: 215416 - DNA, 20 bp, Artificial Sequence
  Description of Artificial Sequence: Synthetic oligonucleotide
  Target: LAMA2; (-) strand; PAM type: YTN; PAM sequence: TTT
gttacttctttgccttccac

SEQ ID NO: 215417 - DNA, 20 bp, Artificial Sequence
  Description of Artificial Sequence: Synthetic oligonucleotide
  Target: LAMA2; (-) strand; PAM type: YTN; PAM sequence: CTT
tgttacttctttgccttcca

SEQ ID NO: 215418 - DNA, 20 bp, Artificial Sequence
  Description of Artificial Sequence: Synthetic oligonucleotide
  Target: LAMA2; (-) strand; PAM type: YTN; PAM sequence: CTG
cctttgttacttctttgcct

SEQ ID NO: 215419 - DNA, 20 bp, Artificial Sequence
  Description of Artificial Sequence: Synthetic oligonucleotide
  Target: LAMA2; (-) strand; PAM type: YTN; PAM sequence: CTG
ccaccatgtaagacctgcct

SEQ ID NO: 215420 - DNA, 20 bp, Artificial Sequence
  Description of Artificial Sequence: Synthetic oligonucleotide
  Target: LAMA2; (-) strand; PAM type: YTN; PAM sequence: TTG
cctgccaccatgtaagacct

SEQ ID NO: 215421 - DNA, 20 bp, Artificial Sequence
  Description of Artificial Sequence: Synthetic oligonucleotide
  Target: LAMA2; (-) strand; PAM type: YTN; PAM sequence: CTT
gcctgccaccatgtaagacc

SEQ ID NO: 215422 - DNA, 20 bp, Artificial Sequence
  Description of Artificial Sequence: Synthetic oligonucleotide
  Target: LAMA2; (-) strand; PAM type: YTN; PAM sequence: CTC
ttgcctgccaccatgtaaga

SEQ ID NO: 215423 - DNA, 20 bp, Artificial Sequence
  Description of Artificial Sequence: Synthetic oligonucleotide
  Target: LAMA2; (-) strand; PAM type: YTN; PAM sequence: CTC
tcttgcctgccaccatgtaa

SEQ ID NO: 215424 - DNA, 20 bp, Artificial Sequence
  Description of Artificial Sequence: Synthetic oligonucleotide
  Target: LAMA2; (-) strand; PAM type: YTN; PAM sequence: CTG
cacatgctctcttgcctgcc

SEQ ID NO: 215425 - DNA, 20 bp, Artificial Sequence
  Description of Artificial Sequence: Synthetic oligonucleotide
  Target: LAMA2; (-) strand; PAM type: YTN; PAM sequence: TTC
ccctgcacatgctctcttgc

SEQ ID NO: 215426 - DNA, 20 bp, Artificial Sequence
  Description of Artificial Sequence: Synthetic oligonucleotide
  Target: LAMA2; (-) strand; PAM type: YTN; PAM sequence: TTA
taaagtgcagttcccctgca

SEQ ID NO: 215427 - DNA, 20 bp, Artificial Sequence
  Description of Artificial Sequence: Synthetic oligonucleotide
  Target: LAMA2; (-) strand; PAM type: YTN; PAM sequence: TTT
ataaagtgcagttcccctgc

SEQ ID NO: 215428 - DNA, 20 bp, Artificial Sequence
  Description of Artificial Sequence: Synthetic oligonucleotide
  Target: LAMA2; (-) strand; PAM type: YTN; PAM sequence: TTT
tataaagtgcagttcccctg

SEQ ID NO: 215429 - DNA, 20 bp, Artificial Sequence
  Description of Artificial Sequence: Synthetic oligonucleotide
  Target: LAMA2; (-) strand; PAM type: YTN; PAM sequence: CTG
gcgattttataaagtgcagt

SEQ ID NO: 215430 - DNA, 20 bp, Artificial Sequence
  Description of Artificial Sequence: Synthetic oligonucleotide
  Target: LAMA2; (-) strand; PAM type: YTN; PAM sequence: CTC
ataatatctggcgattttat

SEQ ID NO: 215431 - DNA, 20 bp, Artificial Sequence
  Description of Artificial Sequence: Synthetic oligonucleotide
  Target: LAMA2; (-) strand; PAM type: YTN; PAM sequence: CTC
gtgatagtaaataagtctca

SEQ ID NO: 215432 - DNA, 20 bp, Artificial Sequence
  Description of Artificial Sequence: Synthetic oligonucleotide
  Target: LAMA2; (-) strand; PAM type: YTN; PAM sequence: TTC
tcgtgatagtaaataagtct

SEQ ID NO: 215433 - DNA, 20 bp, Artificial Sequence
  Description of Artificial Sequence: Synthetic oligonucleotide
  Target: LAMA2; (-) strand; PAM type: YTN; PAM sequence: CTG
ttctcgtgatagtaaataag

SEQ ID NO: 215434 - DNA, 20 bp, Artificial Sequence
  Description of Artificial Sequence: Synthetic oligonucleotide
  Target: LAMA2; (-) strand; PAM type: YTN; PAM sequence: CTC
atgctgttctcgtgatagta

SEQ ID NO: 215435 - DNA, 20 bp, Artificial Sequence
  Description of Artificial Sequence: Synthetic oligonucleotide
  Target: LAMA2; (-) strand; PAM type: YTN; PAM sequence: TTC
tcatgctgttctcgtgatag

SEQ ID NO: 215436 - DNA, 20 bp, Artificial Sequence
  Description of Artificial Sequence: Synthetic oligonucleotide
  Target: LAMA2; (-) strand; PAM type: YTN; PAM sequence: TTT
ctcatgctgttctcgtgata

SEQ ID NO: 215437 - DNA, 20 bp, Artificial Sequence
  Description of Artificial Sequence: Synthetic oligonucleotide
  Target: LAMA2; (-) strand; PAM type: YTN; PAM sequence: TTT
tctcatgctgttctcgtgat

SEQ ID NO: 215438 - DNA, 20 bp, Artificial Sequence
  Description of Artificial Sequence: Synthetic oligonucleotide
  Target: LAMA2; (-) strand; PAM type: YTN; PAM sequence: TTT
ttctcatgctgttctcgtga

SEQ ID NO: 215439 - DNA, 20 bp, Artificial Sequence
  Description of Artificial Sequence: Synthetic oligonucleotide
  Target: LAMA2; (-) strand; PAM type: YTN; PAM sequence: TTG
aatcatgagggcaggttttt

SEQ ID NO: 215440 - DNA, 20 bp, Artificial Sequence
  Description of Artificial Sequence: Synthetic oligonucleotide
  Target: LAMA2; (-) strand; PAM type: YTN; PAM sequence: TTT
gaatcatgagggcaggtttt

SEQ ID NO: 215441 - DNA, 20 bp, Artificial Sequence
  Description of Artificial Sequence: Synthetic oligonucleotide
  Target: LAMA2; (-) strand; PAM type: YTN; PAM sequence: TTG
ggaggtatttgaatcatgag

SEQ ID NO: 215442 - DNA, 20 bp, Artificial Sequence
  Description of Artificial Sequence: Synthetic oligonucleotide
  Target: LAMA2; (-) strand; PAM type: YTN; PAM sequence: TTG
tgggagggacacgttgggag

SEQ ID NO: 215443 - DNA, 20 bp, Artificial Sequence
  Description of Artificial Sequence: Synthetic oligonucleotide
  Target: LAMA2; (-) strand; PAM type: YTN; PAM sequence: CTG
taatccccatgtgttgtggg

SEQ ID NO: 215444 - DNA, 20 bp, Artificial Sequence
  Description of Artificial Sequence: Synthetic oligonucleotide
  Target: LAMA2; (-) strand; PAM type: YTN; PAM sequence: TTG
tagcgcctgtaatccccatg

SEQ ID NO: 215445 - DNA, 20 bp, Artificial Sequence
  Description of Artificial Sequence: Synthetic oligonucleotide
  Target: LAMA2; (-) strand; PAM type: YTN; PAM sequence: TTG
aattgtagcgcctgtaatcc

SEQ ID NO: 215446 - DNA, 20 bp, Artificial Sequence
  Description of Artificial Sequence: Synthetic oligonucleotide
  Target: LAMA2; (-) strand; PAM type: YTN; PAM sequence: CTT
gaattgtagcgcctgtaatc

SEQ ID NO: 215447 - DNA, 20 bp, Artificial Sequence
  Description of Artificial Sequence: Synthetic oligonucleotide
  Target: LAMA2; (-) strand; PAM type: YTN; PAM sequence: CTC
atcttgaattgtagcgcctg

SEQ ID NO: 215448 - DNA, 20 bp, Artificial Sequence
  Description of Artificial Sequence: Synthetic oligonucleotide
  Target: LAMA2; (-) strand; PAM type: YTN; PAM sequence: CTA
cccaaatctcatcttgaatt

SEQ ID NO: 215449 - DNA, 20 bp, Artificial Sequence
  Description of Artificial Sequence: Synthetic oligonucleotide
  Target: LAMA2; (-) strand; PAM type: YTN; PAM sequence: CTG
tgtccctacccaaatctcat

SEQ ID NO: 215450 - DNA, 20 bp, Artificial Sequence
  Description of Artificial Sequence: Synthetic oligonucleotide
  Target: LAMA2; (-) strand; PAM type: YTN; PAM sequence: TTG
gctgtgtccctacccaaatc

SEQ ID NO: 215451 - DNA, 20 bp, Artificial Sequence
  Description of Artificial Sequence: Synthetic oligonucleotide
  Target: LAMA2; (-) strand; PAM type: YTN; PAM sequence: TTT
ggctgtgtccctacccaaat

SEQ ID NO: 215452 - DNA, 20 bp, Artificial Sequence
  Description of Artificial Sequence: Synthetic oligonucleotide
  Target: LAMA2; (-) strand; PAM type: YTN; PAM sequence: TTG
aataaacataatggtggata

SEQ ID NO: 215453 - DNA, 20 bp, Artificial Sequence
  Description of Artificial Sequence: Synthetic oligonucleotide
  Target: LAMA2; (-) strand; PAM type: YTN; PAM sequence: TTA
cacattgaataaacataatg

SEQ ID NO: 215454 - DNA, 20 bp, Artificial Sequence
  Description of Artificial Sequence: Synthetic oligonucleotide
  Target: LAMA2; (-) strand; PAM type: YTN; PAM sequence: CTA
tagatacagatacatatagg

SEQ ID NO: 215455 - DNA, 20 bp, Artificial Sequence
  Description of Artificial Sequence: Synthetic oligonucleotide
  Target: LAMA2; (-) strand; PAM type: YTN; PAM sequence: CTG
gatatagatgtggctataga

SEQ ID NO: 215456 - DNA, 20 bp, Artificial Sequence
  Description of Artificial Sequence: Synthetic oligonucleotide
  Target: LAMA2; (-) strand; PAM type: YTN; PAM sequence: TTG
tctggatatagatgtggcta

SEQ ID NO: 215457 - DNA, 20 bp, Artificial Sequence
  Description of Artificial Sequence: Synthetic oligonucleotide
  Target: LAMA2; (-) strand; PAM type: YTN; PAM sequence: TTA
tgtaattgtctggatataga

SEQ ID NO: 215458 - DNA, 20 bp, Artificial Sequence
  Description of Artificial Sequence: Synthetic oligonucleotide
  Target: LAMA2; (-) strand; PAM type: YTN; PAM sequence: TTC
aacatataagattatgtaat

SEQ ID NO: 215459 - DNA, 20 bp, Artificial Sequence
  Description of Artificial Sequence: Synthetic oligonucleotide
  Target: LAMA2; (-) strand; PAM type: YTN; PAM sequence: TTT
caacatataagattatgtaa

SEQ ID NO: 215460 - DNA, 20 bp, Artificial Sequence
  Description of Artificial Sequence: Synthetic oligonucleotide
  Target: LAMA2; (-) strand; PAM type: YTN; PAM sequence: TTG
tttcaacatataagattatg

SEQ ID NO: 215461 - DNA, 20 bp, Artificial Sequence
  Description of Artificial Sequence: Synthetic oligonucleotide
  Target: LAMA2; (-) strand; PAM type: YTN; PAM sequence: CTG
taattgtttcaacatataag

SEQ ID NO: 215462 - DNA, 20 bp, Artificial Sequence
  Description of Artificial Sequence: Synthetic oligonucleotide
  Target: LAMA2; (-) strand; PAM type: YTN; PAM sequence: TTG
aatctgtaattgtttcaaca

SEQ ID NO: 215463 - DNA, 20 bp, Artificial Sequence
  Description of Artificial Sequence: Synthetic oligonucleotide
  Target: LAMA2; (-) strand; PAM type: YTN; PAM sequence: CTT
gaatctgtaattgtttcaac

SEQ ID NO: 215464 - DNA, 20 bp, Artificial Sequence
  Description of Artificial Sequence: Synthetic oligonucleotide
  Target: LAMA2; (-) strand; PAM type: YTN; PAM sequence: TTA
tgtaaatgatgagtgagtca

SEQ ID NO: 215465 - DNA, 20 bp, Artificial Sequence
  Description of Artificial Sequence: Synthetic oligonucleotide
  Target: LAMA2; (-) strand; PAM type: YTN; PAM sequence: CTT
atgtaaatgatgagtgagtc

SEQ ID NO: 215466 - DNA, 20 bp, Artificial Sequence
  Description of Artificial Sequence: Synthetic oligonucleotide
  Target: LAMA2; (-) strand; PAM type: YTN; PAM sequence: CTG
aaagcttatgtaaatgatga

SEQ ID NO: 215467 - DNA, 20 bp, Artificial Sequence
  Description of Artificial Sequence: Synthetic oligonucleotide
  Target: LAMA2; (-) strand; PAM type: YTN; PAM sequence: CTG
ctgaaagcttatgtaaatga

SEQ ID NO: 215468 - DNA, 20 bp, Artificial Sequence
  Description of Artificial Sequence: Synthetic oligonucleotide
  Target: LAMA2; (-) strand; PAM type: YTN; PAM sequence: CTC
tgctgaaagcttatgtaaat

SEQ ID NO: 215469 - DNA, 20 bp, Artificial Sequence
  Description of Artificial Sequence: Synthetic oligonucleotide
  Target: LAMA2; (-) strand; PAM type: YTN; PAM sequence: CTC
tctgctgaaagcttatgtaa

SEQ ID NO: 215470 - DNA, 20 bp, Artificial Sequence
  Description of Artificial Sequence: Synthetic oligonucleotide
  Target: LAMA2; (-) strand; PAM type: YTN; PAM sequence: TTA
gggaaaatgaagaaagaaaa

SEQ ID NO: 215471 - DNA, 20 bp, Artificial Sequence
  Description of Artificial Sequence: Synthetic oligonucleotide
  Target: LAMA2; (-) strand; PAM type: YTN; PAM sequence: CTG
ttagggaaaatgaagaaaga

SEQ ID NO: 215472 - DNA, 20 bp, Artificial Sequence
  Description of Artificial Sequence: Synthetic oligonucleotide
  Target: LAMA2; (-) strand; PAM type: YTN; PAM sequence: TTA
tctgttagggaaaatgaaga

SEQ ID NO: 215473 - DNA, 20 bp, Artificial Sequence
  Description of Artificial Sequence: Synthetic oligonucleotide
  Target: LAMA2; (-) strand; PAM type: YTN; PAM sequence: TTT
atctgttagggaaaatgaag

SEQ ID NO: 215474 - DNA, 20 bp, Artificial Sequence
  Description of Artificial Sequence: Synthetic oligonucleotide
  Target: LAMA2; (-) strand; PAM type: YTN; PAM sequence: TTC
aaggagaaatagaagtttat

SEQ ID NO: 215475 - DNA, 20 bp, Artificial Sequence
  Description of Artificial Sequence: Synthetic oligonucleotide
  Target: LAMA2; (-) strand; PAM type: YTN; PAM sequence: TTT
caaggagaaatagaagttta

SEQ ID NO: 215476 - DNA, 20 bp, Artificial Sequence
  Description of Artificial Sequence: Synthetic oligonucleotide
  Target: LAMA2; (-) strand; PAM type: YTN; PAM sequence: TTT
tcaaggagaaatagaagttt

SEQ ID NO: 215477 - DNA, 20 bp, Artificial Sequence
  Description of Artificial Sequence: Synthetic oligonucleotide
  Target: LAMA2; (-) strand; PAM type: YTN; PAM sequence: CTG
aattttcaaggagaaataga

SEQ ID NO: 215478 - DNA, 20 bp, Artificial Sequence
  Description of Artificial Sequence: Synthetic oligonucleotide
  Target: LAMA2; (-) strand; PAM type: YTN; PAM sequence: TTG
agctgaattttcaaggagaa

SEQ ID NO: 215479 - DNA, 20 bp, Artificial Sequence
  Description of Artificial Sequence: Synthetic oligonucleotide
  Target: LAMA2; (-) strand; PAM type: YTN; PAM sequence: CTT
gagctgaattttcaaggaga

SEQ ID NO: 215480 - DNA, 20 bp, Artificial Sequence
  Description of Artificial Sequence: Synthetic oligonucleotide
  Target: LAMA2; (-) strand; PAM type: YTN; PAM sequence: TTA
tcatgggaagtaatcttgag

SEQ ID NO: 215481 - DNA, 20 bp, Artificial Sequence
  Description of Artificial Sequence: Synthetic oligonucleotide
  Target: LAMA2; (-) strand; PAM type: YTN; PAM sequence: CTT
atcatgggaagtaatcttga

SEQ ID NO: 215482 - DNA, 20 bp, Artificial Sequence
  Description of Artificial Sequence: Synthetic oligonucleotide
  Target: LAMA2; (-) strand; PAM type: YTN; PAM sequence: CTA
agatgggcttatcatgggaa

SEQ ID NO: 215483 - DNA, 20 bp, Artificial Sequence
  Description of Artificial Sequence: Synthetic oligonucleotide
  Target: LAMA2; (-) strand; PAM type: YTN; PAM sequence: TTA
ctaagatgggcttatcatgg

SEQ ID NO: 215484 - DNA, 20 bp, Artificial Sequence
  Description of Artificial Sequence: Synthetic oligonucleotide
  Target: LAMA2; (-) strand; PAM type: YTN; PAM sequence: CTG
agaataaaaatattactaag

SEQ ID NO: 215485 - DNA, 20 bp, Artificial Sequence
  Description of Artificial Sequence: Synthetic oligonucleotide
  Target: LAMA2; (-) strand; PAM type: YTN; PAM sequence: TTA
tgccagacagtaaaggatct

SEQ ID NO: 215486 - DNA, 20 bp, Artificial Sequence
  Description of Artificial Sequence: Synthetic oligonucleotide
  Target: LAMA2; (-) strand; PAM type: YTN; PAM sequence: TTG
agcacatattatgccagaca

SEQ ID NO: 215487 - DNA, 20 bp, Artificial Sequence
  Description of Artificial Sequence: Synthetic oligonucleotide
  Target: LAMA2; (-) strand; PAM type: YTN; PAM sequence: TTT
gagcacatattatgccagac

SEQ ID NO: 215488 - DNA, 20 bp, Artificial Sequence
  Description of Artificial Sequence: Synthetic oligonucleotide
  Target: LAMA2; (-) strand; PAM type: YTN; PAM sequence: TTT
tgagcacatattatgccaga

SEQ ID NO: 215489 - DNA, 20 bp, Artificial Sequence
  Description of Artificial Sequence: Synthetic oligonucleotide
  Target: LAMA2; (-) strand; PAM type: YTN; PAM sequence: TTC
atcaaatatgttttgagcac

SEQ ID NO: 215490 - DNA, 20 bp, Artificial Sequence
  Description of Artificial Sequence: Synthetic oligonucleotide
  Target: LAMA2; (-) strand; PAM type: YTN; PAM sequence: CTT
catcaaatatgttttgagca

SEQ ID NO: 215491 - DNA, 20 bp, Artificial Sequence
  Description of Artificial Sequence: Synthetic oligonucleotide
  Target: LAMA2; (-) strand; PAM type: YTN; PAM sequence: TTC
cttcatcaaatatgttttga

SEQ ID NO: 215492 - DNA, 20 bp, Artificial Sequence
  Description of Artificial Sequence: Synthetic oligonucleotide
  Target: LAMA2; (-) strand; PAM type: YTN; PAM sequence: CTA
ttccttcatcaaatatgttt

SEQ ID NO: 215493 - DNA, 20 bp, Artificial Sequence
  Description of Artificial Sequence: Synthetic oligonucleotide
  Target: LAMA2; (-) strand; PAM type: YTN; PAM sequence: TTA
acggtacaactattccttca

SEQ ID NO: 215494 - DNA, 20 bp, Artificial Sequence
  Description of Artificial Sequence: Synthetic oligonucleotide
  Target: LAMA2; (-) strand; PAM type: YTN; PAM sequence: TTT
aacggtacaactattccttc

SEQ ID NO: 215495 - DNA, 20 bp, Artificial Sequence
  Description of Artificial Sequence: Synthetic oligonucleotide
  Target: LAMA2; (-) strand; PAM type: YTN; PAM sequence: TTG
catttaacggtacaactatt

SEQ ID NO: 215496 - DNA, 20 bp, Artificial Sequence
  Description of Artificial Sequence: Synthetic oligonucleotide
  Target: LAMA2; (-) strand; PAM type: YTN; PAM sequence: TTT
gcatttaacggtacaactat

SEQ ID NO: 215497 - DNA, 20 bp, Artificial Sequence
  Description of Artificial Sequence: Synthetic oligonucleotide
  Target: LAMA2; (-) strand; PAM type: YTN; PAM sequence: TTT
tgcatttaacggtacaacta

SEQ ID NO: 215498 - DNA, 20 bp, Artificial Sequence
  Description of Artificial Sequence: Synthetic oligonucleotide
  Target: LAMA2; (-) strand; PAM type: YTN; PAM sequence: TTC
atcaccattttgcatttaac

SEQ ID NO: 215499 - DNA, 20 bp, Artificial Sequence
  Description of Artificial Sequence: Synthetic oligonucleotide
  Target: LAMA2; (-) strand; PAM type: YTN; PAM sequence: TTG
tcattcatcaccattttgca

SEQ ID NO: 215500 - DNA, 20 bp, Artificial Sequence
  Description of Artificial Sequence: Synthetic oligonucleotide
  Target: LAMA2; (-) strand; PAM type: YTN; PAM sequence: TTT
gtcattcatcaccattttgc

SEQ ID NO: 215501 - DNA, 20 bp, Artificial Sequence
  Description of Artificial Sequence: Synthetic oligonucleotide
  Target: LAMA2; (-) strand; PAM type: YTN; PAM sequence: TTT
tgtcattcatcaccattttg

SEQ ID NO: 215502 - DNA, 20 bp, Artificial Sequence
  Description of Artificial Sequence: Synthetic oligonucleotide
  Target: LAMA2; (-) strand; PAM type: YTN; PAM sequence: CTA
ttttgtcattcatcaccatt

SEQ ID NO: 215503 - DNA, 20 bp, Artificial Sequence
  Description of Artificial Sequence: Synthetic oligonucleotide
  Target: LAMA2; (-) strand; PAM type: YTN; PAM sequence: TTC
tattttgtcattcatcacca

SEQ ID NO: 215504 - DNA, 20 bp, Artificial Sequence
  Description of Artificial Sequence: Synthetic oligonucleotide
  Target: LAMA2; (-) strand; PAM type: YTN; PAM sequence: TTT
ctattttgtcattcatcacc

SEQ ID NO: 215505 - DNA, 20 bp, Artificial Sequence
  Description of Artificial Sequence: Synthetic oligonucleotide
  Target: LAMA2; (-) strand; PAM type: YTN; PAM sequence: CTT
tctattttgtcattcatcac

SEQ ID NO: 215506 - DNA, 20 bp, Artificial Sequence
  Description of Artificial Sequence: Synthetic oligonucleotide
  Target: LAMA2; (-) strand; PAM type: YTN; PAM sequence: CTG
tatatctttctattttgtca

SEQ ID NO: 215507 - DNA, 20 bp, Artificial Sequence
  Description of Artificial Sequence: Synthetic oligonucleotide
  Target: LAMA2; (-) strand; PAM type: YTN; PAM sequence: TTG
tctgtatatctttctatttt

SEQ ID NO: 215508 - DNA, 20 bp, Artificial Sequence
  Description of Artificial Sequence: Synthetic oligonucleotide
  Target: LAMA2; (-) strand; PAM type: YTN; PAM sequence: TTT
gtctgtatatctttctattt

SEQ ID NO: 215509 - DNA, 20 bp, Artificial Sequence
  Description of Artificial Sequence: Synthetic oligonucleotide
  Target: LAMA2; (-) strand; PAM type: YTN; PAM sequence: TTA
aataaagtttgtctgtatat

SEQ ID NO: 215510 - DNA, 20 bp, Artificial Sequence
  Description of Artificial Sequence: Synthetic oligonucleotide
  Target: LAMA2; (-) strand; PAM type: YTN; PAM sequence: TTA
ataaatgatatgcgattaaa

SEQ ID NO: 215511 - DNA, 20 bp, Artificial Sequence
  Description of Artificial Sequence: Synthetic oligonucleotide
  Target: LAMA2; (-) strand; PAM type: YTN; PAM sequence: CTA
ggttaataaatgatatgcga

SEQ ID NO: 215512 - DNA, 20 bp, Artificial Sequence
  Description of Artificial Sequence: Synthetic oligonucleotide
  Target: LAMA2; (-) strand; PAM type: YTN; PAM sequence: TTC
taggttaataaatgatatgc

SEQ ID NO: 215513 - DNA, 20 bp, Artificial Sequence
  Description of Artificial Sequence: Synthetic oligonucleotide
  Target: LAMA2; (-) strand; PAM type: YTN; PAM sequence: TTT
ctaggttaataaatgatatg

SEQ ID NO: 215514 - DNA, 20 bp, Artificial Sequence
  Description of Artificial Sequence: Synthetic oligonucleotide
  Target: LAMA2; (-) strand; PAM type: YTN; PAM sequence: TTT
tctaggttaataaatgatat

SEQ ID NO: 215515 - DNA, 20 bp, Artificial Sequence
  Description of Artificial Sequence: Synthetic oligonucleotide
  Target: LAMA2; (-) strand; PAM type: YTN; PAM sequence: TTA
ttttctaggttaataaatga

SEQ ID NO: 215516 - DNA, 20 bp, Artificial Sequence
  Description of Artificial Sequence: Synthetic oligonucleotide
  Target: LAMA2; (-) strand; PAM type: YTN; PAM sequence: TTT
attttctaggttaataaatg

SEQ ID NO: 215517 - DNA, 20 bp, Artificial Sequence
  Description of Artificial Sequence: Synthetic oligonucleotide
  Target: LAMA2; (-) strand; PAM type: YTN; PAM sequence: TTT
tattttctaggttaataaat

SEQ ID NO: 215518 - DNA, 20 bp, Artificial Sequence
  Description of Artificial Sequence: Synthetic oligonucleotide
  Target: LAMA2; (-) strand; PAM type: YTN; PAM sequence: TTA
gacattttattttctaggtt

SEQ ID NO: 215519 - DNA, 20 bp, Artificial Sequence
  Description of Artificial Sequence: Synthetic oligonucleotide
  Target: LAMA2; (-) strand; PAM type: YTN; PAM sequence: CTT
agacattttattttctaggt

SEQ ID NO: 215520 - DNA, 20 bp, Artificial Sequence
  Description of Artificial Sequence: Synthetic oligonucleotide
  Target: LAMA2; (-) strand; PAM type: YTN; PAM sequence: CTA
tcttagacattttattttct

SEQ ID NO: 215521 - DNA, 20 bp, Artificial Sequence
  Description of Artificial Sequence: Synthetic oligonucleotide
  Target: LAMA2; (-) strand; PAM type: YTN; PAM sequence: TTA
tctatcttagacattttatt

SEQ ID NO: 215522 - DNA, 20 bp, Artificial Sequence
  Description of Artificial Sequence: Synthetic oligonucleotide
  Target: LAMA2; (-) strand; PAM type: YTN; PAM sequence: CTC
cacgccattatctatcttag

SEQ ID NO: 215523 - DNA, 20 bp, Artificial Sequence
  Description of Artificial Sequence: Synthetic oligonucleotide
  Target: LAMA2; (-) strand; PAM type: YTN; PAM sequence: TTA
gatggtctccacgccattat

SEQ ID NO: 215524 - DNA, 20 bp, Artificial Sequence
  Description of Artificial Sequence: Synthetic oligonucleotide
  Target: LAMA2; (-) strand; PAM type: YTN; PAM sequence: TTA
aaaataattagatggtctcc

SEQ ID NO: 215525 - DNA, 20 bp, Artificial Sequence
  Description of Artificial Sequence: Synthetic oligonucleotide
  Target: LAMA2; (-) strand; PAM type: YTN; PAM sequence: TTT
aaaaataattagatggtctc

SEQ ID NO: 215526 - DNA, 20 bp, Artificial Sequence
  Description of Artificial Sequence: Synthetic oligonucleotide
  Target: LAMA2; (-) strand; PAM type: YTN; PAM sequence: TTA
caaatttaaaaataattaga

SEQ ID NO: 215527 - DNA, 20 bp, Artificial Sequence
  Description of Artificial Sequence: Synthetic oligonucleotide
  Target: LAMA2; (-) strand; PAM type: YTN; PAM sequence: TTG
tcaggttacaaatttaaaaa

SEQ ID NO: 215528 - DNA, 20 bp, Artificial Sequence
  Description of Artificial Sequence: Synthetic oligonucleotide
  Target: LAMA2; (-) strand; PAM type: YTN; PAM sequence: TTT
gtcaggttacaaatttaaaa

SEQ ID NO: 215529 - DNA, 20 bp, Artificial Sequence
  Description of Artificial Sequence: Synthetic oligonucleotide
  Target: LAMA2; (-) strand; PAM type: YTN; PAM sequence: TTG
tgacgtttgtcaggttacaa

SEQ ID NO: 215530 - DNA, 20 bp, Artificial Sequence
  Description of Artificial Sequence: Synthetic oligonucleotide
  Target: LAMA2; (-) strand; PAM type: YTN; PAM sequence: TTT
gtgacgtttgtcaggttaca

SEQ ID NO: 215531 - DNA, 20 bp, Artificial Sequence
  Description of Artificial Sequence: Synthetic oligonucleotide
  Target: LAMA2; (-) strand; PAM type: YTN; PAM sequence: TTT
tgtgacgtttgtcaggttac

SEQ ID NO: 215532 - DNA, 20 bp, Artificial Sequence
  Description of Artificial Sequence: Synthetic oligonucleotide
  Target: LAMA2; (-) strand; PAM type: YTN; PAM sequence: CTA
acaattttgtgacgtttgtc

SEQ ID NO: 215533 - DNA, 20 bp, Artificial Sequence
  Description of Artificial Sequence: Synthetic oligonucleotide
  Target: LAMA2; (-) strand; PAM type: YTN; PAM sequence: TTC
ctaacaattttgtgacgttt

SEQ ID NO: 215534 - DNA, 20 bp, Artificial Sequence
  Description of Artificial Sequence: Synthetic oligonucleotide
  Target: LAMA2; (-) strand; PAM type: YTN; PAM sequence: CTT
cctaacaattttgtgacgtt

SEQ ID NO: 215535 - DNA, 20 bp, Artificial Sequence
  Description of Artificial Sequence: Synthetic oligonucleotide
  Target: LAMA2; (-) strand; PAM type: YTN; PAM sequence: TTA
gtgaaaacttcctaacaatt

SEQ ID NO: 215536 - DNA, 20 bp, Artificial Sequence
  Description of Artificial Sequence: Synthetic oligonucleotide
  Target: LAMA2; (-) strand; PAM type: YTN; PAM sequence: CTT
agtgaaaacttcctaacaat

SEQ ID NO: 215537 - DNA, 20 bp, Artificial Sequence
  Description of Artificial Sequence: Synthetic oligonucleotide
  Target: LAMA2; (-) strand; PAM type: YTN; PAM sequence: TTC
catgatataagccttagtga

SEQ ID NO: 215538 - DNA, 20 bp, Artificial Sequence
  Description of Artificial Sequence: Synthetic oligonucleotide
  Target: LAMA2; (-) strand; PAM type: YTN; PAM sequence: TTT
ccatgatataagccttagtg

SEQ ID NO: 215539 - DNA, 20 bp, Artificial Sequence
  Description of Artificial Sequence: Synthetic oligonucleotide
  Target: LAMA2; (-) strand; PAM type: YTN; PAM sequence: TTT
tccatgatataagccttagt

SEQ ID NO: 215540 - DNA, 20 bp, Artificial Sequence
  Description of Artificial Sequence: Synthetic oligonucleotide
  Target: LAMA2; (-) strand; PAM type: YTN; PAM sequence: CTT
ttccatgatataagccttag

SEQ ID NO: 215541 - DNA, 20 bp, Artificial Sequence
  Description of Artificial Sequence: Synthetic oligonucleotide
  Target: LAMA2; (-) strand; PAM type: YTN; PAM sequence: TTA
tcttttccatgatataagcc

SEQ ID NO: 215542 - DNA, 20 bp, Artificial Sequence
  Description of Artificial Sequence: Synthetic oligonucleotide
  Target: LAMA2; (-) strand; PAM type: YTN; PAM sequence: TTT
atcttttccatgatataagc

SEQ ID NO: 215543 - DNA, 20 bp, Artificial Sequence
  Description of Artificial Sequence: Synthetic oligonucleotide
  Target: LAMA2; (-) strand; PAM type: YTN; PAM sequence: TTT
tatcttttccatgatataag

SEQ ID NO: 215544 - DNA, 20 bp, Artificial Sequence
  Description of Artificial Sequence: Synthetic oligonucleotide
  Target: LAMA2; (-) strand; PAM type: YTN; PAM sequence: TTT
ttatcttttccatgatataa

SEQ ID NO: 215545 - DNA, 20 bp, Artificial Sequence
  Description of Artificial Sequence: Synthetic oligonucleotide
  Target: LAMA2; (-) strand; PAM type: YTN; PAM sequence: TTT
tttatcttttccatgatata

SEQ ID NO: 215546 - DNA, 20 bp, Artificial Sequence
  Description of Artificial Sequence: Synthetic oligonucleotide
  Target: LAMA2; (-) strand; PAM type: YTN; PAM sequence: TTT
ttttatcttttccatgatat

SEQ ID NO: 215547 - DNA, 20 bp, Artificial Sequence
  Description of Artificial Sequence: Synthetic oligonucleotide
  Target: LAMA2; (-) strand; PAM type: YTN; PAM sequence: TTT
tttttatcttttccatgata

SEQ ID NO: 215548 - DNA, 20 bp, Artificial Sequence
  Description of Artificial Sequence: Synthetic oligonucleotide
  Target: LAMA2; (-) strand; PAM type: YTN; PAM sequence: TTT
ttttttatcttttccatgat

SEQ ID NO: 215549 - DNA, 20 bp, Artificial Sequence
  Description of Artificial Sequence: Synthetic oligonucleotide
  Target: LAMA2; (-) strand; PAM type: YTN; PAM sequence: TTA
tttttttttatcttttccat

SEQ ID NO: 215550 - DNA, 20 bp, Artificial Sequence
  Description of Artificial Sequence: Synthetic oligonucleotide
  Target: LAMA2; (-) strand; PAM type: YTN; PAM sequence: CTT
atttttttttatcttttcca

SEQ ID NO: 215551 - DNA, 20 bp, Artificial Sequence
  Description of Artificial Sequence: Synthetic oligonucleotide
  Target: LAMA2; (-) strand; PAM type: YTN; PAM sequence: TTA
ccttatttttttttatcttt

SEQ ID NO: 215552 - DNA, 20 bp, Artificial Sequence
  Description of Artificial Sequence: Synthetic oligonucleotide
  Target: LAMA2; (-) strand; PAM type: YTN; PAM sequence: TTT
accttatttttttttatctt

SEQ ID NO: 215553 - DNA, 20 bp, Artificial Sequence
  Description of Artificial Sequence: Synthetic oligonucleotide
  Target: LAMA2; (-) strand; PAM type: YTN; PAM sequence: TTT
taccttatttttttttatct

SEQ ID NO: 215554 - DNA, 20 bp, Artificial Sequence
  Description of Artificial Sequence: Synthetic oligonucleotide
  Target: LAMA2; (-) strand; PAM type: YTN; PAM sequence: TTT
ttaccttatttttttttatc

SEQ ID NO: 215555 - DNA, 20 bp, Artificial Sequence
  Description of Artificial Sequence: Synthetic oligonucleotide
  Target: LAMA2; (-) strand; PAM type: YTN; PAM sequence: TTA
aaagtttttaccttattttt

SEQ ID NO: 215556 - DNA, 20 bp, Artificial Sequence
  Description of Artificial Sequence: Synthetic oligonucleotide
  Target: LAMA2; (-) strand; PAM type: YTN; PAM sequence: TTT
aaaagtttttaccttatttt

SEQ ID NO: 215557 - DNA, 20 bp, Artificial Sequence
  Description of Artificial Sequence: Synthetic oligonucleotide
  Target: LAMA2; (-) strand; PAM type: YTN; PAM sequence: TTA
taaaaagtagagtaccattt

SEQ ID NO: 215558 - DNA, 20 bp, Artificial Sequence
  Description of Artificial Sequence: Synthetic oligonucleotide
  Target: LAMA2; (-) strand; PAM type: YTN; PAM sequence: TTT
ataaaaagtagagtaccatt

SEQ ID NO: 215559 - DNA, 20 bp, Artificial Sequence
  Description of Artificial Sequence: Synthetic oligonucleotide
  Target: LAMA2; (-) strand; PAM type: YTN; PAM sequence: TTT
tataaaaagtagagtaccat

SEQ ID NO: 215560 - DNA, 20 bp, Artificial Sequence
  Description of Artificial Sequence: Synthetic oligonucleotide
  Target: LAMA2; (-) strand; PAM type: YTN; PAM sequence: TTA
gaaaatgtaatgttttataa

SEQ ID NO: 215561 - DNA, 20 bp, Artificial Sequence
  Description of Artificial Sequence: Synthetic oligonucleotide
  Target: LAMA2; (-) strand; PAM type: YTN; PAM sequence: TTC
attagaaaatgtaatgtttt

SEQ ID NO: 215562 - DNA, 20 bp, Artificial Sequence
  Description of Artificial Sequence: Synthetic oligonucleotide
  Target: LAMA2; (-) strand; PAM type: YTN; PAM sequence: TTT
cattagaaaatgtaatgttt

SEQ ID NO: 215563 - DNA, 20 bp, Artificial Sequence
  Description of Artificial Sequence: Synthetic oligonucleotide
  Target: LAMA2; (-) strand; PAM type: YTN; PAM sequence: TTA
tttcattagaaaatgtaatg

SEQ ID NO: 215564 - DNA, 20 bp, Artificial Sequence
  Description of Artificial Sequence: Synthetic oligonucleotide
  Target: LAMA2; (-) strand; PAM type: YTN; PAM sequence: TTT
atttcattagaaaatgtaat

SEQ ID NO: 215565 - DNA, 20 bp, Artificial Sequence
  Description of Artificial Sequence: Synthetic oligonucleotide
  Target: LAMA2; (-) strand; PAM type: YTN; PAM sequence: TTA
tttatttcattagaaaatgt

SEQ ID NO: 215566 - DNA, 20 bp, Artificial Sequence
  Description of Artificial Sequence: Synthetic oligonucleotide
  Target: LAMA2; (-) strand; PAM type: YTN; PAM sequence: TTC
ataaagtattatttatttca

SEQ ID NO: 215567 - DNA, 20 bp, Artificial Sequence
  Description of Artificial Sequence: Synthetic oligonucleotide
  Target: LAMA2; (-) strand; PAM type: YTN; PAM sequence: TTA
aacattcataaagtattatt

SEQ ID NO: 215568 - DNA, 20 bp, Artificial Sequence
  Description of Artificial Sequence: Synthetic oligonucleotide
  Target: LAMA2; (-) strand; PAM type: YTN; PAM sequence: TTA
gagaaatattaaacattcat

SEQ ID NO: 215569 - DNA, 20 bp, Artificial Sequence
  Description of Artificial Sequence: Synthetic oligonucleotide
  Target: LAMA2; (-) strand; PAM type: YTN; PAM sequence: TTG
gttagagaaatattaaacat

SEQ ID NO: 215570 - DNA, 20 bp, Artificial Sequence
  Description of Artificial Sequence: Synthetic oligonucleotide
  Target: LAMA2; (-) strand; PAM type: YTN; PAM sequence: TTG
ttggttagagaaatattaaa

SEQ ID NO: 215571 - DNA, 20 bp, Artificial Sequence
  Description of Artificial Sequence: Synthetic oligonucleotide
  Target: LAMA2; (-) strand; PAM type: YTN; PAM sequence: CTA
atgtaattgttggttagaga

SEQ ID NO: 215572 - DNA, 20 bp, Artificial Sequence
  Description of Artificial Sequence: Synthetic oligonucleotide
  Target: LAMA2; (-) strand; PAM type: YTN; PAM sequence: CTG
tcagtgtgacataaggaaag

SEQ ID NO: 215573 - DNA, 20 bp, Artificial Sequence
  Description of Artificial Sequence: Synthetic oligonucleotide
  Target: LAMA2; (-) strand; PAM type: YTN; PAM sequence: TTC
tgtcagtgtgacataaggaa

SEQ ID NO: 215574 - DNA, 20 bp, Artificial Sequence
  Description of Artificial Sequence: Synthetic oligonucleotide
  Target: LAMA2; (-) strand; PAM type: YTN; PAM sequence: CTG
gccccaacacaatgagacat

SEQ ID NO: 215575 - DNA, 20 bp, Artificial Sequence
  Description of Artificial Sequence: Synthetic oligonucleotide
  Target: LAMA2; (-) strand; PAM type: YTN; PAM sequence: CTC
tggccccaacacaatgagac

SEQ ID NO: 215576 - DNA, 20 bp, Artificial Sequence
  Description of Artificial Sequence: Synthetic oligonucleotide
  Target: LAMA2; (-) strand; PAM type: YTN; PAM sequence: CTC
tctggccccaacacaatgag

SEQ ID NO: 215577 - DNA, 20 bp, Artificial Sequence
  Description of Artificial Sequence: Synthetic oligonucleotide
  Target: LAMA2; (-) strand; PAM type: YTN; PAM sequence: CTG
tgctctctggccccaacaca

SEQ ID NO: 215578 - DNA, 20 bp, Artificial Sequence
  Description of Artificial Sequence: Synthetic oligonucleotide
  Target: LAMA2; (-) strand; PAM type: YTN; PAM sequence: CTC
tgtgctctctggccccaaca

SEQ ID NO: 215579 - DNA, 20 bp, Artificial Sequence
  Description of Artificial Sequence: Synthetic oligonucleotide
  Target: LAMA2; (-) strand; PAM type: YTN; PAM sequence: CTC
atctctgtgctctctggccc

SEQ ID NO: 215580 - DNA, 20 bp, Artificial Sequence
  Description of Artificial Sequence: Synthetic oligonucleotide
  Target: LAMA2; (-) strand; PAM type: YTN; PAM sequence: TTC
ccccctcatctctgtgctct

SEQ ID NO: 215581 - DNA, 20 bp, Artificial Sequence
  Description of Artificial Sequence: Synthetic oligonucleotide
  Target: LAMA2; (-) strand; PAM type: YTN; PAM sequence: TTA
ttcccccctcatctctgtgc

SEQ ID NO: 215582 - DNA, 20 bp, Artificial Sequence
  Description of Artificial Sequence: Synthetic oligonucleotide
  Target: LAMA2; (-) strand; PAM type: YTN; PAM sequence: TTT
attcccccctcatctctgtg

SEQ ID NO: 215583 - DNA, 20 bp, Artificial Sequence
  Description of Artificial Sequence: Synthetic oligonucleotide
  Target: LAMA2; (-) strand; PAM type: YTN; PAM sequence: CTG
atacatttattcccccctca

SEQ ID NO: 215584 - DNA, 20 bp, Artificial Sequence
  Description of Artificial Sequence: Synthetic oligonucleotide
  Target: LAMA2; (-) strand; PAM type: YTN; PAM sequence: TTC
ctgatacatttattcccccc

SEQ ID NO: 215585 - DNA, 20 bp, Artificial Sequence
  Description of Artificial Sequence: Synthetic oligonucleotide
  Target: LAMA2; (-) strand; PAM type: YTN; PAM sequence: TTG
ttcctgatacatttattccc

SEQ ID NO: 215586 - DNA, 20 bp, Artificial Sequence
  Description of Artificial Sequence: Synthetic oligonucleotide
  Target: LAMA2; (-) strand; PAM type: YTN; PAM sequence: TTA
ttgttcctgatacatttatt

SEQ ID NO: 215587 - DNA, 20 bp, Artificial Sequence
  Description of Artificial Sequence: Synthetic oligonucleotide
  Target: LAMA2; (-) strand; PAM type: YTN; PAM sequence: TTT
attgttcctgatacatttat

SEQ ID NO: 215588 - DNA, 20 bp, Artificial Sequence
  Description of Artificial Sequence: Synthetic oligonucleotide
  Target: LAMA2; (-) strand; PAM type: YTN; PAM sequence: CTC
atttattgttcctgatacat

SEQ ID NO: 215589 - DNA, 20 bp, Artificial Sequence
  Description of Artificial Sequence: Synthetic oligonucleotide
  Target: LAMA2; (-) strand; PAM type: YTN; PAM sequence: CTA
tctcatttattgttcctgat

SEQ ID NO: 215590 - DNA, 20 bp, Artificial Sequence
  Description of Artificial Sequence: Synthetic oligonucleotide
  Target: LAMA2; (-) strand; PAM type: YTN; PAM sequence: TTA
atcactatctcatttattgt

SEQ ID NO: 215591 - DNA, 20 bp, Artificial Sequence
  Description of Artificial Sequence: Synthetic oligonucleotide
  Target: LAMA2; (-) strand; PAM type: YTN; PAM sequence: CTT
aatcactatctcatttattg

SEQ ID NO: 215592 - DNA, 20 bp, Artificial Sequence
  Description of Artificial Sequence: Synthetic oligonucleotide
  Target: LAMA2; (-) strand; PAM type: YTN; PAM sequence: TTC
acttaatcactatctcattt

SEQ ID NO: 215593 - DNA, 20 bp, Artificial Sequence
  Description of Artificial Sequence: Synthetic oligonucleotide
  Target: LAMA2; (-) strand; PAM type: YTN; PAM sequence: TTT
cacttaatcactatctcatt

SEQ ID NO: 215594 - DNA, 20 bp, Artificial Sequence
  Description of Artificial Sequence: Synthetic oligonucleotide
  Target: LAMA2; (-) strand; PAM type: YTN; PAM sequence: TTT
tcacttaatcactatctcat

SEQ ID NO: 215595 - DNA, 20 bp, Artificial Sequence
  Description of Artificial Sequence: Synthetic oligonucleotide
  Target: LAMA2; (-) strand; PAM type: YTN; PAM sequence: TTT
ttcacttaatcactatctca

SEQ ID NO: 215596 - DNA, 20 bp, Artificial Sequence
  Description of Artificial Sequence: Synthetic oligonucleotide
  Target: LAMA2; (-) strand; PAM type: YTN; PAM sequence: CTT
tttcacttaatcactatctc

SEQ ID NO: 215597 - DNA, 20 bp, Artificial Sequence
  Description of Artificial Sequence: Synthetic oligonucleotide
  Target: LAMA2; (-) strand; PAM type: YTN; PAM sequence: TTA
ctttttcacttaatcactat

SEQ ID NO: 215598 - DNA, 20 bp, Artificial Sequence
  Description of Artificial Sequence: Synthetic oligonucleotide
  Target: LAMA2; (-) strand; PAM type: YTN; PAM sequence: CTT
actttttcacttaatcacta

SEQ ID NO: 215599 - DNA, 20 bp, Artificial Sequence
  Description of Artificial Sequence: Synthetic oligonucleotide
  Target: LAMA2; (-) strand; PAM type: YTN; PAM sequence: TTG
ccaatggtacttactttttc

SEQ ID NO: 215600 - DNA, 20 bp, Artificial Sequence
  Description of Artificial Sequence: Synthetic oligonucleotide
  Target: LAMA2; (-) strand; PAM type: YTN; PAM sequence: TTT
gccaatggtacttacttttt

SEQ ID NO: 215601 - DNA, 20 bp, Artificial Sequence
  Description of Artificial Sequence: Synthetic oligonucleotide
  Target: LAMA2; (-) strand; PAM type: YTN; PAM sequence: CTG
atttgccaatggtacttact

SEQ ID NO: 215602 - DNA, 20 bp, Artificial Sequence
  Description of Artificial Sequence: Synthetic oligonucleotide
  Target: LAMA2; (-) strand; PAM type: YTN; PAM sequence: TTC
ctgatttgccaatggtactt

SEQ ID NO: 215603 - DNA, 20 bp, Artificial Sequence
  Description of Artificial Sequence: Synthetic oligonucleotide
  Target: LAMA2; (-) strand; PAM type: YTN; PAM sequence: TTT
cctgatttgccaatggtact

SEQ ID NO: 215604 - DNA, 20 bp, Artificial Sequence
  Description of Artificial Sequence: Synthetic oligonucleotide
  Target: LAMA2; (-) strand; PAM type: YTN; PAM sequence: TTT
tcctgatttgccaatggtac

SEQ ID NO: 215605 - DNA, 20 bp, Artificial Sequence
  Description of Artificial Sequence: Synthetic oligonucleotide
  Target: LAMA2; (-) strand; PAM type: YTN; PAM sequence: TTT
ttcctgatttgccaatggta

SEQ ID NO: 215606 - DNA, 20 bp, Artificial Sequence
  Description of Artificial Sequence: Synthetic oligonucleotide
  Target: LAMA2; (-) strand; PAM type: YTN; PAM sequence: TTC
ccaatttttcctgatttgcc

SEQ ID NO: 215607 - DNA, 20 bp, Artificial Sequence
  Description of Artificial Sequence: Synthetic oligonucleotide
  Target: LAMA2; (-) strand; PAM type: YTN; PAM sequence: TTG
aggttcccaatttttcctga

SEQ ID NO: 215608 - DNA, 20 bp, Artificial Sequence
  Description of Artificial Sequence: Synthetic oligonucleotide
  Target: LAMA2; (-) strand; PAM type: YTN; PAM sequence: CTG
aaagttgaggttcccaattt

SEQ ID NO: 215609 - DNA, 20 bp, Artificial Sequence
  Description of Artificial Sequence: Synthetic oligonucleotide
  Target: LAMA2; (-) strand; PAM type: YTN; PAM sequence: TTC
agctgaaagttgaggttccc

SEQ ID NO: 215610 - DNA, 20 bp, Artificial Sequence
  Description of Artificial Sequence: Synthetic oligonucleotide
  Target: LAMA2; (-) strand; PAM type: YTN; PAM sequence: CTT
cagctgaaagttgaggttcc

SEQ ID NO: 215611 - DNA, 20 bp, Artificial Sequence
  Description of Artificial Sequence: Synthetic oligonucleotide
  Target: LAMA2; (-) strand; PAM type: YTN; PAM sequence: TTC
ttcagctgaaagttgaggtt

SEQ ID NO: 215612 - DNA, 20 bp, Artificial Sequence
  Description of Artificial Sequence: Synthetic oligonucleotide
  Target: LAMA2; (-) strand; PAM type: YTN; PAM sequence: TTT
cttcagctgaaagttgaggt

SEQ ID NO: 215613 - DNA, 20 bp, Artificial Sequence
  Description of Artificial Sequence: Synthetic oligonucleotide
  Target: LAMA2; (-) strand; PAM type: YTN; PAM sequence: TTT
tcttcagctgaaagttgagg

SEQ ID NO: 215614 - DNA, 20 bp, Artificial Sequence
  Description of Artificial Sequence: Synthetic oligonucleotide
  Target: LAMA2; (-) strand; PAM type: YTN; PAM sequence: TTT
ttcttcagctgaaagttgag

SEQ ID NO: 215615 - DNA, 20 bp, Artificial Sequence
  Description of Artificial Sequence: Synthetic oligonucleotide
  Target: LAMA2; (-) strand; PAM type: YTN; PAM sequence: TTG
tgtttttcttcagctgaaag

SEQ ID NO: 215616 - DNA, 20 bp, Artificial Sequence
  Description of Artificial Sequence: Synthetic oligonucleotide
  Target: LAMA2; (-) strand; PAM type: YTN; PAM sequence: CTT
gtgtttttcttcagctgaaa

SEQ ID NO: 215617 - DNA, 20 bp, Artificial Sequence
  Description of Artificial Sequence: Synthetic oligonucleotide
  Target: LAMA2; (-) strand; PAM type: YTN; PAM sequence: CTG
ccttgtgtttttcttcagct

SEQ ID NO: 215618 - DNA, 20 bp, Artificial Sequence
  Description of Artificial Sequence: Synthetic oligonucleotide
  Target: LAMA2; (-) strand; PAM type: YTN; PAM sequence: CTC
ctgccttgtgtttttcttca

SEQ ID NO: 215619 - DNA, 20 bp, Artificial Sequence
  Description of Artificial Sequence: Synthetic oligonucleotide
  Target: LAMA2; (-) strand; PAM type: YTN; PAM sequence: CTG
gcctcctgccttgtgttttt

SEQ ID NO: 215620 - DNA, 20 bp, Artificial Sequence
  Description of Artificial Sequence: Synthetic oligonucleotide
  Target: LAMA2; (-) strand; PAM type: YTN; PAM sequence: CTC
atctggcctcctgccttgtg

SEQ ID NO: 215621 - DNA, 20 bp, Artificial Sequence
  Description of Artificial Sequence: Synthetic oligonucleotide
  Target: LAMA2; (-) strand; PAM type: YTN; PAM sequence: CTC
tcatctggcctcctgccttg

SEQ ID NO: 215622 - DNA, 20 bp, Artificial Sequence
  Description of Artificial Sequence: Synthetic oligonucleotide
  Target: LAMA2; (-) strand; PAM type: YTN; PAM sequence: CTC
caaaatagtgacccccaact

SEQ ID NO: 215623 - DNA, 20 bp, Artificial Sequence
  Description of Artificial Sequence: Synthetic oligonucleotide
  Target: LAMA2; (-) strand; PAM type: YTN; PAM sequence: TTC
ctccaaaatagtgaccccca

SEQ ID NO: 215624 - DNA, 20 bp, Artificial Sequence
  Description of Artificial Sequence: Synthetic oligonucleotide
  Target: LAMA2; (-) strand; PAM type: YTN; PAM sequence: CTG
ttcctccaaaatagtgaccc

SEQ ID NO: 215625 - DNA, 20 bp, Artificial Sequence
  Description of Artificial Sequence: Synthetic oligonucleotide
  Target: LAMA2; (-) strand; PAM type: YTN; PAM sequence: TTA
atcctgttcctccaaaatag

SEQ ID NO: 215626 - DNA, 20 bp, Artificial Sequence
  Description of Artificial Sequence: Synthetic oligonucleotide
  Target: LAMA2; (-) strand; PAM type: YTN; PAM sequence: CTT
aatcctgttcctccaaaata

SEQ ID NO: 215627 - DNA, 20 bp, Artificial Sequence
  Description of Artificial Sequence: Synthetic oligonucleotide
  Target: LAMA2; (-) strand; PAM type: YTN; PAM sequence: TTA
aaaatcccttaatcctgttc

SEQ ID NO: 215628 - DNA, 20 bp, Artificial Sequence
  Description of Artificial Sequence: Synthetic oligonucleotide
  Target: LAMA2; (-) strand; PAM type: YTN; PAM sequence: TTT
aaaaatcccttaatcctgtt

SEQ ID NO: 215629 - DNA, 20 bp, Artificial Sequence
  Description of Artificial Sequence: Synthetic oligonucleotide
  Target: LAMA2; (-) strand; PAM type: YTN; PAM sequence: CTT
taaaaatcccttaatcctgt

SEQ ID NO: 215630 - DNA, 20 bp, Artificial Sequence
  Description of Artificial Sequence: Synthetic oligonucleotide
  Target: LAMA2; (-) strand; PAM type: YTN; PAM sequence: TTA
tacatatgtctttaaaaatc

SEQ ID NO: 215631 - DNA, 20 bp, Artificial Sequence
  Description of Artificial Sequence: Synthetic oligonucleotide
  Target: LAMA2; (-) strand; PAM type: YTN; PAM sequence: CTT
atacatatgtctttaaaaat

SEQ ID NO: 215632 - DNA, 20 bp, Artificial Sequence
  Description of Artificial Sequence: Synthetic oligonucleotide
  Target: LAMA2; (-) strand; PAM type: YTN; PAM sequence: CTC
cttatacatatgtctttaaa

SEQ ID NO: 215633 - DNA, 20 bp, Artificial Sequence
  Description of Artificial Sequence: Synthetic oligonucleotide
  Target: LAMA2; (-) strand; PAM type: YTN; PAM sequence: CTC
cctccttatacatatgtctt

SEQ ID NO: 215634 - DNA, 20 bp, Artificial Sequence
  Description of Artificial Sequence: Synthetic oligonucleotide
  Target: LAMA2; (-) strand; PAM type: YTN; PAM sequence: TTC
tccctccttatacatatgtc

SEQ ID NO: 215635 - DNA, 20 bp, Artificial Sequence
  Description of Artificial Sequence: Synthetic oligonucleotide
  Target: LAMA2; (-) strand; PAM type: YTN; PAM sequence: TTT
ctccctccttatacatatgt

SEQ ID NO: 215636 - DNA, 20 bp, Artificial Sequence
  Description of Artificial Sequence: Synthetic oligonucleotide
  Target: LAMA2; (-) strand; PAM type: YTN; PAM sequence: TTT
tctccctccttatacatatg

SEQ ID NO: 215637 - DNA, 20 bp, Artificial Sequence
  Description of Artificial Sequence: Synthetic oligonucleotide
  Target: LAMA2; (-) strand; PAM type: YTN; PAM sequence: CTT
ttctccctccttatacatat

SEQ ID NO: 215638 - DNA, 20 bp, Artificial Sequence
  Description of Artificial Sequence: Synthetic oligonucleotide
  Target: LAMA2; (-) strand; PAM type: YTN; PAM sequence: TTC
ttttctccctccttatacat

SEQ ID NO: 215639 - DNA, 20 bp, Artificial Sequence
  Description of Artificial Sequence: Synthetic oligonucleotide
  Target: LAMA2; (-) strand; PAM type: YTN; PAM sequence: TTT
cttttctccctccttataca

SEQ ID NO: 215640 - DNA, 20 bp, Artificial Sequence
  Description of Artificial Sequence: Synthetic oligonucleotide
  Target: LAMA2; (-) strand; PAM type: YTN; PAM sequence: CTT
tcttttctccctccttatac

SEQ ID NO: 215641 - DNA, 20 bp, Artificial Sequence
  Description of Artificial Sequence: Synthetic oligonucleotide
  Target: LAMA2; (-) strand; PAM type: YTN; PAM sequence: TTC
tttcttttctccctccttat

SEQ ID NO: 215642 - DNA, 20 bp, Artificial Sequence
  Description of Artificial Sequence: Synthetic oligonucleotide
  Target: LAMA2; (-) strand; PAM type: YTN; PAM sequence: TTT
ctttcttttctccctcctta

SEQ ID NO: 215643 - DNA, 20 bp, Artificial Sequence
  Description of Artificial Sequence: Synthetic oligonucleotide
  Target: LAMA2; (-) strand; PAM type: YTN; PAM sequence: TTT
tctttcttttctccctcctt

SEQ ID NO: 215644 - DNA, 20 bp, Artificial Sequence
  Description of Artificial Sequence: Synthetic oligonucleotide
  Target: LAMA2; (-) strand; PAM type: YTN; PAM sequence: CTT
ttctttcttttctccctcct

SEQ ID NO: 215645 - DNA, 20 bp, Artificial Sequence
  Description of Artificial Sequence: Synthetic oligonucleotide
  Target: LAMA2; (-) strand; PAM type: YTN; PAM sequence: CTG
cccccaaagaatcttttctt

SEQ ID NO: 215646 - DNA, 20 bp, Artificial Sequence
  Description of Artificial Sequence: Synthetic oligonucleotide
  Target: LAMA2; (-) strand; PAM type: YTN; PAM sequence: CTC
ccaaagagctgcccccaaag

SEQ ID NO: 215647 - DNA, 20 bp, Artificial Sequence
  Description of Artificial Sequence: Synthetic oligonucleotide
  Target: LAMA2; (-) strand; PAM type: YTN; PAM sequence: TTA
agatctcccaaagagctgcc

SEQ ID NO: 215648 - DNA, 20 bp, Artificial Sequence
  Description of Artificial Sequence: Synthetic oligonucleotide
  Target: LAMA2; (-) strand; PAM type: YTN; PAM sequence: CTT
aagatctcccaaagagctgc

SEQ ID NO: 215649 - DNA, 20 bp, Artificial Sequence
  Description of Artificial Sequence: Synthetic oligonucleotide
  Target: LAMA2; (-) strand; PAM type: YTN; PAM sequence: TTC
ttaagatctcccaaagagct

SEQ ID NO: 215650 - DNA, 20 bp, Artificial Sequence
  Description of Artificial Sequence: Synthetic oligonucleotide
  Target: LAMA2; (-) strand; PAM type: YTN; PAM sequence: CTC
agtcattcttaagatctccc

SEQ ID NO: 215651 - DNA, 20 bp, Artificial Sequence
  Description of Artificial Sequence: Synthetic oligonucleotide
  Target: LAMA2; (-) strand; PAM type: YTN; PAM sequence: TTG
tctcagtcattcttaagatc

SEQ ID NO: 215652 - DNA, 20 bp, Artificial Sequence
  Description of Artificial Sequence: Synthetic oligonucleotide
  Target: LAMA2; (-) strand; PAM type: YTN; PAM sequence: CTT
gtctcagtcattcttaagat

SEQ ID NO: 215653 - DNA, 20 bp, Artificial Sequence
  Description of Artificial Sequence: Synthetic oligonucleotide
  Target: LAMA2; (-) strand; PAM type: YTN; PAM sequence: TTC
ttgtctcagtcattcttaag

SEQ ID NO: 215654 - DNA, 20 bp, Artificial Sequence
  Description of Artificial Sequence: Synthetic oligonucleotide
  Target: LAMA2; (-) strand; PAM type: YTN; PAM sequence: CTC
agttcttgtctcagtcattc

SEQ ID NO: 215655 - DNA, 20 bp, Artificial Sequence
  Description of Artificial Sequence: Synthetic oligonucleotide
  Target: LAMA2; (-) strand; PAM type: YTN; PAM sequence: TTC
aaaagatcaagtgacaactc

SEQ ID NO: 215656 - DNA, 20 bp, Artificial Sequence
  Description of Artificial Sequence: Synthetic oligonucleotide
  Target: LAMA2; (-) strand; PAM type: YTN; PAM sequence: TTC
cacaggtaaatgaattcaaa

SEQ ID NO: 215657 - DNA, 20 bp, Artificial Sequence
  Description of Artificial Sequence: Synthetic oligonucleotide
  Target: LAMA2; (-) strand; PAM type: YTN; PAM sequence: CTC
caaaaaattccacaggtaaa

SEQ ID NO: 215658 - DNA, 20 bp, Artificial Sequence
  Description of Artificial Sequence: Synthetic oligonucleotide
  Target: LAMA2; (-) strand; PAM type: YTN; PAM sequence: TTG
taatcactccaaaaaattcc

SEQ ID NO: 215659 - DNA, 20 bp, Artificial Sequence
  Description of Artificial Sequence: Synthetic oligonucleotide
  Target: LAMA2; (-) strand; PAM type: YTN; PAM sequence: TTA
ttgtaatcactccaaaaaat

SEQ ID NO: 215660 - DNA, 20 bp, Artificial Sequence
  Description of Artificial Sequence: Synthetic oligonucleotide
  Target: LAMA2; (-) strand; PAM type: YTN; PAM sequence: TTT
attgtaatcactccaaaaaa

SEQ ID NO: 215661 - DNA, 20 bp, Artificial Sequence
  Description of Artificial Sequence: Synthetic oligonucleotide
  Target: LAMA2; (-) strand; PAM type: YTN; PAM sequence: CTT
tattgtaatcactccaaaaa

SEQ ID NO: 215662 - DNA, 20 bp, Artificial Sequence
  Description of Artificial Sequence: Synthetic oligonucleotide
  Target: LAMA2; (-) strand; PAM type: YTN; PAM sequence: TTA
aatctttattgtaatcactc

SEQ ID NO: 215663 - DNA, 20 bp, Artificial Sequence
  Description of Artificial Sequence: Synthetic oligonucleotide
  Target: LAMA2; (-) strand; PAM type: YTN; PAM sequence: TTT
aaatctttattgtaatcact

SEQ ID NO: 215664 - DNA, 20 bp, Artificial Sequence
  Description of Artificial Sequence: Synthetic oligonucleotide
  Target: LAMA2; (-) strand; PAM type: YTN; PAM sequence: TTA
taaatagtttaaatctttat

SEQ ID NO: 215665 - DNA, 20 bp, Artificial Sequence
  Description of Artificial Sequence: Synthetic oligonucleotide
  Target: LAMA2; (-) strand; PAM type: YTN; PAM sequence: TTG
caattataaatagtttaaat

SEQ ID NO: 215666 - DNA, 20 bp, Artificial Sequence
  Description of Artificial Sequence: Synthetic oligonucleotide
  Target: LAMA2; (-) strand; PAM type: YTN; PAM sequence: TTA
aaaaaagataatagtacagt

SEQ ID NO: 215667 - DNA, 20 bp, Artificial Sequence
  Description of Artificial Sequence: Synthetic oligonucleotide
  Target: LAMA2; (-) strand; PAM type: YTN; PAM sequence: CTG
ttaaaaaaagataatagtac

SEQ ID NO: 215668 - DNA, 20 bp, Artificial Sequence
  Description of Artificial Sequence: Synthetic oligonucleotide
  Target: LAMA2; (-) strand; PAM type: YTN; PAM sequence: TTC
tgttaaaaaaagataatagt

SEQ ID NO: 215669 - DNA, 20 bp, Artificial Sequence
  Description of Artificial Sequence: Synthetic oligonucleotide
  Target: LAMA2; (-) strand; PAM type: YTN; PAM sequence: TTT
ctgttaaaaaaagataatag

SEQ ID NO: 215670 - DNA, 20 bp, Artificial Sequence
  Description of Artificial Sequence: Synthetic oligonucleotide
  Target: LAMA2; (-) strand; PAM type: YTN; PAM sequence: TTT
tctgttaaaaaaagataata

SEQ ID NO: 215671 - DNA, 20 bp, Artificial Sequence
  Description of Artificial Sequence: Synthetic oligonucleotide
  Target: LAMA2; (-) strand; PAM type: YTN; PAM sequence: CTT
ttctgttaaaaaaagataat

SEQ ID NO: 215672 - DNA, 20 bp, Artificial Sequence
  Description of Artificial Sequence: Synthetic oligonucleotide
  Target: LAMA2; (-) strand; PAM type: YTN; PAM sequence: TTC
ttttctgttaaaaaaagata

SEQ ID NO: 215673 - DNA, 20 bp, Artificial Sequence
  Description of Artificial Sequence: Synthetic oligonucleotide
  Target: LAMA2; (-) strand; PAM type: YTN; PAM sequence: TTT
cttttctgttaaaaaaagat

SEQ ID NO: 215674 - DNA, 20 bp, Artificial Sequence
  Description of Artificial Sequence: Synthetic oligonucleotide
  Target: LAMA2; (-) strand; PAM type: YTN; PAM sequence: TTT
tcttttctgttaaaaaaaga

SEQ ID NO: 215675 - DNA, 20 bp, Artificial Sequence
  Description of Artificial Sequence: Synthetic oligonucleotide
  Target: LAMA2; (-) strand; PAM type: YTN; PAM sequence: TTA
agttttcttttctgttaaaa

SEQ ID NO: 215676 - DNA, 20 bp, Artificial Sequence
  Description of Artificial Sequence: Synthetic oligonucleotide
  Target: LAMA2; (-) strand; PAM type: YTN; PAM sequence: CTA
ttaagttttcttttctgtta

SEQ ID NO: 215677 - DNA, 20 bp, Artificial Sequence
  Description of Artificial Sequence: Synthetic oligonucleotide
  Target: LAMA2; (-) strand; PAM type: YTN; PAM sequence: TTG
actattaagttttcttttct

SEQ ID NO: 215678 - DNA, 20 bp, Artificial Sequence
  Description of Artificial Sequence: Synthetic oligonucleotide
  Target: LAMA2; (-) strand; PAM type: YTN; PAM sequence: TTA
gagtatgtattgactattaa

SEQ ID NO: 215679 - DNA, 20 bp, Artificial Sequence
  Description of Artificial Sequence: Synthetic oligonucleotide
  Target: LAMA2; (-) strand; PAM type: YTN; PAM sequence: TTA
ttagagtatgtattgactat

SEQ ID NO: 215680 - DNA, 20 bp, Artificial Sequence
  Description of Artificial Sequence: Synthetic oligonucleotide
  Target: LAMA2; (-) strand; PAM type: YTN; PAM sequence: TTG
attattagagtatgtattga

SEQ ID NO: 215681 - DNA, 20 bp, Artificial Sequence
  Description of Artificial Sequence: Synthetic oligonucleotide
  Target: LAMA2; (-) strand; PAM type: YTN; PAM sequence: TTT
gattattagagtatgtattg

SEQ ID NO: 215682 - DNA, 20 bp, Artificial Sequence
  Description of Artificial Sequence: Synthetic oligonucleotide
  Target: LAMA2; (-) strand; PAM type: YTN; PAM sequence: TTA
taatatttgattattagagt

SEQ ID NO: 215683 - DNA, 20 bp, Artificial Sequence
  Description of Artificial Sequence: Synthetic oligonucleotide
  Target: LAMA2; (-) strand; PAM type: YTN; PAM sequence: TTT
ataatatttgattattagag

SEQ ID NO: 215684 - DNA, 20 bp, Artificial Sequence
  Description of Artificial Sequence: Synthetic oligonucleotide
  Target: LAMA2; (-) strand; PAM type: YTN; PAM sequence: TTT
tataatatttgattattaga

SEQ ID NO: 215685 - DNA, 20 bp, Artificial Sequence
  Description of Artificial Sequence: Synthetic oligonucleotide
  Target: LAMA2; (-) strand; PAM type: YTN; PAM sequence: TTT
ttataatatttgattattag

SEQ ID NO: 215686 - DNA, 20 bp, Artificial Sequence
  Description of Artificial Sequence: Synthetic oligonucleotide
  Target: LAMA2; (-) strand; PAM type: YTN; PAM sequence: TTA
ggaagatttttataatattt

SEQ ID NO: 215687 - DNA, 20 bp, Artificial Sequence
  Description of Artificial Sequence: Synthetic oligonucleotide
  Target: LAMA2; (-) strand; PAM type: YTN; PAM sequence: TTA
aaaaagaaagtaaattagga

SEQ ID NO: 215688 - DNA, 20 bp, Artificial Sequence
  Description of Artificial Sequence: Synthetic oligonucleotide
  Target: LAMA2; (-) strand; PAM type: YTN; PAM sequence: TTG
aaagaaacaaaaaattaaaa

SEQ ID NO: 215689 - DNA, 20 bp, Artificial Sequence
  Description of Artificial Sequence: Synthetic oligonucleotide
  Target: LAMA2; (-) strand; PAM type: YTN; PAM sequence: TTG
cattgaaagaaacaaaaaat

SEQ ID NO: 215690 - DNA, 20 bp, Artificial Sequence
  Description of Artificial Sequence: Synthetic oligonucleotide
  Target: LAMA2; (-) strand; PAM type: YTN; PAM sequence: TTA
gaattgcattgaaagaaaca

SEQ ID NO: 215691 - DNA, 20 bp, Artificial Sequence
  Description of Artificial Sequence: Synthetic oligonucleotide
  Target: LAMA2; (-) strand; PAM type: YTN; PAM sequence: CTT
agaattgcattgaaagaaac

SEQ ID NO: 215692 - DNA, 20 bp, Artificial Sequence
  Description of Artificial Sequence: Synthetic oligonucleotide
  Target: LAMA2; (-) strand; PAM type: YTN; PAM sequence: TTG
gccttagaattgcattgaaa

SEQ ID NO: 215693 - DNA, 20 bp, Artificial Sequence
  Description of Artificial Sequence: Synthetic oligonucleotide
  Target: LAMA2; (-) strand; PAM type: YTN; PAM sequence: CTG
gttggccttagaattgcatt

SEQ ID NO: 215694 - DNA, 20 bp, Artificial Sequence
  Description of Artificial Sequence: Synthetic oligonucleotide
  Target: LAMA2; (-) strand; PAM type: YTN; PAM sequence: TTG
cggacctggttggccttaga

SEQ ID NO: 215695 - DNA, 20 bp, Artificial Sequence
  Description of Artificial Sequence: Synthetic oligonucleotide
  Target: LAMA2; (-) strand; PAM type: YTN; PAM sequence: CTT
gcggacctggttggccttag

SEQ ID NO: 215696 - DNA, 20 bp, Artificial Sequence
  Description of Artificial Sequence: Synthetic oligonucleotide
  Target: LAMA2; (-) strand; PAM type: YTN; PAM sequence: CTA
ccttgcggacctggttggcc

SEQ ID NO: 215697 - DNA, 20 bp, Artificial Sequence
  Description of Artificial Sequence: Synthetic oligonucleotide
  Target: LAMA2; (-) strand; PAM type: YTN; PAM sequence: CTA
gtgctaccttgcggacctgg

SEQ ID NO: 215698 - DNA, 20 bp, Artificial Sequence
  Description of Artificial Sequence: Synthetic oligonucleotide
  Target: LAMA2; (-) strand; PAM type: YTN; PAM sequence: TTA
tgaaaccagcatagatctag

SEQ ID NO: 215699 - DNA, 20 bp, Artificial Sequence
  Description of Artificial Sequence: Synthetic oligonucleotide
  Target: LAMA2; (-) strand; PAM type: YTN; PAM sequence: TTT
atgaaaccagcatagatcta

SEQ ID NO: 215700 - DNA, 20 bp, Artificial Sequence
  Description of Artificial Sequence: Synthetic oligonucleotide
  Target: LAMA2; (-) strand; PAM type: YTN; PAM sequence: TTT
tatgaaaccagcatagatct

SEQ ID NO: 215701 - DNA, 20 bp, Artificial Sequence
  Description of Artificial Sequence: Synthetic oligonucleotide
  Target: LAMA2; (-) strand; PAM type: YTN; PAM sequence: CTA
caatgttttatgaaaccagc

SEQ ID NO: 215702 - DNA, 20 bp, Artificial Sequence
  Description of Artificial Sequence: Synthetic oligonucleotide
  Target: LAMA2; (-) strand; PAM type: YTN; PAM sequence: CTG
aatggcatctacaatgtttt

SEQ ID NO: 215703 - DNA, 20 bp, Artificial Sequence
  Description of Artificial Sequence: Synthetic oligonucleotide
  Target: LAMA2; (-) strand; PAM type: YTN; PAM sequence: CTA
ctgaatggcatctacaatgt

SEQ ID NO: 215704 - DNA, 20 bp, Artificial Sequence
  Description of Artificial Sequence: Synthetic oligonucleotide
  Target: LAMA2; (-) strand; PAM type: YTN; PAM sequence: CTC
tactgaatggcatctacaat

SEQ ID NO: 215705 - DNA, 20 bp, Artificial Sequence
  Description of Artificial Sequence: Synthetic oligonucleotide
  Target: LAMA2; (-) strand; PAM type: YTN; PAM sequence: TTA
atcactctactgaatggcat

SEQ ID NO: 215706 - DNA, 20 bp, Artificial Sequence
  Description of Artificial Sequence: Synthetic oligonucleotide
  Target: LAMA2; (-) strand; PAM type: YTN; PAM sequence: CTT
aatcactctactgaatggca

SEQ ID NO: 215707 - DNA, 20 bp, Artificial Sequence
  Description of Artificial Sequence: Synthetic oligonucleotide
  Target: LAMA2; (-) strand; PAM type: YTN; PAM sequence: CTC
ttaatcactctactgaatgg

SEQ ID NO: 215708 - DNA, 20 bp, Artificial Sequence
  Description of Artificial Sequence: Synthetic oligonucleotide
  Target: LAMA2; (-) strand; PAM type: YTN; PAM sequence: CTA
tcctcttaatcactctactg

SEQ ID NO: 215709 - DNA, 20 bp, Artificial Sequence
  Description of Artificial Sequence: Synthetic oligonucleotide
  Target: LAMA2; (-) strand; PAM type: YTN; PAM sequence: CTC
cagagtctatcctcttaatc

SEQ ID NO: 215710 - DNA, 20 bp, Artificial Sequence
  Description of Artificial Sequence: Synthetic oligonucleotide
  Target: LAMA2; (-) strand; PAM type: YTN; PAM sequence: CTG
gctccagagtctatcctctt

SEQ ID NO: 215711 - DNA, 20 bp, Artificial Sequence
  Description of Artificial Sequence: Synthetic oligonucleotide
  Target: LAMA2; (-) strand; PAM type: YTN; PAM sequence: TTG
aaccaaagcaatctggctcc

SEQ ID NO: 215712 - DNA, 20 bp, Artificial Sequence
  Description of Artificial Sequence: Synthetic oligonucleotide
  Target: LAMA2; (-) strand; PAM type: YTN; PAM sequence: TTT
gaaccaaagcaatctggctc

SEQ ID NO: 215713 - DNA, 20 bp, Artificial Sequence
  Description of Artificial Sequence: Synthetic oligonucleotide
  Target: LAMA2; (-) strand; PAM type: YTN; PAM sequence: CTA
tgatttgaaccaaagcaatc

SEQ ID NO: 215714 - DNA, 20 bp, Artificial Sequence
  Description of Artificial Sequence: Synthetic oligonucleotide
  Target: LAMA2; (-) strand; PAM type: YTN; PAM sequence: CTA
gcaagtagcagagctatgat

SEQ ID NO: 215715 - DNA, 20 bp, Artificial Sequence
  Description of Artificial Sequence: Synthetic oligonucleotide
  Target: LAMA2; (-) strand; PAM type: YTN; PAM sequence: TTA
cagctagcaagtagcagagc

SEQ ID NO: 215716 - DNA, 20 bp, Artificial Sequence
  Description of Artificial Sequence: Synthetic oligonucleotide
  Target: LAMA2; (-) strand; PAM type: YTN; PAM sequence: CTG
attacagctagcaagtagca

SEQ ID NO: 215717 - DNA, 20 bp, Artificial Sequence
  Description of Artificial Sequence: Synthetic oligonucleotide
  Target: LAMA2; (-) strand; PAM type: YTN; PAM sequence: CTC
ctgattacagctagcaagta

SEQ ID NO: 215718 - DNA, 20 bp, Artificial Sequence
  Description of Artificial Sequence: Synthetic oligonucleotide
  Target: LAMA2; (-) strand; PAM type: YTN; PAM sequence: CTC
gctcctgattacagctagca

SEQ ID NO: 215719 - DNA, 20 bp, Artificial Sequence
  Description of Artificial Sequence: Synthetic oligonucleotide
  Target: LAMA2; (-) strand; PAM type: YTN; PAM sequence: TTA
agtaactcgctcctgattac

SEQ ID NO: 215720 - DNA, 20 bp, Artificial Sequence
  Description of Artificial Sequence: Synthetic oligonucleotide
  Target: LAMA2; (-) strand; PAM type: YTN; PAM sequence: TTA
agaaggcagagaggtgttaa

SEQ ID NO: 215721 - DNA, 20 bp, Artificial Sequence
  Description of Artificial Sequence: Synthetic oligonucleotide
  Target: LAMA2; (-) strand; PAM type: YTN; PAM sequence: TTA
ttaagaaggcagagaggtgt

SEQ ID NO: 215722 - DNA, 20 bp, Artificial Sequence
  Description of Artificial Sequence: Synthetic oligonucleotide
  Target: LAMA2; (-) strand; PAM type: YTN; PAM sequence: TTT
attaagaaggcagagaggtg

SEQ ID NO: 215723 - DNA, 20 bp, Artificial Sequence
  Description of Artificial Sequence: Synthetic oligonucleotide
  Target: LAMA2; (-) strand; PAM type: YTN; PAM sequence: TTT
tattaagaaggcagagaggt

SEQ ID NO: 215724 - DNA, 20 bp, Artificial Sequence
  Description of Artificial Sequence: Synthetic oligonucleotide
  Target: LAMA2; (-) strand; PAM type: YTN; PAM sequence: CTA
ttttattaagaaggcagaga

SEQ ID NO: 215725 - DNA, 20 bp, Artificial Sequence
  Description of Artificial Sequence: Synthetic oligonucleotide
  Target: LAMA2; (-) strand; PAM type: YTN; PAM sequence: CTC
tattttattaagaaggcaga

SEQ ID NO: 215726 - DNA, 20 bp, Artificial Sequence
  Description of Artificial Sequence: Synthetic oligonucleotide
  Target: LAMA2; (-) strand; PAM type: YTN; PAM sequence: TTA
tctctattttattaagaagg

SEQ ID NO: 215727 - DNA, 20 bp, Artificial Sequence
  Description of Artificial Sequence: Synthetic oligonucleotide
  Target: LAMA2; (-) strand; PAM type: YTN; PAM sequence: CTA
ttatctctattttattaaga

SEQ ID NO: 215728 - DNA, 20 bp, Artificial Sequence
  Description of Artificial Sequence: Synthetic oligonucleotide
  Target: LAMA2; (-) strand; PAM type: YTN; PAM sequence: TTC
ataccactattatctctatt

SEQ ID NO: 215729 - DNA, 20 bp, Artificial Sequence
  Description of Artificial Sequence: Synthetic oligonucleotide
  Target: LAMA2; (-) strand; PAM type: YTN; PAM sequence: CTT
cataccactattatctctat

SEQ ID NO: 215730 - DNA, 20 bp, Artificial Sequence
  Description of Artificial Sequence: Synthetic oligonucleotide
  Target: LAMA2; (-) strand; PAM type: YTN; PAM sequence: CTA
cacaaaacatccacatgagc

SEQ ID NO: 215731 - DNA, 20 bp, Artificial Sequence
  Description of Artificial Sequence: Synthetic oligonucleotide
  Target: LAMA2; (-) strand; PAM type: YTN; PAM sequence: TTG
ctacacaaaacatccacatg

SEQ ID NO: 215732 - DNA, 20 bp, Artificial Sequence
  Description of Artificial Sequence: Synthetic oligonucleotide
  Target: LAMA2; (-) strand; PAM type: YTN; PAM sequence: TTT
gctacacaaaacatccacat

SEQ ID NO: 215733 - DNA, 20 bp, Artificial Sequence
  Description of Artificial Sequence: Synthetic oligonucleotide
  Target: LAMA2; (-) strand; PAM type: YTN; PAM sequence: CTA
caatgatttgctacacaaaa

SEQ ID NO: 215734 - DNA, 20 bp, Artificial Sequence
  Description of Artificial Sequence: Synthetic oligonucleotide
  Target: LAMA2; (-) strand; PAM type: YTN; PAM sequence: TTC
ctacaatgatttgctacaca

SEQ ID NO: 215735 - DNA, 20 bp, Artificial Sequence
  Description of Artificial Sequence: Synthetic oligonucleotide
  Target: LAMA2; (-) strand; PAM type: YTN; PAM sequence: CTG
ttcctacaatgatttgctac

SEQ ID NO: 215736 - DNA, 20 bp, Artificial Sequence
  Description of Artificial Sequence: Synthetic oligonucleotide
  Target: LAMA2; (-) strand; PAM type: YTN; PAM sequence: TTG
tcagacactgttcctacaat

SEQ ID NO: 215737 - DNA, 20 bp, Artificial Sequence
  Description of Artificial Sequence: Synthetic oligonucleotide
  Target: LAMA2; (-) strand; PAM type: YTN; PAM sequence: CTA
ttgtcagacactgttcctac

SEQ ID NO: 215738 - DNA, 20 bp, Artificial Sequence
  Description of Artificial Sequence: Synthetic oligonucleotide
  Target: LAMA2; (-) strand; PAM type: YTN; PAM sequence: TTG
caatgtgccaagcactattg

SEQ ID NO: 215739 - DNA, 20 bp, Artificial Sequence
  Description of Artificial Sequence: Synthetic oligonucleotide
  Target: LAMA2; (-) strand; PAM type: YTN; PAM sequence: TTT
gcaatgtgccaagcactatt

SEQ ID NO: 215740 - DNA, 20 bp, Artificial Sequence
  Description of Artificial Sequence: Synthetic oligonucleotide
  Target: LAMA2; (-) strand; PAM type: YTN; PAM sequence: TTG
aatgtttgcaatgtgccaag

SEQ ID NO: 215741 - DNA, 20 bp, Artificial Sequence
  Description of Artificial Sequence: Synthetic oligonucleotide
  Target: LAMA2; (-) strand; PAM type: YTN; PAM sequence: TTA
taatcataatagccagcatc

SEQ ID NO: 215742 - DNA, 20 bp, Artificial Sequence
  Description of Artificial Sequence: Synthetic oligonucleotide
  Target: LAMA2; (-) strand; PAM type: YTN; PAM sequence: CTG
catataataataataattat

SEQ ID NO: 215743 - DNA, 20 bp, Artificial Sequence
  Description of Artificial Sequence: Synthetic oligonucleotide
  Target: LAMA2; (-) strand; PAM type: YTN; PAM sequence: CTG
tatcatctgcatataataat

SEQ ID NO: 215744 - DNA, 20 bp, Artificial Sequence
  Description of Artificial Sequence: Synthetic oligonucleotide
  Target: LAMA2; (-) strand; PAM type: YTN; PAM sequence: TTG
tctgtatcatctgcatataa

SEQ ID NO: 215745 - DNA, 20 bp, Artificial Sequence
  Description of Artificial Sequence: Synthetic oligonucleotide
  Target: LAMA2; (-) strand; PAM type: YTN; PAM sequence: TTT
gtctgtatcatctgcatata

SEQ ID NO: 215746 - DNA, 20 bp, Artificial Sequence
  Description of Artificial Sequence: Synthetic oligonucleotide
  Target: LAMA2; (-) strand; PAM type: YTN; PAM sequence: CTC
ataaatgtttgtctgtatca

SEQ ID NO: 215747 - DNA, 20 bp, Artificial Sequence
  Description of Artificial Sequence: Synthetic oligonucleotide
  Target: LAMA2; (-) strand; PAM type: YTN; PAM sequence: TTG
gactcataaatgtttgtctg

SEQ ID NO: 215748 - DNA, 20 bp, Artificial Sequence
  Description of Artificial Sequence: Synthetic oligonucleotide
  Target: LAMA2; (-) strand; PAM type: YTN; PAM sequence: TTA
taaatattggactcataaat

SEQ ID NO: 215749 - DNA, 20 bp, Artificial Sequence
  Description of Artificial Sequence: Synthetic oligonucleotide
  Target: LAMA2; (-) strand; PAM type: YTN; PAM sequence: TTA
gattataaatattggactca

SEQ ID NO: 215750 - DNA, 20 bp, Artificial Sequence
  Description of Artificial Sequence: Synthetic oligonucleotide
  Target: LAMA2; (-) strand; PAM type: YTN; PAM sequence: TTG
taaaataaacgaataattag

SEQ ID NO: 215751 - DNA, 20 bp, Artificial Sequence
  Description of Artificial Sequence: Synthetic oligonucleotide
  Target: LAMA2; (-) strand; PAM type: YTN; PAM sequence: TTT
gtaaaataaacgaataatta

SEQ ID NO: 215752 - DNA, 20 bp, Artificial Sequence
  Description of Artificial Sequence: Synthetic oligonucleotide
  Target: LAMA2; (-) strand; PAM type: YTN; PAM sequence: CTC
aatgtatttgtaaaataaac

SEQ ID NO: 215753 - DNA, 20 bp, Artificial Sequence
  Description of Artificial Sequence: Synthetic oligonucleotide
  Target: LAMA2; (-) strand; PAM type: YTN; PAM sequence: TTG
gcacatagtagggacagagt

SEQ ID NO: 215754 - DNA, 20 bp, Artificial Sequence
  Description of Artificial Sequence: Synthetic oligonucleotide
  Target: LAMA2; (-) strand; PAM type: YTN; PAM sequence: CTT
ggcacatagtagggacagag

SEQ ID NO: 215755 - DNA, 20 bp, Artificial Sequence
  Description of Artificial Sequence: Synthetic oligonucleotide
  Target: LAMA2; (-) strand; PAM type: YTN; PAM sequence: CTC
aaagcttggcacatagtagg

SEQ ID NO: 215756 - DNA, 20 bp, Artificial Sequence
  Description of Artificial Sequence: Synthetic oligonucleotide
  Target: LAMA2; (-) strand; PAM type: YTN; PAM sequence: TTA
tcctcaaagcttggcacata

SEQ ID NO: 215757 - DNA, 20 bp, Artificial Sequence
  Description of Artificial Sequence: Synthetic oligonucleotide
  Target: LAMA2; (-) strand; PAM type: YTN; PAM sequence: CTT
atcctcaaagcttggcacat

SEQ ID NO: 215758 - DNA, 20 bp, Artificial Sequence
  Description of Artificial Sequence: Synthetic oligonucleotide
  Target: LAMA2; (-) strand; PAM type: YTN; PAM sequence: CTG
ccttatcctcaaagcttggc

SEQ ID NO: 215759 - DNA, 20 bp, Artificial Sequence
  Description of Artificial Sequence: Synthetic oligonucleotide
  Target: LAMA2; (-) strand; PAM type: YTN; PAM sequence: TTC
tgccttatcctcaaagcttg

SEQ ID NO: 215760 - DNA, 20 bp, Artificial Sequence
  Description of Artificial Sequence: Synthetic oligonucleotide
  Target: LAMA2; (-) strand; PAM type: YTN; PAM sequence: TTT
ctgccttatcctcaaagctt

SEQ ID NO: 215761 - DNA, 20 bp, Artificial Sequence
  Description of Artificial Sequence: Synthetic oligonucleotide
  Target: LAMA2; (-) strand; PAM type: YTN; PAM sequence: TTT
tctgccttatcctcaaagct

SEQ ID NO: 215762 - DNA, 20 bp, Artificial Sequence
  Description of Artificial Sequence: Synthetic oligonucleotide
  Target: LAMA2; (-) strand; PAM type: YTN; PAM sequence: TTG
tattttctgccttatcctca

SEQ ID NO: 215763 - DNA, 20 bp, Artificial Sequence
  Description of Artificial Sequence: Synthetic oligonucleotide
  Target: LAMA2; (-) strand; PAM type: YTN; PAM sequence: TTT
gtattttctgccttatcctc

SEQ ID NO: 215764 - DNA, 20 bp, Artificial Sequence
  Description of Artificial Sequence: Synthetic oligonucleotide
  Target: LAMA2; (-) strand; PAM type: YTN; PAM sequence: TTG
aatttgtattttctgcctta

SEQ ID NO: 215765 - DNA, 20 bp, Artificial Sequence
  Description of Artificial Sequence: Synthetic oligonucleotide
  Target: LAMA2; (-) strand; PAM type: YTN; PAM sequence: CTT
gaatttgtattttctgcctt

SEQ ID NO: 215766 - DNA, 20 bp, Artificial Sequence
  Description of Artificial Sequence: Synthetic oligonucleotide
  Target: LAMA2; (-) strand; PAM type: YTN; PAM sequence: CTA
gatcttgaatttgtattttc

SEQ ID NO: 215767 - DNA, 20 bp, Artificial Sequence
  Description of Artificial Sequence: Synthetic oligonucleotide
  Target: LAMA2; (-) strand; PAM type: YTN; PAM sequence: CTC
tagatcttgaatttgtattt

SEQ ID NO: 215768 - DNA, 20 bp, Artificial Sequence
  Description of Artificial Sequence: Synthetic oligonucleotide
  Target: LAMA2; (-) strand; PAM type: YTN; PAM sequence: TTA
ccaagatctctagatcttga

SEQ ID NO: 215769 - DNA, 20 bp, Artificial Sequence
  Description of Artificial Sequence: Synthetic oligonucleotide
  Target: LAMA2; (-) strand; PAM type: YTN; PAM sequence: TTT
accaagatctctagatcttg

SEQ ID NO: 215770 - DNA, 20 bp, Artificial Sequence
  Description of Artificial Sequence: Synthetic oligonucleotide
  Target: LAMA2; (-) strand; PAM type: YTN; PAM sequence: TTT
taccaagatctctagatctt

SEQ ID NO: 215771 - DNA, 20 bp, Artificial Sequence
  Description of Artificial Sequence: Synthetic oligonucleotide
  Target: LAMA2; (-) strand; PAM type: YTN; PAM sequence: TTT
ttaccaagatctctagatct

SEQ ID NO: 215772 - DNA, 20 bp, Artificial Sequence
  Description of Artificial Sequence: Synthetic oligonucleotide
  Target: LAMA2; (-) strand; PAM type: YTN; PAM sequence: TTT
tttaccaagatctctagatc

SEQ ID NO: 215773 - DNA, 20 bp, Artificial Sequence
  Description of Artificial Sequence: Synthetic oligonucleotide
  Target: LAMA2; (-) strand; PAM type: YTN; PAM sequence: CTT
ttttaccaagatctctagat

SEQ ID NO: 215774 - DNA, 20 bp, Artificial Sequence
  Description of Artificial Sequence: Synthetic oligonucleotide
  Target: LAMA2; (-) strand; PAM type: YTN; PAM sequence: CTG
ccttttttaccaagatctct

SEQ ID NO: 215775 - DNA, 20 bp, Artificial Sequence
  Description of Artificial Sequence: Synthetic oligonucleotide
  Target: LAMA2; (-) strand; PAM type: YTN; PAM sequence: TTC
tgccttttttaccaagatct

SEQ ID NO: 215776 - DNA, 20 bp, Artificial Sequence
  Description of Artificial Sequence: Synthetic oligonucleotide
  Target: LAMA2; (-) strand; PAM type: YTN; PAM sequence: TTT
ctgccttttttaccaagatc

SEQ ID NO: 215777 - DNA, 20 bp, Artificial Sequence
  Description of Artificial Sequence: Synthetic oligonucleotide
  Target: LAMA2; (-) strand; PAM type: YTN; PAM sequence: TTT
tctgccttttttaccaagat

SEQ ID NO: 215778 - DNA, 20 bp, Artificial Sequence
  Description of Artificial Sequence: Synthetic oligonucleotide
  Target: LAMA2; (-) strand; PAM type: YTN; PAM sequence: TTG
tgttttctgccttttttacc

SEQ ID NO: 215779 - DNA, 20 bp, Artificial Sequence
  Description of Artificial Sequence: Synthetic oligonucleotide
  Target: LAMA2; (-) strand; PAM type: YTN; PAM sequence: TTT
gtgttttctgccttttttac

SEQ ID NO: 215780 - DNA, 20 bp, Artificial Sequence
  Description of Artificial Sequence: Synthetic oligonucleotide
  Target: LAMA2; (-) strand; PAM type: YTN; PAM sequence: TTG
agtttgtgttttctgccttt

SEQ ID NO: 215781 - DNA, 20 bp, Artificial Sequence
  Description of Artificial Sequence: Synthetic oligonucleotide
  Target: LAMA2; (-) strand; PAM type: YTN; PAM sequence: CTT
gagtttgtgttttctgcctt

SEQ ID NO: 215782 - DNA, 20 bp, Artificial Sequence
  Description of Artificial Sequence: Synthetic oligonucleotide
  Target: LAMA2; (-) strand; PAM type: YTN; PAM sequence: CTA
gatcttgagtttgtgttttc

SEQ ID NO: 215783 - DNA, 20 bp, Artificial Sequence
  Description of Artificial Sequence: Synthetic oligonucleotide
  Target: LAMA2; (-) strand; PAM type: YTN; PAM sequence: CTG
agatccctagatcttgagtt

SEQ ID NO: 215784 - DNA, 20 bp, Artificial Sequence
  Description of Artificial Sequence: Synthetic oligonucleotide
  Target: LAMA2; (-) strand; PAM type: YTN; PAM sequence: TTA
ctgagatccctagatcttga

SEQ ID NO: 215785 - DNA, 20 bp, Artificial Sequence
  Description of Artificial Sequence: Synthetic oligonucleotide
  Target: LAMA2; (-) strand; PAM type: YTN; PAM sequence: TTT
actgagatccctagatcttg

SEQ ID NO: 215786 - DNA, 20 bp, Artificial Sequence
  Description of Artificial Sequence: Synthetic oligonucleotide
  Target: LAMA2; (-) strand; PAM type: YTN; PAM sequence: TTT
tactgagatccctagatctt

SEQ ID NO: 215787 - DNA, 20 bp, Artificial Sequence
  Description of Artificial Sequence: Synthetic oligonucleotide
  Target: LAMA2; (-) strand; PAM type: YTN; PAM sequence: TTG
atattttactgagatcccta

SEQ ID NO: 215788 - DNA, 20 bp, Artificial Sequence
  Description of Artificial Sequence: Synthetic oligonucleotide
  Target: LAMA2; (-) strand; PAM type: YTN; PAM sequence: CTT
gatattttactgagatccct

SEQ ID NO: 215789 - DNA, 20 bp, Artificial Sequence
  Description of Artificial Sequence: Synthetic oligonucleotide
  Target: LAMA2; (-) strand; PAM type: YTN; PAM sequence: CTC
atggcttgatattttactga

SEQ ID NO: 215790 - DNA, 20 bp, Artificial Sequence
  Description of Artificial Sequence: Synthetic oligonucleotide
  Target: LAMA2; (-) strand; PAM type: YTN; PAM sequence: CTA
aatctcatggcttgatattt

SEQ ID NO: 215791 - DNA, 20 bp, Artificial Sequence
  Description of Artificial Sequence: Synthetic oligonucleotide
  Target: LAMA2; (-) strand; PAM type: YTN; PAM sequence: CTG
actaaatctcatggcttgat

SEQ ID NO: 215792 - DNA, 20 bp, Artificial Sequence
  Description of Artificial Sequence: Synthetic oligonucleotide
  Target: LAMA2; (-) strand; PAM type: YTN; PAM sequence: TTC
ctgactaaatctcatggctt

SEQ ID NO: 215793 - DNA, 20 bp, Artificial Sequence
  Description of Artificial Sequence: Synthetic oligonucleotide
  Target: LAMA2; (-) strand; PAM type: YTN; PAM sequence: CTT
cctgactaaatctcatggct

SEQ ID NO: 215794 - DNA, 20 bp, Artificial Sequence
  Description of Artificial Sequence: Synthetic oligonucleotide
  Target: LAMA2; (-) strand; PAM type: YTN; PAM sequence: CTG
tcaagaaagagagagagaga

SEQ ID NO: 215795 - DNA, 20 bp, Artificial Sequence
  Description of Artificial Sequence: Synthetic oligonucleotide
  Target: LAMA2; (-) strand; PAM type: YTN; PAM sequence: CTC
tgtcaagaaagagagagaga

SEQ ID NO: 215796 - DNA, 20 bp, Artificial Sequence
  Description of Artificial Sequence: Synthetic oligonucleotide
  Target: LAMA2; (-) strand; PAM type: YTN; PAM sequence: CTG
ggagacagaggaagactctg

SEQ ID NO: 215797 - DNA, 20 bp, Artificial Sequence
  Description of Artificial Sequence: Synthetic oligonucleotide
  Target: LAMA2; (-) strand; PAM type: YTN; PAM sequence: CTC
cagcctgggagacagaggaa

SEQ ID NO: 215798 - DNA, 20 bp, Artificial Sequence
  Description of Artificial Sequence: Synthetic oligonucleotide
  Target: LAMA2; (-) strand; PAM type: YTN; PAM sequence: CTG
cactccagcctgggagacag

SEQ ID NO: 215799 - DNA, 20 bp, Artificial Sequence
  Description of Artificial Sequence: Synthetic oligonucleotide
  Target: LAMA2; (-) strand; PAM type: YTN; PAM sequence: CTG
agatcacatcactgcactcc

SEQ ID NO: 215800 - DNA, 20 bp, Artificial Sequence
  Description of Artificial Sequence: Synthetic oligonucleotide
  Target: LAMA2; (-) strand; PAM type: YTN; PAM sequence: TTG
cagtgagctgagatcacatc

SEQ ID NO: 215801 - DNA, 20 bp, Artificial Sequence
  Description of Artificial Sequence: Synthetic oligonucleotide
  Target: LAMA2; (-) strand; PAM type: YTN; PAM sequence: TTG
agcccgggaggtggaggttg

SEQ ID NO: 215802 - DNA, 20 bp, Artificial Sequence
  Description of Artificial Sequence: Synthetic oligonucleotide
  Target: LAMA2; (-) strand; PAM type: YTN; PAM sequence: CTT
gagcccgggaggtggaggtt

SEQ ID NO: 215803 - DNA, 20 bp, Artificial Sequence
  Description of Artificial Sequence: Synthetic oligonucleotide
  Target: LAMA2; (-) strand; PAM type: YTN; PAM sequence: TTG
cttgagcccgggaggtggag

SEQ ID NO: 215804 - DNA, 20 bp, Artificial Sequence
  Description of Artificial Sequence: Synthetic oligonucleotide
  Target: LAMA2; (-) strand; PAM type: YTN; PAM sequence: CTG
aggcaggagaattgcttgag

SEQ ID NO: 215805 - DNA, 20 bp, Artificial Sequence
  Description of Artificial Sequence: Synthetic oligonucleotide
  Target: LAMA2; (-) strand; PAM type: YTN; PAM sequence: TTG
gaaacctgaggcaggagaat

SEQ ID NO: 215806 - DNA, 20 bp, Artificial Sequence
  Description of Artificial Sequence: Synthetic oligonucleotide
  Target: LAMA2; (-) strand; PAM type: YTN; PAM sequence: CTT
ggaaacctgaggcaggagaa

SEQ ID NO: 215807 - DNA, 20 bp, Artificial Sequence
  Description of Artificial Sequence: Synthetic oligonucleotide
  Target: LAMA2; (-) strand; PAM type: YTN; PAM sequence: CTA
cttggaaacctgaggcagga

SEQ ID NO: 215808 - DNA, 20 bp, Artificial Sequence
  Description of Artificial Sequence: Synthetic oligonucleotide
  Target: LAMA2; (-) strand; PAM type: YTN; PAM sequence: CTG
taatcccagctacttggaaa

SEQ ID NO: 215809 - DNA, 20 bp, Artificial Sequence
  Description of Artificial Sequence: Synthetic oligonucleotide
  Target: LAMA2; (-) strand; PAM type: YTN; PAM sequence: TTA
gcagggcgtggtggtgggca

SEQ ID NO: 215810 - DNA, 20 bp, Artificial Sequence
  Description of Artificial Sequence: Synthetic oligonucleotide
  Target: LAMA2; (-) strand; PAM type: YTN; PAM sequence: CTA
aaaatacaaaaattagcagg

SEQ ID NO: 215811 - DNA, 20 bp, Artificial Sequence
  Description of Artificial Sequence: Synthetic oligonucleotide
  Target: LAMA2; (-) strand; PAM type: YTN; PAM sequence: CTA
ctaaaaatacaaaaattagc

SEQ ID NO: 215812 - DNA, 20 bp, Artificial Sequence
  Description of Artificial Sequence: Synthetic oligonucleotide
  Target: LAMA2; (-) strand; PAM type: YTN; PAM sequence: CTC
tactaaaaatacaaaaatta

SEQ ID NO: 215813 - DNA, 20 bp, Artificial Sequence
  Description of Artificial Sequence: Synthetic oligonucleotide
  Target: LAMA2; (-) strand; PAM type: YTN; PAM sequence: CTG
tctctactaaaaatacaaaa

SEQ ID NO: 215814 - DNA, 20 bp, Artificial Sequence
  Description of Artificial Sequence: Synthetic oligonucleotide
  Target: LAMA2; (-) strand; PAM type: YTN; PAM sequence: CTG
gccaacatggtgaaaccctg

SEQ ID NO: 215815 - DNA, 20 bp, Artificial Sequence
  Description of Artificial Sequence: Synthetic oligonucleotide
  Target: LAMA2; (-) strand; PAM type: YTN; PAM sequence: TTC
aagaccagtctggccaacat

SEQ ID NO: 215816 - DNA, 20 bp, Artificial Sequence
  Description of Artificial Sequence: Synthetic oligonucleotide
  Target: LAMA2; (-) strand; PAM type: YTN; PAM sequence: TTG
aggtcaggagttcaagacca

SEQ ID NO: 215817 - DNA, 20 bp, Artificial Sequence
  Description of Artificial Sequence: Synthetic oligonucleotide
  Target: LAMA2; (-) strand; PAM type: YTN; PAM sequence: CTT
gaggtcaggagttcaagacc

SEQ ID NO: 215818 - DNA, 20 bp, Artificial Sequence
  Description of Artificial Sequence: Synthetic oligonucleotide
  Target: LAMA2; (-) strand; PAM type: YTN; PAM sequence: CTG
aggtgggcggatcacttgag

SEQ ID NO: 215819 - DNA, 20 bp, Artificial Sequence
  Description of Artificial Sequence: Synthetic oligonucleotide
  Target: LAMA2; (-) strand; PAM type: YTN; PAM sequence: TTG
ggaggctgaggtgggcggat

SEQ ID NO: 215820 - DNA, 20 bp, Artificial Sequence
  Description of Artificial Sequence: Synthetic oligonucleotide
  Target: LAMA2; (-) strand; PAM type: YTN; PAM sequence: TTT
gggaggctgaggtgggcgga

SEQ ID NO: 215821 - DNA, 20 bp, Artificial Sequence
  Description of Artificial Sequence: Synthetic oligonucleotide
  Target: LAMA2; (-) strand; PAM type: YTN; PAM sequence: CTT
tgggaggctgaggtgggcgg

SEQ ID NO: 215822 - DNA, 20 bp, Artificial Sequence
  Description of Artificial Sequence: Synthetic oligonucleotide
  Target: LAMA2; (-) strand; PAM type: YTN; PAM sequence: CTG
taatcccagcactttgggag

SEQ ID NO: 215823 - DNA, 20 bp, Artificial Sequence
  Description of Artificial Sequence: Synthetic oligonucleotide
  Target: LAMA2; (-) strand; PAM type: YTN; PAM sequence: CTC
acgcctgtaatcccagcact

SEQ ID NO: 215824 - DNA, 20 bp, Artificial Sequence
  Description of Artificial Sequence: Synthetic oligonucleotide
  Target: LAMA2; (-) strand; PAM type: YTN; PAM sequence: CTC
gccgggtgtggtgactcacg

SEQ ID NO: 215825 - DNA, 20 bp, Artificial Sequence
  Description of Artificial Sequence: Synthetic oligonucleotide
  Target: LAMA2; (-) strand; PAM type: YTN; PAM sequence: TTC
ctcgccgggtgtggtgactc

SEQ ID NO: 215826 - DNA, 20 bp, Artificial Sequence
  Description of Artificial Sequence: Synthetic oligonucleotide
  Target: LAMA2; (-) strand; PAM type: YTN; PAM sequence: CTG
atagaaagtcattcctcgcc

SEQ ID NO: 215827 - DNA, 20 bp, Artificial Sequence
  Description of Artificial Sequence: Synthetic oligonucleotide
  Target: LAMA2; (-) strand; PAM type: YTN; PAM sequence: TTC
tgatagaaagtcattcctcg

SEQ ID NO: 215828 - DNA, 20 bp, Artificial Sequence
  Description of Artificial Sequence: Synthetic oligonucleotide
  Target: LAMA2; (-) strand; PAM type: YTN; PAM sequence: CTT
ctgatagaaagtcattcctc

SEQ ID NO: 215829 - DNA, 20 bp, Artificial Sequence
  Description of Artificial Sequence: Synthetic oligonucleotide
  Target: LAMA2; (-) strand; PAM type: YTN; PAM sequence: TTC
aacttctgatagaaagtcat

SEQ ID NO: 215830 - DNA, 20 bp, Artificial Sequence
  Description of Artificial Sequence: Synthetic oligonucleotide
  Target: LAMA2; (-) strand; PAM type: YTN; PAM sequence: CTA
tatcaattcaacttctgata

SEQ ID NO: 215831 - DNA, 20 bp, Artificial Sequence
  Description of Artificial Sequence: Synthetic oligonucleotide
  Target: LAMA2; (-) strand; PAM type: YTN; PAM sequence: CTA
tatatgtgccaagtaggtct

SEQ ID NO: 215832 - DNA, 20 bp, Artificial Sequence
  Description of Artificial Sequence: Synthetic oligonucleotide
  Target: LAMA2; (-) strand; PAM type: YTN; PAM sequence: CTC
tatatatgtgccaagtaggt

SEQ ID NO: 215833 - DNA, 20 bp, Artificial Sequence
  Description of Artificial Sequence: Synthetic oligonucleotide
  Target: LAMA2; (-) strand; PAM type: YTN; PAM sequence: TTC
agctctatatatgtgccaag

SEQ ID NO: 215834 - DNA, 20 bp, Artificial Sequence
  Description of Artificial Sequence: Synthetic oligonucleotide
  Target: LAMA2; (-) strand; PAM type: YTN; PAM sequence: TTT
cagctctatatatgtgccaa

SEQ ID NO: 215835 - DNA, 20 bp, Artificial Sequence
  Description of Artificial Sequence: Synthetic oligonucleotide
  Target: LAMA2; (-) strand; PAM type: YTN; PAM sequence: TTG
tttcagctctatatatgtgc

SEQ ID NO: 215836 - DNA, 20 bp, Artificial Sequence
  Description of Artificial Sequence: Synthetic oligonucleotide
  Target: LAMA2; (-) strand; PAM type: YTN; PAM sequence: CTA
ggttgtttcagctctatata

SEQ ID NO: 215837 - DNA, 20 bp, Artificial Sequence
  Description of Artificial Sequence: Synthetic oligonucleotide
  Target: LAMA2; (-) strand; PAM type: YTN; PAM sequence: TTA
tggagaaaatatgccgacca

SEQ ID NO: 215838 - DNA, 20 bp, Artificial Sequence
  Description of Artificial Sequence: Synthetic oligonucleotide
  Target: LAMA2; (-) strand; PAM type: YTN; PAM sequence: TTT
atggagaaaatatgccgacc

SEQ ID NO: 215839 - DNA, 20 bp, Artificial Sequence
  Description of Artificial Sequence: Synthetic oligonucleotide
  Target: LAMA2; (-) strand; PAM type: YTN; PAM sequence: CTA
tttatggagaaaatatgccg

SEQ ID NO: 215840 - DNA, 20 bp, Artificial Sequence
  Description of Artificial Sequence: Synthetic oligonucleotide
  Target: LAMA2; (-) strand; PAM type: YTN; PAM sequence: CTC
tatttatggagaaaatatgc

SEQ ID NO: 215841 - DNA, 20 bp, Artificial Sequence
  Description of Artificial Sequence: Synthetic oligonucleotide
  Target: LAMA2; (-) strand; PAM type: YTN; PAM sequence: TTG
actctatttatggagaaaat

SEQ ID NO: 215842 - DNA, 20 bp, Artificial Sequence
  Description of Artificial Sequence: Synthetic oligonucleotide
  Target: LAMA2; (-) strand; PAM type: YTN; PAM sequence: TTT
gactctatttatggagaaaa

SEQ ID NO: 215843 - DNA, 20 bp, Artificial Sequence
  Description of Artificial Sequence: Synthetic oligonucleotide
  Target: LAMA2; (-) strand; PAM type: YTN; PAM sequence: TTA
cagataatttgactctattt

SEQ ID NO: 215844 - DNA, 20 bp, Artificial Sequence
  Description of Artificial Sequence: Synthetic oligonucleotide
  Target: LAMA2; (-) strand; PAM type: YTN; PAM sequence: TTG
aaattacagataatttgact

SEQ ID NO: 215845 - DNA, 20 bp, Artificial Sequence
  Description of Artificial Sequence: Synthetic oligonucleotide
  Target: LAMA2; (-) strand; PAM type: YTN; PAM sequence: TTT
gaaattacagataatttgac

SEQ ID NO: 215846 - DNA, 20 bp, Artificial Sequence
  Description of Artificial Sequence: Synthetic oligonucleotide
  Target: LAMA2; (-) strand; PAM type: YTN; PAM sequence: TTG
gagaaagtacatttgaaatt

SEQ ID NO: 215847 - DNA, 20 bp, Artificial Sequence
  Description of Artificial Sequence: Synthetic oligonucleotide
  Target: LAMA2; (-) strand; PAM type: YTN; PAM sequence: CTT
ggagaaagtacatttgaaat

SEQ ID NO: 215848 - DNA, 20 bp, Artificial Sequence
  Description of Artificial Sequence: Synthetic oligonucleotide
  Target: LAMA2; (-) strand; PAM type: YTN; PAM sequence: TTC
ttggagaaagtacatttgaa

SEQ ID NO: 215849 - DNA, 20 bp, Artificial Sequence
  Description of Artificial Sequence: Synthetic oligonucleotide
  Target: LAMA2; (-) strand; PAM type: YTN; PAM sequence: CTG
ttcttggagaaagtacattt

SEQ ID NO: 215850 - DNA, 20 bp, Artificial Sequence
  Description of Artificial Sequence: Synthetic oligonucleotide
  Target: LAMA2; (-) strand; PAM type: YTN; PAM sequence: CTG
aaaaatctgttcttggagaa

SEQ ID NO: 215851 - DNA, 20 bp, Artificial Sequence
  Description of Artificial Sequence: Synthetic oligonucleotide
  Target: LAMA2; (-) strand; PAM type: YTN; PAM sequence: TTA
actgaaaaatctgttcttgg

SEQ ID NO: 215852 - DNA, 20 bp, Artificial Sequence
  Description of Artificial Sequence: Synthetic oligonucleotide
  Target: LAMA2; (-) strand; PAM type: YTN; PAM sequence: TTT
aactgaaaaatctgttcttg

SEQ ID NO: 215853 - DNA, 20 bp, Artificial Sequence
  Description of Artificial Sequence: Synthetic oligonucleotide
  Target: LAMA2; (-) strand; PAM type: YTN; PAM sequence: CTT
taactgaaaaatctgttctt

SEQ ID NO: 215854 - DNA, 20 bp, Artificial Sequence
  Description of Artificial Sequence: Synthetic oligonucleotide
  Target: LAMA2; (-) strand; PAM type: YTN; PAM sequence: CTC
tttaactgaaaaatctgttc

SEQ ID NO: 215855 - DNA, 20 bp, Artificial Sequence
  Description of Artificial Sequence: Synthetic oligonucleotide
  Target: LAMA2; (-) strand; PAM type: YTN; PAM sequence: CTC
atcaaaagccactctttaac

SEQ ID NO: 215856 - DNA, 20 bp, Artificial Sequence
  Description of Artificial Sequence: Synthetic oligonucleotide
  Target: LAMA2; (-) strand; PAM type: YTN; PAM sequence: TTC
aataacagtatagcaaagtc

SEQ ID NO: 215857 - DNA, 20 bp, Artificial Sequence
  Description of Artificial Sequence: Synthetic oligonucleotide
  Target: LAMA2; (-) strand; PAM type: YTN; PAM sequence: TTT
caataacagtatagcaaagt

SEQ ID NO: 215858 - DNA, 20 bp, Artificial Sequence
  Description of Artificial Sequence: Synthetic oligonucleotide
  Target: LAMA2; (-) strand; PAM type: YTN; PAM sequence: TTT
tcaataacagtatagcaaag

SEQ ID NO: 215859 - DNA, 20 bp, Artificial Sequence
  Description of Artificial Sequence: Synthetic oligonucleotide
  Target: LAMA2; (-) strand; PAM type: YTN; PAM sequence: TTT
ttcaataacagtatagcaaa

SEQ ID NO: 215860 - DNA, 20 bp, Artificial Sequence
  Description of Artificial Sequence: Synthetic oligonucleotide
  Target: LAMA2; (-) strand; PAM type: YTN; PAM sequence: CTT
tttcaataacagtatagcaa

SEQ ID NO: 215861 - DNA, 20 bp, Artificial Sequence
  Description of Artificial Sequence: Synthetic oligonucleotide
  Target: LAMA2; (-) strand; PAM type: YTN; PAM sequence: TTA
tagaccctttttcaataaca

SEQ ID NO: 215862 - DNA, 20 bp, Artificial Sequence
  Description of Artificial Sequence: Synthetic oligonucleotide
  Target: LAMA2; (-) strand; PAM type: YTN; PAM sequence: TTG
catattatagaccctttttc

SEQ ID NO: 215863 - DNA, 20 bp, Artificial Sequence
  Description of Artificial Sequence: Synthetic oligonucleotide
  Target: LAMA2; (-) strand; PAM type: YTN; PAM sequence: TTT
gcatattatagacccttttt

SEQ ID NO: 215864 - DNA, 20 bp, Artificial Sequence
  Description of Artificial Sequence: Synthetic oligonucleotide
  Target: LAMA2; (-) strand; PAM type: YTN; PAM sequence: CTA
gcatttgcatattatagacc

SEQ ID NO: 215865 - DNA, 20 bp, Artificial Sequence
  Description of Artificial Sequence: Synthetic oligonucleotide
  Target: LAMA2; (-) strand; PAM type: YTN; PAM sequence: TTC
atacatgtctagcatttgca

SEQ ID NO: 215866 - DNA, 20 bp, Artificial Sequence
  Description of Artificial Sequence: Synthetic oligonucleotide
  Target: LAMA2; (-) strand; PAM type: YTN; PAM sequence: CTT
catacatgtctagcatttgc

SEQ ID NO: 215867 - DNA, 20 bp, Artificial Sequence
  Description of Artificial Sequence: Synthetic oligonucleotide
  Target: LAMA2; (-) strand; PAM type: YTN; PAM sequence: TTG
tgcttcatacatgtctagca

SEQ ID NO: 215868 - DNA, 20 bp, Artificial Sequence
  Description of Artificial Sequence: Synthetic oligonucleotide
  Target: LAMA2; (-) strand; PAM type: YTN; PAM sequence: TTA
atgtcaattgtgcttcatac

SEQ ID NO: 215869 - DNA, 20 bp, Artificial Sequence
  Description of Artificial Sequence: Synthetic oligonucleotide
  Target: LAMA2; (-) strand; PAM type: YTN; PAM sequence: CTG
taagttaatgtcaattgtgc

SEQ ID NO: 215870 - DNA, 20 bp, Artificial Sequence
  Description of Artificial Sequence: Synthetic oligonucleotide
  Target: LAMA2; (-) strand; PAM type: YTN; PAM sequence: TTC
ctgtaagttaatgtcaattg

SEQ ID NO: 215871 - DNA, 20 bp, Artificial Sequence
  Description of Artificial Sequence: Synthetic oligonucleotide
  Target: LAMA2; (-) strand; PAM type: YTN; PAM sequence: CTT
cctgtaagttaatgtcaatt

SEQ ID NO: 215872 - DNA, 20 bp, Artificial Sequence
  Description of Artificial Sequence: Synthetic oligonucleotide
  Target: LAMA2; (-) strand; PAM type: YTN; PAM sequence: TTC
ttcctgtaagttaatgtcaa

SEQ ID NO: 215873 - DNA, 20 bp, Artificial Sequence
  Description of Artificial Sequence: Synthetic oligonucleotide
  Target: LAMA2; (-) strand; PAM type: YTN; PAM sequence: TTT
cttcctgtaagttaatgtca

SEQ ID NO: 215874 - DNA, 20 bp, Artificial Sequence
  Description of Artificial Sequence: Synthetic oligonucleotide
  Target: LAMA2; (-) strand; PAM type: YTN; PAM sequence: TTT
tcttcctgtaagttaatgtc

SEQ ID NO: 215875 - DNA, 20 bp, Artificial Sequence
  Description of Artificial Sequence: Synthetic oligonucleotide
  Target: LAMA2; (-) strand; PAM type: YTN; PAM sequence: CTT
ttcttcctgtaagttaatgt

SEQ ID NO: 215876 - DNA, 20 bp, Artificial Sequence
  Description of Artificial Sequence: Synthetic oligonucleotide
  Target: LAMA2; (-) strand; PAM type: YTN; PAM sequence: CTC
ttttcttcctgtaagttaat

SEQ ID NO: 215877 - DNA, 20 bp, Artificial Sequence
  Description of Artificial Sequence: Synthetic oligonucleotide
  Target: LAMA2; (-) strand; PAM type: YTN; PAM sequence: TTC
agtctcttttcttcctgtaa

SEQ ID NO: 215878 - DNA, 20 bp, Artificial Sequence
  Description of Artificial Sequence: Synthetic oligonucleotide
  Target: LAMA2; (-) strand; PAM type: YTN; PAM sequence: CTG
agaaccaaattcagtctctt

SEQ ID NO: 215879 - DNA, 20 bp, Artificial Sequence
  Description of Artificial Sequence: Synthetic oligonucleotide
  Target: LAMA2; (-) strand; PAM type: YTN; PAM sequence: CTC
tgagaaccaaattcagtctc

SEQ ID NO: 215880 - DNA, 20 bp, Artificial Sequence
  Description of Artificial Sequence: Synthetic oligonucleotide
  Target: LAMA2; (-) strand; PAM type: YTN; PAM sequence: TTC
cctctgagaaccaaattcag

SEQ ID NO: 215881 - DNA, 20 bp, Artificial Sequence
  Description of Artificial Sequence: Synthetic oligonucleotide
  Target: LAMA2; (-) strand; PAM type: YTN; PAM sequence: TTA
ttccctctgagaaccaaatt

SEQ ID NO: 215882 - DNA, 20 bp, Artificial Sequence
  Description of Artificial Sequence: Synthetic oligonucleotide
  Target: LAMA2; (-) strand; PAM type: YTN; PAM sequence: TTT
attccctctgagaaccaaat

SEQ ID NO: 215883 - DNA, 20 bp, Artificial Sequence
  Description of Artificial Sequence: Synthetic oligonucleotide
  Target: LAMA2; (-) strand; PAM type: YTN; PAM sequence: TTT
tattccctctgagaaccaaa

SEQ ID NO: 215884 - DNA, 20 bp, Artificial Sequence
  Description of Artificial Sequence: Synthetic oligonucleotide
  Target: LAMA2; (-) strand; PAM type: YTN; PAM sequence: TTT
ttattccctctgagaaccaa

SEQ ID NO: 215885 - DNA, 20 bp, Artificial Sequence
  Description of Artificial Sequence: Synthetic oligonucleotide
  Target: LAMA2; (-) strand; PAM type: YTN; PAM sequence: TTT
tttattccctctgagaacca

SEQ ID NO: 215886 - DNA, 20 bp, Artificial Sequence
  Description of Artificial Sequence: Synthetic oligonucleotide
  Target: LAMA2; (-) strand; PAM type: YTN; PAM sequence: TTT
ttttattccctctgagaacc

SEQ ID NO: 215887 - DNA, 20 bp, Artificial Sequence
  Description of Artificial Sequence: Synthetic oligonucleotide
  Target: LAMA2; (-) strand; PAM type: YTN; PAM sequence: CTG
gggagatttttttattccct

SEQ ID NO: 215888 - DNA, 20 bp, Artificial Sequence
  Description of Artificial Sequence: Synthetic oligonucleotide
  Target: LAMA2; (-) strand; PAM type: YTN; PAM sequence: CTA
agtgtagggctggggagatt

SEQ ID NO: 215889 - DNA, 20 bp, Artificial Sequence
  Description of Artificial Sequence: Synthetic oligonucleotide
  Target: LAMA2; (-) strand; PAM type: YTN; PAM sequence: CTC
agaggtccatctaagtgtag

SEQ ID NO: 215890 - DNA, 20 bp, Artificial Sequence
  Description of Artificial Sequence: Synthetic oligonucleotide
  Target: LAMA2; (-) strand; PAM type: YTN; PAM sequence: TTC
atagatacgatctcagaggt

SEQ ID NO: 215891 - DNA, 20 bp, Artificial Sequence
  Description of Artificial Sequence: Synthetic oligonucleotide
  Target: LAMA2; (-) strand; PAM type: YTN; PAM sequence: TTT
catagatacgatctcagagg

SEQ ID NO: 215892 - DNA, 20 bp, Artificial Sequence
  Description of Artificial Sequence: Synthetic oligonucleotide
  Target: LAMA2; (-) strand; PAM type: YTN; PAM sequence: CTT
tcatagatacgatctcagag

SEQ ID NO: 215893 - DNA, 20 bp, Artificial Sequence
  Description of Artificial Sequence: Synthetic oligonucleotide
  Target: LAMA2; (-) strand; PAM type: YTN; PAM sequence: TTA
actttcatagatacgatctc

SEQ ID NO: 215894 - DNA, 20 bp, Artificial Sequence
  Description of Artificial Sequence: Synthetic oligonucleotide
  Target: LAMA2; (-) strand; PAM type: YTN; PAM sequence: TTT
aactttcatagatacgatct

SEQ ID NO: 215895 - DNA, 20 bp, Artificial Sequence
  Description of Artificial Sequence: Synthetic oligonucleotide
  Target: LAMA2; (-) strand; PAM type: YTN; PAM sequence: TTT
taactttcatagatacgatc

SEQ ID NO: 215896 - DNA, 20 bp, Artificial Sequence
  Description of Artificial Sequence: Synthetic oligonucleotide
  Target: LAMA2; (-) strand; PAM type: YTN; PAM sequence: TTT
ttaactttcatagatacgat

SEQ ID NO: 215897 - DNA, 20 bp, Artificial Sequence
  Description of Artificial Sequence: Synthetic oligonucleotide
  Target: LAMA2; (-) strand; PAM type: YTN; PAM sequence: TTA
gatataatagaagtttttaa

SEQ ID NO: 215898 - DNA, 20 bp, Artificial Sequence
  Description of Artificial Sequence: Synthetic oligonucleotide
  Target: LAMA2; (-) strand; PAM type: YTN; PAM sequence: CTT
agatataatagaagttttta

SEQ ID NO: 215899 - DNA, 20 bp, Artificial Sequence
  Description of Artificial Sequence: Synthetic oligonucleotide
  Target: LAMA2; (-) strand; PAM type: YTN; PAM sequence: TTA
tgtcttagatataatagaag

SEQ ID NO: 215900 - DNA, 20 bp, Artificial Sequence
  Description of Artificial Sequence: Synthetic oligonucleotide
  Target: LAMA2; (-) strand; PAM type: YTN; PAM sequence: TTA
tagtggtccatgatcataca

SEQ ID NO: 215901 - DNA, 20 bp, Artificial Sequence
  Description of Artificial Sequence: Synthetic oligonucleotide
  Target: LAMA2; (-) strand; PAM type: YTN; PAM sequence: TTG
ccagaaacaagccattatag

SEQ ID NO: 215902 - DNA, 20 bp, Artificial Sequence
  Description of Artificial Sequence: Synthetic oligonucleotide
  Target: LAMA2; (-) strand; PAM type: YTN; PAM sequence: TTC
catgccatccagcaatataa

SEQ ID NO: 215903 - DNA, 20 bp, Artificial Sequence
  Description of Artificial Sequence: Synthetic oligonucleotide
  Target: LAMA2; (-) strand; PAM type: YTN; PAM sequence: TTT
ccatgccatccagcaatata

SEQ ID NO: 215904 - DNA, 20 bp, Artificial Sequence
  Description of Artificial Sequence: Synthetic oligonucleotide
  Target: LAMA2; (-) strand; PAM type: YTN; PAM sequence: CTT
tccatgccatccagcaatat

SEQ ID NO: 215905 - DNA, 20 bp, Artificial Sequence
  Description of Artificial Sequence: Synthetic oligonucleotide
  Target: LAMA2; (-) strand; PAM type: YTN; PAM sequence: CTG
ctttccatgccatccagcaa

SEQ ID NO: 215906 - DNA, 20 bp, Artificial Sequence
  Description of Artificial Sequence: Synthetic oligonucleotide
  Target: LAMA2; (-) strand; PAM type: YTN; PAM sequence: TTA
ctgctttccatgccatccag

SEQ ID NO: 215907 - DNA, 20 bp, Artificial Sequence
  Description of Artificial Sequence: Synthetic oligonucleotide
  Target: LAMA2; (-) strand; PAM type: YTN; PAM sequence: TTT
actgctttccatgccatcca

SEQ ID NO: 215908 - DNA, 20 bp, Artificial Sequence
  Description of Artificial Sequence: Synthetic oligonucleotide
  Target: LAMA2; (-) strand; PAM type: YTN; PAM sequence: TTT
tactgctttccatgccatcc

SEQ ID NO: 215909 - DNA, 20 bp, Artificial Sequence
  Description of Artificial Sequence: Synthetic oligonucleotide
  Target: LAMA2; (-) strand; PAM type: YTN; PAM sequence: TTT
ttactgctttccatgccatc

SEQ ID NO: 215910 - DNA, 20 bp, Artificial Sequence
  Description of Artificial Sequence: Synthetic oligonucleotide
  Target: LAMA2; (-) strand; PAM type: YTN; PAM sequence: TTG
gaataccaatttttactgct

SEQ ID NO: 215911 - DNA, 20 bp, Artificial Sequence
  Description of Artificial Sequence: Synthetic oligonucleotide
  Target: LAMA2; (-) strand; PAM type: YTN; PAM sequence: TTT
ggaataccaatttttactgc

SEQ ID NO: 215912 - DNA, 20 bp, Artificial Sequence
  Description of Artificial Sequence: Synthetic oligonucleotide
  Target: LAMA2; (-) strand; PAM type: YTN; PAM sequence: CTT
tggaataccaatttttactg

SEQ ID NO: 215913 - DNA, 20 bp, Artificial Sequence
  Description of Artificial Sequence: Synthetic oligonucleotide
  Target: LAMA2; (-) strand; PAM type: YTN; PAM sequence: TTA
ctttggaataccaattttta

SEQ ID NO: 215914 - DNA, 20 bp, Artificial Sequence
  Description of Artificial Sequence: Synthetic oligonucleotide
  Target: LAMA2; (-) strand; PAM type: YTN; PAM sequence: TTT
actttggaataccaattttt

SEQ ID NO: 215915 - DNA, 20 bp, Artificial Sequence
  Description of Artificial Sequence: Synthetic oligonucleotide
  Target: LAMA2; (-) strand; PAM type: YTN; PAM sequence: CTA
gagaagatagataatgttta

SEQ ID NO: 215916 - DNA, 20 bp, Artificial Sequence
  Description of Artificial Sequence: Synthetic oligonucleotide
  Target: LAMA2; (-) strand; PAM type: YTN; PAM sequence: TTA
tcccagactagagaagatag

SEQ ID NO: 215917 - DNA, 20 bp, Artificial Sequence
  Description of Artificial Sequence: Synthetic oligonucleotide
  Target: LAMA2; (-) strand; PAM type: YTN; PAM sequence: TTT
atcccagactagagaagata

SEQ ID NO: 215918 - DNA, 20 bp, Artificial Sequence
  Description of Artificial Sequence: Synthetic oligonucleotide
  Target: LAMA2; (-) strand; PAM type: YTN; PAM sequence: CTT
tatcccagactagagaagat

SEQ ID NO: 215919 - DNA, 20 bp, Artificial Sequence
  Description of Artificial Sequence: Synthetic oligonucleotide
  Target: LAMA2; (-) strand; PAM type: YTN; PAM sequence: TTC
tttatcccagactagagaag

SEQ ID NO: 215920 - DNA, 20 bp, Artificial Sequence
  Description of Artificial Sequence: Synthetic oligonucleotide
  Target: LAMA2; (-) strand; PAM type: YTN; PAM sequence: CTT
ctttatcccagactagagaa

SEQ ID NO: 215921 - DNA, 20 bp, Artificial Sequence
  Description of Artificial Sequence: Synthetic oligonucleotide
  Target: LAMA2; (-) strand; PAM type: YTN; PAM sequence: TTA
aaacttctttatcccagact

SEQ ID NO: 215922 - DNA, 20 bp, Artificial Sequence
  Description of Artificial Sequence: Synthetic oligonucleotide
  Target: LAMA2; (-) strand; PAM type: YTN; PAM sequence: TTA
ttaaaacttctttatcccag

SEQ ID NO: 215923 - DNA, 20 bp, Artificial Sequence
  Description of Artificial Sequence: Synthetic oligonucleotide
  Target: LAMA2; (-) strand; PAM type: YTN; PAM sequence: TTC
agtgtaaataattattaaaa

SEQ ID NO: 215924 - DNA, 20 bp, Artificial Sequence
  Description of Artificial Sequence: Synthetic oligonucleotide
  Target: LAMA2; (-) strand; PAM type: YTN; PAM sequence: CTT
cagtgtaaataattattaaa

SEQ ID NO: 215925 - DNA, 20 bp, Artificial Sequence
  Description of Artificial Sequence: Synthetic oligonucleotide
  Target: LAMA2; (-) strand; PAM type: YTN; PAM sequence: TTA
tccttcagtgtaaataatta

SEQ ID NO: 215926 - DNA, 20 bp, Artificial Sequence
  Description of Artificial Sequence: Synthetic oligonucleotide
  Target: LAMA2; (-) strand; PAM type: YTN; PAM sequence: CTA
attatccttcagtgtaaata

SEQ ID NO: 215927 - DNA, 20 bp, Artificial Sequence
  Description of Artificial Sequence: Synthetic oligonucleotide
  Target: LAMA2; (-) strand; PAM type: YTN; PAM sequence: CTC
taattatccttcagtgtaaa

SEQ ID NO: 215928 - DNA, 20 bp, Artificial Sequence
  Description of Artificial Sequence: Synthetic oligonucleotide
  Target: LAMA2; (-) strand; PAM type: YTN; PAM sequence: TTC
atgctctaattatccttcag

SEQ ID NO: 215929 - DNA, 20 bp, Artificial Sequence
  Description of Artificial Sequence: Synthetic oligonucleotide
  Target: LAMA2; (-) strand; PAM type: YTN; PAM sequence: TTT
catgctctaattatccttca

SEQ ID NO: 215930 - DNA, 20 bp, Artificial Sequence
  Description of Artificial Sequence: Synthetic oligonucleotide
  Target: LAMA2; (-) strand; PAM type: YTN; PAM sequence: TTC
atggtcatttcatgctctaa

SEQ ID NO: 215931 - DNA, 20 bp, Artificial Sequence
  Description of Artificial Sequence: Synthetic oligonucleotide
  Target: LAMA2; (-) strand; PAM type: YTN; PAM sequence: TTT
catggtcatttcatgctcta

SEQ ID NO: 215932 - DNA, 20 bp, Artificial Sequence
  Description of Artificial Sequence: Synthetic oligonucleotide
  Target: LAMA2; (-) strand; PAM type: YTN; PAM sequence: TTT
tcatggtcatttcatgctct

SEQ ID NO: 215933 - DNA, 20 bp, Artificial Sequence
  Description of Artificial Sequence: Synthetic oligonucleotide
  Target: LAMA2; (-) strand; PAM type: YTN; PAM sequence: TTT
ttcatggtcatttcatgctc

SEQ ID NO: 215934 - DNA, 20 bp, Artificial Sequence
  Description of Artificial Sequence: Synthetic oligonucleotide
  Target: LAMA2; (-) strand; PAM type: YTN; PAM sequence: TTT
tttcatggtcatttcatgct

SEQ ID NO: 215935 - DNA, 20 bp, Artificial Sequence
  Description of Artificial Sequence: Synthetic oligonucleotide
  Target: LAMA2; (-) strand; PAM type: YTN; PAM sequence: CTA
tgcaaatatattttttcatg

SEQ ID NO: 215936 - DNA, 20 bp, Artificial Sequence
  Description of Artificial Sequence: Synthetic oligonucleotide
  Target: LAMA2; (-) strand; PAM type: YTN; PAM sequence: CTG
cacaactatgcaaatatatt

SEQ ID NO: 215937 - DNA, 20 bp, Artificial Sequence
  Description of Artificial Sequence: Synthetic oligonucleotide
  Target: LAMA2; (-) strand; PAM type: YTN; PAM sequence: TTC
tgcacaactatgcaaatata

SEQ ID NO: 215938 - DNA, 20 bp, Artificial Sequence
  Description of Artificial Sequence: Synthetic oligonucleotide
  Target: LAMA2; (-) strand; PAM type: YTN; PAM sequence: TTT
ctgcacaactatgcaaatat

SEQ ID NO: 215939 - DNA, 20 bp, Artificial Sequence
  Description of Artificial Sequence: Synthetic oligonucleotide
  Target: LAMA2; (-) strand; PAM type: YTN; PAM sequence: TTA
atgtttctgcacaactatgc

SEQ ID NO: 215940 - DNA, 20 bp, Artificial Sequence
  Description of Artificial Sequence: Synthetic oligonucleotide
  Target: LAMA2; (-) strand; PAM type: YTN; PAM sequence: TTG
catgttaatgtttctgcaca

SEQ ID NO: 215941 - DNA, 20 bp, Artificial Sequence
  Description of Artificial Sequence: Synthetic oligonucleotide
  Target: LAMA2; (-) strand; PAM type: YTN; PAM sequence: CTA
gtatcaagacataattgcat

SEQ ID NO: 215942 - DNA, 20 bp, Artificial Sequence
  Description of Artificial Sequence: Synthetic oligonucleotide
  Target: LAMA2; (-) strand; PAM type: YTN; PAM sequence: TTA
tatctagtatcaagacataa

SEQ ID NO: 215943 - DNA, 20 bp, Artificial Sequence
  Description of Artificial Sequence: Synthetic oligonucleotide
  Target: LAMA2; (-) strand; PAM type: YTN; PAM sequence: TTT
atatctagtatcaagacata

SEQ ID NO: 215944 - DNA, 20 bp, Artificial Sequence
  Description of Artificial Sequence: Synthetic oligonucleotide
  Target: LAMA2; (-) strand; PAM type: YTN; PAM sequence: TTT
tatatctagtatcaagacat

SEQ ID NO: 215945 - DNA, 20 bp, Artificial Sequence
  Description of Artificial Sequence: Synthetic oligonucleotide
  Target: LAMA2; (-) strand; PAM type: YTN; PAM sequence: TTC
agatattttatatctagtat

SEQ ID NO: 215946 - DNA, 20 bp, Artificial Sequence
  Description of Artificial Sequence: Synthetic oligonucleotide
  Target: LAMA2; (-) strand; PAM type: YTN; PAM sequence: TTT
cagatattttatatctagta

SEQ ID NO: 215947 - DNA, 20 bp, Artificial Sequence
  Description of Artificial Sequence: Synthetic oligonucleotide
  Target: LAMA2; (-) strand; PAM type: YTN; PAM sequence: TTC
catttcagatattttatatc

SEQ ID NO: 215948 - DNA, 20 bp, Artificial Sequence
  Description of Artificial Sequence: Synthetic oligonucleotide
  Target: LAMA2; (-) strand; PAM type: YTN; PAM sequence: CTT
ccatttcagatattttatat

SEQ ID NO: 215949 - DNA, 20 bp, Artificial Sequence
  Description of Artificial Sequence: Synthetic oligonucleotide
  Target: LAMA2; (-) strand; PAM type: YTN; PAM sequence: TTC
catcttccatttcagatatt

SEQ ID NO: 215950 - DNA, 20 bp, Artificial Sequence
  Description of Artificial Sequence: Synthetic oligonucleotide
  Target: LAMA2; (-) strand; PAM type: YTN; PAM sequence: CTT
ccatcttccatttcagatat

SEQ ID NO: 215951 - DNA, 20 bp, Artificial Sequence
  Description of Artificial Sequence: Synthetic oligonucleotide
  Target: LAMA2; (-) strand; PAM type: YTN; PAM sequence: CTA
aatcttccatcttccatttc

SEQ ID NO: 215952 - DNA, 20 bp, Artificial Sequence
  Description of Artificial Sequence: Synthetic oligonucleotide
  Target: LAMA2; (-) strand; PAM type: YTN; PAM sequence: TTG
gtaaaagatcccactaaatc

SEQ ID NO: 215953 - DNA, 20 bp, Artificial Sequence
  Description of Artificial Sequence: Synthetic oligonucleotide
  Target: LAMA2; (-) strand; PAM type: YTN; PAM sequence: TTA
ttggtaaaagatcccactaa

SEQ ID NO: 215954 - DNA, 20 bp, Artificial Sequence
  Description of Artificial Sequence: Synthetic oligonucleotide
  Target: LAMA2; (-) strand; PAM type: YTN; PAM sequence: TTG
aagttattggtaaaagatcc

SEQ ID NO: 215955 - DNA, 20 bp, Artificial Sequence
  Description of Artificial Sequence: Synthetic oligonucleotide
  Target: LAMA2; (-) strand; PAM type: YTN; PAM sequence: CTG
ttgaagttattggtaaaaga

SEQ ID NO: 215956 - DNA, 20 bp, Artificial Sequence
  Description of Artificial Sequence: Synthetic oligonucleotide
  Target: LAMA2; (-) strand; PAM type: YTN; PAM sequence: TTC
tgttgaagttattggtaaaa

SEQ ID NO: 215957 - DNA, 20 bp, Artificial Sequence
  Description of Artificial Sequence: Synthetic oligonucleotide
  Target: LAMA2; (-) strand; PAM type: YTN; PAM sequence: CTT
ctgttgaagttattggtaaa

SEQ ID NO: 215958 - DNA, 20 bp, Artificial Sequence
  Description of Artificial Sequence: Synthetic oligonucleotide
  Target: LAMA2; (-) strand; PAM type: YTN; PAM sequence: CTA
aaacacaaatcttctgttga

SEQ ID NO: 215959 - DNA, 20 bp, Artificial Sequence
  Description of Artificial Sequence: Synthetic oligonucleotide
  Target: LAMA2; (-) strand; PAM type: YTN; PAM sequence: TTC
taaaacacaaatcttctgtt

SEQ ID NO: 215960 - DNA, 20 bp, Artificial Sequence
  Description of Artificial Sequence: Synthetic oligonucleotide
  Target: LAMA2; (-) strand; PAM type: YTN; PAM sequence: CTA
ggacacattctaaaacacaa

SEQ ID NO: 215961 - DNA, 20 bp, Artificial Sequence
  Description of Artificial Sequence: Synthetic oligonucleotide
  Target: LAMA2; (-) strand; PAM type: YTN; PAM sequence: CTC
taggacacattctaaaacac

SEQ ID NO: 215962 - DNA, 20 bp, Artificial Sequence
  Description of Artificial Sequence: Synthetic oligonucleotide
  Target: LAMA2; (-) strand; PAM type: YTN; PAM sequence: CTG
tctctaggacacattctaaa

SEQ ID NO: 215963 - DNA, 20 bp, Artificial Sequence
  Description of Artificial Sequence: Synthetic oligonucleotide
  Target: LAMA2; (-) strand; PAM type: YTN; PAM sequence: CTA
ggaagaaggtcctgtctcta

SEQ ID NO: 215964 - DNA, 20 bp, Artificial Sequence
  Description of Artificial Sequence: Synthetic oligonucleotide
  Target: LAMA2; (-) strand; PAM type: YTN; PAM sequence: TTA
gctaggaagaaggtcctgtc

SEQ ID NO: 215965 - DNA, 20 bp, Artificial Sequence
  Description of Artificial Sequence: Synthetic oligonucleotide
  Target: LAMA2; (-) strand; PAM type: YTN; PAM sequence: TTT
agctaggaagaaggtcctgt

SEQ ID NO: 215966 - DNA, 20 bp, Artificial Sequence
  Description of Artificial Sequence: Synthetic oligonucleotide
  Target: LAMA2; (-) strand; PAM type: YTN; PAM sequence: CTA
atatttagctaggaagaagg

SEQ ID NO: 215967 - DNA, 20 bp, Artificial Sequence
  Description of Artificial Sequence: Synthetic oligonucleotide
  Target: LAMA2; (-) strand; PAM type: YTN; PAM sequence: CTC
taatatttagctaggaagaa

SEQ ID NO: 215968 - DNA, 20 bp, Artificial Sequence
  Description of Artificial Sequence: Synthetic oligonucleotide
  Target: LAMA2; (-) strand; PAM type: YTN; PAM sequence: TTA
tctctaatatttagctagga

SEQ ID NO: 215969 - DNA, 20 bp, Artificial Sequence
  Description of Artificial Sequence: Synthetic oligonucleotide
  Target: LAMA2; (-) strand; PAM type: YTN; PAM sequence: TTT
atctctaatatttagctagg

SEQ ID NO: 215970 - DNA, 20 bp, Artificial Sequence
  Description of Artificial Sequence: Synthetic oligonucleotide
  Target: LAMA2; (-) strand; PAM type: YTN; PAM sequence: TTT
tatctctaatatttagctag

SEQ ID NO: 215971 - DNA, 20 bp, Artificial Sequence
  Description of Artificial Sequence: Synthetic oligonucleotide
  Target: LAMA2; (-) strand; PAM type: YTN; PAM sequence: TTT
ttatctctaatatttagcta

SEQ ID NO: 215972 - DNA, 20 bp, Artificial Sequence
  Description of Artificial Sequence: Synthetic oligonucleotide
  Target: LAMA2; (-) strand; PAM type: YTN; PAM sequence: TTT
tttatctctaatatttagct

SEQ ID NO: 215973 - DNA, 20 bp, Artificial Sequence
  Description of Artificial Sequence: Synthetic oligonucleotide
  Target: LAMA2; (-) strand; PAM type: YTN; PAM sequence: TTA
attttttatctctaatattt

SEQ ID NO: 215974 - DNA, 20 bp, Artificial Sequence
  Description of Artificial Sequence: Synthetic oligonucleotide
  Target: LAMA2; (-) strand; PAM type: YTN; PAM sequence: TTT
aattttttatctctaatatt

SEQ ID NO: 215975 - DNA, 20 bp, Artificial Sequence
  Description of Artificial Sequence: Synthetic oligonucleotide
  Target: LAMA2; (-) strand; PAM type: YTN; PAM sequence: TTT
taattttttatctctaatat

SEQ ID NO: 215976 - DNA, 20 bp, Artificial Sequence
  Description of Artificial Sequence: Synthetic oligonucleotide
  Target: LAMA2; (-) strand; PAM type: YTN; PAM sequence: TTT
ttaattttttatctctaata

SEQ ID NO: 215977 - DNA, 20 bp, Artificial Sequence
  Description of Artificial Sequence: Synthetic oligonucleotide
  Target: LAMA2; (-) strand; PAM type: YTN; PAM sequence: CTT
tttaattttttatctctaat

SEQ ID NO: 215978 - DNA, 20 bp, Artificial Sequence
  Description of Artificial Sequence: Synthetic oligonucleotide
  Target: LAMA2; (-) strand; PAM type: YTN; PAM sequence: CTC
tttttaattttttatctcta

SEQ ID NO: 215979 - DNA, 20 bp, Artificial Sequence
  Description of Artificial Sequence: Synthetic oligonucleotide
  Target: LAMA2; (-) strand; PAM type: YTN; PAM sequence: TTA
agcctctttttaatttttta

SEQ ID NO: 215980 - DNA, 20 bp, Artificial Sequence
  Description of Artificial Sequence: Synthetic oligonucleotide
  Target: LAMA2; (-) strand; PAM type: YTN; PAM sequence: TTT
aagcctctttttaatttttt

SEQ ID NO: 215981 - DNA, 20 bp, Artificial Sequence
  Description of Artificial Sequence: Synthetic oligonucleotide
  Target: LAMA2; (-) strand; PAM type: YTN; PAM sequence: CTT
taagcctctttttaattttt

SEQ ID NO: 215982 - DNA, 20 bp, Artificial Sequence
  Description of Artificial Sequence: Synthetic oligonucleotide
  Target: LAMA2; (-) strand; PAM type: YTN; PAM sequence: TTA
agtatggactttaagcctct

SEQ ID NO: 215983 - DNA, 20 bp, Artificial Sequence
  Description of Artificial Sequence: Synthetic oligonucleotide
  Target: LAMA2; (-) strand; PAM type: YTN; PAM sequence: CTT
aagtatggactttaagcctc

SEQ ID NO: 215984 - DNA, 20 bp, Artificial Sequence
  Description of Artificial Sequence: Synthetic oligonucleotide
  Target: LAMA2; (-) strand; PAM type: YTN; PAM sequence: CTG
ggtcttaagtatggacttta

SEQ ID NO: 215985 - DNA, 20 bp, Artificial Sequence
  Description of Artificial Sequence: Synthetic oligonucleotide
  Target: LAMA2; (-) strand; PAM type: YTN; PAM sequence: TTC
tgggtcttaagtatggactt

SEQ ID NO: 215986 - DNA, 20 bp, Artificial Sequence
  Description of Artificial Sequence: Synthetic oligonucleotide
  Target: LAMA2; (-) strand; PAM type: YTN; PAM sequence: TTT
ctgggtcttaagtatggact

SEQ ID NO: 215987 - DNA, 20 bp, Artificial Sequence
  Description of Artificial Sequence: Synthetic oligonucleotide
  Target: LAMA2; (-) strand; PAM type: YTN; PAM sequence: CTT
tctgggtcttaagtatggac

SEQ ID NO: 215988 - DNA, 20 bp, Artificial Sequence
  Description of Artificial Sequence: Synthetic oligonucleotide
  Target: LAMA2; (-) strand; PAM type: YTN; PAM sequence: TTC
tttctgggtcttaagtatgg

SEQ ID NO: 215989 - DNA, 20 bp, Artificial Sequence
  Description of Artificial Sequence: Synthetic oligonucleotide
  Target: LAMA2; (-) strand; PAM type: YTN; PAM sequence: TTT
ctttctgggtcttaagtatg

SEQ ID NO: 215990 - DNA, 20 bp, Artificial Sequence
  Description of Artificial Sequence: Synthetic oligonucleotide
  Target: LAMA2; (-) strand; PAM type: YTN; PAM sequence: TTT
tctttctgggtcttaagtat

SEQ ID NO: 215991 - DNA, 20 bp, Artificial Sequence
  Description of Artificial Sequence: Synthetic oligonucleotide
  Target: LAMA2; (-) strand; PAM type: YTN; PAM sequence: TTT
ttctttctgggtcttaagta

SEQ ID NO: 215992 - DNA, 20 bp, Artificial Sequence
  Description of Artificial Sequence: Synthetic oligonucleotide
  Target: LAMA2; (-) strand; PAM type: YTN; PAM sequence: CTA
tttttctttctgggtcttaa

SEQ ID NO: 215993 - DNA, 20 bp, Artificial Sequence
  Description of Artificial Sequence: Synthetic oligonucleotide
  Target: LAMA2; (-) strand; PAM type: YTN; PAM sequence: TTA
tcaaaagaatactatttttc

SEQ ID NO: 215994 - DNA, 20 bp, Artificial Sequence
  Description of Artificial Sequence: Synthetic oligonucleotide
  Target: LAMA2; (-) strand; PAM type: YTN; PAM sequence: CTA
tgtgttatcaaaagaatact

SEQ ID NO: 215995 - DNA, 20 bp, Artificial Sequence
  Description of Artificial Sequence: Synthetic oligonucleotide
  Target: LAMA2; (-) strand; PAM type: YTN; PAM sequence: CTA
cataaatactatgtgttatc

SEQ ID NO: 215996 - DNA, 20 bp, Artificial Sequence
  Description of Artificial Sequence: Synthetic oligonucleotide
  Target: LAMA2; (-) strand; PAM type: YTN; PAM sequence: TTC
agtatactacataaatacta

SEQ ID NO: 215997 - DNA, 20 bp, Artificial Sequence
  Description of Artificial Sequence: Synthetic oligonucleotide
  Target: LAMA2; (-) strand; PAM type: YTN; PAM sequence: CTG
acaattcagtatactacata

SEQ ID NO: 215998 - DNA, 20 bp, Artificial Sequence
  Description of Artificial Sequence: Synthetic oligonucleotide
  Target: LAMA2; (-) strand; PAM type: YTN; PAM sequence: TTA
atgataaatacctgacaatt

SEQ ID NO: 215999 - DNA, 20 bp, Artificial Sequence
  Description of Artificial Sequence: Synthetic oligonucleotide
  Target: LAMA2; (-) strand; PAM type: YTN; PAM sequence: TTA
aagtaacccaacatgagata

SEQ ID NO: 216000 - DNA, 20 bp, Artificial Sequence
  Description of Artificial Sequence: Synthetic oligonucleotide
  Target: LAMA2; (-) strand; PAM type: YTN; PAM sequence: TTC
ggagcattaaagtaacccaa

SEQ ID NO: 216001 - DNA, 20 bp, Artificial Sequence
  Description of Artificial Sequence: Synthetic oligonucleotide
  Target: LAMA2; (-) strand; PAM type: YTN; PAM sequence: TTT
cggagcattaaagtaaccca

SEQ ID NO: 216002 - DNA, 20 bp, Artificial Sequence
  Description of Artificial Sequence: Synthetic oligonucleotide
  Target: LAMA2; (-) strand; PAM type: YTN; PAM sequence: TTT
tcggagcattaaagtaaccc

SEQ ID NO: 216003 - DNA, 20 bp, Artificial Sequence
  Description of Artificial Sequence: Synthetic oligonucleotide
  Target: LAMA2; (-) strand; PAM type: YTN; PAM sequence: TTT
ttcggagcattaaagtaacc

SEQ ID NO: 216004 - DNA, 20 bp, Artificial Sequence
  Description of Artificial Sequence: Synthetic oligonucleotide
  Target: LAMA2; (-) strand; PAM type: YTN; PAM sequence: TTG
agataaaatatttttcggag

SEQ ID NO: 216005 - DNA, 20 bp, Artificial Sequence
  Description of Artificial Sequence: Synthetic oligonucleotide
  Target: LAMA2; (-) strand; PAM type: YTN; PAM sequence: TTA
aaagcaattgagataaaata

SEQ ID NO: 216006 - DNA, 20 bp, Artificial Sequence
  Description of Artificial Sequence: Synthetic oligonucleotide
  Target: LAMA2; (-) strand; PAM type: YTN; PAM sequence: TTT
aaaagcaattgagataaaat

SEQ ID NO: 216007 - DNA, 20 bp, Artificial Sequence
  Description of Artificial Sequence: Synthetic oligonucleotide
  Target: LAMA2; (-) strand; PAM type: YTN; PAM sequence: TTT
taaaagcaattgagataaaa

SEQ ID NO: 216008 - DNA, 20 bp, Artificial Sequence
  Description of Artificial Sequence: Synthetic oligonucleotide
  Target: LAMA2; (-) strand; PAM type: YTN; PAM sequence: TTG
atacattttaaaagcaattg

SEQ ID NO: 216009 - DNA, 20 bp, Artificial Sequence
  Description of Artificial Sequence: Synthetic oligonucleotide
  Target: LAMA2; (-) strand; PAM type: YTN; PAM sequence: TTT
gatacattttaaaagcaatt

SEQ ID NO: 216010 - DNA, 20 bp, Artificial Sequence
  Description of Artificial Sequence: Synthetic oligonucleotide
  Target: LAMA2; (-) strand; PAM type: YTN; PAM sequence: TTT
tgatacattttaaaagcaat

SEQ ID NO: 216011 - DNA, 20 bp, Artificial Sequence
  Description of Artificial Sequence: Synthetic oligonucleotide
  Target: LAMA2; (-) strand; PAM type: YTN; PAM sequence: TTA
ggattttgatacattttaaa

SEQ ID NO: 216012 - DNA, 20 bp, Artificial Sequence
  Description of Artificial Sequence: Synthetic oligonucleotide
  Target: LAMA2; (-) strand; PAM type: YTN; PAM sequence: CTG
aaaaagatggacaaatgaag

SEQ ID NO: 216013 - DNA, 20 bp, Artificial Sequence
  Description of Artificial Sequence: Synthetic oligonucleotide
  Target: LAMA2; (-) strand; PAM type: YTN; PAM sequence: TTC
aggacagcagggaataaacc

SEQ ID NO: 216014 - DNA, 20 bp, Artificial Sequence
  Description of Artificial Sequence: Synthetic oligonucleotide
  Target: LAMA2; (-) strand; PAM type: YTN; PAM sequence: TTA
gaagcaagattcaggacagc

SEQ ID NO: 216015 - DNA, 20 bp, Artificial Sequence
  Description of Artificial Sequence: Synthetic oligonucleotide
  Target: LAMA2; (-) strand; PAM type: YTN; PAM sequence: TTG
gtcgtgataagagcattaga

SEQ ID NO: 216016 - DNA, 20 bp, Artificial Sequence
  Description of Artificial Sequence: Synthetic oligonucleotide
  Target: LAMA2; (-) strand; PAM type: YTN; PAM sequence: TTG
cattggtcgtgataagagca

SEQ ID NO: 216017 - DNA, 20 bp, Artificial Sequence
  Description of Artificial Sequence: Synthetic oligonucleotide
  Target: LAMA2; (-) strand; PAM type: YTN; PAM sequence: CTC
cacatgttgcattggtcgtg

SEQ ID NO: 216018 - DNA, 20 bp, Artificial Sequence
  Description of Artificial Sequence: Synthetic oligonucleotide
  Target: LAMA2; (-) strand; PAM type: YTN; PAM sequence: TTC
tccacatgttgcattggtcg

SEQ ID NO: 216019 - DNA, 20 bp, Artificial Sequence
  Description of Artificial Sequence: Synthetic oligonucleotide
  Target: LAMA2; (-) strand; PAM type: YTN; PAM sequence: TTT
ctccacatgttgcattggtc

SEQ ID NO: 216020 - DNA, 20 bp, Artificial Sequence
  Description of Artificial Sequence: Synthetic oligonucleotide
  Target: LAMA2; (-) strand; PAM type: YTN; PAM sequence: TTT
tctccacatgttgcattggt

SEQ ID NO: 216021 - DNA, 20 bp, Artificial Sequence
  Description of Artificial Sequence: Synthetic oligonucleotide
  Target: LAMA2; (-) strand; PAM type: YTN; PAM sequence: TTT
ttctccacatgttgcattgg

SEQ ID NO: 216022 - DNA, 20 bp, Artificial Sequence
  Description of Artificial Sequence: Synthetic oligonucleotide
  Target: LAMA2; (-) strand; PAM type: YTN; PAM sequence: CTT
tttctccacatgttgcattg

SEQ ID NO: 216023 - DNA, 20 bp, Artificial Sequence
  Description of Artificial Sequence: Synthetic oligonucleotide
  Target: LAMA2; (-) strand; PAM type: YTN; PAM sequence: TTC
aggtcctttttctccacatg

SEQ ID NO: 216024 - DNA, 20 bp, Artificial Sequence
  Description of Artificial Sequence: Synthetic oligonucleotide
  Target: LAMA2; (-) strand; PAM type: YTN; PAM sequence: TTT
caggtcctttttctccacat

SEQ ID NO: 216025 - DNA, 20 bp, Artificial Sequence
  Description of Artificial Sequence: Synthetic oligonucleotide
  Target: LAMA2; (-) strand; PAM type: YTN; PAM sequence: TTG
cagtacatttcaggtccttt

SEQ ID NO: 216026 - DNA, 20 bp, Artificial Sequence
  Description of Artificial Sequence: Synthetic oligonucleotide
  Target: LAMA2; (-) strand; PAM type: YTN; PAM sequence: TTT
gcagtacatttcaggtcctt

SEQ ID NO: 216027 - DNA, 20 bp, Artificial Sequence
  Description of Artificial Sequence: Synthetic oligonucleotide
  Target: LAMA2; (-) strand; PAM type: YTN; PAM sequence: CTA
ccaatttgcagtacatttca

SEQ ID NO: 216028 - DNA, 20 bp, Artificial Sequence
  Description of Artificial Sequence: Synthetic oligonucleotide
  Target: LAMA2; (-) strand; PAM type: YTN; PAM sequence: TTC
taccaatttgcagtacattt

SEQ ID NO: 216029 - DNA, 20 bp, Artificial Sequence
  Description of Artificial Sequence: Synthetic oligonucleotide
  Target: LAMA2; (-) strand; PAM type: YTN; PAM sequence: CTG
cccagggacatgttctacca

SEQ ID NO: 216030 - DNA, 20 bp, Artificial Sequence
  Description of Artificial Sequence: Synthetic oligonucleotide
  Target: LAMA2; (-) strand; PAM type: YTN; PAM sequence: CTC
acaggctgcccagggacatg

SEQ ID NO: 216031 - DNA, 20 bp, Artificial Sequence
  Description of Artificial Sequence: Synthetic oligonucleotide
  Target: LAMA2; (-) strand; PAM type: YTN; PAM sequence: TTC
ctcacaggctgcccagggac

SEQ ID NO: 216032 - DNA, 20 bp, Artificial Sequence
  Description of Artificial Sequence: Synthetic oligonucleotide
  Target: LAMA2; (-) strand; PAM type: YTN; PAM sequence: CTG
cgggttcctcacaggctgcc

SEQ ID NO: 216033 - DNA, 20 bp, Artificial Sequence
  Description of Artificial Sequence: Synthetic oligonucleotide
  Target: LAMA2; (-) strand; PAM type: YTN; PAM sequence: TTC
gacactgcgggttcctcaca

SEQ ID NO: 216034 - DNA, 20 bp, Artificial Sequence
  Description of Artificial Sequence: Synthetic oligonucleotide
  Target: LAMA2; (-) strand; PAM type: YTN; PAM sequence: TTG
cagattcgacactgcgggtt

SEQ ID NO: 216035 - DNA, 20 bp, Artificial Sequence
  Description of Artificial Sequence: Synthetic oligonucleotide
  Target: LAMA2; (-) strand; PAM type: YTN; PAM sequence: TTG
attgcagattcgacactgcg

SEQ ID NO: 216036 - DNA, 20 bp, Artificial Sequence
  Description of Artificial Sequence: Synthetic oligonucleotide
  Target: LAMA2; (-) strand; PAM type: YTN; PAM sequence: TTT
gattgcagattcgacactgc

SEQ ID NO: 216037 - DNA, 20 bp, Artificial Sequence
  Description of Artificial Sequence: Synthetic oligonucleotide
  Target: LAMA2; (-) strand; PAM type: YTN; PAM sequence: TTT
tgattgcagattcgacactg

SEQ ID NO: 216038 - DNA, 20 bp, Artificial Sequence
  Description of Artificial Sequence: Synthetic oligonucleotide
  Target: LAMA2; (-) strand; PAM type: YTN; PAM sequence: CTG
ttttgattgcagattcgaca

SEQ ID NO: 216039 - DNA, 20 bp, Artificial Sequence
  Description of Artificial Sequence: Synthetic oligonucleotide
  Target: LAMA2; (-) strand; PAM type: YTN; PAM sequence: CTG
ctgttttgattgcagattcg

SEQ ID NO: 216040 - DNA, 20 bp, Artificial Sequence
  Description of Artificial Sequence: Synthetic oligonucleotide
  Target: LAMA2; (-) strand; PAM type: YTN; PAM sequence: TTG
ctgctgttttgattgcagat

SEQ ID NO: 216041 - DNA, 20 bp, Artificial Sequence
  Description of Artificial Sequence: Synthetic oligonucleotide
  Target: LAMA2; (-) strand; PAM type: YTN; PAM sequence: TTG
gattgctgctgttttgattg

SEQ ID NO: 216042 - DNA, 20 bp, Artificial Sequence
  Description of Artificial Sequence: Synthetic oligonucleotide
  Target: LAMA2; (-) strand; PAM type: YTN; PAM sequence: TTT
ggattgctgctgttttgatt

SEQ ID NO: 216043 - DNA, 20 bp, Artificial Sequence
  Description of Artificial Sequence: Synthetic oligonucleotide
  Target: LAMA2; (-) strand; PAM type: YTN; PAM sequence: CTA
aaatacatacggtttggatt

SEQ ID NO: 216044 - DNA, 20 bp, Artificial Sequence
  Description of Artificial Sequence: Synthetic oligonucleotide
  Target: LAMA2; (-) strand; PAM type: YTN; PAM sequence: CTA
cacactaaaatacatacggt

SEQ ID NO: 216045 - DNA, 20 bp, Artificial Sequence
  Description of Artificial Sequence: Synthetic oligonucleotide
  Target: LAMA2; (-) strand; PAM type: YTN; PAM sequence: CTA
cccagcgccacacacctaca

SEQ ID NO: 216046 - DNA, 20 bp, Artificial Sequence
  Description of Artificial Sequence: Synthetic oligonucleotide
  Target: LAMA2; (-) strand; PAM type: YTN; PAM sequence: TTA
tagatcctacccagcgccac

SEQ ID NO: 216047 - DNA, 20 bp, Artificial Sequence
  Description of Artificial Sequence: Synthetic oligonucleotide
  Target: LAMA2; (-) strand; PAM type: YTN; PAM sequence: CTC
acaattatagatcctaccca

SEQ ID NO: 216048 - DNA, 20 bp, Artificial Sequence
  Description of Artificial Sequence: Synthetic oligonucleotide
  Target: LAMA2; (-) strand; PAM type: YTN; PAM sequence: CTC
aacatctcacaattatagat

SEQ ID NO: 216049 - DNA, 20 bp, Artificial Sequence
  Description of Artificial Sequence: Synthetic oligonucleotide
  Target: LAMA2; (-) strand; PAM type: YTN; PAM sequence: TTG
gcctcaacatctcacaatta

SEQ ID NO: 216050 - DNA, 20 bp, Artificial Sequence
  Description of Artificial Sequence: Synthetic oligonucleotide
  Target: LAMA2; (-) strand; PAM type: YTN; PAM sequence: CTT
ggcctcaacatctcacaatt

SEQ ID NO: 216051 - DNA, 20 bp, Artificial Sequence
  Description of Artificial Sequence: Synthetic oligonucleotide
  Target: LAMA2; (-) strand; PAM type: YTN; PAM sequence: TTA
atgcaacttggcctcaacat

SEQ ID NO: 216052 - DNA, 20 bp, Artificial Sequence
  Description of Artificial Sequence: Synthetic oligonucleotide
  Target: LAMA2; (-) strand; PAM type: YTN; PAM sequence: TTT
aatgcaacttggcctcaaca

SEQ ID NO: 216053 - DNA, 20 bp, Artificial Sequence
  Description of Artificial Sequence: Synthetic oligonucleotide
  Target: LAMA2; (-) strand; PAM type: YTN; PAM sequence: TTG
aatttaatgcaacttggcct

SEQ ID NO: 216054 - DNA, 20 bp, Artificial Sequence
  Description of Artificial Sequence: Synthetic oligonucleotide
  Target: LAMA2; (-) strand; PAM type: YTN; PAM sequence: CTT
gaatttaatgcaacttggcc

SEQ ID NO: 216055 - DNA, 20 bp, Artificial Sequence
  Description of Artificial Sequence: Synthetic oligonucleotide
  Target: LAMA2; (-) strand; PAM type: YTN; PAM sequence: TTA
caaacccttgaatttaatgc

SEQ ID NO: 216056 - DNA, 20 bp, Artificial Sequence
  Description of Artificial Sequence: Synthetic oligonucleotide
  Target: LAMA2; (-) strand; PAM type: YTN; PAM sequence: TTA
gtattacaaacccttgaatt

SEQ ID NO: 216057 - DNA, 20 bp, Artificial Sequence
  Description of Artificial Sequence: Synthetic oligonucleotide
  Target: LAMA2; (-) strand; PAM type: YTN; PAM sequence: CTT
agtattacaaacccttgaat

SEQ ID NO: 216058 - DNA, 20 bp, Artificial Sequence
  Description of Artificial Sequence: Synthetic oligonucleotide
  Target: LAMA2; (-) strand; PAM type: YTN; PAM sequence: TTC
ttagtattacaaacccttga

SEQ ID NO: 216059 - DNA, 20 bp, Artificial Sequence
  Description of Artificial Sequence: Synthetic oligonucleotide
  Target: LAMA2; (-) strand; PAM type: YTN; PAM sequence: CTA
ggaattcttagtattacaaa

SEQ ID NO: 216060 - DNA, 20 bp, Artificial Sequence
  Description of Artificial Sequence: Synthetic oligonucleotide
  Target: LAMA2; (-) strand; PAM type: YTN; PAM sequence: TTC
taggaattcttagtattaca

SEQ ID NO: 216061 - DNA, 20 bp, Artificial Sequence
  Description of Artificial Sequence: Synthetic oligonucleotide
  Target: LAMA2; (-) strand; PAM type: YTN; PAM sequence: TTA
atggtaaaaagaattctagg

SEQ ID NO: 216062 - DNA, 20 bp, Artificial Sequence
  Description of Artificial Sequence: Synthetic oligonucleotide
  Target: LAMA2; (-) strand; PAM type: YTN; PAM sequence: CTT
aatggtaaaaagaattctag

SEQ ID NO: 216063 - DNA, 20 bp, Artificial Sequence
  Description of Artificial Sequence: Synthetic oligonucleotide
  Target: LAMA2; (-) strand; PAM type: YTN; PAM sequence: CTC
ttaatggtaaaaagaattct

SEQ ID NO: 216064 - DNA, 20 bp, Artificial Sequence
  Description of Artificial Sequence: Synthetic oligonucleotide
  Target: LAMA2; (-) strand; PAM type: YTN; PAM sequence: CTG
aatgacagagaggggccagg

SEQ ID NO: 216065 - DNA, 20 bp, Artificial Sequence
  Description of Artificial Sequence: Synthetic oligonucleotide
  Target: LAMA2; (-) strand; PAM type: YTN; PAM sequence: TTG
ctgaatgacagagaggggcc

SEQ ID NO: 216066 - DNA, 20 bp, Artificial Sequence
  Description of Artificial Sequence: Synthetic oligonucleotide
  Target: LAMA2; (-) strand; PAM type: YTN; PAM sequence: TTT
gctgaatgacagagaggggc

SEQ ID NO: 216067 - DNA, 20 bp, Artificial Sequence
  Description of Artificial Sequence: Synthetic oligonucleotide
  Target: LAMA2; (-) strand; PAM type: YTN; PAM sequence: CTC
caataatgtttgctgaatga

SEQ ID NO: 216068 - DNA, 20 bp, Artificial Sequence
  Description of Artificial Sequence: Synthetic oligonucleotide
  Target: LAMA2; (-) strand; PAM type: YTN; PAM sequence: TTA
gcacatagcaggaactccaa

SEQ ID NO: 216069 - DNA, 20 bp, Artificial Sequence
  Description of Artificial Sequence: Synthetic oligonucleotide
  Target: LAMA2; (-) strand; PAM type: YTN; PAM sequence: CTT
agcacatagcaggaactcca

SEQ ID NO: 216070 - DNA, 20 bp, Artificial Sequence
  Description of Artificial Sequence: Synthetic oligonucleotide
  Target: LAMA2; (-) strand; PAM type: YTN; PAM sequence: CTG
tacttagcacatagcaggaa

SEQ ID NO: 216071 - DNA, 20 bp, Artificial Sequence
  Description of Artificial Sequence: Synthetic oligonucleotide
  Target: LAMA2; (-) strand; PAM type: YTN; PAM sequence: CTC
caatcactgtacttagcaca

SEQ ID NO: 216072 - DNA, 20 bp, Artificial Sequence
  Description of Artificial Sequence: Synthetic oligonucleotide
  Target: LAMA2; (-) strand; PAM type: YTN; PAM sequence: CTG
gcgaatcatctccaatcact

SEQ ID NO: 216073 - DNA, 20 bp, Artificial Sequence
  Description of Artificial Sequence: Synthetic oligonucleotide
  Target: LAMA2; (-) strand; PAM type: YTN; PAM sequence: TTC
agctggcgaatcatctccaa

SEQ ID NO: 216074 - DNA, 20 bp, Artificial Sequence
  Description of Artificial Sequence: Synthetic oligonucleotide
  Target: LAMA2; (-) strand; PAM type: YTN; PAM sequence: CTT
cagctggcgaatcatctcca

SEQ ID NO: 216075 - DNA, 20 bp, Artificial Sequence
  Description of Artificial Sequence: Synthetic oligonucleotide
  Target: LAMA2; (-) strand; PAM type: YTN; PAM sequence: CTG
ccacaggccttcagctggcg

SEQ ID NO: 216076 - DNA, 20 bp, Artificial Sequence
  Description of Artificial Sequence: Synthetic oligonucleotide
  Target: LAMA2; (-) strand; PAM type: YTN; PAM sequence: TTA
gtaaacccaatgactgccac

SEQ ID NO: 216077 - DNA, 20 bp, Artificial Sequence
  Description of Artificial Sequence: Synthetic oligonucleotide
  Target: LAMA2; (-) strand; PAM type: YTN; PAM sequence: CTG
gagttagtaaacccaatgac

SEQ ID NO: 216078 - DNA, 20 bp, Artificial Sequence
  Description of Artificial Sequence: Synthetic oligonucleotide
  Target: LAMA2; (-) strand; PAM type: YTN; PAM sequence: TTG
gtatctggagttagtaaacc

SEQ ID NO: 216079 - DNA, 20 bp, Artificial Sequence
  Description of Artificial Sequence: Synthetic oligonucleotide
  Target: LAMA2; (-) strand; PAM type: YTN; PAM sequence: TTT
ggtatctggagttagtaaac

SEQ ID NO: 216080 - DNA, 20 bp, Artificial Sequence
  Description of Artificial Sequence: Synthetic oligonucleotide
  Target: LAMA2; (-) strand; PAM type: YTN; PAM sequence: CTT
tggtatctggagttagtaaa

SEQ ID NO: 216081 - DNA, 20 bp, Artificial Sequence
  Description of Artificial Sequence: Synthetic oligonucleotide
  Target: LAMA2; (-) strand; PAM type: YTN; PAM sequence: CTC
agaaaccactttggtatctg

SEQ ID NO: 216082 - DNA, 20 bp, Artificial Sequence
  Description of Artificial Sequence: Synthetic oligonucleotide
  Target: LAMA2; (-) strand; PAM type: YTN; PAM sequence: TTA
ataaccacaccctcagaaac

SEQ ID NO: 216083 - DNA, 20 bp, Artificial Sequence
  Description of Artificial Sequence: Synthetic oligonucleotide
  Target: LAMA2; (-) strand; PAM type: YTN; PAM sequence: CTG
agttaataaccacaccctca

SEQ ID NO: 216084 - DNA, 20 bp, Artificial Sequence
  Description of Artificial Sequence: Synthetic oligonucleotide
  Target: LAMA2; (-) strand; PAM type: YTN; PAM sequence: TTA
ccaatgaatgatgacagcct

SEQ ID NO: 216085 - DNA, 20 bp, Artificial Sequence
  Description of Artificial Sequence: Synthetic oligonucleotide
  Target: LAMA2; (-) strand; PAM type: YTN; PAM sequence: CTG
gcacataaattaccaatgaa

SEQ ID NO: 216086 - DNA, 20 bp, Artificial Sequence
  Description of Artificial Sequence: Synthetic oligonucleotide
  Target: LAMA2; (-) strand; PAM type: YTN; PAM sequence: CTC
aggcacaatatctggcacat

SEQ ID NO: 216087 - DNA, 20 bp, Artificial Sequence
  Description of Artificial Sequence: Synthetic oligonucleotide
  Target: LAMA2; (-) strand; PAM type: YTN; PAM sequence: CTG
gatctcaggcacaatatctg

SEQ ID NO: 216088 - DNA, 20 bp, Artificial Sequence
  Description of Artificial Sequence: Synthetic oligonucleotide
  Target: LAMA2; (-) strand; PAM type: YTN; PAM sequence: CTC
ctggatctcaggcacaatat

SEQ ID NO: 216089 - DNA, 20 bp, Artificial Sequence
  Description of Artificial Sequence: Synthetic oligonucleotide
  Target: LAMA2; (-) strand; PAM type: YTN; PAM sequence: TTC
ctcctggatctcaggcacaa

SEQ ID NO: 216090 - DNA, 20 bp, Artificial Sequence
  Description of Artificial Sequence: Synthetic oligonucleotide
  Target: LAMA2; (-) strand; PAM type: YTN; PAM sequence: TTA
ttcctcctggatctcaggca

SEQ ID NO: 216091 - DNA, 20 bp, Artificial Sequence
  Description of Artificial Sequence: Synthetic oligonucleotide
  Target: LAMA2; (-) strand; PAM type: YTN; PAM sequence: CTT
attcctcctggatctcaggc

SEQ ID NO: 216092 - DNA, 20 bp, Artificial Sequence
  Description of Artificial Sequence: Synthetic oligonucleotide
  Target: LAMA2; (-) strand; PAM type: YTN; PAM sequence: CTA
ccttattcctcctggatctc

SEQ ID NO: 216093 - DNA, 20 bp, Artificial Sequence
  Description of Artificial Sequence: Synthetic oligonucleotide
  Target: LAMA2; (-) strand; PAM type: YTN; PAM sequence: CTC
aaagacgatatcctacctta

SEQ ID NO: 216094 - DNA, 20 bp, Artificial Sequence
  Description of Artificial Sequence: Synthetic oligonucleotide
  Target: LAMA2; (-) strand; PAM type: YTN; PAM sequence: CTA
tatatcagtagctcaaagac

SEQ ID NO: 216095 - DNA, 20 bp, Artificial Sequence
  Description of Artificial Sequence: Synthetic oligonucleotide
  Target: LAMA2; (-) strand; PAM type: YTN; PAM sequence: TTA
ccacactatatatcagtagc

SEQ ID NO: 216096 - DNA, 20 bp, Artificial Sequence
  Description of Artificial Sequence: Synthetic oligonucleotide
  Target: LAMA2; (-) strand; PAM type: YTN; PAM sequence: CTT
accacactatatatcagtag

SEQ ID NO: 216097 - DNA, 20 bp, Artificial Sequence
  Description of Artificial Sequence: Synthetic oligonucleotide
  Target: LAMA2; (-) strand; PAM type: YTN; PAM sequence: TTG
tacttaccacactatatatc

SEQ ID NO: 216098 - DNA, 20 bp, Artificial Sequence
  Description of Artificial Sequence: Synthetic oligonucleotide
  Target: LAMA2; (-) strand; PAM type: YTN; PAM sequence: TTT
gtacttaccacactatatat

SEQ ID NO: 216099 - DNA, 20 bp, Artificial Sequence
  Description of Artificial Sequence: Synthetic oligonucleotide
  Target: LAMA2; (-) strand; PAM type: YTN; PAM sequence: CTT
tgtacttaccacactatata

SEQ ID NO: 216100 - DNA, 20 bp, Artificial Sequence
  Description of Artificial Sequence: Synthetic oligonucleotide
  Target: LAMA2; (-) strand; PAM type: YTN; PAM sequence: TTC
ctttgtacttaccacactat

SEQ ID NO: 216101 - DNA, 20 bp, Artificial Sequence
  Description of Artificial Sequence: Synthetic oligonucleotide
  Target: LAMA2; (-) strand; PAM type: YTN; PAM sequence: TTT
cctttgtacttaccacacta

SEQ ID NO: 216102 - DNA, 20 bp, Artificial Sequence
  Description of Artificial Sequence: Synthetic oligonucleotide
  Target: LAMA2; (-) strand; PAM type: YTN; PAM sequence: CTT
tcctttgtacttaccacact

SEQ ID NO: 216103 - DNA, 20 bp, Artificial Sequence
  Description of Artificial Sequence: Synthetic oligonucleotide
  Target: LAMA2; (-) strand; PAM type: YTN; PAM sequence: TTC
tttcctttgtacttaccaca

SEQ ID NO: 216104 - DNA, 20 bp, Artificial Sequence
  Description of Artificial Sequence: Synthetic oligonucleotide
  Target: LAMA2; (-) strand; PAM type: YTN; PAM sequence: CTC
attctttcctttgtacttac

SEQ ID NO: 216105 - DNA, 20 bp, Artificial Sequence
  Description of Artificial Sequence: Synthetic oligonucleotide
  Target: LAMA2; (-) strand; PAM type: YTN; PAM sequence: CTG
tgctcattctttcctttgta

SEQ ID NO: 216106 - DNA, 20 bp, Artificial Sequence
  Description of Artificial Sequence: Synthetic oligonucleotide
  Target: LAMA2; (-) strand; PAM type: YTN; PAM sequence: CTG
cagaacgctgtgctcattct

SEQ ID NO: 216107 - DNA, 20 bp, Artificial Sequence
  Description of Artificial Sequence: Synthetic oligonucleotide
  Target: LAMA2; (-) strand; PAM type: YTN; PAM sequence: TTC
tgcagaacgctgtgctcatt

SEQ ID NO: 216108 - DNA, 20 bp, Artificial Sequence
  Description of Artificial Sequence: Synthetic oligonucleotide
  Target: LAMA2; (-) strand; PAM type: YTN; PAM sequence: CTT
ctgcagaacgctgtgctcat

SEQ ID NO: 216109 - DNA, 20 bp, Artificial Sequence
  Description of Artificial Sequence: Synthetic oligonucleotide
  Target: LAMA2; (-) strand; PAM type: YTN; PAM sequence: CTC
ttctgcagaacgctgtgctc

SEQ ID NO: 216110 - DNA, 20 bp, Artificial Sequence
  Description of Artificial Sequence: Synthetic oligonucleotide
  Target: LAMA2; (-) strand; PAM type: YTN; PAM sequence: CTC
tcttctgcagaacgctgtgc

SEQ ID NO: 216111 - DNA, 20 bp, Artificial Sequence
  Description of Artificial Sequence: Synthetic oligonucleotide
  Target: LAMA2; (-) strand; PAM type: YTN; PAM sequence: CTC
tctcttctgcagaacgctgt

SEQ ID NO: 216112 - DNA, 20 bp, Artificial Sequence
  Description of Artificial Sequence: Synthetic oligonucleotide
  Target: LAMA2; (-) strand; PAM type: YTN; PAM sequence: TTG
tggccatcctctctcttctg

SEQ ID NO: 216113 - DNA, 20 bp, Artificial Sequence
  Description of Artificial Sequence: Synthetic oligonucleotide
  Target: LAMA2; (-) strand; PAM type: YTN; PAM sequence: TTT
gtggccatcctctctcttct

SEQ ID NO: 216114 - DNA, 20 bp, Artificial Sequence
  Description of Artificial Sequence: Synthetic oligonucleotide
  Target: LAMA2; (-) strand; PAM type: YTN; PAM sequence: CTT
tgtggccatcctctctcttc

SEQ ID NO: 216115 - DNA, 20 bp, Artificial Sequence
  Description of Artificial Sequence: Synthetic oligonucleotide
  Target: LAMA2; (-) strand; PAM type: YTN; PAM sequence: TTA
caccaagcctttgtggccat

SEQ ID NO: 216116 - DNA, 20 bp, Artificial Sequence
  Description of Artificial Sequence: Synthetic oligonucleotide
  Target: LAMA2; (-) strand; PAM type: YTN; PAM sequence: CTT
acaccaagcctttgtggcca

SEQ ID NO: 216117 - DNA, 20 bp, Artificial Sequence
  Description of Artificial Sequence: Synthetic oligonucleotide
  Target: LAMA2; (-) strand; PAM type: YTN; PAM sequence: TTA
cttacaccaagcctttgtgg

SEQ ID NO: 216118 - DNA, 20 bp, Artificial Sequence
  Description of Artificial Sequence: Synthetic oligonucleotide
  Target: LAMA2; (-) strand; PAM type: YTN; PAM sequence: TTT
acttacaccaagcctttgtg

SEQ ID NO: 216119 - DNA, 20 bp, Artificial Sequence
  Description of Artificial Sequence: Synthetic oligonucleotide
  Target: LAMA2; (-) strand; PAM type: YTN; PAM sequence: CTT
tacttacaccaagcctttgt

SEQ ID NO: 216120 - DNA, 20 bp, Artificial Sequence
  Description of Artificial Sequence: Synthetic oligonucleotide
  Target: LAMA2; (-) strand; PAM type: YTN; PAM sequence: CTG
gcaagcctttacttacacca

SEQ ID NO: 216121 - DNA, 20 bp, Artificial Sequence
  Description of Artificial Sequence: Synthetic oligonucleotide
  Target: LAMA2; (-) strand; PAM type: YTN; PAM sequence: TTC
tggcaagcctttacttacac

SEQ ID NO: 216122 - DNA, 20 bp, Artificial Sequence
  Description of Artificial Sequence: Synthetic oligonucleotide
  Target: LAMA2; (-) strand; PAM type: YTN; PAM sequence: CTT
ctggcaagcctttacttaca

SEQ ID NO: 216123 - DNA, 20 bp, Artificial Sequence
  Description of Artificial Sequence: Synthetic oligonucleotide
  Target: LAMA2; (-) strand; PAM type: YTN; PAM sequence: CTC
cttctggcaagcctttactt

SEQ ID NO: 216124 - DNA, 20 bp, Artificial Sequence
  Description of Artificial Sequence: Synthetic oligonucleotide
  Target: LAMA2; (-) strand; PAM type: YTN; PAM sequence: TTG
gatatcgctccttctggcaa

SEQ ID NO: 216125 - DNA, 20 bp, Artificial Sequence
  Description of Artificial Sequence: Synthetic oligonucleotide
  Target: LAMA2; (-) strand; PAM type: YTN; PAM sequence: CTT
ggatatcgctccttctggca

SEQ ID NO: 216126 - DNA, 20 bp, Artificial Sequence
  Description of Artificial Sequence: Synthetic oligonucleotide
  Target: LAMA2; (-) strand; PAM type: YTN; PAM sequence: TTG
gtcatcagcttggatatcgc

SEQ ID NO: 216127 - DNA, 20 bp, Artificial Sequence
  Description of Artificial Sequence: Synthetic oligonucleotide
  Target: LAMA2; (-) strand; PAM type: YTN; PAM sequence: CTT
ggtcatcagcttggatatcg

SEQ ID NO: 216128 - DNA, 20 bp, Artificial Sequence
  Description of Artificial Sequence: Synthetic oligonucleotide
  Target: LAMA2; (-) strand; PAM type: YTN; PAM sequence: CTC
atgtccttggtcatcagctt

SEQ ID NO: 216129 - DNA, 20 bp, Artificial Sequence
  Description of Artificial Sequence: Synthetic oligonucleotide
  Target: LAMA2; (-) strand; PAM type: YTN; PAM sequence: TTA
gctcatgtccttggtcatca

SEQ ID NO: 216130 - DNA, 20 bp, Artificial Sequence
  Description of Artificial Sequence: Synthetic oligonucleotide
  Target: LAMA2; (-) strand; PAM type: YTN; PAM sequence: TTT
agctcatgtccttggtcatc

SEQ ID NO: 216131 - DNA, 20 bp, Artificial Sequence
  Description of Artificial Sequence: Synthetic oligonucleotide
  Target: LAMA2; (-) strand; PAM type: YTN; PAM sequence: TTG
tttagctcatgtccttggtc

SEQ ID NO: 216132 - DNA, 20 bp, Artificial Sequence
  Description of Artificial Sequence: Synthetic oligonucleotide
  Target: LAMA2; (-) strand; PAM type: YTN; PAM sequence: CTT
gtttagctcatgtccttggt

SEQ ID NO: 216133 - DNA, 20 bp, Artificial Sequence
  Description of Artificial Sequence: Synthetic oligonucleotide
  Target: LAMA2; (-) strand; PAM type: YTN; PAM sequence: CTC
atacccttgtttagctcatg

SEQ ID NO: 216134 - DNA, 20 bp, Artificial Sequence
  Description of Artificial Sequence: Synthetic oligonucleotide
  Target: LAMA2; (-) strand; PAM type: YTN; PAM sequence: TTA
tctcatacccttgtttagct

SEQ ID NO: 216135 - DNA, 20 bp, Artificial Sequence
  Description of Artificial Sequence: Synthetic oligonucleotide
  Target: LAMA2; (-) strand; PAM type: YTN; PAM sequence: TTT
atctcatacccttgtttagc

SEQ ID NO: 216136 - DNA, 20 bp, Artificial Sequence
  Description of Artificial Sequence: Synthetic oligonucleotide
  Target: LAMA2; (-) strand; PAM type: YTN; PAM sequence: CTG
tttatctcatacccttgttt

SEQ ID NO: 216137 - DNA, 20 bp, Artificial Sequence
  Description of Artificial Sequence: Synthetic oligonucleotide
  Target: LAMA2; (-) strand; PAM type: YTN; PAM sequence: TTA
cctgtttatctcataccctt

SEQ ID NO: 216138 - DNA, 20 bp, Artificial Sequence
  Description of Artificial Sequence: Synthetic oligonucleotide
  Target: LAMA2; (-) strand; PAM type: YTN; PAM sequence: TTT
acctgtttatctcataccct

SEQ ID NO: 216139 - DNA, 20 bp, Artificial Sequence
  Description of Artificial Sequence: Synthetic oligonucleotide
  Target: LAMA2; (-) strand; PAM type: YTN; PAM sequence: CTT
tacctgtttatctcataccc

SEQ ID NO: 216140 - DNA, 20 bp, Artificial Sequence
  Description of Artificial Sequence: Synthetic oligonucleotide
  Target: LAMA2; (-) strand; PAM type: YTN; PAM sequence: CTC
tttacctgtttatctcatac

SEQ ID NO: 216141 - DNA, 20 bp, Artificial Sequence
  Description of Artificial Sequence: Synthetic oligonucleotide
  Target: LAMA2; (-) strand; PAM type: YTN; PAM sequence: CTC
acctctttacctgtttatct

SEQ ID NO: 216142 - DNA, 20 bp, Artificial Sequence
  Description of Artificial Sequence: Synthetic oligonucleotide
  Target: LAMA2; (-) strand; PAM type: YTN; PAM sequence: CTC
cctcacctctttacctgttt

SEQ ID NO: 216143 - DNA, 20 bp, Artificial Sequence
  Description of Artificial Sequence: Synthetic oligonucleotide
  Target: LAMA2; (-) strand; PAM type: YTN; PAM sequence: TTC
ccctccctcacctctttacc

SEQ ID NO: 216144 - DNA, 20 bp, Artificial Sequence
  Description of Artificial Sequence: Synthetic oligonucleotide
  Target: LAMA2; (-) strand; PAM type: YTN; PAM sequence: CTT
cccctccctcacctctttac

SEQ ID NO: 216145 - DNA, 20 bp, Artificial Sequence
  Description of Artificial Sequence: Synthetic oligonucleotide
  Target: LAMA2; (-) strand; PAM type: YTN; PAM sequence: CTC
ttcccctccctcacctcttt

SEQ ID NO: 216146 - DNA, 20 bp, Artificial Sequence
  Description of Artificial Sequence: Synthetic oligonucleotide
  Target: LAMA2; (-) strand; PAM type: YTN; PAM sequence: CTC
ctcttcccctccctcacctc

SEQ ID NO: 216147 - DNA, 20 bp, Artificial Sequence
  Description of Artificial Sequence: Synthetic oligonucleotide
  Target: LAMA2; (-) strand; PAM type: YTN; PAM sequence: TTC
tcctcttcccctccctcacc

SEQ ID NO: 216148 - DNA, 20 bp, Artificial Sequence
  Description of Artificial Sequence: Synthetic oligonucleotide
  Target: LAMA2; (-) strand; PAM type: YTN; PAM sequence: CTT
ctcctcttcccctccctcac

SEQ ID NO: 216149 - DNA, 20 bp, Artificial Sequence
  Description of Artificial Sequence: Synthetic oligonucleotide
  Target: LAMA2; (-) strand; PAM type: YTN; PAM sequence: CTG
gcatgacttctcctcttccc

SEQ ID NO: 216150 - DNA, 20 bp, Artificial Sequence
  Description of Artificial Sequence: Synthetic oligonucleotide
  Target: LAMA2; (-) strand; PAM type: YTN; PAM sequence: TTC
ctggcatgacttctcctctt

SEQ ID NO: 216151 - DNA, 20 bp, Artificial Sequence
  Description of Artificial Sequence: Synthetic oligonucleotide
  Target: LAMA2; (-) strand; PAM type: YTN; PAM sequence: CTT
cctggcatgacttctcctct

SEQ ID NO: 216152 - DNA, 20 bp, Artificial Sequence
  Description of Artificial Sequence: Synthetic oligonucleotide
  Target: LAMA2; (-) strand; PAM type: YTN; PAM sequence: CTC
ttcctggcatgacttctcct

SEQ ID NO: 216153 - DNA, 20 bp, Artificial Sequence
  Description of Artificial Sequence: Synthetic oligonucleotide
  Target: LAMA2; (-) strand; PAM type: YTN; PAM sequence: TTC
tcttcctggcatgacttctc

SEQ ID NO: 216154 - DNA, 20 bp, Artificial Sequence
  Description of Artificial Sequence: Synthetic oligonucleotide
  Target: LAMA2; (-) strand; PAM type: YTN; PAM sequence: TTT
ctcttcctggcatgacttct

SEQ ID NO: 216155 - DNA, 20 bp, Artificial Sequence
  Description of Artificial Sequence: Synthetic oligonucleotide
  Target: LAMA2; (-) strand; PAM type: YTN; PAM sequence: CTG
atttctcttcctggcatgac

SEQ ID NO: 216156 - DNA, 20 bp, Artificial Sequence
  Description of Artificial Sequence: Synthetic oligonucleotide
  Target: LAMA2; (-) strand; PAM type: YTN; PAM sequence: TTC
tgatttctcttcctggcatg

SEQ ID NO: 216157 - DNA, 20 bp, Artificial Sequence
  Description of Artificial Sequence: Synthetic oligonucleotide
  Target: LAMA2; (-) strand; PAM type: YTN; PAM sequence: CTA
attctgatttctcttcctgg

SEQ ID NO: 216158 - DNA, 20 bp, Artificial Sequence
  Description of Artificial Sequence: Synthetic oligonucleotide
  Target: LAMA2; (-) strand; PAM type: YTN; PAM sequence: CTG
tctaattctgatttctcttc

SEQ ID NO: 216159 - DNA, 20 bp, Artificial Sequence
  Description of Artificial Sequence: Synthetic oligonucleotide
  Target: LAMA2; (-) strand; PAM type: YTN; PAM sequence: TTC
tgtctaattctgatttctct

SEQ ID NO: 216160 - DNA, 20 bp, Artificial Sequence
  Description of Artificial Sequence: Synthetic oligonucleotide
  Target: LAMA2; (-) strand; PAM type: YTN; PAM sequence: TTT
ctgtctaattctgatttctc

SEQ ID NO: 216161 - DNA, 20 bp, Artificial Sequence
  Description of Artificial Sequence: Synthetic oligonucleotide
  Target: LAMA2; (-) strand; PAM type: YTN; PAM sequence: TTT
tctgtctaattctgatttct

SEQ ID NO: 216162 - DNA, 20 bp, Artificial Sequence
  Description of Artificial Sequence: Synthetic oligonucleotide
  Target: LAMA2; (-) strand; PAM type: YTN; PAM sequence: CTA
ggattttctgtctaattctg

SEQ ID NO: 216163 - DNA, 20 bp, Artificial Sequence
  Description of Artificial Sequence: Synthetic oligonucleotide
  Target: LAMA2; (-) strand; PAM type: YTN; PAM sequence: CTC
cccgagtaactaggattttc

SEQ ID NO: 216164 - DNA, 20 bp, Artificial Sequence
  Description of Artificial Sequence: Synthetic oligonucleotide
  Target: LAMA2; (-) strand; PAM type: YTN; PAM sequence: TTG
tagctccccgagtaactagg

SEQ ID NO: 216165 - DNA, 20 bp, Artificial Sequence
  Description of Artificial Sequence: Synthetic oligonucleotide
  Target: LAMA2; (-) strand; PAM type: YTN; PAM sequence: CTT
gtagctccccgagtaactag

SEQ ID NO: 216166 - DNA, 20 bp, Artificial Sequence
  Description of Artificial Sequence: Synthetic oligonucleotide
  Target: LAMA2; (-) strand; PAM type: YTN; PAM sequence: CTA
cttgtagctccccgagtaac

SEQ ID NO: 216167 - DNA, 20 bp, Artificial Sequence
  Description of Artificial Sequence: Synthetic oligonucleotide
  Target: LAMA2; (-) strand; PAM type: YTN; PAM sequence: TTC
ctacttgtagctccccgagt

SEQ ID NO: 216168 - DNA, 20 bp, Artificial Sequence
  Description of Artificial Sequence: Synthetic oligonucleotide
  Target: LAMA2; (-) strand; PAM type: YTN; PAM sequence: CTA
gtcattcctacttgtagctc

SEQ ID NO: 216169 - DNA, 20 bp, Artificial Sequence
  Description of Artificial Sequence: Synthetic oligonucleotide
  Target: LAMA2; (-) strand; PAM type: YTN; PAM sequence: TTC
tagtcattcctacttgtagc

SEQ ID NO: 216170 - DNA, 20 bp, Artificial Sequence
  Description of Artificial Sequence: Synthetic oligonucleotide
  Target: LAMA2; (-) strand; PAM type: YTN; PAM sequence: TTC
agttctagtcattcctactt

SEQ ID NO: 216171 - DNA, 20 bp, Artificial Sequence
  Description of Artificial Sequence: Synthetic oligonucleotide
  Target: LAMA2; (-) strand; PAM type: YTN; PAM sequence: TTT
cagttctagtcattcctact

SEQ ID NO: 216172 - DNA, 20 bp, Artificial Sequence
  Description of Artificial Sequence: Synthetic oligonucleotide
  Target: LAMA2; (-) strand; PAM type: YTN; PAM sequence: CTT
tcagttctagtcattcctac

SEQ ID NO: 216173 - DNA, 20 bp, Artificial Sequence
  Description of Artificial Sequence: Synthetic oligonucleotide
  Target: LAMA2; (-) strand; PAM type: YTN; PAM sequence: TTG
gcactttcagttctagtcat

SEQ ID NO: 216174 - DNA, 20 bp, Artificial Sequence
  Description of Artificial Sequence: Synthetic oligonucleotide
  Target: LAMA2; (-) strand; PAM type: YTN; PAM sequence: TTT
ggcactttcagttctagtca

SEQ ID NO: 216175 - DNA, 20 bp, Artificial Sequence
  Description of Artificial Sequence: Synthetic oligonucleotide
  Target: LAMA2; (-) strand; PAM type: YTN; PAM sequence: CTT
tggcactttcagttctagtc

SEQ ID NO: 216176 - DNA, 20 bp, Artificial Sequence
  Description of Artificial Sequence: Synthetic oligonucleotide
  Target: LAMA2; (-) strand; PAM type: YTN; PAM sequence: CTG
ccctttggcactttcagttc

SEQ ID NO: 216177 - DNA, 20 bp, Artificial Sequence
  Description of Artificial Sequence: Synthetic oligonucleotide
  Target: LAMA2; (-) strand; PAM type: YTN; PAM sequence: CTC
tgccctttggcactttcagt

SEQ ID NO: 216178 - DNA, 20 bp, Artificial Sequence
  Description of Artificial Sequence: Synthetic oligonucleotide
  Target: LAMA2; (-) strand; PAM type: YTN; PAM sequence: CTC
tctgccctttggcactttca

SEQ ID NO: 216179 - DNA, 20 bp, Artificial Sequence
  Description of Artificial Sequence: Synthetic oligonucleotide
  Target: LAMA2; (-) strand; PAM type: YTN; PAM sequence: CTA
ctctctgccctttggcactt

SEQ ID NO: 216180 - DNA, 20 bp, Artificial Sequence
  Description of Artificial Sequence: Synthetic oligonucleotide
  Target: LAMA2; (-) strand; PAM type: YTN; PAM sequence: CTC
tactctctgccctttggcac

SEQ ID NO: 216181 - DNA, 20 bp, Artificial Sequence
  Description of Artificial Sequence: Synthetic oligonucleotide
  Target: LAMA2; (-) strand; PAM type: YTN; PAM sequence: CTC
atctctactctctgcccttt

SEQ ID NO: 216182 - DNA, 20 bp, Artificial Sequence
  Description of Artificial Sequence: Synthetic oligonucleotide
  Target: LAMA2; (-) strand; PAM type: YTN; PAM sequence: CTA
gtctcatctctactctctgc

SEQ ID NO: 216183 - DNA, 20 bp, Artificial Sequence
  Description of Artificial Sequence: Synthetic oligonucleotide
  Target: LAMA2; (-) strand; PAM type: YTN; PAM sequence: CTC
tagtctcatctctactctct

SEQ ID NO: 216184 - DNA, 20 bp, Artificial Sequence
  Description of Artificial Sequence: Synthetic oligonucleotide
  Target: LAMA2; (-) strand; PAM type: YTN; PAM sequence: TTG
ctctagtctcatctctactc

SEQ ID NO: 216185 - DNA, 20 bp, Artificial Sequence
  Description of Artificial Sequence: Synthetic oligonucleotide
  Target: LAMA2; (-) strand; PAM type: YTN; PAM sequence: TTT
gctctagtctcatctctact

SEQ ID NO: 216186 - DNA, 20 bp, Artificial Sequence
  Description of Artificial Sequence: Synthetic oligonucleotide
  Target: LAMA2; (-) strand; PAM type: YTN; PAM sequence: TTT
tgctctagtctcatctctac

SEQ ID NO: 216187 - DNA, 20 bp, Artificial Sequence
  Description of Artificial Sequence: Synthetic oligonucleotide
  Target: LAMA2; (-) strand; PAM type: YTN; PAM sequence: CTT
ttgctctagtctcatctcta

SEQ ID NO: 216188 - DNA, 20 bp, Artificial Sequence
  Description of Artificial Sequence: Synthetic oligonucleotide
  Target: LAMA2; (-) strand; PAM type: YTN; PAM sequence: CTC
cagccttttgctctagtctc

SEQ ID NO: 216189 - DNA, 20 bp, Artificial Sequence
  Description of Artificial Sequence: Synthetic oligonucleotide
  Target: LAMA2; (-) strand; PAM type: YTN; PAM sequence: CTG
gctccagccttttgctctag

SEQ ID NO: 216190 - DNA, 20 bp, Artificial Sequence
  Description of Artificial Sequence: Synthetic oligonucleotide
  Target: LAMA2; (-) strand; PAM type: YTN; PAM sequence: TTC
ataatctggctccagccttt

SEQ ID NO: 216191 - DNA, 20 bp, Artificial Sequence
  Description of Artificial Sequence: Synthetic oligonucleotide
  Target: LAMA2; (-) strand; PAM type: YTN; PAM sequence: CTT
cataatctggctccagcctt

SEQ ID NO: 216192 - DNA, 20 bp, Artificial Sequence
  Description of Artificial Sequence: Synthetic oligonucleotide
  Target: LAMA2; (-) strand; PAM type: YTN; PAM sequence: TTA
aatgccttcataatctggct

SEQ ID NO: 216193 - DNA, 20 bp, Artificial Sequence
  Description of Artificial Sequence: Synthetic oligonucleotide
  Target: LAMA2; (-) strand; PAM type: YTN; PAM sequence: TTG
ttaaatgccttcataatctg

SEQ ID NO: 216194 - DNA, 20 bp, Artificial Sequence
  Description of Artificial Sequence: Synthetic oligonucleotide
  Target: LAMA2; (-) strand; PAM type: YTN; PAM sequence: CTG
tggttgttaaatgccttcat

SEQ ID NO: 216195 - DNA, 20 bp, Artificial Sequence
  Description of Artificial Sequence: Synthetic oligonucleotide
  Target: LAMA2; (-) strand; PAM type: YTN; PAM sequence: CTC
ctgtggttgttaaatgcctt

SEQ ID NO: 216196 - DNA, 20 bp, Artificial Sequence
  Description of Artificial Sequence: Synthetic oligonucleotide
  Target: LAMA2; (-) strand; PAM type: YTN; PAM sequence: TTC
tcctgtggttgttaaatgcc

SEQ ID NO: 216197 - DNA, 20 bp, Artificial Sequence
  Description of Artificial Sequence: Synthetic oligonucleotide
  Target: LAMA2; (-) strand; PAM type: YTN; PAM sequence: CTT
ctcctgtggttgttaaatgc

SEQ ID NO: 216198 - DNA, 20 bp, Artificial Sequence
  Description of Artificial Sequence: Synthetic oligonucleotide
  Target: LAMA2; (-) strand; PAM type: YTN; PAM sequence: CTA
aatcacttctcctgtggttg

SEQ ID NO: 216199 - DNA, 20 bp, Artificial Sequence
  Description of Artificial Sequence: Synthetic oligonucleotide
  Target: LAMA2; (-) strand; PAM type: YTN; PAM sequence: CTC
cctaaatcacttctcctgtg

SEQ ID NO: 216200 - DNA, 20 bp, Artificial Sequence
  Description of Artificial Sequence: Synthetic oligonucleotide
  Target: LAMA2; (-) strand; PAM type: YTN; PAM sequence: CTC
tccctaaatcacttctcctg

SEQ ID NO: 216201 - DNA, 20 bp, Artificial Sequence
  Description of Artificial Sequence: Synthetic oligonucleotide
  Target: LAMA2; (-) strand; PAM type: YTN; PAM sequence: TTA
catggtgcctctccctaaat

SEQ ID NO: 216202 - DNA, 20 bp, Artificial Sequence
  Description of Artificial Sequence: Synthetic oligonucleotide
  Target: LAMA2; (-) strand; PAM type: YTN; PAM sequence: TTT
acatggtgcctctccctaaa

SEQ ID NO: 216203 - DNA, 20 bp, Artificial Sequence
  Description of Artificial Sequence: Synthetic oligonucleotide
  Target: LAMA2; (-) strand; PAM type: YTN; PAM sequence: CTT
tacatggtgcctctccctaa

SEQ ID NO: 216204 - DNA, 20 bp, Artificial Sequence
  Description of Artificial Sequence: Synthetic oligonucleotide
  Target: LAMA2; (-) strand; PAM type: YTN; PAM sequence: CTG
gaaagagggctttacatggt

SEQ ID NO: 216205 - DNA, 20 bp, Artificial Sequence
  Description of Artificial Sequence: Synthetic oligonucleotide
  Target: LAMA2; (-) strand; PAM type: YTN; PAM sequence: TTC
atagaggctggaaagagggc

SEQ ID NO: 216206 - DNA, 20 bp, Artificial Sequence
  Description of Artificial Sequence: Synthetic oligonucleotide
  Target: LAMA2; (-) strand; PAM type: YTN; PAM sequence: CTG
tggttcatagaggctggaaa

SEQ ID NO: 216207 - DNA, 20 bp, Artificial Sequence
  Description of Artificial Sequence: Synthetic oligonucleotide
  Target: LAMA2; (-) strand; PAM type: YTN; PAM sequence: CTG
aggtatcactgtggttcata

SEQ ID NO: 216208 - DNA, 20 bp, Artificial Sequence
  Description of Artificial Sequence: Synthetic oligonucleotide
  Target: LAMA2; (-) strand; PAM type: YTN; PAM sequence: TTG
aataaatacatcaatgagtc

SEQ ID NO: 216209 - DNA, 20 bp, Artificial Sequence
  Description of Artificial Sequence: Synthetic oligonucleotide
  Target: LAMA2; (-) strand; PAM type: YTN; PAM sequence: CTG
ttgaataaatacatcaatga

SEQ ID NO: 216210 - DNA, 20 bp, Artificial Sequence
  Description of Artificial Sequence: Synthetic oligonucleotide
  Target: LAMA2; (-) strand; PAM type: YTN; PAM sequence: TTC
aaaggcctgttgaataaata

SEQ ID NO: 216211 - DNA, 20 bp, Artificial Sequence
  Description of Artificial Sequence: Synthetic oligonucleotide
  Target: LAMA2; (-) strand; PAM type: YTN; PAM sequence: CTA
gtaggaggtgttcaaaggcc

SEQ ID NO: 216212 - DNA, 20 bp, Artificial Sequence
  Description of Artificial Sequence: Synthetic oligonucleotide
  Target: LAMA2; (-) strand; PAM type: YTN; PAM sequence: TTG
ctagtaggaggtgttcaaag

SEQ ID NO: 216213 - DNA, 20 bp, Artificial Sequence
  Description of Artificial Sequence: Synthetic oligonucleotide
  Target: LAMA2; (-) strand; PAM type: YTN; PAM sequence: TTT
gctagtaggaggtgttcaaa

SEQ ID NO: 216214 - DNA, 20 bp, Artificial Sequence
  Description of Artificial Sequence: Synthetic oligonucleotide
  Target: LAMA2; (-) strand; PAM type: YTN; PAM sequence: CTT
tgctagtaggaggtgttcaa

SEQ ID NO: 216215 - DNA, 20 bp, Artificial Sequence
  Description of Artificial Sequence: Synthetic oligonucleotide
  Target: LAMA2; (-) strand; PAM type: YTN; PAM sequence: CTC
caatacaatgctttgctagt

SEQ ID NO: 216216 - DNA, 20 bp, Artificial Sequence
  Description of Artificial Sequence: Synthetic oligonucleotide
  Target: LAMA2; (-) strand; PAM type: YTN; PAM sequence: TTA
tgctccaatacaatgctttg

SEQ ID NO: 216217 - DNA, 20 bp, Artificial Sequence
  Description of Artificial Sequence: Synthetic oligonucleotide
  Target: LAMA2; (-) strand; PAM type: YTN; PAM sequence: TTA
acattatgctccaatacaat

SEQ ID NO: 216218 - DNA, 20 bp, Artificial Sequence
  Description of Artificial Sequence: Synthetic oligonucleotide
  Target: LAMA2; (-) strand; PAM type: YTN; PAM sequence: TTT
aacattatgctccaatacaa

SEQ ID NO: 216219 - DNA, 20 bp, Artificial Sequence
  Description of Artificial Sequence: Synthetic oligonucleotide
  Target: LAMA2; (-) strand; PAM type: YTN; PAM sequence: TTA
tgtgtaatttaacattatgc

SEQ ID NO: 216220 - DNA, 20 bp, Artificial Sequence
  Description of Artificial Sequence: Synthetic oligonucleotide
  Target: LAMA2; (-) strand; PAM type: YTN; PAM sequence: CTG
aatcaggggttatgtgtaat

SEQ ID NO: 216221 - DNA, 20 bp, Artificial Sequence
  Description of Artificial Sequence: Synthetic oligonucleotide
  Target: LAMA2; (-) strand; PAM type: YTN; PAM sequence: CTC
tgaatcaggggttatgtgta

SEQ ID NO: 216222 - DNA, 20 bp, Artificial Sequence
  Description of Artificial Sequence: Synthetic oligonucleotide
  Target: LAMA2; (-) strand; PAM type: YTN; PAM sequence: CTA
ggtcctctgaatcaggggtt

SEQ ID NO: 216223 - DNA, 20 bp, Artificial Sequence
  Description of Artificial Sequence: Synthetic oligonucleotide
  Target: LAMA2; (-) strand; PAM type: YTN; PAM sequence: CTC
taggtcctctgaatcagggg

SEQ ID NO: 216224 - DNA, 20 bp, Artificial Sequence
  Description of Artificial Sequence: Synthetic oligonucleotide
  Target: LAMA2; (-) strand; PAM type: YTN; PAM sequence: TTC
ccctctaggtcctctgaatc

SEQ ID NO: 216225 - DNA, 20 bp, Artificial Sequence
  Description of Artificial Sequence: Synthetic oligonucleotide
  Target: LAMA2; (-) strand; PAM type: YTN; PAM sequence: TTT
cccctctaggtcctctgaat

SEQ ID NO: 216226 - DNA, 20 bp, Artificial Sequence
  Description of Artificial Sequence: Synthetic oligonucleotide
  Target: LAMA2; (-) strand; PAM type: YTN; PAM sequence: CTA
tttcccctctaggtcctctg

SEQ ID NO: 216227 - DNA, 20 bp, Artificial Sequence
  Description of Artificial Sequence: Synthetic oligonucleotide
  Target: LAMA2; (-) strand; PAM type: YTN; PAM sequence: CTC
tatttcccctctaggtcctc

SEQ ID NO: 216228 - DNA, 20 bp, Artificial Sequence
  Description of Artificial Sequence: Synthetic oligonucleotide
  Target: LAMA2; (-) strand; PAM type: YTN; PAM sequence: TTG
cctctatttcccctctaggt

SEQ ID NO: 216229 - DNA, 20 bp, Artificial Sequence
  Description of Artificial Sequence: Synthetic oligonucleotide
  Target: LAMA2; (-) strand; PAM type: YTN; PAM sequence: TTT
gcctctatttcccctctagg

SEQ ID NO: 216230 - DNA, 20 bp, Artificial Sequence
  Description of Artificial Sequence: Synthetic oligonucleotide
  Target: LAMA2; (-) strand; PAM type: YTN; PAM sequence: TTT
tgcctctatttcccctctag

SEQ ID NO: 216231 - DNA, 20 bp, Artificial Sequence
  Description of Artificial Sequence: Synthetic oligonucleotide
  Target: LAMA2; (-) strand; PAM type: YTN; PAM sequence: CTT
ttgcctctatttcccctcta

SEQ ID NO: 216232 - DNA, 20 bp, Artificial Sequence
  Description of Artificial Sequence: Synthetic oligonucleotide
  Target: LAMA2; (-) strand; PAM type: YTN; PAM sequence: TTC
ttttgcctctatttcccctc

SEQ ID NO: 216233 - DNA, 20 bp, Artificial Sequence
  Description of Artificial Sequence: Synthetic oligonucleotide
  Target: LAMA2; (-) strand; PAM type: YTN; PAM sequence: TTT
cttttgcctctatttcccct

SEQ ID NO: 216234 - DNA, 20 bp, Artificial Sequence
  Description of Artificial Sequence: Synthetic oligonucleotide
  Target: LAMA2; (-) strand; PAM type: YTN; PAM sequence: TTT
tcttttgcctctatttcccc

SEQ ID NO: 216235 - DNA, 20 bp, Artificial Sequence
  Description of Artificial Sequence: Synthetic oligonucleotide
  Target: LAMA2; (-) strand; PAM type: YTN; PAM sequence: CTT
ttcttttgcctctatttccc

SEQ ID NO: 216236 - DNA, 20 bp, Artificial Sequence
  Description of Artificial Sequence: Synthetic oligonucleotide
  Target: LAMA2; (-) strand; PAM type: YTN; PAM sequence: TTA
cttttcttttgcctctattt

SEQ ID NO: 216237 - DNA, 20 bp, Artificial Sequence
  Description of Artificial Sequence: Synthetic oligonucleotide
  Target: LAMA2; (-) strand; PAM type: YTN; PAM sequence: TTT
acttttcttttgcctctatt

SEQ ID NO: 216238 - DNA, 20 bp, Artificial Sequence
  Description of Artificial Sequence: Synthetic oligonucleotide
  Target: LAMA2; (-) strand; PAM type: YTN; PAM sequence: CTG
aatttacttttcttttgcct

SEQ ID NO: 216239 - DNA, 20 bp, Artificial Sequence
  Description of Artificial Sequence: Synthetic oligonucleotide
  Target: LAMA2; (-) strand; PAM type: YTN; PAM sequence: TTA
gcactgaatttacttttctt

SEQ ID NO: 216240 - DNA, 20 bp, Artificial Sequence
  Description of Artificial Sequence: Synthetic oligonucleotide
  Target: LAMA2; (-) strand; PAM type: YTN; PAM sequence: TTT
agcactgaatttacttttct

SEQ ID NO: 216241 - DNA, 20 bp, Artificial Sequence
  Description of Artificial Sequence: Synthetic oligonucleotide
  Target: LAMA2; (-) strand; PAM type: YTN; PAM sequence: TTT
tagcactgaatttacttttc

SEQ ID NO: 216242 - DNA, 20 bp, Artificial Sequence
  Description of Artificial Sequence: Synthetic oligonucleotide
  Target: LAMA2; (-) strand; PAM type: YTN; PAM sequence: TTA
ttttagcactgaatttactt

SEQ ID NO: 216243 - DNA, 20 bp, Artificial Sequence
  Description of Artificial Sequence: Synthetic oligonucleotide
  Target: LAMA2; (-) strand; PAM type: YTN; PAM sequence: TTC
atgttattttagcactgaat

SEQ ID NO: 216244 - DNA, 20 bp, Artificial Sequence
  Description of Artificial Sequence: Synthetic oligonucleotide
  Target: LAMA2; (-) strand; PAM type: YTN; PAM sequence: CTA
catggagcattcatgttatt

SEQ ID NO: 216245 - DNA, 20 bp, Artificial Sequence
  Description of Artificial Sequence: Synthetic oligonucleotide
  Target: LAMA2; (-) strand; PAM type: YTN; PAM sequence: TTA
gcatctacatggagcattca

SEQ ID NO: 216246 - DNA, 20 bp, Artificial Sequence
  Description of Artificial Sequence: Synthetic oligonucleotide
  Target: LAMA2; (-) strand; PAM type: YTN; PAM sequence: TTT
agcatctacatggagcattc

SEQ ID NO: 216247 - DNA, 20 bp, Artificial Sequence
  Description of Artificial Sequence: Synthetic oligonucleotide
  Target: LAMA2; (-) strand; PAM type: YTN; PAM sequence: CTT
tagcatctacatggagcatt

SEQ ID NO: 216248 - DNA, 20 bp, Artificial Sequence
  Description of Artificial Sequence: Synthetic oligonucleotide
  Target: LAMA2; (-) strand; PAM type: YTN; PAM sequence: TTA
gatgactttagcatctacat

SEQ ID NO: 216249 - DNA, 20 bp, Artificial Sequence
  Description of Artificial Sequence: Synthetic oligonucleotide
  Target: LAMA2; (-) strand; PAM type: YTN; PAM sequence: TTT
agatgactttagcatctaca

SEQ ID NO: 216250 - DNA, 20 bp, Artificial Sequence
  Description of Artificial Sequence: Synthetic oligonucleotide
  Target: LAMA2; (-) strand; PAM type: YTN; PAM sequence: CTT
tagatgactttagcatctac

SEQ ID NO: 216251 - DNA, 20 bp, Artificial Sequence
  Description of Artificial Sequence: Synthetic oligonucleotide
  Target: LAMA2; (-) strand; PAM type: YTN; PAM sequence: TTA
gccagaaatctttagatgac

SEQ ID NO: 216252 - DNA, 20 bp, Artificial Sequence
  Description of Artificial Sequence: Synthetic oligonucleotide
  Target: LAMA2; (-) strand; PAM type: YTN; PAM sequence: CTT
agccagaaatctttagatga

SEQ ID NO: 216253 - DNA, 20 bp, Artificial Sequence
  Description of Artificial Sequence: Synthetic oligonucleotide
  Target: LAMA2; (-) strand; PAM type: YTN; PAM sequence: TTC
ttagccagaaatctttagat

SEQ ID NO: 216254 - DNA, 20 bp, Artificial Sequence
  Description of Artificial Sequence: Synthetic oligonucleotide
  Target: LAMA2; (-) strand; PAM type: YTN; PAM sequence: TTT
cttagccagaaatctttaga

SEQ ID NO: 216255 - DNA, 20 bp, Artificial Sequence
  Description of Artificial Sequence: Synthetic oligonucleotide
  Target: LAMA2; (-) strand; PAM type: YTN; PAM sequence: TTA
tatatatacagagagagaga

SEQ ID NO: 216256 - DNA, 20 bp, Artificial Sequence
  Description of Artificial Sequence: Synthetic oligonucleotide
  Target: LAMA2; (-) strand; PAM type: YTN; PAM sequence: TTA
tatatatattatatatatac

SEQ ID NO: 216257 - DNA, 20 bp, Artificial Sequence
  Description of Artificial Sequence: Synthetic oligonucleotide
  Target: LAMA2; (-) strand; PAM type: YTN; PAM sequence: TTT
atatatatattatatatata

SEQ ID NO: 216258 - DNA, 20 bp, Artificial Sequence
  Description of Artificial Sequence: Synthetic oligonucleotide
  Target: LAMA2; (-) strand; PAM type: YTN; PAM sequence: TTT
tatatatatattatatatat

SEQ ID NO: 216259 - DNA, 20 bp, Artificial Sequence
  Description of Artificial Sequence: Synthetic oligonucleotide
  Target: LAMA2; (-) strand; PAM type: YTN; PAM sequence: CTA
tatatattttatatatatat

SEQ ID NO: 216260 - DNA, 20 bp, Artificial Sequence
  Description of Artificial Sequence: Synthetic oligonucleotide
  Target: LAMA2; (-) strand; PAM type: YTN; PAM sequence: CTG
ctatatatattttatatata

SEQ ID NO: 216261 - DNA, 20 bp, Artificial Sequence
  Description of Artificial Sequence: Synthetic oligonucleotide
  Target: LAMA2; (-) strand; PAM type: YTN; PAM sequence: CTA
cctgctatatatattttata

SEQ ID NO: 216262 - DNA, 20 bp, Artificial Sequence
  Description of Artificial Sequence: Synthetic oligonucleotide
  Target: LAMA2; (-) strand; PAM type: YTN; PAM sequence: TTA
catataagtatatatctacc

SEQ ID NO: 216263 - DNA, 20 bp, Artificial Sequence
  Description of Artificial Sequence: Synthetic oligonucleotide
  Target: LAMA2; (-) strand; PAM type: YTN; PAM sequence: TTA
tgtagattacatataagtat

SEQ ID NO: 216264 - DNA, 20 bp, Artificial Sequence
  Description of Artificial Sequence: Synthetic oligonucleotide
  Target: LAMA2; (-) strand; PAM type: YTN; PAM sequence: TTT
atgtagattacatataagta

SEQ ID NO: 216265 - DNA, 20 bp, Artificial Sequence
  Description of Artificial Sequence: Synthetic oligonucleotide
  Target: LAMA2; (-) strand; PAM type: YTN; PAM sequence: CTT
tatgtagattacatataagt

SEQ ID NO: 216266 - DNA, 20 bp, Artificial Sequence
  Description of Artificial Sequence: Synthetic oligonucleotide
  Target: LAMA2; (-) strand; PAM type: YTN; PAM sequence: TTA
cctttatgtagattacatat

SEQ ID NO: 216267 - DNA, 20 bp, Artificial Sequence
  Description of Artificial Sequence: Synthetic oligonucleotide
  Target: LAMA2; (-) strand; PAM type: YTN; PAM sequence: TTT
acctttatgtagattacata

SEQ ID NO: 216268 - DNA, 20 bp, Artificial Sequence
  Description of Artificial Sequence: Synthetic oligonucleotide
  Target: LAMA2; (-) strand; PAM type: YTN; PAM sequence: TTT
tacctttatgtagattacat

SEQ ID NO: 216269 - DNA, 20 bp, Artificial Sequence
  Description of Artificial Sequence: Synthetic oligonucleotide
  Target: LAMA2; (-) strand; PAM type: YTN; PAM sequence: TTT
ttacctttatgtagattaca

SEQ ID NO: 216270 - DNA, 20 bp, Artificial Sequence
  Description of Artificial Sequence: Synthetic oligonucleotide
  Target: LAMA2; (-) strand; PAM type: YTN; PAM sequence: TTA
aaaataatataaataaatat

SEQ ID NO: 216271 - DNA, 20 bp, Artificial Sequence
  Description of Artificial Sequence: Synthetic oligonucleotide
  Target: LAMA2; (-) strand; PAM type: YTN; PAM sequence: TTC
attaaaaataatataaataa

SEQ ID NO: 216272 - DNA, 20 bp, Artificial Sequence
  Description of Artificial Sequence: Synthetic oligonucleotide
  Target: LAMA2; (-) strand; PAM type: YTN; PAM sequence: CTG
ttcattaaaaataatataaa

SEQ ID NO: 216273 - DNA, 20 bp, Artificial Sequence
  Description of Artificial Sequence: Synthetic oligonucleotide
  Target: LAMA2; (-) strand; PAM type: YTN; PAM sequence: CTC
aaaaacaaaataaaaataaa

SEQ ID NO: 216274 - DNA, 20 bp, Artificial Sequence
  Description of Artificial Sequence: Synthetic oligonucleotide
  Target: LAMA2; (-) strand; PAM type: YTN; PAM sequence: CTG
cctcaaaaacaaaataaaaa

SEQ ID NO: 216275 - DNA, 20 bp, Artificial Sequence
  Description of Artificial Sequence: Synthetic oligonucleotide
  Target: LAMA2; (-) strand; PAM type: YTN; PAM sequence: TTC
tgcctcaaaaacaaaataaa

SEQ ID NO: 216276 - DNA, 20 bp, Artificial Sequence
  Description of Artificial Sequence: Synthetic oligonucleotide
  Target: LAMA2; (-) strand; PAM type: YTN; PAM sequence: CTG
ggtgacagagtgagattctg

SEQ ID NO: 216277 - DNA, 20 bp, Artificial Sequence
  Description of Artificial Sequence: Synthetic oligonucleotide
  Target: LAMA2; (-) strand; PAM type: YTN; PAM sequence: CTC
cagcctgggtgacagagtga

SEQ ID NO: 216278 - DNA, 20 bp, Artificial Sequence
  Description of Artificial Sequence: Synthetic oligonucleotide
  Target: LAMA2; (-) strand; PAM type: YTN; PAM sequence: CTG
cactccagcctgggtgacag

SEQ ID NO: 216279 - DNA, 20 bp, Artificial Sequence
  Description of Artificial Sequence: Synthetic oligonucleotide
  Target: LAMA2; (-) strand; PAM type: YTN; PAM sequence: CTG
agatcgcaccactgcactcc

SEQ ID NO: 216280 - DNA, 20 bp, Artificial Sequence
  Description of Artificial Sequence: Synthetic oligonucleotide
  Target: LAMA2; (-) strand; PAM type: YTN; PAM sequence: TTG
cagtgagctgagatcgcacc

SEQ ID NO: 216281 - DNA, 20 bp, Artificial Sequence
  Description of Artificial Sequence: Synthetic oligonucleotide
  Target: LAMA2; (-) strand; PAM type: YTN; PAM sequence: TTG
aacccgggagatggcggttg

SEQ ID NO: 216282 - DNA, 20 bp, Artificial Sequence
  Description of Artificial Sequence: Synthetic oligonucleotide
  Target: LAMA2; (-) strand; PAM type: YTN; PAM sequence: CTT
gaacccgggagatggcggtt

SEQ ID NO: 216283 - DNA, 20 bp, Artificial Sequence
  Description of Artificial Sequence: Synthetic oligonucleotide
  Target: LAMA2; (-) strand; PAM type: YTN; PAM sequence: TTG
cttgaacccgggagatggcg

SEQ ID NO: 216284 - DNA, 20 bp, Artificial Sequence
  Description of Artificial Sequence: Synthetic oligonucleotide
  Target: LAMA2; (-) strand; PAM type: YTN; PAM sequence: CTG
aggcaggagaattgcttgaa

SEQ ID NO: 216285 - DNA, 20 bp, Artificial Sequence
  Description of Artificial Sequence: Synthetic oligonucleotide
  Target: LAMA2; (-) strand; PAM type: YTN; PAM sequence: CTC
gggaggctgaggcaggagaa

SEQ ID NO: 216286 - DNA, 20 bp, Artificial Sequence
  Description of Artificial Sequence: Synthetic oligonucleotide
  Target: LAMA2; (-) strand; PAM type: YTN; PAM sequence: CTA
ctcgggaggctgaggcagga

SEQ ID NO: 216287 - DNA, 20 bp, Artificial Sequence
  Description of Artificial Sequence: Synthetic oligonucleotide
  Target: LAMA2; (-) strand; PAM type: YTN; PAM sequence: CTG
taatccagctactcgggagg

SEQ ID NO: 216288 - DNA, 20 bp, Artificial Sequence
  Description of Artificial Sequence: Synthetic oligonucleotide
  Target: LAMA2; (-) strand; PAM type: YTN; PAM sequence: TTG
aaatacaaaaaatagccagg

SEQ ID NO: 216289 - DNA, 20 bp, Artificial Sequence
  Description of Artificial Sequence: Synthetic oligonucleotide
  Target: LAMA2; (-) strand; PAM type: YTN; PAM sequence: CTT
gaaatacaaaaaatagccag

SEQ ID NO: 216290 - DNA, 20 bp, Artificial Sequence
  Description of Artificial Sequence: Synthetic oligonucleotide
  Target: LAMA2; (-) strand; PAM type: YTN; PAM sequence: CTA
cttgaaatacaaaaaatagc

SEQ ID NO: 216291 - DNA, 20 bp, Artificial Sequence
  Description of Artificial Sequence: Synthetic oligonucleotide
  Target: LAMA2; (-) strand; PAM type: YTN; PAM sequence: TTC
tacttgaaatacaaaaaata

SEQ ID NO: 216292 - DNA, 20 bp, Artificial Sequence
  Description of Artificial Sequence: Synthetic oligonucleotide
  Target: LAMA2; (-) strand; PAM type: YTN; PAM sequence: TTT
ctacttgaaatacaaaaaat

SEQ ID NO: 216293 - DNA, 20 bp, Artificial Sequence
  Description of Artificial Sequence: Synthetic oligonucleotide
  Target: LAMA2; (-) strand; PAM type: YTN; PAM sequence: CTG
gccaacatggtaaaacccca

SEQ ID NO: 216294 - DNA, 20 bp, Artificial Sequence
  Description of Artificial Sequence: Synthetic oligonucleotide
  Target: LAMA2; (-) strand; PAM type: YTN; PAM sequence: TTG
agaccagcctggccaacatg

SEQ ID NO: 216295 - DNA, 20 bp, Artificial Sequence
  Description of Artificial Sequence: Synthetic oligonucleotide
  Target: LAMA2; (-) strand; PAM type: YTN; PAM sequence: TTT
gagaccagcctggccaacat

SEQ ID NO: 216296 - DNA, 20 bp, Artificial Sequence
  Description of Artificial Sequence: Synthetic oligonucleotide
  Target: LAMA2; (-) strand; PAM type: YTN; PAM sequence: TTG
aggtcaggagtttgagacca

SEQ ID NO: 216297 - DNA, 20 bp, Artificial Sequence
  Description of Artificial Sequence: Synthetic oligonucleotide
  Target: LAMA2; (-) strand; PAM type: YTN; PAM sequence: CTT
gaggtcaggagtttgagacc

SEQ ID NO: 216298 - DNA, 20 bp, Artificial Sequence
  Description of Artificial Sequence: Synthetic oligonucleotide
  Target: LAMA2; (-) strand; PAM type: YTN; PAM sequence: CTG
aagcgggtgatcacttgagg

SEQ ID NO: 216299 - DNA, 20 bp, Artificial Sequence
  Description of Artificial Sequence: Synthetic oligonucleotide
  Target: LAMA2; (-) strand; PAM type: YTN; PAM sequence: TTG
ggaggctgaagcgggtgatc

SEQ ID NO: 216300 - DNA, 20 bp, Artificial Sequence
  Description of Artificial Sequence: Synthetic oligonucleotide
  Target: LAMA2; (-) strand; PAM type: YTN; PAM sequence: CTA
ttgggaggctgaagcgggtg

SEQ ID NO: 216301 - DNA, 20 bp, Artificial Sequence
  Description of Artificial Sequence: Synthetic oligonucleotide
  Target: LAMA2; (-) strand; PAM type: YTN; PAM sequence: TTA
acaaaaaatatatctattgg

SEQ ID NO: 216302 - DNA, 20 bp, Artificial Sequence
  Description of Artificial Sequence: Synthetic oligonucleotide
  Target: LAMA2; (-) strand; PAM type: YTN; PAM sequence: TTA
tatatgaaataatattaaca

SEQ ID NO: 216303 - DNA, 20 bp, Artificial Sequence
  Description of Artificial Sequence: Synthetic oligonucleotide
  Target: LAMA2; (-) strand; PAM type: YTN; PAM sequence: TTA
atatattatatatgaaataa

SEQ ID NO: 216304 - DNA, 20 bp, Artificial Sequence
  Description of Artificial Sequence: Synthetic oligonucleotide
  Target: LAMA2; (-) strand; PAM type: YTN; PAM sequence: TTT
aatatattatatatgaaata

SEQ ID NO: 216305 - DNA, 20 bp, Artificial Sequence
  Description of Artificial Sequence: Synthetic oligonucleotide
  Target: LAMA2; (-) strand; PAM type: YTN; PAM sequence: TTT
taatatattatatatgaaat

SEQ ID NO: 216306 - DNA, 20 bp, Artificial Sequence
  Description of Artificial Sequence: Synthetic oligonucleotide
  Target: LAMA2; (-) strand; PAM type: YTN; PAM sequence: CTT
ttaatatattatatatgaaa

SEQ ID NO: 216307 - DNA, 20 bp, Artificial Sequence
  Description of Artificial Sequence: Synthetic oligonucleotide
  Target: LAMA2; (-) strand; PAM type: YTN; PAM sequence: CTA
ccttttaatatattatatat

SEQ ID NO: 216308 - DNA, 20 bp, Artificial Sequence
  Description of Artificial Sequence: Synthetic oligonucleotide
  Target: LAMA2; (-) strand; PAM type: YTN; PAM sequence: CTA
catataatatatatctacct

SEQ ID NO: 216309 - DNA, 20 bp, Artificial Sequence
  Description of Artificial Sequence: Synthetic oligonucleotide
  Target: LAMA2; (-) strand; PAM type: YTN; PAM sequence: CTC
tacatataatatatatctac

SEQ ID NO: 216310 - DNA, 20 bp, Artificial Sequence
  Description of Artificial Sequence: Synthetic oligonucleotide
  Target: LAMA2; (-) strand; PAM type: YTN; PAM sequence: CTC
tctacatataatatatatct

SEQ ID NO: 216311 - DNA, 20 bp, Artificial Sequence
  Description of Artificial Sequence: Synthetic oligonucleotide
  Target: LAMA2; (-) strand; PAM type: YTN; PAM sequence: CTA
tagatatgtaaaatatatct

SEQ ID NO: 216312 - DNA, 20 bp, Artificial Sequence
  Description of Artificial Sequence: Synthetic oligonucleotide
  Target: LAMA2; (-) strand; PAM type: YTN; PAM sequence: CTA
tagatcgatctatagatatg

SEQ ID NO: 216313 - DNA, 20 bp, Artificial Sequence
  Description of Artificial Sequence: Synthetic oligonucleotide
  Target: LAMA2; (-) strand; PAM type: YTN; PAM sequence: CTA
tagatatagatatctataga

SEQ ID NO: 216314 - DNA, 20 bp, Artificial Sequence
  Description of Artificial Sequence: Synthetic oligonucleotide
  Target: LAMA2; (-) strand; PAM type: YTN; PAM sequence: CTA
tagatcgatctatagatata

SEQ ID NO: 216315 - DNA, 20 bp, Artificial Sequence
  Description of Artificial Sequence: Synthetic oligonucleotide
  Target: LAMA2; (-) strand; PAM type: YTN; PAM sequence: CTA
tagatatagatatctataga

SEQ ID NO: 216316 - DNA, 20 bp, Artificial Sequence
  Description of Artificial Sequence: Synthetic oligonucleotide
  Target: LAMA2; (-) strand; PAM type: YTN; PAM sequence: CTA
tctatagatatagatatcta

SEQ ID NO: 216317 - DNA, 20 bp, Artificial Sequence
  Description of Artificial Sequence: Synthetic oligonucleotide
  Target: LAMA2; (-) strand; PAM type: YTN; PAM sequence: CTA
tatatctatctatagatata

SEQ ID NO: 216318 - DNA, 20 bp, Artificial Sequence
  Description of Artificial Sequence: Synthetic oligonucleotide
  Target: LAMA2; (-) strand; PAM type: YTN; PAM sequence: CTC
tatatatctatctatagata

SEQ ID NO: 216319 - DNA, 20 bp, Artificial Sequence
  Description of Artificial Sequence: Synthetic oligonucleotide
  Target: LAMA2; (-) strand; PAM type: YTN; PAM sequence: CTG
gcctctatatatctatctat

SEQ ID NO: 216320 - DNA, 20 bp, Artificial Sequence
  Description of Artificial Sequence: Synthetic oligonucleotide
  Target: LAMA2; (-) strand; PAM type: YTN; PAM sequence: TTC
tggcctctatatatctatct

SEQ ID NO: 216321 - DNA, 20 bp, Artificial Sequence
  Description of Artificial Sequence: Synthetic oligonucleotide
  Target: LAMA2; (-) strand; PAM type: YTN; PAM sequence: TTT
ctggcctctatatatctatc

SEQ ID NO: 216322 - DNA, 20 bp, Artificial Sequence
  Description of Artificial Sequence: Synthetic oligonucleotide
  Target: LAMA2; (-) strand; PAM type: YTN; PAM sequence: CTT
tctggcctctatatatctat

SEQ ID NO: 216323 - DNA, 20 bp, Artificial Sequence
  Description of Artificial Sequence: Synthetic oligonucleotide
  Target: LAMA2; (-) strand; PAM type: YTN; PAM sequence: TTA
ctttctggcctctatatatc

SEQ ID NO: 216324 - DNA, 20 bp, Artificial Sequence
  Description of Artificial Sequence: Synthetic oligonucleotide
  Target: LAMA2; (-) strand; PAM type: YTN; PAM sequence: TTT
actttctggcctctatatat

SEQ ID NO: 216325 - DNA, 20 bp, Artificial Sequence
  Description of Artificial Sequence: Synthetic oligonucleotide
  Target: LAMA2; (-) strand; PAM type: YTN; PAM sequence: TTC
atttactttctggcctctat

SEQ ID NO: 216326 - DNA, 20 bp, Artificial Sequence
  Description of Artificial Sequence: Synthetic oligonucleotide
  Target: LAMA2; (-) strand; PAM type: YTN; PAM sequence: CTA
ataatccatcaattcattta

SEQ ID NO: 216327 - DNA, 20 bp, Artificial Sequence
  Description of Artificial Sequence: Synthetic oligonucleotide
  Target: LAMA2; (-) strand; PAM type: YTN; PAM sequence: CTG
aaactaataatccatcaatt

SEQ ID NO: 216328 - DNA, 20 bp, Artificial Sequence
  Description of Artificial Sequence: Synthetic oligonucleotide
  Target: LAMA2; (-) strand; PAM type: YTN; PAM sequence: CTA
atgaacctgaaactaataat

SEQ ID NO: 216329 - DNA, 20 bp, Artificial Sequence
  Description of Artificial Sequence: Synthetic oligonucleotide
  Target: LAMA2; (-) strand; PAM type: YTN; PAM sequence: TTG
cctaatgaacctgaaactaa

SEQ ID NO: 216330 - DNA, 20 bp, Artificial Sequence
  Description of Artificial Sequence: Synthetic oligonucleotide
  Target: LAMA2; (-) strand; PAM type: YTN; PAM sequence: CTT
gcctaatgaacctgaaacta

SEQ ID NO: 216331 - DNA, 20 bp, Artificial Sequence
  Description of Artificial Sequence: Synthetic oligonucleotide
  Target: LAMA2; (-) strand; PAM type: YTN; PAM sequence: TTA
tcatcttgcctaatgaacct

SEQ ID NO: 216332 - DNA, 20 bp, Artificial Sequence
  Description of Artificial Sequence: Synthetic oligonucleotide
  Target: LAMA2; (-) strand; PAM type: YTN; PAM sequence: TTT
atcatcttgcctaatgaacc

SEQ ID NO: 216333 - DNA, 20 bp, Artificial Sequence
  Description of Artificial Sequence: Synthetic oligonucleotide
  Target: LAMA2; (-) strand; PAM type: YTN; PAM sequence: CTT
tatcatcttgcctaatgaac

SEQ ID NO: 216334 - DNA, 20 bp, Artificial Sequence
  Description of Artificial Sequence: Synthetic oligonucleotide
  Target: LAMA2; (-) strand; PAM type: YTN; PAM sequence: CTC
catcaggctttatcatcttg

SEQ ID NO: 216335 - DNA, 20 bp, Artificial Sequence
  Description of Artificial Sequence: Synthetic oligonucleotide
  Target: LAMA2; (-) strand; PAM type: YTN; PAM sequence: TTC
cctccatcaggctttatcat

SEQ ID NO: 216336 - DNA, 20 bp, Artificial Sequence
  Description of Artificial Sequence: Synthetic oligonucleotide
  Target: LAMA2; (-) strand; PAM type: YTN; PAM sequence: TTT
ccctccatcaggctttatca

SEQ ID NO: 216337 - DNA, 20 bp, Artificial Sequence
  Description of Artificial Sequence: Synthetic oligonucleotide
  Target: LAMA2; (-) strand; PAM type: YTN; PAM sequence: CTG
aaccaatggtggtttccctc

SEQ ID NO: 216338 - DNA, 20 bp, Artificial Sequence
  Description of Artificial Sequence: Synthetic oligonucleotide
  Target: LAMA2; (-) strand; PAM type: YTN; PAM sequence: CTC
tgaaccaatggtggtttccc

SEQ ID NO: 216339 - DNA, 20 bp, Artificial Sequence
  Description of Artificial Sequence: Synthetic oligonucleotide
  Target: LAMA2; (-) strand; PAM type: YTN; PAM sequence: TTC
aaggccaccagtctctgaac

SEQ ID NO: 216340 - DNA, 20 bp, Artificial Sequence
  Description of Artificial Sequence: Synthetic oligonucleotide
  Target: LAMA2; (-) strand; PAM type: YTN; PAM sequence: TTT
caaggccaccagtctctgaa

SEQ ID NO: 216341 - DNA, 20 bp, Artificial Sequence
  Description of Artificial Sequence: Synthetic oligonucleotide
  Target: LAMA2; (-) strand; PAM type: YTN; PAM sequence: TTT
tcaaggccaccagtctctga

SEQ ID NO: 216342 - DNA, 20 bp, Artificial Sequence
  Description of Artificial Sequence: Synthetic oligonucleotide
  Target: LAMA2; (-) strand; PAM type: YTN; PAM sequence: TTC
atgaaattttcaaggccacc

SEQ ID NO: 216343 - DNA, 20 bp, Artificial Sequence
  Description of Artificial Sequence: Synthetic oligonucleotide
  Target: LAMA2; (-) strand; PAM type: YTN; PAM sequence: CTT
catgaaattttcaaggccac

SEQ ID NO: 216344 - DNA, 20 bp, Artificial Sequence
  Description of Artificial Sequence: Synthetic oligonucleotide
  Target: LAMA2; (-) strand; PAM type: YTN; PAM sequence: TTC
ttcatgaaattttcaaggcc

SEQ ID NO: 216345 - DNA, 20 bp, Artificial Sequence
  Description of Artificial Sequence: Synthetic oligonucleotide
  Target: LAMA2; (-) strand; PAM type: YTN; PAM sequence: CTC
atattcttcatgaaattttc

SEQ ID NO: 216346 - DNA, 20 bp, Artificial Sequence
  Description of Artificial Sequence: Synthetic oligonucleotide
  Target: LAMA2; (-) strand; PAM type: YTN; PAM sequence: TTC
tcatattcttcatgaaattt

SEQ ID NO: 216347 - DNA, 20 bp, Artificial Sequence
  Description of Artificial Sequence: Synthetic oligonucleotide
  Target: LAMA2; (-) strand; PAM type: YTN; PAM sequence: TTT
ctcatattcttcatgaaatt

SEQ ID NO: 216348 - DNA, 20 bp, Artificial Sequence
  Description of Artificial Sequence: Synthetic oligonucleotide
  Target: LAMA2; (-) strand; PAM type: YTN; PAM sequence: CTT
tctcatattcttcatgaaat

SEQ ID NO: 216349 - DNA, 20 bp, Artificial Sequence
  Description of Artificial Sequence: Synthetic oligonucleotide
  Target: LAMA2; (-) strand; PAM type: YTN; PAM sequence: CTG
ggctttctcatattcttcat

SEQ ID NO: 216350 - DNA, 20 bp, Artificial Sequence
  Description of Artificial Sequence: Synthetic oligonucleotide
  Target: LAMA2; (-) strand; PAM type: YTN; PAM sequence: TTC
atgcccctgggctttctcat

SEQ ID NO: 216351 - DNA, 20 bp, Artificial Sequence
  Description of Artificial Sequence: Synthetic oligonucleotide
  Target: LAMA2; (-) strand; PAM type: YTN; PAM sequence: CTC
cgttcatgcccctgggcttt

SEQ ID NO: 216352 - DNA, 20 bp, Artificial Sequence
  Description of Artificial Sequence: Synthetic oligonucleotide
  Target: LAMA2; (-) strand; PAM type: YTN; PAM sequence: CTC
cccacaactccgttcatgcc

SEQ ID NO: 216353 - DNA, 20 bp, Artificial Sequence
  Description of Artificial Sequence: Synthetic oligonucleotide
  Target: LAMA2; (-) strand; PAM type: YTN; PAM sequence: CTC
ctccccacaactccgttcat

SEQ ID NO: 216354 - DNA, 20 bp, Artificial Sequence
  Description of Artificial Sequence: Synthetic oligonucleotide
  Target: LAMA2; (-) strand; PAM type: YTN; PAM sequence: CTC
gcacctcctccccacaactc

SEQ ID NO: 216355 - DNA, 20 bp, Artificial Sequence
  Description of Artificial Sequence: Synthetic oligonucleotide
  Target: LAMA2; (-) strand; PAM type: YTN; PAM sequence: CTA
cacactcgcacctcctcccc

SEQ ID NO: 216356 - DNA, 20 bp, Artificial Sequence
  Description of Artificial Sequence: Synthetic oligonucleotide
  Target: LAMA2; (-) strand; PAM type: YTN; PAM sequence: CTA
aacacacatctacacactcg

SEQ ID NO: 216357 - DNA, 20 bp, Artificial Sequence
  Description of Artificial Sequence: Synthetic oligonucleotide
  Target: LAMA2; (-) strand; PAM type: YTN; PAM sequence: CTG
cacagcccatcctaaacaca

SEQ ID NO: 216358 - DNA, 20 bp, Artificial Sequence
  Description of Artificial Sequence: Synthetic oligonucleotide
  Target: LAMA2; (-) strand; PAM type: YTN; PAM sequence: CTC
cccgtctgcacagcccatcc

SEQ ID NO: 216359 - DNA, 20 bp, Artificial Sequence
  Description of Artificial Sequence: Synthetic oligonucleotide
  Target: LAMA2; (-) strand; PAM type: YTN; PAM sequence: TTC
tccccgtctgcacagcccat

SEQ ID NO: 216360 - DNA, 20 bp, Artificial Sequence
  Description of Artificial Sequence: Synthetic oligonucleotide
  Target: LAMA2; (-) strand; PAM type: YTN; PAM sequence: CTA
attctccccgtctgcacagc

SEQ ID NO: 216361 - DNA, 20 bp, Artificial Sequence
  Description of Artificial Sequence: Synthetic oligonucleotide
  Target: LAMA2; (-) strand; PAM type: YTN; PAM sequence: CTC
taattctccccgtctgcaca

SEQ ID NO: 216362 - DNA, 20 bp, Artificial Sequence
  Description of Artificial Sequence: Synthetic oligonucleotide
  Target: LAMA2; (-) strand; PAM type: YTN; PAM sequence: CTC
tctaattctccccgtctgca

SEQ ID NO: 216363 - DNA, 20 bp, Artificial Sequence
  Description of Artificial Sequence: Synthetic oligonucleotide
  Target: LAMA2; (-) strand; PAM type: YTN; PAM sequence: TTA
tctctctaattctccccgtc

SEQ ID NO: 216364 - DNA, 20 bp, Artificial Sequence
  Description of Artificial Sequence: Synthetic oligonucleotide
  Target: LAMA2; (-) strand; PAM type: YTN; PAM sequence: TTT
atctctctaattctccccgt

SEQ ID NO: 216365 - DNA, 20 bp, Artificial Sequence
  Description of Artificial Sequence: Synthetic oligonucleotide
  Target: LAMA2; (-) strand; PAM type: YTN; PAM sequence: TTT
tatctctctaattctccccg

SEQ ID NO: 216366 - DNA, 20 bp, Artificial Sequence
  Description of Artificial Sequence: Synthetic oligonucleotide
  Target: LAMA2; (-) strand; PAM type: YTN; PAM sequence: TTA
catattttatctctctaatt

SEQ ID NO: 216367 - DNA, 20 bp, Artificial Sequence
  Description of Artificial Sequence: Synthetic oligonucleotide
  Target: LAMA2; (-) strand; PAM type: YTN; PAM sequence: TTT
acatattttatctctctaat

SEQ ID NO: 216368 - DNA, 20 bp, Artificial Sequence
  Description of Artificial Sequence: Synthetic oligonucleotide
  Target: LAMA2; (-) strand; PAM type: YTN; PAM sequence: TTT
tacatattttatctctctaa

SEQ ID NO: 216369 - DNA, 20 bp, Artificial Sequence
  Description of Artificial Sequence: Synthetic oligonucleotide
  Target: LAMA2; (-) strand; PAM type: YTN; PAM sequence: TTA
tggttttacatattttatct

SEQ ID NO: 216370 - DNA, 20 bp, Artificial Sequence
  Description of Artificial Sequence: Synthetic oligonucleotide
  Target: LAMA2; (-) strand; PAM type: YTN; PAM sequence: CTT
atggttttacatattttatc

SEQ ID NO: 216371 - DNA, 20 bp, Artificial Sequence
  Description of Artificial Sequence: Synthetic oligonucleotide
  Target: LAMA2; (-) strand; PAM type: YTN; PAM sequence: CTG
catacatatacacacactta

SEQ ID NO: 216372 - DNA, 20 bp, Artificial Sequence
  Description of Artificial Sequence: Synthetic oligonucleotide
  Target: LAMA2; (-) strand; PAM type: YTN; PAM sequence: CTA
catatatatatatatacctg

SEQ ID NO: 216373 - DNA, 20 bp, Artificial Sequence
  Description of Artificial Sequence: Synthetic oligonucleotide
  Target: LAMA2; (-) strand; PAM type: YTN; PAM sequence: CTC
tacatatatatatatatacc

SEQ ID NO: 216374 - DNA, 20 bp, Artificial Sequence
  Description of Artificial Sequence: Synthetic oligonucleotide
  Target: LAMA2; (-) strand; PAM type: YTN; PAM sequence: CTC
tctacatatatatatatata

SEQ ID NO: 216375 - DNA, 20 bp, Artificial Sequence
  Description of Artificial Sequence: Synthetic oligonucleotide
  Target: LAMA2; (-) strand; PAM type: YTN; PAM sequence: CTC
tctctacatatatatatata

SEQ ID NO: 216376 - DNA, 20 bp, Artificial Sequence
  Description of Artificial Sequence: Synthetic oligonucleotide
  Target: LAMA2; (-) strand; PAM type: YTN; PAM sequence: CTC
tctctctacatatatatata

SEQ ID NO: 216377 - DNA, 20 bp, Artificial Sequence
  Description of Artificial Sequence: Synthetic oligonucleotide
  Target: LAMA2; (-) strand; PAM type: YTN; PAM sequence: CTC
tctctctctacatatatata

SEQ ID NO: 216378 - DNA, 20 bp, Artificial Sequence
  Description of Artificial Sequence: Synthetic oligonucleotide
  Target: LAMA2; (-) strand; PAM type: YTN; PAM sequence: CTC
tctctctctctacatatata

SEQ ID NO: 216379 - DNA, 20 bp, Artificial Sequence
  Description of Artificial Sequence: Synthetic oligonucleotide
  Target: LAMA2; (-) strand; PAM type: YTN; PAM sequence: TTC
tctctctctctctacatata

SEQ ID NO: 216380 - DNA, 20 bp, Artificial Sequence
  Description of Artificial Sequence: Synthetic oligonucleotide
  Target: LAMA2; (-) strand; PAM type: YTN; PAM sequence: TTT
ctctctctctctctacatat

SEQ ID NO: 216381 - DNA, 20 bp, Artificial Sequence
  Description of Artificial Sequence: Synthetic oligonucleotide
  Target: LAMA2; (-) strand; PAM type: YTN; PAM sequence: CTT
tctctctctctctctacata

SEQ ID NO: 216382 - DNA, 20 bp, Artificial Sequence
  Description of Artificial Sequence: Synthetic oligonucleotide
  Target: LAMA2; (-) strand; PAM type: YTN; PAM sequence: CTC
ctttctctctctctctctac

SEQ ID NO: 216383 - DNA, 20 bp, Artificial Sequence
  Description of Artificial Sequence: Synthetic oligonucleotide
  Target: LAMA2; (-) strand; PAM type: YTN; PAM sequence: TTA
cctcctttctctctctctct

SEQ ID NO: 216384 - DNA, 20 bp, Artificial Sequence
  Description of Artificial Sequence: Synthetic oligonucleotide
  Target: LAMA2; (-) strand; PAM type: YTN; PAM sequence: TTA
ttacctcctttctctctctc

SEQ ID NO: 216385 - DNA, 20 bp, Artificial Sequence
  Description of Artificial Sequence: Synthetic oligonucleotide
  Target: LAMA2; (-) strand; PAM type: YTN; PAM sequence: TTC
acgttattacctcctttctc

SEQ ID NO: 216386 - DNA, 20 bp, Artificial Sequence
  Description of Artificial Sequence: Synthetic oligonucleotide
  Target: LAMA2; (-) strand; PAM type: YTN; PAM sequence: TTA
agtattcacgttattacctc

SEQ ID NO: 216387 - DNA, 20 bp, Artificial Sequence
  Description of Artificial Sequence: Synthetic oligonucleotide
  Target: LAMA2; (-) strand; PAM type: YTN; PAM sequence: TTG
gcattaagtattcacgttat

SEQ ID NO: 216388 - DNA, 20 bp, Artificial Sequence
  Description of Artificial Sequence: Synthetic oligonucleotide
  Target: LAMA2; (-) strand; PAM type: YTN; PAM sequence: CTT
ggcattaagtattcacgtta

SEQ ID NO: 216389 - DNA, 20 bp, Artificial Sequence
  Description of Artificial Sequence: Synthetic oligonucleotide
  Target: LAMA2; (-) strand; PAM type: YTN; PAM sequence: CTC
acttggcattaagtattcac

SEQ ID NO: 216390 - DNA, 20 bp, Artificial Sequence
  Description of Artificial Sequence: Synthetic oligonucleotide
  Target: LAMA2; (-) strand; PAM type: YTN; PAM sequence: TTC
acctcacttggcattaagta

SEQ ID NO: 216391 - DNA, 20 bp, Artificial Sequence
  Description of Artificial Sequence: Synthetic oligonucleotide
  Target: LAMA2; (-) strand; PAM type: YTN; PAM sequence: TTA
cccccatcatagttcacctc

SEQ ID NO: 216392 - DNA, 20 bp, Artificial Sequence
  Description of Artificial Sequence: Synthetic oligonucleotide
  Target: LAMA2; (-) strand; PAM type: YTN; PAM sequence: TTT
acccccatcatagttcacct

SEQ ID NO: 216393 - DNA, 20 bp, Artificial Sequence
  Description of Artificial Sequence: Synthetic oligonucleotide
  Target: LAMA2; (-) strand; PAM type: YTN; PAM sequence: CTT
tacccccatcatagttcacc

SEQ ID NO: 216394 - DNA, 20 bp, Artificial Sequence
  Description of Artificial Sequence: Synthetic oligonucleotide
  Target: LAMA2; (-) strand; PAM type: YTN; PAM sequence: TTG
tgaagctttacccccatcat

SEQ ID NO: 216395 - DNA, 20 bp, Artificial Sequence
  Description of Artificial Sequence: Synthetic oligonucleotide
  Target: LAMA2; (-) strand; PAM type: YTN; PAM sequence: TTA
aaataatataattgtgaagc

SEQ ID NO: 216396 - DNA, 20 bp, Artificial Sequence
  Description of Artificial Sequence: Synthetic oligonucleotide
  Target: LAMA2; (-) strand; PAM type: YTN; PAM sequence: TTT
aaaataatataattgtgaag

SEQ ID NO: 216397 - DNA, 20 bp, Artificial Sequence
  Description of Artificial Sequence: Synthetic oligonucleotide
  Target: LAMA2; (-) strand; PAM type: YTN; PAM sequence: TTT
taaaataatataattgtgaa

SEQ ID NO: 216398 - DNA, 20 bp, Artificial Sequence
  Description of Artificial Sequence: Synthetic oligonucleotide
  Target: LAMA2; (-) strand; PAM type: YTN; PAM sequence: CTA
agcaaattttaaaataatat

SEQ ID NO: 216399 - DNA, 20 bp, Artificial Sequence
  Description of Artificial Sequence: Synthetic oligonucleotide
  Target: LAMA2; (-) strand; PAM type: YTN; PAM sequence: CTA
aaaaaaaaaaaaaaaaaagg

SEQ ID NO: 216400 - DNA, 20 bp, Artificial Sequence
  Description of Artificial Sequence: Synthetic oligonucleotide
  Target: LAMA2; (-) strand; PAM type: YTN; PAM sequence: CTG
cctaaaaaaaaaaaaaaaaa

SEQ ID NO: 216401 - DNA, 20 bp, Artificial Sequence
  Description of Artificial Sequence: Synthetic oligonucleotide
  Target: LAMA2; (-) strand; PAM type: YTN; PAM sequence: CTC
tgcctaaaaaaaaaaaaaaa

SEQ ID NO: 216402 - DNA, 20 bp, Artificial Sequence
  Description of Artificial Sequence: Synthetic oligonucleotide
  Target: LAMA2; (-) strand; PAM type: YTN; PAM sequence: CTG
ggcgacagagcgaaactctg

SEQ ID NO: 216403 - DNA, 20 bp, Artificial Sequence
  Description of Artificial Sequence: Synthetic oligonucleotide
  Target: LAMA2; (-) strand; PAM type: YTN; PAM sequence: CTG
cagcctgggcgacagagcga

SEQ ID NO: 216404 - DNA, 20 bp, Artificial Sequence
  Description of Artificial Sequence: Synthetic oligonucleotide
  Target: LAMA2; (-) strand; PAM type: YTN; PAM sequence: CTG
cactgcagcctgggcgacag

SEQ ID NO: 216405 - DNA, 20 bp, Artificial Sequence
  Description of Artificial Sequence: Synthetic oligonucleotide
  Target: LAMA2; (-) strand; PAM type: YTN; PAM sequence: TTG
cagtgagccgagatcgcgcc

SEQ ID NO: 216406 - DNA, 20 bp, Artificial Sequence
  Description of Artificial Sequence: Synthetic oligonucleotide
  Target: LAMA2; (-) strand; PAM type: YTN; PAM sequence: CTT
gcagtgagccgagatcgcgc

SEQ ID NO: 216407 - DNA, 20 bp, Artificial Sequence
  Description of Artificial Sequence: Synthetic oligonucleotide
  Target: LAMA2; (-) strand; PAM type: YTN; PAM sequence: CTG
aggcaagagaatggcgtgaa

SEQ ID NO: 216408 - DNA, 20 bp, Artificial Sequence
  Description of Artificial Sequence: Synthetic oligonucleotide
  Target: LAMA2; (-) strand; PAM type: YTN; PAM sequence: CTG
gggaggctgaggcaagagaa

SEQ ID NO: 216409 - DNA, 20 bp, Artificial Sequence
  Description of Artificial Sequence: Synthetic oligonucleotide
  Target: LAMA2; (-) strand; PAM type: YTN; PAM sequence: CTG
ctggggaggctgaggcaaga

SEQ ID NO: 216410 - DNA, 20 bp, Artificial Sequence
  Description of Artificial Sequence: Synthetic oligonucleotide
  Target: LAMA2; (-) strand; PAM type: YTN; PAM sequence: CTG
cagtcccagctgctggggag

SEQ ID NO: 216411 - DNA, 20 bp, Artificial Sequence
  Description of Artificial Sequence: Synthetic oligonucleotide
  Target: LAMA2; (-) strand; PAM type: YTN; PAM sequence: TTA
gccgggcgtggcaacgtgcg

SEQ ID NO: 216412 - DNA, 20 bp, Artificial Sequence
  Description of Artificial Sequence: Synthetic oligonucleotide
  Target: LAMA2; (-) strand; PAM type: YTN; PAM sequence: CTA
aaaatacaaaaaaaaaaaaa

SEQ ID NO: 216413 - DNA, 20 bp, Artificial Sequence
  Description of Artificial Sequence: Synthetic oligonucleotide
  Target: LAMA2; (-) strand; PAM type: YTN; PAM sequence: CTC
aactaaaaatacaaaaaaaa

SEQ ID NO: 216414 - DNA, 20 bp, Artificial Sequence
  Description of Artificial Sequence: Synthetic oligonucleotide
  Target: LAMA2; (-) strand; PAM type: YTN; PAM sequence: CTA
acacggtgaaaccccgtctc

SEQ ID NO: 216415 - DNA, 20 bp, Artificial Sequence
  Description of Artificial Sequence: Synthetic oligonucleotide
  Target: LAMA2; (-) strand; PAM type: YTN; PAM sequence: CTA
gctaacacggtgaaaccccg

SEQ ID NO: 216416 - DNA, 20 bp, Artificial Sequence
  Description of Artificial Sequence: Synthetic oligonucleotide
  Target: LAMA2; (-) strand; PAM type: YTN; PAM sequence: TTG
agaccgtgctagctaacacg

SEQ ID NO: 216417 - DNA, 20 bp, Artificial Sequence
  Description of Artificial Sequence: Synthetic oligonucleotide
  Target: LAMA2; (-) strand; PAM type: YTN; PAM sequence: TTG
ggaggccgaggcgggcatat

SEQ ID NO: 216418 - DNA, 20 bp, Artificial Sequence
  Description of Artificial Sequence: Synthetic oligonucleotide
  Target: LAMA2; (-) strand; PAM type: YTN; PAM sequence: TTT
gggaggccgaggcgggcata

SEQ ID NO: 216419 - DNA, 20 bp, Artificial Sequence
  Description of Artificial Sequence: Synthetic oligonucleotide
  Target: LAMA2; (-) strand; PAM type: YTN; PAM sequence: CTT
tgggaggccgaggcgggcat

SEQ ID NO: 216420 - DNA, 20 bp, Artificial Sequence
  Description of Artificial Sequence: Synthetic oligonucleotide
  Target: LAMA2; (-) strand; PAM type: YTN; PAM sequence: CTG
taatcccagcactttgggag

SEQ ID NO: 216421 - DNA, 20 bp, Artificial Sequence
  Description of Artificial Sequence: Synthetic oligonucleotide
  Target: LAMA2; (-) strand; PAM type: YTN; PAM sequence: CTC
acgcctgtaatcccagcact

SEQ ID NO: 216422 - DNA, 20 bp, Artificial Sequence
  Description of Artificial Sequence: Synthetic oligonucleotide
  Target: LAMA2; (-) strand; PAM type: YTN; PAM sequence: TTA
aaaagacagagaaaaggccg

SEQ ID NO: 216423 - DNA, 20 bp, Artificial Sequence
  Description of Artificial Sequence: Synthetic oligonucleotide
  Target: LAMA2; (-) strand; PAM type: YTN; PAM sequence: TTT
aaaaagacagagaaaaggcc

SEQ ID NO: 216424 - DNA, 20 bp, Artificial Sequence
  Description of Artificial Sequence: Synthetic oligonucleotide
  Target: LAMA2; (-) strand; PAM type: YTN; PAM sequence: CTA
tttaaaaagacagagaaaag

SEQ ID NO: 216425 - DNA, 20 bp, Artificial Sequence
  Description of Artificial Sequence: Synthetic oligonucleotide
  Target: LAMA2; (-) strand; PAM type: YTN; PAM sequence: CTA
aaaataaggtctatttaaaa

SEQ ID NO: 216426 - DNA, 20 bp, Artificial Sequence
  Description of Artificial Sequence: Synthetic oligonucleotide
  Target: LAMA2; (-) strand; PAM type: YTN; PAM sequence: CTC
taaaaataaggtctatttaa

SEQ ID NO: 216427 - DNA, 20 bp, Artificial Sequence
  Description of Artificial Sequence: Synthetic oligonucleotide
  Target: LAMA2; (-) strand; PAM type: YTN; PAM sequence: CTG
ctctaaaaataaggtctatt

SEQ ID NO: 216428 - DNA, 20 bp, Artificial Sequence
  Description of Artificial Sequence: Synthetic oligonucleotide
  Target: LAMA2; (-) strand; PAM type: YTN; PAM sequence: CTC
aaactgctctaaaaataagg

SEQ ID NO: 216429 - DNA, 20 bp, Artificial Sequence
  Description of Artificial Sequence: Synthetic oligonucleotide
  Target: LAMA2; (-) strand; PAM type: YTN; PAM sequence: CTG
tgaacctcaaactgctctaa

SEQ ID NO: 216430 - DNA, 20 bp, Artificial Sequence
  Description of Artificial Sequence: Synthetic oligonucleotide
  Target: LAMA2; (-) strand; PAM type: YTN; PAM sequence: TTG
ctgtgaacctcaaactgctc

SEQ ID NO: 216431 - DNA, 20 bp, Artificial Sequence
  Description of Artificial Sequence: Synthetic oligonucleotide
  Target: LAMA2; (-) strand; PAM type: YTN; PAM sequence: TTT
gctgtgaacctcaaactgct

SEQ ID NO: 216432 - DNA, 20 bp, Artificial Sequence
  Description of Artificial Sequence: Synthetic oligonucleotide
  Target: LAMA2; (-) strand; PAM type: YTN; PAM sequence: TTT
tgctgtgaacctcaaactgc

SEQ ID NO: 216433 - DNA, 20 bp, Artificial Sequence
  Description of Artificial Sequence: Synthetic oligonucleotide
  Target: LAMA2; (-) strand; PAM type: YTN; PAM sequence: TTA
attttgctgtgaacctcaaa

SEQ ID NO: 216434 - DNA, 20 bp, Artificial Sequence
  Description of Artificial Sequence: Synthetic oligonucleotide
  Target: LAMA2; (-) strand; PAM type: YTN; PAM sequence: CTT
aattttgctgtgaacctcaa

SEQ ID NO: 216435 - DNA, 20 bp, Artificial Sequence
  Description of Artificial Sequence: Synthetic oligonucleotide
  Target: LAMA2; (-) strand; PAM type: YTN; PAM sequence: CTC
ttaattttgctgtgaacctc

SEQ ID NO: 216436 - DNA, 20 bp, Artificial Sequence
  Description of Artificial Sequence: Synthetic oligonucleotide
  Target: LAMA2; (-) strand; PAM type: YTN; PAM sequence: TTC
ctcttaattttgctgtgaac

SEQ ID NO: 216437 - DNA, 20 bp, Artificial Sequence
  Description of Artificial Sequence: Synthetic oligonucleotide
  Target: LAMA2; (-) strand; PAM type: YTN; PAM sequence: TTT
cctcttaattttgctgtgaa

SEQ ID NO: 216438 - DNA, 20 bp, Artificial Sequence
  Description of Artificial Sequence: Synthetic oligonucleotide
  Target: LAMA2; (-) strand; PAM type: YTN; PAM sequence: CTT
tcctcttaattttgctgtga

SEQ ID NO: 216439 - DNA, 20 bp, Artificial Sequence
  Description of Artificial Sequence: Synthetic oligonucleotide
  Target: LAMA2; (-) strand; PAM type: YTN; PAM sequence: CTG
tactttcctcttaattttgc

SEQ ID NO: 216440 - DNA, 20 bp, Artificial Sequence
  Description of Artificial Sequence: Synthetic oligonucleotide
  Target: LAMA2; (-) strand; PAM type: YTN; PAM sequence: TTC
tgtactttcctcttaatttt

SEQ ID NO: 216441 - DNA, 20 bp, Artificial Sequence
  Description of Artificial Sequence: Synthetic oligonucleotide
  Target: LAMA2; (-) strand; PAM type: YTN; PAM sequence: TTT
ctgtactttcctcttaattt

SEQ ID NO: 216442 - DNA, 20 bp, Artificial Sequence
  Description of Artificial Sequence: Synthetic oligonucleotide
  Target: LAMA2; (-) strand; PAM type: YTN; PAM sequence: TTG
gggcgggggaaatatgggga

SEQ ID NO: 216443 - DNA, 20 bp, Artificial Sequence
  Description of Artificial Sequence: Synthetic oligonucleotide
  Target: LAMA2; (-) strand; PAM type: YTN; PAM sequence: TTG
gtaatggagaagtccacgca

SEQ ID NO: 216444 - DNA, 20 bp, Artificial Sequence
  Description of Artificial Sequence: Synthetic oligonucleotide
  Target: LAMA2; (-) strand; PAM type: YTN; PAM sequence: TTT
ggtaatggagaagtccacgc

SEQ ID NO: 216445 - DNA, 20 bp, Artificial Sequence
  Description of Artificial Sequence: Synthetic oligonucleotide
  Target: LAMA2; (-) strand; PAM type: YTN; PAM sequence: TTT
tggtaatggagaagtccacg

SEQ ID NO: 216446 - DNA, 20 bp, Artificial Sequence
  Description of Artificial Sequence: Synthetic oligonucleotide
  Target: LAMA2; (-) strand; PAM type: YTN; PAM sequence: CTG
gagggggattttggtaatgg

SEQ ID NO: 216447 - DNA, 20 bp, Artificial Sequence
  Description of Artificial Sequence: Synthetic oligonucleotide
  Target: LAMA2; (-) strand; PAM type: YTN; PAM sequence: CTC
tggagggggattttggtaat

SEQ ID NO: 216448 - DNA, 20 bp, Artificial Sequence
  Description of Artificial Sequence: Synthetic oligonucleotide
  Target: LAMA2; (-) strand; PAM type: YTN; PAM sequence: CTG
taacaaatgtagcactctgg

SEQ ID NO: 216449 - DNA, 20 bp, Artificial Sequence
  Description of Artificial Sequence: Synthetic oligonucleotide
  Target: LAMA2; (-) strand; PAM type: YTN; PAM sequence: TTC
atggactgtaacaaatgtag

SEQ ID NO: 216450 - DNA, 20 bp, Artificial Sequence
  Description of Artificial Sequence: Synthetic oligonucleotide
  Target: LAMA2; (-) strand; PAM type: YTN; PAM sequence: TTG
tcaatgtaggttcatggact

SEQ ID NO: 216451 - DNA, 20 bp, Artificial Sequence
  Description of Artificial Sequence: Synthetic oligonucleotide
  Target: LAMA2; (-) strand; PAM type: YTN; PAM sequence: CTG
ttgtcaatgtaggttcatgg

SEQ ID NO: 216452 - DNA, 20 bp, Artificial Sequence
  Description of Artificial Sequence: Synthetic oligonucleotide
  Target: LAMA2; (-) strand; PAM type: YTN; PAM sequence: TTG
ggtgatgctgttgtcaatgt

SEQ ID NO: 216453 - DNA, 20 bp, Artificial Sequence
  Description of Artificial Sequence: Synthetic oligonucleotide
  Target: LAMA2; (-) strand; PAM type: YTN; PAM sequence: TTT
gggtgatgctgttgtcaatg

SEQ ID NO: 216454 - DNA, 20 bp, Artificial Sequence
  Description of Artificial Sequence: Synthetic oligonucleotide
  Target: LAMA2; (-) strand; PAM type: YTN; PAM sequence: CTA
tgaagtttgggtgatgctgt

SEQ ID NO: 216455 - DNA, 20 bp, Artificial Sequence
  Description of Artificial Sequence: Synthetic oligonucleotide
  Target: LAMA2; (-) strand; PAM type: YTN; PAM sequence: CTA
atgcagtctatgaagtttgg

SEQ ID NO: 216456 - DNA, 20 bp, Artificial Sequence
  Description of Artificial Sequence: Synthetic oligonucleotide
  Target: LAMA2; (-) strand; PAM type: YTN; PAM sequence: TTG
tccaaacccataaaaggtac

SEQ ID NO: 216457 - DNA, 20 bp, Artificial Sequence
  Description of Artificial Sequence: Synthetic oligonucleotide
  Target: LAMA2; (-) strand; PAM type: YTN; PAM sequence: TTT
gtccaaacccataaaaggta

SEQ ID NO: 216458 - DNA, 20 bp, Artificial Sequence
  Description of Artificial Sequence: Synthetic oligonucleotide
  Target: LAMA2; (-) strand; PAM type: YTN; PAM sequence: TTA
taagtttgtccaaacccata

SEQ ID NO: 216459 - DNA, 20 bp, Artificial Sequence
  Description of Artificial Sequence: Synthetic oligonucleotide
  Target: LAMA2; (-) strand; PAM type: YTN; PAM sequence: CTA
atggtagatatatatcatta

SEQ ID NO: 216460 - DNA, 20 bp, Artificial Sequence
  Description of Artificial Sequence: Synthetic oligonucleotide
  Target: LAMA2; (-) strand; PAM type: YTN; PAM sequence: CTC
taatggtagatatatatcat

SEQ ID NO: 216461 - DNA, 20 bp, Artificial Sequence
  Description of Artificial Sequence: Synthetic oligonucleotide
  Target: LAMA2; (-) strand; PAM type: YTN; PAM sequence: TTG
cgtgatactctaatggtaga

SEQ ID NO: 216462 - DNA, 20 bp, Artificial Sequence
  Description of Artificial Sequence: Synthetic oligonucleotide
  Target: LAMA2; (-) strand; PAM type: YTN; PAM sequence: TTT
gcgtgatactctaatggtag

SEQ ID NO: 216463 - DNA, 20 bp, Artificial Sequence
  Description of Artificial Sequence: Synthetic oligonucleotide
  Target: LAMA2; (-) strand; PAM type: YTN; PAM sequence: CTT
tgcgtgatactctaatggta

SEQ ID NO: 216464 - DNA, 20 bp, Artificial Sequence
  Description of Artificial Sequence: Synthetic oligonucleotide
  Target: LAMA2; (-) strand; PAM type: YTN; PAM sequence: CTA
ctttgcgtgatactctaatg

SEQ ID NO: 216465 - DNA, 20 bp, Artificial Sequence
  Description of Artificial Sequence: Synthetic oligonucleotide
  Target: LAMA2; (-) strand; PAM type: YTN; PAM sequence: TTA
aaaaaaaaagagcaatgaaa

SEQ ID NO: 216466 - DNA, 20 bp, Artificial Sequence
  Description of Artificial Sequence: Synthetic oligonucleotide
  Target: LAMA2; (-) strand; PAM type: YTN; PAM sequence: TTT
aaaaaaaaaagagcaatgaa

SEQ ID NO: 216467 - DNA, 20 bp, Artificial Sequence
  Description of Artificial Sequence: Synthetic oligonucleotide
  Target: LAMA2; (-) strand; PAM type: YTN; PAM sequence: TTA
taatttaaaaaaaaaagagc

SEQ ID NO: 216468 - DNA, 20 bp, Artificial Sequence
  Description of Artificial Sequence: Synthetic oligonucleotide
  Target: LAMA2; (-) strand; PAM type: YTN; PAM sequence: TTT
ataatttaaaaaaaaaagag

SEQ ID NO: 216469 - DNA, 20 bp, Artificial Sequence
  Description of Artificial Sequence: Synthetic oligonucleotide
  Target: LAMA2; (-) strand; PAM type: YTN; PAM sequence: TTT
tataatttaaaaaaaaaaga

SEQ ID NO: 216470 - DNA, 20 bp, Artificial Sequence
  Description of Artificial Sequence: Synthetic oligonucleotide
  Target: LAMA2; (-) strand; PAM type: YTN; PAM sequence: TTA
tacattttataatttaaaaa

SEQ ID NO: 216471 - DNA, 20 bp, Artificial Sequence
  Description of Artificial Sequence: Synthetic oligonucleotide
  Target: LAMA2; (-) strand; PAM type: YTN; PAM sequence: TTT
atacattttataatttaaaa

SEQ ID NO: 216472 - DNA, 20 bp, Artificial Sequence
  Description of Artificial Sequence: Synthetic oligonucleotide
  Target: LAMA2; (-) strand; PAM type: YTN; PAM sequence: TTT
tatacattttataatttaaa

SEQ ID NO: 216473 - DNA, 20 bp, Artificial Sequence
  Description of Artificial Sequence: Synthetic oligonucleotide
  Target: LAMA2; (-) strand; PAM type: YTN; PAM sequence: CTC
attttatacattttataatt

SEQ ID NO: 216474 - DNA, 20 bp, Artificial Sequence
  Description of Artificial Sequence: Synthetic oligonucleotide
  Target: LAMA2; (-) strand; PAM type: YTN; PAM sequence: CTC
tcattttatacattttataa

SEQ ID NO: 216475 - DNA, 20 bp, Artificial Sequence
  Description of Artificial Sequence: Synthetic oligonucleotide
  Target: LAMA2; (-) strand; PAM type: YTN; PAM sequence: TTG
tgagaaaaagctctcatttt

SEQ ID NO: 216476 - DNA, 20 bp, Artificial Sequence
  Description of Artificial Sequence: Synthetic oligonucleotide
  Target: LAMA2; (-) strand; PAM type: YTN; PAM sequence: TTG
ggataaaaaatgtaaattgt

SEQ ID NO: 216477 - DNA, 20 bp, Artificial Sequence
  Description of Artificial Sequence: Synthetic oligonucleotide
  Target: LAMA2; (-) strand; PAM type: YTN; PAM sequence: TTT
gggataaaaaatgtaaattg

SEQ ID NO: 216478 - DNA, 20 bp, Artificial Sequence
  Description of Artificial Sequence: Synthetic oligonucleotide
  Target: LAMA2; (-) strand; PAM type: YTN; PAM sequence: TTT
tgggataaaaaatgtaaatt

SEQ ID NO: 216479 - DNA, 20 bp, Artificial Sequence
  Description of Artificial Sequence: Synthetic oligonucleotide
  Target: LAMA2; (-) strand; PAM type: YTN; PAM sequence: TTT
ttgggataaaaaatgtaaat

SEQ ID NO: 216480 - DNA, 20 bp, Artificial Sequence
  Description of Artificial Sequence: Synthetic oligonucleotide
  Target: LAMA2; (-) strand; PAM type: YTN; PAM sequence: CTT
tttgggataaaaaatgtaaa

SEQ ID NO: 216481 - DNA, 20 bp, Artificial Sequence
  Description of Artificial Sequence: Synthetic oligonucleotide
  Target: LAMA2; (-) strand; PAM type: YTN; PAM sequence: TTC
tttttgggataaaaaatgta

SEQ ID NO: 216482 - DNA, 20 bp, Artificial Sequence
  Description of Artificial Sequence: Synthetic oligonucleotide
  Target: LAMA2; (-) strand; PAM type: YTN; PAM sequence: TTT
ctttttgggataaaaaatgt

SEQ ID NO: 216483 - DNA, 20 bp, Artificial Sequence
  Description of Artificial Sequence: Synthetic oligonucleotide
  Target: LAMA2; (-) strand; PAM type: YTN; PAM sequence: TTT
tctttttgggataaaaaatg

SEQ ID NO: 216484 - DNA, 20 bp, Artificial Sequence
  Description of Artificial Sequence: Synthetic oligonucleotide
  Target: LAMA2; (-) strand; PAM type: YTN; PAM sequence: TTC
aattttctttttgggataaa

SEQ ID NO: 216485 - DNA, 20 bp, Artificial Sequence
  Description of Artificial Sequence: Synthetic oligonucleotide
  Target: LAMA2; (-) strand; PAM type: YTN; PAM sequence: TTT
caattttctttttgggataa

SEQ ID NO: 216486 - DNA, 20 bp, Artificial Sequence
  Description of Artificial Sequence: Synthetic oligonucleotide
  Target: LAMA2; (-) strand; PAM type: YTN; PAM sequence: CTT
tcaattttctttttgggata

SEQ ID NO: 216487 - DNA, 20 bp, Artificial Sequence
  Description of Artificial Sequence: Synthetic oligonucleotide
  Target: LAMA2; (-) strand; PAM type: YTN; PAM sequence: CTC
caagaaaaaaggcacaatgc

SEQ ID NO: 216488 - DNA, 20 bp, Artificial Sequence
  Description of Artificial Sequence: Synthetic oligonucleotide
  Target: LAMA2; (-) strand; PAM type: YTN; PAM sequence: TTA
accagctccaagaaaaaagg

SEQ ID NO: 216489 - DNA, 20 bp, Artificial Sequence
  Description of Artificial Sequence: Synthetic oligonucleotide
  Target: LAMA2; (-) strand; PAM type: YTN; PAM sequence: TTT
aaccagctccaagaaaaaag

SEQ ID NO: 216490 - DNA, 20 bp, Artificial Sequence
  Description of Artificial Sequence: Synthetic oligonucleotide
  Target: LAMA2; (-) strand; PAM type: YTN; PAM sequence: CTT
taaccagctccaagaaaaaa

SEQ ID NO: 216491 - DNA, 20 bp, Artificial Sequence
  Description of Artificial Sequence: Synthetic oligonucleotide
  Target: LAMA2; (-) strand; PAM type: YTN; PAM sequence: CTC
tttaaccagctccaagaaaa

SEQ ID NO: 216492 - DNA, 20 bp, Artificial Sequence
  Description of Artificial Sequence: Synthetic oligonucleotide
  Target: LAMA2; (-) strand; PAM type: YTN; PAM sequence: CTC
tctttaaccagctccaagaa

SEQ ID NO: 216493 - DNA, 20 bp, Artificial Sequence
  Description of Artificial Sequence: Synthetic oligonucleotide
  Target: LAMA2; (-) strand; PAM type: YTN; PAM sequence: CTA
tgcatgcctctctttaacca

SEQ ID NO: 216494 - DNA, 20 bp, Artificial Sequence
  Description of Artificial Sequence: Synthetic oligonucleotide
  Target: LAMA2; (-) strand; PAM type: YTN; PAM sequence: TTA
tataatgaggggactatgca

SEQ ID NO: 216495 - DNA, 20 bp, Artificial Sequence
  Description of Artificial Sequence: Synthetic oligonucleotide
  Target: LAMA2; (-) strand; PAM type: YTN; PAM sequence: CTA
aattatataatgaggggact

SEQ ID NO: 216496 - DNA, 20 bp, Artificial Sequence
  Description of Artificial Sequence: Synthetic oligonucleotide
  Target: LAMA2; (-) strand; PAM type: YTN; PAM sequence: TTC
ctaaattatataatgagggg

SEQ ID NO: 216497 - DNA, 20 bp, Artificial Sequence
  Description of Artificial Sequence: Synthetic oligonucleotide
  Target: LAMA2; (-) strand; PAM type: YTN; PAM sequence: CTG
cattcctaaattatataatg

SEQ ID NO: 216498 - DNA, 20 bp, Artificial Sequence
  Description of Artificial Sequence: Synthetic oligonucleotide
  Target: LAMA2; (-) strand; PAM type: YTN; PAM sequence: TTC
tgcattcctaaattatataa

SEQ ID NO: 216499 - DNA, 20 bp, Artificial Sequence
  Description of Artificial Sequence: Synthetic oligonucleotide
  Target: LAMA2; (-) strand; PAM type: YTN; PAM sequence: TTT
ctgcattcctaaattatata

SEQ ID NO: 216500 - DNA, 20 bp, Artificial Sequence
  Description of Artificial Sequence: Synthetic oligonucleotide
  Target: LAMA2; (-) strand; PAM type: YTN; PAM sequence: TTT
tctgcattcctaaattatat

SEQ ID NO: 216501 - DNA, 20 bp, Artificial Sequence
  Description of Artificial Sequence: Synthetic oligonucleotide
  Target: LAMA2; (-) strand; PAM type: YTN; PAM sequence: CTG
aaatatagtaatgttttctg

SEQ ID NO: 216502 - DNA, 20 bp, Artificial Sequence
  Description of Artificial Sequence: Synthetic oligonucleotide
  Target: LAMA2; (-) strand; PAM type: YTN; PAM sequence: TTG
ctgaaatatagtaatgtttt

SEQ ID NO: 216503 - DNA, 20 bp, Artificial Sequence
  Description of Artificial Sequence: Synthetic oligonucleotide
  Target: LAMA2; (-) strand; PAM type: YTN; PAM sequence: TTA
atcaaacaagtgtcaattgc

SEQ ID NO: 216504 - DNA, 20 bp, Artificial Sequence
  Description of Artificial Sequence: Synthetic oligonucleotide
  Target: LAMA2; (-) strand; PAM type: YTN; PAM sequence: TTT
aatcaaacaagtgtcaattg

SEQ ID NO: 216505 - DNA, 20 bp, Artificial Sequence
  Description of Artificial Sequence: Synthetic oligonucleotide
  Target: LAMA2; (-) strand; PAM type: YTN; PAM sequence: TTT
taatcaaacaagtgtcaatt

SEQ ID NO: 216506 - DNA, 20 bp, Artificial Sequence
  Description of Artificial Sequence: Synthetic oligonucleotide
  Target: LAMA2; (-) strand; PAM type: YTN; PAM sequence: CTA
attttaatcaaacaagtgtc

SEQ ID NO: 216507 - DNA, 20 bp, Artificial Sequence
  Description of Artificial Sequence: Synthetic oligonucleotide
  Target: LAMA2; (-) strand; PAM type: YTN; PAM sequence: CTG
tgatacacacgaccactaat

SEQ ID NO: 216508 - DNA, 20 bp, Artificial Sequence
  Description of Artificial Sequence: Synthetic oligonucleotide
  Target: LAMA2; (-) strand; PAM type: YTN; PAM sequence: TTC
tgtgatacacacgaccacta

SEQ ID NO: 216509 - DNA, 20 bp, Artificial Sequence
  Description of Artificial Sequence: Synthetic oligonucleotide
  Target: LAMA2; (-) strand; PAM type: YTN; PAM sequence: CTG
atattctgtgatacacacga

SEQ ID NO: 216510 - DNA, 20 bp, Artificial Sequence
  Description of Artificial Sequence: Synthetic oligonucleotide
  Target: LAMA2; (-) strand; PAM type: YTN; PAM sequence: TTC
tgatattctgtgatacacac

SEQ ID NO: 216511 - DNA, 20 bp, Artificial Sequence
  Description of Artificial Sequence: Synthetic oligonucleotide
  Target: LAMA2; (-) strand; PAM type: YTN; PAM sequence: TTT
ctgatattctgtgatacaca

SEQ ID NO: 216512 - DNA, 20 bp, Artificial Sequence
  Description of Artificial Sequence: Synthetic oligonucleotide
  Target: LAMA2; (-) strand; PAM type: YTN; PAM sequence: TTT
tctgatattctgtgatacac

SEQ ID NO: 216513 - DNA, 20 bp, Artificial Sequence
  Description of Artificial Sequence: Synthetic oligonucleotide
  Target: LAMA2; (-) strand; PAM type: YTN; PAM sequence: TTA
acatgttttctgatattctg

SEQ ID NO: 216514 - DNA, 20 bp, Artificial Sequence
  Description of Artificial Sequence: Synthetic oligonucleotide
  Target: LAMA2; (-) strand; PAM type: YTN; PAM sequence: CTT
aacatgttttctgatattct

SEQ ID NO: 216515 - DNA, 20 bp, Artificial Sequence
  Description of Artificial Sequence: Synthetic oligonucleotide
  Target: LAMA2; (-) strand; PAM type: YTN; PAM sequence: TTG
gtgtcttaacatgttttctg

SEQ ID NO: 216516 - DNA, 20 bp, Artificial Sequence
  Description of Artificial Sequence: Synthetic oligonucleotide
  Target: LAMA2; (-) strand; PAM type: YTN; PAM sequence: TTT
ggtgtcttaacatgttttct

SEQ ID NO: 216517 - DNA, 20 bp, Artificial Sequence
  Description of Artificial Sequence: Synthetic oligonucleotide
  Target: LAMA2; (-) strand; PAM type: YTN; PAM sequence: CTT
tggtgtcttaacatgttttc

SEQ ID NO: 216518 - DNA, 20 bp, Artificial Sequence
  Description of Artificial Sequence: Synthetic oligonucleotide
  Target: LAMA2; (-) strand; PAM type: YTN; PAM sequence: TTC
tttggtgtcttaacatgttt

SEQ ID NO: 216519 - DNA, 20 bp, Artificial Sequence
  Description of Artificial Sequence: Synthetic oligonucleotide
  Target: LAMA2; (-) strand; PAM type: YTN; PAM sequence: CTT
ctttggtgtcttaacatgtt

SEQ ID NO: 216520 - DNA, 20 bp, Artificial Sequence
  Description of Artificial Sequence: Synthetic oligonucleotide
  Target: LAMA2; (-) strand; PAM type: YTN; PAM sequence: TTG
ccttctttggtgtcttaaca

SEQ ID NO: 216521 - DNA, 20 bp, Artificial Sequence
  Description of Artificial Sequence: Synthetic oligonucleotide
  Target: LAMA2; (-) strand; PAM type: YTN; PAM sequence: CTG
gtggttgccttctttggtgt

SEQ ID NO: 216522 - DNA, 20 bp, Artificial Sequence
  Description of Artificial Sequence: Synthetic oligonucleotide
  Target: LAMA2; (-) strand; PAM type: YTN; PAM sequence: TTC
tggtggttgccttctttggt

SEQ ID NO: 216523 - DNA, 20 bp, Artificial Sequence
  Description of Artificial Sequence: Synthetic oligonucleotide
  Target: LAMA2; (-) strand; PAM type: YTN; PAM sequence: TTT
ctggtggttgccttctttgg

SEQ ID NO: 216524 - DNA, 20 bp, Artificial Sequence
  Description of Artificial Sequence: Synthetic oligonucleotide
  Target: LAMA2; (-) strand; PAM type: YTN; PAM sequence: TTA
ataggaaaggtttctggtgg

SEQ ID NO: 216525 - DNA, 20 bp, Artificial Sequence
  Description of Artificial Sequence: Synthetic oligonucleotide
  Target: LAMA2; (-) strand; PAM type: YTN; PAM sequence: TTA
accagagtcattaataggaa

SEQ ID NO: 216526 - DNA, 20 bp, Artificial Sequence
  Description of Artificial Sequence: Synthetic oligonucleotide
  Target: LAMA2; (-) strand; PAM type: YTN; PAM sequence: CTC
aaaataaaacaaaacaaaac

SEQ ID NO: 216527 - DNA, 20 bp, Artificial Sequence
  Description of Artificial Sequence: Synthetic oligonucleotide
  Target: LAMA2; (-) strand; PAM type: YTN; PAM sequence: CTC
cgtctcaaaataaaacaaaa

SEQ ID NO: 216528 - DNA, 20 bp, Artificial Sequence
  Description of Artificial Sequence: Synthetic oligonucleotide
  Target: LAMA2; (-) strand; PAM type: YTN; PAM sequence: CTG
ggcaacaagagcaaaactcc

SEQ ID NO: 216529 - DNA, 20 bp, Artificial Sequence
  Description of Artificial Sequence: Synthetic oligonucleotide
  Target: LAMA2; (-) strand; PAM type: YTN; PAM sequence: CTC
cagcctgggcaacaagagca

SEQ ID NO: 216530 - DNA, 20 bp, Artificial Sequence
  Description of Artificial Sequence: Synthetic oligonucleotide
  Target: LAMA2; (-) strand; PAM type: YTN; PAM sequence: TTG
cactccagcctgggcaacaa

SEQ ID NO: 216531 - DNA, 20 bp, Artificial Sequence
  Description of Artificial Sequence: Synthetic oligonucleotide
  Target: LAMA2; (-) strand; PAM type: YTN; PAM sequence: TTG
cggtgagccgaggtcgtgcc

SEQ ID NO: 216532 - DNA, 20 bp, Artificial Sequence
  Description of Artificial Sequence: Synthetic oligonucleotide
  Target: LAMA2; (-) strand; PAM type: YTN; PAM sequence: TTG
aacccgggaggcggaggttg

SEQ ID NO: 216533 - DNA, 20 bp, Artificial Sequence
  Description of Artificial Sequence: Synthetic oligonucleotide
  Target: LAMA2; (-) strand; PAM type: YTN; PAM sequence: CTT
gaacccgggaggcggaggtt

SEQ ID NO: 216534 - DNA, 20 bp, Artificial Sequence
  Description of Artificial Sequence: Synthetic oligonucleotide
  Target: LAMA2; (-) strand; PAM type: YTN; PAM sequence: CTC
ttgaacccgggaggcggagg

SEQ ID NO: 216535 - DNA, 20 bp, Artificial Sequence
  Description of Artificial Sequence: Synthetic oligonucleotide
  Target: LAMA2; (-) strand; PAM type: YTN; PAM sequence: CTG
aggcagaagaatctcttgaa

SEQ ID NO: 216536 - DNA, 20 bp, Artificial Sequence
  Description of Artificial Sequence: Synthetic oligonucleotide
  Target: LAMA2; (-) strand; PAM type: YTN; PAM sequence: CTC
aggaggctgaggcagaagaa

SEQ ID NO: 216537 - DNA, 20 bp, Artificial Sequence
  Description of Artificial Sequence: Synthetic oligonucleotide
  Target: LAMA2; (-) strand; PAM type: YTN; PAM sequence: CTC
tcaggaggctgaggcagaag

SEQ ID NO: 216538 - DNA, 20 bp, Artificial Sequence
  Description of Artificial Sequence: Synthetic oligonucleotide
  Target: LAMA2; (-) strand; PAM type: YTN; PAM sequence: TTA
gccgggcatggtggcgcatg

SEQ ID NO: 216539 - DNA, 20 bp, Artificial Sequence
  Description of Artificial Sequence: Synthetic oligonucleotide
  Target: LAMA2; (-) strand; PAM type: YTN; PAM sequence: CTA
aaaatacaaaattagccggg

SEQ ID NO: 216540 - DNA, 20 bp, Artificial Sequence
  Description of Artificial Sequence: Synthetic oligonucleotide
  Target: LAMA2; (-) strand; PAM type: YTN; PAM sequence: CTA
ctaaaaatacaaaattagcc

SEQ ID NO: 216541 - DNA, 20 bp, Artificial Sequence
  Description of Artificial Sequence: Synthetic oligonucleotide
  Target: LAMA2; (-) strand; PAM type: YTN; PAM sequence: CTC
tactaaaaatacaaaattag

SEQ ID NO: 216542 - DNA, 20 bp, Artificial Sequence
  Description of Artificial Sequence: Synthetic oligonucleotide
  Target: LAMA2; (-) strand; PAM type: YTN; PAM sequence: CTC
gtctctactaaaaatacaaa

SEQ ID NO: 216543 - DNA, 20 bp, Artificial Sequence
  Description of Artificial Sequence: Synthetic oligonucleotide
  Target: LAMA2; (-) strand; PAM type: YTN; PAM sequence: CTA
accaacatggagaaacctcg

SEQ ID NO: 216544 - DNA, 20 bp, Artificial Sequence
  Description of Artificial Sequence: Synthetic oligonucleotide
  Target: LAMA2; (-) strand; PAM type: YTN; PAM sequence: TTC
gggaccagcctaaccaacat

SEQ ID NO: 216545 - DNA, 20 bp, Artificial Sequence
  Description of Artificial Sequence: Synthetic oligonucleotide
  Target: LAMA2; (-) strand; PAM type: YTN; PAM sequence: CTG
gagttcgggaccagcctaac

SEQ ID NO: 216546 - DNA, 20 bp, Artificial Sequence
  Description of Artificial Sequence: Synthetic oligonucleotide
  Target: LAMA2; (-) strand; PAM type: YTN; PAM sequence: CTG
aggtctggagttcgggacca

SEQ ID NO: 216547 - DNA, 20 bp, Artificial Sequence
  Description of Artificial Sequence: Synthetic oligonucleotide
  Target: LAMA2; (-) strand; PAM type: YTN; PAM sequence: TTG
gatcaactgaggtctggagt

SEQ ID NO: 216548 - DNA, 20 bp, Artificial Sequence
  Description of Artificial Sequence: Synthetic oligonucleotide
  Target: LAMA2; (-) strand; PAM type: YTN; PAM sequence: TTG
ggaggccgaggcagttggat

SEQ ID NO: 216549 - DNA, 20 bp, Artificial Sequence
  Description of Artificial Sequence: Synthetic oligonucleotide
  Target: LAMA2; (-) strand; PAM type: YTN; PAM sequence: TTT
gggaggccgaggcagttgga

SEQ ID NO: 216550 - DNA, 20 bp, Artificial Sequence
  Description of Artificial Sequence: Synthetic oligonucleotide
  Target: LAMA2; (-) strand; PAM type: YTN; PAM sequence: CTT
tgggaggccgaggcagttgg

SEQ ID NO: 216551 - DNA, 20 bp, Artificial Sequence
  Description of Artificial Sequence: Synthetic oligonucleotide
  Target: LAMA2; (-) strand; PAM type: YTN; PAM sequence: CTG
taatcccagcactttgggag

SEQ ID NO: 216552 - DNA, 20 bp, Artificial Sequence
  Description of Artificial Sequence: Synthetic oligonucleotide
  Target: LAMA2; (-) strand; PAM type: YTN; PAM sequence: CTC
atgtctgtaatcccagcact

SEQ ID NO: 216553 - DNA, 20 bp, Artificial Sequence
  Description of Artificial Sequence: Synthetic oligonucleotide
  Target: LAMA2; (-) strand; PAM type: YTN; PAM sequence: TTC
accagagtcggccgggcgca

SEQ ID NO: 216554 - DNA, 20 bp, Artificial Sequence
  Description of Artificial Sequence: Synthetic oligonucleotide
  Target: LAMA2; (-) strand; PAM type: YTN; PAM sequence: TTA
catccgagaaattcaccaga

SEQ ID NO: 216555 - DNA, 20 bp, Artificial Sequence
  Description of Artificial Sequence: Synthetic oligonucleotide
  Target: LAMA2; (-) strand; PAM type: YTN; PAM sequence: CTT
acatccgagaaattcaccag

SEQ ID NO: 216556 - DNA, 20 bp, Artificial Sequence
  Description of Artificial Sequence: Synthetic oligonucleotide
  Target: LAMA2; (-) strand; PAM type: YTN; PAM sequence: CTA
cacacataccataacaactt

SEQ ID NO: 216557 - DNA, 20 bp, Artificial Sequence
  Description of Artificial Sequence: Synthetic oligonucleotide
  Target: LAMA2; (-) strand; PAM type: YTN; PAM sequence: CTC
ctacacacataccataacaa

SEQ ID NO: 216558 - DNA, 20 bp, Artificial Sequence
  Description of Artificial Sequence: Synthetic oligonucleotide
  Target: LAMA2; (-) strand; PAM type: YTN; PAM sequence: CTC
cccactcctacacacatacc

SEQ ID NO: 216559 - DNA, 20 bp, Artificial Sequence
  Description of Artificial Sequence: Synthetic oligonucleotide
  Target: LAMA2; (-) strand; PAM type: YTN; PAM sequence: CTA
tactccccactcctacacac

SEQ ID NO: 216560 - DNA, 20 bp, Artificial Sequence
  Description of Artificial Sequence: Synthetic oligonucleotide
  Target: LAMA2; (-) strand; PAM type: YTN; PAM sequence: CTA
gcaaacacatgggtatgcaa

SEQ ID NO: 216561 - DNA, 20 bp, Artificial Sequence
  Description of Artificial Sequence: Synthetic oligonucleotide
  Target: LAMA2; (-) strand; PAM type: YTN; PAM sequence: CTA
tacaagagctagcaaacaca

SEQ ID NO: 216562 - DNA, 20 bp, Artificial Sequence
  Description of Artificial Sequence: Synthetic oligonucleotide
  Target: LAMA2; (-) strand; PAM type: YTN; PAM sequence: TTC
tatacaagagctagcaaaca

SEQ ID NO: 216563 - DNA, 20 bp, Artificial Sequence
  Description of Artificial Sequence: Synthetic oligonucleotide
  Target: LAMA2; (-) strand; PAM type: YTN; PAM sequence: TTA
cattctatacaagagctagc

SEQ ID NO: 216564 - DNA, 20 bp, Artificial Sequence
  Description of Artificial Sequence: Synthetic oligonucleotide
  Target: LAMA2; (-) strand; PAM type: YTN; PAM sequence: CTT
acattctatacaagagctag

SEQ ID NO: 216565 - DNA, 20 bp, Artificial Sequence
  Description of Artificial Sequence: Synthetic oligonucleotide
  Target: LAMA2; (-) strand; PAM type: YTN; PAM sequence: CTC
ttacattctatacaagagct

SEQ ID NO: 216566 - DNA, 20 bp, Artificial Sequence
  Description of Artificial Sequence: Synthetic oligonucleotide
  Target: LAMA2; (-) strand; PAM type: YTN; PAM sequence: TTC
ctcttacattctatacaaga

SEQ ID NO: 216567 - DNA, 20 bp, Artificial Sequence
  Description of Artificial Sequence: Synthetic oligonucleotide
  Target: LAMA2; (-) strand; PAM type: YTN; PAM sequence: TTT
cctcttacattctatacaag

SEQ ID NO: 216568 - DNA, 20 bp, Artificial Sequence
  Description of Artificial Sequence: Synthetic oligonucleotide
  Target: LAMA2; (-) strand; PAM type: YTN; PAM sequence: CTT
tcctcttacattctatacaa

SEQ ID NO: 216569 - DNA, 20 bp, Artificial Sequence
  Description of Artificial Sequence: Synthetic oligonucleotide
  Target: LAMA2; (-) strand; PAM type: YTN; PAM sequence: CTG
acatatgtcctttcctctta

SEQ ID NO: 216570 - DNA, 20 bp, Artificial Sequence
  Description of Artificial Sequence: Synthetic oligonucleotide
  Target: LAMA2; (-) strand; PAM type: YTN; PAM sequence: CTC
tgacatatgtcctttcctct

SEQ ID NO: 216571 - DNA, 20 bp, Artificial Sequence
  Description of Artificial Sequence: Synthetic oligonucleotide
  Target: LAMA2; (-) strand; PAM type: YTN; PAM sequence: TTA
cataaaagcaaagggctctg

SEQ ID NO: 216572 - DNA, 20 bp, Artificial Sequence
  Description of Artificial Sequence: Synthetic oligonucleotide
  Target: LAMA2; (-) strand; PAM type: YTN; PAM sequence: TTT
acataaaagcaaagggctct

SEQ ID NO: 216573 - DNA, 20 bp, Artificial Sequence
  Description of Artificial Sequence: Synthetic oligonucleotide
  Target: LAMA2; (-) strand; PAM type: YTN; PAM sequence: TTT
tacataaaagcaaagggctc

SEQ ID NO: 216574 - DNA, 20 bp, Artificial Sequence
  Description of Artificial Sequence: Synthetic oligonucleotide
  Target: LAMA2; (-) strand; PAM type: YTN; PAM sequence: CTT
ttacataaaagcaaagggct

SEQ ID NO: 216575 - DNA, 20 bp, Artificial Sequence
  Description of Artificial Sequence: Synthetic oligonucleotide
  Target: LAMA2; (-) strand; PAM type: YTN; PAM sequence: TTG
gcttttacataaaagcaaag

SEQ ID NO: 216576 - DNA, 20 bp, Artificial Sequence
  Description of Artificial Sequence: Synthetic oligonucleotide
  Target: LAMA2; (-) strand; PAM type: YTN; PAM sequence: CTT
ggcttttacataaaagcaaa

SEQ ID NO: 216577 - DNA, 20 bp, Artificial Sequence
  Description of Artificial Sequence: Synthetic oligonucleotide
  Target: LAMA2; (-) strand; PAM type: YTN; PAM sequence: CTC
ccttggcttttacataaaag

SEQ ID NO: 216578 - DNA, 20 bp, Artificial Sequence
  Description of Artificial Sequence: Synthetic oligonucleotide
  Target: LAMA2; (-) strand; PAM type: YTN; PAM sequence: CTG
aactcccttggcttttacat

SEQ ID NO: 216579 - DNA, 20 bp, Artificial Sequence
  Description of Artificial Sequence: Synthetic oligonucleotide
  Target: LAMA2; (-) strand; PAM type: YTN; PAM sequence: TTA
cctgaactcccttggctttt

SEQ ID NO: 216580 - DNA, 20 bp, Artificial Sequence
  Description of Artificial Sequence: Synthetic oligonucleotide
  Target: LAMA2; (-) strand; PAM type: YTN; PAM sequence: TTT
acctgaactcccttggcttt

SEQ ID NO: 216581 - DNA, 20 bp, Artificial Sequence
  Description of Artificial Sequence: Synthetic oligonucleotide
  Target: LAMA2; (-) strand; PAM type: YTN; PAM sequence: CTC
catttacctgaactcccttg

SEQ ID NO: 216582 - DNA, 20 bp, Artificial Sequence
  Description of Artificial Sequence: Synthetic oligonucleotide
  Target: LAMA2; (-) strand; PAM type: YTN; PAM sequence: TTG
actccatttacctgaactcc

SEQ ID NO: 216583 - DNA, 20 bp, Artificial Sequence
  Description of Artificial Sequence: Synthetic oligonucleotide
  Target: LAMA2; (-) strand; PAM type: YTN; PAM sequence: CTT
gactccatttacctgaactc

SEQ ID NO: 216584 - DNA, 20 bp, Artificial Sequence
  Description of Artificial Sequence: Synthetic oligonucleotide
  Target: LAMA2; (-) strand; PAM type: YTN; PAM sequence: TTG
ccttgactccatttacctga

SEQ ID NO: 216585 - DNA, 20 bp, Artificial Sequence
  Description of Artificial Sequence: Synthetic oligonucleotide
  Target: LAMA2; (-) strand; PAM type: YTN; PAM sequence: TTA
ttgccttgactccatttacc

SEQ ID NO: 216586 - DNA, 20 bp, Artificial Sequence
  Description of Artificial Sequence: Synthetic oligonucleotide
  Target: LAMA2; (-) strand; PAM type: YTN; PAM sequence: TTT
attgccttgactccatttac

SEQ ID NO: 216587 - DNA, 20 bp, Artificial Sequence
  Description of Artificial Sequence: Synthetic oligonucleotide
  Target: LAMA2; (-) strand; PAM type: YTN; PAM sequence: CTT
tattgccttgactccattta

SEQ ID NO: 216588 - DNA, 20 bp, Artificial Sequence
  Description of Artificial Sequence: Synthetic oligonucleotide
  Target: LAMA2; (-) strand; PAM type: YTN; PAM sequence: TTC
cctttattgccttgactcca

SEQ ID NO: 216589 - DNA, 20 bp, Artificial Sequence
  Description of Artificial Sequence: Synthetic oligonucleotide
  Target: LAMA2; (-) strand; PAM type: YTN; PAM sequence: TTT
ccctttattgccttgactcc

SEQ ID NO: 216590 - DNA, 20 bp, Artificial Sequence
  Description of Artificial Sequence: Synthetic oligonucleotide
  Target: LAMA2; (-) strand; PAM type: YTN; PAM sequence: CTG
tttccctttattgccttgac

SEQ ID NO: 216591 - DNA, 20 bp, Artificial Sequence
  Description of Artificial Sequence: Synthetic oligonucleotide
  Target: LAMA2; (-) strand; PAM type: YTN; PAM sequence: TTG
aaatctgtttccctttattg

SEQ ID NO: 216592 - DNA, 20 bp, Artificial Sequence
  Description of Artificial Sequence: Synthetic oligonucleotide
  Target: LAMA2; (-) strand; PAM type: YTN; PAM sequence: CTT
gaaatctgtttccctttatt

SEQ ID NO: 216593 - DNA, 20 bp, Artificial Sequence
  Description of Artificial Sequence: Synthetic oligonucleotide
  Target: LAMA2; (-) strand; PAM type: YTN; PAM sequence: TTC
ccttgaaatctgtttccctt

SEQ ID NO: 216594 - DNA, 20 bp, Artificial Sequence
  Description of Artificial Sequence: Synthetic oligonucleotide
  Target: LAMA2; (-) strand; PAM type: YTN; PAM sequence: TTT
cccttgaaatctgtttccct

SEQ ID NO: 216595 - DNA, 20 bp, Artificial Sequence
  Description of Artificial Sequence: Synthetic oligonucleotide
  Target: LAMA2; (-) strand; PAM type: YTN; PAM sequence: TTT
tcccttgaaatctgtttccc

SEQ ID NO: 216596 - DNA, 20 bp, Artificial Sequence
  Description of Artificial Sequence: Synthetic oligonucleotide
  Target: LAMA2; (-) strand; PAM type: YTN; PAM sequence: TTT
ttcccttgaaatctgtttcc

SEQ ID NO: 216597 - DNA, 20 bp, Artificial Sequence
  Description of Artificial Sequence: Synthetic oligonucleotide
  Target: LAMA2; (-) strand; PAM type: YTN; PAM sequence: TTT
tttcccttgaaatctgtttc

SEQ ID NO: 216598 - DNA, 20 bp, Artificial Sequence
  Description of Artificial Sequence: Synthetic oligonucleotide
  Target: LAMA2; (-) strand; PAM type: YTN; PAM sequence: TTT
ttttcccttgaaatctgttt

SEQ ID NO: 216599 - DNA, 20 bp, Artificial Sequence
  Description of Artificial Sequence: Synthetic oligonucleotide
  Target: LAMA2; (-) strand; PAM type: YTN; PAM sequence: CTG
atttttttcccttgaaatct

SEQ ID NO: 216600 - DNA, 20 bp, Artificial Sequence
  Description of Artificial Sequence: Synthetic oligonucleotide
  Target: LAMA2; (-) strand; PAM type: YTN; PAM sequence: TTC
ctgatttttttcccttgaaa

SEQ ID NO: 216601 - DNA, 20 bp, Artificial Sequence
  Description of Artificial Sequence: Synthetic oligonucleotide
  Target: LAMA2; (-) strand; PAM type: YTN; PAM sequence: TTT
cctgatttttttcccttgaa

SEQ ID NO: 216602 - DNA, 20 bp, Artificial Sequence
  Description of Artificial Sequence: Synthetic oligonucleotide
  Target: LAMA2; (-) strand; PAM type: YTN; PAM sequence: TTT
tcctgatttttttcccttga

SEQ ID NO: 216603 - DNA, 20 bp, Artificial Sequence
  Description of Artificial Sequence: Synthetic oligonucleotide
  Target: LAMA2; (-) strand; PAM type: YTN; PAM sequence: CTC
attttcctgatttttttccc

SEQ ID NO: 216604 - DNA, 20 bp, Artificial Sequence
  Description of Artificial Sequence: Synthetic oligonucleotide
  Target: LAMA2; (-) strand; PAM type: YTN; PAM sequence: CTA
atgcctcattttcctgattt

SEQ ID NO: 216605 - DNA, 20 bp, Artificial Sequence
  Description of Artificial Sequence: Synthetic oligonucleotide
  Target: LAMA2; (-) strand; PAM type: YTN; PAM sequence: TTC
atcacatacctaatgcctca

SEQ ID NO: 216606 - DNA, 20 bp, Artificial Sequence
  Description of Artificial Sequence: Synthetic oligonucleotide
  Target: LAMA2; (-) strand; PAM type: YTN; PAM sequence: CTT
catcacatacctaatgcctc

SEQ ID NO: 216607 - DNA, 20 bp, Artificial Sequence
  Description of Artificial Sequence: Synthetic oligonucleotide
  Target: LAMA2; (-) strand; PAM type: YTN; PAM sequence: TTC
cttcatcacatacctaatgc

SEQ ID NO: 216608 - DNA, 20 bp, Artificial Sequence
  Description of Artificial Sequence: Synthetic oligonucleotide
  Target: LAMA2; (-) strand; PAM type: YTN; PAM sequence: TTT
ccttcatcacatacctaatg

SEQ ID NO: 216609 - DNA, 20 bp, Artificial Sequence
  Description of Artificial Sequence: Synthetic oligonucleotide
  Target: LAMA2; (-) strand; PAM type: YTN; PAM sequence: CTT
tccttcatcacatacctaat

SEQ ID NO: 216610 - DNA, 20 bp, Artificial Sequence
  Description of Artificial Sequence: Synthetic oligonucleotide
  Target: LAMA2; (-) strand; PAM type: YTN; PAM sequence: TTC
tttccttcatcacataccta

SEQ ID NO: 216611 - DNA, 20 bp, Artificial Sequence
  Description of Artificial Sequence: Synthetic oligonucleotide
  Target: LAMA2; (-) strand; PAM type: YTN; PAM sequence: CTA
aaaattctttccttcatcac

SEQ ID NO: 216612 - DNA, 20 bp, Artificial Sequence
  Description of Artificial Sequence: Synthetic oligonucleotide
  Target: LAMA2; (-) strand; PAM type: YTN; PAM sequence: TTC
ctaaaaattctttccttcat

SEQ ID NO: 216613 - DNA, 20 bp, Artificial Sequence
  Description of Artificial Sequence: Synthetic oligonucleotide
  Target: LAMA2; (-) strand; PAM type: YTN; PAM sequence: CTT
cctaaaaattctttccttca

SEQ ID NO: 216614 - DNA, 20 bp, Artificial Sequence
  Description of Artificial Sequence: Synthetic oligonucleotide
  Target: LAMA2; (-) strand; PAM type: YTN; PAM sequence: TTC
ttcctaaaaattctttcctt

SEQ ID NO: 216615 - DNA, 20 bp, Artificial Sequence
  Description of Artificial Sequence: Synthetic oligonucleotide
  Target: LAMA2; (-) strand; PAM type: YTN; PAM sequence: TTT
cttcctaaaaattctttcct

SEQ ID NO: 216616 - DNA, 20 bp, Artificial Sequence
  Description of Artificial Sequence: Synthetic oligonucleotide
  Target: LAMA2; (-) strand; PAM type: YTN; PAM sequence: TTT
tcttcctaaaaattctttcc

SEQ ID NO: 216617 - DNA, 20 bp, Artificial Sequence
  Description of Artificial Sequence: Synthetic oligonucleotide
  Target: LAMA2; (-) strand; PAM type: YTN; PAM sequence: TTT
ttcttcctaaaaattctttc

SEQ ID NO: 216618 - DNA, 20 bp, Artificial Sequence
  Description of Artificial Sequence: Synthetic oligonucleotide
  Target: LAMA2; (-) strand; PAM type: YTN; PAM sequence: CTT
tttcttcctaaaaattcttt

SEQ ID NO: 216619 - DNA, 20 bp, Artificial Sequence
  Description of Artificial Sequence: Synthetic oligonucleotide
  Target: LAMA2; (-) strand; PAM type: YTN; PAM sequence: TTA
ctttttcttcctaaaaattc

SEQ ID NO: 216620 - DNA, 20 bp, Artificial Sequence
  Description of Artificial Sequence: Synthetic oligonucleotide
  Target: LAMA2; (-) strand; PAM type: YTN; PAM sequence: CTG
ttactttttcttcctaaaaa

SEQ ID NO: 216621 - DNA, 20 bp, Artificial Sequence
  Description of Artificial Sequence: Synthetic oligonucleotide
  Target: LAMA2; (-) strand; PAM type: YTN; PAM sequence: TTA
aaactgttactttttcttcc

SEQ ID NO: 216622 - DNA, 20 bp, Artificial Sequence
  Description of Artificial Sequence: Synthetic oligonucleotide
  Target: LAMA2; (-) strand; PAM type: YTN; PAM sequence: TTT
aaaactgttactttttcttc

SEQ ID NO: 216623 - DNA, 20 bp, Artificial Sequence
  Description of Artificial Sequence: Synthetic oligonucleotide
  Target: LAMA2; (-) strand; PAM type: YTN; PAM sequence: TTC
gaagcatttaaaactgttac

SEQ ID NO: 216624 - DNA, 20 bp, Artificial Sequence
  Description of Artificial Sequence: Synthetic oligonucleotide
  Target: LAMA2; (-) strand; PAM type: YTN; PAM sequence: CTT
cgaagcatttaaaactgtta

SEQ ID NO: 216625 - DNA, 20 bp, Artificial Sequence
  Description of Artificial Sequence: Synthetic oligonucleotide
  Target: LAMA2; (-) strand; PAM type: YTN; PAM sequence: TTA
tcttcgaagcatttaaaact

SEQ ID NO: 216626 - DNA, 20 bp, Artificial Sequence
  Description of Artificial Sequence: Synthetic oligonucleotide
  Target: LAMA2; (-) strand; PAM type: YTN; PAM sequence: CTC
aattatcttcgaagcattta

SEQ ID NO: 216627 - DNA, 20 bp, Artificial Sequence
  Description of Artificial Sequence: Synthetic oligonucleotide
  Target: LAMA2; (-) strand; PAM type: YTN; PAM sequence: TTA
ctcaattatcttcgaagcat

SEQ ID NO: 216628 - DNA, 20 bp, Artificial Sequence
  Description of Artificial Sequence: Synthetic oligonucleotide
  Target: LAMA2; (-) strand; PAM type: YTN; PAM sequence: CTT
actcaattatcttcgaagca

SEQ ID NO: 216629 - DNA, 20 bp, Artificial Sequence
  Description of Artificial Sequence: Synthetic oligonucleotide
  Target: LAMA2; (-) strand; PAM type: YTN; PAM sequence: TTC
ttactcaattatcttcgaag

SEQ ID NO: 216630 - DNA, 20 bp, Artificial Sequence
  Description of Artificial Sequence: Synthetic oligonucleotide
  Target: LAMA2; (-) strand; PAM type: YTN; PAM sequence: TTT
cttactcaattatcttcgaa

SEQ ID NO: 216631 - DNA, 20 bp, Artificial Sequence
  Description of Artificial Sequence: Synthetic oligonucleotide
  Target: LAMA2; (-) strand; PAM type: YTN; PAM sequence: TTT
tcttactcaattatcttcga

SEQ ID NO: 216632 - DNA, 20 bp, Artificial Sequence
  Description of Artificial Sequence: Synthetic oligonucleotide
  Target: LAMA2; (-) strand; PAM type: YTN; PAM sequence: CTT
ttcttactcaattatcttcg

SEQ ID NO: 216633 - DNA, 20 bp, Artificial Sequence
  Description of Artificial Sequence: Synthetic oligonucleotide
  Target: LAMA2; (-) strand; PAM type: YTN; PAM sequence: TTA
tgcttttcttactcaattat

SEQ ID NO: 216634 - DNA, 20 bp, Artificial Sequence
  Description of Artificial Sequence: Synthetic oligonucleotide
  Target: LAMA2; (-) strand; PAM type: YTN; PAM sequence: TTT
atgcttttcttactcaatta

SEQ ID NO: 216635 - DNA, 20 bp, Artificial Sequence
  Description of Artificial Sequence: Synthetic oligonucleotide
  Target: LAMA2; (-) strand; PAM type: YTN; PAM sequence: TTT
tatgcttttcttactcaatt

SEQ ID NO: 216636 - DNA, 20 bp, Artificial Sequence
  Description of Artificial Sequence: Synthetic oligonucleotide
  Target: LAMA2; (-) strand; PAM type: YTN; PAM sequence: CTA
ttttatgcttttcttactca

SEQ ID NO: 216637 - DNA, 20 bp, Artificial Sequence
  Description of Artificial Sequence: Synthetic oligonucleotide
  Target: LAMA2; (-) strand; PAM type: YTN; PAM sequence: TTG
tcaaaagcaagggaaaccta

SEQ ID NO: 216638 - DNA, 20 bp, Artificial Sequence
  Description of Artificial Sequence: Synthetic oligonucleotide
  Target: LAMA2; (-) strand; PAM type: YTN; PAM sequence: TTC
aatggatggccatgttgtca

SEQ ID NO: 216639 - DNA, 20 bp, Artificial Sequence
  Description of Artificial Sequence: Synthetic oligonucleotide
  Target: LAMA2; (-) strand; PAM type: YTN; PAM sequence: TTA
gaaaggtgttcaatggatgg

SEQ ID NO: 216640 - DNA, 20 bp, Artificial Sequence
  Description of Artificial Sequence: Synthetic oligonucleotide
  Target: LAMA2; (-) strand; PAM type: YTN; PAM sequence: TTT
agaaaggtgttcaatggatg

SEQ ID NO: 216641 - DNA, 20 bp, Artificial Sequence
  Description of Artificial Sequence: Synthetic oligonucleotide
  Target: LAMA2; (-) strand; PAM type: YTN; PAM sequence: CTT
tagaaaggtgttcaatggat

SEQ ID NO: 216642 - DNA, 20 bp, Artificial Sequence
  Description of Artificial Sequence: Synthetic oligonucleotide
  Target: LAMA2; (-) strand; PAM type: YTN; PAM sequence: CTG
agtactttagaaaggtgttc

SEQ ID NO: 216643 - DNA, 20 bp, Artificial Sequence
  Description of Artificial Sequence: Synthetic oligonucleotide
  Target: LAMA2; (-) strand; PAM type: YTN; PAM sequence: CTG
ctgagtactttagaaaggtg

SEQ ID NO: 216644 - DNA, 20 bp, Artificial Sequence
  Description of Artificial Sequence: Synthetic oligonucleotide
  Target: LAMA2; (-) strand; PAM type: YTN; PAM sequence: CTA
tgaatctgctgagtacttta

SEQ ID NO: 216645 - DNA, 20 bp, Artificial Sequence
  Description of Artificial Sequence: Synthetic oligonucleotide
  Target: LAMA2; (-) strand; PAM type: YTN; PAM sequence: TTG
ccactatgaatctgctgagt

SEQ ID NO: 216646 - DNA, 20 bp, Artificial Sequence
  Description of Artificial Sequence: Synthetic oligonucleotide
  Target: LAMA2; (-) strand; PAM type: YTN; PAM sequence: CTT
gccactatgaatctgctgag

SEQ ID NO: 216647 - DNA, 20 bp, Artificial Sequence
  Description of Artificial Sequence: Synthetic oligonucleotide
  Target: LAMA2; (-) strand; PAM type: YTN; PAM sequence: CTC
ttgccactatgaatctgctg

SEQ ID NO: 216648 - DNA, 20 bp, Artificial Sequence
  Description of Artificial Sequence: Synthetic oligonucleotide
  Target: LAMA2; (-) strand; PAM type: YTN; PAM sequence: TTC
agtgtgcctcttgccactat

SEQ ID NO: 216649 - DNA, 20 bp, Artificial Sequence
  Description of Artificial Sequence: Synthetic oligonucleotide
  Target: LAMA2; (-) strand; PAM type: YTN; PAM sequence: CTT
cagtgtgcctcttgccacta

SEQ ID NO: 216650 - DNA, 20 bp, Artificial Sequence
  Description of Artificial Sequence: Synthetic oligonucleotide
  Target: LAMA2; (-) strand; PAM type: YTN; PAM sequence: CTC
ttcagtgtgcctcttgccac

SEQ ID NO: 216651 - DNA, 20 bp, Artificial Sequence
  Description of Artificial Sequence: Synthetic oligonucleotide
  Target: LAMA2; (-) strand; PAM type: YTN; PAM sequence: TTA
cctcttcagtgtgcctcttg

SEQ ID NO: 216652 - DNA, 20 bp, Artificial Sequence
  Description of Artificial Sequence: Synthetic oligonucleotide
  Target: LAMA2; (-) strand; PAM type: YTN; PAM sequence: TTA
ttacctcttcagtgtgcctc

SEQ ID NO: 216653 - DNA, 20 bp, Artificial Sequence
  Description of Artificial Sequence: Synthetic oligonucleotide
  Target: LAMA2; (-) strand; PAM type: YTN; PAM sequence: TTT
attacctcttcagtgtgcct

SEQ ID NO: 216654 - DNA, 20 bp, Artificial Sequence
  Description of Artificial Sequence: Synthetic oligonucleotide
  Target: LAMA2; (-) strand; PAM type: YTN; PAM sequence: TTC
atttattacctcttcagtgt

SEQ ID NO: 216655 - DNA, 20 bp, Artificial Sequence
  Description of Artificial Sequence: Synthetic oligonucleotide
  Target: LAMA2; (-) strand; PAM type: YTN; PAM sequence: TTC
atcattcatttattacctct

SEQ ID NO: 216656 - DNA, 20 bp, Artificial Sequence
  Description of Artificial Sequence: Synthetic oligonucleotide
  Target: LAMA2; (-) strand; PAM type: YTN; PAM sequence: CTT
catcattcatttattacctc

SEQ ID NO: 216657 - DNA, 20 bp, Artificial Sequence
  Description of Artificial Sequence: Synthetic oligonucleotide
  Target: LAMA2; (-) strand; PAM type: YTN; PAM sequence: TTC
ttcatcattcatttattacc

SEQ ID NO: 216658 - DNA, 20 bp, Artificial Sequence
  Description of Artificial Sequence: Synthetic oligonucleotide
  Target: LAMA2; (-) strand; PAM type: YTN; PAM sequence: CTT
cttcatcattcatttattac

SEQ ID NO: 216659 - DNA, 20 bp, Artificial Sequence
  Description of Artificial Sequence: Synthetic oligonucleotide
  Target: LAMA2; (-) strand; PAM type: YTN; PAM sequence: TTC
ttcttcatcattcatttatt

SEQ ID NO: 216660 - DNA, 20 bp, Artificial Sequence
  Description of Artificial Sequence: Synthetic oligonucleotide
  Target: LAMA2; (-) strand; PAM type: YTN; PAM sequence: CTT
cttcttcatcattcatttat

SEQ ID NO: 216661 - DNA, 20 bp, Artificial Sequence
  Description of Artificial Sequence: Synthetic oligonucleotide
  Target: LAMA2; (-) strand; PAM type: YTN; PAM sequence: CTC
ttcttcttcatcattcattt

SEQ ID NO: 216662 - DNA, 20 bp, Artificial Sequence
  Description of Artificial Sequence: Synthetic oligonucleotide
  Target: LAMA2; (-) strand; PAM type: YTN; PAM sequence: CTA
tagtcccctcttcttcttca

SEQ ID NO: 216663 - DNA, 20 bp, Artificial Sequence
  Description of Artificial Sequence: Synthetic oligonucleotide
  Target: LAMA2; (-) strand; PAM type: YTN; PAM sequence: TTC
tatagtcccctcttcttctt

SEQ ID NO: 216664 - DNA, 20 bp, Artificial Sequence
  Description of Artificial Sequence: Synthetic oligonucleotide
  Target: LAMA2; (-) strand; PAM type: YTN; PAM sequence: TTT
ctatagtcccctcttcttct

SEQ ID NO: 216665 - DNA, 20 bp, Artificial Sequence
  Description of Artificial Sequence: Synthetic oligonucleotide
  Target: LAMA2; (-) strand; PAM type: YTN; PAM sequence: TTG
acagaatatttctatagtcc

SEQ ID NO: 216666 - DNA, 20 bp, Artificial Sequence
  Description of Artificial Sequence: Synthetic oligonucleotide
  Target: LAMA2; (-) strand; PAM type: YTN; PAM sequence: CTT
gacagaatatttctatagtc

SEQ ID NO: 216667 - DNA, 20 bp, Artificial Sequence
  Description of Artificial Sequence: Synthetic oligonucleotide
  Target: LAMA2; (-) strand; PAM type: YTN; PAM sequence: TTC
acatcaaggatacttgacag

SEQ ID NO: 216668 - DNA, 20 bp, Artificial Sequence
  Description of Artificial Sequence: Synthetic oligonucleotide
  Target: LAMA2; (-) strand; PAM type: YTN; PAM sequence: TTT
cacatcaaggatacttgaca

SEQ ID NO: 216669 - DNA, 20 bp, Artificial Sequence
  Description of Artificial Sequence: Synthetic oligonucleotide
  Target: LAMA2; (-) strand; PAM type: YTN; PAM sequence: CTT
tcacatcaaggatacttgac

SEQ ID NO: 216670 - DNA, 20 bp, Artificial Sequence
  Description of Artificial Sequence: Synthetic oligonucleotide
  Target: LAMA2; (-) strand; PAM type: YTN; PAM sequence: CTC
tttcacatcaaggatacttg

SEQ ID NO: 216671 - DNA, 20 bp, Artificial Sequence
  Description of Artificial Sequence: Synthetic oligonucleotide
  Target: LAMA2; (-) strand; PAM type: YTN; PAM sequence: TTC
tctttcacatcaaggatact

SEQ ID NO: 216672 - DNA, 20 bp, Artificial Sequence
  Description of Artificial Sequence: Synthetic oligonucleotide
  Target: LAMA2; (-) strand; PAM type: YTN; PAM sequence: TTC
attctctttcacatcaagga

SEQ ID NO: 216673 - DNA, 20 bp, Artificial Sequence
  Description of Artificial Sequence: Synthetic oligonucleotide
  Target: LAMA2; (-) strand; PAM type: YTN; PAM sequence: CTT
cattctctttcacatcaagg

SEQ ID NO: 216674 - DNA, 20 bp, Artificial Sequence
  Description of Artificial Sequence: Synthetic oligonucleotide
  Target: LAMA2; (-) strand; PAM type: YTN; PAM sequence: CTG
tccttcattctctttcacat

SEQ ID NO: 216675 - DNA, 20 bp, Artificial Sequence
  Description of Artificial Sequence: Synthetic oligonucleotide
  Target: LAMA2; (-) strand; PAM type: YTN; PAM sequence: CTC
tgtccttcattctctttcac

SEQ ID NO: 216676 - DNA, 20 bp, Artificial Sequence
  Description of Artificial Sequence: Synthetic oligonucleotide
  Target: LAMA2; (-) strand; PAM type: YTN; PAM sequence: CTC
ctctgtccttcattctcttt

SEQ ID NO: 216677 - DNA, 20 bp, Artificial Sequence
  Description of Artificial Sequence: Synthetic oligonucleotide
  Target: LAMA2; (-) strand; PAM type: YTN; PAM sequence: CTC
cacaacctcctctgtccttc

SEQ ID NO: 216678 - DNA, 20 bp, Artificial Sequence
  Description of Artificial Sequence: Synthetic oligonucleotide
  Target: LAMA2; (-) strand; PAM type: YTN; PAM sequence: TTG
caactccacaacctcctctg

SEQ ID NO: 216679 - DNA, 20 bp, Artificial Sequence
  Description of Artificial Sequence: Synthetic oligonucleotide
  Target: LAMA2; (-) strand; PAM type: YTN; PAM sequence: TTT
gcaactccacaacctcctct

SEQ ID NO: 216680 - DNA, 20 bp, Artificial Sequence
  Description of Artificial Sequence: Synthetic oligonucleotide
  Target: LAMA2; (-) strand; PAM type: YTN; PAM sequence: CTT
tgcaactccacaacctcctc

SEQ ID NO: 216681 - DNA, 20 bp, Artificial Sequence
  Description of Artificial Sequence: Synthetic oligonucleotide
  Target: LAMA2; (-) strand; PAM type: YTN; PAM sequence: TTG
aaaacctttgcaactccaca

SEQ ID NO: 216682 - DNA, 20 bp, Artificial Sequence
  Description of Artificial Sequence: Synthetic oligonucleotide
  Target: LAMA2; (-) strand; PAM type: YTN; PAM sequence: TTT
gaaaacctttgcaactccac

SEQ ID NO: 216683 - DNA, 20 bp, Artificial Sequence
  Description of Artificial Sequence: Synthetic oligonucleotide
  Target: LAMA2; (-) strand; PAM type: YTN; PAM sequence: CTT
tgaaaacctttgcaactcca

SEQ ID NO: 216684 - DNA, 20 bp, Artificial Sequence
  Description of Artificial Sequence: Synthetic oligonucleotide
  Target: LAMA2; (-) strand; PAM type: YTN; PAM sequence: TTA
tctttgaaaacctttgcaac

SEQ ID NO: 216685 - DNA, 20 bp, Artificial Sequence
  Description of Artificial Sequence: Synthetic oligonucleotide
  Target: LAMA2; (-) strand; PAM type: YTN; PAM sequence: CTT
atctttgaaaacctttgcaa

SEQ ID NO: 216686 - DNA, 20 bp, Artificial Sequence
  Description of Artificial Sequence: Synthetic oligonucleotide
  Target: LAMA2; (-) strand; PAM type: YTN; PAM sequence: CTC
ttatctttgaaaacctttgc

SEQ ID NO: 216687 - DNA, 20 bp, Artificial Sequence
  Description of Artificial Sequence: Synthetic oligonucleotide
  Target: LAMA2; (-) strand; PAM type: YTN; PAM sequence: CTC
aaatgtctcttatctttgaa

SEQ ID NO: 216688 - DNA, 20 bp, Artificial Sequence
  Description of Artificial Sequence: Synthetic oligonucleotide
  Target: LAMA2; (-) strand; PAM type: YTN; PAM sequence: CTA
aaccaactcaaatgtctctt

SEQ ID NO: 216689 - DNA, 20 bp, Artificial Sequence
  Description of Artificial Sequence: Synthetic oligonucleotide
  Target: LAMA2; (-) strand; PAM type: YTN; PAM sequence: TTC
cccccaagcatctaaaccaa

SEQ ID NO: 216690 - DNA, 20 bp, Artificial Sequence
  Description of Artificial Sequence: Synthetic oligonucleotide
  Target: LAMA2; (-) strand; PAM type: YTN; PAM sequence: TTT
ccccccaagcatctaaacca

SEQ ID NO: 216691 - DNA, 20 bp, Artificial Sequence
  Description of Artificial Sequence: Synthetic oligonucleotide
  Target: LAMA2; (-) strand; PAM type: YTN; PAM sequence: CTT
tccccccaagcatctaaacc

SEQ ID NO: 216692 - DNA, 20 bp, Artificial Sequence
  Description of Artificial Sequence: Synthetic oligonucleotide
  Target: LAMA2; (-) strand; PAM type: YTN; PAM sequence: CTG
cctttccccccaagcatcta

SEQ ID NO: 216693 - DNA, 20 bp, Artificial Sequence
  Description of Artificial Sequence: Synthetic oligonucleotide
  Target: LAMA2; (-) strand; PAM type: YTN; PAM sequence: TTC
cctgcctttccccccaagca

SEQ ID NO: 216694 - DNA, 20 bp, Artificial Sequence
  Description of Artificial Sequence: Synthetic oligonucleotide
  Target: LAMA2; (-) strand; PAM type: YTN; PAM sequence: CTT
ccctgcctttccccccaagc

SEQ ID NO: 216695 - DNA, 20 bp, Artificial Sequence
  Description of Artificial Sequence: Synthetic oligonucleotide
  Target: LAMA2; (-) strand; PAM type: YTN; PAM sequence: TTC
aacttccctgcctttccccc

SEQ ID NO: 216696 - DNA, 20 bp, Artificial Sequence
  Description of Artificial Sequence: Synthetic oligonucleotide
  Target: LAMA2; (-) strand; PAM type: YTN; PAM sequence: CTT
caacttccctgcctttcccc

SEQ ID NO: 216697 - DNA, 20 bp, Artificial Sequence
  Description of Artificial Sequence: Synthetic oligonucleotide
  Target: LAMA2; (-) strand; PAM type: YTN; PAM sequence: TTG
gtcttcaacttccctgcctt

SEQ ID NO: 216698 - DNA, 20 bp, Artificial Sequence
  Description of Artificial Sequence: Synthetic oligonucleotide
  Target: LAMA2; (-) strand; PAM type: YTN; PAM sequence: CTT
ggtcttcaacttccctgcct

SEQ ID NO: 216699 - DNA, 20 bp, Artificial Sequence
  Description of Artificial Sequence: Synthetic oligonucleotide
  Target: LAMA2; (-) strand; PAM type: YTN; PAM sequence: CTA
gagagacaccatgcccacca

SEQ ID NO: 216700 - DNA, 20 bp, Artificial Sequence
  Description of Artificial Sequence: Synthetic oligonucleotide
  Target: LAMA2; (-) strand; PAM type: YTN; PAM sequence: TTC
tagagagacaccatgcccac

SEQ ID NO: 216701 - DNA, 20 bp, Artificial Sequence
  Description of Artificial Sequence: Synthetic oligonucleotide
  Target: LAMA2; (-) strand; PAM type: YTN; PAM sequence: CTT
ctagagagacaccatgccca

SEQ ID NO: 216702 - DNA, 20 bp, Artificial Sequence
  Description of Artificial Sequence: Synthetic oligonucleotide
  Target: LAMA2; (-) strand; PAM type: YTN; PAM sequence: TTA
cttctagagagacaccatgc

SEQ ID NO: 216703 - DNA, 20 bp, Artificial Sequence
  Description of Artificial Sequence: Synthetic oligonucleotide
  Target: LAMA2; (-) strand; PAM type: YTN; PAM sequence: TTT
acttctagagagacaccatg

SEQ ID NO: 216704 - DNA, 20 bp, Artificial Sequence
  Description of Artificial Sequence: Synthetic oligonucleotide
  Target: LAMA2; (-) strand; PAM type: YTN; PAM sequence: TTT
tacttctagagagacaccat

SEQ ID NO: 216705 - DNA, 20 bp, Artificial Sequence
  Description of Artificial Sequence: Synthetic oligonucleotide
  Target: LAMA2; (-) strand; PAM type: YTN; PAM sequence: TTT
ttacttctagagagacacca

SEQ ID NO: 216706 - DNA, 20 bp, Artificial Sequence
  Description of Artificial Sequence: Synthetic oligonucleotide
  Target: LAMA2; (-) strand; PAM type: YTN; PAM sequence: TTA
atgacccatatgtttttact

SEQ ID NO: 216707 - DNA, 20 bp, Artificial Sequence
  Description of Artificial Sequence: Synthetic oligonucleotide
  Target: LAMA2; (-) strand; PAM type: YTN; PAM sequence: CTT
aatgacccatatgtttttac

SEQ ID NO: 216708 - DNA, 20 bp, Artificial Sequence
  Description of Artificial Sequence: Synthetic oligonucleotide
  Target: LAMA2; (-) strand; PAM type: YTN; PAM sequence: CTA
tgcttaatgacccatatgtt

SEQ ID NO: 216709 - DNA, 20 bp, Artificial Sequence
  Description of Artificial Sequence: Synthetic oligonucleotide
  Target: LAMA2; (-) strand; PAM type: YTN; PAM sequence: TTG
cctatgcttaatgacccata

SEQ ID NO: 216710 - DNA, 20 bp, Artificial Sequence
  Description of Artificial Sequence: Synthetic oligonucleotide
  Target: LAMA2; (-) strand; PAM type: YTN; PAM sequence: TTT
gcctatgcttaatgacccat

SEQ ID NO: 216711 - DNA, 20 bp, Artificial Sequence
  Description of Artificial Sequence: Synthetic oligonucleotide
  Target: LAMA2; (-) strand; PAM type: YTN; PAM sequence: TTT
tgcctatgcttaatgaccca

SEQ ID NO: 216712 - DNA, 20 bp, Artificial Sequence
  Description of Artificial Sequence: Synthetic oligonucleotide
  Target: LAMA2; (-) strand; PAM type: YTN; PAM sequence: TTT
ttgcctatgcttaatgaccc

SEQ ID NO: 216713 - DNA, 20 bp, Artificial Sequence
  Description of Artificial Sequence: Synthetic oligonucleotide
  Target: LAMA2; (-) strand; PAM type: YTN; PAM sequence: CTA
atataaggtttttgcctatg

SEQ ID NO: 216714 - DNA, 20 bp, Artificial Sequence
  Description of Artificial Sequence: Synthetic oligonucleotide
  Target: LAMA2; (-) strand; PAM type: YTN; PAM sequence: TTC
taatataaggtttttgccta

SEQ ID NO: 216715 - DNA, 20 bp, Artificial Sequence
  Description of Artificial Sequence: Synthetic oligonucleotide
  Target: LAMA2; (-) strand; PAM type: YTN; PAM sequence: CTT
ctaatataaggtttttgcct

SEQ ID NO: 216716 - DNA, 20 bp, Artificial Sequence
  Description of Artificial Sequence: Synthetic oligonucleotide
  Target: LAMA2; (-) strand; PAM type: YTN; PAM sequence: TTA
aaagtatgtatcttctaata

SEQ ID NO: 216717 - DNA, 20 bp, Artificial Sequence
  Description of Artificial Sequence: Synthetic oligonucleotide
  Target: LAMA2; (-) strand; PAM type: YTN; PAM sequence: TTG
gtgagttaaaagtatgtatc

SEQ ID NO: 216718 - DNA, 20 bp, Artificial Sequence
  Description of Artificial Sequence: Synthetic oligonucleotide
  Target: LAMA2; (-) strand; PAM type: YTN; PAM sequence: TTT
ggtgagttaaaagtatgtat

SEQ ID NO: 216719 - DNA, 20 bp, Artificial Sequence
  Description of Artificial Sequence: Synthetic oligonucleotide
  Target: LAMA2; (-) strand; PAM type: YTN; PAM sequence: CTG
atttggtgagttaaaagtat

SEQ ID NO: 216720 - DNA, 20 bp, Artificial Sequence
  Description of Artificial Sequence: Synthetic oligonucleotide
  Target: LAMA2; (-) strand; PAM type: YTN; PAM sequence: TTC
tgatttggtgagttaaaagt

SEQ ID NO: 216721 - DNA, 20 bp, Artificial Sequence
  Description of Artificial Sequence: Synthetic oligonucleotide
  Target: LAMA2; (-) strand; PAM type: YTN; PAM sequence: TTT
ctgatttggtgagttaaaag

SEQ ID NO: 216722 - DNA, 20 bp, Artificial Sequence
  Description of Artificial Sequence: Synthetic oligonucleotide
  Target: LAMA2; (-) strand; PAM type: YTN; PAM sequence: CTT
tctgatttggtgagttaaaa

SEQ ID NO: 216723 - DNA, 20 bp, Artificial Sequence
  Description of Artificial Sequence: Synthetic oligonucleotide
  Target: LAMA2; (-) strand; PAM type: YTN; PAM sequence: TTC
tttctgatttggtgagttaa

SEQ ID NO: 216724 - DNA, 20 bp, Artificial Sequence
  Description of Artificial Sequence: Synthetic oligonucleotide
  Target: LAMA2; (-) strand; PAM type: YTN; PAM sequence: CTT
ctttctgatttggtgagtta

SEQ ID NO: 216725 - DNA, 20 bp, Artificial Sequence
  Description of Artificial Sequence: Synthetic oligonucleotide
  Target: LAMA2; (-) strand; PAM type: YTN; PAM sequence: TTC
ttctttctgatttggtgagt

SEQ ID NO: 216726 - DNA, 20 bp, Artificial Sequence
  Description of Artificial Sequence: Synthetic oligonucleotide
  Target: LAMA2; (-) strand; PAM type: YTN; PAM sequence: TTT
cttctttctgatttggtgag

SEQ ID NO: 216727 - DNA, 20 bp, Artificial Sequence
  Description of Artificial Sequence: Synthetic oligonucleotide
  Target: LAMA2; (-) strand; PAM type: YTN; PAM sequence: CTT
tcttctttctgatttggtga

SEQ ID NO: 216728 - DNA, 20 bp, Artificial Sequence
  Description of Artificial Sequence: Synthetic oligonucleotide
  Target: LAMA2; (-) strand; PAM type: YTN; PAM sequence: TTC
tttcttctttctgatttggt

SEQ ID NO: 216729 - DNA, 20 bp, Artificial Sequence
  Description of Artificial Sequence: Synthetic oligonucleotide
  Target: LAMA2; (-) strand; PAM type: YTN; PAM sequence: TTC
attctttcttctttctgatt

SEQ ID NO: 216730 - DNA, 20 bp, Artificial Sequence
  Description of Artificial Sequence: Synthetic oligonucleotide
  Target: LAMA2; (-) strand; PAM type: YTN; PAM sequence: CTA
ttcattctttcttctttctg

SEQ ID NO: 216731 - DNA, 20 bp, Artificial Sequence
  Description of Artificial Sequence: Synthetic oligonucleotide
  Target: LAMA2; (-) strand; PAM type: YTN; PAM sequence: CTG
ctattcattctttcttcttt

SEQ ID NO: 216732 - DNA, 20 bp, Artificial Sequence
  Description of Artificial Sequence: Synthetic oligonucleotide
  Target: LAMA2; (-) strand; PAM type: YTN; PAM sequence: CTG
ctgctattcattctttcttc

SEQ ID NO: 216733 - DNA, 20 bp, Artificial Sequence
  Description of Artificial Sequence: Synthetic oligonucleotide
  Target: LAMA2; (-) strand; PAM type: YTN; PAM sequence: CTG
actgctgctattcattcttt

SEQ ID NO: 216734 - DNA, 20 bp, Artificial Sequence
  Description of Artificial Sequence: Synthetic oligonucleotide
  Target: LAMA2; (-) strand; PAM type: YTN; PAM sequence: CTG
ctgactgctgctattcattc

SEQ ID NO: 216735 - DNA, 20 bp, Artificial Sequence
  Description of Artificial Sequence: Synthetic oligonucleotide
  Target: LAMA2; (-) strand; PAM type: YTN; PAM sequence: TTC
tgctgactgctgctattcat

SEQ ID NO: 216736 - DNA, 20 bp, Artificial Sequence
  Description of Artificial Sequence: Synthetic oligonucleotide
  Target: LAMA2; (-) strand; PAM type: YTN; PAM sequence: TTT
ctgctgactgctgctattca

SEQ ID NO: 216737 - DNA, 20 bp, Artificial Sequence
  Description of Artificial Sequence: Synthetic oligonucleotide
  Target: LAMA2; (-) strand; PAM type: YTN; PAM sequence: CTT
tctgctgactgctgctattc

SEQ ID NO: 216738 - DNA, 20 bp, Artificial Sequence
  Description of Artificial Sequence: Synthetic oligonucleotide
  Target: LAMA2; (-) strand; PAM type: YTN; PAM sequence: CTC
ccaacactttctgctgactg

SEQ ID NO: 216739 - DNA, 20 bp, Artificial Sequence
  Description of Artificial Sequence: Synthetic oligonucleotide
  Target: LAMA2; (-) strand; PAM type: YTN; PAM sequence: TTC
tcccaacactttctgctgac

SEQ ID NO: 216740 - DNA, 20 bp, Artificial Sequence
  Description of Artificial Sequence: Synthetic oligonucleotide
  Target: LAMA2; (-) strand; PAM type: YTN; PAM sequence: TTT
ctcccaacactttctgctga

SEQ ID NO: 216741 - DNA, 20 bp, Artificial Sequence
  Description of Artificial Sequence: Synthetic oligonucleotide
  Target: LAMA2; (-) strand; PAM type: YTN; PAM sequence: TTA
atgaagaaatcaagatcatc

SEQ ID NO: 216742 - DNA, 20 bp, Artificial Sequence
  Description of Artificial Sequence: Synthetic oligonucleotide
  Target: LAMA2; (-) strand; PAM type: YTN; PAM sequence: CTT
aatgaagaaatcaagatcat

SEQ ID NO: 216743 - DNA, 20 bp, Artificial Sequence
  Description of Artificial Sequence: Synthetic oligonucleotide
  Target: LAMA2; (-) strand; PAM type: YTN; PAM sequence: TTA
catcttaatgaagaaatcaa

SEQ ID NO: 216744 - DNA, 20 bp, Artificial Sequence
  Description of Artificial Sequence: Synthetic oligonucleotide
  Target: LAMA2; (-) strand; PAM type: YTN; PAM sequence: TTT
acatcttaatgaagaaatca

SEQ ID NO: 216745 - DNA, 20 bp, Artificial Sequence
  Description of Artificial Sequence: Synthetic oligonucleotide
  Target: LAMA2; (-) strand; PAM type: YTN; PAM sequence: CTC
agcaggtaacccagatttac

SEQ ID NO: 216746 - DNA, 20 bp, Artificial Sequence
  Description of Artificial Sequence: Synthetic oligonucleotide
  Target: LAMA2; (-) strand; PAM type: YTN; PAM sequence: TTC
ctcagcaggtaacccagatt

SEQ ID NO: 216747 - DNA, 20 bp, Artificial Sequence
  Description of Artificial Sequence: Synthetic oligonucleotide
  Target: LAMA2; (-) strand; PAM type: YTN; PAM sequence: TTT
cctcagcaggtaacccagat

SEQ ID NO: 216748 - DNA, 20 bp, Artificial Sequence
  Description of Artificial Sequence: Synthetic oligonucleotide
  Target: LAMA2; (-) strand; PAM type: YTN; PAM sequence: CTT
tcctcagcaggtaacccaga

SEQ ID NO: 216749 - DNA, 20 bp, Artificial Sequence
  Description of Artificial Sequence: Synthetic oligonucleotide
  Target: LAMA2; (-) strand; PAM type: YTN; PAM sequence: TTC
tttcctcagcaggtaaccca

SEQ ID NO: 216750 - DNA, 20 bp, Artificial Sequence
  Description of Artificial Sequence: Synthetic oligonucleotide
  Target: LAMA2; (-) strand; PAM type: YTN; PAM sequence: CTT
ctttcctcagcaggtaaccc

SEQ ID NO: 216751 - DNA, 20 bp, Artificial Sequence
  Description of Artificial Sequence: Synthetic oligonucleotide
  Target: LAMA2; (-) strand; PAM type: YTN; PAM sequence: TTG
cttctttcctcagcaggtaa

SEQ ID NO: 216752 - DNA, 20 bp, Artificial Sequence
  Description of Artificial Sequence: Synthetic oligonucleotide
  Target: LAMA2; (-) strand; PAM type: YTN; PAM sequence: TTT
gcttctttcctcagcaggta

SEQ ID NO: 216753 - DNA, 20 bp, Artificial Sequence
  Description of Artificial Sequence: Synthetic oligonucleotide
  Target: LAMA2; (-) strand; PAM type: YTN; PAM sequence: CTA
aatgtttgcttctttcctca

SEQ ID NO: 216754 - DNA, 20 bp, Artificial Sequence
  Description of Artificial Sequence: Synthetic oligonucleotide
  Target: LAMA2; (-) strand; PAM type: YTN; PAM sequence: CTC
ataatctaaatgtttgcttc

SEQ ID NO: 216755 - DNA, 20 bp, Artificial Sequence
  Description of Artificial Sequence: Synthetic oligonucleotide
  Target: LAMA2; (-) strand; PAM type: YTN; PAM sequence: CTG
agaggctcataatctaaatg

SEQ ID NO: 216756 - DNA, 20 bp, Artificial Sequence
  Description of Artificial Sequence: Synthetic oligonucleotide
  Target: LAMA2; (-) strand; PAM type: YTN; PAM sequence: TTC
ccctgagaggctcataatct

SEQ ID NO: 216757 - DNA, 20 bp, Artificial Sequence
  Description of Artificial Sequence: Synthetic oligonucleotide
  Target: LAMA2; (-) strand; PAM type: YTN; PAM sequence: CTA
ttcccctgagaggctcataa

SEQ ID NO: 216758 - DNA, 20 bp, Artificial Sequence
  Description of Artificial Sequence: Synthetic oligonucleotide
  Target: LAMA2; (-) strand; PAM type: YTN; PAM sequence: CTC
ctattcccctgagaggctca

SEQ ID NO: 216759 - DNA, 20 bp, Artificial Sequence
  Description of Artificial Sequence: Synthetic oligonucleotide
  Target: LAMA2; (-) strand; PAM type: YTN; PAM sequence: CTC
agtgatcccctcctattccc

SEQ ID NO: 216760 - DNA, 20 bp, Artificial Sequence
  Description of Artificial Sequence: Synthetic oligonucleotide
  Target: LAMA2; (-) strand; PAM type: YTN; PAM sequence: TTA
cggctcagtgatcccctcct

SEQ ID NO: 216761 - DNA, 20 bp, Artificial Sequence
  Description of Artificial Sequence: Synthetic oligonucleotide
  Target: LAMA2; (-) strand; PAM type: YTN; PAM sequence: CTG
attacggctcagtgatcccc

SEQ ID NO: 216762 - DNA, 20 bp, Artificial Sequence
  Description of Artificial Sequence: Synthetic oligonucleotide
  Target: LAMA2; (-) strand; PAM type: YTN; PAM sequence: TTC
tgattacggctcagtgatcc

SEQ ID NO: 216763 - DNA, 20 bp, Artificial Sequence
  Description of Artificial Sequence: Synthetic oligonucleotide
  Target: LAMA2; (-) strand; PAM type: YTN; PAM sequence: TTA
ttctgattacggctcagtga

SEQ ID NO: 216764 - DNA, 20 bp, Artificial Sequence
  Description of Artificial Sequence: Synthetic oligonucleotide
  Target: LAMA2; (-) strand; PAM type: YTN; PAM sequence: TTT
attctgattacggctcagtg

SEQ ID NO: 216765 - DNA, 20 bp, Artificial Sequence
  Description of Artificial Sequence: Synthetic oligonucleotide
  Target: LAMA2; (-) strand; PAM type: YTN; PAM sequence: CTT
tattctgattacggctcagt

SEQ ID NO: 216766 - DNA, 20 bp, Artificial Sequence
  Description of Artificial Sequence: Synthetic oligonucleotide
  Target: LAMA2; (-) strand; PAM type: YTN; PAM sequence: TTG
ccactttattctgattacgg

SEQ ID NO: 216767 - DNA, 20 bp, Artificial Sequence
  Description of Artificial Sequence: Synthetic oligonucleotide
  Target: LAMA2; (-) strand; PAM type: YTN; PAM sequence: CTC
catatggaattgccacttta

SEQ ID NO: 216768 - DNA, 20 bp, Artificial Sequence
  Description of Artificial Sequence: Synthetic oligonucleotide
  Target: LAMA2; (-) strand; PAM type: YTN; PAM sequence: TTA
ctccatatggaattgccact

SEQ ID NO: 216769 - DNA, 20 bp, Artificial Sequence
  Description of Artificial Sequence: Synthetic oligonucleotide
  Target: LAMA2; (-) strand; PAM type: YTN; PAM sequence: TTT
actccatatggaattgccac

SEQ ID NO: 216770 - DNA, 20 bp, Artificial Sequence
  Description of Artificial Sequence: Synthetic oligonucleotide
  Target: LAMA2; (-) strand; PAM type: YTN; PAM sequence: TTT
tactccatatggaattgcca

SEQ ID NO: 216771 - DNA, 20 bp, Artificial Sequence
  Description of Artificial Sequence: Synthetic oligonucleotide
  Target: LAMA2; (-) strand; PAM type: YTN; PAM sequence: TTA
ttttactccatatggaattg

SEQ ID NO: 216772 - DNA, 20 bp, Artificial Sequence
  Description of Artificial Sequence: Synthetic oligonucleotide
  Target: LAMA2; (-) strand; PAM type: YTN; PAM sequence: TTT
attttactccatatggaatt

SEQ ID NO: 216773 - DNA, 20 bp, Artificial Sequence
  Description of Artificial Sequence: Synthetic oligonucleotide
  Target: LAMA2; (-) strand; PAM type: YTN; PAM sequence: CTT
tattttactccatatggaat

SEQ ID NO: 216774 - DNA, 20 bp, Artificial Sequence
  Description of Artificial Sequence: Synthetic oligonucleotide
  Target: LAMA2; (-) strand; PAM type: YTN; PAM sequence: TTC
tttattttactccatatgga

SEQ ID NO: 216775 - DNA, 20 bp, Artificial Sequence
  Description of Artificial Sequence: Synthetic oligonucleotide
  Target: LAMA2; (-) strand; PAM type: YTN; PAM sequence: TTG
attctttattttactccata

SEQ ID NO: 216776 - DNA, 20 bp, Artificial Sequence
  Description of Artificial Sequence: Synthetic oligonucleotide
  Target: LAMA2; (-) strand; PAM type: YTN; PAM sequence: TTT
gattctttattttactccat

SEQ ID NO: 216777 - DNA, 20 bp, Artificial Sequence
  Description of Artificial Sequence: Synthetic oligonucleotide
  Target: LAMA2; (-) strand; PAM type: YTN; PAM sequence: CTC
caagagtatcagtccacacg

SEQ ID NO: 216778 - DNA, 20 bp, Artificial Sequence
  Description of Artificial Sequence: Synthetic oligonucleotide
  Target: LAMA2; (-) strand; PAM type: YTN; PAM sequence: CTG
taatgctccaagagtatcag

SEQ ID NO: 216779 - DNA, 20 bp, Artificial Sequence
  Description of Artificial Sequence: Synthetic oligonucleotide
  Target: LAMA2; (-) strand; PAM type: YTN; PAM sequence: TTC
cctgtaatgctccaagagta

SEQ ID NO: 216780 - DNA, 20 bp, Artificial Sequence
  Description of Artificial Sequence: Synthetic oligonucleotide
  Target: LAMA2; (-) strand; PAM type: YTN; PAM sequence: TTT
ccctgtaatgctccaagagt

SEQ ID NO: 216781 - DNA, 20 bp, Artificial Sequence
  Description of Artificial Sequence: Synthetic oligonucleotide
  Target: LAMA2; (-) strand; PAM type: YTN; PAM sequence: CTT
tccctgtaatgctccaagag

SEQ ID NO: 216782 - DNA, 20 bp, Artificial Sequence
  Description of Artificial Sequence: Synthetic oligonucleotide
  Target: LAMA2; (-) strand; PAM type: YTN; PAM sequence: CTA
ctttccctgtaatgctccaa

SEQ ID NO: 216783 - DNA, 20 bp, Artificial Sequence
  Description of Artificial Sequence: Synthetic oligonucleotide
  Target: LAMA2; (-) strand; PAM type: YTN; PAM sequence: TTC
tactttccctgtaatgctcc

SEQ ID NO: 216784 - DNA, 20 bp, Artificial Sequence
  Description of Artificial Sequence: Synthetic oligonucleotide
  Target: LAMA2; (-) strand; PAM type: YTN; PAM sequence: TTC
cattctactttccctgtaat

SEQ ID NO: 216785 - DNA, 20 bp, Artificial Sequence
  Description of Artificial Sequence: Synthetic oligonucleotide
  Target: LAMA2; (-) strand; PAM type: YTN; PAM sequence: TTT
ccattctactttccctgtaa

SEQ ID NO: 216786 - DNA, 20 bp, Artificial Sequence
  Description of Artificial Sequence: Synthetic oligonucleotide
  Target: LAMA2; (-) strand; PAM type: YTN; PAM sequence: CTT
tccattctactttccctgta

SEQ ID NO: 216787 - DNA, 20 bp, Artificial Sequence
  Description of Artificial Sequence: Synthetic oligonucleotide
  Target: LAMA2; (-) strand; PAM type: YTN; PAM sequence: CTC
tttccattctactttccctg

SEQ ID NO: 216788 - DNA, 20 bp, Artificial Sequence
  Description of Artificial Sequence: Synthetic oligonucleotide
  Target: LAMA2; (-) strand; PAM type: YTN; PAM sequence: TTC
tctttccattctactttccc

SEQ ID NO: 216789 - DNA, 20 bp, Artificial Sequence
  Description of Artificial Sequence: Synthetic oligonucleotide
  Target: LAMA2; (-) strand; PAM type: YTN; PAM sequence: CTT
ctctttccattctactttcc

SEQ ID NO: 216790 - DNA, 20 bp, Artificial Sequence
  Description of Artificial Sequence: Synthetic oligonucleotide
  Target: LAMA2; (-) strand; PAM type: YTN; PAM sequence: TTG
ccatcttctctttccattct

SEQ ID NO: 216791 - DNA, 20 bp, Artificial Sequence
  Description of Artificial Sequence: Synthetic oligonucleotide
  Target: LAMA2; (-) strand; PAM type: YTN; PAM sequence: CTT
gccatcttctctttccattc

SEQ ID NO: 216792 - DNA, 20 bp, Artificial Sequence
  Description of Artificial Sequence: Synthetic oligonucleotide
  Target: LAMA2; (-) strand; PAM type: YTN; PAM sequence: TTC
ttgccatcttctctttccat

SEQ ID NO: 216793 - DNA, 20 bp, Artificial Sequence
  Description of Artificial Sequence: Synthetic oligonucleotide
  Target: LAMA2; (-) strand; PAM type: YTN; PAM sequence: TTT
cttgccatcttctctttcca

SEQ ID NO: 216794 - DNA, 20 bp, Artificial Sequence
  Description of Artificial Sequence: Synthetic oligonucleotide
  Target: LAMA2; (-) strand; PAM type: YTN; PAM sequence: TTT
tcttgccatcttctctttcc

SEQ ID NO: 216795 - DNA, 20 bp, Artificial Sequence
  Description of Artificial Sequence: Synthetic oligonucleotide
  Target: LAMA2; (-) strand; PAM type: YTN; PAM sequence: TTC
aattttcttgccatcttctc

SEQ ID NO: 216796 - DNA, 20 bp, Artificial Sequence
  Description of Artificial Sequence: Synthetic oligonucleotide
  Target: LAMA2; (-) strand; PAM type: YTN; PAM sequence: CTT
caattttcttgccatcttct

SEQ ID NO: 216797 - DNA, 20 bp, Artificial Sequence
  Description of Artificial Sequence: Synthetic oligonucleotide
  Target: LAMA2; (-) strand; PAM type: YTN; PAM sequence: TTC
ttcaattttcttgccatctt

SEQ ID NO: 216798 - DNA, 20 bp, Artificial Sequence
  Description of Artificial Sequence: Synthetic oligonucleotide
  Target: LAMA2; (-) strand; PAM type: YTN; PAM sequence: TTT
cttcaattttcttgccatct

SEQ ID NO: 216799 - DNA, 20 bp, Artificial Sequence
  Description of Artificial Sequence: Synthetic oligonucleotide
  Target: LAMA2; (-) strand; PAM type: YTN; PAM sequence: TTT
tcttcaattttcttgccatc

SEQ ID NO: 216800 - DNA, 20 bp, Artificial Sequence
  Description of Artificial Sequence: Synthetic oligonucleotide
  Target: LAMA2; (-) strand; PAM type: YTN; PAM sequence: CTT
ttcttcaattttcttgccat

SEQ ID NO: 216801 - DNA, 20 bp, Artificial Sequence
  Description of Artificial Sequence: Synthetic oligonucleotide
  Target: LAMA2; (-) strand; PAM type: YTN; PAM sequence: CTG
accttttcttcaattttctt

SEQ ID NO: 216802 - DNA, 20 bp, Artificial Sequence
  Description of Artificial Sequence: Synthetic oligonucleotide
  Target: LAMA2; (-) strand; PAM type: YTN; PAM sequence: TTC
tgaccttttcttcaattttc

SEQ ID NO: 216803 - DNA, 20 bp, Artificial Sequence
  Description of Artificial Sequence: Synthetic oligonucleotide
  Target: LAMA2; (-) strand; PAM type: YTN; PAM sequence: TTT
ctgaccttttcttcaatttt

SEQ ID NO: 216804 - DNA, 20 bp, Artificial Sequence
  Description of Artificial Sequence: Synthetic oligonucleotide
  Target: LAMA2; (-) strand; PAM type: YTN; PAM sequence: CTT
tctgaccttttcttcaattt

SEQ ID NO: 216805 - DNA, 20 bp, Artificial Sequence
  Description of Artificial Sequence: Synthetic oligonucleotide
  Target: LAMA2; (-) strand; PAM type: YTN; PAM sequence: TTA
ctttctgaccttttcttcaa

SEQ ID NO: 216806 - DNA, 20 bp, Artificial Sequence
  Description of Artificial Sequence: Synthetic oligonucleotide
  Target: LAMA2; (-) strand; PAM type: YTN; PAM sequence: TTT
actttctgaccttttcttca

SEQ ID NO: 216807 - DNA, 20 bp, Artificial Sequence
  Description of Artificial Sequence: Synthetic oligonucleotide
  Target: LAMA2; (-) strand; PAM type: YTN; PAM sequence: TTC
atttactttctgaccttttc

SEQ ID NO: 216808 - DNA, 20 bp, Artificial Sequence
  Description of Artificial Sequence: Synthetic oligonucleotide
  Target: LAMA2; (-) strand; PAM type: YTN; PAM sequence: CTA
ataatccatcaattcattta

SEQ ID NO: 216809 - DNA, 20 bp, Artificial Sequence
  Description of Artificial Sequence: Synthetic oligonucleotide
  Target: LAMA2; (-) strand; PAM type: YTN; PAM sequence: CTG
aaactaataatccatcaatt

SEQ ID NO: 216810 - DNA, 20 bp, Artificial Sequence
  Description of Artificial Sequence: Synthetic oligonucleotide
  Target: LAMA2; (-) strand; PAM type: YTN; PAM sequence: CTA
atgaacctgaaactaataat

SEQ ID NO: 216811 - DNA, 20 bp, Artificial Sequence
  Description of Artificial Sequence: Synthetic oligonucleotide
  Target: LAMA2; (-) strand; PAM type: YTN; PAM sequence: TTG
cctaatgaacctgaaactaa

SEQ ID NO: 216812 - DNA, 20 bp, Artificial Sequence
  Description of Artificial Sequence: Synthetic oligonucleotide
  Target: LAMA2; (-) strand; PAM type: YTN; PAM sequence: CTT
gcctaatgaacctgaaacta

SEQ ID NO: 216813 - DNA, 20 bp, Artificial Sequence
  Description of Artificial Sequence: Synthetic oligonucleotide
  Target: LAMA2; (-) strand; PAM type: YTN; PAM sequence: TTG
tcatcttgcctaatgaacct

SEQ ID NO: 216814 - DNA, 20 bp, Artificial Sequence
  Description of Artificial Sequence: Synthetic oligonucleotide
  Target: LAMA2; (-) strand; PAM type: YTN; PAM sequence: TTT
gtcatcttgcctaatgaacc

SEQ ID NO: 216815 - DNA, 20 bp, Artificial Sequence
  Description of Artificial Sequence: Synthetic oligonucleotide
  Target: LAMA2; (-) strand; PAM type: YTN; PAM sequence: CTT
tgtcatcttgcctaatgaac

SEQ ID NO: 216816 - DNA, 20 bp, Artificial Sequence
  Description of Artificial Sequence: Synthetic oligonucleotide
  Target: LAMA2; (-) strand; PAM type: YTN; PAM sequence: CTC
catcaggctttgtcatcttg

SEQ ID NO: 216817 - DNA, 20 bp, Artificial Sequence
  Description of Artificial Sequence: Synthetic oligonucleotide
  Target: LAMA2; (-) strand; PAM type: YTN; PAM sequence: TTC
cctccatcaggctttgtcat

SEQ ID NO: 216818 - DNA, 20 bp, Artificial Sequence
  Description of Artificial Sequence: Synthetic oligonucleotide
  Target: LAMA2; (-) strand; PAM type: YTN; PAM sequence: TTT
ccctccatcaggctttgtca

SEQ ID NO: 216819 - DNA, 20 bp, Artificial Sequence
  Description of Artificial Sequence: Synthetic oligonucleotide
  Target: LAMA2; (-) strand; PAM type: YTN; PAM sequence: CTG
aaccaatggtagtttccctc

SEQ ID NO: 216820 - DNA, 20 bp, Artificial Sequence
  Description of Artificial Sequence: Synthetic oligonucleotide
  Target: LAMA2; (-) strand; PAM type: YTN; PAM sequence: TTC
aaggccaccagtccctgaac

SEQ ID NO: 216821 - DNA, 20 bp, Artificial Sequence
  Description of Artificial Sequence: Synthetic oligonucleotide
  Target: LAMA2; (-) strand; PAM type: YTN; PAM sequence: TTT
caaggccaccagtccctgaa

SEQ ID NO: 216822 - DNA, 20 bp, Artificial Sequence
  Description of Artificial Sequence: Synthetic oligonucleotide
  Target: LAMA2; (-) strand; PAM type: YTN; PAM sequence: TTT
tcaaggccaccagtccctga

SEQ ID NO: 216823 - DNA, 20 bp, Artificial Sequence
  Description of Artificial Sequence: Synthetic oligonucleotide
  Target: LAMA2; (-) strand; PAM type: YTN; PAM sequence: CTA
tgaaattttcaaggccacca

SEQ ID NO: 216824 - DNA, 20 bp, Artificial Sequence
  Description of Artificial Sequence: Synthetic oligonucleotide
  Target: LAMA2; (-) strand; PAM type: YTN; PAM sequence: CTC
tatgaaattttcaaggccac

SEQ ID NO: 216825 - DNA, 20 bp, Artificial Sequence
  Description of Artificial Sequence: Synthetic oligonucleotide
  Target: LAMA2; (-) strand; PAM type: YTN; PAM sequence: TTC
tctatgaaattttcaaggcc

SEQ ID NO: 216826 - DNA, 20 bp, Artificial Sequence
  Description of Artificial Sequence: Synthetic oligonucleotide
  Target: LAMA2; (-) strand; PAM type: YTN; PAM sequence: CTC
acattctctatgaaattttc

SEQ ID NO: 216827 - DNA, 20 bp, Artificial Sequence
  Description of Artificial Sequence: Synthetic oligonucleotide
  Target: LAMA2; (-) strand; PAM type: YTN; PAM sequence: TTC
tcacattctctatgaaattt

SEQ ID NO: 216828 - DNA, 20 bp, Artificial Sequence
  Description of Artificial Sequence: Synthetic oligonucleotide
  Target: LAMA2; (-) strand; PAM type: YTN; PAM sequence: TTT
ctcacattctctatgaaatt

SEQ ID NO: 216829 - DNA, 20 bp, Artificial Sequence
  Description of Artificial Sequence: Synthetic oligonucleotide
  Target: LAMA2; (-) strand; PAM type: YTN; PAM sequence: CTT
tctcacattctctatgaaat

SEQ ID NO: 216830 - DNA, 20 bp, Artificial Sequence
  Description of Artificial Sequence: Synthetic oligonucleotide
  Target: LAMA2; (-) strand; PAM type: YTN; PAM sequence: CTG
ggctttctcacattctctat

SEQ ID NO: 216831 - DNA, 20 bp, Artificial Sequence
  Description of Artificial Sequence: Synthetic oligonucleotide
  Target: LAMA2; (-) strand; PAM type: YTN; PAM sequence: TTC
atgcccctgggctttctcac

SEQ ID NO: 216832 - DNA, 20 bp, Artificial Sequence
  Description of Artificial Sequence: Synthetic oligonucleotide
  Target: LAMA2; (-) strand; PAM type: YTN; PAM sequence: CTC
cgttcatgcccctgggcttt

SEQ ID NO: 216833 - DNA, 20 bp, Artificial Sequence
  Description of Artificial Sequence: Synthetic oligonucleotide
  Target: LAMA2; (-) strand; PAM type: YTN; PAM sequence: CTC
cccacaactccgttcatgcc

SEQ ID NO: 216834 - DNA, 20 bp, Artificial Sequence
  Description of Artificial Sequence: Synthetic oligonucleotide
  Target: LAMA2; (-) strand; PAM type: YTN; PAM sequence: CTC
ctccccacaactccgttcat

SEQ ID NO: 216835 - DNA, 20 bp, Artificial Sequence
  Description of Artificial Sequence: Synthetic oligonucleotide
  Target: LAMA2; (-) strand; PAM type: YTN; PAM sequence: CTC
gcacctcctccccacaactc

SEQ ID NO: 216836 - DNA, 20 bp, Artificial Sequence
  Description of Artificial Sequence: Synthetic oligonucleotide
  Target: LAMA2; (-) strand; PAM type: YTN; PAM sequence: CTA
cacactcgcacctcctcccc

SEQ ID NO: 216837 - DNA, 20 bp, Artificial Sequence
  Description of Artificial Sequence: Synthetic oligonucleotide
  Target: LAMA2; (-) strand; PAM type: YTN; PAM sequence: CTA
aatacacgtctacacactcg

SEQ ID NO: 216838 - DNA, 20 bp, Artificial Sequence
  Description of Artificial Sequence: Synthetic oligonucleotide
  Target: LAMA2; (-) strand; PAM type: YTN; PAM sequence: CTG
cacagtccatcctaaataca

SEQ ID NO: 216839 - DNA, 20 bp, Artificial Sequence
  Description of Artificial Sequence: Synthetic oligonucleotide
  Target: LAMA2; (-) strand; PAM type: YTN; PAM sequence: CTG
tctgcacagtccatcctaaa

SEQ ID NO: 216840 - DNA, 20 bp, Artificial Sequence
  Description of Artificial Sequence: Synthetic oligonucleotide
  Target: LAMA2; (-) strand; PAM type: YTN; PAM sequence: CTC
cctgtctgcacagtccatcc

SEQ ID NO: 216841 - DNA, 20 bp, Artificial Sequence
  Description of Artificial Sequence: Synthetic oligonucleotide
  Target: LAMA2; (-) strand; PAM type: YTN; PAM sequence: TTC
tccctgtctgcacagtccat

SEQ ID NO: 216842 - DNA, 20 bp, Artificial Sequence
  Description of Artificial Sequence: Synthetic oligonucleotide
  Target: LAMA2; (-) strand; PAM type: YTN; PAM sequence: CTA
attctccctgtctgcacagt

SEQ ID NO: 216843 - DNA, 20 bp, Artificial Sequence
  Description of Artificial Sequence: Synthetic oligonucleotide
  Target: LAMA2; (-) strand; PAM type: YTN; PAM sequence: CTC
taattctccctgtctgcaca

SEQ ID NO: 216844 - DNA, 20 bp, Artificial Sequence
  Description of Artificial Sequence: Synthetic oligonucleotide
  Target: LAMA2; (-) strand; PAM type: YTN; PAM sequence: CTC
tctaattctccctgtctgca

SEQ ID NO: 216845 - DNA, 20 bp, Artificial Sequence
  Description of Artificial Sequence: Synthetic oligonucleotide
  Target: LAMA2; (-) strand; PAM type: YTN; PAM sequence: TTA
tctctctaattctccctgtc

SEQ ID NO: 216846 - DNA, 20 bp, Artificial Sequence
  Description of Artificial Sequence: Synthetic oligonucleotide
  Target: LAMA2; (-) strand; PAM type: YTN; PAM sequence: TTT
atctctctaattctccctgt

SEQ ID NO: 216847 - DNA, 20 bp, Artificial Sequence
  Description of Artificial Sequence: Synthetic oligonucleotide
  Target: LAMA2; (-) strand; PAM type: YTN; PAM sequence: TTT
tatctctctaattctccctg

SEQ ID NO: 216848 - DNA, 20 bp, Artificial Sequence
  Description of Artificial Sequence: Synthetic oligonucleotide
  Target: LAMA2; (-) strand; PAM type: YTN; PAM sequence: TTA
catattttatctctctaatt

SEQ ID NO: 216849 - DNA, 20 bp, Artificial Sequence
  Description of Artificial Sequence: Synthetic oligonucleotide
  Target: LAMA2; (-) strand; PAM type: YTN; PAM sequence: TTT
acatattttatctctctaat

SEQ ID NO: 216850 - DNA, 20 bp, Artificial Sequence
  Description of Artificial Sequence: Synthetic oligonucleotide
  Target: LAMA2; (-) strand; PAM type: YTN; PAM sequence: TTT
tacatattttatctctctaa

SEQ ID NO: 216851 - DNA, 20 bp, Artificial Sequence
  Description of Artificial Sequence: Synthetic oligonucleotide
  Target: LAMA2; (-) strand; PAM type: YTN; PAM sequence: TTA
tggttttacatattttatct

SEQ ID NO: 216852 - DNA, 20 bp, Artificial Sequence
  Description of Artificial Sequence: Synthetic oligonucleotide
  Target: LAMA2; (-) strand; PAM type: YTN; PAM sequence: CTT
atggttttacatattttatc

SEQ ID NO: 216853 - DNA, 20 bp, Artificial Sequence
  Description of Artificial Sequence: Synthetic oligonucleotide
  Target: LAMA2; (-) strand; PAM type: YTN; PAM sequence: CTG
catacatatacacacactta

SEQ ID NO: 216854 - DNA, 20 bp, Artificial Sequence
  Description of Artificial Sequence: Synthetic oligonucleotide
  Target: LAMA2; (-) strand; PAM type: YTN; PAM sequence: TTA
ataaatacataagtatatgt

SEQ ID NO: 216855 - DNA, 20 bp, Artificial Sequence
  Description of Artificial Sequence: Synthetic oligonucleotide
  Target: LAMA2; (-) strand; PAM type: YTN; PAM sequence: TTT
aataaatacataagtatatg

SEQ ID NO: 216856 - DNA, 20 bp, Artificial Sequence
  Description of Artificial Sequence: Synthetic oligonucleotide
  Target: LAMA2; (-) strand; PAM type: YTN; PAM sequence: TTA
aatatttaataaatacataa

SEQ ID NO: 216857 - DNA, 20 bp, Artificial Sequence
  Description of Artificial Sequence: Synthetic oligonucleotide
  Target: LAMA2; (-) strand; PAM type: YTN; PAM sequence: TTT
aaatatttaataaatacata

SEQ ID NO: 216858 - DNA, 20 bp, Artificial Sequence
  Description of Artificial Sequence: Synthetic oligonucleotide
  Target: LAMA2; (-) strand; PAM type: YTN; PAM sequence: TTA
atttaaatatttaataaata

SEQ ID NO: 216859 - DNA, 20 bp, Artificial Sequence
  Description of Artificial Sequence: Synthetic oligonucleotide
  Target: LAMA2; (-) strand; PAM type: YTN; PAM sequence: TTT
aatttaaatatttaataaat

SEQ ID NO: 216860 - DNA, 20 bp, Artificial Sequence
  Description of Artificial Sequence: Synthetic oligonucleotide
  Target: LAMA2; (-) strand; PAM type: YTN; PAM sequence: TTC
atgtttaatttaaatattta

SEQ ID NO: 216861 - DNA, 20 bp, Artificial Sequence
  Description of Artificial Sequence: Synthetic oligonucleotide
  Target: LAMA2; (-) strand; PAM type: YTN; PAM sequence: TTT
catgtttaatttaaatattt

SEQ ID NO: 216862 - DNA, 20 bp, Artificial Sequence
  Description of Artificial Sequence: Synthetic oligonucleotide
  Target: LAMA2; (-) strand; PAM type: YTN; PAM sequence: TTA
catatcatatatttcatgtt

SEQ ID NO: 216863 - DNA, 20 bp, Artificial Sequence
  Description of Artificial Sequence: Synthetic oligonucleotide
  Target: LAMA2; (-) strand; PAM type: YTN; PAM sequence: TTA
tattacatatcatatatttc

SEQ ID NO: 216864 - DNA, 20 bp, Artificial Sequence
  Description of Artificial Sequence: Synthetic oligonucleotide
  Target: LAMA2; (-) strand; PAM type: YTN; PAM sequence: TTA
tataagtatattatattaca

SEQ ID NO: 216865 - DNA, 20 bp, Artificial Sequence
  Description of Artificial Sequence: Synthetic oligonucleotide
  Target: LAMA2; (-) strand; PAM type: YTN; PAM sequence: TTA
atattatataagtatattat

SEQ ID NO: 216866 - DNA, 20 bp, Artificial Sequence
  Description of Artificial Sequence: Synthetic oligonucleotide
  Target: LAMA2; (-) strand; PAM type: YTN; PAM sequence: TTT
aatattatataagtatatta

SEQ ID NO: 216867 - DNA, 20 bp, Artificial Sequence
  Description of Artificial Sequence: Synthetic oligonucleotide
  Target: LAMA2; (-) strand; PAM type: YTN; PAM sequence: TTA
tttaatattatataagtata

SEQ ID NO: 216868 - DNA, 20 bp, Artificial Sequence
  Description of Artificial Sequence: Synthetic oligonucleotide
  Target: LAMA2; (-) strand; PAM type: YTN; PAM sequence: TTT
atttaatattatataagtat

SEQ ID NO: 216869 - DNA, 20 bp, Artificial Sequence
  Description of Artificial Sequence: Synthetic oligonucleotide
  Target: LAMA2; (-) strand; PAM type: YTN; PAM sequence: TTA
tataaatttatttaatatta

SEQ ID NO: 216870 - DNA, 20 bp, Artificial Sequence
  Description of Artificial Sequence: Synthetic oligonucleotide
  Target: LAMA2; (-) strand; PAM type: YTN; PAM sequence: TTT
atataaatttatttaatatt

SEQ ID NO: 216871 - DNA, 20 bp, Artificial Sequence
  Description of Artificial Sequence: Synthetic oligonucleotide
  Target: LAMA2; (-) strand; PAM type: YTN; PAM sequence: TTA
tttatataaatttatttaat

SEQ ID NO: 216872 - DNA, 20 bp, Artificial Sequence
  Description of Artificial Sequence: Synthetic oligonucleotide
  Target: LAMA2; (-) strand; PAM type: YTN; PAM sequence: TTA
tatgtgtatattatttatat

SEQ ID NO: 216873 - DNA, 20 bp, Artificial Sequence
  Description of Artificial Sequence: Synthetic oligonucleotide
  Target: LAMA2; (-) strand; PAM type: YTN; PAM sequence: CTT
atatgtgtatattatttata

SEQ ID NO: 216874 - DNA, 20 bp, Artificial Sequence
  Description of Artificial Sequence: Synthetic oligonucleotide
  Target: LAMA2; (-) strand; PAM type: YTN; PAM sequence: TTA
tacttatatgtgtatattat

SEQ ID NO: 216875 - DNA, 20 bp, Artificial Sequence
  Description of Artificial Sequence: Synthetic oligonucleotide
  Target: LAMA2; (-) strand; PAM type: YTN; PAM sequence: TTT
atacttatatgtgtatatta

SEQ ID NO: 216876 - DNA, 20 bp, Artificial Sequence
  Description of Artificial Sequence: Synthetic oligonucleotide
  Target: LAMA2; (-) strand; PAM type: YTN; PAM sequence: TTA
tatatacataatatttatac

SEQ ID NO: 216877 - DNA, 20 bp, Artificial Sequence
  Description of Artificial Sequence: Synthetic oligonucleotide
  Target: LAMA2; (-) strand; PAM type: YTN; PAM sequence: TTA
ttatatatacataatattta

SEQ ID NO: 216878 - DNA, 20 bp, Artificial Sequence
  Description of Artificial Sequence: Synthetic oligonucleotide
  Target: LAMA2; (-) strand; PAM type: YTN; PAM sequence: TTA
tatacacataggtacatatt

SEQ ID NO: 216879 - DNA, 20 bp, Artificial Sequence
  Description of Artificial Sequence: Synthetic oligonucleotide
  Target: LAMA2; (-) strand; PAM type: YTN; PAM sequence: CTA
gtgtaaatattatatacaca

SEQ ID NO: 216880 - DNA, 20 bp, Artificial Sequence
  Description of Artificial Sequence: Synthetic oligonucleotide
  Target: LAMA2; (-) strand; PAM type: YTN; PAM sequence: TTC
tagtgtaaatattatataca

SEQ ID NO: 216881 - DNA, 20 bp, Artificial Sequence
  Description of Artificial Sequence: Synthetic oligonucleotide
  Target: LAMA2; (-) strand; PAM type: YTN; PAM sequence: TTT
ctagtgtaaatattatatac

SEQ ID NO: 216882 - DNA, 20 bp, Artificial Sequence
  Description of Artificial Sequence: Synthetic oligonucleotide
  Target: LAMA2; (-) strand; PAM type: YTN; PAM sequence: CTT
tctagtgtaaatattatata

SEQ ID NO: 216883 - DNA, 20 bp, Artificial Sequence
  Description of Artificial Sequence: Synthetic oligonucleotide
  Target: LAMA2; (-) strand; PAM type: YTN; PAM sequence: TTG
cctttctagtgtaaatatta

SEQ ID NO: 216884 - DNA, 20 bp, Artificial Sequence
  Description of Artificial Sequence: Synthetic oligonucleotide
  Target: LAMA2; (-) strand; PAM type: YTN; PAM sequence: CTT
gcctttctagtgtaaatatt

SEQ ID NO: 216885 - DNA, 20 bp, Artificial Sequence
  Description of Artificial Sequence: Synthetic oligonucleotide
  Target: LAMA2; (-) strand; PAM type: YTN; PAM sequence: TTC
ttgcctttctagtgtaaata

SEQ ID NO: 216886 - DNA, 20 bp, Artificial Sequence
  Description of Artificial Sequence: Synthetic oligonucleotide
  Target: LAMA2; (-) strand; PAM type: YTN; PAM sequence: TTT
cttgcctttctagtgtaaat

SEQ ID NO: 216887 - DNA, 20 bp, Artificial Sequence
  Description of Artificial Sequence: Synthetic oligonucleotide
  Target: LAMA2; (-) strand; PAM type: YTN; PAM sequence: TTA
tttcttgcctttctagtgta

SEQ ID NO: 216888 - DNA, 20 bp, Artificial Sequence
  Description of Artificial Sequence: Synthetic oligonucleotide
  Target: LAMA2; (-) strand; PAM type: YTN; PAM sequence: CTT
atttcttgcctttctagtgt

SEQ ID NO: 216889 - DNA, 20 bp, Artificial Sequence
  Description of Artificial Sequence: Synthetic oligonucleotide
  Target: LAMA2; (-) strand; PAM type: YTN; PAM sequence: TTC
ttatttcttgcctttctagt

SEQ ID NO: 216890 - DNA, 20 bp, Artificial Sequence
  Description of Artificial Sequence: Synthetic oligonucleotide
  Target: LAMA2; (-) strand; PAM type: YTN; PAM sequence: TTT
cttatttcttgcctttctag

SEQ ID NO: 216891 - DNA, 20 bp, Artificial Sequence
  Description of Artificial Sequence: Synthetic oligonucleotide
  Target: LAMA2; (-) strand; PAM type: YTN; PAM sequence: TTT
tcttatttcttgcctttcta

SEQ ID NO: 216892 - DNA, 20 bp, Artificial Sequence
  Description of Artificial Sequence: Synthetic oligonucleotide
  Target: LAMA2; (-) strand; PAM type: YTN; PAM sequence: TTG
gatacattttcttatttctt

SEQ ID NO: 216893 - DNA, 20 bp, Artificial Sequence
  Description of Artificial Sequence: Synthetic oligonucleotide
  Target: LAMA2; (-) strand; PAM type: YTN; PAM sequence: TTA
tgattggatacattttctta

SEQ ID NO: 216894 - DNA, 20 bp, Artificial Sequence
  Description of Artificial Sequence: Synthetic oligonucleotide
  Target: LAMA2; (-) strand; PAM type: YTN; PAM sequence: TTT
atgattggatacattttctt

SEQ ID NO: 216895 - DNA, 20 bp, Artificial Sequence
  Description of Artificial Sequence: Synthetic oligonucleotide
  Target: LAMA2; (-) strand; PAM type: YTN; PAM sequence: TTT
tatgattggatacattttct

SEQ ID NO: 216896 - DNA, 20 bp, Artificial Sequence
  Description of Artificial Sequence: Synthetic oligonucleotide
  Target: LAMA2; (-) strand; PAM type: YTN; PAM sequence: TTT
ttatgattggatacattttc

SEQ ID NO: 216897 - DNA, 20 bp, Artificial Sequence
  Description of Artificial Sequence: Synthetic oligonucleotide
  Target: LAMA2; (-) strand; PAM type: YTN; PAM sequence: CTC
catcccatttttatgattgg

SEQ ID NO: 216898 - DNA, 20 bp, Artificial Sequence
  Description of Artificial Sequence: Synthetic oligonucleotide
  Target: LAMA2; (-) strand; PAM type: YTN; PAM sequence: TTC
ctccatcccatttttatgat

SEQ ID NO: 216899 - DNA, 20 bp, Artificial Sequence
  Description of Artificial Sequence: Synthetic oligonucleotide
  Target: LAMA2; (-) strand; PAM type: YTN; PAM sequence: TTG
catcattcctccatcccatt

SEQ ID NO: 216900 - DNA, 20 bp, Artificial Sequence
  Description of Artificial Sequence: Synthetic oligonucleotide
  Target: LAMA2; (-) strand; PAM type: YTN; PAM sequence: TTT
gcatcattcctccatcccat

SEQ ID NO: 216901 - DNA, 20 bp, Artificial Sequence
  Description of Artificial Sequence: Synthetic oligonucleotide
  Target: LAMA2; (-) strand; PAM type: YTN; PAM sequence: CTT
tgcatcattcctccatccca

SEQ ID NO: 216902 - DNA, 20 bp, Artificial Sequence
  Description of Artificial Sequence: Synthetic oligonucleotide
  Target: LAMA2; (-) strand; PAM type: YTN; PAM sequence: CTA
ccccaatctttgcatcattc

SEQ ID NO: 216903 - DNA, 20 bp, Artificial Sequence
  Description of Artificial Sequence: Synthetic oligonucleotide
  Target: LAMA2; (-) strand; PAM type: YTN; PAM sequence: TTC
taccccaatctttgcatcat

SEQ ID NO: 216904 - DNA, 20 bp, Artificial Sequence
  Description of Artificial Sequence: Synthetic oligonucleotide
  Target: LAMA2; (-) strand; PAM type: YTN; PAM sequence: TTT
ctaccccaatctttgcatca

SEQ ID NO: 216905 - DNA, 20 bp, Artificial Sequence
  Description of Artificial Sequence: Synthetic oligonucleotide
  Target: LAMA2; (-) strand; PAM type: YTN; PAM sequence: TTT
tctaccccaatctttgcatc

SEQ ID NO: 216906 - DNA, 20 bp, Artificial Sequence
  Description of Artificial Sequence: Synthetic oligonucleotide
  Target: LAMA2; (-) strand; PAM type: YTN; PAM sequence: TTA
ttttctaccccaatctttgc

SEQ ID NO: 216907 - DNA, 20 bp, Artificial Sequence
  Description of Artificial Sequence: Synthetic oligonucleotide
  Target: LAMA2; (-) strand; PAM type: YTN; PAM sequence: CTA
aattattttctaccccaatc

SEQ ID NO: 216908 - DNA, 20 bp, Artificial Sequence
  Description of Artificial Sequence: Synthetic oligonucleotide
  Target: LAMA2; (-) strand; PAM type: YTN; PAM sequence: TTG
agtggagaactaaattattt

SEQ ID NO: 216909 - DNA, 20 bp, Artificial Sequence
  Description of Artificial Sequence: Synthetic oligonucleotide
  Target: LAMA2; (-) strand; PAM type: YTN; PAM sequence: TTC
cagccaagaataaaaataat

SEQ ID NO: 216910 - DNA, 20 bp, Artificial Sequence
  Description of Artificial Sequence: Synthetic oligonucleotide
  Target: LAMA2; (-) strand; PAM type: YTN; PAM sequence: TTT
ccagccaagaataaaaataa

SEQ ID NO: 216911 - DNA, 20 bp, Artificial Sequence
  Description of Artificial Sequence: Synthetic oligonucleotide
  Target: LAMA2; (-) strand; PAM type: YTN; PAM sequence: TTT
tccagccaagaataaaaata

SEQ ID NO: 216912 - DNA, 20 bp, Artificial Sequence
  Description of Artificial Sequence: Synthetic oligonucleotide
  Target: LAMA2; (-) strand; PAM type: YTN; PAM sequence: TTT
ttccagccaagaataaaaat

SEQ ID NO: 216913 - DNA, 20 bp, Artificial Sequence
  Description of Artificial Sequence: Synthetic oligonucleotide
  Target: LAMA2; (-) strand; PAM type: YTN; PAM sequence: CTC
atccatttttccagccaaga

SEQ ID NO: 216914 - DNA, 20 bp, Artificial Sequence
  Description of Artificial Sequence: Synthetic oligonucleotide
  Target: LAMA2; (-) strand; PAM type: YTN; PAM sequence: CTG
acaatgcatctcatccattt

SEQ ID NO: 216915 - DNA, 20 bp, Artificial Sequence
  Description of Artificial Sequence: Synthetic oligonucleotide
  Target: LAMA2; (-) strand; PAM type: YTN; PAM sequence: CTC
aatctgacaatgcatctcat

SEQ ID NO: 216916 - DNA, 20 bp, Artificial Sequence
  Description of Artificial Sequence: Synthetic oligonucleotide
  Target: LAMA2; (-) strand; PAM type: YTN; PAM sequence: TTG
gactcaatctgacaatgcat

SEQ ID NO: 216917 - DNA, 20 bp, Artificial Sequence
  Description of Artificial Sequence: Synthetic oligonucleotide
  Target: LAMA2; (-) strand; PAM type: YTN; PAM sequence: TTT
ggactcaatctgacaatgca

SEQ ID NO: 216918 - DNA, 20 bp, Artificial Sequence
  Description of Artificial Sequence: Synthetic oligonucleotide
  Target: LAMA2; (-) strand; PAM type: YTN; PAM sequence: TTT
tggactcaatctgacaatgc

SEQ ID NO: 216919 - DNA, 20 bp, Artificial Sequence
  Description of Artificial Sequence: Synthetic oligonucleotide
  Target: LAMA2; (-) strand; PAM type: YTN; PAM sequence: CTT
ttggactcaatctgacaatg

SEQ ID NO: 216920 - DNA, 20 bp, Artificial Sequence
  Description of Artificial Sequence: Synthetic oligonucleotide
  Target: LAMA2; (-) strand; PAM type: YTN; PAM sequence: TTC
aagagggtgaaagacagaat

SEQ ID NO: 216921 - DNA, 20 bp, Artificial Sequence
  Description of Artificial Sequence: Synthetic oligonucleotide
  Target: LAMA2; (-) strand; PAM type: YTN; PAM sequence: TTT
caagagggtgaaagacagaa

SEQ ID NO: 216922 - DNA, 20 bp, Artificial Sequence
  Description of Artificial Sequence: Synthetic oligonucleotide
  Target: LAMA2; (-) strand; PAM type: YTN; PAM sequence: CTT
tcaagagggtgaaagacaga

SEQ ID NO: 216923 - DNA, 20 bp, Artificial Sequence
  Description of Artificial Sequence: Synthetic oligonucleotide
  Target: LAMA2; (-) strand; PAM type: YTN; PAM sequence: CTG
aatgtagaactttcaagagg

SEQ ID NO: 216924 - DNA, 20 bp, Artificial Sequence
  Description of Artificial Sequence: Synthetic oligonucleotide
  Target: LAMA2; (-) strand; PAM type: YTN; PAM sequence: CTC
tgaatgtagaactttcaaga

SEQ ID NO: 216925 - DNA, 20 bp, Artificial Sequence
  Description of Artificial Sequence: Synthetic oligonucleotide
  Target: LAMA2; (-) strand; PAM type: YTN; PAM sequence: TTC
cacgagacaaaagatactct

SEQ ID NO: 216926 - DNA, 20 bp, Artificial Sequence
  Description of Artificial Sequence: Synthetic oligonucleotide
  Target: LAMA2; (-) strand; PAM type: YTN; PAM sequence: CTT
ccacgagacaaaagatactc

SEQ ID NO: 216927 - DNA, 20 bp, Artificial Sequence
  Description of Artificial Sequence: Synthetic oligonucleotide
  Target: LAMA2; (-) strand; PAM type: YTN; PAM sequence: TTA
tcttccacgagacaaaagat

SEQ ID NO: 216928 - DNA, 20 bp, Artificial Sequence
  Description of Artificial Sequence: Synthetic oligonucleotide
  Target: LAMA2; (-) strand; PAM type: YTN; PAM sequence: TTT
atcttccacgagacaaaaga

SEQ ID NO: 216929 - DNA, 20 bp, Artificial Sequence
  Description of Artificial Sequence: Synthetic oligonucleotide
  Target: LAMA2; (-) strand; PAM type: YTN; PAM sequence: CTG
aatatatttatcttccacga

SEQ ID NO: 216930 - DNA, 20 bp, Artificial Sequence
  Description of Artificial Sequence: Synthetic oligonucleotide
  Target: LAMA2; (-) strand; PAM type: YTN; PAM sequence: TTG
gctgaatatatttatcttcc

SEQ ID NO: 216931 - DNA, 20 bp, Artificial Sequence
  Description of Artificial Sequence: Synthetic oligonucleotide
  Target: LAMA2; (-) strand; PAM type: YTN; PAM sequence: TTC
aatgtgaaaacatggatagt

SEQ ID NO: 216932 - DNA, 20 bp, Artificial Sequence
  Description of Artificial Sequence: Synthetic oligonucleotide
  Target: LAMA2; (-) strand; PAM type: YTN; PAM sequence: TTT
caatgtgaaaacatggatag

SEQ ID NO: 216933 - DNA, 20 bp, Artificial Sequence
  Description of Artificial Sequence: Synthetic oligonucleotide
  Target: LAMA2; (-) strand; PAM type: YTN; PAM sequence: TTG
gtttcaatgtgaaaacatgg

SEQ ID NO: 216934 - DNA, 20 bp, Artificial Sequence
  Description of Artificial Sequence: Synthetic oligonucleotide
  Target: LAMA2; (-) strand; PAM type: YTN; PAM sequence: TTT
ggtttcaatgtgaaaacatg

SEQ ID NO: 216935 - DNA, 20 bp, Artificial Sequence
  Description of Artificial Sequence: Synthetic oligonucleotide
  Target: LAMA2; (-) strand; PAM type: YTN; PAM sequence: TTT
tggtttcaatgtgaaaacat

SEQ ID NO: 216936 - DNA, 20 bp, Artificial Sequence
  Description of Artificial Sequence: Synthetic oligonucleotide
  Target: LAMA2; (-) strand; PAM type: YTN; PAM sequence: TTT
ttggtttcaatgtgaaaaca

SEQ ID NO: 216937 - DNA, 20 bp, Artificial Sequence
  Description of Artificial Sequence: Synthetic oligonucleotide
  Target: LAMA2; (-) strand; PAM type: YTN; PAM sequence: TTC
atttttggtttcaatgtgaa

SEQ ID NO: 216938 - DNA, 20 bp, Artificial Sequence
  Description of Artificial Sequence: Synthetic oligonucleotide
  Target: LAMA2; (-) strand; PAM type: YTN; PAM sequence: TTG
attcatttttggtttcaatg

SEQ ID NO: 216939 - DNA, 20 bp, Artificial Sequence
  Description of Artificial Sequence: Synthetic oligonucleotide
  Target: LAMA2; (-) strand; PAM type: YTN; PAM sequence: CTG
aaataattgattcatttttg

SEQ ID NO: 216940 - DNA, 20 bp, Artificial Sequence
  Description of Artificial Sequence: Synthetic oligonucleotide
  Target: LAMA2; (-) strand; PAM type: YTN; PAM sequence: TTA
ctgaaataattgattcattt

SEQ ID NO: 216941 - DNA, 20 bp, Artificial Sequence
  Description of Artificial Sequence: Synthetic oligonucleotide
  Target: LAMA2; (-) strand; PAM type: YTN; PAM sequence: TTT
actgaaataattgattcatt

SEQ ID NO: 216942 - DNA, 20 bp, Artificial Sequence
  Description of Artificial Sequence: Synthetic oligonucleotide
  Target: LAMA2; (-) strand; PAM type: YTN; PAM sequence: CTT
tactgaaataattgattcat

SEQ ID NO: 216943 - DNA, 20 bp, Artificial Sequence
  Description of Artificial Sequence: Synthetic oligonucleotide
  Target: LAMA2; (-) strand; PAM type: YTN; PAM sequence: TTG
ctttactgaaataattgatt

SEQ ID NO: 216944 - DNA, 20 bp, Artificial Sequence
  Description of Artificial Sequence: Synthetic oligonucleotide
  Target: LAMA2; (-) strand; PAM type: YTN; PAM sequence: CTT
gctttactgaaataattgat

SEQ ID NO: 216945 - DNA, 20 bp, Artificial Sequence
  Description of Artificial Sequence: Synthetic oligonucleotide
  Target: LAMA2; (-) strand; PAM type: YTN; PAM sequence: TTA
tatacaccttgctttactga

SEQ ID NO: 216946 - DNA, 20 bp, Artificial Sequence
  Description of Artificial Sequence: Synthetic oligonucleotide
  Target: LAMA2; (-) strand; PAM type: YTN; PAM sequence: CTT
atatacaccttgctttactg

SEQ ID NO: 216947 - DNA, 20 bp, Artificial Sequence
  Description of Artificial Sequence: Synthetic oligonucleotide
  Target: LAMA2; (-) strand; PAM type: YTN; PAM sequence: CTA
caggtaaataaaaatgggga

SEQ ID NO: 216948 - DNA, 20 bp, Artificial Sequence
  Description of Artificial Sequence: Synthetic oligonucleotide
  Target: LAMA2; (-) strand; PAM type: YTN; PAM sequence: TTA
gaaaacactacaggtaaata

SEQ ID NO: 216949 - DNA, 20 bp, Artificial Sequence
  Description of Artificial Sequence: Synthetic oligonucleotide
  Target: LAMA2; (-) strand; PAM type: YTN; PAM sequence: TTT
agaaaacactacaggtaaat

SEQ ID NO: 216950 - DNA, 20 bp, Artificial Sequence
  Description of Artificial Sequence: Synthetic oligonucleotide
  Target: LAMA2; (-) strand; PAM type: YTN; PAM sequence: CTG
gtttagaaaacactacaggt

SEQ ID NO: 216951 - DNA, 20 bp, Artificial Sequence
  Description of Artificial Sequence: Synthetic oligonucleotide
  Target: LAMA2; (-) strand; PAM type: YTN; PAM sequence: CTG
tgactggtttagaaaacact

SEQ ID NO: 216952 - DNA, 20 bp, Artificial Sequence
  Description of Artificial Sequence: Synthetic oligonucleotide
  Target: LAMA2; (-) strand; PAM type: YTN; PAM sequence: CTC
aaataataataataataata

SEQ ID NO: 216953 - DNA, 20 bp, Artificial Sequence
  Description of Artificial Sequence: Synthetic oligonucleotide
  Target: LAMA2; (-) strand; PAM type: YTN; PAM sequence: CTC
catctcaaataataataata

SEQ ID NO: 216954 - DNA, 20 bp, Artificial Sequence
  Description of Artificial Sequence: Synthetic oligonucleotide
  Target: LAMA2; (-) strand; PAM type: YTN; PAM sequence: CTC
cagcccgggtgacagagtga

SEQ ID NO: 216955 - DNA, 20 bp, Artificial Sequence
  Description of Artificial Sequence: Synthetic oligonucleotide
  Target: LAMA2; (-) strand; PAM type: YTN; PAM sequence: CTG
cactccagcccgggtgacag

SEQ ID NO: 216956 - DNA, 20 bp, Artificial Sequence
  Description of Artificial Sequence: Synthetic oligonucleotide
  Target: LAMA2; (-) strand; PAM type: YTN; PAM sequence: TTG
tgccactgcactccagcccg

SEQ ID NO: 216957 - DNA, 20 bp, Artificial Sequence
  Description of Artificial Sequence: Synthetic oligonucleotide
  Target: LAMA2; (-) strand; PAM type: YTN; PAM sequence: TTG
cagtgagccaagattgtgcc

SEQ ID NO: 216958 - DNA, 20 bp, Artificial Sequence
  Description of Artificial Sequence: Synthetic oligonucleotide
  Target: LAMA2; (-) strand; PAM type: YTN; PAM sequence: CTG
ggaggcgaaggttgcagtga

SEQ ID NO: 216959 - DNA, 20 bp, Artificial Sequence
  Description of Artificial Sequence: Synthetic oligonucleotide
  Target: LAMA2; (-) strand; PAM type: YTN; PAM sequence: TTG
aacctgggaggcgaaggttg

SEQ ID NO: 216960 - DNA, 20 bp, Artificial Sequence
  Description of Artificial Sequence: Synthetic oligonucleotide
  Target: LAMA2; (-) strand; PAM type: YTN; PAM sequence: CTT
gaacctgggaggcgaaggtt

SEQ ID NO: 216961 - DNA, 20 bp, Artificial Sequence
  Description of Artificial Sequence: Synthetic oligonucleotide
  Target: LAMA2; (-) strand; PAM type: YTN; PAM sequence: TTG
agaatcgcttgaacctggga

SEQ ID NO: 216962 - DNA, 20 bp, Artificial Sequence
  Description of Artificial Sequence: Synthetic oligonucleotide
  Target: LAMA2; (-) strand; PAM type: YTN; PAM sequence: CTT
gagaatcgcttgaacctggg

SEQ ID NO: 216963 - DNA, 20 bp, Artificial Sequence
  Description of Artificial Sequence: Synthetic oligonucleotide
  Target: LAMA2; (-) strand; PAM type: YTN; PAM sequence: CTG
aggcttgagaatcgcttgaa

SEQ ID NO: 216964 - DNA, 20 bp, Artificial Sequence
  Description of Artificial Sequence: Synthetic oligonucleotide
  Target: LAMA2; (-) strand; PAM type: YTN; PAM sequence: CTC
aggaggctgaggcttgagaa

SEQ ID NO: 216965 - DNA, 20 bp, Artificial Sequence
  Description of Artificial Sequence: Synthetic oligonucleotide
  Target: LAMA2; (-) strand; PAM type: YTN; PAM sequence: CTA
ctcaggaggctgaggcttga

SEQ ID NO: 216966 - DNA, 20 bp, Artificial Sequence
  Description of Artificial Sequence: Synthetic oligonucleotide
  Target: LAMA2; (-) strand; PAM type: YTN; PAM sequence: TTA
gccagacgcagtggcacacg

SEQ ID NO: 216967 - DNA, 20 bp, Artificial Sequence
  Description of Artificial Sequence: Synthetic oligonucleotide
  Target: LAMA2; (-) strand; PAM type: YTN; PAM sequence: CTA
aaaatacaaaaaaattagcc

SEQ ID NO: 216968 - DNA, 20 bp, Artificial Sequence
  Description of Artificial Sequence: Synthetic oligonucleotide
  Target: LAMA2; (-) strand; PAM type: YTN; PAM sequence: CTA
ctaaaaatacaaaaaaatta

SEQ ID NO: 216969 - DNA, 20 bp, Artificial Sequence
  Description of Artificial Sequence: Synthetic oligonucleotide
  Target: LAMA2; (-) strand; PAM type: YTN; PAM sequence: CTC
tactaaaaatacaaaaaaat

SEQ ID NO: 216970 - DNA, 20 bp, Artificial Sequence
  Description of Artificial Sequence: Synthetic oligonucleotide
  Target: LAMA2; (-) strand; PAM type: YTN; PAM sequence: CTC
catctctactaaaaatacaa

SEQ ID NO: 216971 - DNA, 20 bp, Artificial Sequence
  Description of Artificial Sequence: Synthetic oligonucleotide
  Target: LAMA2; (-) strand; PAM type: YTN; PAM sequence: CTG
gccaacacggtgaaactcca

SEQ ID NO: 216972 - DNA, 20 bp, Artificial Sequence
  Description of Artificial Sequence: Synthetic oligonucleotide
  Target: LAMA2; (-) strand; PAM type: YTN; PAM sequence: TTC
aagaccagcctggccaacac

SEQ ID NO: 216973 - DNA, 20 bp, Artificial Sequence
  Description of Artificial Sequence: Synthetic oligonucleotide
  Target: LAMA2; (-) strand; PAM type: YTN; PAM sequence: TTG
ggaggccaaggcaggtagat

SEQ ID NO: 216974 - DNA, 20 bp, Artificial Sequence
  Description of Artificial Sequence: Synthetic oligonucleotide
  Target: LAMA2; (-) strand; PAM type: YTN; PAM sequence: TTT
gggaggccaaggcaggtaga

SEQ ID NO: 216975 - DNA, 20 bp, Artificial Sequence
  Description of Artificial Sequence: Synthetic oligonucleotide
  Target: LAMA2; (-) strand; PAM type: YTN; PAM sequence: CTT
tgggaggccaaggcaggtag

SEQ ID NO: 216976 - DNA, 20 bp, Artificial Sequence
  Description of Artificial Sequence: Synthetic oligonucleotide
  Target: LAMA2; (-) strand; PAM type: YTN; PAM sequence: CTG
taatcccagcactttgggag

SEQ ID NO: 216977 - DNA, 20 bp, Artificial Sequence
  Description of Artificial Sequence: Synthetic oligonucleotide
  Target: LAMA2; (-) strand; PAM type: YTN; PAM sequence: CTC
acacctgtaatcccagcact

SEQ ID NO: 216978 - DNA, 20 bp, Artificial Sequence
  Description of Artificial Sequence: Synthetic oligonucleotide
  Target: LAMA2; (-) strand; PAM type: YTN; PAM sequence: TTA
aaaataatcatgcaggccag

SEQ ID NO: 216979 - DNA, 20 bp, Artificial Sequence
  Description of Artificial Sequence: Synthetic oligonucleotide
  Target: LAMA2; (-) strand; PAM type: YTN; PAM sequence: TTT
aaaaataatcatgcaggcca

SEQ ID NO: 216980 - DNA, 20 bp, Artificial Sequence
  Description of Artificial Sequence: Synthetic oligonucleotide
  Target: LAMA2; (-) strand; PAM type: YTN; PAM sequence: CTG
gtcatttaaaaataatcatg

SEQ ID NO: 216981 - DNA, 20 bp, Artificial Sequence
  Description of Artificial Sequence: Synthetic oligonucleotide
  Target: LAMA2; (-) strand; PAM type: YTN; PAM sequence: CTG
gaaatgtggaatgaatctgg

SEQ ID NO: 216982 - DNA, 20 bp, Artificial Sequence
  Description of Artificial Sequence: Synthetic oligonucleotide
  Target: LAMA2; (-) strand; PAM type: YTN; PAM sequence: CTA
gtatcaaagcataatctgga

SEQ ID NO: 216983 - DNA, 20 bp, Artificial Sequence
  Description of Artificial Sequence: Synthetic oligonucleotide
  Target: LAMA2; (-) strand; PAM type: YTN; PAM sequence: TTC
tagtatcaaagcataatctg

SEQ ID NO: 216984 - DNA, 20 bp, Artificial Sequence
  Description of Artificial Sequence: Synthetic oligonucleotide
  Target: LAMA2; (-) strand; PAM type: YTN; PAM sequence: TTT
ctagtatcaaagcataatct

SEQ ID NO: 216985 - DNA, 20 bp, Artificial Sequence
  Description of Artificial Sequence: Synthetic oligonucleotide
  Target: LAMA2; (-) strand; PAM type: YTN; PAM sequence: CTA
aatttctagtatcaaagcat

SEQ ID NO: 216986 - DNA, 20 bp, Artificial Sequence
  Description of Artificial Sequence: Synthetic oligonucleotide
  Target: LAMA2; (-) strand; PAM type: YTN; PAM sequence: TTC
taaatttctagtatcaaagc

SEQ ID NO: 216987 - DNA, 20 bp, Artificial Sequence
  Description of Artificial Sequence: Synthetic oligonucleotide
  Target: LAMA2; (-) strand; PAM type: YTN; PAM sequence: TTT
ctaaatttctagtatcaaag

SEQ ID NO: 216988 - DNA, 20 bp, Artificial Sequence
  Description of Artificial Sequence: Synthetic oligonucleotide
  Target: LAMA2; (-) strand; PAM type: YTN; PAM sequence: CTT
tctaaatttctagtatcaaa

SEQ ID NO: 216989 - DNA, 20 bp, Artificial Sequence
  Description of Artificial Sequence: Synthetic oligonucleotide
  Target: LAMA2; (-) strand; PAM type: YTN; PAM sequence: TTC
tttctaaatttctagtatca

SEQ ID NO: 216990 - DNA, 20 bp, Artificial Sequence
  Description of Artificial Sequence: Synthetic oligonucleotide
  Target: LAMA2; (-) strand; PAM type: YTN; PAM sequence: TTA
ttctttctaaatttctagta

SEQ ID NO: 216991 - DNA, 20 bp, Artificial Sequence
  Description of Artificial Sequence: Synthetic oligonucleotide
  Target: LAMA2; (-) strand; PAM type: YTN; PAM sequence: TTT
attctttctaaatttctagt

SEQ ID NO: 216992 - DNA, 20 bp, Artificial Sequence
  Description of Artificial Sequence: Synthetic oligonucleotide
  Target: LAMA2; (-) strand; PAM type: YTN; PAM sequence: TTT
tattctttctaaatttctag

SEQ ID NO: 216993 - DNA, 20 bp, Artificial Sequence
  Description of Artificial Sequence: Synthetic oligonucleotide
  Target: LAMA2; (-) strand; PAM type: YTN; PAM sequence: TTG
tggggttttattctttctaa

SEQ ID NO: 216994 - DNA, 20 bp, Artificial Sequence
  Description of Artificial Sequence: Synthetic oligonucleotide
  Target: LAMA2; (-) strand; PAM type: YTN; PAM sequence: CTT
gtggggttttattctttcta

SEQ ID NO: 216995 - DNA, 20 bp, Artificial Sequence
  Description of Artificial Sequence: Synthetic oligonucleotide
  Target: LAMA2; (-) strand; PAM type: YTN; PAM sequence: TTC
ttgtggggttttattctttc

SEQ ID NO: 216996 - DNA, 20 bp, Artificial Sequence
  Description of Artificial Sequence: Synthetic oligonucleotide
  Target: LAMA2; (-) strand; PAM type: YTN; PAM sequence: TTA
ttcttgtggggttttattct

SEQ ID NO: 216997 - DNA, 20 bp, Artificial Sequence
  Description of Artificial Sequence: Synthetic oligonucleotide
  Target: LAMA2; (-) strand; PAM type: YTN; PAM sequence: TTT
attcttgtggggttttattc

SEQ ID NO: 216998 - DNA, 20 bp, Artificial Sequence
  Description of Artificial Sequence: Synthetic oligonucleotide
  Target: LAMA2; (-) strand; PAM type: YTN; PAM sequence: TTT
tattcttgtggggttttatt

SEQ ID NO: 216999 - DNA, 20 bp, Artificial Sequence
  Description of Artificial Sequence: Synthetic oligonucleotide
  Target: LAMA2; (-) strand; PAM type: YTN; PAM sequence: TTT
ttattcttgtggggttttat

SEQ ID NO: 217000 - DNA, 20 bp, Artificial Sequence
  Description of Artificial Sequence: Synthetic oligonucleotide
  Target: LAMA2; (-) strand; PAM type: YTN; PAM sequence: CTA
gatttttattcttgtggggt

SEQ ID NO: 217001 - DNA, 20 bp, Artificial Sequence
  Description of Artificial Sequence: Synthetic oligonucleotide
  Target: LAMA2; (-) strand; PAM type: YTN; PAM sequence: TTG
ctagatttttattcttgtgg

SEQ ID NO: 217002 - DNA, 20 bp, Artificial Sequence
  Description of Artificial Sequence: Synthetic oligonucleotide
  Target: LAMA2; (-) strand; PAM type: YTN; PAM sequence: TTG
attgctagatttttattctt

SEQ ID NO: 217003 - DNA, 20 bp, Artificial Sequence
  Description of Artificial Sequence: Synthetic oligonucleotide
  Target: LAMA2; (-) strand; PAM type: YTN; PAM sequence: TTC
atgcagttgattgctagatt

SEQ ID NO: 217004 - DNA, 20 bp, Artificial Sequence
  Description of Artificial Sequence: Synthetic oligonucleotide
  Target: LAMA2; (-) strand; PAM type: YTN; PAM sequence: CTA
aaatatattcatgcagttga

SEQ ID NO: 217005 - DNA, 20 bp, Artificial Sequence
  Description of Artificial Sequence: Synthetic oligonucleotide
  Target: LAMA2; (-) strand; PAM type: YTN; PAM sequence: TTA
ctaaaatatattcatgcagt

SEQ ID NO: 217006 - DNA, 20 bp, Artificial Sequence
  Description of Artificial Sequence: Synthetic oligonucleotide
  Target: LAMA2; (-) strand; PAM type: YTN; PAM sequence: TTT
actaaaatatattcatgcag

SEQ ID NO: 217007 - DNA, 20 bp, Artificial Sequence
  Description of Artificial Sequence: Synthetic oligonucleotide
  Target: LAMA2; (-) strand; PAM type: YTN; PAM sequence: TTT
tactaaaatatattcatgca

SEQ ID NO: 217008 - DNA, 20 bp, Artificial Sequence
  Description of Artificial Sequence: Synthetic oligonucleotide
  Target: LAMA2; (-) strand; PAM type: YTN; PAM sequence: CTT
ttactaaaatatattcatgc

SEQ ID NO: 217009 - DNA, 20 bp, Artificial Sequence
  Description of Artificial Sequence: Synthetic oligonucleotide
  Target: LAMA2; (-) strand; PAM type: YTN; PAM sequence: CTC
caacttttactaaaatatat

SEQ ID NO: 217010 - DNA, 20 bp, Artificial Sequence
  Description of Artificial Sequence: Synthetic oligonucleotide
  Target: LAMA2; (-) strand; PAM type: YTN; PAM sequence: TTG
ctccaacttttactaaaata

SEQ ID NO: 217011 - DNA, 20 bp, Artificial Sequence
  Description of Artificial Sequence: Synthetic oligonucleotide
  Target: LAMA2; (-) strand; PAM type: YTN; PAM sequence: CTG
ttgctccaacttttactaaa

SEQ ID NO: 217012 - DNA, 20 bp, Artificial Sequence
  Description of Artificial Sequence: Synthetic oligonucleotide
  Target: LAMA2; (-) strand; PAM type: YTN; PAM sequence: TTA
tcatctgttgctccaacttt

SEQ ID NO: 217013 - DNA, 20 bp, Artificial Sequence
  Description of Artificial Sequence: Synthetic oligonucleotide
  Target: LAMA2; (-) strand; PAM type: YTN; PAM sequence: TTT
atcatctgttgctccaactt

SEQ ID NO: 217014 - DNA, 20 bp, Artificial Sequence
  Description of Artificial Sequence: Synthetic oligonucleotide
  Target: LAMA2; (-) strand; PAM type: YTN; PAM sequence: TTT
tatcatctgttgctccaact

SEQ ID NO: 217015 - DNA, 20 bp, Artificial Sequence
  Description of Artificial Sequence: Synthetic oligonucleotide
  Target: LAMA2; (-) strand; PAM type: YTN; PAM sequence: TTG
tggaattttatcatctgttg

SEQ ID NO: 217016 - DNA, 20 bp, Artificial Sequence
  Description of Artificial Sequence: Synthetic oligonucleotide
  Target: LAMA2; (-) strand; PAM type: YTN; PAM sequence: TTT
gtggaattttatcatctgtt

SEQ ID NO: 217017 - DNA, 20 bp, Artificial Sequence
  Description of Artificial Sequence: Synthetic oligonucleotide
  Target: LAMA2; (-) strand; PAM type: YTN; PAM sequence: CTG
aatttgtggaattttatcat

SEQ ID NO: 217018 - DNA, 20 bp, Artificial Sequence
  Description of Artificial Sequence: Synthetic oligonucleotide
  Target: LAMA2; (-) strand; PAM type: YTN; PAM sequence: TTC
actgaatttgtggaatttta

SEQ ID NO: 217019 - DNA, 20 bp, Artificial Sequence
  Description of Artificial Sequence: Synthetic oligonucleotide
  Target: LAMA2; (-) strand; PAM type: YTN; PAM sequence: CTC
agagttcactgaatttgtgg

SEQ ID NO: 217020 - DNA, 20 bp, Artificial Sequence
  Description of Artificial Sequence: Synthetic oligonucleotide
  Target: LAMA2; (-) strand; PAM type: YTN; PAM sequence: TTC
tcagagttcactgaatttgt

SEQ ID NO: 217021 - DNA, 20 bp, Artificial Sequence
  Description of Artificial Sequence: Synthetic oligonucleotide
  Target: LAMA2; (-) strand; PAM type: YTN; PAM sequence: TTA
ttctcagagttcactgaatt

SEQ ID NO: 217022 - DNA, 20 bp, Artificial Sequence
  Description of Artificial Sequence: Synthetic oligonucleotide
  Target: LAMA2; (-) strand; PAM type: YTN; PAM sequence: TTT
attctcagagttcactgaat

SEQ ID NO: 217023 - DNA, 20 bp, Artificial Sequence
  Description of Artificial Sequence: Synthetic oligonucleotide
  Target: LAMA2; (-) strand; PAM type: YTN; PAM sequence: TTC
catatttattctcagagttc

SEQ ID NO: 217024 - DNA, 20 bp, Artificial Sequence
  Description of Artificial Sequence: Synthetic oligonucleotide
  Target: LAMA2; (-) strand; PAM type: YTN; PAM sequence: CTT
ccatatttattctcagagtt

SEQ ID NO: 217025 - DNA, 20 bp, Artificial Sequence
  Description of Artificial Sequence: Synthetic oligonucleotide
  Target: LAMA2; (-) strand; PAM type: YTN; PAM sequence: CTG
cggaccttccatatttattc

SEQ ID NO: 217026 - DNA, 20 bp, Artificial Sequence
  Description of Artificial Sequence: Synthetic oligonucleotide
  Target: LAMA2; (-) strand; PAM type: YTN; PAM sequence: TTA
actgcggaccttccatattt

SEQ ID NO: 217027 - DNA, 20 bp, Artificial Sequence
  Description of Artificial Sequence: Synthetic oligonucleotide
  Target: LAMA2; (-) strand; PAM type: YTN; PAM sequence: TTG
caggataattaactgcggac

SEQ ID NO: 217028 - DNA, 20 bp, Artificial Sequence
  Description of Artificial Sequence: Synthetic oligonucleotide
  Target: LAMA2; (-) strand; PAM type: YTN; PAM sequence: TTT
gcaggataattaactgcgga

SEQ ID NO: 217029 - DNA, 20 bp, Artificial Sequence
  Description of Artificial Sequence: Synthetic oligonucleotide
  Target: LAMA2; (-) strand; PAM type: YTN; PAM sequence: CTT
tgcaggataattaactgcgg

SEQ ID NO: 217030 - DNA, 20 bp, Artificial Sequence
  Description of Artificial Sequence: Synthetic oligonucleotide
  Target: LAMA2; (-) strand; PAM type: YTN; PAM sequence: TTC
tttgcaggataattaactgc

SEQ ID NO: 217031 - DNA, 20 bp, Artificial Sequence
  Description of Artificial Sequence: Synthetic oligonucleotide
  Target: LAMA2; (-) strand; PAM type: YTN; PAM sequence: TTT
ctttgcaggataattaactg

SEQ ID NO: 217032 - DNA, 20 bp, Artificial Sequence
  Description of Artificial Sequence: Synthetic oligonucleotide
  Target: LAMA2; (-) strand; PAM type: YTN; PAM sequence: TTT
tctttgcaggataattaact

SEQ ID NO: 217033 - DNA, 20 bp, Artificial Sequence
  Description of Artificial Sequence: Synthetic oligonucleotide
  Target: LAMA2; (-) strand; PAM type: YTN; PAM sequence: TTC
gttttctttgcaggataatt

SEQ ID NO: 217034 - DNA, 20 bp, Artificial Sequence
  Description of Artificial Sequence: Synthetic oligonucleotide
  Target: LAMA2; (-) strand; PAM type: YTN; PAM sequence: TTC
aaggttcgttttctttgcag

SEQ ID NO: 217035 - DNA, 20 bp, Artificial Sequence
  Description of Artificial Sequence: Synthetic oligonucleotide
  Target: LAMA2; (-) strand; PAM type: YTN; PAM sequence: TTA
acagaaagttcaaggttcgt

SEQ ID NO: 217036 - DNA, 20 bp, Artificial Sequence
  Description of Artificial Sequence: Synthetic oligonucleotide
  Target: LAMA2; (-) strand; PAM type: YTN; PAM sequence: CTA
ttaacagaaagttcaaggtt

SEQ ID NO: 217037 - DNA, 20 bp, Artificial Sequence
  Description of Artificial Sequence: Synthetic oligonucleotide
  Target: LAMA2; (-) strand; PAM type: YTN; PAM sequence: TTG
ggaagcaaagtctattaaca

SEQ ID NO: 217038 - DNA, 20 bp, Artificial Sequence
  Description of Artificial Sequence: Synthetic oligonucleotide
  Target: LAMA2; (-) strand; PAM type: YTN; PAM sequence: TTA
attgggaagcaaagtctatt

SEQ ID NO: 217039 - DNA, 20 bp, Artificial Sequence
  Description of Artificial Sequence: Synthetic oligonucleotide
  Target: LAMA2; (-) strand; PAM type: YTN; PAM sequence: TTT
aattgggaagcaaagtctat

SEQ ID NO: 217040 - DNA, 20 bp, Artificial Sequence
  Description of Artificial Sequence: Synthetic oligonucleotide
  Target: LAMA2; (-) strand; PAM type: YTN; PAM sequence: TTT
taattgggaagcaaagtcta

SEQ ID NO: 217041 - DNA, 20 bp, Artificial Sequence
  Description of Artificial Sequence: Synthetic oligonucleotide
  Target: LAMA2; (-) strand; PAM type: YTN; PAM sequence: CTT
ttaattgggaagcaaagtct

SEQ ID NO: 217042 - DNA, 20 bp, Artificial Sequence
  Description of Artificial Sequence: Synthetic oligonucleotide
  Target: LAMA2; (-) strand; PAM type: YTN; PAM sequence: CTA
gcttttaattgggaagcaaa

SEQ ID NO: 217043 - DNA, 20 bp, Artificial Sequence
  Description of Artificial Sequence: Synthetic oligonucleotide
  Target: LAMA2; (-) strand; PAM type: YTN; PAM sequence: CTG
ctagcttttaattgggaagc

SEQ ID NO: 217044 - DNA, 20 bp, Artificial Sequence
  Description of Artificial Sequence: Synthetic oligonucleotide
  Target: LAMA2; (-) strand; PAM type: YTN; PAM sequence: TTC
aaactgctagcttttaattg

SEQ ID NO: 217045 - DNA, 20 bp, Artificial Sequence
  Description of Artificial Sequence: Synthetic oligonucleotide
  Target: LAMA2; (-) strand; PAM type: YTN; PAM sequence: TTT
caaactgctagcttttaatt

SEQ ID NO: 217046 - DNA, 20 bp, Artificial Sequence
  Description of Artificial Sequence: Synthetic oligonucleotide
  Target: LAMA2; (-) strand; PAM type: YTN; PAM sequence: CTT
tcaaactgctagcttttaat

SEQ ID NO: 217047 - DNA, 20 bp, Artificial Sequence
  Description of Artificial Sequence: Synthetic oligonucleotide
  Target: LAMA2; (-) strand; PAM type: YTN; PAM sequence: CTG
atgaggtaaacctttcaaac

SEQ ID NO: 217048 - DNA, 20 bp, Artificial Sequence
  Description of Artificial Sequence: Synthetic oligonucleotide
  Target: LAMA2; (-) strand; PAM type: YTN; PAM sequence: CTG
gatagggaatcgctgatgag

SEQ ID NO: 217049 - DNA, 20 bp, Artificial Sequence
  Description of Artificial Sequence: Synthetic oligonucleotide
  Target: LAMA2; (-) strand; PAM type: YTN; PAM sequence: CTG
aaaactggatagggaatcgc

SEQ ID NO: 217050 - DNA, 20 bp, Artificial Sequence
  Description of Artificial Sequence: Synthetic oligonucleotide
  Target: LAMA2; (-) strand; PAM type: YTN; PAM sequence: CTG
catctgaaaactggataggg

SEQ ID NO: 217051 - DNA, 20 bp, Artificial Sequence
  Description of Artificial Sequence: Synthetic oligonucleotide
  Target: LAMA2; (-) strand; PAM type: YTN; PAM sequence: CTA
actgcatctgaaaactggat

SEQ ID NO: 217052 - DNA, 20 bp, Artificial Sequence
  Description of Artificial Sequence: Synthetic oligonucleotide
  Target: LAMA2; (-) strand; PAM type: YTN; PAM sequence: CTC
aacagggataaatatgcaag

SEQ ID NO: 217053 - DNA, 20 bp, Artificial Sequence
  Description of Artificial Sequence: Synthetic oligonucleotide
  Target: LAMA2; (-) strand; PAM type: YTN; PAM sequence: TTA
aaaggagatagaaacgtata

SEQ ID NO: 217054 - DNA, 20 bp, Artificial Sequence
  Description of Artificial Sequence: Synthetic oligonucleotide
  Target: LAMA2; (-) strand; PAM type: YTN; PAM sequence: TTT
aaaaggagatagaaacgtat

SEQ ID NO: 217055 - DNA, 20 bp, Artificial Sequence
  Description of Artificial Sequence: Synthetic oligonucleotide
  Target: LAMA2; (-) strand; PAM type: YTN; PAM sequence: TTA
tttaaaaggagatagaaacg

SEQ ID NO: 217056 - DNA, 20 bp, Artificial Sequence
  Description of Artificial Sequence: Synthetic oligonucleotide
  Target: LAMA2; (-) strand; PAM type: YTN; PAM sequence: CTT
atttaaaaggagatagaaac

SEQ ID NO: 217057 - DNA, 20 bp, Artificial Sequence
  Description of Artificial Sequence: Synthetic oligonucleotide
  Target: LAMA2; (-) strand; PAM type: YTN; PAM sequence: TTC
ccttatttaaaaggagatag

SEQ ID NO: 217058 - DNA, 20 bp, Artificial Sequence
  Description of Artificial Sequence: Synthetic oligonucleotide
  Target: LAMA2; (-) strand; PAM type: YTN; PAM sequence: TTG
gcaaagttcccttatttaaa

SEQ ID NO: 217059 - DNA, 20 bp, Artificial Sequence
  Description of Artificial Sequence: Synthetic oligonucleotide
  Target: LAMA2; (-) strand; PAM type: YTN; PAM sequence: TTG
ttggcaaagttcccttattt

SEQ ID NO: 217060 - DNA, 20 bp, Artificial Sequence
  Description of Artificial Sequence: Synthetic oligonucleotide
  Target: LAMA2; (-) strand; PAM type: YTN; PAM sequence: CTG
acgaattgttggcaaagttc

SEQ ID NO: 217061 - DNA, 20 bp, Artificial Sequence
  Description of Artificial Sequence: Synthetic oligonucleotide
  Target: LAMA2; (-) strand; PAM type: YTN; PAM sequence: TTG
caaatactgacgaattgttg

SEQ ID NO: 217062 - DNA, 20 bp, Artificial Sequence
  Description of Artificial Sequence: Synthetic oligonucleotide
  Target: LAMA2; (-) strand; PAM type: YTN; PAM sequence: TTT
gcaaatactgacgaattgtt

SEQ ID NO: 217063 - DNA, 20 bp, Artificial Sequence
  Description of Artificial Sequence: Synthetic oligonucleotide
  Target: LAMA2; (-) strand; PAM type: YTN; PAM sequence: TTA
atttgcaaatactgacgaat

SEQ ID NO: 217064 - DNA, 20 bp, Artificial Sequence
  Description of Artificial Sequence: Synthetic oligonucleotide
  Target: LAMA2; (-) strand; PAM type: YTN; PAM sequence: TTA
atcataattaatttgcaaat

SEQ ID NO: 217065 - DNA, 20 bp, Artificial Sequence
  Description of Artificial Sequence: Synthetic oligonucleotide
  Target: LAMA2; (-) strand; PAM type: YTN; PAM sequence: TTT
aatcataattaatttgcaaa

SEQ ID NO: 217066 - DNA, 20 bp, Artificial Sequence
  Description of Artificial Sequence: Synthetic oligonucleotide
  Target: LAMA2; (-) strand; PAM type: YTN; PAM sequence: TTA
tgaaagtttaatcataatta

SEQ ID NO: 217067 - DNA, 20 bp, Artificial Sequence
  Description of Artificial Sequence: Synthetic oligonucleotide
  Target: LAMA2; (-) strand; PAM type: YTN; PAM sequence: CTA
ttatgaaagtttaatcataa

SEQ ID NO: 217068 - DNA, 20 bp, Artificial Sequence
  Description of Artificial Sequence: Synthetic oligonucleotide
  Target: LAMA2; (-) strand; PAM type: YTN; PAM sequence: TTA
accataatccctattatgaa

SEQ ID NO: 217069 - DNA, 20 bp, Artificial Sequence
  Description of Artificial Sequence: Synthetic oligonucleotide
  Target: LAMA2; (-) strand; PAM type: YTN; PAM sequence: CTG
ggagatgaatcaacaattaa

SEQ ID NO: 217070 - DNA, 20 bp, Artificial Sequence
  Description of Artificial Sequence: Synthetic oligonucleotide
  Target: LAMA2; (-) strand; PAM type: YTN; PAM sequence: TTA
gtcacaaaaaggaggactgg

SEQ ID NO: 217071 - DNA, 20 bp, Artificial Sequence
  Description of Artificial Sequence: Synthetic oligonucleotide
  Target: LAMA2; (-) strand; PAM type: YTN; PAM sequence: CTG
ataagagaattagtcacaaa

SEQ ID NO: 217072 - DNA, 20 bp, Artificial Sequence
  Description of Artificial Sequence: Synthetic oligonucleotide
  Target: LAMA2; (-) strand; PAM type: YTN; PAM sequence: CTC
aggtcaaactgataagagaa

SEQ ID NO: 217073 - DNA, 20 bp, Artificial Sequence
  Description of Artificial Sequence: Synthetic oligonucleotide
  Target: LAMA2; (-) strand; PAM type: YTN; PAM sequence: CTG
ccacctcaggtcaaactgat

SEQ ID NO: 217074 - DNA, 20 bp, Artificial Sequence
  Description of Artificial Sequence: Synthetic oligonucleotide
  Target: LAMA2; (-) strand; PAM type: YTN; PAM sequence: TTG
tggtatctgccacctcaggt

SEQ ID NO: 217075 - DNA, 20 bp, Artificial Sequence
  Description of Artificial Sequence: Synthetic oligonucleotide
  Target: LAMA2; (-) strand; PAM type: YTN; PAM sequence: CTA
ataggaaattgtggtatctg

SEQ ID NO: 217076 - DNA, 20 bp, Artificial Sequence
  Description of Artificial Sequence: Synthetic oligonucleotide
  Target: LAMA2; (-) strand; PAM type: YTN; PAM sequence: TTG
tctaataggaaattgtggta

SEQ ID NO: 217077 - DNA, 20 bp, Artificial Sequence
  Description of Artificial Sequence: Synthetic oligonucleotide
  Target: LAMA2; (-) strand; PAM type: YTN; PAM sequence: TTG
tgagagaagttgtctaatag

SEQ ID NO: 217078 - DNA, 20 bp, Artificial Sequence
  Description of Artificial Sequence: Synthetic oligonucleotide
  Target: LAMA2; (-) strand; PAM type: YTN; PAM sequence: TTA
ggtaattgtgagagaagttg

SEQ ID NO: 217079 - DNA, 20 bp, Artificial Sequence
  Description of Artificial Sequence: Synthetic oligonucleotide
  Target: LAMA2; (-) strand; PAM type: YTN; PAM sequence: CTT
aggtaattgtgagagaagtt

SEQ ID NO: 217080 - DNA, 20 bp, Artificial Sequence
  Description of Artificial Sequence: Synthetic oligonucleotide
  Target: LAMA2; (-) strand; PAM type: YTN; PAM sequence: CTC
ttaggtaattgtgagagaag

SEQ ID NO: 217081 - DNA, 20 bp, Artificial Sequence
  Description of Artificial Sequence: Synthetic oligonucleotide
  Target: LAMA2; (-) strand; PAM type: YTN; PAM sequence: TTC
atggctcttaggtaattgtg

SEQ ID NO: 217082 - DNA, 20 bp, Artificial Sequence
  Description of Artificial Sequence: Synthetic oligonucleotide
  Target: LAMA2; (-) strand; PAM type: YTN; PAM sequence: CTA
aatcaaattcatggctctta

SEQ ID NO: 217083 - DNA, 20 bp, Artificial Sequence
  Description of Artificial Sequence: Synthetic oligonucleotide
  Target: LAMA2; (-) strand; PAM type: YTN; PAM sequence: TTC
taaatcaaattcatggctct

SEQ ID NO: 217084 - DNA, 20 bp, Artificial Sequence
  Description of Artificial Sequence: Synthetic oligonucleotide
  Target: LAMA2; (-) strand; PAM type: YTN; PAM sequence: TTT
ctaaatcaaattcatggctc

SEQ ID NO: 217085 - DNA, 20 bp, Artificial Sequence
  Description of Artificial Sequence: Synthetic oligonucleotide
  Target: LAMA2; (-) strand; PAM type: YTN; PAM sequence: TTA
atatgtgatagaaaaacaca

SEQ ID NO: 217086 - DNA, 20 bp, Artificial Sequence
  Description of Artificial Sequence: Synthetic oligonucleotide
  Target: LAMA2; (-) strand; PAM type: YTN; PAM sequence: TTT
aatatgtgatagaaaaacac

SEQ ID NO: 217087 - DNA, 20 bp, Artificial Sequence
  Description of Artificial Sequence: Synthetic oligonucleotide
  Target: LAMA2; (-) strand; PAM type: YTN; PAM sequence: TTG
tgcgtttaatatgtgataga

SEQ ID NO: 217088 - DNA, 20 bp, Artificial Sequence
  Description of Artificial Sequence: Synthetic oligonucleotide
  Target: LAMA2; (-) strand; PAM type: YTN; PAM sequence: TTA
cagattgtgcgtttaatatg

SEQ ID NO: 217089 - DNA, 20 bp, Artificial Sequence
  Description of Artificial Sequence: Synthetic oligonucleotide
  Target: LAMA2; (-) strand; PAM type: YTN; PAM sequence: TTT
acagattgtgcgtttaatat

SEQ ID NO: 217090 - DNA, 20 bp, Artificial Sequence
  Description of Artificial Sequence: Synthetic oligonucleotide
  Target: LAMA2; (-) strand; PAM type: YTN; PAM sequence: TTT
tacagattgtgcgtttaata

SEQ ID NO: 217091 - DNA, 20 bp, Artificial Sequence
  Description of Artificial Sequence: Synthetic oligonucleotide
  Target: LAMA2; (-) strand; PAM type: YTN; PAM sequence: TTT
ttacagattgtgcgtttaat

SEQ ID NO: 217092 - DNA, 20 bp, Artificial Sequence
  Description of Artificial Sequence: Synthetic oligonucleotide
  Target: LAMA2; (-) strand; PAM type: YTN; PAM sequence: TTT
tttacagattgtgcgtttaa

SEQ ID NO: 217093 - DNA, 20 bp, Artificial Sequence
  Description of Artificial Sequence: Synthetic oligonucleotide
  Target: LAMA2; (-) strand; PAM type: YTN; PAM sequence: CTT
ttttacagattgtgcgttta

SEQ ID NO: 217094 - DNA, 20 bp, Artificial Sequence
  Description of Artificial Sequence: Synthetic oligonucleotide
  Target: LAMA2; (-) strand; PAM type: YTN; PAM sequence: CTG
aatcttttttacagattgtg

SEQ ID NO: 217095 - DNA, 20 bp, Artificial Sequence
  Description of Artificial Sequence: Synthetic oligonucleotide
  Target: LAMA2; (-) strand; PAM type: YTN; PAM sequence: CTC
ctgaatcttttttacagatt

SEQ ID NO: 217096 - DNA, 20 bp, Artificial Sequence
  Description of Artificial Sequence: Synthetic oligonucleotide
  Target: LAMA2; (-) strand; PAM type: YTN; PAM sequence: TTC
ccaaacatcctcctgaatct

SEQ ID NO: 217097 - DNA, 20 bp, Artificial Sequence
  Description of Artificial Sequence: Synthetic oligonucleotide
  Target: LAMA2; (-) strand; PAM type: YTN; PAM sequence: TTT
cccaaacatcctcctgaatc

SEQ ID NO: 217098 - DNA, 20 bp, Artificial Sequence
  Description of Artificial Sequence: Synthetic oligonucleotide
  Target: LAMA2; (-) strand; PAM type: YTN; PAM sequence: CTG
aagaaaaataaatatcacag

SEQ ID NO: 217099 - DNA, 20 bp, Artificial Sequence
  Description of Artificial Sequence: Synthetic oligonucleotide
  Target: LAMA2; (-) strand; PAM type: YTN; PAM sequence: TTC
tgaagaaaaataaatatcac

SEQ ID NO: 217100 - DNA, 20 bp, Artificial Sequence
  Description of Artificial Sequence: Synthetic oligonucleotide
  Target: LAMA2; (-) strand; PAM type: YTN; PAM sequence: CTT
ctgaagaaaaataaatatca

SEQ ID NO: 217101 - DNA, 20 bp, Artificial Sequence
  Description of Artificial Sequence: Synthetic oligonucleotide
  Target: LAMA2; (-) strand; PAM type: YTN; PAM sequence: TTC
ttctgaagaaaaataaatat

SEQ ID NO: 217102 - DNA, 20 bp, Artificial Sequence
  Description of Artificial Sequence: Synthetic oligonucleotide
  Target: LAMA2; (-) strand; PAM type: YTN; PAM sequence: CTT
cttctgaagaaaaataaata

SEQ ID NO: 217103 - DNA, 20 bp, Artificial Sequence
  Description of Artificial Sequence: Synthetic oligonucleotide
  Target: LAMA2; (-) strand; PAM type: YTN; PAM sequence: TTG
gcacttcttctgaagaaaaa

SEQ ID NO: 217104 - DNA, 20 bp, Artificial Sequence
  Description of Artificial Sequence: Synthetic oligonucleotide
  Target: LAMA2; (-) strand; PAM type: YTN; PAM sequence: TTG
ttggcacttcttctgaagaa

SEQ ID NO: 217105 - DNA, 20 bp, Artificial Sequence
  Description of Artificial Sequence: Synthetic oligonucleotide
  Target: LAMA2; (-) strand; PAM type: YTN; PAM sequence: TTG
gcatatggggaatcaaaacc

SEQ ID NO: 217106 - DNA, 20 bp, Artificial Sequence
  Description of Artificial Sequence: Synthetic oligonucleotide
  Target: LAMA2; (-) strand; PAM type: YTN; PAM sequence: CTG
aaattggcatatggggaatc

SEQ ID NO: 217107 - DNA, 20 bp, Artificial Sequence
  Description of Artificial Sequence: Synthetic oligonucleotide
  Target: LAMA2; (-) strand; PAM type: YTN; PAM sequence: CTG
gtgaaataagagggtgctga

SEQ ID NO: 217108 - DNA, 20 bp, Artificial Sequence
  Description of Artificial Sequence: Synthetic oligonucleotide
  Target: LAMA2; (-) strand; PAM type: YTN; PAM sequence: CTA
aataccaaataaatgaccct

SEQ ID NO: 217109 - DNA, 20 bp, Artificial Sequence
  Description of Artificial Sequence: Synthetic oligonucleotide
  Target: LAMA2; (-) strand; PAM type: YTN; PAM sequence: TTA
tgatgacagcaaatatcaga

SEQ ID NO: 217110 - DNA, 20 bp, Artificial Sequence
  Description of Artificial Sequence: Synthetic oligonucleotide
  Target: LAMA2; (-) strand; PAM type: YTN; PAM sequence: TTT
atgatgacagcaaatatcag

SEQ ID NO: 217111 - DNA, 20 bp, Artificial Sequence
  Description of Artificial Sequence: Synthetic oligonucleotide
  Target: LAMA2; (-) strand; PAM type: YTN; PAM sequence: CTT
tatgatgacagcaaatatca

SEQ ID NO: 217112 - DNA, 20 bp, Artificial Sequence
  Description of Artificial Sequence: Synthetic oligonucleotide
  Target: LAMA2; (-) strand; PAM type: YTN; PAM sequence: CTA
gggaagatgtcaggtcttta

SEQ ID NO: 217113 - DNA, 20 bp, Artificial Sequence
  Description of Artificial Sequence: Synthetic oligonucleotide
  Target: LAMA2; (-) strand; PAM type: YTN; PAM sequence: TTG
aagctagggaagatgtcagg

SEQ ID NO: 217114 - DNA, 20 bp, Artificial Sequence
  Description of Artificial Sequence: Synthetic oligonucleotide
  Target: LAMA2; (-) strand; PAM type: YTN; PAM sequence: TTT
gaagctagggaagatgtcag

SEQ ID NO: 217115 - DNA, 20 bp, Artificial Sequence
  Description of Artificial Sequence: Synthetic oligonucleotide
  Target: LAMA2; (-) strand; PAM type: YTN; PAM sequence: TTT
tgaagctagggaagatgtca

SEQ ID NO: 217116 - DNA, 20 bp, Artificial Sequence
  Description of Artificial Sequence: Synthetic oligonucleotide
  Target: LAMA2; (-) strand; PAM type: YTN; PAM sequence: CTT
ttgaagctagggaagatgtc

SEQ ID NO: 217117 - DNA, 20 bp, Artificial Sequence
  Description of Artificial Sequence: Synthetic oligonucleotide
  Target: LAMA2; (-) strand; PAM type: YTN; PAM sequence: TTC
ttttgaagctagggaagatg

SEQ ID NO: 217118 - DNA, 20 bp, Artificial Sequence
  Description of Artificial Sequence: Synthetic oligonucleotide
  Target: LAMA2; (-) strand; PAM type: YTN; PAM sequence: TTG
ttcttttgaagctagggaag

SEQ ID NO: 217119 - DNA, 20 bp, Artificial Sequence
  Description of Artificial Sequence: Synthetic oligonucleotide
  Target: LAMA2; (-) strand; PAM type: YTN; PAM sequence: TTA
gtcaaattgttcttttgaag

SEQ ID NO: 217120 - DNA, 20 bp, Artificial Sequence
  Description of Artificial Sequence: Synthetic oligonucleotide
  Target: LAMA2; (-) strand; PAM type: YTN; PAM sequence: TTA
gcattagtcaaattgttctt

SEQ ID NO: 217121 - DNA, 20 bp, Artificial Sequence
  Description of Artificial Sequence: Synthetic oligonucleotide
  Target: LAMA2; (-) strand; PAM type: YTN; PAM sequence: TTA
aatgttagcattagtcaaat

SEQ ID NO: 217122 - DNA, 20 bp, Artificial Sequence
  Description of Artificial Sequence: Synthetic oligonucleotide
  Target: LAMA2; (-) strand; PAM type: YTN; PAM sequence: TTT
aaatgttagcattagtcaaa

SEQ ID NO: 217123 - DNA, 20 bp, Artificial Sequence
  Description of Artificial Sequence: Synthetic oligonucleotide
  Target: LAMA2; (-) strand; PAM type: YTN; PAM sequence: CTG
aatatatttaaatgttagca

SEQ ID NO: 217124 - DNA, 20 bp, Artificial Sequence
  Description of Artificial Sequence: Synthetic oligonucleotide
  Target: LAMA2; (-) strand; PAM type: YTN; PAM sequence: TTC
tgaatatatttaaatgttag

SEQ ID NO: 217125 - DNA, 20 bp, Artificial Sequence
  Description of Artificial Sequence: Synthetic oligonucleotide
  Target: LAMA2; (-) strand; PAM type: YTN; PAM sequence: TTT
ctgaatatatttaaatgtta

SEQ ID NO: 217126 - DNA, 20 bp, Artificial Sequence
  Description of Artificial Sequence: Synthetic oligonucleotide
  Target: LAMA2; (-) strand; PAM type: YTN; PAM sequence: TTA
atgaaaagtaaaatttctga

SEQ ID NO: 217127 - DNA, 20 bp, Artificial Sequence
  Description of Artificial Sequence: Synthetic oligonucleotide
  Target: LAMA2; (-) strand; PAM type: YTN; PAM sequence: CTC
attaatgaaaagtaaaattt

SEQ ID NO: 217128 - DNA, 20 bp, Artificial Sequence
  Description of Artificial Sequence: Synthetic oligonucleotide
  Target: LAMA2; (-) strand; PAM type: YTN; PAM sequence: CTG
tctcattaatgaaaagtaaa

SEQ ID NO: 217129 - DNA, 20 bp, Artificial Sequence
  Description of Artificial Sequence: Synthetic oligonucleotide
  Target: LAMA2; (-) strand; PAM type: YTN; PAM sequence: TTC
ctgtctcattaatgaaaagt

SEQ ID NO: 217130 - DNA, 20 bp, Artificial Sequence
  Description of Artificial Sequence: Synthetic oligonucleotide
  Target: LAMA2; (-) strand; PAM type: YTN; PAM sequence: CTT
cctgtctcattaatgaaaag

SEQ ID NO: 217131 - DNA, 20 bp, Artificial Sequence
  Description of Artificial Sequence: Synthetic oligonucleotide
  Target: LAMA2; (-) strand; PAM type: YTN; PAM sequence: TTA
gcagtccatagagatgaggc

SEQ ID NO: 217132 - DNA, 20 bp, Artificial Sequence
  Description of Artificial Sequence: Synthetic oligonucleotide
  Target: LAMA2; (-) strand; PAM type: YTN; PAM sequence: TTC
caccaaatcatcatgttagc

SEQ ID NO: 217133 - DNA, 20 bp, Artificial Sequence
  Description of Artificial Sequence: Synthetic oligonucleotide
  Target: LAMA2; (-) strand; PAM type: YTN; PAM sequence: TTT
ccaccaaatcatcatgttag

SEQ ID NO: 217134 - DNA, 20 bp, Artificial Sequence
  Description of Artificial Sequence: Synthetic oligonucleotide
  Target: LAMA2; (-) strand; PAM type: YTN; PAM sequence: TTT
tccaccaaatcatcatgtta

SEQ ID NO: 217135 - DNA, 20 bp, Artificial Sequence
  Description of Artificial Sequence: Synthetic oligonucleotide
  Target: LAMA2; (-) strand; PAM type: YTN; PAM sequence: TTA
ttttccaccaaatcatcatg

SEQ ID NO: 217136 - DNA, 20 bp, Artificial Sequence
  Description of Artificial Sequence: Synthetic oligonucleotide
  Target: LAMA2; (-) strand; PAM type: YTN; PAM sequence: TTT
attttccaccaaatcatcat

SEQ ID NO: 217137 - DNA, 20 bp, Artificial Sequence
  Description of Artificial Sequence: Synthetic oligonucleotide
  Target: LAMA2; (-) strand; PAM type: YTN; PAM sequence: CTT
tattttccaccaaatcatca

SEQ ID NO: 217138 - DNA, 20 bp, Artificial Sequence
  Description of Artificial Sequence: Synthetic oligonucleotide
  Target: LAMA2; (-) strand; PAM type: YTN; PAM sequence: CTG
gactttattttccaccaaat

SEQ ID NO: 217139 - DNA, 20 bp, Artificial Sequence
  Description of Artificial Sequence: Synthetic oligonucleotide
  Target: LAMA2; (-) strand; PAM type: YTN; PAM sequence: CTG
gctggactttattttccacc

SEQ ID NO: 217140 - DNA, 20 bp, Artificial Sequence
  Description of Artificial Sequence: Synthetic oligonucleotide
  Target: LAMA2; (-) strand; PAM type: YTN; PAM sequence: TTA
acagctggctggactttatt

SEQ ID NO: 217141 - DNA, 20 bp, Artificial Sequence
  Description of Artificial Sequence: Synthetic oligonucleotide
  Target: LAMA2; (-) strand; PAM type: YTN; PAM sequence: CTT
aacagctggctggactttat

SEQ ID NO: 217142 - DNA, 20 bp, Artificial Sequence
  Description of Artificial Sequence: Synthetic oligonucleotide
  Target: LAMA2; (-) strand; PAM type: YTN; PAM sequence: TTC
aacttaacagctggctggac

SEQ ID NO: 217143 - DNA, 20 bp, Artificial Sequence
  Description of Artificial Sequence: Synthetic oligonucleotide
  Target: LAMA2; (-) strand; PAM type: YTN; PAM sequence: TTA
attcaacttaacagctggct

SEQ ID NO: 217144 - DNA, 20 bp, Artificial Sequence
  Description of Artificial Sequence: Synthetic oligonucleotide
  Target: LAMA2; (-) strand; PAM type: YTN; PAM sequence: TTT
aattcaacttaacagctggc

SEQ ID NO: 217145 - DNA, 20 bp, Artificial Sequence
  Description of Artificial Sequence: Synthetic oligonucleotide
  Target: LAMA2; (-) strand; PAM type: YTN; PAM sequence: TTT
taattcaacttaacagctgg

SEQ ID NO: 217146 - DNA, 20 bp, Artificial Sequence
  Description of Artificial Sequence: Synthetic oligonucleotide
  Target: LAMA2; (-) strand; PAM type: YTN; PAM sequence: TTT
ttaattcaacttaacagctg

SEQ ID NO: 217147 - DNA, 20 bp, Artificial Sequence
  Description of Artificial Sequence: Synthetic oligonucleotide
  Target: LAMA2; (-) strand; PAM type: YTN; PAM sequence: TTT
tttaattcaacttaacagct

SEQ ID NO: 217148 - DNA, 20 bp, Artificial Sequence
  Description of Artificial Sequence: Synthetic oligonucleotide
  Target: LAMA2; (-) strand; PAM type: YTN; PAM sequence: TTG
gtaaattttttaattcaact

SEQ ID NO: 217149 - DNA, 20 bp, Artificial Sequence
  Description of Artificial Sequence: Synthetic oligonucleotide
  Target: LAMA2; (-) strand; PAM type: YTN; PAM sequence: TTA
ttggtaaattttttaattca

SEQ ID NO: 217150 - DNA, 20 bp, Artificial Sequence
  Description of Artificial Sequence: Synthetic oligonucleotide
  Target: LAMA2; (-) strand; PAM type: YTN; PAM sequence: TTA
ttattggtaaattttttaat

SEQ ID NO: 217151 - DNA, 20 bp, Artificial Sequence
  Description of Artificial Sequence: Synthetic oligonucleotide
  Target: LAMA2; (-) strand; PAM type: YTN; PAM sequence: TTC
cattattattggtaaatttt

SEQ ID NO: 217152 - DNA, 20 bp, Artificial Sequence
  Description of Artificial Sequence: Synthetic oligonucleotide
  Target: LAMA2; (-) strand; PAM type: YTN; PAM sequence: CTG
tacaagacagggcaaaaata

SEQ ID NO: 217153 - DNA, 20 bp, Artificial Sequence
  Description of Artificial Sequence: Synthetic oligonucleotide
  Target: LAMA2; (-) strand; PAM type: YTN; PAM sequence: TTA
atatgactgtacaagacagg

SEQ ID NO: 217154 - DNA, 20 bp, Artificial Sequence
  Description of Artificial Sequence: Synthetic oligonucleotide
  Target: LAMA2; (-) strand; PAM type: YTN; PAM sequence: CTT
aatatgactgtacaagacag

SEQ ID NO: 217155 - DNA, 20 bp, Artificial Sequence
  Description of Artificial Sequence: Synthetic oligonucleotide
  Target: LAMA2; (-) strand; PAM type: YTN; PAM sequence: TTG
caaatcttaatatgactgta

SEQ ID NO: 217156 - DNA, 20 bp, Artificial Sequence
  Description of Artificial Sequence: Synthetic oligonucleotide
  Target: LAMA2; (-) strand; PAM type: YTN; PAM sequence: TTC
atattgcaaatcttaatatg

SEQ ID NO: 217157 - DNA, 20 bp, Artificial Sequence
  Description of Artificial Sequence: Synthetic oligonucleotide
  Target: LAMA2; (-) strand; PAM type: YTN; PAM sequence: TTC
cagatatggatattcatatt

SEQ ID NO: 217158 - DNA, 20 bp, Artificial Sequence
  Description of Artificial Sequence: Synthetic oligonucleotide
  Target: LAMA2; (-) strand; PAM type: YTN; PAM sequence: CTA
ttccagatatggatattcat

SEQ ID NO: 217159 - DNA, 20 bp, Artificial Sequence
  Description of Artificial Sequence: Synthetic oligonucleotide
  Target: LAMA2; (-) strand; PAM type: YTN; PAM sequence: TTA
tagtcctattccagatatgg

SEQ ID NO: 217160 - DNA, 20 bp, Artificial Sequence
  Description of Artificial Sequence: Synthetic oligonucleotide
  Target: LAMA2; (-) strand; PAM type: YTN; PAM sequence: TTA
tggtattatagtcctattcc

SEQ ID NO: 217161 - DNA, 20 bp, Artificial Sequence
  Description of Artificial Sequence: Synthetic oligonucleotide
  Target: LAMA2; (-) strand; PAM type: YTN; PAM sequence: TTT
atggtattatagtcctattc

SEQ ID NO: 217162 - DNA, 20 bp, Artificial Sequence
  Description of Artificial Sequence: Synthetic oligonucleotide
  Target: LAMA2; (-) strand; PAM type: YTN; PAM sequence: CTA
tttatggtattatagtccta

SEQ ID NO: 217163 - DNA, 20 bp, Artificial Sequence
  Description of Artificial Sequence: Synthetic oligonucleotide
  Target: LAMA2; (-) strand; PAM type: YTN; PAM sequence: TTA
agctatttatggtattatag

SEQ ID NO: 217164 - DNA, 20 bp, Artificial Sequence
  Description of Artificial Sequence: Synthetic oligonucleotide
  Target: LAMA2; (-) strand; PAM type: YTN; PAM sequence: TTT
aagctatttatggtattata

SEQ ID NO: 217165 - DNA, 20 bp, Artificial Sequence
  Description of Artificial Sequence: Synthetic oligonucleotide
  Target: LAMA2; (-) strand; PAM type: YTN; PAM sequence: TTT
taagctatttatggtattat

SEQ ID NO: 217166 - DNA, 20 bp, Artificial Sequence
  Description of Artificial Sequence: Synthetic oligonucleotide
  Target: LAMA2; (-) strand; PAM type: YTN; PAM sequence: CTA
tgttttaagctatttatggt

SEQ ID NO: 217167 - DNA, 20 bp, Artificial Sequence
  Description of Artificial Sequence: Synthetic oligonucleotide
  Target: LAMA2; (-) strand; PAM type: YTN; PAM sequence: CTG
aaaacatgaagactatgttt

SEQ ID NO: 217168 - DNA, 20 bp, Artificial Sequence
  Description of Artificial Sequence: Synthetic oligonucleotide
  Target: LAMA2; (-) strand; PAM type: YTN; PAM sequence: TTA
ctgaaaacatgaagactatg

SEQ ID NO: 217169 - DNA, 20 bp, Artificial Sequence
  Description of Artificial Sequence: Synthetic oligonucleotide
  Target: LAMA2; (-) strand; PAM type: YTN; PAM sequence: TTT
actgaaaacatgaagactat

SEQ ID NO: 217170 - DNA, 20 bp, Artificial Sequence
  Description of Artificial Sequence: Synthetic oligonucleotide
  Target: LAMA2; (-) strand; PAM type: YTN; PAM sequence: CTG
tcataacatttactgaaaac

SEQ ID NO: 217171 - DNA, 20 bp, Artificial Sequence
  Description of Artificial Sequence: Synthetic oligonucleotide
  Target: LAMA2; (-) strand; PAM type: YTN; PAM sequence: TTA
atatataatacactgtcata

SEQ ID NO: 217172 - DNA, 20 bp, Artificial Sequence
  Description of Artificial Sequence: Synthetic oligonucleotide
  Target: LAMA2; (-) strand; PAM type: YTN; PAM sequence: TTA
taattaatatataatacact

SEQ ID NO: 217173 - DNA, 20 bp, Artificial Sequence
  Description of Artificial Sequence: Synthetic oligonucleotide
  Target: LAMA2; (-) strand; PAM type: YTN; PAM sequence: TTT
ataattaatatataatacac

SEQ ID NO: 217174 - DNA, 20 bp, Artificial Sequence
  Description of Artificial Sequence: Synthetic oligonucleotide
  Target: LAMA2; (-) strand; PAM type: YTN; PAM sequence: TTA
atttataattaatatataat

SEQ ID NO: 217175 - DNA, 20 bp, Artificial Sequence
  Description of Artificial Sequence: Synthetic oligonucleotide
  Target: LAMA2; (-) strand; PAM type: YTN; PAM sequence: TTA
catattaatttataattaat

SEQ ID NO: 217176 - DNA, 20 bp, Artificial Sequence
  Description of Artificial Sequence: Synthetic oligonucleotide
  Target: LAMA2; (-) strand; PAM type: YTN; PAM sequence: TTG
tattacatattaatttataa

SEQ ID NO: 217177 - DNA, 20 bp, Artificial Sequence
  Description of Artificial Sequence: Synthetic oligonucleotide
  Target: LAMA2; (-) strand; PAM type: YTN; PAM sequence: TTT
gtattacatattaatttata

SEQ ID NO: 217178 - DNA, 20 bp, Artificial Sequence
  Description of Artificial Sequence: Synthetic oligonucleotide
  Target: LAMA2; (-) strand; PAM type: YTN; PAM sequence: TTG
tgaagatttgtattacatat

SEQ ID NO: 217179 - DNA, 20 bp, Artificial Sequence
  Description of Artificial Sequence: Synthetic oligonucleotide
  Target: LAMA2; (-) strand; PAM type: YTN; PAM sequence: TTT
gtgaagatttgtattacata

SEQ ID NO: 217180 - DNA, 20 bp, Artificial Sequence
  Description of Artificial Sequence: Synthetic oligonucleotide
  Target: LAMA2; (-) strand; PAM type: YTN; PAM sequence: TTC
agatttgtgaagatttgtat

SEQ ID NO: 217181 - DNA, 20 bp, Artificial Sequence
  Description of Artificial Sequence: Synthetic oligonucleotide
  Target: LAMA2; (-) strand; PAM type: YTN; PAM sequence: TTT
cagatttgtgaagatttgta

SEQ ID NO: 217182 - DNA, 20 bp, Artificial Sequence
  Description of Artificial Sequence: Synthetic oligonucleotide
  Target: LAMA2; (-) strand; PAM type: YTN; PAM sequence: TTT
tcagatttgtgaagatttgt

SEQ ID NO: 217183 - DNA, 20 bp, Artificial Sequence
  Description of Artificial Sequence: Synthetic oligonucleotide
  Target: LAMA2; (-) strand; PAM type: YTN; PAM sequence: TTG
gcattttcagatttgtgaag

SEQ ID NO: 217184 - DNA, 20 bp, Artificial Sequence
  Description of Artificial Sequence: Synthetic oligonucleotide
  Target: LAMA2; (-) strand; PAM type: YTN; PAM sequence: TTT
ggcattttcagatttgtgaa

SEQ ID NO: 217185 - DNA, 20 bp, Artificial Sequence
  Description of Artificial Sequence: Synthetic oligonucleotide
  Target: LAMA2; (-) strand; PAM type: YTN; PAM sequence: CTA
aatttggcattttcagattt

SEQ ID NO: 217186 - DNA, 20 bp, Artificial Sequence
  Description of Artificial Sequence: Synthetic oligonucleotide
  Target: LAMA2; (-) strand; PAM type: YTN; PAM sequence: TTC
actaaatttggcattttcag

SEQ ID NO: 217187 - DNA, 20 bp, Artificial Sequence
  Description of Artificial Sequence: Synthetic oligonucleotide
  Target: LAMA2; (-) strand; PAM type: YTN; PAM sequence: CTG
aatattcactaaatttggca

SEQ ID NO: 217188 - DNA, 20 bp, Artificial Sequence
  Description of Artificial Sequence: Synthetic oligonucleotide
  Target: LAMA2; (-) strand; PAM type: YTN; PAM sequence: TTA
aaaagctgaatattcactaa

SEQ ID NO: 217189 - DNA, 20 bp, Artificial Sequence
  Description of Artificial Sequence: Synthetic oligonucleotide
  Target: LAMA2; (-) strand; PAM type: YTN; PAM sequence: TTT
aaaaagctgaatattcacta

SEQ ID NO: 217190 - DNA, 20 bp, Artificial Sequence
  Description of Artificial Sequence: Synthetic oligonucleotide
  Target: LAMA2; (-) strand; PAM type: YTN; PAM sequence: TTC
aaaatttaaaaagctgaata

SEQ ID NO: 217191 - DNA, 20 bp, Artificial Sequence
  Description of Artificial Sequence: Synthetic oligonucleotide
  Target: LAMA2; (-) strand; PAM type: YTN; PAM sequence: TTT
caaaatttaaaaagctgaat

SEQ ID NO: 217192 - DNA, 20 bp, Artificial Sequence
  Description of Artificial Sequence: Synthetic oligonucleotide
  Target: LAMA2; (-) strand; PAM type: YTN; PAM sequence: CTC
catttcaaaatttaaaaagc

SEQ ID NO: 217193 - DNA, 20 bp, Artificial Sequence
  Description of Artificial Sequence: Synthetic oligonucleotide
  Target: LAMA2; (-) strand; PAM type: YTN; PAM sequence: CTA
ggtgacagagtgagactcca

SEQ ID NO: 217194 - DNA, 20 bp, Artificial Sequence
  Description of Artificial Sequence: Synthetic oligonucleotide
  Target: LAMA2; (-) strand; PAM type: YTN; PAM sequence: CTC
cagcctaggtgacagagtga

SEQ ID NO: 217195 - DNA, 20 bp, Artificial Sequence
  Description of Artificial Sequence: Synthetic oligonucleotide
  Target: LAMA2; (-) strand; PAM type: YTN; PAM sequence: TTG
cactccagcctaggtgacag

SEQ ID NO: 217196 - DNA, 20 bp, Artificial Sequence
  Description of Artificial Sequence: Synthetic oligonucleotide
  Target: LAMA2; (-) strand; PAM type: YTN; PAM sequence: TTG
cagtgagccaagatcacgcc

SEQ ID NO: 217197 - DNA, 20 bp, Artificial Sequence
  Description of Artificial Sequence: Synthetic oligonucleotide
  Target: LAMA2; (-) strand; PAM type: YTN; PAM sequence: TTG
aacccaggaggtagaggttg

SEQ ID NO: 217198 - DNA, 20 bp, Artificial Sequence
  Description of Artificial Sequence: Synthetic oligonucleotide
  Target: LAMA2; (-) strand; PAM type: YTN; PAM sequence: CTT
gaacccaggaggtagaggtt

SEQ ID NO: 217199 - DNA, 20 bp, Artificial Sequence
  Description of Artificial Sequence: Synthetic oligonucleotide
  Target: LAMA2; (-) strand; PAM type: YTN; PAM sequence: CTG
aggcaggagaatcacttgaa

SEQ ID NO: 217200 - DNA, 20 bp, Artificial Sequence
  Description of Artificial Sequence: Synthetic oligonucleotide
  Target: LAMA2; (-) strand; PAM type: YTN; PAM sequence: TTG
ggaggctgaggcaggagaat

SEQ ID NO: 217201 - DNA, 20 bp, Artificial Sequence
  Description of Artificial Sequence: Synthetic oligonucleotide
  Target: LAMA2; (-) strand; PAM type: YTN; PAM sequence: CTT
gggaggctgaggcaggagaa

SEQ ID NO: 217202 - DNA, 20 bp, Artificial Sequence
  Description of Artificial Sequence: Synthetic oligonucleotide
  Target: LAMA2; (-) strand; PAM type: YTN; PAM sequence: CTA
cttgggaggctgaggcagga

SEQ ID NO: 217203 - DNA, 20 bp, Artificial Sequence
  Description of Artificial Sequence: Synthetic oligonucleotide
  Target: LAMA2; (-) strand; PAM type: YTN; PAM sequence: TTC
ccagctacttgggaggctga

SEQ ID NO: 217204 - DNA, 20 bp, Artificial Sequence
  Description of Artificial Sequence: Synthetic oligonucleotide
  Target: LAMA2; (-) strand; PAM type: YTN; PAM sequence: CTG
tattcccagctacttgggag

SEQ ID NO: 217205 - DNA, 20 bp, Artificial Sequence
  Description of Artificial Sequence: Synthetic oligonucleotide
  Target: LAMA2; (-) strand; PAM type: YTN; PAM sequence: CTA
tgaaaaaaaaaaaaaaatag

SEQ ID NO: 217206 - DNA, 20 bp, Artificial Sequence
  Description of Artificial Sequence: Synthetic oligonucleotide
  Target: LAMA2; (-) strand; PAM type: YTN; PAM sequence: CTC
tatgaaaaaaaaaaaaaaat

SEQ ID NO: 217207 - DNA, 20 bp, Artificial Sequence
  Description of Artificial Sequence: Synthetic oligonucleotide
  Target: LAMA2; (-) strand; PAM type: YTN; PAM sequence: CTG
gccaacacagtgaaacccca

SEQ ID NO: 217208 - DNA, 20 bp, Artificial Sequence
  Description of Artificial Sequence: Synthetic oligonucleotide
  Target: LAMA2; (-) strand; PAM type: YTN; PAM sequence: TTC
aagaccagcctggccaacac

SEQ ID NO: 217209 - DNA, 20 bp, Artificial Sequence
  Description of Artificial Sequence: Synthetic oligonucleotide
  Target: LAMA2; (-) strand; PAM type: YTN; PAM sequence: CTG
aggtcaggagttcaagacca

SEQ ID NO: 217210 - DNA, 20 bp, Artificial Sequence
  Description of Artificial Sequence: Synthetic oligonucleotide
  Target: LAMA2; (-) strand; PAM type: YTN; PAM sequence: CTG
aggtgggcagatcacctgag

SEQ ID NO: 217211 - DNA, 20 bp, Artificial Sequence
  Description of Artificial Sequence: Synthetic oligonucleotide
  Target: LAMA2; (-) strand; PAM type: YTN; PAM sequence: TTG
ggaggctgaggtgggcagat

SEQ ID NO: 217212 - DNA, 20 bp, Artificial Sequence
  Description of Artificial Sequence: Synthetic oligonucleotide
  Target: LAMA2; (-) strand; PAM type: YTN; PAM sequence: TTT
gggaggctgaggtgggcaga

SEQ ID NO: 217213 - DNA, 20 bp, Artificial Sequence
  Description of Artificial Sequence: Synthetic oligonucleotide
  Target: LAMA2; (-) strand; PAM type: YTN; PAM sequence: CTT
tgggaggctgaggtgggcag

SEQ ID NO: 217214 - DNA, 20 bp, Artificial Sequence
  Description of Artificial Sequence: Synthetic oligonucleotide
  Target: LAMA2; (-) strand; PAM type: YTN; PAM sequence: CTG
taatcccagcactttgggag

SEQ ID NO: 217215 - DNA, 20 bp, Artificial Sequence
  Description of Artificial Sequence: Synthetic oligonucleotide
  Target: LAMA2; (-) strand; PAM type: YTN; PAM sequence: CTC
acacctgtaatcccagcact

SEQ ID NO: 217216 - DNA, 20 bp, Artificial Sequence
  Description of Artificial Sequence: Synthetic oligonucleotide
  Target: LAMA2; (-) strand; PAM type: YTN; PAM sequence: TTG
gccaggtgcagtggctcaca

SEQ ID NO: 217217 - DNA, 20 bp, Artificial Sequence
  Description of Artificial Sequence: Synthetic oligonucleotide
  Target: LAMA2; (-) strand; PAM type: YTN; PAM sequence: CTG
aatattggccaggtgcagtg

SEQ ID NO: 217218 - DNA, 20 bp, Artificial Sequence
  Description of Artificial Sequence: Synthetic oligonucleotide
  Target: LAMA2; (-) strand; PAM type: YTN; PAM sequence: TTA
aaagctgaatattggccagg

SEQ ID NO: 217219 - DNA, 20 bp, Artificial Sequence
  Description of Artificial Sequence: Synthetic oligonucleotide
  Target: LAMA2; (-) strand; PAM type: YTN; PAM sequence: TTA
ttaaaagctgaatattggcc

SEQ ID NO: 217220 - DNA, 20 bp, Artificial Sequence
  Description of Artificial Sequence: Synthetic oligonucleotide
  Target: LAMA2; (-) strand; PAM type: YTN; PAM sequence: TTT
attaaaagctgaatattggc

SEQ ID NO: 217221 - DNA, 20 bp, Artificial Sequence
  Description of Artificial Sequence: Synthetic oligonucleotide
  Target: LAMA2; (-) strand; PAM type: YTN; PAM sequence: TTT
tattaaaagctgaatattgg

SEQ ID NO: 217222 - DNA, 20 bp, Artificial Sequence
  Description of Artificial Sequence: Synthetic oligonucleotide
  Target: LAMA2; (-) strand; PAM type: YTN; PAM sequence: TTA
aaagaaaaattttattaaaa

SEQ ID NO: 217223 - DNA, 20 bp, Artificial Sequence
  Description of Artificial Sequence: Synthetic oligonucleotide
  Target: LAMA2; (-) strand; PAM type: YTN; PAM sequence: TTT
aaaagaaaaattttattaaa

SEQ ID NO: 217224 - DNA, 20 bp, Artificial Sequence
  Description of Artificial Sequence: Synthetic oligonucleotide
  Target: LAMA2; (-) strand; PAM type: YTN; PAM sequence: CTT
taaaagaaaaattttattaa

SEQ ID NO: 217225 - DNA, 20 bp, Artificial Sequence
  Description of Artificial Sequence: Synthetic oligonucleotide
  Target: LAMA2; (-) strand; PAM type: YTN; PAM sequence: CTG
atagaaagtaaaatcatctt

SEQ ID NO: 217226 - DNA, 20 bp, Artificial Sequence
  Description of Artificial Sequence: Synthetic oligonucleotide
  Target: LAMA2; (-) strand; PAM type: YTN; PAM sequence: CTC
aatgcaataggaatctgata

SEQ ID NO: 217227 - DNA, 20 bp, Artificial Sequence
  Description of Artificial Sequence: Synthetic oligonucleotide
  Target: LAMA2; (-) strand; PAM type: YTN; PAM sequence: CTA
agtcctcaatgcaataggaa

SEQ ID NO: 217228 - DNA, 20 bp, Artificial Sequence
  Description of Artificial Sequence: Synthetic oligonucleotide
  Target: LAMA2; (-) strand; PAM type: YTN; PAM sequence: TTG
aaaaaacaataaaaataaag

SEQ ID NO: 217229 - DNA, 20 bp, Artificial Sequence
  Description of Artificial Sequence: Synthetic oligonucleotide
  Target: LAMA2; (-) strand; PAM type: YTN; PAM sequence: TTT
gaaaaaacaataaaaataaa

SEQ ID NO: 217230 - DNA, 20 bp, Artificial Sequence
  Description of Artificial Sequence: Synthetic oligonucleotide
  Target: LAMA2; (-) strand; PAM type: YTN; PAM sequence: TTG
gtaaaacatttgaaaaaaca

SEQ ID NO: 217231 - DNA, 20 bp, Artificial Sequence
  Description of Artificial Sequence: Synthetic oligonucleotide
  Target: LAMA2; (-) strand; PAM type: YTN; PAM sequence: CTT
ggtaaaacatttgaaaaaac

SEQ ID NO: 217232 - DNA, 20 bp, Artificial Sequence
  Description of Artificial Sequence: Synthetic oligonucleotide
  Target: LAMA2; (-) strand; PAM type: YTN; PAM sequence: TTG
tacttggtaaaacatttgaa

SEQ ID NO: 217233 - DNA, 20 bp, Artificial Sequence
  Description of Artificial Sequence: Synthetic oligonucleotide
  Target: LAMA2; (-) strand; PAM type: YTN; PAM sequence: TTA
gagacaagttgtacttggta

SEQ ID NO: 217234 - DNA, 20 bp, Artificial Sequence
  Description of Artificial Sequence: Synthetic oligonucleotide
  Target: LAMA2; (-) strand; PAM type: YTN; PAM sequence: CTT
agagacaagttgtacttggt

SEQ ID NO: 217235 - DNA, 20 bp, Artificial Sequence
  Description of Artificial Sequence: Synthetic oligonucleotide
  Target: LAMA2; (-) strand; PAM type: YTN; PAM sequence: TTG
aatcttagagacaagttgta

SEQ ID NO: 217236 - DNA, 20 bp, Artificial Sequence
  Description of Artificial Sequence: Synthetic oligonucleotide
  Target: LAMA2; (-) strand; PAM type: YTN; PAM sequence: TTT
gaatcttagagacaagttgt

SEQ ID NO: 217237 - DNA, 20 bp, Artificial Sequence
  Description of Artificial Sequence: Synthetic oligonucleotide
  Target: LAMA2; (-) strand; PAM type: YTN; PAM sequence: TTT
tgaatcttagagacaagttg

SEQ ID NO: 217238 - DNA, 20 bp, Artificial Sequence
  Description of Artificial Sequence: Synthetic oligonucleotide
  Target: LAMA2; (-) strand; PAM type: YTN; PAM sequence: CTG
ttttgaatcttagagacaag

SEQ ID NO: 217239 - DNA, 20 bp, Artificial Sequence
  Description of Artificial Sequence: Synthetic oligonucleotide
  Target: LAMA2; (-) strand; PAM type: YTN; PAM sequence: TTC
aaaatgtacactgttttgaa

SEQ ID NO: 217240 - DNA, 20 bp, Artificial Sequence
  Description of Artificial Sequence: Synthetic oligonucleotide
  Target: LAMA2; (-) strand; PAM type: YTN; PAM sequence: CTA
ttcaaaatgtacactgtttt

SEQ ID NO: 217241 - DNA, 20 bp, Artificial Sequence
  Description of Artificial Sequence: Synthetic oligonucleotide
  Target: LAMA2; (-) strand; PAM type: YTN; PAM sequence: TTA
tgcatatacataaaataaat

SEQ ID NO: 217242 - DNA, 20 bp, Artificial Sequence
  Description of Artificial Sequence: Synthetic oligonucleotide
  Target: LAMA2; (-) strand; PAM type: YTN; PAM sequence: TTA
ttatgcatatacataaaata

SEQ ID NO: 217243 - DNA, 20 bp, Artificial Sequence
  Description of Artificial Sequence: Synthetic oligonucleotide
  Target: LAMA2; (-) strand; PAM type: YTN; PAM sequence: CTA
accattattatgcatataca

SEQ ID NO: 217244 - DNA, 20 bp, Artificial Sequence
  Description of Artificial Sequence: Synthetic oligonucleotide
  Target: LAMA2; (-) strand; PAM type: YTN; PAM sequence: TTC
taaccattattatgcatata

SEQ ID NO: 217245 - DNA, 20 bp, Artificial Sequence
  Description of Artificial Sequence: Synthetic oligonucleotide
  Target: LAMA2; (-) strand; PAM type: YTN; PAM sequence: CTG
tgagcattctaaccattatt

SEQ ID NO: 217246 - DNA, 20 bp, Artificial Sequence
  Description of Artificial Sequence: Synthetic oligonucleotide
  Target: LAMA2; (-) strand; PAM type: YTN; PAM sequence: CTG
atgaacagtataactgtgag

SEQ ID NO: 217247 - DNA, 20 bp, Artificial Sequence
  Description of Artificial Sequence: Synthetic oligonucleotide
  Target: LAMA2; (-) strand; PAM type: YTN; PAM sequence: TTA
ctgatgaacagtataactgt

SEQ ID NO: 217248 - DNA, 20 bp, Artificial Sequence
  Description of Artificial Sequence: Synthetic oligonucleotide
  Target: LAMA2; (-) strand; PAM type: YTN; PAM sequence: TTC
acagggttactgatgaacag

SEQ ID NO: 217249 - DNA, 20 bp, Artificial Sequence
  Description of Artificial Sequence: Synthetic oligonucleotide
  Target: LAMA2; (-) strand; PAM type: YTN; PAM sequence: CTG
tattcacagggttactgatg

SEQ ID NO: 217250 - DNA, 20 bp, Artificial Sequence
  Description of Artificial Sequence: Synthetic oligonucleotide
  Target: LAMA2; (-) strand; PAM type: YTN; PAM sequence: TTG
gatgtgaaccctgtattcac

SEQ ID NO: 217251 - DNA, 20 bp, Artificial Sequence
  Description of Artificial Sequence: Synthetic oligonucleotide
  Target: LAMA2; (-) strand; PAM type: YTN; PAM sequence: CTT
ggatgtgaaccctgtattca

SEQ ID NO: 217252 - DNA, 20 bp, Artificial Sequence
  Description of Artificial Sequence: Synthetic oligonucleotide
  Target: LAMA2; (-) strand; PAM type: YTN; PAM sequence: TTG
ccacggaccagtgagaacat

SEQ ID NO: 217253 - DNA, 20 bp, Artificial Sequence
  Description of Artificial Sequence: Synthetic oligonucleotide
  Target: LAMA2; (-) strand; PAM type: YTN; PAM sequence: TTT
gccacggaccagtgagaaca

SEQ ID NO: 217254 - DNA, 20 bp, Artificial Sequence
  Description of Artificial Sequence: Synthetic oligonucleotide
  Target: LAMA2; (-) strand; PAM type: YTN; PAM sequence: CTT
tgccacggaccagtgagaac

SEQ ID NO: 217255 - DNA, 20 bp, Artificial Sequence
  Description of Artificial Sequence: Synthetic oligonucleotide
  Target: LAMA2; (-) strand; PAM type: YTN; PAM sequence: TTA
ctttgccacggaccagtgag

SEQ ID NO: 217256 - DNA, 20 bp, Artificial Sequence
  Description of Artificial Sequence: Synthetic oligonucleotide
  Target: LAMA2; (-) strand; PAM type: YTN; PAM sequence: CTT
actttgccacggaccagtga

SEQ ID NO: 217257 - DNA, 20 bp, Artificial Sequence
  Description of Artificial Sequence: Synthetic oligonucleotide
  Target: LAMA2; (-) strand; PAM type: YTN; PAM sequence: TTC
ttactttgccacggaccagt

SEQ ID NO: 217258 - DNA, 20 bp, Artificial Sequence
  Description of Artificial Sequence: Synthetic oligonucleotide
  Target: LAMA2; (-) strand; PAM type: YTN; PAM sequence: TTT
cttactttgccacggaccag

SEQ ID NO: 217259 - DNA, 20 bp, Artificial Sequence
  Description of Artificial Sequence: Synthetic oligonucleotide
  Target: LAMA2; (-) strand; PAM type: YTN; PAM sequence: TTT
tcttactttgccacggacca

SEQ ID NO: 217260 - DNA, 20 bp, Artificial Sequence
  Description of Artificial Sequence: Synthetic oligonucleotide
  Target: LAMA2; (-) strand; PAM type: YTN; PAM sequence: CTC
attttcttactttgccacgg

SEQ ID NO: 217261 - DNA, 20 bp, Artificial Sequence
  Description of Artificial Sequence: Synthetic oligonucleotide
  Target: LAMA2; (-) strand; PAM type: YTN; PAM sequence: TTC
tcattttcttactttgccac

SEQ ID NO: 217262 - DNA, 20 bp, Artificial Sequence
  Description of Artificial Sequence: Synthetic oligonucleotide
  Target: LAMA2; (-) strand; PAM type: YTN; PAM sequence: TTG
ttctcattttcttactttgc

SEQ ID NO: 217263 - DNA, 20 bp, Artificial Sequence
  Description of Artificial Sequence: Synthetic oligonucleotide
  Target: LAMA2; (-) strand; PAM type: YTN; PAM sequence: TTA
tgaaaaatgtggaaagttgt

SEQ ID NO: 217264 - DNA, 20 bp, Artificial Sequence
  Description of Artificial Sequence: Synthetic oligonucleotide
  Target: LAMA2; (-) strand; PAM type: YTN; PAM sequence: TTT
atgaaaaatgtggaaagttg

SEQ ID NO: 217265 - DNA, 20 bp, Artificial Sequence
  Description of Artificial Sequence: Synthetic oligonucleotide
  Target: LAMA2; (-) strand; PAM type: YTN; PAM sequence: TTT
tatgaaaaatgtggaaagtt

SEQ ID NO: 217266 - DNA, 20 bp, Artificial Sequence
  Description of Artificial Sequence: Synthetic oligonucleotide
  Target: LAMA2; (-) strand; PAM type: YTN; PAM sequence: TTT
ttatgaaaaatgtggaaagt

SEQ ID NO: 217267 - DNA, 20 bp, Artificial Sequence
  Description of Artificial Sequence: Synthetic oligonucleotide
  Target: LAMA2; (-) strand; PAM type: YTN; PAM sequence: CTA
tttttatgaaaaatgtggaa

SEQ ID NO: 217268 - DNA, 20 bp, Artificial Sequence
  Description of Artificial Sequence: Synthetic oligonucleotide
  Target: LAMA2; (-) strand; PAM type: YTN; PAM sequence: TTC
tatttttatgaaaaatgtgg

SEQ ID NO: 217269 - DNA, 20 bp, Artificial Sequence
  Description of Artificial Sequence: Synthetic oligonucleotide
  Target: LAMA2; (-) strand; PAM type: YTN; PAM sequence: TTT
ctatttttatgaaaaatgtg

SEQ ID NO: 217270 - DNA, 20 bp, Artificial Sequence
  Description of Artificial Sequence: Synthetic oligonucleotide
  Target: LAMA2; (-) strand; PAM type: YTN; PAM sequence: CTT
tctatttttatgaaaaatgt

SEQ ID NO: 217271 - DNA, 20 bp, Artificial Sequence
  Description of Artificial Sequence: Synthetic oligonucleotide
  Target: LAMA2; (-) strand; PAM type: YTN; PAM sequence: TTG
tatcctttctatttttatga

SEQ ID NO: 217272 - DNA, 20 bp, Artificial Sequence
  Description of Artificial Sequence: Synthetic oligonucleotide
  Target: LAMA2; (-) strand; PAM type: YTN; PAM sequence: TTA
aattgtatcctttctatttt

SEQ ID NO: 217273 - DNA, 20 bp, Artificial Sequence
  Description of Artificial Sequence: Synthetic oligonucleotide
  Target: LAMA2; (-) strand; PAM type: YTN; PAM sequence: TTT
aaattgtatcctttctattt

SEQ ID NO: 217274 - DNA, 20 bp, Artificial Sequence
  Description of Artificial Sequence: Synthetic oligonucleotide
  Target: LAMA2; (-) strand; PAM type: YTN; PAM sequence: TTA
tttaaattgtatcctttcta

SEQ ID NO: 217275 - DNA, 20 bp, Artificial Sequence
  Description of Artificial Sequence: Synthetic oligonucleotide
  Target: LAMA2; (-) strand; PAM type: YTN; PAM sequence: TTA
aaacccataatatcaaaatg

SEQ ID NO: 217276 - DNA, 20 bp, Artificial Sequence
  Description of Artificial Sequence: Synthetic oligonucleotide
  Target: LAMA2; (-) strand; PAM type: YTN; PAM sequence: TTT
aaaacccataatatcaaaat

SEQ ID NO: 217277 - DNA, 20 bp, Artificial Sequence
  Description of Artificial Sequence: Synthetic oligonucleotide
  Target: LAMA2; (-) strand; PAM type: YTN; PAM sequence: TTT
taaaacccataatatcaaaa

SEQ ID NO: 217278 - DNA, 20 bp, Artificial Sequence
  Description of Artificial Sequence: Synthetic oligonucleotide
  Target: LAMA2; (-) strand; PAM type: YTN; PAM sequence: TTT
ttaaaacccataatatcaaa

SEQ ID NO: 217279 - DNA, 20 bp, Artificial Sequence
  Description of Artificial Sequence: Synthetic oligonucleotide
  Target: LAMA2; (-) strand; PAM type: YTN; PAM sequence: TTA
gtttttaaaacccataatat

SEQ ID NO: 217280 - DNA, 20 bp, Artificial Sequence
  Description of Artificial Sequence: Synthetic oligonucleotide
  Target: LAMA2; (-) strand; PAM type: YTN; PAM sequence: TTA
aaaaccatcattagttttta

SEQ ID NO: 217281 - DNA, 20 bp, Artificial Sequence
  Description of Artificial Sequence: Synthetic oligonucleotide
  Target: LAMA2; (-) strand; PAM type: YTN; PAM sequence: TTT
aaaaaccatcattagttttt

SEQ ID NO: 217282 - DNA, 20 bp, Artificial Sequence
  Description of Artificial Sequence: Synthetic oligonucleotide
  Target: LAMA2; (-) strand; PAM type: YTN; PAM sequence: TTC
atgaaacaaagggcatttaa

SEQ ID NO: 217283 - DNA, 20 bp, Artificial Sequence
  Description of Artificial Sequence: Synthetic oligonucleotide
  Target: LAMA2; (-) strand; PAM type: YTN; PAM sequence: TTT
catgaaacaaagggcattta

SEQ ID NO: 217284 - DNA, 20 bp, Artificial Sequence
  Description of Artificial Sequence: Synthetic oligonucleotide
  Target: LAMA2; (-) strand; PAM type: YTN; PAM sequence: TTA
tttcatgaaacaaagggcat

SEQ ID NO: 217285 - DNA, 20 bp, Artificial Sequence
  Description of Artificial Sequence: Synthetic oligonucleotide
  Target: LAMA2; (-) strand; PAM type: YTN; PAM sequence: TTA
ttatttcatgaaacaaaggg

SEQ ID NO: 217286 - DNA, 20 bp, Artificial Sequence
  Description of Artificial Sequence: Synthetic oligonucleotide
  Target: LAMA2; (-) strand; PAM type: YTN; PAM sequence: TTA
ataaagcatcattattattt

SEQ ID NO: 217287 - DNA, 20 bp, Artificial Sequence
  Description of Artificial Sequence: Synthetic oligonucleotide
  Target: LAMA2; (-) strand; PAM type: YTN; PAM sequence: TTT
aataaagcatcattattatt

SEQ ID NO: 217288 - DNA, 20 bp, Artificial Sequence
  Description of Artificial Sequence: Synthetic oligonucleotide
  Target: LAMA2; (-) strand; PAM type: YTN; PAM sequence: CTA
tcatttaataaagcatcatt

SEQ ID NO: 217289 - DNA, 20 bp, Artificial Sequence
  Description of Artificial Sequence: Synthetic oligonucleotide
  Target: LAMA2; (-) strand; PAM type: YTN; PAM sequence: TTC
tatcatttaataaagcatca

SEQ ID NO: 217290 - DNA, 20 bp, Artificial Sequence
  Description of Artificial Sequence: Synthetic oligonucleotide
  Target: LAMA2; (-) strand; PAM type: YTN; PAM sequence: TTT
ctatcatttaataaagcatc

SEQ ID NO: 217291 - DNA, 20 bp, Artificial Sequence
  Description of Artificial Sequence: Synthetic oligonucleotide
  Target: LAMA2; (-) strand; PAM type: YTN; PAM sequence: CTC
caatatatttctatcattta

SEQ ID NO: 217292 - DNA, 20 bp, Artificial Sequence
  Description of Artificial Sequence: Synthetic oligonucleotide
  Target: LAMA2; (-) strand; PAM type: YTN; PAM sequence: TTC
caagtaataataacctccaa

SEQ ID NO: 217293 - DNA, 20 bp, Artificial Sequence
  Description of Artificial Sequence: Synthetic oligonucleotide
  Target: LAMA2; (-) strand; PAM type: YTN; PAM sequence: TTT
ccaagtaataataacctcca

SEQ ID NO: 217294 - DNA, 20 bp, Artificial Sequence
  Description of Artificial Sequence: Synthetic oligonucleotide
  Target: LAMA2; (-) strand; PAM type: YTN; PAM sequence: TTT
tccaagtaataataacctcc

SEQ ID NO: 217295 - DNA, 20 bp, Artificial Sequence
  Description of Artificial Sequence: Synthetic oligonucleotide
  Target: LAMA2; (-) strand; PAM type: YTN; PAM sequence: TTT
ttccaagtaataataacctc

SEQ ID NO: 217296 - DNA, 20 bp, Artificial Sequence
  Description of Artificial Sequence: Synthetic oligonucleotide
  Target: LAMA2; (-) strand; PAM type: YTN; PAM sequence: TTA
gtttttccaagtaataataa

SEQ ID NO: 217297 - DNA, 20 bp, Artificial Sequence
  Description of Artificial Sequence: Synthetic oligonucleotide
  Target: LAMA2; (-) strand; PAM type: YTN; PAM sequence: CTT
agtttttccaagtaataata

SEQ ID NO: 217298 - DNA, 20 bp, Artificial Sequence
  Description of Artificial Sequence: Synthetic oligonucleotide
  Target: LAMA2; (-) strand; PAM type: YTN; PAM sequence: CTC
ttagtttttccaagtaataa

SEQ ID NO: 217299 - DNA, 20 bp, Artificial Sequence
  Description of Artificial Sequence: Synthetic oligonucleotide
  Target: LAMA2; (-) strand; PAM type: YTN; PAM sequence: CTA
gctcttagtttttccaagta

SEQ ID NO: 217300 - DNA, 20 bp, Artificial Sequence
  Description of Artificial Sequence: Synthetic oligonucleotide
  Target: LAMA2; (-) strand; PAM type: YTN; PAM sequence: TTC
tagctcttagtttttccaag

SEQ ID NO: 217301 - DNA, 20 bp, Artificial Sequence
  Description of Artificial Sequence: Synthetic oligonucleotide
  Target: LAMA2; (-) strand; PAM type: YTN; PAM sequence: TTG
atataggagttctagctctt

SEQ ID NO: 217302 - DNA, 20 bp, Artificial Sequence
  Description of Artificial Sequence: Synthetic oligonucleotide
  Target: LAMA2; (-) strand; PAM type: YTN; PAM sequence: TTG
tgaaattgatataggagttc

SEQ ID NO: 217303 - DNA, 20 bp, Artificial Sequence
  Description of Artificial Sequence: Synthetic oligonucleotide
  Target: LAMA2; (-) strand; PAM type: YTN; PAM sequence: TTT
gtgaaattgatataggagtt

SEQ ID NO: 217304 - DNA, 20 bp, Artificial Sequence
  Description of Artificial Sequence: Synthetic oligonucleotide
  Target: LAMA2; (-) strand; PAM type: YTN; PAM sequence: TTA
aaaataaatgtgtgatcgat

SEQ ID NO: 217305 - DNA, 20 bp, Artificial Sequence
  Description of Artificial Sequence: Synthetic oligonucleotide
  Target: LAMA2; (-) strand; PAM type: YTN; PAM sequence: TTC
agagaaaaaatatgaaatta

SEQ ID NO: 217306 - DNA, 20 bp, Artificial Sequence
  Description of Artificial Sequence: Synthetic oligonucleotide
  Target: LAMA2; (-) strand; PAM type: YTN; PAM sequence: TTT
cagagaaaaaatatgaaatt

SEQ ID NO: 217307 - DNA, 20 bp, Artificial Sequence
  Description of Artificial Sequence: Synthetic oligonucleotide
  Target: LAMA2; (-) strand; PAM type: YTN; PAM sequence: TTT
tcagagaaaaaatatgaaat

SEQ ID NO: 217308 - DNA, 20 bp, Artificial Sequence
  Description of Artificial Sequence: Synthetic oligonucleotide
  Target: LAMA2; (-) strand; PAM type: YTN; PAM sequence: TTC
ataattttcagagaaaaaat

SEQ ID NO: 217309 - DNA, 20 bp, Artificial Sequence
  Description of Artificial Sequence: Synthetic oligonucleotide
  Target: LAMA2; (-) strand; PAM type: YTN; PAM sequence: TTC
cagattcataattttcagag

SEQ ID NO: 217310 - DNA, 20 bp, Artificial Sequence
  Description of Artificial Sequence: Synthetic oligonucleotide
  Target: LAMA2; (-) strand; PAM type: YTN; PAM sequence: TTT
ccagattcataattttcaga

SEQ ID NO: 217311 - DNA, 20 bp, Artificial Sequence
  Description of Artificial Sequence: Synthetic oligonucleotide
  Target: LAMA2; (-) strand; PAM type: YTN; PAM sequence: CTC
acagcagtggtttccagatt

SEQ ID NO: 217312 - DNA, 20 bp, Artificial Sequence
  Description of Artificial Sequence: Synthetic oligonucleotide
  Target: LAMA2; (-) strand; PAM type: YTN; PAM sequence: TTC
cgctcacagcagtggtttcc

SEQ ID NO: 217313 - DNA, 20 bp, Artificial Sequence
  Description of Artificial Sequence: Synthetic oligonucleotide
  Target: LAMA2; (-) strand; PAM type: YTN; PAM sequence: CTA
ggaataacaaaattccgctc

SEQ ID NO: 217314 - DNA, 20 bp, Artificial Sequence
  Description of Artificial Sequence: Synthetic oligonucleotide
  Target: LAMA2; (-) strand; PAM type: YTN; PAM sequence: CTG
atctaggaataacaaaattc

SEQ ID NO: 217315 - DNA, 20 bp, Artificial Sequence
  Description of Artificial Sequence: Synthetic oligonucleotide
  Target: LAMA2; (-) strand; PAM type: YTN; PAM sequence: CTC
tgatctaggaataacaaaat

SEQ ID NO: 217316 - DNA, 20 bp, Artificial Sequence
  Description of Artificial Sequence: Synthetic oligonucleotide
  Target: LAMA2; (-) strand; PAM type: YTN; PAM sequence: TTA
tgtgtcatctctgatctagg

SEQ ID NO: 217317 - DNA, 20 bp, Artificial Sequence
  Description of Artificial Sequence: Synthetic oligonucleotide
  Target: LAMA2; (-) strand; PAM type: YTN; PAM sequence: TTC
aacattatgtgtcatctctg

SEQ ID NO: 217318 - DNA, 20 bp, Artificial Sequence
  Description of Artificial Sequence: Synthetic oligonucleotide
  Target: LAMA2; (-) strand; PAM type: YTN; PAM sequence: CTG
accacagacaaatcattcaa

SEQ ID NO: 217319 - DNA, 20 bp, Artificial Sequence
  Description of Artificial Sequence: Synthetic oligonucleotide
  Target: LAMA2; (-) strand; PAM type: YTN; PAM sequence: TTA
gtacgtaactgaccacagac

SEQ ID NO: 217320 - DNA, 20 bp, Artificial Sequence
  Description of Artificial Sequence: Synthetic oligonucleotide
  Target: LAMA2; (-) strand; PAM type: YTN; PAM sequence: CTT
agtacgtaactgaccacaga

SEQ ID NO: 217321 - DNA, 20 bp, Artificial Sequence
  Description of Artificial Sequence: Synthetic oligonucleotide
  Target: LAMA2; (-) strand; PAM type: YTN; PAM sequence: CTC
caccacttagtacgtaactg

SEQ ID NO: 217322 - DNA, 20 bp, Artificial Sequence
  Description of Artificial Sequence: Synthetic oligonucleotide
  Target: LAMA2; (-) strand; PAM type: YTN; PAM sequence: CTG
gctccaccacttagtacgta

SEQ ID NO: 217323 - DNA, 20 bp, Artificial Sequence
  Description of Artificial Sequence: Synthetic oligonucleotide
  Target: LAMA2; (-) strand; PAM type: YTN; PAM sequence: CTC
ctggctccaccacttagtac

SEQ ID NO: 217324 - DNA, 20 bp, Artificial Sequence
  Description of Artificial Sequence: Synthetic oligonucleotide
  Target: LAMA2; (-) strand; PAM type: YTN; PAM sequence: TTC
ctcctggctccaccacttag

SEQ ID NO: 217325 - DNA, 20 bp, Artificial Sequence
  Description of Artificial Sequence: Synthetic oligonucleotide
  Target: LAMA2; (-) strand; PAM type: YTN; PAM sequence: CTG
atattcctcctggctccacc

SEQ ID NO: 217326 - DNA, 20 bp, Artificial Sequence
  Description of Artificial Sequence: Synthetic oligonucleotide
  Target: LAMA2; (-) strand; PAM type: YTN; PAM sequence: CTG
gcacacgggtagctgatatt

SEQ ID NO: 217327 - DNA, 20 bp, Artificial Sequence
  Description of Artificial Sequence: Synthetic oligonucleotide
  Target: LAMA2; (-) strand; PAM type: YTN; PAM sequence: CTA
ataataatggtgatgagagg

SEQ ID NO: 217328 - DNA, 20 bp, Artificial Sequence
  Description of Artificial Sequence: Synthetic oligonucleotide
  Target: LAMA2; (-) strand; PAM type: YTN; PAM sequence: TTC
taataataatggtgatgaga

SEQ ID NO: 217329 - DNA, 20 bp, Artificial Sequence
  Description of Artificial Sequence: Synthetic oligonucleotide
  Target: LAMA2; (-) strand; PAM type: YTN; PAM sequence: CTA
gccatgtattctaataataa

SEQ ID NO: 217330 - DNA, 20 bp, Artificial Sequence
  Description of Artificial Sequence: Synthetic oligonucleotide
  Target: LAMA2; (-) strand; PAM type: YTN; PAM sequence: TTG
caatctagccatgtattcta

SEQ ID NO: 217331 - DNA, 20 bp, Artificial Sequence
  Description of Artificial Sequence: Synthetic oligonucleotide
  Target: LAMA2; (-) strand; PAM type: YTN; PAM sequence: CTA
atattgcaatctagccatgt

SEQ ID NO: 217332 - DNA, 20 bp, Artificial Sequence
  Description of Artificial Sequence: Synthetic oligonucleotide
  Target: LAMA2; (-) strand; PAM type: YTN; PAM sequence: CTA
cctaatattgcaatctagcc

SEQ ID NO: 217333 - DNA, 20 bp, Artificial Sequence
  Description of Artificial Sequence: Synthetic oligonucleotide
  Target: LAMA2; (-) strand; PAM type: YTN; PAM sequence: TTG
cctacctaatattgcaatct

SEQ ID NO: 217334 - DNA, 20 bp, Artificial Sequence
  Description of Artificial Sequence: Synthetic oligonucleotide
  Target: LAMA2; (-) strand; PAM type: YTN; PAM sequence: TTT
gcctacctaatattgcaatc

SEQ ID NO: 217335 - DNA, 20 bp, Artificial Sequence
  Description of Artificial Sequence: Synthetic oligonucleotide
  Target: LAMA2; (-) strand; PAM type: YTN; PAM sequence: CTC
aatttgcctacctaatattg

SEQ ID NO: 217336 - DNA, 20 bp, Artificial Sequence
  Description of Artificial Sequence: Synthetic oligonucleotide
  Target: LAMA2; (-) strand; PAM type: YTN; PAM sequence: CTC
tcaatttgcctacctaatat

SEQ ID NO: 217337 - DNA, 20 bp, Artificial Sequence
  Description of Artificial Sequence: Synthetic oligonucleotide
  Target: LAMA2; (-) strand; PAM type: YTN; PAM sequence: CTA
tgaggaacaaacatggactc

SEQ ID NO: 217338 - DNA, 20 bp, Artificial Sequence
  Description of Artificial Sequence: Synthetic oligonucleotide
  Target: LAMA2; (-) strand; PAM type: YTN; PAM sequence: TTG
ctatgaggaacaaacatgga

SEQ ID NO: 217339 - DNA, 20 bp, Artificial Sequence
  Description of Artificial Sequence: Synthetic oligonucleotide
  Target: LAMA2; (-) strand; PAM type: YTN; PAM sequence: CTC
acataaggaacaaatcacat

SEQ ID NO: 217340 - DNA, 20 bp, Artificial Sequence
  Description of Artificial Sequence: Synthetic oligonucleotide
  Target: LAMA2; (-) strand; PAM type: YTN; PAM sequence: TTG
aaggaatacctcacataagg

SEQ ID NO: 217341 - DNA, 20 bp, Artificial Sequence
  Description of Artificial Sequence: Synthetic oligonucleotide
  Target: LAMA2; (-) strand; PAM type: YTN; PAM sequence: TTT
gaaggaatacctcacataag

SEQ ID NO: 217342 - DNA, 20 bp, Artificial Sequence
  Description of Artificial Sequence: Synthetic oligonucleotide
  Target: LAMA2; (-) strand; PAM type: YTN; PAM sequence: TTA
aatttgaaggaatacctcac

SEQ ID NO: 217343 - DNA, 20 bp, Artificial Sequence
  Description of Artificial Sequence: Synthetic oligonucleotide
  Target: LAMA2; (-) strand; PAM type: YTN; PAM sequence: TTT
aaatttgaaggaatacctca

SEQ ID NO: 217344 - DNA, 20 bp, Artificial Sequence
  Description of Artificial Sequence: Synthetic oligonucleotide
  Target: LAMA2; (-) strand; PAM type: YTN; PAM sequence: TTT
taaatttgaaggaatacctc

SEQ ID NO: 217345 - DNA, 20 bp, Artificial Sequence
  Description of Artificial Sequence: Synthetic oligonucleotide
  Target: LAMA2; (-) strand; PAM type: YTN; PAM sequence: TTT
ttaaatttgaaggaatacct

SEQ ID NO: 217346 - DNA, 20 bp, Artificial Sequence
  Description of Artificial Sequence: Synthetic oligonucleotide
  Target: LAMA2; (-) strand; PAM type: YTN; PAM sequence: CTT
tttaaatttgaaggaatacc

SEQ ID NO: 217347 - DNA, 20 bp, Artificial Sequence
  Description of Artificial Sequence: Synthetic oligonucleotide
  Target: LAMA2; (-) strand; PAM type: YTN; PAM sequence: TTA
gaacacaatcctttttaaat

SEQ ID NO: 217348 - DNA, 20 bp, Artificial Sequence
  Description of Artificial Sequence: Synthetic oligonucleotide
  Target: LAMA2; (-) strand; PAM type: YTN; PAM sequence: TTA
gattagaacacaatcctttt

SEQ ID NO: 217349 - DNA, 20 bp, Artificial Sequence
  Description of Artificial Sequence: Synthetic oligonucleotide
  Target: LAMA2; (-) strand; PAM type: YTN; PAM sequence: TTT
agattagaacacaatccttt

SEQ ID NO: 217350 - DNA, 20 bp, Artificial Sequence
  Description of Artificial Sequence: Synthetic oligonucleotide
  Target: LAMA2; (-) strand; PAM type: YTN; PAM sequence: TTT
tagattagaacacaatcctt

SEQ ID NO: 217351 - DNA, 20 bp, Artificial Sequence
  Description of Artificial Sequence: Synthetic oligonucleotide
  Target: LAMA2; (-) strand; PAM type: YTN; PAM sequence: CTT
ttagattagaacacaatcct

SEQ ID NO: 217352 - DNA, 20 bp, Artificial Sequence
  Description of Artificial Sequence: Synthetic oligonucleotide
  Target: LAMA2; (-) strand; PAM type: YTN; PAM sequence: TTA
tgaatgaccttttagattag

SEQ ID NO: 217353 - DNA, 20 bp, Artificial Sequence
  Description of Artificial Sequence: Synthetic oligonucleotide
  Target: LAMA2; (-) strand; PAM type: YTN; PAM sequence: CTT
atgaatgaccttttagatta

SEQ ID NO: 217354 - DNA, 20 bp, Artificial Sequence
  Description of Artificial Sequence: Synthetic oligonucleotide
  Target: LAMA2; (-) strand; PAM type: YTN; PAM sequence: TTC
gaatgagtggcttatgaatg

SEQ ID NO: 217355 - DNA, 20 bp, Artificial Sequence
  Description of Artificial Sequence: Synthetic oligonucleotide
  Target: LAMA2; (-) strand; PAM type: YTN; PAM sequence: TTT
cgaatgagtggcttatgaat

SEQ ID NO: 217356 - DNA, 20 bp, Artificial Sequence
  Description of Artificial Sequence: Synthetic oligonucleotide
  Target: LAMA2; (-) strand; PAM type: YTN; PAM sequence: CTG
ggaagatgtttcgaatgagt

SEQ ID NO: 217357 - DNA, 20 bp, Artificial Sequence
  Description of Artificial Sequence: Synthetic oligonucleotide
  Target: LAMA2; (-) strand; PAM type: YTN; PAM sequence: CTA
agtatctgggaagatgtttc

SEQ ID NO: 217358 - DNA, 20 bp, Artificial Sequence
  Description of Artificial Sequence: Synthetic oligonucleotide
  Target: LAMA2; (-) strand; PAM type: YTN; PAM sequence: TTC
ataaaactaagtatctggga

SEQ ID NO: 217359 - DNA, 20 bp, Artificial Sequence
  Description of Artificial Sequence: Synthetic oligonucleotide
  Target: LAMA2; (-) strand; PAM type: YTN; PAM sequence: TTT
cataaaactaagtatctggg

SEQ ID NO: 217360 - DNA, 20 bp, Artificial Sequence
  Description of Artificial Sequence: Synthetic oligonucleotide
  Target: LAMA2; (-) strand; PAM type: YTN; PAM sequence: TTG
agaatttcataaaactaagt

SEQ ID NO: 217361 - DNA, 20 bp, Artificial Sequence
  Description of Artificial Sequence: Synthetic oligonucleotide
  Target: LAMA2; (-) strand; PAM type: YTN; PAM sequence: CTT
gagaatttcataaaactaag

SEQ ID NO: 217362 - DNA, 20 bp, Artificial Sequence
  Description of Artificial Sequence: Synthetic oligonucleotide
  Target: LAMA2; (-) strand; PAM type: YTN; PAM sequence: TTG
gggtgtcagtcttgagaatt

SEQ ID NO: 217363 - DNA, 20 bp, Artificial Sequence
  Description of Artificial Sequence: Synthetic oligonucleotide
  Target: LAMA2; (-) strand; PAM type: YTN; PAM sequence: TTT
ggggtgtcagtcttgagaat

SEQ ID NO: 217364 - DNA, 20 bp, Artificial Sequence
  Description of Artificial Sequence: Synthetic oligonucleotide
  Target: LAMA2; (-) strand; PAM type: YTN; PAM sequence: CTT
tggggtgtcagtcttgagaa

SEQ ID NO: 217365 - DNA, 20 bp, Artificial Sequence
  Description of Artificial Sequence: Synthetic oligonucleotide
  Target: LAMA2; (-) strand; PAM type: YTN; PAM sequence: TTA
aggatgctttggggtgtcag

SEQ ID NO: 217366 - DNA, 20 bp, Artificial Sequence
  Description of Artificial Sequence: Synthetic oligonucleotide
  Target: LAMA2; (-) strand; PAM type: YTN; PAM sequence: TTA
tagattaaggatgctttggg

SEQ ID NO: 217367 - DNA, 20 bp, Artificial Sequence
  Description of Artificial Sequence: Synthetic oligonucleotide
  Target: LAMA2; (-) strand; PAM type: YTN; PAM sequence: TTA
ttatagattaaggatgcttt

SEQ ID NO: 217368 - DNA, 20 bp, Artificial Sequence
  Description of Artificial Sequence: Synthetic oligonucleotide
  Target: LAMA2; (-) strand; PAM type: YTN; PAM sequence: TTT
attatagattaaggatgctt

SEQ ID NO: 217369 - DNA, 20 bp, Artificial Sequence
  Description of Artificial Sequence: Synthetic oligonucleotide
  Target: LAMA2; (-) strand; PAM type: YTN; PAM sequence: CTG
tgtttattatagattaagga

SEQ ID NO: 217370 - DNA, 20 bp, Artificial Sequence
  Description of Artificial Sequence: Synthetic oligonucleotide
  Target: LAMA2; (-) strand; PAM type: YTN; PAM sequence: CTC
ctgtgtttattatagattaa

SEQ ID NO: 217371 - DNA, 20 bp, Artificial Sequence
  Description of Artificial Sequence: Synthetic oligonucleotide
  Target: LAMA2; (-) strand; PAM type: YTN; PAM sequence: CTG
tactcctgtgtttattatag

SEQ ID NO: 217372 - DNA, 20 bp, Artificial Sequence
  Description of Artificial Sequence: Synthetic oligonucleotide
  Target: LAMA2; (-) strand; PAM type: YTN; PAM sequence: TTC
cctgtactcctgtgtttatt

SEQ ID NO: 217373 - DNA, 20 bp, Artificial Sequence
  Description of Artificial Sequence: Synthetic oligonucleotide
  Target: LAMA2; (-) strand; PAM type: YTN; PAM sequence: CTT
ccctgtactcctgtgtttat

SEQ ID NO: 217374 - DNA, 20 bp, Artificial Sequence
  Description of Artificial Sequence: Synthetic oligonucleotide
  Target: LAMA2; (-) strand; PAM type: YTN; PAM sequence: TTG
cccatagaaatgtaaacaaa

SEQ ID NO: 217375 - DNA, 20 bp, Artificial Sequence
  Description of Artificial Sequence: Synthetic oligonucleotide
  Target: LAMA2; (-) strand; PAM type: YTN; PAM sequence: TTT
gcccatagaaatgtaaacaa

SEQ ID NO: 217376 - DNA, 20 bp, Artificial Sequence
  Description of Artificial Sequence: Synthetic oligonucleotide
  Target: LAMA2; (-) strand; PAM type: YTN; PAM sequence: CTA
gaaagtcggcacatttgccc

SEQ ID NO: 217377 - DNA, 20 bp, Artificial Sequence
  Description of Artificial Sequence: Synthetic oligonucleotide
  Target: LAMA2; (-) strand; PAM type: YTN; PAM sequence: CTC
actagaaagtcggcacattt

SEQ ID NO: 217378 - DNA, 20 bp, Artificial Sequence
  Description of Artificial Sequence: Synthetic oligonucleotide
  Target: LAMA2; (-) strand; PAM type: YTN; PAM sequence: CTC
acatctcactagaaagtcgg

SEQ ID NO: 217379 - DNA, 20 bp, Artificial Sequence
  Description of Artificial Sequence: Synthetic oligonucleotide
  Target: LAMA2; (-) strand; PAM type: YTN; PAM sequence: TTC
ctcacatctcactagaaagt

SEQ ID NO: 217380 - DNA, 20 bp, Artificial Sequence
  Description of Artificial Sequence: Synthetic oligonucleotide
  Target: LAMA2; (-) strand; PAM type: YTN; PAM sequence: TTA
aattcctcacatctcactag

SEQ ID NO: 217381 - DNA, 20 bp, Artificial Sequence
  Description of Artificial Sequence: Synthetic oligonucleotide
  Target: LAMA2; (-) strand; PAM type: YTN; PAM sequence: CTT
aaattcctcacatctcacta

SEQ ID NO: 217382 - DNA, 20 bp, Artificial Sequence
  Description of Artificial Sequence: Synthetic oligonucleotide
  Target: LAMA2; (-) strand; PAM type: YTN; PAM sequence: CTG
cagtaagggcacttaaattc

SEQ ID NO: 217383 - DNA, 20 bp, Artificial Sequence
  Description of Artificial Sequence: Synthetic oligonucleotide
  Target: LAMA2; (-) strand; PAM type: YTN; PAM sequence: TTC
ccaaggctgcagtaagggca

SEQ ID NO: 217384 - DNA, 20 bp, Artificial Sequence
  Description of Artificial Sequence: Synthetic oligonucleotide
  Target: LAMA2; (-) strand; PAM type: YTN; PAM sequence: CTA
ttcccaaggctgcagtaagg

SEQ ID NO: 217385 - DNA, 20 bp, Artificial Sequence
  Description of Artificial Sequence: Synthetic oligonucleotide
  Target: LAMA2; (-) strand; PAM type: YTN; PAM sequence: TTC
tattcccaaggctgcagtaa

SEQ ID NO: 217386 - DNA, 20 bp, Artificial Sequence
  Description of Artificial Sequence: Synthetic oligonucleotide
  Target: LAMA2; (-) strand; PAM type: YTN; PAM sequence: TTT
ctattcccaaggctgcagta

SEQ ID NO: 217387 - DNA, 20 bp, Artificial Sequence
  Description of Artificial Sequence: Synthetic oligonucleotide
  Target: LAMA2; (-) strand; PAM type: YTN; PAM sequence: CTG
tttctattcccaaggctgca

SEQ ID NO: 217388 - DNA, 20 bp, Artificial Sequence
  Description of Artificial Sequence: Synthetic oligonucleotide
  Target: LAMA2; (-) strand; PAM type: YTN; PAM sequence: TTG
atgatcctgtttctattccc

SEQ ID NO: 217389 - DNA, 20 bp, Artificial Sequence
  Description of Artificial Sequence: Synthetic oligonucleotide
  Target: LAMA2; (-) strand; PAM type: YTN; PAM sequence: CTG
ttgatgatcctgtttctatt

SEQ ID NO: 217390 - DNA, 20 bp, Artificial Sequence
  Description of Artificial Sequence: Synthetic oligonucleotide
  Target: LAMA2; (-) strand; PAM type: YTN; PAM sequence: CTC
atgcatgggtgaggatggca

SEQ ID NO: 217391 - DNA, 20 bp, Artificial Sequence
  Description of Artificial Sequence: Synthetic oligonucleotide
  Target: LAMA2; (-) strand; PAM type: YTN; PAM sequence: TTG
ctcatgcatgggtgaggatg

SEQ ID NO: 217392 - DNA, 20 bp, Artificial Sequence
  Description of Artificial Sequence: Synthetic oligonucleotide
  Target: LAMA2; (-) strand; PAM type: YTN; PAM sequence: CTT
gctcatgcatgggtgaggat

SEQ ID NO: 217393 - DNA, 20 bp, Artificial Sequence
  Description of Artificial Sequence: Synthetic oligonucleotide
  Target: LAMA2; (-) strand; PAM type: YTN; PAM sequence: CTA
aacaggccttgctcatgcat

SEQ ID NO: 217394 - DNA, 20 bp, Artificial Sequence
  Description of Artificial Sequence: Synthetic oligonucleotide
  Target: LAMA2; (-) strand; PAM type: YTN; PAM sequence: CTC
taaacaggccttgctcatgc

SEQ ID NO: 217395 - DNA, 20 bp, Artificial Sequence
  Description of Artificial Sequence: Synthetic oligonucleotide
  Target: LAMA2; (-) strand; PAM type: YTN; PAM sequence: CTC
tctaaacaggccttgctcat

SEQ ID NO: 217396 - DNA, 20 bp, Artificial Sequence
  Description of Artificial Sequence: Synthetic oligonucleotide
  Target: LAMA2; (-) strand; PAM type: YTN; PAM sequence: CTC
cctctctaaacaggccttgc

SEQ ID NO: 217397 - DNA, 20 bp, Artificial Sequence
  Description of Artificial Sequence: Synthetic oligonucleotide
  Target: LAMA2; (-) strand; PAM type: YTN; PAM sequence: TTC
tccctctctaaacaggcctt

SEQ ID NO: 217398 - DNA, 20 bp, Artificial Sequence
  Description of Artificial Sequence: Synthetic oligonucleotide
  Target: LAMA2; (-) strand; PAM type: YTN; PAM sequence: TTT
ctccctctctaaacaggcct

SEQ ID NO: 217399 - DNA, 20 bp, Artificial Sequence
  Description of Artificial Sequence: Synthetic oligonucleotide
  Target: LAMA2; (-) strand; PAM type: YTN; PAM sequence: CTT
tctccctctctaaacaggcc

SEQ ID NO: 217400 - DNA, 20 bp, Artificial Sequence
  Description of Artificial Sequence: Synthetic oligonucleotide
  Target: LAMA2; (-) strand; PAM type: YTN; PAM sequence: TTC
tttctccctctctaaacagg

SEQ ID NO: 217401 - DNA, 20 bp, Artificial Sequence
  Description of Artificial Sequence: Synthetic oligonucleotide
  Target: LAMA2; (-) strand; PAM type: YTN; PAM sequence: TTT
ctttctccctctctaaacag

SEQ ID NO: 217402 - DNA, 20 bp, Artificial Sequence
  Description of Artificial Sequence: Synthetic oligonucleotide
  Target: LAMA2; (-) strand; PAM type: YTN; PAM sequence: TTT
tctttctccctctctaaaca

SEQ ID NO: 217403 - DNA, 20 bp, Artificial Sequence
  Description of Artificial Sequence: Synthetic oligonucleotide
  Target: LAMA2; (-) strand; PAM type: YTN; PAM sequence: TTT
ttctttctccctctctaaac

SEQ ID NO: 217404 - DNA, 20 bp, Artificial Sequence
  Description of Artificial Sequence: Synthetic oligonucleotide
  Target: LAMA2; (-) strand; PAM type: YTN; PAM sequence: CTT
tttctttctccctctctaaa

SEQ ID NO: 217405 - DNA, 20 bp, Artificial Sequence
  Description of Artificial Sequence: Synthetic oligonucleotide
  Target: LAMA2; (-) strand; PAM type: YTN; PAM sequence: TTC
caagtaatataaggtctttt

SEQ ID NO: 217406 - DNA, 20 bp, Artificial Sequence
  Description of Artificial Sequence: Synthetic oligonucleotide
  Target: LAMA2; (-) strand; PAM type: YTN; PAM sequence: TTT
ccaagtaatataaggtcttt

SEQ ID NO: 217407 - DNA, 20 bp, Artificial Sequence
  Description of Artificial Sequence: Synthetic oligonucleotide
  Target: LAMA2; (-) strand; PAM type: YTN; PAM sequence: TTT
tccaagtaatataaggtctt

SEQ ID NO: 217408 - DNA, 20 bp, Artificial Sequence
  Description of Artificial Sequence: Synthetic oligonucleotide
  Target: LAMA2; (-) strand; PAM type: YTN; PAM sequence: CTC
attttccaagtaatataagg

SEQ ID NO: 217409 - DNA, 20 bp, Artificial Sequence
  Description of Artificial Sequence: Synthetic oligonucleotide
  Target: LAMA2; (-) strand; PAM type: YTN; PAM sequence: TTC
tcattttccaagtaatataa

SEQ ID NO: 217410 - DNA, 20 bp, Artificial Sequence
  Description of Artificial Sequence: Synthetic oligonucleotide
  Target: LAMA2; (-) strand; PAM type: YTN; PAM sequence: CTT
ctcattttccaagtaatata

SEQ ID NO: 217411 - DNA, 20 bp, Artificial Sequence
  Description of Artificial Sequence: Synthetic oligonucleotide
  Target: LAMA2; (-) strand; PAM type: YTN; PAM sequence: TTG
cttctcattttccaagtaat

SEQ ID NO: 217412 - DNA, 20 bp, Artificial Sequence
  Description of Artificial Sequence: Synthetic oligonucleotide
  Target: LAMA2; (-) strand; PAM type: YTN; PAM sequence: TTT
gcttctcattttccaagtaa

SEQ ID NO: 217413 - DNA, 20 bp, Artificial Sequence
  Description of Artificial Sequence: Synthetic oligonucleotide
  Target: LAMA2; (-) strand; PAM type: YTN; PAM sequence: CTT
tgcttctcattttccaagta

SEQ ID NO: 217414 - DNA, 20 bp, Artificial Sequence
  Description of Artificial Sequence: Synthetic oligonucleotide
  Target: LAMA2; (-) strand; PAM type: YTN; PAM sequence: CTA
aaatctttgcttctcatttt

SEQ ID NO: 217415 - DNA, 20 bp, Artificial Sequence
  Description of Artificial Sequence: Synthetic oligonucleotide
  Target: LAMA2; (-) strand; PAM type: YTN; PAM sequence: TTG
tctaaaatctttgcttctca

SEQ ID NO: 217416 - DNA, 20 bp, Artificial Sequence
  Description of Artificial Sequence: Synthetic oligonucleotide
  Target: LAMA2; (-) strand; PAM type: YTN; PAM sequence: CTT
gtctaaaatctttgcttctc

SEQ ID NO: 217417 - DNA, 20 bp, Artificial Sequence
  Description of Artificial Sequence: Synthetic oligonucleotide
  Target: LAMA2; (-) strand; PAM type: YTN; PAM sequence: TTC
ttgtctaaaatctttgcttc

SEQ ID NO: 217418 - DNA, 20 bp, Artificial Sequence
  Description of Artificial Sequence: Synthetic oligonucleotide
  Target: LAMA2; (-) strand; PAM type: YTN; PAM sequence: TTG
gttcttgtctaaaatctttg

SEQ ID NO: 217419 - DNA, 20 bp, Artificial Sequence
  Description of Artificial Sequence: Synthetic oligonucleotide
  Target: LAMA2; (-) strand; PAM type: YTN; PAM sequence: TTC
ccagtcattggttcttgtct

SEQ ID NO: 217420 - DNA, 20 bp, Artificial Sequence
  Description of Artificial Sequence: Synthetic oligonucleotide
  Target: LAMA2; (-) strand; PAM type: YTN; PAM sequence: TTG
gttcccagtcattggttctt

SEQ ID NO: 217421 - DNA, 20 bp, Artificial Sequence
  Description of Artificial Sequence: Synthetic oligonucleotide
  Target: LAMA2; (-) strand; PAM type: YTN; PAM sequence: TTT
ggttcccagtcattggttct

SEQ ID NO: 217422 - DNA, 20 bp, Artificial Sequence
  Description of Artificial Sequence: Synthetic oligonucleotide
  Target: LAMA2; (-) strand; PAM type: YTN; PAM sequence: TTT
tggttcccagtcattggttc

SEQ ID NO: 217423 - DNA, 20 bp, Artificial Sequence
  Description of Artificial Sequence: Synthetic oligonucleotide
  Target: LAMA2; (-) strand; PAM type: YTN; PAM sequence: TTG
cattttggttcccagtcatt

SEQ ID NO: 217424 - DNA, 20 bp, Artificial Sequence
  Description of Artificial Sequence: Synthetic oligonucleotide
  Target: LAMA2; (-) strand; PAM type: YTN; PAM sequence: CTC
attgcattttggttcccagt

SEQ ID NO: 217425 - DNA, 20 bp, Artificial Sequence
  Description of Artificial Sequence: Synthetic oligonucleotide
  Target: LAMA2; (-) strand; PAM type: YTN; PAM sequence: CTG
ccaagccctcattgcatttt

SEQ ID NO: 217426 - DNA, 20 bp, Artificial Sequence
  Description of Artificial Sequence: Synthetic oligonucleotide
  Target: LAMA2; (-) strand; PAM type: YTN; PAM sequence: CTG
ggctgccaagccctcattgc

SEQ ID NO: 217427 - DNA, 20 bp, Artificial Sequence
  Description of Artificial Sequence: Synthetic oligonucleotide
  Target: LAMA2; (-) strand; PAM type: YTN; PAM sequence: CTC
ctgggctgccaagccctcat

SEQ ID NO: 217428 - DNA, 20 bp, Artificial Sequence
  Description of Artificial Sequence: Synthetic oligonucleotide
  Target: LAMA2; (-) strand; PAM type: YTN; PAM sequence: CTA
ctcctgggctgccaagccct

SEQ ID NO: 217429 - DNA, 20 bp, Artificial Sequence
  Description of Artificial Sequence: Synthetic oligonucleotide
  Target: LAMA2; (-) strand; PAM type: YTN; PAM sequence: CTC
acaacagcagccactactcc

SEQ ID NO: 217430 - DNA, 20 bp, Artificial Sequence
  Description of Artificial Sequence: Synthetic oligonucleotide
  Target: LAMA2; (-) strand; PAM type: YTN; PAM sequence: CTC
catgtgtctcacaacagcag

SEQ ID NO: 217431 - DNA, 20 bp, Artificial Sequence
  Description of Artificial Sequence: Synthetic oligonucleotide
  Target: LAMA2; (-) strand; PAM type: YTN; PAM sequence: TTA
gctccatgtgtctcacaaca

SEQ ID NO: 217432 - DNA, 20 bp, Artificial Sequence
  Description of Artificial Sequence: Synthetic oligonucleotide
  Target: LAMA2; (-) strand; PAM type: YTN; PAM sequence: TTT
agctccatgtgtctcacaac

SEQ ID NO: 217433 - DNA, 20 bp, Artificial Sequence
  Description of Artificial Sequence: Synthetic oligonucleotide
  Target: LAMA2; (-) strand; PAM type: YTN; PAM sequence: TTT
tagctccatgtgtctcacaa

SEQ ID NO: 217434 - DNA, 20 bp, Artificial Sequence
  Description of Artificial Sequence: Synthetic oligonucleotide
  Target: LAMA2; (-) strand; PAM type: YTN; PAM sequence: CTC
ccattttagctccatgtgtc

SEQ ID NO: 217435 - DNA, 20 bp, Artificial Sequence
  Description of Artificial Sequence: Synthetic oligonucleotide
  Target: LAMA2; (-) strand; PAM type: YTN; PAM sequence: CTC
tcccattttagctccatgtg

SEQ ID NO: 217436 - DNA, 20 bp, Artificial Sequence
  Description of Artificial Sequence: Synthetic oligonucleotide
  Target: LAMA2; (-) strand; PAM type: YTN; PAM sequence: CTC
atctctcccattttagctcc

SEQ ID NO: 217437 - DNA, 20 bp, Artificial Sequence
  Description of Artificial Sequence: Synthetic oligonucleotide
  Target: LAMA2; (-) strand; PAM type: YTN; PAM sequence: TTC
tcatctctcccattttagct

SEQ ID NO: 217438 - DNA, 20 bp, Artificial Sequence
  Description of Artificial Sequence: Synthetic oligonucleotide
  Target: LAMA2; (-) strand; PAM type: YTN; PAM sequence: TTT
ctcatctctcccattttagc

SEQ ID NO: 217439 - DNA, 20 bp, Artificial Sequence
  Description of Artificial Sequence: Synthetic oligonucleotide
  Target: LAMA2; (-) strand; PAM type: YTN; PAM sequence: CTC
acagtttctcatctctccca

SEQ ID NO: 217440 - DNA, 20 bp, Artificial Sequence
  Description of Artificial Sequence: Synthetic oligonucleotide
  Target: LAMA2; (-) strand; PAM type: YTN; PAM sequence: CTC
aaagctcacagtttctcatc

SEQ ID NO: 217441 - DNA, 20 bp, Artificial Sequence
  Description of Artificial Sequence: Synthetic oligonucleotide
  Target: LAMA2; (-) strand; PAM type: YTN; PAM sequence: TTA
caatcctcaaagctcacagt

SEQ ID NO: 217442 - DNA, 20 bp, Artificial Sequence
  Description of Artificial Sequence: Synthetic oligonucleotide
  Target: LAMA2; (-) strand; PAM type: YTN; PAM sequence: CTT
acaatcctcaaagctcacag

SEQ ID NO: 217443 - DNA, 20 bp, Artificial Sequence
  Description of Artificial Sequence: Synthetic oligonucleotide
  Target: LAMA2; (-) strand; PAM type: YTN; PAM sequence: TTC
ttacaatcctcaaagctcac

SEQ ID NO: 217444 - DNA, 20 bp, Artificial Sequence
  Description of Artificial Sequence: Synthetic oligonucleotide
  Target: LAMA2; (-) strand; PAM type: YTN; PAM sequence: CTT
cttacaatcctcaaagctca

SEQ ID NO: 217445 - DNA, 20 bp, Artificial Sequence
  Description of Artificial Sequence: Synthetic oligonucleotide
  Target: LAMA2; (-) strand; PAM type: YTN; PAM sequence: TTC
cttcttacaatcctcaaagc

SEQ ID NO: 217446 - DNA, 20 bp, Artificial Sequence
  Description of Artificial Sequence: Synthetic oligonucleotide
  Target: LAMA2; (-) strand; PAM type: YTN; PAM sequence: CTT
ccttcttacaatcctcaaag

SEQ ID NO: 217447 - DNA, 20 bp, Artificial Sequence
  Description of Artificial Sequence: Synthetic oligonucleotide
  Target: LAMA2; (-) strand; PAM type: YTN; PAM sequence: CTC
ccttccttcttacaatcctc

SEQ ID NO: 217448 - DNA, 20 bp, Artificial Sequence
  Description of Artificial Sequence: Synthetic oligonucleotide
  Target: LAMA2; (-) strand; PAM type: YTN; PAM sequence: TTG
cagctcccttccttcttaca

SEQ ID NO: 217449 - DNA, 20 bp, Artificial Sequence
  Description of Artificial Sequence: Synthetic oligonucleotide
  Target: LAMA2; (-) strand; PAM type: YTN; PAM sequence: TTG
ttgcagctcccttccttctt

SEQ ID NO: 217450 - DNA, 20 bp, Artificial Sequence
  Description of Artificial Sequence: Synthetic oligonucleotide
  Target: LAMA2; (-) strand; PAM type: YTN; PAM sequence: TTT
gttgcagctcccttccttct

SEQ ID NO: 217451 - DNA, 20 bp, Artificial Sequence
  Description of Artificial Sequence: Synthetic oligonucleotide
  Target: LAMA2; (-) strand; PAM type: YTN; PAM sequence: CTT
tgttgcagctcccttccttc

SEQ ID NO: 217452 - DNA, 20 bp, Artificial Sequence
  Description of Artificial Sequence: Synthetic oligonucleotide
  Target: LAMA2; (-) strand; PAM type: YTN; PAM sequence: CTG
tgacctttgttgcagctccc

SEQ ID NO: 217453 - DNA, 20 bp, Artificial Sequence
  Description of Artificial Sequence: Synthetic oligonucleotide
  Target: LAMA2; (-) strand; PAM type: YTN; PAM sequence: TTA
gagatagaaaataggaggcg

SEQ ID NO: 217454 - DNA, 20 bp, Artificial Sequence
  Description of Artificial Sequence: Synthetic oligonucleotide
  Target: LAMA2; (-) strand; PAM type: YTN; PAM sequence: TTG
tgaaaatcaaaagggagatt

SEQ ID NO: 217455 - DNA, 20 bp, Artificial Sequence
  Description of Artificial Sequence: Synthetic oligonucleotide
  Target: LAMA2; (-) strand; PAM type: YTN; PAM sequence: TTC
acccagacatataagaacag

SEQ ID NO: 217456 - DNA, 20 bp, Artificial Sequence
  Description of Artificial Sequence: Synthetic oligonucleotide
  Target: LAMA2; (-) strand; PAM type: YTN; PAM sequence: TTT
cacccagacatataagaaca

SEQ ID NO: 217457 - DNA, 20 bp, Artificial Sequence
  Description of Artificial Sequence: Synthetic oligonucleotide
  Target: LAMA2; (-) strand; PAM type: YTN; PAM sequence: CTT
tcacccagacatataagaac

SEQ ID NO: 217458 - DNA, 20 bp, Artificial Sequence
  Description of Artificial Sequence: Synthetic oligonucleotide
  Target: LAMA2; (-) strand; PAM type: YTN; PAM sequence: TTA
ctttcacccagacatataag

SEQ ID NO: 217459 - DNA, 20 bp, Artificial Sequence
  Description of Artificial Sequence: Synthetic oligonucleotide
  Target: LAMA2; (-) strand; PAM type: YTN; PAM sequence: CTT
actttcacccagacatataa

SEQ ID NO: 217460 - DNA, 20 bp, Artificial Sequence
  Description of Artificial Sequence: Synthetic oligonucleotide
  Target: LAMA2; (-) strand; PAM type: YTN; PAM sequence: TTC
ccttactttcacccagacat

SEQ ID NO: 217461 - DNA, 20 bp, Artificial Sequence
  Description of Artificial Sequence: Synthetic oligonucleotide
  Target: LAMA2; (-) strand; PAM type: YTN; PAM sequence: CTT
cccttactttcacccagaca

SEQ ID NO: 217462 - DNA, 20 bp, Artificial Sequence
  Description of Artificial Sequence: Synthetic oligonucleotide
  Target: LAMA2; (-) strand; PAM type: YTN; PAM sequence: CTA
ccaaaaaccacagatcttcc

SEQ ID NO: 217463 - DNA, 20 bp, Artificial Sequence
  Description of Artificial Sequence: Synthetic oligonucleotide
  Target: LAMA2; (-) strand; PAM type: YTN; PAM sequence: CTA
tcctaccaaaaaccacagat

SEQ ID NO: 217464 - DNA, 20 bp, Artificial Sequence
  Description of Artificial Sequence: Synthetic oligonucleotide
  Target: LAMA2; (-) strand; PAM type: YTN; PAM sequence: CTC
tatcctaccaaaaaccacag

SEQ ID NO: 217465 - DNA, 20 bp, Artificial Sequence
  Description of Artificial Sequence: Synthetic oligonucleotide
  Target: LAMA2; (-) strand; PAM type: YTN; PAM sequence: TTA
caataatggcaaggaaggag

SEQ ID NO: 217466 - DNA, 20 bp, Artificial Sequence
  Description of Artificial Sequence: Synthetic oligonucleotide
  Target: LAMA2; (-) strand; PAM type: YTN; PAM sequence: TTT
acaataatggcaaggaagga

SEQ ID NO: 217467 - DNA, 20 bp, Artificial Sequence
  Description of Artificial Sequence: Synthetic oligonucleotide
  Target: LAMA2; (-) strand; PAM type: YTN; PAM sequence: CTT
tacaataatggcaaggaagg

SEQ ID NO: 217468 - DNA, 20 bp, Artificial Sequence
  Description of Artificial Sequence: Synthetic oligonucleotide
  Target: LAMA2; (-) strand; PAM type: YTN; PAM sequence: CTA
gtggaggaatctttacaata

SEQ ID NO: 217469 - DNA, 20 bp, Artificial Sequence
  Description of Artificial Sequence: Synthetic oligonucleotide
  Target: LAMA2; (-) strand; PAM type: YTN; PAM sequence: CTC
tagtggaggaatctttacaa

SEQ ID NO: 217470 - DNA, 20 bp, Artificial Sequence
  Description of Artificial Sequence: Synthetic oligonucleotide
  Target: LAMA2; (-) strand; PAM type: YTN; PAM sequence: CTA
actctagtggaggaatcttt

SEQ ID NO: 217471 - DNA, 20 bp, Artificial Sequence
  Description of Artificial Sequence: Synthetic oligonucleotide
  Target: LAMA2; (-) strand; PAM type: YTN; PAM sequence: TTG
ccatcatcactaactctagt

SEQ ID NO: 217472 - DNA, 20 bp, Artificial Sequence
  Description of Artificial Sequence: Synthetic oligonucleotide
  Target: LAMA2; (-) strand; PAM type: YTN; PAM sequence: CTG
ttgccatcatcactaactct

SEQ ID NO: 217473 - DNA, 20 bp, Artificial Sequence
  Description of Artificial Sequence: Synthetic oligonucleotide
  Target: LAMA2; (-) strand; PAM type: YTN; PAM sequence: TTG
tctgttgccatcatcactaa

SEQ ID NO: 217474 - DNA, 20 bp, Artificial Sequence
  Description of Artificial Sequence: Synthetic oligonucleotide
  Target: LAMA2; (-) strand; PAM type: YTN; PAM sequence: TTT
gtctgttgccatcatcacta

SEQ ID NO: 217475 - DNA, 20 bp, Artificial Sequence
  Description of Artificial Sequence: Synthetic oligonucleotide
  Target: LAMA2; (-) strand; PAM type: YTN; PAM sequence: CTC
atccggcatttgtctgttgc

SEQ ID NO: 217476 - DNA, 20 bp, Artificial Sequence
  Description of Artificial Sequence: Synthetic oligonucleotide
  Target: LAMA2; (-) strand; PAM type: YTN; PAM sequence: CTC
tcatccggcatttgtctgtt

SEQ ID NO: 217477 - DNA, 20 bp, Artificial Sequence
  Description of Artificial Sequence: Synthetic oligonucleotide
  Target: LAMA2; (-) strand; PAM type: YTN; PAM sequence: TTA
ataatatgagagataaccca

SEQ ID NO: 217478 - DNA, 20 bp, Artificial Sequence
  Description of Artificial Sequence: Synthetic oligonucleotide
  Target: LAMA2; (-) strand; PAM type: YTN; PAM sequence: TTT
aataatatgagagataaccc

SEQ ID NO: 217479 - DNA, 20 bp, Artificial Sequence
  Description of Artificial Sequence: Synthetic oligonucleotide
  Target: LAMA2; (-) strand; PAM type: YTN; PAM sequence: CTA
tttaataatatgagagataa

SEQ ID NO: 217480 - DNA, 20 bp, Artificial Sequence
  Description of Artificial Sequence: Synthetic oligonucleotide
  Target: LAMA2; (-) strand; PAM type: YTN; PAM sequence: CTA
tcactatttaataatatgag

SEQ ID NO: 217481 - DNA, 20 bp, Artificial Sequence
  Description of Artificial Sequence: Synthetic oligonucleotide
  Target: LAMA2; (-) strand; PAM type: YTN; PAM sequence: TTC
tatcactatttaataatatg

SEQ ID NO: 217482 - DNA, 20 bp, Artificial Sequence
  Description of Artificial Sequence: Synthetic oligonucleotide
  Target: LAMA2; (-) strand; PAM type: YTN; PAM sequence: TTT
ctatcactatttaataatat

SEQ ID NO: 217483 - DNA, 20 bp, Artificial Sequence
  Description of Artificial Sequence: Synthetic oligonucleotide
  Target: LAMA2; (-) strand; PAM type: YTN; PAM sequence: TTT
tctatcactatttaataata

SEQ ID NO: 217484 - DNA, 20 bp, Artificial Sequence
  Description of Artificial Sequence: Synthetic oligonucleotide
  Target: LAMA2; (-) strand; PAM type: YTN; PAM sequence: TTG
ccaattttctatcactattt

SEQ ID NO: 217485 - DNA, 20 bp, Artificial Sequence
  Description of Artificial Sequence: Synthetic oligonucleotide
  Target: LAMA2; (-) strand; PAM type: YTN; PAM sequence: CTT
gccaattttctatcactatt

SEQ ID NO: 217486 - DNA, 20 bp, Artificial Sequence
  Description of Artificial Sequence: Synthetic oligonucleotide
  Target: LAMA2; (-) strand; PAM type: YTN; PAM sequence: TTA
acttgccaattttctatcac

SEQ ID NO: 217487 - DNA, 20 bp, Artificial Sequence
  Description of Artificial Sequence: Synthetic oligonucleotide
  Target: LAMA2; (-) strand; PAM type: YTN; PAM sequence: TTT
aacttgccaattttctatca

SEQ ID NO: 217488 - DNA, 20 bp, Artificial Sequence
  Description of Artificial Sequence: Synthetic oligonucleotide
  Target: LAMA2; (-) strand; PAM type: YTN; PAM sequence: CTT
taacttgccaattttctatc

SEQ ID NO: 217489 - DNA, 20 bp, Artificial Sequence
  Description of Artificial Sequence: Synthetic oligonucleotide
  Target: LAMA2; (-) strand; PAM type: YTN; PAM sequence: TTG
cggccagtctttaacttgcc

SEQ ID NO: 217490 - DNA, 20 bp, Artificial Sequence
  Description of Artificial Sequence: Synthetic oligonucleotide
  Target: LAMA2; (-) strand; PAM type: YTN; PAM sequence: TTT
gcggccagtctttaacttgc

SEQ ID NO: 217491 - DNA, 20 bp, Artificial Sequence
  Description of Artificial Sequence: Synthetic oligonucleotide
  Target: LAMA2; (-) strand; PAM type: YTN; PAM sequence: TTT
tgcggccagtctttaacttg

SEQ ID NO: 217492 - DNA, 20 bp, Artificial Sequence
  Description of Artificial Sequence: Synthetic oligonucleotide
  Target: LAMA2; (-) strand; PAM type: YTN; PAM sequence: TTT
ttgcggccagtctttaactt

SEQ ID NO: 217493 - DNA, 20 bp, Artificial Sequence
  Description of Artificial Sequence: Synthetic oligonucleotide
  Target: LAMA2; (-) strand; PAM type: YTN; PAM sequence: CTT
tttgcggccagtctttaact

SEQ ID NO: 217494 - DNA, 20 bp, Artificial Sequence
  Description of Artificial Sequence: Synthetic oligonucleotide
  Target: LAMA2; (-) strand; PAM type: YTN; PAM sequence: TTA
cagaagctttttgcggccag

SEQ ID NO: 217495 - DNA, 20 bp, Artificial Sequence
  Description of Artificial Sequence: Synthetic oligonucleotide
  Target: LAMA2; (-) strand; PAM type: YTN; PAM sequence: CTT
acagaagctttttgcggcca

SEQ ID NO: 217496 - DNA, 20 bp, Artificial Sequence
  Description of Artificial Sequence: Synthetic oligonucleotide
  Target: LAMA2; (-) strand; PAM type: YTN; PAM sequence: TTG
gcccttacagaagctttttg

SEQ ID NO: 217497 - DNA, 20 bp, Artificial Sequence
  Description of Artificial Sequence: Synthetic oligonucleotide
  Target: LAMA2; (-) strand; PAM type: YTN; PAM sequence: CTT
ggcccttacagaagcttttt

SEQ ID NO: 217498 - DNA, 20 bp, Artificial Sequence
  Description of Artificial Sequence: Synthetic oligonucleotide
  Target: LAMA2; (-) strand; PAM type: YTN; PAM sequence: TTC
ccttggcccttacagaagct

SEQ ID NO: 217499 - DNA, 20 bp, Artificial Sequence
  Description of Artificial Sequence: Synthetic oligonucleotide
  Target: LAMA2; (-) strand; PAM type: YTN; PAM sequence: TTT
cccttggcccttacagaagc

SEQ ID NO: 217500 - DNA, 20 bp, Artificial Sequence
  Description of Artificial Sequence: Synthetic oligonucleotide
  Target: LAMA2; (-) strand; PAM type: YTN; PAM sequence: TTT
tcccttggcccttacagaag

SEQ ID NO: 217501 - DNA, 20 bp, Artificial Sequence
  Description of Artificial Sequence: Synthetic oligonucleotide
  Target: LAMA2; (-) strand; PAM type: YTN; PAM sequence: TTC
agagggcaaaagagaagttt

SEQ ID NO: 217502 - DNA, 20 bp, Artificial Sequence
  Description of Artificial Sequence: Synthetic oligonucleotide
  Target: LAMA2; (-) strand; PAM type: YTN; PAM sequence: CTT
cagagggcaaaagagaagtt

SEQ ID NO: 217503 - DNA, 20 bp, Artificial Sequence
  Description of Artificial Sequence: Synthetic oligonucleotide
  Target: LAMA2; (-) strand; PAM type: YTN; PAM sequence: TTC
agcaaaccttcagagggcaa

SEQ ID NO: 217504 - DNA, 20 bp, Artificial Sequence
  Description of Artificial Sequence: Synthetic oligonucleotide
  Target: LAMA2; (-) strand; PAM type: YTN; PAM sequence: TTT
cagcaaaccttcagagggca

SEQ ID NO: 217505 - DNA, 20 bp, Artificial Sequence
  Description of Artificial Sequence: Synthetic oligonucleotide
  Target: LAMA2; (-) strand; PAM type: YTN; PAM sequence: TTT
tcagcaaaccttcagagggc

SEQ ID NO: 217506 - DNA, 20 bp, Artificial Sequence
  Description of Artificial Sequence: Synthetic oligonucleotide
  Target: LAMA2; (-) strand; PAM type: YTN; PAM sequence: TTT
ttcagcaaaccttcagaggg

SEQ ID NO: 217507 - DNA, 20 bp, Artificial Sequence
  Description of Artificial Sequence: Synthetic oligonucleotide
  Target: LAMA2; (-) strand; PAM type: YTN; PAM sequence: TTG
atttttcagcaaaccttcag

SEQ ID NO: 217508 - DNA, 20 bp, Artificial Sequence
  Description of Artificial Sequence: Synthetic oligonucleotide
  Target: LAMA2; (-) strand; PAM type: YTN; PAM sequence: TTC
agttgatttttcagcaaacc

SEQ ID NO: 217509 - DNA, 20 bp, Artificial Sequence
  Description of Artificial Sequence: Synthetic oligonucleotide
  Target: LAMA2; (-) strand; PAM type: YTN; PAM sequence: TTT
cagttgatttttcagcaaac

SEQ ID NO: 217510 - DNA, 20 bp, Artificial Sequence
  Description of Artificial Sequence: Synthetic oligonucleotide
  Target: LAMA2; (-) strand; PAM type: YTN; PAM sequence: TTT
tcagttgatttttcagcaaa

SEQ ID NO: 217511 - DNA, 20 bp, Artificial Sequence
  Description of Artificial Sequence: Synthetic oligonucleotide
  Target: LAMA2; (-) strand; PAM type: YTN; PAM sequence: TTT
ttcagttgatttttcagcaa

SEQ ID NO: 217512 - DNA, 20 bp, Artificial Sequence
  Description of Artificial Sequence: Synthetic oligonucleotide
  Target: LAMA2; (-) strand; PAM type: YTN; PAM sequence: TTT
tttcagttgatttttcagca

SEQ ID NO: 217513 - DNA, 20 bp, Artificial Sequence
  Description of Artificial Sequence: Synthetic oligonucleotide
  Target: LAMA2; (-) strand; PAM type: YTN; PAM sequence: CTT
ttttcagttgatttttcagc

SEQ ID NO: 217514 - DNA, 20 bp, Artificial Sequence
  Description of Artificial Sequence: Synthetic oligonucleotide
  Target: LAMA2; (-) strand; PAM type: YTN; PAM sequence: CTA
acttttttcagttgattttt

SEQ ID NO: 217515 - DNA, 20 bp, Artificial Sequence
  Description of Artificial Sequence: Synthetic oligonucleotide
  Target: LAMA2; (-) strand; PAM type: YTN; PAM sequence: CTA
ccaagctaacttttttcagt

SEQ ID NO: 217516 - DNA, 20 bp, Artificial Sequence
  Description of Artificial Sequence: Synthetic oligonucleotide
  Target: LAMA2; (-) strand; PAM type: YTN; PAM sequence: TTC
acctaccaagctaacttttt

SEQ ID NO: 217517 - DNA, 20 bp, Artificial Sequence
  Description of Artificial Sequence: Synthetic oligonucleotide
  Target: LAMA2; (-) strand; PAM type: YTN; PAM sequence: TTT
cacctaccaagctaactttt

SEQ ID NO: 217518 - DNA, 20 bp, Artificial Sequence
  Description of Artificial Sequence: Synthetic oligonucleotide
  Target: LAMA2; (-) strand; PAM type: YTN; PAM sequence: CTT
tcacctaccaagctaacttt

SEQ ID NO: 217519 - DNA, 20 bp, Artificial Sequence
  Description of Artificial Sequence: Synthetic oligonucleotide
  Target: LAMA2; (-) strand; PAM type: YTN; PAM sequence: TTG
tatgcctttcacctaccaag

SEQ ID NO: 217520 - DNA, 20 bp, Artificial Sequence
  Description of Artificial Sequence: Synthetic oligonucleotide
  Target: LAMA2; (-) strand; PAM type: YTN; PAM sequence: TTT
gtatgcctttcacctaccaa

SEQ ID NO: 217521 - DNA, 20 bp, Artificial Sequence
  Description of Artificial Sequence: Synthetic oligonucleotide
  Target: LAMA2; (-) strand; PAM type: YTN; PAM sequence: TTT
tgtatgcctttcacctacca

SEQ ID NO: 217522 - DNA, 20 bp, Artificial Sequence
  Description of Artificial Sequence: Synthetic oligonucleotide
  Target: LAMA2; (-) strand; PAM type: YTN; PAM sequence: TTA
aaatacattttgtatgcctt

SEQ ID NO: 217523 - DNA, 20 bp, Artificial Sequence
  Description of Artificial Sequence: Synthetic oligonucleotide
  Target: LAMA2; (-) strand; PAM type: YTN; PAM sequence: CTA
tgcatgttaaaatacatttt

SEQ ID NO: 217524 - DNA, 20 bp, Artificial Sequence
  Description of Artificial Sequence: Synthetic oligonucleotide
  Target: LAMA2; (-) strand; PAM type: YTN; PAM sequence: TTC
catgctatgcatgttaaaat

SEQ ID NO: 217525 - DNA, 20 bp, Artificial Sequence
  Description of Artificial Sequence: Synthetic oligonucleotide
  Target: LAMA2; (-) strand; PAM type: YTN; PAM sequence: CTT
ccatgctatgcatgttaaaa

SEQ ID NO: 217526 - DNA, 20 bp, Artificial Sequence
  Description of Artificial Sequence: Synthetic oligonucleotide
  Target: LAMA2; (-) strand; PAM type: YTN; PAM sequence: TTC
ttccatgctatgcatgttaa

SEQ ID NO: 217527 - DNA, 20 bp, Artificial Sequence
  Description of Artificial Sequence: Synthetic oligonucleotide
  Target: LAMA2; (-) strand; PAM type: YTN; PAM sequence: CTG
tgattcttccatgctatgca

SEQ ID NO: 217528 - DNA, 20 bp, Artificial Sequence
  Description of Artificial Sequence: Synthetic oligonucleotide
  Target: LAMA2; (-) strand; PAM type: YTN; PAM sequence: CTC
ctgtgattcttccatgctat

SEQ ID NO: 217529 - DNA, 20 bp, Artificial Sequence
  Description of Artificial Sequence: Synthetic oligonucleotide
  Target: LAMA2; (-) strand; PAM type: YTN; PAM sequence: TTG
ggtaatcatcctcctgtgat

SEQ ID NO: 217530 - DNA, 20 bp, Artificial Sequence
  Description of Artificial Sequence: Synthetic oligonucleotide
  Target: LAMA2; (-) strand; PAM type: YTN; PAM sequence: TTA
ttgggtaatcatcctcctgt

SEQ ID NO: 217531 - DNA, 20 bp, Artificial Sequence
  Description of Artificial Sequence: Synthetic oligonucleotide
  Target: LAMA2; (-) strand; PAM type: YTN; PAM sequence: TTG
ggttattgggtaatcatcct

SEQ ID NO: 217532 - DNA, 20 bp, Artificial Sequence
  Description of Artificial Sequence: Synthetic oligonucleotide
  Target: LAMA2; (-) strand; PAM type: YTN; PAM sequence: CTA
ttgggttattgggtaatcat

SEQ ID NO: 217533 - DNA, 20 bp, Artificial Sequence
  Description of Artificial Sequence: Synthetic oligonucleotide
  Target: LAMA2; (-) strand; PAM type: YTN; PAM sequence: CTC
ctattgggttattgggtaat

SEQ ID NO: 217534 - DNA, 20 bp, Artificial Sequence
  Description of Artificial Sequence: Synthetic oligonucleotide
  Target: LAMA2; (-) strand; PAM type: YTN; PAM sequence: CTA
tgctcctattgggttattgg

SEQ ID NO: 217535 - DNA, 20 bp, Artificial Sequence
  Description of Artificial Sequence: Synthetic oligonucleotide
  Target: LAMA2; (-) strand; PAM type: YTN; PAM sequence: CTA
catctatgctcctattgggt

SEQ ID NO: 217536 - DNA, 20 bp, Artificial Sequence
  Description of Artificial Sequence: Synthetic oligonucleotide
  Target: LAMA2; (-) strand; PAM type: YTN; PAM sequence: CTC
ccccgtgaagaagggtatat

SEQ ID NO: 217537 - DNA, 20 bp, Artificial Sequence
  Description of Artificial Sequence: Synthetic oligonucleotide
  Target: LAMA2; (-) strand; PAM type: YTN; PAM sequence: TTC
cctcccccgtgaagaagggt

SEQ ID NO: 217538 - DNA, 20 bp, Artificial Sequence
  Description of Artificial Sequence: Synthetic oligonucleotide
  Target: LAMA2; (-) strand; PAM type: YTN; PAM sequence: CTT
ccctcccccgtgaagaaggg

SEQ ID NO: 217539 - DNA, 20 bp, Artificial Sequence
  Description of Artificial Sequence: Synthetic oligonucleotide
  Target: LAMA2; (-) strand; PAM type: YTN; PAM sequence: TTC
cccatcttccctcccccgtg

SEQ ID NO: 217540 - DNA, 20 bp, Artificial Sequence
  Description of Artificial Sequence: Synthetic oligonucleotide
  Target: LAMA2; (-) strand; PAM type: YTN; PAM sequence: TTT
ccccatcttccctcccccgt

SEQ ID NO: 217541 - DNA, 20 bp, Artificial Sequence
  Description of Artificial Sequence: Synthetic oligonucleotide
  Target: LAMA2; (-) strand; PAM type: YTN; PAM sequence: TTT
tccccatcttccctcccccg

SEQ ID NO: 217542 - DNA, 20 bp, Artificial Sequence
  Description of Artificial Sequence: Synthetic oligonucleotide
  Target: LAMA2; (-) strand; PAM type: YTN; PAM sequence: TTG
ccatattttccccatcttcc

SEQ ID NO: 217543 - DNA, 20 bp, Artificial Sequence
  Description of Artificial Sequence: Synthetic oligonucleotide
  Target: LAMA2; (-) strand; PAM type: YTN; PAM sequence: TTC
caaattgccatattttcccc

SEQ ID NO: 217544 - DNA, 20 bp, Artificial Sequence
  Description of Artificial Sequence: Synthetic oligonucleotide
  Target: LAMA2; (-) strand; PAM type: YTN; PAM sequence: TTT
ccaaattgccatattttccc

SEQ ID NO: 217545 - DNA, 20 bp, Artificial Sequence
  Description of Artificial Sequence: Synthetic oligonucleotide
  Target: LAMA2; (-) strand; PAM type: YTN; PAM sequence: TTT
tccaaattgccatattttcc

SEQ ID NO: 217546 - DNA, 20 bp, Artificial Sequence
  Description of Artificial Sequence: Synthetic oligonucleotide
  Target: LAMA2; (-) strand; PAM type: YTN; PAM sequence: CTA
ttttccaaattgccatattt

SEQ ID NO: 217547 - DNA, 20 bp, Artificial Sequence
  Description of Artificial Sequence: Synthetic oligonucleotide
  Target: LAMA2; (-) strand; PAM type: YTN; PAM sequence: TTA
ctattttccaaattgccata

SEQ ID NO: 217548 - DNA, 20 bp, Artificial Sequence
  Description of Artificial Sequence: Synthetic oligonucleotide
  Target: LAMA2; (-) strand; PAM type: YTN; PAM sequence: TTT
actattttccaaattgccat

SEQ ID NO: 217549 - DNA, 20 bp, Artificial Sequence
  Description of Artificial Sequence: Synthetic oligonucleotide
  Target: LAMA2; (-) strand; PAM type: YTN; PAM sequence: CTA
aaaaatcatttactattttc

SEQ ID NO: 217550 - DNA, 20 bp, Artificial Sequence
  Description of Artificial Sequence: Synthetic oligonucleotide
  Target: LAMA2; (-) strand; PAM type: YTN; PAM sequence: TTC
ccctaaaaaatcatttacta

SEQ ID NO: 217551 - DNA, 20 bp, Artificial Sequence
  Description of Artificial Sequence: Synthetic oligonucleotide
  Target: LAMA2; (-) strand; PAM type: YTN; PAM sequence: TTG
aattcccctaaaaaatcatt

SEQ ID NO: 217552 - DNA, 20 bp, Artificial Sequence
  Description of Artificial Sequence: Synthetic oligonucleotide
  Target: LAMA2; (-) strand; PAM type: YTN; PAM sequence: CTT
gaattcccctaaaaaatcat

SEQ ID NO: 217553 - DNA, 20 bp, Artificial Sequence
  Description of Artificial Sequence: Synthetic oligonucleotide
  Target: LAMA2; (-) strand; PAM type: YTN; PAM sequence: TTC
ttgaattcccctaaaaaatc

SEQ ID NO: 217554 - DNA, 20 bp, Artificial Sequence
  Description of Artificial Sequence: Synthetic oligonucleotide
  Target: LAMA2; (-) strand; PAM type: YTN; PAM sequence: TTG
taggttcttgaattccccta

SEQ ID NO: 217555 - DNA, 20 bp, Artificial Sequence
  Description of Artificial Sequence: Synthetic oligonucleotide
  Target: LAMA2; (-) strand; PAM type: YTN; PAM sequence: TTG
tcccaggccattgtaggttc

SEQ ID NO: 217556 - DNA, 20 bp, Artificial Sequence
  Description of Artificial Sequence: Synthetic oligonucleotide
  Target: LAMA2; (-) strand; PAM type: YTN; PAM sequence: TTT
gtcccaggccattgtaggtt

SEQ ID NO: 217557 - DNA, 20 bp, Artificial Sequence
  Description of Artificial Sequence: Synthetic oligonucleotide
  Target: LAMA2; (-) strand; PAM type: YTN; PAM sequence: CTT
tgtcccaggccattgtaggt

SEQ ID NO: 217558 - DNA, 20 bp, Artificial Sequence
  Description of Artificial Sequence: Synthetic oligonucleotide
  Target: LAMA2; (-) strand; PAM type: YTN; PAM sequence: CTG
tgggcccaacagactttgtc

SEQ ID NO: 217559 - DNA, 20 bp, Artificial Sequence
  Description of Artificial Sequence: Synthetic oligonucleotide
  Target: LAMA2; (-) strand; PAM type: YTN; PAM sequence: CTC
tgtgggcccaacagactttg

SEQ ID NO: 217560 - DNA, 20 bp, Artificial Sequence
  Description of Artificial Sequence: Synthetic oligonucleotide
  Target: LAMA2; (-) strand; PAM type: YTN; PAM sequence: CTG
ctctgtgggcccaacagact

SEQ ID NO: 217561 - DNA, 20 bp, Artificial Sequence
  Description of Artificial Sequence: Synthetic oligonucleotide
  Target: LAMA2; (-) strand; PAM type: YTN; PAM sequence: CTA
tctgctctgtgggcccaaca

SEQ ID NO: 217562 - DNA, 20 bp, Artificial Sequence
  Description of Artificial Sequence: Synthetic oligonucleotide
  Target: LAMA2; (-) strand; PAM type: YTN; PAM sequence: TTA
caaaccactatctgctctgt

SEQ ID NO: 217563 - DNA, 20 bp, Artificial Sequence
  Description of Artificial Sequence: Synthetic oligonucleotide
  Target: LAMA2; (-) strand; PAM type: YTN; PAM sequence: TTG
ttacaaaccactatctgctc

SEQ ID NO: 217564 - DNA, 20 bp, Artificial Sequence
  Description of Artificial Sequence: Synthetic oligonucleotide
  Target: LAMA2; (-) strand; PAM type: YTN; PAM sequence: TTT
gttacaaaccactatctgct

SEQ ID NO: 217565 - DNA, 20 bp, Artificial Sequence
  Description of Artificial Sequence: Synthetic oligonucleotide
  Target: LAMA2; (-) strand; PAM type: YTN; PAM sequence: TTT
tgttacaaaccactatctgc

SEQ ID NO: 217566 - DNA, 20 bp, Artificial Sequence
  Description of Artificial Sequence: Synthetic oligonucleotide
  Target: LAMA2; (-) strand; PAM type: YTN; PAM sequence: CTT
ttgttacaaaccactatctg

SEQ ID NO: 217567 - DNA, 20 bp, Artificial Sequence
  Description of Artificial Sequence: Synthetic oligonucleotide
  Target: LAMA2; (-) strand; PAM type: YTN; PAM sequence: CTG
aacagacttttgttacaaac

SEQ ID NO: 217568 - DNA, 20 bp, Artificial Sequence
  Description of Artificial Sequence: Synthetic oligonucleotide
  Target: LAMA2; (-) strand; PAM type: YTN; PAM sequence: CTG
tcggcacacctgaacagact

SEQ ID NO: 217569 - DNA, 20 bp, Artificial Sequence
  Description of Artificial Sequence: Synthetic oligonucleotide
  Target: LAMA2; (-) strand; PAM type: YTN; PAM sequence: CTG
aagtctgtcggcacacctga

SEQ ID NO: 217570 - DNA, 20 bp, Artificial Sequence
  Description of Artificial Sequence: Synthetic oligonucleotide
  Target: LAMA2; (-) strand; PAM type: YTN; PAM sequence: TTC
acatgaagagagactgaagt

SEQ ID NO: 217571 - DNA, 20 bp, Artificial Sequence
  Description of Artificial Sequence: Synthetic oligonucleotide
  Target: LAMA2; (-) strand; PAM type: YTN; PAM sequence: TTT
cacatgaagagagactgaag

SEQ ID NO: 217572 - DNA, 20 bp, Artificial Sequence
  Description of Artificial Sequence: Synthetic oligonucleotide
  Target: LAMA2; (-) strand; PAM type: YTN; PAM sequence: CTC
atttcacatgaagagagact

SEQ ID NO: 217573 - DNA, 20 bp, Artificial Sequence
  Description of Artificial Sequence: Synthetic oligonucleotide
  Target: LAMA2; (-) strand; PAM type: YTN; PAM sequence: TTA
actcatttcacatgaagaga

SEQ ID NO: 217574 - DNA, 20 bp, Artificial Sequence
  Description of Artificial Sequence: Synthetic oligonucleotide
  Target: LAMA2; (-) strand; PAM type: YTN; PAM sequence: TTT
aactcatttcacatgaagag

SEQ ID NO: 217575 - DNA, 20 bp, Artificial Sequence
  Description of Artificial Sequence: Synthetic oligonucleotide
  Target: LAMA2; (-) strand; PAM type: YTN; PAM sequence: TTA
atttaactcatttcacatga

SEQ ID NO: 217576 - DNA, 20 bp, Artificial Sequence
  Description of Artificial Sequence: Synthetic oligonucleotide
  Target: LAMA2; (-) strand; PAM type: YTN; PAM sequence: TTC
attaatttaactcatttcac

SEQ ID NO: 217577 - DNA, 20 bp, Artificial Sequence
  Description of Artificial Sequence: Synthetic oligonucleotide
  Target: LAMA2; (-) strand; PAM type: YTN; PAM sequence: TTT
cattaatttaactcatttca

SEQ ID NO: 217578 - DNA, 20 bp, Artificial Sequence
  Description of Artificial Sequence: Synthetic oligonucleotide
  Target: LAMA2; (-) strand; PAM type: YTN; PAM sequence: TTT
tcattaatttaactcatttc

SEQ ID NO: 217579 - DNA, 20 bp, Artificial Sequence
  Description of Artificial Sequence: Synthetic oligonucleotide
  Target: LAMA2; (-) strand; PAM type: YTN; PAM sequence: TTA
agttttcattaatttaactc

SEQ ID NO: 217580 - DNA, 20 bp, Artificial Sequence
  Description of Artificial Sequence: Synthetic oligonucleotide
  Target: LAMA2; (-) strand; PAM type: YTN; PAM sequence: CTT
aagttttcattaatttaact

SEQ ID NO: 217581 - DNA, 20 bp, Artificial Sequence
  Description of Artificial Sequence: Synthetic oligonucleotide
  Target: LAMA2; (-) strand; PAM type: YTN; PAM sequence: TTG
cttaagttttcattaattta

SEQ ID NO: 217582 - DNA, 20 bp, Artificial Sequence
  Description of Artificial Sequence: Synthetic oligonucleotide
  Target: LAMA2; (-) strand; PAM type: YTN; PAM sequence: CTT
gcttaagttttcattaattt

SEQ ID NO: 217583 - DNA, 20 bp, Artificial Sequence
  Description of Artificial Sequence: Synthetic oligonucleotide
  Target: LAMA2; (-) strand; PAM type: YTN; PAM sequence: CTC
ttgcttaagttttcattaat

SEQ ID NO: 217584 - DNA, 20 bp, Artificial Sequence
  Description of Artificial Sequence: Synthetic oligonucleotide
  Target: LAMA2; (-) strand; PAM type: YTN; PAM sequence: CTG
gccctcttgcttaagttttc

SEQ ID NO: 217585 - DNA, 20 bp, Artificial Sequence
  Description of Artificial Sequence: Synthetic oligonucleotide
  Target: LAMA2; (-) strand; PAM type: YTN; PAM sequence: CTC
tggccctcttgcttaagttt

SEQ ID NO: 217586 - DNA, 20 bp, Artificial Sequence
  Description of Artificial Sequence: Synthetic oligonucleotide
  Target: LAMA2; (-) strand; PAM type: YTN; PAM sequence: TTC
ctctggccctcttgcttaag

SEQ ID NO: 217587 - DNA, 20 bp, Artificial Sequence
  Description of Artificial Sequence: Synthetic oligonucleotide
  Target: LAMA2; (-) strand; PAM type: YTN; PAM sequence: TTT
cctctggccctcttgcttaa

SEQ ID NO: 217588 - DNA, 20 bp, Artificial Sequence
  Description of Artificial Sequence: Synthetic oligonucleotide
  Target: LAMA2; (-) strand; PAM type: YTN; PAM sequence: CTG
atcccaccaggaggaaaagt

SEQ ID NO: 217589 - DNA, 20 bp, Artificial Sequence
  Description of Artificial Sequence: Synthetic oligonucleotide
  Target: LAMA2; (-) strand; PAM type: YTN; PAM sequence: TTA
cagtctgatcccaccaggag

SEQ ID NO: 217590 - DNA, 20 bp, Artificial Sequence
  Description of Artificial Sequence: Synthetic oligonucleotide
  Target: LAMA2; (-) strand; PAM type: YTN; PAM sequence: CTT
acagtctgatcccaccagga

SEQ ID NO: 217591 - DNA, 20 bp, Artificial Sequence
  Description of Artificial Sequence: Synthetic oligonucleotide
  Target: LAMA2; (-) strand; PAM type: YTN; PAM sequence: CTA
cttacagtctgatcccacca

SEQ ID NO: 217592 - DNA, 20 bp, Artificial Sequence
  Description of Artificial Sequence: Synthetic oligonucleotide
  Target: LAMA2; (-) strand; PAM type: YTN; PAM sequence: CTC
ccgtatctacttacagtctg

SEQ ID NO: 217593 - DNA, 20 bp, Artificial Sequence
  Description of Artificial Sequence: Synthetic oligonucleotide
  Target: LAMA2; (-) strand; PAM type: YTN; PAM sequence: CTG
atactcccgtatctacttac

SEQ ID NO: 217594 - DNA, 20 bp, Artificial Sequence
  Description of Artificial Sequence: Synthetic oligonucleotide
  Target: LAMA2; (-) strand; PAM type: YTN; PAM sequence: CTC
tgatactcccgtatctactt

SEQ ID NO: 217595 - DNA, 20 bp, Artificial Sequence
  Description of Artificial Sequence: Synthetic oligonucleotide
  Target: LAMA2; (-) strand; PAM type: YTN; PAM sequence: TTA
ctctgatactcccgtatcta

SEQ ID NO: 217596 - DNA, 20 bp, Artificial Sequence
  Description of Artificial Sequence: Synthetic oligonucleotide
  Target: LAMA2; (-) strand; PAM type: YTN; PAM sequence: TTT
actctgatactcccgtatct

SEQ ID NO: 217597 - DNA, 20 bp, Artificial Sequence
  Description of Artificial Sequence: Synthetic oligonucleotide
  Target: LAMA2; (-) strand; PAM type: YTN; PAM sequence: TTT
tactctgatactcccgtatc

SEQ ID NO: 217598 - DNA, 20 bp, Artificial Sequence
  Description of Artificial Sequence: Synthetic oligonucleotide
  Target: LAMA2; (-) strand; PAM type: YTN; PAM sequence: CTG
aaataagttttactctgata

SEQ ID NO: 217599 - DNA, 20 bp, Artificial Sequence
  Description of Artificial Sequence: Synthetic oligonucleotide
  Target: LAMA2; (-) strand; PAM type: YTN; PAM sequence: TTG
gagaccagcaaatgctgaaa

SEQ ID NO: 217600 - DNA, 20 bp, Artificial Sequence
  Description of Artificial Sequence: Synthetic oligonucleotide
  Target: LAMA2; (-) strand; PAM type: YTN; PAM sequence: CTT
ggagaccagcaaatgctgaa

SEQ ID NO: 217601 - DNA, 20 bp, Artificial Sequence
  Description of Artificial Sequence: Synthetic oligonucleotide
  Target: LAMA2; (-) strand; PAM type: YTN; PAM sequence: CTC
ttggagaccagcaaatgctg

SEQ ID NO: 217602 - DNA, 20 bp, Artificial Sequence
  Description of Artificial Sequence: Synthetic oligonucleotide
  Target: LAMA2; (-) strand; PAM type: YTN; PAM sequence: TTA
aaggctcttggagaccagca

SEQ ID NO: 217603 - DNA, 20 bp, Artificial Sequence
  Description of Artificial Sequence: Synthetic oligonucleotide
  Target: LAMA2; (-) strand; PAM type: YTN; PAM sequence: TTA
aattaaaggctcttggagac

SEQ ID NO: 217604 - DNA, 20 bp, Artificial Sequence
  Description of Artificial Sequence: Synthetic oligonucleotide
  Target: LAMA2; (-) strand; PAM type: YTN; PAM sequence: TTT
aaattaaaggctcttggaga

SEQ ID NO: 217605 - DNA, 20 bp, Artificial Sequence
  Description of Artificial Sequence: Synthetic oligonucleotide
  Target: LAMA2; (-) strand; PAM type: YTN; PAM sequence: TTT
taaattaaaggctcttggag

SEQ ID NO: 217606 - DNA, 20 bp, Artificial Sequence
  Description of Artificial Sequence: Synthetic oligonucleotide
  Target: LAMA2; (-) strand; PAM type: YTN; PAM sequence: TTA
ttttaaattaaaggctcttg

SEQ ID NO: 217607 - DNA, 20 bp, Artificial Sequence
  Description of Artificial Sequence: Synthetic oligonucleotide
  Target: LAMA2; (-) strand; PAM type: YTN; PAM sequence: CTG
attattttaaattaaaggct

SEQ ID NO: 217608 - DNA, 20 bp, Artificial Sequence
  Description of Artificial Sequence: Synthetic oligonucleotide
  Target: LAMA2; (-) strand; PAM type: YTN; PAM sequence: CTG
gtatgctgattattttaaat

SEQ ID NO: 217609 - DNA, 20 bp, Artificial Sequence
  Description of Artificial Sequence: Synthetic oligonucleotide
  Target: LAMA2; (-) strand; PAM type: YTN; PAM sequence: CTC
agaaaccaatacccgaaaat

SEQ ID NO: 217610 - DNA, 20 bp, Artificial Sequence
  Description of Artificial Sequence: Synthetic oligonucleotide
  Target: LAMA2; (-) strand; PAM type: YTN; PAM sequence: TTG
aggctcagaaaccaataccc

SEQ ID NO: 217611 - DNA, 20 bp, Artificial Sequence
  Description of Artificial Sequence: Synthetic oligonucleotide
  Target: LAMA2; (-) strand; PAM type: YTN; PAM sequence: CTA
tgagatattgaggctcagaa

SEQ ID NO: 217612 - DNA, 20 bp, Artificial Sequence
  Description of Artificial Sequence: Synthetic oligonucleotide
  Target: LAMA2; (-) strand; PAM type: YTN; PAM sequence: TTC
tatgagatattgaggctcag

SEQ ID NO: 217613 - DNA, 20 bp, Artificial Sequence
  Description of Artificial Sequence: Synthetic oligonucleotide
  Target: LAMA2; (-) strand; PAM type: YTN; PAM sequence: TTC
attctatgagatattgaggc

SEQ ID NO: 217614 - DNA, 20 bp, Artificial Sequence
  Description of Artificial Sequence: Synthetic oligonucleotide
  Target: LAMA2; (-) strand; PAM type: YTN; PAM sequence: TTA
aattcattctatgagatatt

SEQ ID NO: 217615 - DNA, 20 bp, Artificial Sequence
  Description of Artificial Sequence: Synthetic oligonucleotide
  Target: LAMA2; (-) strand; PAM type: YTN; PAM sequence: CTG
ttaaattcattctatgagat

SEQ ID NO: 217616 - DNA, 20 bp, Artificial Sequence
  Description of Artificial Sequence: Synthetic oligonucleotide
  Target: LAMA2; (-) strand; PAM type: YTN; PAM sequence: TTA
acataaaatgctgttaaatt

SEQ ID NO: 217617 - DNA, 20 bp, Artificial Sequence
  Description of Artificial Sequence: Synthetic oligonucleotide
  Target: LAMA2; (-) strand; PAM type: YTN; PAM sequence: TTT
aacataaaatgctgttaaat

SEQ ID NO: 217618 - DNA, 20 bp, Artificial Sequence
  Description of Artificial Sequence: Synthetic oligonucleotide
  Target: LAMA2; (-) strand; PAM type: YTN; PAM sequence: TTT
taacataaaatgctgttaaa

SEQ ID NO: 217619 - DNA, 20 bp, Artificial Sequence
  Description of Artificial Sequence: Synthetic oligonucleotide
  Target: LAMA2; (-) strand; PAM type: YTN; PAM sequence: CTG
gttttaacataaaatgctgt

SEQ ID NO: 217620 - DNA, 20 bp, Artificial Sequence
  Description of Artificial Sequence: Synthetic oligonucleotide
  Target: LAMA2; (-) strand; PAM type: YTN; PAM sequence: TTA
agacgtagggagtccaatat

SEQ ID NO: 217621 - DNA, 20 bp, Artificial Sequence
  Description of Artificial Sequence: Synthetic oligonucleotide
  Target: LAMA2; (-) strand; PAM type: YTN; PAM sequence: TTA
ttaagacgtagggagtccaa

SEQ ID NO: 217622 - DNA, 20 bp, Artificial Sequence
  Description of Artificial Sequence: Synthetic oligonucleotide
  Target: LAMA2; (-) strand; PAM type: YTN; PAM sequence: TTA
ttattaagacgtagggagtc

SEQ ID NO: 217623 - DNA, 20 bp, Artificial Sequence
  Description of Artificial Sequence: Synthetic oligonucleotide
  Target: LAMA2; (-) strand; PAM type: YTN; PAM sequence: TTC
attattattaagacgtaggg

SEQ ID NO: 217624 - DNA, 20 bp, Artificial Sequence
  Description of Artificial Sequence: Synthetic oligonucleotide
  Target: LAMA2; (-) strand; PAM type: YTN; PAM sequence: CTG
acacattcattattattaag

SEQ ID NO: 217625 - DNA, 20 bp, Artificial Sequence
  Description of Artificial Sequence: Synthetic oligonucleotide
  Target: LAMA2; (-) strand; PAM type: YTN; PAM sequence: TTC
tgacacattcattattatta

SEQ ID NO: 217626 - DNA, 20 bp, Artificial Sequence
  Description of Artificial Sequence: Synthetic oligonucleotide
  Target: LAMA2; (-) strand; PAM type: YTN; PAM sequence: CTT
ctgacacattcattattatt

SEQ ID NO: 217627 - DNA, 20 bp, Artificial Sequence
  Description of Artificial Sequence: Synthetic oligonucleotide
  Target: LAMA2; (-) strand; PAM type: YTN; PAM sequence: TTG
cccttctgacacattcatta

SEQ ID NO: 217628 - DNA, 20 bp, Artificial Sequence
  Description of Artificial Sequence: Synthetic oligonucleotide
  Target: LAMA2; (-) strand; PAM type: YTN; PAM sequence: CTT
gcccttctgacacattcatt

SEQ ID NO: 217629 - DNA, 20 bp, Artificial Sequence
  Description of Artificial Sequence: Synthetic oligonucleotide
  Target: LAMA2; (-) strand; PAM type: YTN; PAM sequence: TTG
aacacttgcccttctgacac

SEQ ID NO: 217630 - DNA, 20 bp, Artificial Sequence
  Description of Artificial Sequence: Synthetic oligonucleotide
  Target: LAMA2; (-) strand; PAM type: YTN; PAM sequence: CTT
gaacacttgcccttctgaca

SEQ ID NO: 217631 - DNA, 20 bp, Artificial Sequence
  Description of Artificial Sequence: Synthetic oligonucleotide
  Target: LAMA2; (-) strand; PAM type: YTN; PAM sequence: TTG
aaatacacttgaacacttgc

SEQ ID NO: 217632 - DNA, 20 bp, Artificial Sequence
  Description of Artificial Sequence: Synthetic oligonucleotide
  Target: LAMA2; (-) strand; PAM type: YTN; PAM sequence: TTG
tggttgaaatacacttgaac

SEQ ID NO: 217633 - DNA, 20 bp, Artificial Sequence
  Description of Artificial Sequence: Synthetic oligonucleotide
  Target: LAMA2; (-) strand; PAM type: YTN; PAM sequence: CTT
gtggttgaaatacacttgaa

SEQ ID NO: 217634 - DNA, 20 bp, Artificial Sequence
  Description of Artificial Sequence: Synthetic oligonucleotide
  Target: LAMA2; (-) strand; PAM type: YTN; PAM sequence: CTG
acttgtggttgaaatacact

SEQ ID NO: 217635 - DNA, 20 bp, Artificial Sequence
  Description of Artificial Sequence: Synthetic oligonucleotide
  Target: LAMA2; (-) strand; PAM type: YTN; PAM sequence: TTA
acagaaacataaaatcctga

SEQ ID NO: 217636 - DNA, 20 bp, Artificial Sequence
  Description of Artificial Sequence: Synthetic oligonucleotide
  Target: LAMA2; (-) strand; PAM type: YTN; PAM sequence: TTG
ttaacagaaacataaaatcc

SEQ ID NO: 217637 - DNA, 20 bp, Artificial Sequence
  Description of Artificial Sequence: Synthetic oligonucleotide
  Target: LAMA2; (-) strand; PAM type: YTN; PAM sequence: CTT
gttaacagaaacataaaatc

SEQ ID NO: 217638 - DNA, 20 bp, Artificial Sequence
  Description of Artificial Sequence: Synthetic oligonucleotide
  Target: LAMA2; (-) strand; PAM type: YTN; PAM sequence: CTA
gtatgccatcaaccttgtta

SEQ ID NO: 217639 - DNA, 20 bp, Artificial Sequence
  Description of Artificial Sequence: Synthetic oligonucleotide
  Target: LAMA2; (-) strand; PAM type: YTN; PAM sequence: CTC
tagtatgccatcaaccttgt

SEQ ID NO: 217640 - DNA, 20 bp, Artificial Sequence
  Description of Artificial Sequence: Synthetic oligonucleotide
  Target: LAMA2; (-) strand; PAM type: YTN; PAM sequence: TTG
agacagctctagtatgccat

SEQ ID NO: 217641 - DNA, 20 bp, Artificial Sequence
  Description of Artificial Sequence: Synthetic oligonucleotide
  Target: LAMA2; (-) strand; PAM type: YTN; PAM sequence: CTA
ttgagacagctctagtatgc

SEQ ID NO: 217642 - DNA, 20 bp, Artificial Sequence
  Description of Artificial Sequence: Synthetic oligonucleotide
  Target: LAMA2; (-) strand; PAM type: YTN; PAM sequence: CTA
actattgagacagctctagt

SEQ ID NO: 217643 - DNA, 20 bp, Artificial Sequence
  Description of Artificial Sequence: Synthetic oligonucleotide
  Target: LAMA2; (-) strand; PAM type: YTN; PAM sequence: TTC
aaaaaagcaacaactaacta

SEQ ID NO: 217644 - DNA, 20 bp, Artificial Sequence
  Description of Artificial Sequence: Synthetic oligonucleotide
  Target: LAMA2; (-) strand; PAM type: YTN; PAM sequence: TTG
tcaatcattcaaaaaagcaa

SEQ ID NO: 217645 - DNA, 20 bp, Artificial Sequence
  Description of Artificial Sequence: Synthetic oligonucleotide
  Target: LAMA2; (-) strand; PAM type: YTN; PAM sequence: CTT
gtcaatcattcaaaaaagca

SEQ ID NO: 217646 - DNA, 20 bp, Artificial Sequence
  Description of Artificial Sequence: Synthetic oligonucleotide
  Target: LAMA2; (-) strand; PAM type: YTN; PAM sequence: TTG
acttgtcaatcattcaaaaa

SEQ ID NO: 217647 - DNA, 20 bp, Artificial Sequence
  Description of Artificial Sequence: Synthetic oligonucleotide
  Target: LAMA2; (-) strand; PAM type: YTN; PAM sequence: CTA
attgacttgtcaatcattca

SEQ ID NO: 217648 - DNA, 20 bp, Artificial Sequence
  Description of Artificial Sequence: Synthetic oligonucleotide
  Target: LAMA2; (-) strand; PAM type: YTN; PAM sequence: TTA
aaatctaattgacttgtcaa

SEQ ID NO: 217649 - DNA, 20 bp, Artificial Sequence
  Description of Artificial Sequence: Synthetic oligonucleotide
  Target: LAMA2; (-) strand; PAM type: YTN; PAM sequence: TTA
agtgtaaagatataatgtta

SEQ ID NO: 217650 - DNA, 20 bp, Artificial Sequence
  Description of Artificial Sequence: Synthetic oligonucleotide
  Target: LAMA2; (-) strand; PAM type: YTN; PAM sequence: CTA
cagaaattaagtgtaaagat

SEQ ID NO: 217651 - DNA, 20 bp, Artificial Sequence
  Description of Artificial Sequence: Synthetic oligonucleotide
  Target: LAMA2; (-) strand; PAM type: YTN; PAM sequence: TTA
aaggtaactacagaaattaa

SEQ ID NO: 217652 - DNA, 20 bp, Artificial Sequence
  Description of Artificial Sequence: Synthetic oligonucleotide
  Target: LAMA2; (-) strand; PAM type: YTN; PAM sequence: TTT
aaaggtaactacagaaatta

SEQ ID NO: 217653 - DNA, 20 bp, Artificial Sequence
  Description of Artificial Sequence: Synthetic oligonucleotide
  Target: LAMA2; (-) strand; PAM type: YTN; PAM sequence: TTT
taaaggtaactacagaaatt

SEQ ID NO: 217654 - DNA, 20 bp, Artificial Sequence
  Description of Artificial Sequence: Synthetic oligonucleotide
  Target: LAMA2; (-) strand; PAM type: YTN; PAM sequence: TTA
accaaaatgggcaattttaa

SEQ ID NO: 217655 - DNA, 20 bp, Artificial Sequence
  Description of Artificial Sequence: Synthetic oligonucleotide
  Target: LAMA2; (-) strand; PAM type: YTN; PAM sequence: CTG
gccattaaccaaaatgggca

SEQ ID NO: 217656 - DNA, 20 bp, Artificial Sequence
  Description of Artificial Sequence: Synthetic oligonucleotide
  Target: LAMA2; (-) strand; PAM type: YTN; PAM sequence: CTC
tggccattaaccaaaatggg

SEQ ID NO: 217657 - DNA, 20 bp, Artificial Sequence
  Description of Artificial Sequence: Synthetic oligonucleotide
  Target: LAMA2; (-) strand; PAM type: YTN; PAM sequence: CTG
gtcagcactctggccattaa

SEQ ID NO: 217658 - DNA, 20 bp, Artificial Sequence
  Description of Artificial Sequence: Synthetic oligonucleotide
  Target: LAMA2; (-) strand; PAM type: YTN; PAM sequence: CTG
caggggaatgagctggtcag

SEQ ID NO: 217659 - DNA, 20 bp, Artificial Sequence
  Description of Artificial Sequence: Synthetic oligonucleotide
  Target: LAMA2; (-) strand; PAM type: YTN; PAM sequence: TTA
ggctgcaggggaatgagctg

SEQ ID NO: 217660 - DNA, 20 bp, Artificial Sequence
  Description of Artificial Sequence: Synthetic oligonucleotide
  Target: LAMA2; (-) strand; PAM type: YTN; PAM sequence: CTT
aggctgcaggggaatgagct

SEQ ID NO: 217661 - DNA, 20 bp, Artificial Sequence
  Description of Artificial Sequence: Synthetic oligonucleotide
  Target: LAMA2; (-) strand; PAM type: YTN; PAM sequence: TTA
aatgcttaggctgcagggga

SEQ ID NO: 217662 - DNA, 20 bp, Artificial Sequence
  Description of Artificial Sequence: Synthetic oligonucleotide
  Target: LAMA2; (-) strand; PAM type: YTN; PAM sequence: TTT
aaatgcttaggctgcagggg

SEQ ID NO: 217663 - DNA, 20 bp, Artificial Sequence
  Description of Artificial Sequence: Synthetic oligonucleotide
  Target: LAMA2; (-) strand; PAM type: YTN; PAM sequence: CTC
atagcaccatacaaggtagc

SEQ ID NO: 217664 - DNA, 20 bp, Artificial Sequence
  Description of Artificial Sequence: Synthetic oligonucleotide
  Target: LAMA2; (-) strand; PAM type: YTN; PAM sequence: CTG
tctcatagcaccatacaagg

SEQ ID NO: 217665 - DNA, 20 bp, Artificial Sequence
  Description of Artificial Sequence: Synthetic oligonucleotide
  Target: LAMA2; (-) strand; PAM type: YTN; PAM sequence: TTC
aatgacagctgtctcatagc

SEQ ID NO: 217666 - DNA, 20 bp, Artificial Sequence
  Description of Artificial Sequence: Synthetic oligonucleotide
  Target: LAMA2; (-) strand; PAM type: YTN; PAM sequence: CTT
caatgacagctgtctcatag

SEQ ID NO: 217667 - DNA, 20 bp, Artificial Sequence
  Description of Artificial Sequence: Synthetic oligonucleotide
  Target: LAMA2; (-) strand; PAM type: YTN; PAM sequence: TTC
ttcaatgacagctgtctcat

SEQ ID NO: 217668 - DNA, 20 bp, Artificial Sequence
  Description of Artificial Sequence: Synthetic oligonucleotide
  Target: LAMA2; (-) strand; PAM type: YTN; PAM sequence: TTT
cttcaatgacagctgtctca

SEQ ID NO: 217669 - DNA, 20 bp, Artificial Sequence
  Description of Artificial Sequence: Synthetic oligonucleotide
  Target: LAMA2; (-) strand; PAM type: YTN; PAM sequence: CTC
aacagaatttcttcaatgac

SEQ ID NO: 217670 - DNA, 20 bp, Artificial Sequence
  Description of Artificial Sequence: Synthetic oligonucleotide
  Target: LAMA2; (-) strand; PAM type: YTN; PAM sequence: TTC
tcaacagaatttcttcaatg

SEQ ID NO: 217671 - DNA, 20 bp, Artificial Sequence
  Description of Artificial Sequence: Synthetic oligonucleotide
  Target: LAMA2; (-) strand; PAM type: YTN; PAM sequence: TTC
agattctcaacagaatttct

SEQ ID NO: 217672 - DNA, 20 bp, Artificial Sequence
  Description of Artificial Sequence: Synthetic oligonucleotide
  Target: LAMA2; (-) strand; PAM type: YTN; PAM sequence: TTA
aaataatacagaaggagagt

SEQ ID NO: 217673 - DNA, 20 bp, Artificial Sequence
  Description of Artificial Sequence: Synthetic oligonucleotide
  Target: LAMA2; (-) strand; PAM type: YTN; PAM sequence: TTA
aaacaaccatcatgtgaata

SEQ ID NO: 217674 - DNA, 20 bp, Artificial Sequence
  Description of Artificial Sequence: Synthetic oligonucleotide
  Target: LAMA2; (-) strand; PAM type: YTN; PAM sequence: TTA
aagtaaaaaaaaatggttaa

SEQ ID NO: 217675 - DNA, 20 bp, Artificial Sequence
  Description of Artificial Sequence: Synthetic oligonucleotide
  Target: LAMA2; (-) strand; PAM type: YTN; PAM sequence: TTT
aaagtaaaaaaaaatggtta

SEQ ID NO: 217676 - DNA, 20 bp, Artificial Sequence
  Description of Artificial Sequence: Synthetic oligonucleotide
  Target: LAMA2; (-) strand; PAM type: YTN; PAM sequence: CTT
taaagtaaaaaaaaatggtt

SEQ ID NO: 217677 - DNA, 20 bp, Artificial Sequence
  Description of Artificial Sequence: Synthetic oligonucleotide
  Target: LAMA2; (-) strand; PAM type: YTN; PAM sequence: TTC
tttaaagtaaaaaaaaatgg

SEQ ID NO: 217678 - DNA, 20 bp, Artificial Sequence
  Description of Artificial Sequence: Synthetic oligonucleotide
  Target: LAMA2; (-) strand; PAM type: YTN; PAM sequence: TTT
ctttaaagtaaaaaaaaatg

SEQ ID NO: 217679 - DNA, 20 bp, Artificial Sequence
  Description of Artificial Sequence: Synthetic oligonucleotide
  Target: LAMA2; (-) strand; PAM type: YTN; PAM sequence: TTT
tctttaaagtaaaaaaaaat

SEQ ID NO: 217680 - DNA, 20 bp, Artificial Sequence
  Description of Artificial Sequence: Synthetic oligonucleotide
  Target: LAMA2; (-) strand; PAM type: YTN; PAM sequence: TTT
ttctttaaagtaaaaaaaaa

SEQ ID NO: 217681 - DNA, 20 bp, Artificial Sequence
  Description of Artificial Sequence: Synthetic oligonucleotide
  Target: LAMA2; (-) strand; PAM type: YTN; PAM sequence: CTT
tttctttaaagtaaaaaaaa

SEQ ID NO: 217682 - DNA, 20 bp, Artificial Sequence
  Description of Artificial Sequence: Synthetic oligonucleotide
  Target: LAMA2; (-) strand; PAM type: YTN; PAM sequence: TTA
tagctttttctttaaagtaa

SEQ ID NO: 217683 - DNA, 20 bp, Artificial Sequence
  Description of Artificial Sequence: Synthetic oligonucleotide
  Target: LAMA2; (-) strand; PAM type: YTN; PAM sequence: TTT
atagctttttctttaaagta

SEQ ID NO: 217684 - DNA, 20 bp, Artificial Sequence
  Description of Artificial Sequence: Synthetic oligonucleotide
  Target: LAMA2; (-) strand; PAM type: YTN; PAM sequence: CTA
gtttatagctttttctttaa

SEQ ID NO: 217685 - DNA, 20 bp, Artificial Sequence
  Description of Artificial Sequence: Synthetic oligonucleotide
  Target: LAMA2; (-) strand; PAM type: YTN; PAM sequence: TTA
gcagcatcatatgaaaggaa

SEQ ID NO: 217686 - DNA, 20 bp, Artificial Sequence
  Description of Artificial Sequence: Synthetic oligonucleotide
  Target: LAMA2; (-) strand; PAM type: YTN; PAM sequence: TTG
agttagcagcatcatatgaa

SEQ ID NO: 217687 - DNA, 20 bp, Artificial Sequence
  Description of Artificial Sequence: Synthetic oligonucleotide
  Target: LAMA2; (-) strand; PAM type: YTN; PAM sequence: CTA
ttgagttagcagcatcatat

SEQ ID NO: 217688 - DNA, 20 bp, Artificial Sequence
  Description of Artificial Sequence: Synthetic oligonucleotide
  Target: LAMA2; (-) strand; PAM type: YTN; PAM sequence: CTC
tattgagttagcagcatcat

SEQ ID NO: 217689 - DNA, 20 bp, Artificial Sequence
  Description of Artificial Sequence: Synthetic oligonucleotide
  Target: LAMA2; (-) strand; PAM type: YTN; PAM sequence: CTC
tctattgagttagcagcatc

SEQ ID NO: 217690 - DNA, 20 bp, Artificial Sequence
  Description of Artificial Sequence: Synthetic oligonucleotide
  Target: LAMA2; (-) strand; PAM type: YTN; PAM sequence: TTG
taatcgggtgtctctctatt

SEQ ID NO: 217691 - DNA, 20 bp, Artificial Sequence
  Description of Artificial Sequence: Synthetic oligonucleotide
  Target: LAMA2; (-) strand; PAM type: YTN; PAM sequence: TTT
gtaatcgggtgtctctctat

SEQ ID NO: 217692 - DNA, 20 bp, Artificial Sequence
  Description of Artificial Sequence: Synthetic oligonucleotide
  Target: LAMA2; (-) strand; PAM type: YTN; PAM sequence: TTC
catcaatagcatttgtaatc

SEQ ID NO: 217693 - DNA, 20 bp, Artificial Sequence
  Description of Artificial Sequence: Synthetic oligonucleotide
  Target: LAMA2; (-) strand; PAM type: YTN; PAM sequence: TTT
ccatcaatagcatttgtaat

SEQ ID NO: 217694 - DNA, 20 bp, Artificial Sequence
  Description of Artificial Sequence: Synthetic oligonucleotide
  Target: LAMA2; (-) strand; PAM type: YTN; PAM sequence: CTT
tccatcaatagcatttgtaa

SEQ ID NO: 217695 - DNA, 20 bp, Artificial Sequence
  Description of Artificial Sequence: Synthetic oligonucleotide
  Target: LAMA2; (-) strand; PAM type: YTN; PAM sequence: TTC
tttccatcaatagcatttgt

SEQ ID NO: 217696 - DNA, 20 bp, Artificial Sequence
  Description of Artificial Sequence: Synthetic oligonucleotide
  Target: LAMA2; (-) strand; PAM type: YTN; PAM sequence: CTG
ccaccaagtgttctttccat

SEQ ID NO: 217697 - DNA, 20 bp, Artificial Sequence
  Description of Artificial Sequence: Synthetic oligonucleotide
  Target: LAMA2; (-) strand; PAM type: YTN; PAM sequence: CTC
tgccaccaagtgttctttcc

SEQ ID NO: 217698 - DNA, 20 bp, Artificial Sequence
  Description of Artificial Sequence: Synthetic oligonucleotide
  Target: LAMA2; (-) strand; PAM type: YTN; PAM sequence: CTG
ggactctgccaccaagtgtt

SEQ ID NO: 217699 - DNA, 20 bp, Artificial Sequence
  Description of Artificial Sequence: Synthetic oligonucleotide
  Target: LAMA2; (-) strand; PAM type: YTN; PAM sequence: TTA
atactgggactctgccacca

SEQ ID NO: 217700 - DNA, 20 bp, Artificial Sequence
  Description of Artificial Sequence: Synthetic oligonucleotide
  Target: LAMA2; (-) strand; PAM type: YTN; PAM sequence: CTT
aatactgggactctgccacc

SEQ ID NO: 217701 - DNA, 20 bp, Artificial Sequence
  Description of Artificial Sequence: Synthetic oligonucleotide
  Target: LAMA2; (-) strand; PAM type: YTN; PAM sequence: TTC
ttaatactgggactctgcca

SEQ ID NO: 217702 - DNA, 20 bp, Artificial Sequence
  Description of Artificial Sequence: Synthetic oligonucleotide
  Target: LAMA2; (-) strand; PAM type: YTN; PAM sequence: TTC
cattcttaatactgggactc

SEQ ID NO: 217703 - DNA, 20 bp, Artificial Sequence
  Description of Artificial Sequence: Synthetic oligonucleotide
  Target: LAMA2; (-) strand; PAM type: YTN; PAM sequence: TTC
gattccattcttaatactgg

SEQ ID NO: 217704 - DNA, 20 bp, Artificial Sequence
  Description of Artificial Sequence: Synthetic oligonucleotide
  Target: LAMA2; (-) strand; PAM type: YTN; PAM sequence: TTG
tcacataatggtattcgatt

SEQ ID NO: 217705 - DNA, 20 bp, Artificial Sequence
  Description of Artificial Sequence: Synthetic oligonucleotide
  Target: LAMA2; (-) strand; PAM type: YTN; PAM sequence: CTG
taaatccagggtaattgtca

SEQ ID NO: 217706 - DNA, 20 bp, Artificial Sequence
  Description of Artificial Sequence: Synthetic oligonucleotide
  Target: LAMA2; (-) strand; PAM type: YTN; PAM sequence: CTG
ctgtaaatccagggtaattg

SEQ ID NO: 217707 - DNA, 20 bp, Artificial Sequence
  Description of Artificial Sequence: Synthetic oligonucleotide
  Target: LAMA2; (-) strand; PAM type: YTN; PAM sequence: CTA
tacctgctgtaaatccaggg

SEQ ID NO: 217708 - DNA, 20 bp, Artificial Sequence
  Description of Artificial Sequence: Synthetic oligonucleotide
  Target: LAMA2; (-) strand; PAM type: YTN; PAM sequence: TTC
aaaagtggaaatgacaaaaa

SEQ ID NO: 217709 - DNA, 20 bp, Artificial Sequence
  Description of Artificial Sequence: Synthetic oligonucleotide
  Target: LAMA2; (-) strand; PAM type: YTN; PAM sequence: TTT
caaaagtggaaatgacaaaa

SEQ ID NO: 217710 - DNA, 20 bp, Artificial Sequence
  Description of Artificial Sequence: Synthetic oligonucleotide
  Target: LAMA2; (-) strand; PAM type: YTN; PAM sequence: CTA
aacaaatagcaaatgtaaaa

SEQ ID NO: 217711 - DNA, 20 bp, Artificial Sequence
  Description of Artificial Sequence: Synthetic oligonucleotide
  Target: LAMA2; (-) strand; PAM type: YTN; PAM sequence: CTA
actaaacaaatagcaaatgt

SEQ ID NO: 217712 - DNA, 20 bp, Artificial Sequence
  Description of Artificial Sequence: Synthetic oligonucleotide
  Target: LAMA2; (-) strand; PAM type: YTN; PAM sequence: TTC
acccacaaaccactaactaa

SEQ ID NO: 217713 - DNA, 20 bp, Artificial Sequence
  Description of Artificial Sequence: Synthetic oligonucleotide
  Target: LAMA2; (-) strand; PAM type: YTN; PAM sequence: TTT
cacccacaaaccactaacta

SEQ ID NO: 217714 - DNA, 20 bp, Artificial Sequence
  Description of Artificial Sequence: Synthetic oligonucleotide
  Target: LAMA2; (-) strand; PAM type: YTN; PAM sequence: CTT
tcacccacaaaccactaact

SEQ ID NO: 217715 - DNA, 20 bp, Artificial Sequence
  Description of Artificial Sequence: Synthetic oligonucleotide
  Target: LAMA2; (-) strand; PAM type: YTN; PAM sequence: TTA
tcaagaaaacaatggagagt

SEQ ID NO: 217716 - DNA, 20 bp, Artificial Sequence
  Description of Artificial Sequence: Synthetic oligonucleotide
  Target: LAMA2; (-) strand; PAM type: YTN; PAM sequence: CTT
atcaagaaaacaatggagag

SEQ ID NO: 217717 - DNA, 20 bp, Artificial Sequence
  Description of Artificial Sequence: Synthetic oligonucleotide
  Target: LAMA2; (-) strand; PAM type: YTN; PAM sequence: TTC
atcttatcaagaaaacaatg

SEQ ID NO: 217718 - DNA, 20 bp, Artificial Sequence
  Description of Artificial Sequence: Synthetic oligonucleotide
  Target: LAMA2; (-) strand; PAM type: YTN; PAM sequence: TTG
ttcatcttatcaagaaaaca

SEQ ID NO: 217719 - DNA, 20 bp, Artificial Sequence
  Description of Artificial Sequence: Synthetic oligonucleotide
  Target: LAMA2; (-) strand; PAM type: YTN; PAM sequence: TTT
gttcatcttatcaagaaaac

SEQ ID NO: 217720 - DNA, 20 bp, Artificial Sequence
  Description of Artificial Sequence: Synthetic oligonucleotide
  Target: LAMA2; (-) strand; PAM type: YTN; PAM sequence: CTT
tgttcatcttatcaagaaaa

SEQ ID NO: 217721 - DNA, 20 bp, Artificial Sequence
  Description of Artificial Sequence: Synthetic oligonucleotide
  Target: LAMA2; (-) strand; PAM type: YTN; PAM sequence: CTA
tatgaataggaccctttgtt

SEQ ID NO: 217722 - DNA, 20 bp, Artificial Sequence
  Description of Artificial Sequence: Synthetic oligonucleotide
  Target: LAMA2; (-) strand; PAM type: YTN; PAM sequence: CTC
gtaaataacaatacgctata

SEQ ID NO: 217723 - DNA, 20 bp, Artificial Sequence
  Description of Artificial Sequence: Synthetic oligonucleotide
  Target: LAMA2; (-) strand; PAM type: YTN; PAM sequence: CTG
aatactcgtaaataacaata

SEQ ID NO: 217724 - DNA, 20 bp, Artificial Sequence
  Description of Artificial Sequence: Synthetic oligonucleotide
  Target: LAMA2; (-) strand; PAM type: YTN; PAM sequence: TTA
aatgctgaatactcgtaaat

SEQ ID NO: 217725 - DNA, 20 bp, Artificial Sequence
  Description of Artificial Sequence: Synthetic oligonucleotide
  Target: LAMA2; (-) strand; PAM type: YTN; PAM sequence: TTA
taattaaatgctgaatactc

SEQ ID NO: 217726 - DNA, 20 bp, Artificial Sequence
  Description of Artificial Sequence: Synthetic oligonucleotide
  Target: LAMA2; (-) strand; PAM type: YTN; PAM sequence: TTT
ataattaaatgctgaatact

SEQ ID NO: 217727 - DNA, 20 bp, Artificial Sequence
  Description of Artificial Sequence: Synthetic oligonucleotide
  Target: LAMA2; (-) strand; PAM type: YTN; PAM sequence: CTT
tataattaaatgctgaatac

SEQ ID NO: 217728 - DNA, 20 bp, Artificial Sequence
  Description of Artificial Sequence: Synthetic oligonucleotide
  Target: LAMA2; (-) strand; PAM type: YTN; PAM sequence: TTG
tgctttataattaaatgctg

SEQ ID NO: 217729 - DNA, 20 bp, Artificial Sequence
  Description of Artificial Sequence: Synthetic oligonucleotide
  Target: LAMA2; (-) strand; PAM type: YTN; PAM sequence: TTG
aattgtgctttataattaaa

SEQ ID NO: 217730 - DNA, 20 bp, Artificial Sequence
  Description of Artificial Sequence: Synthetic oligonucleotide
  Target: LAMA2; (-) strand; PAM type: YTN; PAM sequence: TTT
gaattgtgctttataattaa

SEQ ID NO: 217731 - DNA, 20 bp, Artificial Sequence
  Description of Artificial Sequence: Synthetic oligonucleotide
  Target: LAMA2; (-) strand; PAM type: YTN; PAM sequence: TTC
catttgaattgtgctttata

SEQ ID NO: 217732 - DNA, 20 bp, Artificial Sequence
  Description of Artificial Sequence: Synthetic oligonucleotide
  Target: LAMA2; (-) strand; PAM type: YTN; PAM sequence: CTT
ccatttgaattgtgctttat

SEQ ID NO: 217733 - DNA, 20 bp, Artificial Sequence
  Description of Artificial Sequence: Synthetic oligonucleotide
  Target: LAMA2; (-) strand; PAM type: YTN; PAM sequence: TTC
acgtgcttccatttgaattg

SEQ ID NO: 217734 - DNA, 20 bp, Artificial Sequence
  Description of Artificial Sequence: Synthetic oligonucleotide
  Target: LAMA2; (-) strand; PAM type: YTN; PAM sequence: CTT
cacgtgcttccatttgaatt

SEQ ID NO: 217735 - DNA, 20 bp, Artificial Sequence
  Description of Artificial Sequence: Synthetic oligonucleotide
  Target: LAMA2; (-) strand; PAM type: YTN; PAM sequence: CTC
ttcacgtgcttccatttgaa

SEQ ID NO: 217736 - DNA, 20 bp, Artificial Sequence
  Description of Artificial Sequence: Synthetic oligonucleotide
  Target: LAMA2; (-) strand; PAM type: YTN; PAM sequence: CTA
agctcttcacgtgcttccat

SEQ ID NO: 217737 - DNA, 20 bp, Artificial Sequence
  Description of Artificial Sequence: Synthetic oligonucleotide
  Target: LAMA2; (-) strand; PAM type: YTN; PAM sequence: TTC
taagctcttcacgtgcttcc

SEQ ID NO: 217738 - DNA, 20 bp, Artificial Sequence
  Description of Artificial Sequence: Synthetic oligonucleotide
  Target: LAMA2; (-) strand; PAM type: YTN; PAM sequence: TTT
ctaagctcttcacgtgcttc

SEQ ID NO: 217739 - DNA, 20 bp, Artificial Sequence
  Description of Artificial Sequence: Synthetic oligonucleotide
  Target: LAMA2; (-) strand; PAM type: YTN; PAM sequence: TTC
atttctaagctcttcacgtg

SEQ ID NO: 217740 - DNA, 20 bp, Artificial Sequence
  Description of Artificial Sequence: Synthetic oligonucleotide
  Target: LAMA2; (-) strand; PAM type: YTN; PAM sequence: CTA
attcatttctaagctcttca

SEQ ID NO: 217741 - DNA, 20 bp, Artificial Sequence
  Description of Artificial Sequence: Synthetic oligonucleotide
  Target: LAMA2; (-) strand; PAM type: YTN; PAM sequence: TTA
gcacctaattcatttctaag

SEQ ID NO: 217742 - DNA, 20 bp, Artificial Sequence
  Description of Artificial Sequence: Synthetic oligonucleotide
  Target: LAMA2; (-) strand; PAM type: YTN; PAM sequence: CTA
aaacagagttagcacctaat

SEQ ID NO: 217743 - DNA, 20 bp, Artificial Sequence
  Description of Artificial Sequence: Synthetic oligonucleotide
  Target: LAMA2; (-) strand; PAM type: YTN; PAM sequence: CTA
gctaaaacagagttagcacc

SEQ ID NO: 217744 - DNA, 20 bp, Artificial Sequence
  Description of Artificial Sequence: Synthetic oligonucleotide
  Target: LAMA2; (-) strand; PAM type: YTN; PAM sequence: TTA
agtccagctagctaaaacag

SEQ ID NO: 217745 - DNA, 20 bp, Artificial Sequence
  Description of Artificial Sequence: Synthetic oligonucleotide
  Target: LAMA2; (-) strand; PAM type: YTN; PAM sequence: TTC
atcattaagtccagctagct

SEQ ID NO: 217746 - DNA, 20 bp, Artificial Sequence
  Description of Artificial Sequence: Synthetic oligonucleotide
  Target: LAMA2; (-) strand; PAM type: YTN; PAM sequence: TTT
catcattaagtccagctagc

SEQ ID NO: 217747 - DNA, 20 bp, Artificial Sequence
  Description of Artificial Sequence: Synthetic oligonucleotide
  Target: LAMA2; (-) strand; PAM type: YTN; PAM sequence: TTT
tcatcattaagtccagctag

SEQ ID NO: 217748 - DNA, 20 bp, Artificial Sequence
  Description of Artificial Sequence: Synthetic oligonucleotide
  Target: LAMA2; (-) strand; PAM type: YTN; PAM sequence: TTG
atccatattttcatcattaa

SEQ ID NO: 217749 - DNA, 20 bp, Artificial Sequence
  Description of Artificial Sequence: Synthetic oligonucleotide
  Target: LAMA2; (-) strand; PAM type: YTN; PAM sequence: TTA
ttgatccatattttcatcat

SEQ ID NO: 217750 - DNA, 20 bp, Artificial Sequence
  Description of Artificial Sequence: Synthetic oligonucleotide
  Target: LAMA2; (-) strand; PAM type: YTN; PAM sequence: TTT
attgatccatattttcatca

SEQ ID NO: 217751 - DNA, 20 bp, Artificial Sequence
  Description of Artificial Sequence: Synthetic oligonucleotide
  Target: LAMA2; (-) strand; PAM type: YTN; PAM sequence: TTT
tattgatccatattttcatc

SEQ ID NO: 217752 - DNA, 20 bp, Artificial Sequence
  Description of Artificial Sequence: Synthetic oligonucleotide
  Target: LAMA2; (-) strand; PAM type: YTN; PAM sequence: TTA
tgtaaaattttattgatcca

SEQ ID NO: 217753 - DNA, 20 bp, Artificial Sequence
  Description of Artificial Sequence: Synthetic oligonucleotide
  Target: LAMA2; (-) strand; PAM type: YTN; PAM sequence: TTG
ttatgtaaaattttattgat

SEQ ID NO: 217754 - DNA, 20 bp, Artificial Sequence
  Description of Artificial Sequence: Synthetic oligonucleotide
  Target: LAMA2; (-) strand; PAM type: YTN; PAM sequence: TTT
gttatgtaaaattttattga

SEQ ID NO: 217755 - DNA, 20 bp, Artificial Sequence
  Description of Artificial Sequence: Synthetic oligonucleotide
  Target: LAMA2; (-) strand; PAM type: YTN; PAM sequence: TTT
tgttatgtaaaattttattg

SEQ ID NO: 217756 - DNA, 20 bp, Artificial Sequence
  Description of Artificial Sequence: Synthetic oligonucleotide
  Target: LAMA2; (-) strand; PAM type: YTN; PAM sequence: TTT
ttgttatgtaaaattttatt

SEQ ID NO: 217757 - DNA, 20 bp, Artificial Sequence
  Description of Artificial Sequence: Synthetic oligonucleotide
  Target: LAMA2; (-) strand; PAM type: YTN; PAM sequence: TTA
tatttttgttatgtaaaatt

SEQ ID NO: 217758 - DNA, 20 bp, Artificial Sequence
  Description of Artificial Sequence: Synthetic oligonucleotide
  Target: LAMA2; (-) strand; PAM type: YTN; PAM sequence: CTA
ttatatttttgttatgtaaa

SEQ ID NO: 217759 - DNA, 20 bp, Artificial Sequence
  Description of Artificial Sequence: Synthetic oligonucleotide
  Target: LAMA2; (-) strand; PAM type: YTN; PAM sequence: TTA
aaaatgatactattatattt

SEQ ID NO: 217760 - DNA, 20 bp, Artificial Sequence
  Description of Artificial Sequence: Synthetic oligonucleotide
  Target: LAMA2; (-) strand; PAM type: YTN; PAM sequence: TTA
aaagttaaaaatgatactat

SEQ ID NO: 217761 - DNA, 20 bp, Artificial Sequence
  Description of Artificial Sequence: Synthetic oligonucleotide
  Target: LAMA2; (-) strand; PAM type: YTN; PAM sequence: TTT
aaaagttaaaaatgatacta

SEQ ID NO: 217762 - DNA, 20 bp, Artificial Sequence
  Description of Artificial Sequence: Synthetic oligonucleotide
  Target: LAMA2; (-) strand; PAM type: YTN; PAM sequence: TTT
taaaagttaaaaatgatact

SEQ ID NO: 217763 - DNA, 20 bp, Artificial Sequence
  Description of Artificial Sequence: Synthetic oligonucleotide
  Target: LAMA2; (-) strand; PAM type: YTN; PAM sequence: TTA
ttttaaaagttaaaaatgat

SEQ ID NO: 217764 - DNA, 20 bp, Artificial Sequence
  Description of Artificial Sequence: Synthetic oligonucleotide
  Target: LAMA2; (-) strand; PAM type: YTN; PAM sequence: TTA
agtgcacacaccatcagcac

SEQ ID NO: 217765 - DNA, 20 bp, Artificial Sequence
  Description of Artificial Sequence: Synthetic oligonucleotide
  Target: LAMA2; (-) strand; PAM type: YTN; PAM sequence: TTT
aagtgcacacaccatcagca

SEQ ID NO: 217766 - DNA, 20 bp, Artificial Sequence
  Description of Artificial Sequence: Synthetic oligonucleotide
  Target: LAMA2; (-) strand; PAM type: YTN; PAM sequence: CTT
taagtgcacacaccatcagc

SEQ ID NO: 217767 - DNA, 20 bp, Artificial Sequence
  Description of Artificial Sequence: Synthetic oligonucleotide
  Target: LAMA2; (-) strand; PAM type: YTN; PAM sequence: TTA
tccaagaacctttaagtgca

SEQ ID NO: 217768 - DNA, 20 bp, Artificial Sequence
  Description of Artificial Sequence: Synthetic oligonucleotide
  Target: LAMA2; (-) strand; PAM type: YTN; PAM sequence: TTG
ttatccaagaacctttaagt

SEQ ID NO: 217769 - DNA, 20 bp, Artificial Sequence
  Description of Artificial Sequence: Synthetic oligonucleotide
  Target: LAMA2; (-) strand; PAM type: YTN; PAM sequence: CTT
gttatccaagaacctttaag

SEQ ID NO: 217770 - DNA, 20 bp, Artificial Sequence
  Description of Artificial Sequence: Synthetic oligonucleotide
  Target: LAMA2; (-) strand; PAM type: YTN; PAM sequence: CTC
aagagccttgttatccaaga

SEQ ID NO: 217771 - DNA, 20 bp, Artificial Sequence
  Description of Artificial Sequence: Synthetic oligonucleotide
  Target: LAMA2; (-) strand; PAM type: YTN; PAM sequence: TTG
ctcaagagccttgttatcca

SEQ ID NO: 217772 - DNA, 20 bp, Artificial Sequence
  Description of Artificial Sequence: Synthetic oligonucleotide
  Target: LAMA2; (-) strand; PAM type: YTN; PAM sequence: TTT
gctcaagagccttgttatcc

SEQ ID NO: 217773 - DNA, 20 bp, Artificial Sequence
  Description of Artificial Sequence: Synthetic oligonucleotide
  Target: LAMA2; (-) strand; PAM type: YTN; PAM sequence: CTC
agtaatgagaggcaatttgc

SEQ ID NO: 217774 - DNA, 20 bp, Artificial Sequence
  Description of Artificial Sequence: Synthetic oligonucleotide
  Target: LAMA2; (-) strand; PAM type: YTN; PAM sequence: CTC
tcagtaatgagaggcaattt

SEQ ID NO: 217775 - DNA, 20 bp, Artificial Sequence
  Description of Artificial Sequence: Synthetic oligonucleotide
  Target: LAMA2; (-) strand; PAM type: YTN; PAM sequence: CTC
agctctcagtaatgagaggc

SEQ ID NO: 217776 - DNA, 20 bp, Artificial Sequence
  Description of Artificial Sequence: Synthetic oligonucleotide
  Target: LAMA2; (-) strand; PAM type: YTN; PAM sequence: TTC
tcagctctcagtaatgagag

SEQ ID NO: 217777 - DNA, 20 bp, Artificial Sequence
  Description of Artificial Sequence: Synthetic oligonucleotide
  Target: LAMA2; (-) strand; PAM type: YTN; PAM sequence: TTT
ctcagctctcagtaatgaga

SEQ ID NO: 217778 - DNA, 20 bp, Artificial Sequence
  Description of Artificial Sequence: Synthetic oligonucleotide
  Target: LAMA2; (-) strand; PAM type: YTN; PAM sequence: CTT
tctcagctctcagtaatgag

SEQ ID NO: 217779 - DNA, 20 bp, Artificial Sequence
  Description of Artificial Sequence: Synthetic oligonucleotide
  Target: LAMA2; (-) strand; PAM type: YTN; PAM sequence: CTG
tcaaaactttctcagctctc

SEQ ID NO: 217780 - DNA, 20 bp, Artificial Sequence
  Description of Artificial Sequence: Synthetic oligonucleotide
  Target: LAMA2; (-) strand; PAM type: YTN; PAM sequence: TTG
aaagcaactgtcaaaacttt

SEQ ID NO: 217781 - DNA, 20 bp, Artificial Sequence
  Description of Artificial Sequence: Synthetic oligonucleotide
  Target: LAMA2; (-) strand; PAM type: YTN; PAM sequence: CTT
gaaagcaactgtcaaaactt

SEQ ID NO: 217782 - DNA, 20 bp, Artificial Sequence
  Description of Artificial Sequence: Synthetic oligonucleotide
  Target: LAMA2; (-) strand; PAM type: YTN; PAM sequence: TTA
acttgaaagcaactgtcaaa

SEQ ID NO: 217783 - DNA, 20 bp, Artificial Sequence
  Description of Artificial Sequence: Synthetic oligonucleotide
  Target: LAMA2; (-) strand; PAM type: YTN; PAM sequence: TTT
aacttgaaagcaactgtcaa

SEQ ID NO: 217784 - DNA, 20 bp, Artificial Sequence
  Description of Artificial Sequence: Synthetic oligonucleotide
  Target: LAMA2; (-) strand; PAM type: YTN; PAM sequence: TTA
gtcacccaagtttaacttga

SEQ ID NO: 217785 - DNA, 20 bp, Artificial Sequence
  Description of Artificial Sequence: Synthetic oligonucleotide
  Target: LAMA2; (-) strand; PAM type: YTN; PAM sequence: TTT
agtcacccaagtttaacttg

SEQ ID NO: 217786 - DNA, 20 bp, Artificial Sequence
  Description of Artificial Sequence: Synthetic oligonucleotide
  Target: LAMA2; (-) strand; PAM type: YTN; PAM sequence: TTC
atttagtcacccaagtttaa

SEQ ID NO: 217787 - DNA, 20 bp, Artificial Sequence
  Description of Artificial Sequence: Synthetic oligonucleotide
  Target: LAMA2; (-) strand; PAM type: YTN; PAM sequence: CTT
catttagtcacccaagttta

SEQ ID NO: 217788 - DNA, 20 bp, Artificial Sequence
  Description of Artificial Sequence: Synthetic oligonucleotide
  Target: LAMA2; (-) strand; PAM type: YTN; PAM sequence: TTA
cttcatttagtcacccaagt

SEQ ID NO: 217789 - DNA, 20 bp, Artificial Sequence
  Description of Artificial Sequence: Synthetic oligonucleotide
  Target: LAMA2; (-) strand; PAM type: YTN; PAM sequence: TTG
ttacttcatttagtcaccca

SEQ ID NO: 217790 - DNA, 20 bp, Artificial Sequence
  Description of Artificial Sequence: Synthetic oligonucleotide
  Target: LAMA2; (-) strand; PAM type: YTN; PAM sequence: CTT
gttacttcatttagtcaccc

SEQ ID NO: 217791 - DNA, 20 bp, Artificial Sequence
  Description of Artificial Sequence: Synthetic oligonucleotide
  Target: LAMA2; (-) strand; PAM type: YTN; PAM sequence: CTA
caaagcttgttacttcattt

SEQ ID NO: 217792 - DNA, 20 bp, Artificial Sequence
  Description of Artificial Sequence: Synthetic oligonucleotide
  Target: LAMA2; (-) strand; PAM type: YTN; PAM sequence: TTG
tataactacaaagcttgtta

SEQ ID NO: 217793 - DNA, 20 bp, Artificial Sequence
  Description of Artificial Sequence: Synthetic oligonucleotide
  Target: LAMA2; (-) strand; PAM type: YTN; PAM sequence: TTT
gtataactacaaagcttgtt

SEQ ID NO: 217794 - DNA, 20 bp, Artificial Sequence
  Description of Artificial Sequence: Synthetic oligonucleotide
  Target: LAMA2; (-) strand; PAM type: YTN; PAM sequence: TTT
tgtataactacaaagcttgt

SEQ ID NO: 217795 - DNA, 20 bp, Artificial Sequence
  Description of Artificial Sequence: Synthetic oligonucleotide
  Target: LAMA2; (-) strand; PAM type: YTN; PAM sequence: TTC
cggcatcaattttgtataac

SEQ ID NO: 217796 - DNA, 20 bp, Artificial Sequence
  Description of Artificial Sequence: Synthetic oligonucleotide
  Target: LAMA2; (-) strand; PAM type: YTN; PAM sequence: CTT
ccggcatcaattttgtataa

SEQ ID NO: 217797 - DNA, 20 bp, Artificial Sequence
  Description of Artificial Sequence: Synthetic oligonucleotide
  Target: LAMA2; (-) strand; PAM type: YTN; PAM sequence: TTG
aacaacttccggcatcaatt

SEQ ID NO: 217798 - DNA, 20 bp, Artificial Sequence
  Description of Artificial Sequence: Synthetic oligonucleotide
  Target: LAMA2; (-) strand; PAM type: YTN; PAM sequence: CTT
gaacaacttccggcatcaat

SEQ ID NO: 217799 - DNA, 20 bp, Artificial Sequence
  Description of Artificial Sequence: Synthetic oligonucleotide
  Target: LAMA2; (-) strand; PAM type: YTN; PAM sequence: CTA
tgcaagacaaacttgaacaa

SEQ ID NO: 217800 - DNA, 20 bp, Artificial Sequence
  Description of Artificial Sequence: Synthetic oligonucleotide
  Target: LAMA2; (-) strand; PAM type: YTN; PAM sequence: TTA
agcatagaaggcacccaggc

SEQ ID NO: 217801 - DNA, 20 bp, Artificial Sequence
  Description of Artificial Sequence: Synthetic oligonucleotide
  Target: LAMA2; (-) strand; PAM type: YTN; PAM sequence: TTG
tgaagagaaggaagaaagag

SEQ ID NO: 217802 - DNA, 20 bp, Artificial Sequence
  Description of Artificial Sequence: Synthetic oligonucleotide
  Target: LAMA2; (-) strand; PAM type: YTN; PAM sequence: CTG
aatattgtgaagagaaggaa

SEQ ID NO: 217803 - DNA, 20 bp, Artificial Sequence
  Description of Artificial Sequence: Synthetic oligonucleotide
  Target: LAMA2; (-) strand; PAM type: YTN; PAM sequence: CTG
acctgaatattgtgaagaga

SEQ ID NO: 217804 - DNA, 20 bp, Artificial Sequence
  Description of Artificial Sequence: Synthetic oligonucleotide
  Target: LAMA2; (-) strand; PAM type: YTN; PAM sequence: TTC
agcctgacctgaatattgtg

SEQ ID NO: 217805 - DNA, 20 bp, Artificial Sequence
  Description of Artificial Sequence: Synthetic oligonucleotide
  Target: LAMA2; (-) strand; PAM type: YTN; PAM sequence: CTT
cagcctgacctgaatattgt

SEQ ID NO: 217806 - DNA, 20 bp, Artificial Sequence
  Description of Artificial Sequence: Synthetic oligonucleotide
  Target: LAMA2; (-) strand; PAM type: YTN; PAM sequence: TTA
ataacttcagcctgacctga

SEQ ID NO: 217807 - DNA, 20 bp, Artificial Sequence
  Description of Artificial Sequence: Synthetic oligonucleotide
  Target: LAMA2; (-) strand; PAM type: YTN; PAM sequence: CTG
attaataacttcagcctgac

SEQ ID NO: 217808 - DNA, 20 bp, Artificial Sequence
  Description of Artificial Sequence: Synthetic oligonucleotide
  Target: LAMA2; (-) strand; PAM type: YTN; PAM sequence: TTC
ctgattaataacttcagcct

SEQ ID NO: 217809 - DNA, 20 bp, Artificial Sequence
  Description of Artificial Sequence: Synthetic oligonucleotide
  Target: LAMA2; (-) strand; PAM type: YTN; PAM sequence: CTG
gcgattcctgattaataact

SEQ ID NO: 217810 - DNA, 20 bp, Artificial Sequence
  Description of Artificial Sequence: Synthetic oligonucleotide
  Target: LAMA2; (-) strand; PAM type: YTN; PAM sequence: TTG
aggtgctggcgattcctgat

SEQ ID NO: 217811 - DNA, 20 bp, Artificial Sequence
  Description of Artificial Sequence: Synthetic oligonucleotide
  Target: LAMA2; (-) strand; PAM type: YTN; PAM sequence: TTT
gaggtgctggcgattcctga

SEQ ID NO: 217812 - DNA, 20 bp, Artificial Sequence
  Description of Artificial Sequence: Synthetic oligonucleotide
  Target: LAMA2; (-) strand; PAM type: YTN; PAM sequence: CTA
aataatttgaggtgctggcg

SEQ ID NO: 217813 - DNA, 20 bp, Artificial Sequence
  Description of Artificial Sequence: Synthetic oligonucleotide
  Target: LAMA2; (-) strand; PAM type: YTN; PAM sequence: TTG
caagcctaaataatttgagg

SEQ ID NO: 217814 - DNA, 20 bp, Artificial Sequence
  Description of Artificial Sequence: Synthetic oligonucleotide
  Target: LAMA2; (-) strand; PAM type: YTN; PAM sequence: CTA
attgcaagcctaaataattt

SEQ ID NO: 217815 - DNA, 20 bp, Artificial Sequence
  Description of Artificial Sequence: Synthetic oligonucleotide
  Target: LAMA2; (-) strand; PAM type: YTN; PAM sequence: TTC
catcctaattgcaagcctaa

SEQ ID NO: 217816 - DNA, 20 bp, Artificial Sequence
  Description of Artificial Sequence: Synthetic oligonucleotide
  Target: LAMA2; (-) strand; PAM type: YTN; PAM sequence: TTT
ccatcctaattgcaagccta

SEQ ID NO: 217817 - DNA, 20 bp, Artificial Sequence
  Description of Artificial Sequence: Synthetic oligonucleotide
  Target: LAMA2; (-) strand; PAM type: YTN; PAM sequence: CTT
tccatcctaattgcaagcct

SEQ ID NO: 217818 - DNA, 20 bp, Artificial Sequence
  Description of Artificial Sequence: Synthetic oligonucleotide
  Target: LAMA2; (-) strand; PAM type: YTN; PAM sequence: TTG
tccactttccatcctaattg

SEQ ID NO: 217819 - DNA, 20 bp, Artificial Sequence
  Description of Artificial Sequence: Synthetic oligonucleotide
  Target: LAMA2; (-) strand; PAM type: YTN; PAM sequence: TTT
gtccactttccatcctaatt

SEQ ID NO: 217820 - DNA, 20 bp, Artificial Sequence
  Description of Artificial Sequence: Synthetic oligonucleotide
  Target: LAMA2; (-) strand; PAM type: YTN; PAM sequence: TTA
ggcatacaaataggatggaa

SEQ ID NO: 217821 - DNA, 20 bp, Artificial Sequence
  Description of Artificial Sequence: Synthetic oligonucleotide
  Target: LAMA2; (-) strand; PAM type: YTN; PAM sequence: TTT
aggcatacaaataggatgga

SEQ ID NO: 217822 - DNA, 20 bp, Artificial Sequence
  Description of Artificial Sequence: Synthetic oligonucleotide
  Target: LAMA2; (-) strand; PAM type: YTN; PAM sequence: TTA
tttaggcatacaaataggat

SEQ ID NO: 217823 - DNA, 20 bp, Artificial Sequence
  Description of Artificial Sequence: Synthetic oligonucleotide
  Target: LAMA2; (-) strand; PAM type: YTN; PAM sequence: CTG
cacattatttaggcatacaa

SEQ ID NO: 217824 - DNA, 20 bp, Artificial Sequence
  Description of Artificial Sequence: Synthetic oligonucleotide
  Target: LAMA2; (-) strand; PAM type: YTN; PAM sequence: CTG
accatcacccctgcacatta

SEQ ID NO: 217825 - DNA, 20 bp, Artificial Sequence
  Description of Artificial Sequence: Synthetic oligonucleotide
  Target: LAMA2; (-) strand; PAM type: YTN; PAM sequence: CTA
tcctgaccatcacccctgca

SEQ ID NO: 217826 - DNA, 20 bp, Artificial Sequence
  Description of Artificial Sequence: Synthetic oligonucleotide
  Target: LAMA2; (-) strand; PAM type: YTN; PAM sequence: TTA
actatcctgaccatcacccc

SEQ ID NO: 217827 - DNA, 20 bp, Artificial Sequence
  Description of Artificial Sequence: Synthetic oligonucleotide
  Target: LAMA2; (-) strand; PAM type: YTN; PAM sequence: CTG
tcattaactatcctgaccat

SEQ ID NO: 217828 - DNA, 20 bp, Artificial Sequence
  Description of Artificial Sequence: Synthetic oligonucleotide
  Target: LAMA2; (-) strand; PAM type: YTN; PAM sequence: TTA
cagtgtatggtgtctgtcat

SEQ ID NO: 217829 - DNA, 20 bp, Artificial Sequence
  Description of Artificial Sequence: Synthetic oligonucleotide
  Target: LAMA2; (-) strand; PAM type: YTN; PAM sequence: TTT
acagtgtatggtgtctgtca

SEQ ID NO: 217830 - DNA, 20 bp, Artificial Sequence
  Description of Artificial Sequence: Synthetic oligonucleotide
  Target: LAMA2; (-) strand; PAM type: YTN; PAM sequence: CTT
tacagtgtatggtgtctgtc

SEQ ID NO: 217831 - DNA, 20 bp, Artificial Sequence
  Description of Artificial Sequence: Synthetic oligonucleotide
  Target: LAMA2; (-) strand; PAM type: YTN; PAM sequence: TTA
taaaaaccatgacctttaca

SEQ ID NO: 217832 - DNA, 20 bp, Artificial Sequence
  Description of Artificial Sequence: Synthetic oligonucleotide
  Target: LAMA2; (-) strand; PAM type: YTN; PAM sequence: CTT
ataaaaaccatgacctttac

SEQ ID NO: 217833 - DNA, 20 bp, Artificial Sequence
  Description of Artificial Sequence: Synthetic oligonucleotide
  Target: LAMA2; (-) strand; PAM type: YTN; PAM sequence: TTC
cccacacagtgataacttat

SEQ ID NO: 217834 - DNA, 20 bp, Artificial Sequence
  Description of Artificial Sequence: Synthetic oligonucleotide
  Target: LAMA2; (-) strand; PAM type: YTN; PAM sequence: CTT
ccccacacagtgataactta

SEQ ID NO: 217835 - DNA, 20 bp, Artificial Sequence
  Description of Artificial Sequence: Synthetic oligonucleotide
  Target: LAMA2; (-) strand; PAM type: YTN; PAM sequence: CTG
ggggcttccccacacagtga

SEQ ID NO: 217836 - DNA, 20 bp, Artificial Sequence
  Description of Artificial Sequence: Synthetic oligonucleotide
  Target: LAMA2; (-) strand; PAM type: YTN; PAM sequence: CTG
gctgggggcttccccacaca

SEQ ID NO: 217837 - DNA, 20 bp, Artificial Sequence
  Description of Artificial Sequence: Synthetic oligonucleotide
  Target: LAMA2; (-) strand; PAM type: YTN; PAM sequence: CTG
gcccactggctgggggcttc

SEQ ID NO: 217838 - DNA, 20 bp, Artificial Sequence
  Description of Artificial Sequence: Synthetic oligonucleotide
  Target: LAMA2; (-) strand; PAM type: YTN; PAM sequence: CTG
atctggcccactggctgggg

SEQ ID NO: 217839 - DNA, 20 bp, Artificial Sequence
  Description of Artificial Sequence: Synthetic oligonucleotide
  Target: LAMA2; (-) strand; PAM type: YTN; PAM sequence: TTG
tgctgatctggcccactggc

SEQ ID NO: 217840 - DNA, 20 bp, Artificial Sequence
  Description of Artificial Sequence: Synthetic oligonucleotide
  Target: LAMA2; (-) strand; PAM type: YTN; PAM sequence: CTT
gtgctgatctggcccactgg

SEQ ID NO: 217841 - DNA, 20 bp, Artificial Sequence
  Description of Artificial Sequence: Synthetic oligonucleotide
  Target: LAMA2; (-) strand; PAM type: YTN; PAM sequence: TTA
ggaaaatgtcttgtgctgat

SEQ ID NO: 217842 - DNA, 20 bp, Artificial Sequence
  Description of Artificial Sequence: Synthetic oligonucleotide
  Target: LAMA2; (-) strand; PAM type: YTN; PAM sequence: CTG
gtggcaaatggcatccatta

SEQ ID NO: 217843 - DNA, 20 bp, Artificial Sequence
  Description of Artificial Sequence: Synthetic oligonucleotide
  Target: LAMA2; (-) strand; PAM type: YTN; PAM sequence: CTC
atgctggtggcaaatggcat

SEQ ID NO: 217844 - DNA, 20 bp, Artificial Sequence
  Description of Artificial Sequence: Synthetic oligonucleotide
  Target: LAMA2; (-) strand; PAM type: YTN; PAM sequence: TTG
tactcatgctggtggcaaat

SEQ ID NO: 217845 - DNA, 20 bp, Artificial Sequence
  Description of Artificial Sequence: Synthetic oligonucleotide
  Target: LAMA2; (-) strand; PAM type: YTN; PAM sequence: CTG
gaggagggagattgtactca

SEQ ID NO: 217846 - DNA, 20 bp, Artificial Sequence
  Description of Artificial Sequence: Synthetic oligonucleotide
  Target: LAMA2; (-) strand; PAM type: YTN; PAM sequence: CTA
gacactggaggagggagatt

SEQ ID NO: 217847 - DNA, 20 bp, Artificial Sequence
  Description of Artificial Sequence: Synthetic oligonucleotide
  Target: LAMA2; (-) strand; PAM type: YTN; PAM sequence: CTC
accaaaatgaacctagacac

SEQ ID NO: 217848 - DNA, 20 bp, Artificial Sequence
  Description of Artificial Sequence: Synthetic oligonucleotide
  Target: LAMA2; (-) strand; PAM type: YTN; PAM sequence: TTG
aatatatgcagccctcacca

SEQ ID NO: 217849 - DNA, 20 bp, Artificial Sequence
  Description of Artificial Sequence: Synthetic oligonucleotide
  Target: LAMA2; (-) strand; PAM type: YTN; PAM sequence: CTT
gaatatatgcagccctcacc

SEQ ID NO: 217850 - DNA, 20 bp, Artificial Sequence
  Description of Artificial Sequence: Synthetic oligonucleotide
  Target: LAMA2; (-) strand; PAM type: YTN; PAM sequence: CTC
ttgaatatatgcagccctca

SEQ ID NO: 217851 - DNA, 20 bp, Artificial Sequence
  Description of Artificial Sequence: Synthetic oligonucleotide
  Target: LAMA2; (-) strand; PAM type: YTN; PAM sequence: CTG
tggctcttgaatatatgcag

SEQ ID NO: 217852 - DNA, 20 bp, Artificial Sequence
  Description of Artificial Sequence: Synthetic oligonucleotide
  Target: LAMA2; (-) strand; PAM type: YTN; PAM sequence: TTC
tgtggctcttgaatatatgc

SEQ ID NO: 217853 - DNA, 20 bp, Artificial Sequence
  Description of Artificial Sequence: Synthetic oligonucleotide
  Target: LAMA2; (-) strand; PAM type: YTN; PAM sequence: TTT
ctgtggctcttgaatatatg

SEQ ID NO: 217854 - DNA, 20 bp, Artificial Sequence
  Description of Artificial Sequence: Synthetic oligonucleotide
  Target: LAMA2; (-) strand; PAM type: YTN; PAM sequence: CTT
tctgtggctcttgaatatat

SEQ ID NO: 217855 - DNA, 20 bp, Artificial Sequence
  Description of Artificial Sequence: Synthetic oligonucleotide
  Target: LAMA2; (-) strand; PAM type: YTN; PAM sequence: CTC
cagccagctttctgtggctc

SEQ ID NO: 217856 - DNA, 20 bp, Artificial Sequence
  Description of Artificial Sequence: Synthetic oligonucleotide
  Target: LAMA2; (-) strand; PAM type: YTN; PAM sequence: TTG
ctccagccagctttctgtgg

SEQ ID NO: 217857 - DNA, 20 bp, Artificial Sequence
  Description of Artificial Sequence: Synthetic oligonucleotide
  Target: LAMA2; (-) strand; PAM type: YTN; PAM sequence: TTT
gctccagccagctttctgtg

SEQ ID NO: 217858 - DNA, 20 bp, Artificial Sequence
  Description of Artificial Sequence: Synthetic oligonucleotide
  Target: LAMA2; (-) strand; PAM type: YTN; PAM sequence: TTG
tttgctccagccagctttct

SEQ ID NO: 217859 - DNA, 20 bp, Artificial Sequence
  Description of Artificial Sequence: Synthetic oligonucleotide
  Target: LAMA2; (-) strand; PAM type: YTN; PAM sequence: CTT
gtttgctccagccagctttc

SEQ ID NO: 217860 - DNA, 20 bp, Artificial Sequence
  Description of Artificial Sequence: Synthetic oligonucleotide
  Target: LAMA2; (-) strand; PAM type: YTN; PAM sequence: CTA
ccgtgcaatccaccagcttg

SEQ ID NO: 217861 - DNA, 20 bp, Artificial Sequence
  Description of Artificial Sequence: Synthetic oligonucleotide
  Target: LAMA2; (-) strand; PAM type: YTN; PAM sequence: CTC
atatcccgaggaggcccata

SEQ ID NO: 217862 - DNA, 20 bp, Artificial Sequence
  Description of Artificial Sequence: Synthetic oligonucleotide
  Target: LAMA2; (-) strand; PAM type: YTN; PAM sequence: TTC
ctcatatcccgaggaggccc

SEQ ID NO: 217863 - DNA, 20 bp, Artificial Sequence
  Description of Artificial Sequence: Synthetic oligonucleotide
  Target: LAMA2; (-) strand; PAM type: YTN; PAM sequence: CTG
ccgccaccagttcctcatat

SEQ ID NO: 217864 - DNA, 20 bp, Artificial Sequence
  Description of Artificial Sequence: Synthetic oligonucleotide
  Target: LAMA2; (-) strand; PAM type: YTN; PAM sequence: CTG
agcccctgccgccaccagtt

SEQ ID NO: 217865 - DNA, 20 bp, Artificial Sequence
  Description of Artificial Sequence: Synthetic oligonucleotide
  Target: LAMA2; (-) strand; PAM type: YTN; PAM sequence: CTG
cagcactgagcccctgccgc

SEQ ID NO: 217866 - DNA, 20 bp, Artificial Sequence
  Description of Artificial Sequence: Synthetic oligonucleotide
  Target: LAMA2; (-) strand; PAM type: YTN; PAM sequence: TTG
gtgatataagctgcagcact

SEQ ID NO: 217867 - DNA, 20 bp, Artificial Sequence
  Description of Artificial Sequence: Synthetic oligonucleotide
  Target: LAMA2; (-) strand; PAM type: YTN; PAM sequence: TTT
ggtgatataagctgcagcac

SEQ ID NO: 217868 - DNA, 20 bp, Artificial Sequence
  Description of Artificial Sequence: Synthetic oligonucleotide
  Target: LAMA2; (-) strand; PAM type: YTN; PAM sequence: TTA
gtgagggtagaaataagtcc

SEQ ID NO: 217869 - DNA, 20 bp, Artificial Sequence
  Description of Artificial Sequence: Synthetic oligonucleotide
  Target: LAMA2; (-) strand; PAM type: YTN; PAM sequence: CTG
tatattagtgagggtagaaa

SEQ ID NO: 217870 - DNA, 20 bp, Artificial Sequence
  Description of Artificial Sequence: Synthetic oligonucleotide
  Target: LAMA2; (-) strand; PAM type: YTN; PAM sequence: CTG
ctgtatattagtgagggtag

SEQ ID NO: 217871 - DNA, 20 bp, Artificial Sequence
  Description of Artificial Sequence: Synthetic oligonucleotide
  Target: LAMA2; (-) strand; PAM type: YTN; PAM sequence: TTC
agctgctgtatattagtgag

SEQ ID NO: 217872 - DNA, 20 bp, Artificial Sequence
  Description of Artificial Sequence: Synthetic oligonucleotide
  Target: LAMA2; (-) strand; PAM type: YTN; PAM sequence: CTG
acattcagctgctgtatatt

SEQ ID NO: 217873 - DNA, 20 bp, Artificial Sequence
  Description of Artificial Sequence: Synthetic oligonucleotide
  Target: LAMA2; (-) strand; PAM type: YTN; PAM sequence: CTC
aggactgacattcagctgct

SEQ ID NO: 217874 - DNA, 20 bp, Artificial Sequence
  Description of Artificial Sequence: Synthetic oligonucleotide
  Target: LAMA2; (-) strand; PAM type: YTN; PAM sequence: TTA
actcaggactgacattcagc

SEQ ID NO: 217875 - DNA, 20 bp, Artificial Sequence
  Description of Artificial Sequence: Synthetic oligonucleotide
  Target: LAMA2; (-) strand; PAM type: YTN; PAM sequence: TTA
ttaactcaggactgacattc

SEQ ID NO: 217876 - DNA, 20 bp, Artificial Sequence
  Description of Artificial Sequence: Synthetic oligonucleotide
  Target: LAMA2; (-) strand; PAM type: YTN; PAM sequence: CTG
agaaatattattaactcagg

SEQ ID NO: 217877 - DNA, 20 bp, Artificial Sequence
  Description of Artificial Sequence: Synthetic oligonucleotide
  Target: LAMA2; (-) strand; PAM type: YTN; PAM sequence: TTC
ctgagaaatattattaactc

SEQ ID NO: 217878 - DNA, 20 bp, Artificial Sequence
  Description of Artificial Sequence: Synthetic oligonucleotide
  Target: LAMA2; (-) strand; PAM type: YTN; PAM sequence: CTT
cctgagaaatattattaact

SEQ ID NO: 217879 - DNA, 20 bp, Artificial Sequence
  Description of Artificial Sequence: Synthetic oligonucleotide
  Target: LAMA2; (-) strand; PAM type: YTN; PAM sequence: CTG
agacttcctgagaaatatta

SEQ ID NO: 217880 - DNA, 20 bp, Artificial Sequence
  Description of Artificial Sequence: Synthetic oligonucleotide
  Target: LAMA2; (-) strand; PAM type: YTN; PAM sequence: CTC
tgagacttcctgagaaatat

SEQ ID NO: 217881 - DNA, 20 bp, Artificial Sequence
  Description of Artificial Sequence: Synthetic oligonucleotide
  Target: LAMA2; (-) strand; PAM type: YTN; PAM sequence: CTG
atagtgctctgagacttcct

SEQ ID NO: 217882 - DNA, 20 bp, Artificial Sequence
  Description of Artificial Sequence: Synthetic oligonucleotide
  Target: LAMA2; (-) strand; PAM type: YTN; PAM sequence: CTC
tgatagtgctctgagacttc

SEQ ID NO: 217883 - DNA, 20 bp, Artificial Sequence
  Description of Artificial Sequence: Synthetic oligonucleotide
  Target: LAMA2; (-) strand; PAM type: YTN; PAM sequence: TTC
tctgatagtgctctgagact

SEQ ID NO: 217884 - DNA, 20 bp, Artificial Sequence
  Description of Artificial Sequence: Synthetic oligonucleotide
  Target: LAMA2; (-) strand; PAM type: YTN; PAM sequence: CTG
ccattctctgatagtgctct

SEQ ID NO: 217885 - DNA, 20 bp, Artificial Sequence
  Description of Artificial Sequence: Synthetic oligonucleotide
  Target: LAMA2; (-) strand; PAM type: YTN; PAM sequence: TTG
ccctgccattctctgatagt

SEQ ID NO: 217886 - DNA, 20 bp, Artificial Sequence
  Description of Artificial Sequence: Synthetic oligonucleotide
  Target: LAMA2; (-) strand; PAM type: YTN; PAM sequence: CTT
gccctgccattctctgatag

SEQ ID NO: 217887 - DNA, 20 bp, Artificial Sequence
  Description of Artificial Sequence: Synthetic oligonucleotide
  Target: LAMA2; (-) strand; PAM type: YTN; PAM sequence: TTG
atcagtgtggtagcttgccc

SEQ ID NO: 217888 - DNA, 20 bp, Artificial Sequence
  Description of Artificial Sequence: Synthetic oligonucleotide
  Target: LAMA2; (-) strand; PAM type: YTN; PAM sequence: CTA
aagcatgattgatcagtgtg

SEQ ID NO: 217889 - DNA, 20 bp, Artificial Sequence
  Description of Artificial Sequence: Synthetic oligonucleotide
  Target: LAMA2; (-) strand; PAM type: YTN; PAM sequence: TTC
ctaaagcatgattgatcagt

SEQ ID NO: 217890 - DNA, 20 bp, Artificial Sequence
  Description of Artificial Sequence: Synthetic oligonucleotide
  Target: LAMA2; (-) strand; PAM type: YTN; PAM sequence: TTT
cctaaagcatgattgatcag

SEQ ID NO: 217891 - DNA, 20 bp, Artificial Sequence
  Description of Artificial Sequence: Synthetic oligonucleotide
  Target: LAMA2; (-) strand; PAM type: YTN; PAM sequence: TTT
tcctaaagcatgattgatca

SEQ ID NO: 217892 - DNA, 20 bp, Artificial Sequence
  Description of Artificial Sequence: Synthetic oligonucleotide
  Target: LAMA2; (-) strand; PAM type: YTN; PAM sequence: TTA
attttcctaaagcatgattg

SEQ ID NO: 217893 - DNA, 20 bp, Artificial Sequence
  Description of Artificial Sequence: Synthetic oligonucleotide
  Target: LAMA2; (-) strand; PAM type: YTN; PAM sequence: TTC
atgcacaggattaattttcc

SEQ ID NO: 217894 - DNA, 20 bp, Artificial Sequence
  Description of Artificial Sequence: Synthetic oligonucleotide
  Target: LAMA2; (-) strand; PAM type: YTN; PAM sequence: CTA
agatccccaggggattcatg

SEQ ID NO: 217895 - DNA, 20 bp, Artificial Sequence
  Description of Artificial Sequence: Synthetic oligonucleotide
  Target: LAMA2; (-) strand; PAM type: YTN; PAM sequence: TTG
aggctaagatccccagggga

SEQ ID NO: 217896 - DNA, 20 bp, Artificial Sequence
  Description of Artificial Sequence: Synthetic oligonucleotide
  Target: LAMA2; (-) strand; PAM type: YTN; PAM sequence: TTT
gaggctaagatccccagggg

SEQ ID NO: 217897 - DNA, 20 bp, Artificial Sequence
  Description of Artificial Sequence: Synthetic oligonucleotide
  Target: LAMA2; (-) strand; PAM type: YTN; PAM sequence: TTT
tgaggctaagatccccaggg

SEQ ID NO: 217898 - DNA, 20 bp, Artificial Sequence
  Description of Artificial Sequence: Synthetic oligonucleotide
  Target: LAMA2; (-) strand; PAM type: YTN; PAM sequence: TTA
tcaggagtggtatgcagtcc

SEQ ID NO: 217899 - DNA, 20 bp, Artificial Sequence
  Description of Artificial Sequence: Synthetic oligonucleotide
  Target: LAMA2; (-) strand; PAM type: YTN; PAM sequence: TTT
atcaggagtggtatgcagtc

SEQ ID NO: 217900 - DNA, 20 bp, Artificial Sequence
  Description of Artificial Sequence: Synthetic oligonucleotide
  Target: LAMA2; (-) strand; PAM type: YTN; PAM sequence: CTT
tatcaggagtggtatgcagt

SEQ ID NO: 217901 - DNA, 20 bp, Artificial Sequence
  Description of Artificial Sequence: Synthetic oligonucleotide
  Target: LAMA2; (-) strand; PAM type: YTN; PAM sequence: TTG
tctttatcaggagtggtatg

SEQ ID NO: 217902 - DNA, 20 bp, Artificial Sequence
  Description of Artificial Sequence: Synthetic oligonucleotide
  Target: LAMA2; (-) strand; PAM type: YTN; PAM sequence: TTG
tgaccaataaaggacaaagt

SEQ ID NO: 217903 - DNA, 20 bp, Artificial Sequence
  Description of Artificial Sequence: Synthetic oligonucleotide
  Target: LAMA2; (-) strand; PAM type: YTN; PAM sequence: CTT
gtgaccaataaaggacaaag

SEQ ID NO: 217904 - DNA, 20 bp, Artificial Sequence
  Description of Artificial Sequence: Synthetic oligonucleotide
  Target: LAMA2; (-) strand; PAM type: YTN; PAM sequence: CTC
ttgtgaccaataaaggacaa

SEQ ID NO: 217905 - DNA, 20 bp, Artificial Sequence
  Description of Artificial Sequence: Synthetic oligonucleotide
  Target: LAMA2; (-) strand; PAM type: YTN; PAM sequence: TTC
aatgatcacatgaaggggga

SEQ ID NO: 217906 - DNA, 20 bp, Artificial Sequence
  Description of Artificial Sequence: Synthetic oligonucleotide
  Target: LAMA2; (-) strand; PAM type: YTN; PAM sequence: TTT
caatgatcacatgaaggggg

SEQ ID NO: 217907 - DNA, 20 bp, Artificial Sequence
  Description of Artificial Sequence: Synthetic oligonucleotide
  Target: LAMA2; (-) strand; PAM type: YTN; PAM sequence: CTT
tcaatgatcacatgaagggg

SEQ ID NO: 217908 - DNA, 20 bp, Artificial Sequence
  Description of Artificial Sequence: Synthetic oligonucleotide
  Target: LAMA2; (-) strand; PAM type: YTN; PAM sequence: CTA
gactttcaatgatcacatga

SEQ ID NO: 217909 - DNA, 20 bp, Artificial Sequence
  Description of Artificial Sequence: Synthetic oligonucleotide
  Target: LAMA2; (-) strand; PAM type: YTN; PAM sequence: TTG
ggagactagactttcaatga

SEQ ID NO: 217910 - DNA, 20 bp, Artificial Sequence
  Description of Artificial Sequence: Synthetic oligonucleotide
  Target: LAMA2; (-) strand; PAM type: YTN; PAM sequence: TTG
attgggagactagactttca

SEQ ID NO: 217911 - DNA, 20 bp, Artificial Sequence
  Description of Artificial Sequence: Synthetic oligonucleotide
  Target: LAMA2; (-) strand; PAM type: YTN; PAM sequence: CTT
gattgggagactagactttc

SEQ ID NO: 217912 - DNA, 20 bp, Artificial Sequence
  Description of Artificial Sequence: Synthetic oligonucleotide
  Target: LAMA2; (-) strand; PAM type: YTN; PAM sequence: CTC
ttgattgggagactagactt

SEQ ID NO: 217913 - DNA, 20 bp, Artificial Sequence
  Description of Artificial Sequence: Synthetic oligonucleotide
  Target: LAMA2; (-) strand; PAM type: YTN; PAM sequence: CTC
actcttgattgggagactag

SEQ ID NO: 217914 - DNA, 20 bp, Artificial Sequence
  Description of Artificial Sequence: Synthetic oligonucleotide
  Target: LAMA2; (-) strand; PAM type: YTN; PAM sequence: CTG
agtcaatgcacagcagactc

SEQ ID NO: 217915 - DNA, 20 bp, Artificial Sequence
  Description of Artificial Sequence: Synthetic oligonucleotide
  Target: LAMA2; (-) strand; PAM type: YTN; PAM sequence: CTG
gagatgacctgagtcaatgc

SEQ ID NO: 217916 - DNA, 20 bp, Artificial Sequence
  Description of Artificial Sequence: Synthetic oligonucleotide
  Target: LAMA2; (-) strand; PAM type: YTN; PAM sequence: CTG
tccctggagatgacctgagt

SEQ ID NO: 217917 - DNA, 20 bp, Artificial Sequence
  Description of Artificial Sequence: Synthetic oligonucleotide
  Target: LAMA2; (-) strand; PAM type: YTN; PAM sequence: TTG
cctgtccctggagatgacct

SEQ ID NO: 217918 - DNA, 20 bp, Artificial Sequence
  Description of Artificial Sequence: Synthetic oligonucleotide
  Target: LAMA2; (-) strand; PAM type: YTN; PAM sequence: TTG
attgcctgtccctggagatg

SEQ ID NO: 217919 - DNA, 20 bp, Artificial Sequence
  Description of Artificial Sequence: Synthetic oligonucleotide
  Target: LAMA2; (-) strand; PAM type: YTN; PAM sequence: TTA
ttgattgcctgtccctggag

SEQ ID NO: 217920 - DNA, 20 bp, Artificial Sequence
  Description of Artificial Sequence: Synthetic oligonucleotide
  Target: LAMA2; (-) strand; PAM type: YTN; PAM sequence: TTT
attgattgcctgtccctgga

SEQ ID NO: 217921 - DNA, 20 bp, Artificial Sequence
  Description of Artificial Sequence: Synthetic oligonucleotide
  Target: LAMA2; (-) strand; PAM type: YTN; PAM sequence: TTA
tttattgattgcctgtccct

SEQ ID NO: 217922 - DNA, 20 bp, Artificial Sequence
  Description of Artificial Sequence: Synthetic oligonucleotide
  Target: LAMA2; (-) strand; PAM type: YTN; PAM sequence: CTA
aaagaataaatggagaataa

SEQ ID NO: 217923 - DNA, 20 bp, Artificial Sequence
  Description of Artificial Sequence: Synthetic oligonucleotide
  Target: LAMA2; (-) strand; PAM type: YTN; PAM sequence: CTA
tgtgcaatctaaaagaataa

SEQ ID NO: 217924 - DNA, 20 bp, Artificial Sequence
  Description of Artificial Sequence: Synthetic oligonucleotide
  Target: LAMA2; (-) strand; PAM type: YTN; PAM sequence: TTC
tatgtgcaatctaaaagaat

SEQ ID NO: 217925 - DNA, 20 bp, Artificial Sequence
  Description of Artificial Sequence: Synthetic oligonucleotide
  Target: LAMA2; (-) strand; PAM type: YTN; PAM sequence: TTG
ttctatgtgcaatctaaaag

SEQ ID NO: 217926 - DNA, 20 bp, Artificial Sequence
  Description of Artificial Sequence: Synthetic oligonucleotide
  Target: LAMA2; (-) strand; PAM type: YTN; PAM sequence: TTG
accccattgttctatgtgca

SEQ ID NO: 217927 - DNA, 20 bp, Artificial Sequence
  Description of Artificial Sequence: Synthetic oligonucleotide
  Target: LAMA2; (-) strand; PAM type: YTN; PAM sequence: TTA
ataattgaccccattgttct

SEQ ID NO: 217928 - DNA, 20 bp, Artificial Sequence
  Description of Artificial Sequence: Synthetic oligonucleotide
  Target: LAMA2; (-) strand; PAM type: YTN; PAM sequence: TTA
tattaataattgaccccatt

SEQ ID NO: 217929 - DNA, 20 bp, Artificial Sequence
  Description of Artificial Sequence: Synthetic oligonucleotide
  Target: LAMA2; (-) strand; PAM type: YTN; PAM sequence: TTG
tgcaaattatattaataatt

SEQ ID NO: 217930 - DNA, 20 bp, Artificial Sequence
  Description of Artificial Sequence: Synthetic oligonucleotide
  Target: LAMA2; (-) strand; PAM type: YTN; PAM sequence: TTT
gtgcaaattatattaataat

SEQ ID NO: 217931 - DNA, 20 bp, Artificial Sequence
  Description of Artificial Sequence: Synthetic oligonucleotide
  Target: LAMA2; (-) strand; PAM type: YTN; PAM sequence: CTA
taagtgatttgtgcaaatta

SEQ ID NO: 217932 - DNA, 20 bp, Artificial Sequence
  Description of Artificial Sequence: Synthetic oligonucleotide
  Target: LAMA2; (-) strand; PAM type: YTN; PAM sequence: CTC
aaagagtactataagtgatt

SEQ ID NO: 217933 - DNA, 20 bp, Artificial Sequence
  Description of Artificial Sequence: Synthetic oligonucleotide
  Target: LAMA2; (-) strand; PAM type: YTN; PAM sequence: TTC
agctcaaagagtactataag

SEQ ID NO: 217934 - DNA, 20 bp, Artificial Sequence
  Description of Artificial Sequence: Synthetic oligonucleotide
  Target: LAMA2; (-) strand; PAM type: YTN; PAM sequence: CTG
ttcagctcaaagagtactat

SEQ ID NO: 217935 - DNA, 20 bp, Artificial Sequence
  Description of Artificial Sequence: Synthetic oligonucleotide
  Target: LAMA2; (-) strand; PAM type: YTN; PAM sequence: TTG
ctgttcagctcaaagagtac

SEQ ID NO: 217936 - DNA, 20 bp, Artificial Sequence
  Description of Artificial Sequence: Synthetic oligonucleotide
  Target: LAMA2; (-) strand; PAM type: YTN; PAM sequence: TTG
ataacaggtaaataatattg

SEQ ID NO: 217937 - DNA, 20 bp, Artificial Sequence
  Description of Artificial Sequence: Synthetic oligonucleotide
  Target: LAMA2; (-) strand; PAM type: YTN; PAM sequence: TTT
gataacaggtaaataatatt

SEQ ID NO: 217938 - DNA, 20 bp, Artificial Sequence
  Description of Artificial Sequence: Synthetic oligonucleotide
  Target: LAMA2; (-) strand; PAM type: YTN; PAM sequence: CTG
ccatgtttgataacaggtaa

SEQ ID NO: 217939 - DNA, 20 bp, Artificial Sequence
  Description of Artificial Sequence: Synthetic oligonucleotide
  Target: LAMA2; (-) strand; PAM type: YTN; PAM sequence: TTA
ggaggggaaaaatgctgcca

SEQ ID NO: 217940 - DNA, 20 bp, Artificial Sequence
  Description of Artificial Sequence: Synthetic oligonucleotide
  Target: LAMA2; (-) strand; PAM type: YTN; PAM sequence: TTG
taaattaggaggggaaaaat

SEQ ID NO: 217941 - DNA, 20 bp, Artificial Sequence
  Description of Artificial Sequence: Synthetic oligonucleotide
  Target: LAMA2; (-) strand; PAM type: YTN; PAM sequence: TTG
cgccatccagttgtaaatta

SEQ ID NO: 217942 - DNA, 20 bp, Artificial Sequence
  Description of Artificial Sequence: Synthetic oligonucleotide
  Target: LAMA2; (-) strand; PAM type: YTN; PAM sequence: TTG
tggttgcgccatccagttgt

SEQ ID NO: 217943 - DNA, 20 bp, Artificial Sequence
  Description of Artificial Sequence: Synthetic oligonucleotide
  Target: LAMA2; (-) strand; PAM type: YTN; PAM sequence: CTT
gtggttgcgccatccagttg

SEQ ID NO: 217944 - DNA, 20 bp, Artificial Sequence
  Description of Artificial Sequence: Synthetic oligonucleotide
  Target: LAMA2; (-) strand; PAM type: YTN; PAM sequence: TTA
gtaaaaacttgtggttgcgc

SEQ ID NO: 217945 - DNA, 20 bp, Artificial Sequence
  Description of Artificial Sequence: Synthetic oligonucleotide
  Target: LAMA2; (-) strand; PAM type: YTN; PAM sequence: TTT
agtaaaaacttgtggttgcg

SEQ ID NO: 217946 - DNA, 20 bp, Artificial Sequence
  Description of Artificial Sequence: Synthetic oligonucleotide
  Target: LAMA2; (-) strand; PAM type: YTN; PAM sequence: TTA
gaaatgatttagtaaaaact

SEQ ID NO: 217947 - DNA, 20 bp, Artificial Sequence
  Description of Artificial Sequence: Synthetic oligonucleotide
  Target: LAMA2; (-) strand; PAM type: YTN; PAM sequence: TTG
ataaaaacaggcaagttaga

SEQ ID NO: 217948 - DNA, 20 bp, Artificial Sequence
  Description of Artificial Sequence: Synthetic oligonucleotide
  Target: LAMA2; (-) strand; PAM type: YTN; PAM sequence: CTG
aattgataaaaacaggcaag

SEQ ID NO: 217949 - DNA, 20 bp, Artificial Sequence
  Description of Artificial Sequence: Synthetic oligonucleotide
  Target: LAMA2; (-) strand; PAM type: YTN; PAM sequence: TTG
ctgaattgataaaaacaggc

SEQ ID NO: 217950 - DNA, 20 bp, Artificial Sequence
  Description of Artificial Sequence: Synthetic oligonucleotide
  Target: LAMA2; (-) strand; PAM type: YTN; PAM sequence: CTT
gctgaattgataaaaacagg

SEQ ID NO: 217951 - DNA, 20 bp, Artificial Sequence
  Description of Artificial Sequence: Synthetic oligonucleotide
  Target: LAMA2; (-) strand; PAM type: YTN; PAM sequence: TTG
acttgctgaattgataaaaa

SEQ ID NO: 217952 - DNA, 20 bp, Artificial Sequence
  Description of Artificial Sequence: Synthetic oligonucleotide
  Target: LAMA2; (-) strand; PAM type: YTN; PAM sequence: TTT
gacttgctgaattgataaaa

SEQ ID NO: 217953 - DNA, 20 bp, Artificial Sequence
  Description of Artificial Sequence: Synthetic oligonucleotide
  Target: LAMA2; (-) strand; PAM type: YTN; PAM sequence: CTT
tgacttgctgaattgataaa

SEQ ID NO: 217954 - DNA, 20 bp, Artificial Sequence
  Description of Artificial Sequence: Synthetic oligonucleotide
  Target: LAMA2; (-) strand; PAM type: YTN; PAM sequence: CTC
tttgacttgctgaattgata

SEQ ID NO: 217955 - DNA, 20 bp, Artificial Sequence
  Description of Artificial Sequence: Synthetic oligonucleotide
  Target: LAMA2; (-) strand; PAM type: YTN; PAM sequence: TTC
aggtaaactctttgacttgc

SEQ ID NO: 217956 - DNA, 20 bp, Artificial Sequence
  Description of Artificial Sequence: Synthetic oligonucleotide
  Target: LAMA2; (-) strand; PAM type: YTN; PAM sequence: TTT
caggtaaactctttgacttg

SEQ ID NO: 217957 - DNA, 20 bp, Artificial Sequence
  Description of Artificial Sequence: Synthetic oligonucleotide
  Target: LAMA2; (-) strand; PAM type: YTN; PAM sequence: CTT
tcaggtaaactctttgactt

SEQ ID NO: 217958 - DNA, 20 bp, Artificial Sequence
  Description of Artificial Sequence: Synthetic oligonucleotide
  Target: LAMA2; (-) strand; PAM type: YTN; PAM sequence: CTG
aaaaataggctttcaggtaa

SEQ ID NO: 217959 - DNA, 20 bp, Artificial Sequence
  Description of Artificial Sequence: Synthetic oligonucleotide
  Target: LAMA2; (-) strand; PAM type: YTN; PAM sequence: TTA
ggaaaatatcaatgacatca

SEQ ID NO: 217960 - DNA, 20 bp, Artificial Sequence
  Description of Artificial Sequence: Synthetic oligonucleotide
  Target: LAMA2; (-) strand; PAM type: YTN; PAM sequence: TTT
aggaaaatatcaatgacatc

SEQ ID NO: 217961 - DNA, 20 bp, Artificial Sequence
  Description of Artificial Sequence: Synthetic oligonucleotide
  Target: LAMA2; (-) strand; PAM type: YTN; PAM sequence: CTG
tgtgggaatggatgagtgag

SEQ ID NO: 217962 - DNA, 20 bp, Artificial Sequence
  Description of Artificial Sequence: Synthetic oligonucleotide
  Target: LAMA2; (-) strand; PAM type: YTN; PAM sequence: TTA
agatactgtgtgggaatgga

SEQ ID NO: 217963 - DNA, 20 bp, Artificial Sequence
  Description of Artificial Sequence: Synthetic oligonucleotide
  Target: LAMA2; (-) strand; PAM type: YTN; PAM sequence: CTT
aagatactgtgtgggaatgg

SEQ ID NO: 217964 - DNA, 20 bp, Artificial Sequence
  Description of Artificial Sequence: Synthetic oligonucleotide
  Target: LAMA2; (-) strand; PAM type: YTN; PAM sequence: TTC
ttaagatactgtgtgggaat

SEQ ID NO: 217965 - DNA, 20 bp, Artificial Sequence
  Description of Artificial Sequence: Synthetic oligonucleotide
  Target: LAMA2; (-) strand; PAM type: YTN; PAM sequence: CTA
aatgggaggaagagaaaaca

SEQ ID NO: 217966 - DNA, 20 bp, Artificial Sequence
  Description of Artificial Sequence: Synthetic oligonucleotide
  Target: LAMA2; (-) strand; PAM type: YTN; PAM sequence: TTA
aactaaatgggaggaagaga

SEQ ID NO: 217967 - DNA, 20 bp, Artificial Sequence
  Description of Artificial Sequence: Synthetic oligonucleotide
  Target: LAMA2; (-) strand; PAM type: YTN; PAM sequence: CTC
cattaaactaaatgggagga

SEQ ID NO: 217968 - DNA, 20 bp, Artificial Sequence
  Description of Artificial Sequence: Synthetic oligonucleotide
  Target: LAMA2; (-) strand; PAM type: YTN; PAM sequence: TTA
cctccattaaactaaatggg

SEQ ID NO: 217969 - DNA, 20 bp, Artificial Sequence
  Description of Artificial Sequence: Synthetic oligonucleotide
  Target: LAMA2; (-) strand; PAM type: YTN; PAM sequence: CTT
acctccattaaactaaatgg

SEQ ID NO: 217970 - DNA, 20 bp, Artificial Sequence
  Description of Artificial Sequence: Synthetic oligonucleotide
  Target: LAMA2; (-) strand; PAM type: YTN; PAM sequence: CTC
atcttacctccattaaacta

SEQ ID NO: 217971 - DNA, 20 bp, Artificial Sequence
  Description of Artificial Sequence: Synthetic oligonucleotide
  Target: LAMA2; (-) strand; PAM type: YTN; PAM sequence: TTC
actcatcttacctccattaa

SEQ ID NO: 217972 - DNA, 20 bp, Artificial Sequence
  Description of Artificial Sequence: Synthetic oligonucleotide
  Target: LAMA2; (-) strand; PAM type: YTN; PAM sequence: TTG
gcatattcactcatcttacc

SEQ ID NO: 217973 - DNA, 20 bp, Artificial Sequence
  Description of Artificial Sequence: Synthetic oligonucleotide
  Target: LAMA2; (-) strand; PAM type: YTN; PAM sequence: CTT
ggcatattcactcatcttac

SEQ ID NO: 217974 - DNA, 20 bp, Artificial Sequence
  Description of Artificial Sequence: Synthetic oligonucleotide
  Target: LAMA2; (-) strand; PAM type: YTN; PAM sequence: TTA
tgatgaatgaagcataaaat

SEQ ID NO: 217975 - DNA, 20 bp, Artificial Sequence
  Description of Artificial Sequence: Synthetic oligonucleotide
  Target: LAMA2; (-) strand; PAM type: YTN; PAM sequence: TTG
ttatgatgaatgaagcataa

SEQ ID NO: 217976 - DNA, 20 bp, Artificial Sequence
  Description of Artificial Sequence: Synthetic oligonucleotide
  Target: LAMA2; (-) strand; PAM type: YTN; PAM sequence: TTT
gttatgatgaatgaagcata

SEQ ID NO: 217977 - DNA, 20 bp, Artificial Sequence
  Description of Artificial Sequence: Synthetic oligonucleotide
  Target: LAMA2; (-) strand; PAM type: YTN; PAM sequence: CTT
tgttatgatgaatgaagcat

SEQ ID NO: 217978 - DNA, 20 bp, Artificial Sequence
  Description of Artificial Sequence: Synthetic oligonucleotide
  Target: LAMA2; (-) strand; PAM type: YTN; PAM sequence: CTG
gcactttgttatgatgaatg

SEQ ID NO: 217979 - DNA, 20 bp, Artificial Sequence
  Description of Artificial Sequence: Synthetic oligonucleotide
  Target: LAMA2; (-) strand; PAM type: YTN; PAM sequence: TTC
tggcactttgttatgatgaa

SEQ ID NO: 217980 - DNA, 20 bp, Artificial Sequence
  Description of Artificial Sequence: Synthetic oligonucleotide
  Target: LAMA2; (-) strand; PAM type: YTN; PAM sequence: TTA
tatacagaattctggcactt

SEQ ID NO: 217981 - DNA, 20 bp, Artificial Sequence
  Description of Artificial Sequence: Synthetic oligonucleotide
  Target: LAMA2; (-) strand; PAM type: YTN; PAM sequence: CTG
ggttatatacagaattctgg

SEQ ID NO: 217982 - DNA, 20 bp, Artificial Sequence
  Description of Artificial Sequence: Synthetic oligonucleotide
  Target: LAMA2; (-) strand; PAM type: YTN; PAM sequence: TTG
gagtcaggtagacctgggtt

SEQ ID NO: 217983 - DNA, 20 bp, Artificial Sequence
  Description of Artificial Sequence: Synthetic oligonucleotide
  Target: LAMA2; (-) strand; PAM type: YTN; PAM sequence: TTT
ggagtcaggtagacctgggt

SEQ ID NO: 217984 - DNA, 20 bp, Artificial Sequence
  Description of Artificial Sequence: Synthetic oligonucleotide
  Target: LAMA2; (-) strand; PAM type: YTN; PAM sequence: CTT
tggagtcaggtagacctggg

SEQ ID NO: 217985 - DNA, 20 bp, Artificial Sequence
  Description of Artificial Sequence: Synthetic oligonucleotide
  Target: LAMA2; (-) strand; PAM type: YTN; PAM sequence: TTC
agactttggagtcaggtaga

SEQ ID NO: 217986 - DNA, 20 bp, Artificial Sequence
  Description of Artificial Sequence: Synthetic oligonucleotide
  Target: LAMA2; (-) strand; PAM type: YTN; PAM sequence: TTT
cagactttggagtcaggtag

SEQ ID NO: 217987 - DNA, 20 bp, Artificial Sequence
  Description of Artificial Sequence: Synthetic oligonucleotide
  Target: LAMA2; (-) strand; PAM type: YTN; PAM sequence: TTG
gtgaatttcagactttggag

SEQ ID NO: 217988 - DNA, 20 bp, Artificial Sequence
  Description of Artificial Sequence: Synthetic oligonucleotide
  Target: LAMA2; (-) strand; PAM type: YTN; PAM sequence: CTT
ggtgaatttcagactttgga

SEQ ID NO: 217989 - DNA, 20 bp, Artificial Sequence
  Description of Artificial Sequence: Synthetic oligonucleotide
  Target: LAMA2; (-) strand; PAM type: YTN; PAM sequence: TTC
cacttggtgaatttcagact

SEQ ID NO: 217990 - DNA, 20 bp, Artificial Sequence
  Description of Artificial Sequence: Synthetic oligonucleotide
  Target: LAMA2; (-) strand; PAM type: YTN; PAM sequence: CTG
taccaattccacttggtgaa

SEQ ID NO: 217991 - DNA, 20 bp, Artificial Sequence
  Description of Artificial Sequence: Synthetic oligonucleotide
  Target: LAMA2; (-) strand; PAM type: YTN; PAM sequence: CTC
tgtaccaattccacttggtg

SEQ ID NO: 217992 - DNA, 20 bp, Artificial Sequence
  Description of Artificial Sequence: Synthetic oligonucleotide
  Target: LAMA2; (-) strand; PAM type: YTN; PAM sequence: TTG
aacacatatgctctgtacca

SEQ ID NO: 217993 - DNA, 20 bp, Artificial Sequence
  Description of Artificial Sequence: Synthetic oligonucleotide
  Target: LAMA2; (-) strand; PAM type: YTN; PAM sequence: TTT
gaacacatatgctctgtacc

SEQ ID NO: 217994 - DNA, 20 bp, Artificial Sequence
  Description of Artificial Sequence: Synthetic oligonucleotide
  Target: LAMA2; (-) strand; PAM type: YTN; PAM sequence: CTG
gaatatgggacaatttgaac

SEQ ID NO: 217995 - DNA, 20 bp, Artificial Sequence
  Description of Artificial Sequence: Synthetic oligonucleotide
  Target: LAMA2; (-) strand; PAM type: YTN; PAM sequence: CTG
gaataaataaggatatggat

SEQ ID NO: 217996 - DNA, 20 bp, Artificial Sequence
  Description of Artificial Sequence: Synthetic oligonucleotide
  Target: LAMA2; (-) strand; PAM type: YTN; PAM sequence: TTC
aggaaatagaaagctggaat

SEQ ID NO: 217997 - DNA, 20 bp, Artificial Sequence
  Description of Artificial Sequence: Synthetic oligonucleotide
  Target: LAMA2; (-) strand; PAM type: YTN; PAM sequence: TTT
caggaaatagaaagctggaa

SEQ ID NO: 217998 - DNA, 20 bp, Artificial Sequence
  Description of Artificial Sequence: Synthetic oligonucleotide
  Target: LAMA2; (-) strand; PAM type: YTN; PAM sequence: TTT
tcaggaaatagaaagctgga

SEQ ID NO: 217999 - DNA, 20 bp, Artificial Sequence
  Description of Artificial Sequence: Synthetic oligonucleotide
  Target: LAMA2; (-) strand; PAM type: YTN; PAM sequence: TTG
attttcaggaaatagaaagc

SEQ ID NO: 218000 - DNA, 20 bp, Artificial Sequence
  Description of Artificial Sequence: Synthetic oligonucleotide
  Target: LAMA2; (-) strand; PAM type: YTN; PAM sequence: CTA
cacacacagtaggttgattt

SEQ ID NO: 218001 - DNA, 20 bp, Artificial Sequence
  Description of Artificial Sequence: Synthetic oligonucleotide
  Target: LAMA2; (-) strand; PAM type: YTN; PAM sequence: TTC
tacacacacagtaggttgat

SEQ ID NO: 218002 - DNA, 20 bp, Artificial Sequence
  Description of Artificial Sequence: Synthetic oligonucleotide
  Target: LAMA2; (-) strand; PAM type: YTN; PAM sequence: CTT
ctacacacacagtaggttga

SEQ ID NO: 218003 - DNA, 20 bp, Artificial Sequence
  Description of Artificial Sequence: Synthetic oligonucleotide
  Target: LAMA2; (-) strand; PAM type: YTN; PAM sequence: TTC
ttctacacacacagtaggtt

SEQ ID NO: 218004 - DNA, 20 bp, Artificial Sequence
  Description of Artificial Sequence: Synthetic oligonucleotide
  Target: LAMA2; (-) strand; PAM type: YTN; PAM sequence: CTT
cttctacacacacagtaggt

SEQ ID NO: 218005 - DNA, 20 bp, Artificial Sequence
  Description of Artificial Sequence: Synthetic oligonucleotide
  Target: LAMA2; (-) strand; PAM type: YTN; PAM sequence: TTC
cccttcttctacacacacag

SEQ ID NO: 218006 - DNA, 20 bp, Artificial Sequence
  Description of Artificial Sequence: Synthetic oligonucleotide
  Target: LAMA2; (-) strand; PAM type: YTN; PAM sequence: TTG
aattccccttcttctacaca

SEQ ID NO: 218007 - DNA, 20 bp, Artificial Sequence
  Description of Artificial Sequence: Synthetic oligonucleotide
  Target: LAMA2; (-) strand; PAM type: YTN; PAM sequence: CTT
gaattccccttcttctacac

SEQ ID NO: 218008 - DNA, 20 bp, Artificial Sequence
  Description of Artificial Sequence: Synthetic oligonucleotide
  Target: LAMA2; (-) strand; PAM type: YTN; PAM sequence: TTA
cttgaattccccttcttcta

SEQ ID NO: 218009 - DNA, 20 bp, Artificial Sequence
  Description of Artificial Sequence: Synthetic oligonucleotide
  Target: LAMA2; (-) strand; PAM type: YTN; PAM sequence: TTA
gagattacttgaattcccct

SEQ ID NO: 218010 - DNA, 20 bp, Artificial Sequence
  Description of Artificial Sequence: Synthetic oligonucleotide
  Target: LAMA2; (-) strand; PAM type: YTN; PAM sequence: TTT
agagattacttgaattcccc

SEQ ID NO: 218011 - DNA, 20 bp, Artificial Sequence
  Description of Artificial Sequence: Synthetic oligonucleotide
  Target: LAMA2; (-) strand; PAM type: YTN; PAM sequence: TTT
tagagattacttgaattccc

SEQ ID NO: 218012 - DNA, 20 bp, Artificial Sequence
  Description of Artificial Sequence: Synthetic oligonucleotide
  Target: LAMA2; (-) strand; PAM type: YTN; PAM sequence: TTT
ttagagattacttgaattcc

SEQ ID NO: 218013 - DNA, 20 bp, Artificial Sequence
  Description of Artificial Sequence: Synthetic oligonucleotide
  Target: LAMA2; (-) strand; PAM type: YTN; PAM sequence: TTA
catttttagagattacttga

SEQ ID NO: 218014 - DNA, 20 bp, Artificial Sequence
  Description of Artificial Sequence: Synthetic oligonucleotide
  Target: LAMA2; (-) strand; PAM type: YTN; PAM sequence: TTA
ttacatttttagagattact

SEQ ID NO: 218015 - DNA, 20 bp, Artificial Sequence
  Description of Artificial Sequence: Synthetic oligonucleotide
  Target: LAMA2; (-) strand; PAM type: YTN; PAM sequence: TTT
attacatttttagagattac

SEQ ID NO: 218016 - DNA, 20 bp, Artificial Sequence
  Description of Artificial Sequence: Synthetic oligonucleotide
  Target: LAMA2; (-) strand; PAM type: YTN; PAM sequence: TTG
agtcaagtagaaataaggat

SEQ ID NO: 218017 - DNA, 20 bp, Artificial Sequence
  Description of Artificial Sequence: Synthetic oligonucleotide
  Target: LAMA2; (-) strand; PAM type: YTN; PAM sequence: CTT
gagtcaagtagaaataagga

SEQ ID NO: 218018 - DNA, 20 bp, Artificial Sequence
  Description of Artificial Sequence: Synthetic oligonucleotide
  Target: LAMA2; (-) strand; PAM type: YTN; PAM sequence: TTA
aaatcttgagtcaagtagaa

SEQ ID NO: 218019 - DNA, 20 bp, Artificial Sequence
  Description of Artificial Sequence: Synthetic oligonucleotide
  Target: LAMA2; (-) strand; PAM type: YTN; PAM sequence: CTA
aattaaaatcttgagtcaag

SEQ ID NO: 218020 - DNA, 20 bp, Artificial Sequence
  Description of Artificial Sequence: Synthetic oligonucleotide
  Target: LAMA2; (-) strand; PAM type: YTN; PAM sequence: CTG
actaaattaaaatcttgagt

SEQ ID NO: 218021 - DNA, 20 bp, Artificial Sequence
  Description of Artificial Sequence: Synthetic oligonucleotide
  Target: LAMA2; (-) strand; PAM type: YTN; PAM sequence: CTA
aataactgactaaattaaaa

SEQ ID NO: 218022 - DNA, 20 bp, Artificial Sequence
  Description of Artificial Sequence: Synthetic oligonucleotide
  Target: LAMA2; (-) strand; PAM type: YTN; PAM sequence: TTC
acatcactaaataactgact

SEQ ID NO: 218023 - DNA, 20 bp, Artificial Sequence
  Description of Artificial Sequence: Synthetic oligonucleotide
  Target: LAMA2; (-) strand; PAM type: YTN; PAM sequence: TTT
cacatcactaaataactgac

SEQ ID NO: 218024 - DNA, 20 bp, Artificial Sequence
  Description of Artificial Sequence: Synthetic oligonucleotide
  Target: LAMA2; (-) strand; PAM type: YTN; PAM sequence: TTT
tcacatcactaaataactga

SEQ ID NO: 218025 - DNA, 20 bp, Artificial Sequence
  Description of Artificial Sequence: Synthetic oligonucleotide
  Target: LAMA2; (-) strand; PAM type: YTN; PAM sequence: CTT
ttcacatcactaaataactg

SEQ ID NO: 218026 - DNA, 20 bp, Artificial Sequence
  Description of Artificial Sequence: Synthetic oligonucleotide
  Target: LAMA2; (-) strand; PAM type: YTN; PAM sequence: TTA
acttttcacatcactaaata

SEQ ID NO: 218027 - DNA, 20 bp, Artificial Sequence
  Description of Artificial Sequence: Synthetic oligonucleotide
  Target: LAMA2; (-) strand; PAM type: YTN; PAM sequence: TTT
aacttttcacatcactaaat

SEQ ID NO: 218028 - DNA, 20 bp, Artificial Sequence
  Description of Artificial Sequence: Synthetic oligonucleotide
  Target: LAMA2; (-) strand; PAM type: YTN; PAM sequence: CTG
tttaacttttcacatcacta

SEQ ID NO: 218029 - DNA, 20 bp, Artificial Sequence
  Description of Artificial Sequence: Synthetic oligonucleotide
  Target: LAMA2; (-) strand; PAM type: YTN; PAM sequence: TTA
caaaacctgtttaacttttc

SEQ ID NO: 218030 - DNA, 20 bp, Artificial Sequence
  Description of Artificial Sequence: Synthetic oligonucleotide
  Target: LAMA2; (-) strand; PAM type: YTN; PAM sequence: TTG
attacaaaacctgtttaact

SEQ ID NO: 218031 - DNA, 20 bp, Artificial Sequence
  Description of Artificial Sequence: Synthetic oligonucleotide
  Target: LAMA2; (-) strand; PAM type: YTN; PAM sequence: CTT
gattacaaaacctgtttaac

SEQ ID NO: 218032 - DNA, 20 bp, Artificial Sequence
  Description of Artificial Sequence: Synthetic oligonucleotide
  Target: LAMA2; (-) strand; PAM type: YTN; PAM sequence: TTC
catcacgaaacttgattaca

SEQ ID NO: 218033 - DNA, 20 bp, Artificial Sequence
  Description of Artificial Sequence: Synthetic oligonucleotide
  Target: LAMA2; (-) strand; PAM type: YTN; PAM sequence: CTG
agaagttccatcacgaaact

SEQ ID NO: 218034 - DNA, 20 bp, Artificial Sequence
  Description of Artificial Sequence: Synthetic oligonucleotide
  Target: LAMA2; (-) strand; PAM type: YTN; PAM sequence: TTG
tctgagaagttccatcacga

SEQ ID NO: 218035 - DNA, 20 bp, Artificial Sequence
  Description of Artificial Sequence: Synthetic oligonucleotide
  Target: LAMA2; (-) strand; PAM type: YTN; PAM sequence: CTT
gtctgagaagttccatcacg

SEQ ID NO: 218036 - DNA, 20 bp, Artificial Sequence
  Description of Artificial Sequence: Synthetic oligonucleotide
  Target: LAMA2; (-) strand; PAM type: YTN; PAM sequence: TTC
ttgtctgagaagttccatca

SEQ ID NO: 218037 - DNA, 20 bp, Artificial Sequence
  Description of Artificial Sequence: Synthetic oligonucleotide
  Target: LAMA2; (-) strand; PAM type: YTN; PAM sequence: TTT
cttgtctgagaagttccatc

SEQ ID NO: 218038 - DNA, 20 bp, Artificial Sequence
  Description of Artificial Sequence: Synthetic oligonucleotide
  Target: LAMA2; (-) strand; PAM type: YTN; PAM sequence: CTT
tcttgtctgagaagttccat

SEQ ID NO: 218039 - DNA, 20 bp, Artificial Sequence
  Description of Artificial Sequence: Synthetic oligonucleotide
  Target: LAMA2; (-) strand; PAM type: YTN; PAM sequence: CTC
tttcttgtctgagaagttcc

SEQ ID NO: 218040 - DNA, 20 bp, Artificial Sequence
  Description of Artificial Sequence: Synthetic oligonucleotide
  Target: LAMA2; (-) strand; PAM type: YTN; PAM sequence: CTG
aagctctttcttgtctgaga

SEQ ID NO: 218041 - DNA, 20 bp, Artificial Sequence
  Description of Artificial Sequence: Synthetic oligonucleotide
  Target: LAMA2; (-) strand; PAM type: YTN; PAM sequence: TTG
gaagtctgaagctctttctt

SEQ ID NO: 218042 - DNA, 20 bp, Artificial Sequence
  Description of Artificial Sequence: Synthetic oligonucleotide
  Target: LAMA2; (-) strand; PAM type: YTN; PAM sequence: CTG
aggccaaattggaagtctga

SEQ ID NO: 218043 - DNA, 20 bp, Artificial Sequence
  Description of Artificial Sequence: Synthetic oligonucleotide
  Target: LAMA2; (-) strand; PAM type: YTN; PAM sequence: TTC
caaagcctgaggccaaattg

SEQ ID NO: 218044 - DNA, 20 bp, Artificial Sequence
  Description of Artificial Sequence: Synthetic oligonucleotide
  Target: LAMA2; (-) strand; PAM type: YTN; PAM sequence: TTA
ttccaaagcctgaggccaaa

SEQ ID NO: 218045 - DNA, 20 bp, Artificial Sequence
  Description of Artificial Sequence: Synthetic oligonucleotide
  Target: LAMA2; (-) strand; PAM type: YTN; PAM sequence: TTG
ttattccaaagcctgaggcc

SEQ ID NO: 218046 - DNA, 20 bp, Artificial Sequence
  Description of Artificial Sequence: Synthetic oligonucleotide
  Target: LAMA2; (-) strand; PAM type: YTN; PAM sequence: TTT
gttattccaaagcctgaggc

SEQ ID NO: 218047 - DNA, 20 bp, Artificial Sequence
  Description of Artificial Sequence: Synthetic oligonucleotide
  Target: LAMA2; (-) strand; PAM type: YTN; PAM sequence: CTC
acagtttgttattccaaagc

SEQ ID NO: 218048 - DNA, 20 bp, Artificial Sequence
  Description of Artificial Sequence: Synthetic oligonucleotide
  Target: LAMA2; (-) strand; PAM type: YTN; PAM sequence: TTA
taaacatgtctcacagtttg

SEQ ID NO: 218049 - DNA, 20 bp, Artificial Sequence
  Description of Artificial Sequence: Synthetic oligonucleotide
  Target: LAMA2; (-) strand; PAM type: YTN; PAM sequence: CTG
aataagtattataaacatgt

SEQ ID NO: 218050 - DNA, 20 bp, Artificial Sequence
  Description of Artificial Sequence: Synthetic oligonucleotide
  Target: LAMA2; (-) strand; PAM type: YTN; PAM sequence: TTG
ccagtgcagtacaatatacc

SEQ ID NO: 218051 - DNA, 20 bp, Artificial Sequence
  Description of Artificial Sequence: Synthetic oligonucleotide
  Target: LAMA2; (-) strand; PAM type: YTN; PAM sequence: CTG
ttgccagtgcagtacaatat

SEQ ID NO: 218052 - DNA, 20 bp, Artificial Sequence
  Description of Artificial Sequence: Synthetic oligonucleotide
  Target: LAMA2; (-) strand; PAM type: YTN; PAM sequence: CTC
tgttgccagtgcagtacaat

SEQ ID NO: 218053 - DNA, 20 bp, Artificial Sequence
  Description of Artificial Sequence: Synthetic oligonucleotide
  Target: LAMA2; (-) strand; PAM type: YTN; PAM sequence: TTC
tctgttgccagtgcagtaca

SEQ ID NO: 218054 - DNA, 20 bp, Artificial Sequence
  Description of Artificial Sequence: Synthetic oligonucleotide
  Target: LAMA2; (-) strand; PAM type: YTN; PAM sequence: TTT
ctctgttgccagtgcagtac

SEQ ID NO: 218055 - DNA, 20 bp, Artificial Sequence
  Description of Artificial Sequence: Synthetic oligonucleotide
  Target: LAMA2; (-) strand; PAM type: YTN; PAM sequence: TTT
tctctgttgccagtgcagta

SEQ ID NO: 218056 - DNA, 20 bp, Artificial Sequence
  Description of Artificial Sequence: Synthetic oligonucleotide
  Target: LAMA2; (-) strand; PAM type: YTN; PAM sequence: TTA
cataataagaatgtccacat

SEQ ID NO: 218057 - DNA, 20 bp, Artificial Sequence
  Description of Artificial Sequence: Synthetic oligonucleotide
  Target: LAMA2; (-) strand; PAM type: YTN; PAM sequence: TTG
tgaggagttacataataaga

SEQ ID NO: 218058 - DNA, 20 bp, Artificial Sequence
  Description of Artificial Sequence: Synthetic oligonucleotide
  Target: LAMA2; (-) strand; PAM type: YTN; PAM sequence: TTA
ttgtgaggagttacataata

SEQ ID NO: 218059 - DNA, 20 bp, Artificial Sequence
  Description of Artificial Sequence: Synthetic oligonucleotide
  Target: LAMA2; (-) strand; PAM type: YTN; PAM sequence: TTC
aggattattgtgaggagtta

SEQ ID NO: 218060 - DNA, 20 bp, Artificial Sequence
  Description of Artificial Sequence: Synthetic oligonucleotide
  Target: LAMA2; (-) strand; PAM type: YTN; PAM sequence: TTA
ttcaggattattgtgaggag

SEQ ID NO: 218061 - DNA, 20 bp, Artificial Sequence
  Description of Artificial Sequence: Synthetic oligonucleotide
  Target: LAMA2; (-) strand; PAM type: YTN; PAM sequence: TTT
attcaggattattgtgagga

SEQ ID NO: 218062 - DNA, 20 bp, Artificial Sequence
  Description of Artificial Sequence: Synthetic oligonucleotide
  Target: LAMA2; (-) strand; PAM type: YTN; PAM sequence: CTG
gtttattcaggattattgtg

SEQ ID NO: 218063 - DNA, 20 bp, Artificial Sequence
  Description of Artificial Sequence: Synthetic oligonucleotide
  Target: LAMA2; (-) strand; PAM type: YTN; PAM sequence: TTA
gctggtttattcaggattat

SEQ ID NO: 218064 - DNA, 20 bp, Artificial Sequence
  Description of Artificial Sequence: Synthetic oligonucleotide
  Target: LAMA2; (-) strand; PAM type: YTN; PAM sequence: TTA
atattagctggtttattcag

SEQ ID NO: 218065 - DNA, 20 bp, Artificial Sequence
  Description of Artificial Sequence: Synthetic oligonucleotide
  Target: LAMA2; (-) strand; PAM type: YTN; PAM sequence: CTA
tgcaataggaatattaatat

SEQ ID NO: 218066 - DNA, 20 bp, Artificial Sequence
  Description of Artificial Sequence: Synthetic oligonucleotide
  Target: LAMA2; (-) strand; PAM type: YTN; PAM sequence: TTC
aactatgcaataggaatatt

SEQ ID NO: 218067 - DNA, 20 bp, Artificial Sequence
  Description of Artificial Sequence: Synthetic oligonucleotide
  Target: LAMA2; (-) strand; PAM type: YTN; PAM sequence: CTT
caactatgcaataggaatat

SEQ ID NO: 218068 - DNA, 20 bp, Artificial Sequence
  Description of Artificial Sequence: Synthetic oligonucleotide
  Target: LAMA2; (-) strand; PAM type: YTN; PAM sequence: TTC
ttcaactatgcaataggaat

SEQ ID NO: 218069 - DNA, 20 bp, Artificial Sequence
  Description of Artificial Sequence: Synthetic oligonucleotide
  Target: LAMA2; (-) strand; PAM type: YTN; PAM sequence: CTA
aagcacagtgttcttcaact

SEQ ID NO: 218070 - DNA, 20 bp, Artificial Sequence
  Description of Artificial Sequence: Synthetic oligonucleotide
  Target: LAMA2; (-) strand; PAM type: YTN; PAM sequence: TTC
taaagcacagtgttcttcaa

SEQ ID NO: 218071 - DNA, 20 bp, Artificial Sequence
  Description of Artificial Sequence: Synthetic oligonucleotide
  Target: LAMA2; (-) strand; PAM type: YTN; PAM sequence: TTT
ctaaagcacagtgttcttca

SEQ ID NO: 218072 - DNA, 20 bp, Artificial Sequence
  Description of Artificial Sequence: Synthetic oligonucleotide
  Target: LAMA2; (-) strand; PAM type: YTN; PAM sequence: TTT
tctaaagcacagtgttcttc

SEQ ID NO: 218073 - DNA, 20 bp, Artificial Sequence
  Description of Artificial Sequence: Synthetic oligonucleotide
  Target: LAMA2; (-) strand; PAM type: YTN; PAM sequence: CTT
ttctaaagcacagtgttctt

SEQ ID NO: 218074 - DNA, 20 bp, Artificial Sequence
  Description of Artificial Sequence: Synthetic oligonucleotide
  Target: LAMA2; (-) strand; PAM type: YTN; PAM sequence: CTG
aacttttctaaagcacagtg

SEQ ID NO: 218075 - DNA, 20 bp, Artificial Sequence
  Description of Artificial Sequence: Synthetic oligonucleotide
  Target: LAMA2; (-) strand; PAM type: YTN; PAM sequence: TTA
gaaagaaggccaagtcactg

SEQ ID NO: 218076 - DNA, 20 bp, Artificial Sequence
  Description of Artificial Sequence: Synthetic oligonucleotide
  Target: LAMA2; (-) strand; PAM type: YTN; PAM sequence: TTT
agaaagaaggccaagtcact

SEQ ID NO: 218077 - DNA, 20 bp, Artificial Sequence
  Description of Artificial Sequence: Synthetic oligonucleotide
  Target: LAMA2; (-) strand; PAM type: YTN; PAM sequence: CTT
tagaaagaaggccaagtcac

SEQ ID NO: 218078 - DNA, 20 bp, Artificial Sequence
  Description of Artificial Sequence: Synthetic oligonucleotide
  Target: LAMA2; (-) strand; PAM type: YTN; PAM sequence: CTG
cccataataagctttagaaa

SEQ ID NO: 218079 - DNA, 20 bp, Artificial Sequence
  Description of Artificial Sequence: Synthetic oligonucleotide
  Target: LAMA2; (-) strand; PAM type: YTN; PAM sequence: TTG
ccccagccctgcccataata

SEQ ID NO: 218080 - DNA, 20 bp, Artificial Sequence
  Description of Artificial Sequence: Synthetic oligonucleotide
  Target: LAMA2; (-) strand; PAM type: YTN; PAM sequence: TTC
atgttgccccagccctgccc

SEQ ID NO: 218081 - DNA, 20 bp, Artificial Sequence
  Description of Artificial Sequence: Synthetic oligonucleotide
  Target: LAMA2; (-) strand; PAM type: YTN; PAM sequence: CTA
ttcatgttgccccagccctg

SEQ ID NO: 218082 - DNA, 20 bp, Artificial Sequence
  Description of Artificial Sequence: Synthetic oligonucleotide
  Target: LAMA2; (-) strand; PAM type: YTN; PAM sequence: TTC
agactattcatgttgcccca

SEQ ID NO: 218083 - DNA, 20 bp, Artificial Sequence
  Description of Artificial Sequence: Synthetic oligonucleotide
  Target: LAMA2; (-) strand; PAM type: YTN; PAM sequence: CTG
gattcagactattcatgttg

SEQ ID NO: 218084 - DNA, 20 bp, Artificial Sequence
  Description of Artificial Sequence: Synthetic oligonucleotide
  Target: LAMA2; (-) strand; PAM type: YTN; PAM sequence: TTG
ggtctggattcagactattc

SEQ ID NO: 218085 - DNA, 20 bp, Artificial Sequence
  Description of Artificial Sequence: Synthetic oligonucleotide
  Target: LAMA2; (-) strand; PAM type: YTN; PAM sequence: TTT
gggtctggattcagactatt

SEQ ID NO: 218086 - DNA, 20 bp, Artificial Sequence
  Description of Artificial Sequence: Synthetic oligonucleotide
  Target: LAMA2; (-) strand; PAM type: YTN; PAM sequence: TTA
gaaaagatagtgtatttggg

SEQ ID NO: 218087 - DNA, 20 bp, Artificial Sequence
  Description of Artificial Sequence: Synthetic oligonucleotide
  Target: LAMA2; (-) strand; PAM type: YTN; PAM sequence: TTC
agatacccattagaaaagat

SEQ ID NO: 218088 - DNA, 20 bp, Artificial Sequence
  Description of Artificial Sequence: Synthetic oligonucleotide
  Target: LAMA2; (-) strand; PAM type: YTN; PAM sequence: CTT
cagatacccattagaaaaga

SEQ ID NO: 218089 - DNA, 20 bp, Artificial Sequence
  Description of Artificial Sequence: Synthetic oligonucleotide
  Target: LAMA2; (-) strand; PAM type: YTN; PAM sequence: TTA
tgtcttcagatacccattag

SEQ ID NO: 218090 - DNA, 20 bp, Artificial Sequence
  Description of Artificial Sequence: Synthetic oligonucleotide
  Target: LAMA2; (-) strand; PAM type: YTN; PAM sequence: CTA
ggattatgtcttcagatacc

SEQ ID NO: 218091 - DNA, 20 bp, Artificial Sequence
  Description of Artificial Sequence: Synthetic oligonucleotide
  Target: LAMA2; (-) strand; PAM type: YTN; PAM sequence: CTC
cctaggattatgtcttcaga

SEQ ID NO: 218092 - DNA, 20 bp, Artificial Sequence
  Description of Artificial Sequence: Synthetic oligonucleotide
  Target: LAMA2; (-) strand; PAM type: YTN; PAM sequence: CTG
agctccctaggattatgtct

SEQ ID NO: 218093 - DNA, 20 bp, Artificial Sequence
  Description of Artificial Sequence: Synthetic oligonucleotide
  Target: LAMA2; (-) strand; PAM type: YTN; PAM sequence: TTA
tcctgagctccctaggatta

SEQ ID NO: 218094 - DNA, 20 bp, Artificial Sequence
  Description of Artificial Sequence: Synthetic oligonucleotide
  Target: LAMA2; (-) strand; PAM type: YTN; PAM sequence: TTG
aaaatatataataaaaatta

SEQ ID NO: 218095 - DNA, 20 bp, Artificial Sequence
  Description of Artificial Sequence: Synthetic oligonucleotide
  Target: LAMA2; (-) strand; PAM type: YTN; PAM sequence: CTT
gaaaatatataataaaaatt

SEQ ID NO: 218096 - DNA, 20 bp, Artificial Sequence
  Description of Artificial Sequence: Synthetic oligonucleotide
  Target: LAMA2; (-) strand; PAM type: YTN; PAM sequence: TTG
gagcccttgaaaatatataa

SEQ ID NO: 218097 - DNA, 20 bp, Artificial Sequence
  Description of Artificial Sequence: Synthetic oligonucleotide
  Target: LAMA2; (-) strand; PAM type: YTN; PAM sequence: TTT
ggagcccttgaaaatatata

SEQ ID NO: 218098 - DNA, 20 bp, Artificial Sequence
  Description of Artificial Sequence: Synthetic oligonucleotide
  Target: LAMA2; (-) strand; PAM type: YTN; PAM sequence: CTA
catttggagcccttgaaaat

SEQ ID NO: 218099 - DNA, 20 bp, Artificial Sequence
  Description of Artificial Sequence: Synthetic oligonucleotide
  Target: LAMA2; (-) strand; PAM type: YTN; PAM sequence: CTG
aactacatttggagcccttg

SEQ ID NO: 218100 - DNA, 20 bp, Artificial Sequence
  Description of Artificial Sequence: Synthetic oligonucleotide
  Target: LAMA2; (-) strand; PAM type: YTN; PAM sequence: TTG
aacctgaactacatttggag

SEQ ID NO: 218101 - DNA, 20 bp, Artificial Sequence
  Description of Artificial Sequence: Synthetic oligonucleotide
  Target: LAMA2; (-) strand; PAM type: YTN; PAM sequence: CTT
gaacctgaactacatttgga

SEQ ID NO: 218102 - DNA, 20 bp, Artificial Sequence
  Description of Artificial Sequence: Synthetic oligonucleotide
  Target: LAMA2; (-) strand; PAM type: YTN; PAM sequence: TTC
ttgaacctgaactacatttg

SEQ ID NO: 218103 - DNA, 20 bp, Artificial Sequence
  Description of Artificial Sequence: Synthetic oligonucleotide
  Target: LAMA2; (-) strand; PAM type: YTN; PAM sequence: TTT
cttgaacctgaactacattt

SEQ ID NO: 218104 - DNA, 20 bp, Artificial Sequence
  Description of Artificial Sequence: Synthetic oligonucleotide
  Target: LAMA2; (-) strand; PAM type: YTN; PAM sequence: TTA
tcccatagaagccaggagaa

SEQ ID NO: 218105 - DNA, 20 bp, Artificial Sequence
  Description of Artificial Sequence: Synthetic oligonucleotide
  Target: LAMA2; (-) strand; PAM type: YTN; PAM sequence: CTA
tattatcccatagaagccag

SEQ ID NO: 218106 - DNA, 20 bp, Artificial Sequence
  Description of Artificial Sequence: Synthetic oligonucleotide
  Target: LAMA2; (-) strand; PAM type: YTN; PAM sequence: TTG
gctatattatcccatagaag

SEQ ID NO: 218107 - DNA, 20 bp, Artificial Sequence
  Description of Artificial Sequence: Synthetic oligonucleotide
  Target: LAMA2; (-) strand; PAM type: YTN; PAM sequence: TTG
ttggctatattatcccatag

SEQ ID NO: 218108 - DNA, 20 bp, Artificial Sequence
  Description of Artificial Sequence: Synthetic oligonucleotide
  Target: LAMA2; (-) strand; PAM type: YTN; PAM sequence: TTA
taacgaaacaggttgttggc

SEQ ID NO: 218109 - DNA, 20 bp, Artificial Sequence
  Description of Artificial Sequence: Synthetic oligonucleotide
  Target: LAMA2; (-) strand; PAM type: YTN; PAM sequence: TTT
ataacgaaacaggttgttgg

SEQ ID NO: 218110 - DNA, 20 bp, Artificial Sequence
  Description of Artificial Sequence: Synthetic oligonucleotide
  Target: LAMA2; (-) strand; PAM type: YTN; PAM sequence: CTT
tataacgaaacaggttgttg

SEQ ID NO: 218111 - DNA, 20 bp, Artificial Sequence
  Description of Artificial Sequence: Synthetic oligonucleotide
  Target: LAMA2; (-) strand; PAM type: YTN; PAM sequence: CTG
ctttataacgaaacaggttg

SEQ ID NO: 218112 - DNA, 20 bp, Artificial Sequence
  Description of Artificial Sequence: Synthetic oligonucleotide
  Target: LAMA2; (-) strand; PAM type: YTN; PAM sequence: CTA
gtcccctgctttataacgaa

SEQ ID NO: 218113 - DNA, 20 bp, Artificial Sequence
  Description of Artificial Sequence: Synthetic oligonucleotide
  Target: LAMA2; (-) strand; PAM type: YTN; PAM sequence: TTC
tagtcccctgctttataacg

SEQ ID NO: 218114 - DNA, 20 bp, Artificial Sequence
  Description of Artificial Sequence: Synthetic oligonucleotide
  Target: LAMA2; (-) strand; PAM type: YTN; PAM sequence: CTA
gaaaatgagggttctagtcc

SEQ ID NO: 218115 - DNA, 20 bp, Artificial Sequence
  Description of Artificial Sequence: Synthetic oligonucleotide
  Target: LAMA2; (-) strand; PAM type: YTN; PAM sequence: CTA
gagtatactagaaaatgagg

SEQ ID NO: 218116 - DNA, 20 bp, Artificial Sequence
  Description of Artificial Sequence: Synthetic oligonucleotide
  Target: LAMA2; (-) strand; PAM type: YTN; PAM sequence: TTA
gaggcacactagagtatact

SEQ ID NO: 218117 - DNA, 20 bp, Artificial Sequence
  Description of Artificial Sequence: Synthetic oligonucleotide
  Target: LAMA2; (-) strand; PAM type: YTN; PAM sequence: TTT
agaggcacactagagtatac

SEQ ID NO: 218118 - DNA, 20 bp, Artificial Sequence
  Description of Artificial Sequence: Synthetic oligonucleotide
  Target: LAMA2; (-) strand; PAM type: YTN; PAM sequence: TTT
tagaggcacactagagtata

SEQ ID NO: 218119 - DNA, 20 bp, Artificial Sequence
  Description of Artificial Sequence: Synthetic oligonucleotide
  Target: LAMA2; (-) strand; PAM type: YTN; PAM sequence: TTG
ccattttagaggcacactag

SEQ ID NO: 218120 - DNA, 20 bp, Artificial Sequence
  Description of Artificial Sequence: Synthetic oligonucleotide
  Target: LAMA2; (-) strand; PAM type: YTN; PAM sequence: TTT
gccattttagaggcacacta

SEQ ID NO: 218121 - DNA, 20 bp, Artificial Sequence
  Description of Artificial Sequence: Synthetic oligonucleotide
  Target: LAMA2; (-) strand; PAM type: YTN; PAM sequence: CTT
tgccattttagaggcacact

SEQ ID NO: 218122 - DNA, 20 bp, Artificial Sequence
  Description of Artificial Sequence: Synthetic oligonucleotide
  Target: LAMA2; (-) strand; PAM type: YTN; PAM sequence: TTC
atgcggtaggtagaaaagac

SEQ ID NO: 218123 - DNA, 20 bp, Artificial Sequence
  Description of Artificial Sequence: Synthetic oligonucleotide
  Target: LAMA2; (-) strand; PAM type: YTN; PAM sequence: CTT
catgcggtaggtagaaaaga

SEQ ID NO: 218124 - DNA, 20 bp, Artificial Sequence
  Description of Artificial Sequence: Synthetic oligonucleotide
  Target: LAMA2; (-) strand; PAM type: YTN; PAM sequence: TTA
atccttcatgcggtaggtag

SEQ ID NO: 218125 - DNA, 20 bp, Artificial Sequence
  Description of Artificial Sequence: Synthetic oligonucleotide
  Target: LAMA2; (-) strand; PAM type: YTN; PAM sequence: CTA
ttaatccttcatgcggtagg

SEQ ID NO: 218126 - DNA, 20 bp, Artificial Sequence
  Description of Artificial Sequence: Synthetic oligonucleotide
  Target: LAMA2; (-) strand; PAM type: YTN; PAM sequence: TTG
aataacctattaatccttca

SEQ ID NO: 218127 - DNA, 20 bp, Artificial Sequence
  Description of Artificial Sequence: Synthetic oligonucleotide
  Target: LAMA2; (-) strand; PAM type: YTN; PAM sequence: TTT
gaataacctattaatccttc

SEQ ID NO: 218128 - DNA, 20 bp, Artificial Sequence
  Description of Artificial Sequence: Synthetic oligonucleotide
  Target: LAMA2; (-) strand; PAM type: YTN; PAM sequence: TTT
tgaataacctattaatcctt

SEQ ID NO: 218129 - DNA, 20 bp, Artificial Sequence
  Description of Artificial Sequence: Synthetic oligonucleotide
  Target: LAMA2; (-) strand; PAM type: YTN; PAM sequence: TTA
ttttgaataacctattaatc

SEQ ID NO: 218130 - DNA, 20 bp, Artificial Sequence
  Description of Artificial Sequence: Synthetic oligonucleotide
  Target: LAMA2; (-) strand; PAM type: YTN; PAM sequence: CTT
attttgaataacctattaat

SEQ ID NO: 218131 - DNA, 20 bp, Artificial Sequence
  Description of Artificial Sequence: Synthetic oligonucleotide
  Target: LAMA2; (-) strand; PAM type: YTN; PAM sequence: CTC
atcttattttgaataaccta

SEQ ID NO: 218132 - DNA, 20 bp, Artificial Sequence
  Description of Artificial Sequence: Synthetic oligonucleotide
  Target: LAMA2; (-) strand; PAM type: YTN; PAM sequence: TTG
gataatagctcatcttattt

SEQ ID NO: 218133 - DNA, 20 bp, Artificial Sequence
  Description of Artificial Sequence: Synthetic oligonucleotide
  Target: LAMA2; (-) strand; PAM type: YTN; PAM sequence: TTA
atcccagttggataatagct

SEQ ID NO: 218134 - DNA, 20 bp, Artificial Sequence
  Description of Artificial Sequence: Synthetic oligonucleotide
  Target: LAMA2; (-) strand; PAM type: YTN; PAM sequence: TTT
aatcccagttggataatagc

SEQ ID NO: 218135 - DNA, 20 bp, Artificial Sequence
  Description of Artificial Sequence: Synthetic oligonucleotide
  Target: LAMA2; (-) strand; PAM type: YTN; PAM sequence: TTT
taatcccagttggataatag

SEQ ID NO: 218136 - DNA, 20 bp, Artificial Sequence
  Description of Artificial Sequence: Synthetic oligonucleotide
  Target: LAMA2; (-) strand; PAM type: YTN; PAM sequence: CTT
ttaatcccagttggataata

SEQ ID NO: 218137 - DNA, 20 bp, Artificial Sequence
  Description of Artificial Sequence: Synthetic oligonucleotide
  Target: LAMA2; (-) strand; PAM type: YTN; PAM sequence: CTG
ccttttaatcccagttggat

SEQ ID NO: 218138 - DNA, 20 bp, Artificial Sequence
  Description of Artificial Sequence: Synthetic oligonucleotide
  Target: LAMA2; (-) strand; PAM type: YTN; PAM sequence: TTA
ctgccttttaatcccagttg

SEQ ID NO: 218139 - DNA, 20 bp, Artificial Sequence
  Description of Artificial Sequence: Synthetic oligonucleotide
  Target: LAMA2; (-) strand; PAM type: YTN; PAM sequence: TTT
actgccttttaatcccagtt

SEQ ID NO: 218140 - DNA, 20 bp, Artificial Sequence
  Description of Artificial Sequence: Synthetic oligonucleotide
  Target: LAMA2; (-) strand; PAM type: YTN; PAM sequence: TTT
tactgccttttaatcccagt

SEQ ID NO: 218141 - DNA, 20 bp, Artificial Sequence
  Description of Artificial Sequence: Synthetic oligonucleotide
  Target: LAMA2; (-) strand; PAM type: YTN; PAM sequence: TTA
taattttactgccttttaat

SEQ ID NO: 218142 - DNA, 20 bp, Artificial Sequence
  Description of Artificial Sequence: Synthetic oligonucleotide
  Target: LAMA2; (-) strand; PAM type: YTN; PAM sequence: TTC
attataattttactgccttt

SEQ ID NO: 218143 - DNA, 20 bp, Artificial Sequence
  Description of Artificial Sequence: Synthetic oligonucleotide
  Target: LAMA2; (-) strand; PAM type: YTN; PAM sequence: CTA
ttcattataattttactgcc

SEQ ID NO: 218144 - DNA, 20 bp, Artificial Sequence
  Description of Artificial Sequence: Synthetic oligonucleotide
  Target: LAMA2; (-) strand; PAM type: YTN; PAM sequence: TTA
cctattcattataattttac

SEQ ID NO: 218145 - DNA, 20 bp, Artificial Sequence
  Description of Artificial Sequence: Synthetic oligonucleotide
  Target: LAMA2; (-) strand; PAM type: YTN; PAM sequence: TTT
acctattcattataatttta

SEQ ID NO: 218146 - DNA, 20 bp, Artificial Sequence
  Description of Artificial Sequence: Synthetic oligonucleotide
  Target: LAMA2; (-) strand; PAM type: YTN; PAM sequence: TTA
gtgatatttacctattcatt

SEQ ID NO: 218147 - DNA, 20 bp, Artificial Sequence
  Description of Artificial Sequence: Synthetic oligonucleotide
  Target: LAMA2; (-) strand; PAM type: YTN; PAM sequence: TTT
agtgatatttacctattcat

SEQ ID NO: 218148 - DNA, 20 bp, Artificial Sequence
  Description of Artificial Sequence: Synthetic oligonucleotide
  Target: LAMA2; (-) strand; PAM type: YTN; PAM sequence: CTG
aataaatgacaaacaaacat

SEQ ID NO: 218149 - DNA, 20 bp, Artificial Sequence
  Description of Artificial Sequence: Synthetic oligonucleotide
  Target: LAMA2; (-) strand; PAM type: YTN; PAM sequence: TTG
ctgaataaatgacaaacaaa

SEQ ID NO: 218150 - DNA, 20 bp, Artificial Sequence
  Description of Artificial Sequence: Synthetic oligonucleotide
  Target: LAMA2; (-) strand; PAM type: YTN; PAM sequence: CTT
gctgaataaatgacaaacaa

SEQ ID NO: 218151 - DNA, 20 bp, Artificial Sequence
  Description of Artificial Sequence: Synthetic oligonucleotide
  Target: LAMA2; (-) strand; PAM type: YTN; PAM sequence: CTC
ttgctgaataaatgacaaac

SEQ ID NO: 218152 - DNA, 20 bp, Artificial Sequence
  Description of Artificial Sequence: Synthetic oligonucleotide
  Target: LAMA2; (-) strand; PAM type: YTN; PAM sequence: CTA
ataaatggtcaagtctcttg

SEQ ID NO: 218153 - DNA, 20 bp, Artificial Sequence
  Description of Artificial Sequence: Synthetic oligonucleotide
  Target: LAMA2; (-) strand; PAM type: YTN; PAM sequence: TTA
tacaaaagaagaactaataa

SEQ ID NO: 218154 - DNA, 20 bp, Artificial Sequence
  Description of Artificial Sequence: Synthetic oligonucleotide
  Target: LAMA2; (-) strand; PAM type: YTN; PAM sequence: TTT
atacaaaagaagaactaata

SEQ ID NO: 218155 - DNA, 20 bp, Artificial Sequence
  Description of Artificial Sequence: Synthetic oligonucleotide
  Target: LAMA2; (-) strand; PAM type: YTN; PAM sequence: TTG
aaatttatacaaaagaagaa

SEQ ID NO: 218156 - DNA, 20 bp, Artificial Sequence
  Description of Artificial Sequence: Synthetic oligonucleotide
  Target: LAMA2; (-) strand; PAM type: YTN; PAM sequence: TTG
ttgaaatttatacaaaagaa

SEQ ID NO: 218157 - DNA, 20 bp, Artificial Sequence
  Description of Artificial Sequence: Synthetic oligonucleotide
  Target: LAMA2; (-) strand; PAM type: YTN; PAM sequence: CTT
gttgaaatttatacaaaaga

SEQ ID NO: 218158 - DNA, 20 bp, Artificial Sequence
  Description of Artificial Sequence: Synthetic oligonucleotide
  Target: LAMA2; (-) strand; PAM type: YTN; PAM sequence: CTG
gcacttgttgaaatttatac

SEQ ID NO: 218159 - DNA, 20 bp, Artificial Sequence
  Description of Artificial Sequence: Synthetic oligonucleotide
  Target: LAMA2; (-) strand; PAM type: YTN; PAM sequence: TTA
tcaacaacaatactggcact

SEQ ID NO: 218160 - DNA, 20 bp, Artificial Sequence
  Description of Artificial Sequence: Synthetic oligonucleotide
  Target: LAMA2; (-) strand; PAM type: YTN; PAM sequence: TTT
atcaacaacaatactggcac

SEQ ID NO: 218161 - DNA, 20 bp, Artificial Sequence
  Description of Artificial Sequence: Synthetic oligonucleotide
  Target: LAMA2; (-) strand; PAM type: YTN; PAM sequence: TTA
tgaaaatgtgtcacagagga

SEQ ID NO: 218162 - DNA, 20 bp, Artificial Sequence
  Description of Artificial Sequence: Synthetic oligonucleotide
  Target: LAMA2; (-) strand; PAM type: YTN; PAM sequence: TTT
atgaaaatgtgtcacagagg

SEQ ID NO: 218163 - DNA, 20 bp, Artificial Sequence
  Description of Artificial Sequence: Synthetic oligonucleotide
  Target: LAMA2; (-) strand; PAM type: YTN; PAM sequence: CTA
atttatgaaaatgtgtcaca

SEQ ID NO: 218164 - DNA, 20 bp, Artificial Sequence
  Description of Artificial Sequence: Synthetic oligonucleotide
  Target: LAMA2; (-) strand; PAM type: YTN; PAM sequence: TTA
agatactaatttatgaaaat

SEQ ID NO: 218165 - DNA, 20 bp, Artificial Sequence
  Description of Artificial Sequence: Synthetic oligonucleotide
  Target: LAMA2; (-) strand; PAM type: YTN; PAM sequence: TTT
aagatactaatttatgaaaa

SEQ ID NO: 218166 - DNA, 20 bp, Artificial Sequence
  Description of Artificial Sequence: Synthetic oligonucleotide
  Target: LAMA2; (-) strand; PAM type: YTN; PAM sequence: TTA
tgtttaagatactaatttat

SEQ ID NO: 218167 - DNA, 20 bp, Artificial Sequence
  Description of Artificial Sequence: Synthetic oligonucleotide
  Target: LAMA2; (-) strand; PAM type: YTN; PAM sequence: CTG
ttatgtttaagatactaatt

SEQ ID NO: 218168 - DNA, 20 bp, Artificial Sequence
  Description of Artificial Sequence: Synthetic oligonucleotide
  Target: LAMA2; (-) strand; PAM type: YTN; PAM sequence: TTC
tgttatgtttaagatactaa

SEQ ID NO: 218169 - DNA, 20 bp, Artificial Sequence
  Description of Artificial Sequence: Synthetic oligonucleotide
  Target: LAMA2; (-) strand; PAM type: YTN; PAM sequence: TTT
ctgttatgtttaagatacta

SEQ ID NO: 218170 - DNA, 20 bp, Artificial Sequence
  Description of Artificial Sequence: Synthetic oligonucleotide
  Target: LAMA2; (-) strand; PAM type: YTN; PAM sequence: TTA
atcaaataaatgcaatcgtt

SEQ ID NO: 218171 - DNA, 20 bp, Artificial Sequence
  Description of Artificial Sequence: Synthetic oligonucleotide
  Target: LAMA2; (-) strand; PAM type: YTN; PAM sequence: TTT
aatcaaataaatgcaatcgt

SEQ ID NO: 218172 - DNA, 20 bp, Artificial Sequence
  Description of Artificial Sequence: Synthetic oligonucleotide
  Target: LAMA2; (-) strand; PAM type: YTN; PAM sequence: CTA
tagtgatttaatcaaataaa

SEQ ID NO: 218173 - DNA, 20 bp, Artificial Sequence
  Description of Artificial Sequence: Synthetic oligonucleotide
  Target: LAMA2; (-) strand; PAM type: YTN; PAM sequence: CTG
taatctatagtgatttaatc

SEQ ID NO: 218174 - DNA, 20 bp, Artificial Sequence
  Description of Artificial Sequence: Synthetic oligonucleotide
  Target: LAMA2; (-) strand; PAM type: YTN; PAM sequence: TTA
aaatgtaaaaaaaaaaaaaa

SEQ ID NO: 218175 - DNA, 20 bp, Artificial Sequence
  Description of Artificial Sequence: Synthetic oligonucleotide
  Target: LAMA2; (-) strand; PAM type: YTN; PAM sequence: TTG
aatgttaaaatgtaaaaaaa

SEQ ID NO: 218176 - DNA, 20 bp, Artificial Sequence
  Description of Artificial Sequence: Synthetic oligonucleotide
  Target: LAMA2; (-) strand; PAM type: YTN; PAM sequence: CTT
gaatgttaaaatgtaaaaaa

SEQ ID NO: 218177 - DNA, 20 bp, Artificial Sequence
  Description of Artificial Sequence: Synthetic oligonucleotide
  Target: LAMA2; (-) strand; PAM type: YTN; PAM sequence: TTA
tcttgaatgttaaaatgtaa

SEQ ID NO: 218178 - DNA, 20 bp, Artificial Sequence
  Description of Artificial Sequence: Synthetic oligonucleotide
  Target: LAMA2; (-) strand; PAM type: YTN; PAM sequence: CTT
atcttgaatgttaaaatgta

SEQ ID NO: 218179 - DNA, 20 bp, Artificial Sequence
  Description of Artificial Sequence: Synthetic oligonucleotide
  Target: LAMA2; (-) strand; PAM type: YTN; PAM sequence: CTA
gtgcttatcttgaatgttaa

SEQ ID NO: 218180 - DNA, 20 bp, Artificial Sequence
  Description of Artificial Sequence: Synthetic oligonucleotide
  Target: LAMA2; (-) strand; PAM type: YTN; PAM sequence: TTC
tagtgcttatcttgaatgtt

SEQ ID NO: 218181 - DNA, 20 bp, Artificial Sequence
  Description of Artificial Sequence: Synthetic oligonucleotide
  Target: LAMA2; (-) strand; PAM type: YTN; PAM sequence: TTT
ctagtgcttatcttgaatgt

SEQ ID NO: 218182 - DNA, 20 bp, Artificial Sequence
  Description of Artificial Sequence: Synthetic oligonucleotide
  Target: LAMA2; (-) strand; PAM type: YTN; PAM sequence: TTT
tctagtgcttatcttgaatg

SEQ ID NO: 218183 - DNA, 20 bp, Artificial Sequence
  Description of Artificial Sequence: Synthetic oligonucleotide
  Target: LAMA2; (-) strand; PAM type: YTN; PAM sequence: TTT
ttctagtgcttatcttgaat

SEQ ID NO: 218184 - DNA, 20 bp, Artificial Sequence
  Description of Artificial Sequence: Synthetic oligonucleotide
  Target: LAMA2; (-) strand; PAM type: YTN; PAM sequence: TTT
tttctagtgcttatcttgaa

SEQ ID NO: 218185 - DNA, 20 bp, Artificial Sequence
  Description of Artificial Sequence: Synthetic oligonucleotide
  Target: LAMA2; (-) strand; PAM type: YTN; PAM sequence: CTA
ttttttctagtgcttatctt

SEQ ID NO: 218186 - DNA, 20 bp, Artificial Sequence
  Description of Artificial Sequence: Synthetic oligonucleotide
  Target: LAMA2; (-) strand; PAM type: YTN; PAM sequence: TTG
ctattttttctagtgcttat

SEQ ID NO: 218187 - DNA, 20 bp, Artificial Sequence
  Description of Artificial Sequence: Synthetic oligonucleotide
  Target: LAMA2; (-) strand; PAM type: YTN; PAM sequence: TTC
caaacaaattgctatttttt

SEQ ID NO: 218188 - DNA, 20 bp, Artificial Sequence
  Description of Artificial Sequence: Synthetic oligonucleotide
  Target: LAMA2; (-) strand; PAM type: YTN; PAM sequence: CTT
ccaaacaaattgctattttt

SEQ ID NO: 218189 - DNA, 20 bp, Artificial Sequence
  Description of Artificial Sequence: Synthetic oligonucleotide
  Target: LAMA2; (-) strand; PAM type: YTN; PAM sequence: TTC
ttccaaacaaattgctattt

SEQ ID NO: 218190 - DNA, 20 bp, Artificial Sequence
  Description of Artificial Sequence: Synthetic oligonucleotide
  Target: LAMA2; (-) strand; PAM type: YTN; PAM sequence: TTT
cttccaaacaaattgctatt

SEQ ID NO: 218191 - DNA, 20 bp, Artificial Sequence
  Description of Artificial Sequence: Synthetic oligonucleotide
  Target: LAMA2; (-) strand; PAM type: YTN; PAM sequence: CTT
tcttccaaacaaattgctat

SEQ ID NO: 218192 - DNA, 20 bp, Artificial Sequence
  Description of Artificial Sequence: Synthetic oligonucleotide
  Target: LAMA2; (-) strand; PAM type: YTN; PAM sequence: CTA
ctttcttccaaacaaattgc

SEQ ID NO: 218193 - DNA, 20 bp, Artificial Sequence
  Description of Artificial Sequence: Synthetic oligonucleotide
  Target: LAMA2; (-) strand; PAM type: YTN; PAM sequence: TTA
taaaataagtagctactttc

SEQ ID NO: 218194 - DNA, 20 bp, Artificial Sequence
  Description of Artificial Sequence: Synthetic oligonucleotide
  Target: LAMA2; (-) strand; PAM type: YTN; PAM sequence: CTT
ataaaataagtagctacttt

SEQ ID NO: 218195 - DNA, 20 bp, Artificial Sequence
  Description of Artificial Sequence: Synthetic oligonucleotide
  Target: LAMA2; (-) strand; PAM type: YTN; PAM sequence: CTA
cttataaaataagtagctac

SEQ ID NO: 218196 - DNA, 20 bp, Artificial Sequence
  Description of Artificial Sequence: Synthetic oligonucleotide
  Target: LAMA2; (-) strand; PAM type: YTN; PAM sequence: CTA
agaacaatctacttataaaa

SEQ ID NO: 218197 - DNA, 20 bp, Artificial Sequence
  Description of Artificial Sequence: Synthetic oligonucleotide
  Target: LAMA2; (-) strand; PAM type: YTN; PAM sequence: TTA
gtaatacgtatctaagaaca

SEQ ID NO: 218198 - DNA, 20 bp, Artificial Sequence
  Description of Artificial Sequence: Synthetic oligonucleotide
  Target: LAMA2; (-) strand; PAM type: YTN; PAM sequence: CTT
agtaatacgtatctaagaac

SEQ ID NO: 218199 - DNA, 20 bp, Artificial Sequence
  Description of Artificial Sequence: Synthetic oligonucleotide
  Target: LAMA2; (-) strand; PAM type: YTN; PAM sequence: TTA
ataatcccttagtaatacgt

SEQ ID NO: 218200 - DNA, 20 bp, Artificial Sequence
  Description of Artificial Sequence: Synthetic oligonucleotide
  Target: LAMA2; (-) strand; PAM type: YTN; PAM sequence: CTA
tgagtaaatagaatgagaaa

SEQ ID NO: 218201 - DNA, 20 bp, Artificial Sequence
  Description of Artificial Sequence: Synthetic oligonucleotide
  Target: LAMA2; (-) strand; PAM type: YTN; PAM sequence: CTC
aaaatatgctatgagtaaat

SEQ ID NO: 218202 - DNA, 20 bp, Artificial Sequence
  Description of Artificial Sequence: Synthetic oligonucleotide
  Target: LAMA2; (-) strand; PAM type: YTN; PAM sequence: TTG
ctcaaaatatgctatgagta

SEQ ID NO: 218203 - DNA, 20 bp, Artificial Sequence
  Description of Artificial Sequence: Synthetic oligonucleotide
  Target: LAMA2; (-) strand; PAM type: YTN; PAM sequence: CTT
gctcaaaatatgctatgagt

SEQ ID NO: 218204 - DNA, 20 bp, Artificial Sequence
  Description of Artificial Sequence: Synthetic oligonucleotide
  Target: LAMA2; (-) strand; PAM type: YTN; PAM sequence: TTA
aatcacttgctcaaaatatg

SEQ ID NO: 218205 - DNA, 20 bp, Artificial Sequence
  Description of Artificial Sequence: Synthetic oligonucleotide
  Target: LAMA2; (-) strand; PAM type: YTN; PAM sequence: TTG
aggcacagcatgattaaatc

SEQ ID NO: 218206 - DNA, 20 bp, Artificial Sequence
  Description of Artificial Sequence: Synthetic oligonucleotide
  Target: LAMA2; (-) strand; PAM type: YTN; PAM sequence: CTA
gaagttgaggcacagcatga

SEQ ID NO: 218207 - DNA, 20 bp, Artificial Sequence
  Description of Artificial Sequence: Synthetic oligonucleotide
  Target: LAMA2; (-) strand; PAM type: YTN; PAM sequence: CTA
atctagaagttgaggcacag

SEQ ID NO: 218208 - DNA, 20 bp, Artificial Sequence
  Description of Artificial Sequence: Synthetic oligonucleotide
  Target: LAMA2; (-) strand; PAM type: YTN; PAM sequence: CTG
ctaatctagaagttgaggca

SEQ ID NO: 218209 - DNA, 20 bp, Artificial Sequence
  Description of Artificial Sequence: Synthetic oligonucleotide
  Target: LAMA2; (-) strand; PAM type: YTN; PAM sequence: TTA
gtctgctaatctagaagttg

SEQ ID NO: 218210 - DNA, 20 bp, Artificial Sequence
  Description of Artificial Sequence: Synthetic oligonucleotide
  Target: LAMA2; (-) strand; PAM type: YTN; PAM sequence: TTT
agtctgctaatctagaagtt

SEQ ID NO: 218211 - DNA, 20 bp, Artificial Sequence
  Description of Artificial Sequence: Synthetic oligonucleotide
  Target: LAMA2; (-) strand; PAM type: YTN; PAM sequence: TTG
taatatttagtctgctaatc

SEQ ID NO: 218212 - DNA, 20 bp, Artificial Sequence
  Description of Artificial Sequence: Synthetic oligonucleotide
  Target: LAMA2; (-) strand; PAM type: YTN; PAM sequence: TTG
ccaagatattgtaatattta

SEQ ID NO: 218213 - DNA, 20 bp, Artificial Sequence
  Description of Artificial Sequence: Synthetic oligonucleotide
  Target: LAMA2; (-) strand; PAM type: YTN; PAM sequence: CTT
gccaagatattgtaatattt

SEQ ID NO: 218214 - DNA, 20 bp, Artificial Sequence
  Description of Artificial Sequence: Synthetic oligonucleotide
  Target: LAMA2; (-) strand; PAM type: YTN; PAM sequence: TTC
ttgccaagatattgtaatat

SEQ ID NO: 218215 - DNA, 20 bp, Artificial Sequence
  Description of Artificial Sequence: Synthetic oligonucleotide
  Target: LAMA2; (-) strand; PAM type: YTN; PAM sequence: TTT
cttgccaagatattgtaata

SEQ ID NO: 218216 - DNA, 20 bp, Artificial Sequence
  Description of Artificial Sequence: Synthetic oligonucleotide
  Target: LAMA2; (-) strand; PAM type: YTN; PAM sequence: TTT
tcttgccaagatattgtaat

SEQ ID NO: 218217 - DNA, 20 bp, Artificial Sequence
  Description of Artificial Sequence: Synthetic oligonucleotide
  Target: LAMA2; (-) strand; PAM type: YTN; PAM sequence: TTA
attttcttgccaagatattg

SEQ ID NO: 218218 - DNA, 20 bp, Artificial Sequence
  Description of Artificial Sequence: Synthetic oligonucleotide
  Target: LAMA2; (-) strand; PAM type: YTN; PAM sequence: TTT
aattttcttgccaagatatt

SEQ ID NO: 218219 - DNA, 20 bp, Artificial Sequence
  Description of Artificial Sequence: Synthetic oligonucleotide
  Target: LAMA2; (-) strand; PAM type: YTN; PAM sequence: CTT
taattttcttgccaagatat

SEQ ID NO: 218220 - DNA, 20 bp, Artificial Sequence
  Description of Artificial Sequence: Synthetic oligonucleotide
  Target: LAMA2; (-) strand; PAM type: YTN; PAM sequence: TTA
ctttaattttcttgccaaga

SEQ ID NO: 218221 - DNA, 20 bp, Artificial Sequence
  Description of Artificial Sequence: Synthetic oligonucleotide
  Target: LAMA2; (-) strand; PAM type: YTN; PAM sequence: TTA
tcattactttaattttcttg

SEQ ID NO: 218222 - DNA, 20 bp, Artificial Sequence
  Description of Artificial Sequence: Synthetic oligonucleotide
  Target: LAMA2; (-) strand; PAM type: YTN; PAM sequence: TTG
ccattatcattactttaatt

SEQ ID NO: 218223 - DNA, 20 bp, Artificial Sequence
  Description of Artificial Sequence: Synthetic oligonucleotide
  Target: LAMA2; (-) strand; PAM type: YTN; PAM sequence: CTA
tattgccattatcattactt

SEQ ID NO: 218224 - DNA, 20 bp, Artificial Sequence
  Description of Artificial Sequence: Synthetic oligonucleotide
  Target: LAMA2; (-) strand; PAM type: YTN; PAM sequence: TTG
ctatattgccattatcatta

SEQ ID NO: 218225 - DNA, 20 bp, Artificial Sequence
  Description of Artificial Sequence: Synthetic oligonucleotide
  Target: LAMA2; (-) strand; PAM type: YTN; PAM sequence: TTA
gttgctatattgccattatc

SEQ ID NO: 218226 - DNA, 20 bp, Artificial Sequence
  Description of Artificial Sequence: Synthetic oligonucleotide
  Target: LAMA2; (-) strand; PAM type: YTN; PAM sequence: TTT
agttgctatattgccattat

SEQ ID NO: 218227 - DNA, 20 bp, Artificial Sequence
  Description of Artificial Sequence: Synthetic oligonucleotide
  Target: LAMA2; (-) strand; PAM type: YTN; PAM sequence: TTG
tgagatggaatttagttgct

SEQ ID NO: 218228 - DNA, 20 bp, Artificial Sequence
  Description of Artificial Sequence: Synthetic oligonucleotide
  Target: LAMA2; (-) strand; PAM type: YTN; PAM sequence: CTG
taattgtgagatggaattta

SEQ ID NO: 218229 - DNA, 20 bp, Artificial Sequence
  Description of Artificial Sequence: Synthetic oligonucleotide
  Target: LAMA2; (-) strand; PAM type: YTN; PAM sequence: TTA
atagctgtaattgtgagatg

SEQ ID NO: 218230 - DNA, 20 bp, Artificial Sequence
  Description of Artificial Sequence: Synthetic oligonucleotide
  Target: LAMA2; (-) strand; PAM type: YTN; PAM sequence: TTT
aatagctgtaattgtgagat

SEQ ID NO: 218231 - DNA, 20 bp, Artificial Sequence
  Description of Artificial Sequence: Synthetic oligonucleotide
  Target: LAMA2; (-) strand; PAM type: YTN; PAM sequence: TTT
taatagctgtaattgtgaga

SEQ ID NO: 218232 - DNA, 20 bp, Artificial Sequence
  Description of Artificial Sequence: Synthetic oligonucleotide
  Target: LAMA2; (-) strand; PAM type: YTN; PAM sequence: CTT
ttaatagctgtaattgtgag

SEQ ID NO: 218233 - DNA, 20 bp, Artificial Sequence
  Description of Artificial Sequence: Synthetic oligonucleotide
  Target: LAMA2; (-) strand; PAM type: YTN; PAM sequence: CTA
gatccttttaatagctgtaa

SEQ ID NO: 218234 - DNA, 20 bp, Artificial Sequence
  Description of Artificial Sequence: Synthetic oligonucleotide
  Target: LAMA2; (-) strand; PAM type: YTN; PAM sequence: CTC
tagatccttttaatagctgt

SEQ ID NO: 218235 - DNA, 20 bp, Artificial Sequence
  Description of Artificial Sequence: Synthetic oligonucleotide
  Target: LAMA2; (-) strand; PAM type: YTN; PAM sequence: CTG
actctagatccttttaatag

SEQ ID NO: 218236 - DNA, 20 bp, Artificial Sequence
  Description of Artificial Sequence: Synthetic oligonucleotide
  Target: LAMA2; (-) strand; PAM type: YTN; PAM sequence: TTC
atgctgactctagatccttt

SEQ ID NO: 218237 - DNA, 20 bp, Artificial Sequence
  Description of Artificial Sequence: Synthetic oligonucleotide
  Target: LAMA2; (-) strand; PAM type: YTN; PAM sequence: TTA
agttcatgctgactctagat

SEQ ID NO: 218238 - DNA, 20 bp, Artificial Sequence
  Description of Artificial Sequence: Synthetic oligonucleotide
  Target: LAMA2; (-) strand; PAM type: YTN; PAM sequence: TTT
aagttcatgctgactctaga

SEQ ID NO: 218239 - DNA, 20 bp, Artificial Sequence
  Description of Artificial Sequence: Synthetic oligonucleotide
  Target: LAMA2; (-) strand; PAM type: YTN; PAM sequence: CTT
taagttcatgctgactctag

SEQ ID NO: 218240 - DNA, 20 bp, Artificial Sequence
  Description of Artificial Sequence: Synthetic oligonucleotide
  Target: LAMA2; (-) strand; PAM type: YTN; PAM sequence: TTC
tttaagttcatgctgactct

SEQ ID NO: 218241 - DNA, 20 bp, Artificial Sequence
  Description of Artificial Sequence: Synthetic oligonucleotide
  Target: LAMA2; (-) strand; PAM type: YTN; PAM sequence: TTT
ctttaagttcatgctgactc

SEQ ID NO: 218242 - DNA, 20 bp, Artificial Sequence
  Description of Artificial Sequence: Synthetic oligonucleotide
  Target: LAMA2; (-) strand; PAM type: YTN; PAM sequence: TTT
tctttaagttcatgctgact

SEQ ID NO: 218243 - DNA, 20 bp, Artificial Sequence
  Description of Artificial Sequence: Synthetic oligonucleotide
  Target: LAMA2; (-) strand; PAM type: YTN; PAM sequence: CTT
ttctttaagttcatgctgac

SEQ ID NO: 218244 - DNA, 20 bp, Artificial Sequence
  Description of Artificial Sequence: Synthetic oligonucleotide
  Target: LAMA2; (-) strand; PAM type: YTN; PAM sequence: TTA
agcttttctttaagttcatg

SEQ ID NO: 218245 - DNA, 20 bp, Artificial Sequence
  Description of Artificial Sequence: Synthetic oligonucleotide
  Target: LAMA2; (-) strand; PAM type: YTN; PAM sequence: CTG
gaacagttaagcttttcttt

SEQ ID NO: 218246 - DNA, 20 bp, Artificial Sequence
  Description of Artificial Sequence: Synthetic oligonucleotide
  Target: LAMA2; (-) strand; PAM type: YTN; PAM sequence: TTA
tatacacgtcactggaacag

SEQ ID NO: 218247 - DNA, 20 bp, Artificial Sequence
  Description of Artificial Sequence: Synthetic oligonucleotide
  Target: LAMA2; (-) strand; PAM type: YTN; PAM sequence: TTT
atatacacgtcactggaaca

SEQ ID NO: 218248 - DNA, 20 bp, Artificial Sequence
  Description of Artificial Sequence: Synthetic oligonucleotide
  Target: LAMA2; (-) strand; PAM type: YTN; PAM sequence: TTT
tatatacacgtcactggaac

SEQ ID NO: 218249 - DNA, 20 bp, Artificial Sequence
  Description of Artificial Sequence: Synthetic oligonucleotide
  Target: LAMA2; (-) strand; PAM type: YTN; PAM sequence: TTT
ttatatacacgtcactggaa

SEQ ID NO: 218250 - DNA, 20 bp, Artificial Sequence
  Description of Artificial Sequence: Synthetic oligonucleotide
  Target: LAMA2; (-) strand; PAM type: YTN; PAM sequence: TTG
agtttttatatacacgtcac

SEQ ID NO: 218251 - DNA, 20 bp, Artificial Sequence
  Description of Artificial Sequence: Synthetic oligonucleotide
  Target: LAMA2; (-) strand; PAM type: YTN; PAM sequence: TTA
tattgagtttttatatacac

SEQ ID NO: 218252 - DNA, 20 bp, Artificial Sequence
  Description of Artificial Sequence: Synthetic oligonucleotide
  Target: LAMA2; (-) strand; PAM type: YTN; PAM sequence: TTC
gcaattatattgagttttta

SEQ ID NO: 218253 - DNA, 20 bp, Artificial Sequence
  Description of Artificial Sequence: Synthetic oligonucleotide
  Target: LAMA2; (-) strand; PAM type: YTN; PAM sequence: TTG
ttcgcaattatattgagttt

SEQ ID NO: 218254 - DNA, 20 bp, Artificial Sequence
  Description of Artificial Sequence: Synthetic oligonucleotide
  Target: LAMA2; (-) strand; PAM type: YTN; PAM sequence: TTT
gttcgcaattatattgagtt

SEQ ID NO: 218255 - DNA, 20 bp, Artificial Sequence
  Description of Artificial Sequence: Synthetic oligonucleotide
  Target: LAMA2; (-) strand; PAM type: YTN; PAM sequence: TTT
tgttcgcaattatattgagt

SEQ ID NO: 218256 - DNA, 20 bp, Artificial Sequence
  Description of Artificial Sequence: Synthetic oligonucleotide
  Target: LAMA2; (-) strand; PAM type: YTN; PAM sequence: TTT
ttgttcgcaattatattgag

SEQ ID NO: 218257 - DNA, 20 bp, Artificial Sequence
  Description of Artificial Sequence: Synthetic oligonucleotide
  Target: LAMA2; (-) strand; PAM type: YTN; PAM sequence: TTG
tatatttttgttcgcaatta

SEQ ID NO: 218258 - DNA, 20 bp, Artificial Sequence
  Description of Artificial Sequence: Synthetic oligonucleotide
  Target: LAMA2; (-) strand; PAM type: YTN; PAM sequence: TTG
ttgtatatttttgttcgcaa

SEQ ID NO: 218259 - DNA, 20 bp, Artificial Sequence
  Description of Artificial Sequence: Synthetic oligonucleotide
  Target: LAMA2; (-) strand; PAM type: YTN; PAM sequence: TTA
aattgttgtatatttttgtt

SEQ ID NO: 218260 - DNA, 20 bp, Artificial Sequence
  Description of Artificial Sequence: Synthetic oligonucleotide
  Target: LAMA2; (-) strand; PAM type: YTN; PAM sequence: TTT
aaattgttgtatatttttgt

SEQ ID NO: 218261 - DNA, 20 bp, Artificial Sequence
  Description of Artificial Sequence: Synthetic oligonucleotide
  Target: LAMA2; (-) strand; PAM type: YTN; PAM sequence: CTT
taaattgttgtatatttttg

SEQ ID NO: 218262 - DNA, 20 bp, Artificial Sequence
  Description of Artificial Sequence: Synthetic oligonucleotide
  Target: LAMA2; (-) strand; PAM type: YTN; PAM sequence: CTC
ctttaaattgttgtatattt

SEQ ID NO: 218263 - DNA, 20 bp, Artificial Sequence
  Description of Artificial Sequence: Synthetic oligonucleotide
  Target: LAMA2; (-) strand; PAM type: YTN; PAM sequence: CTG
tctcctttaaattgttgtat

SEQ ID NO: 218264 - DNA, 20 bp, Artificial Sequence
  Description of Artificial Sequence: Synthetic oligonucleotide
  Target: LAMA2; (-) strand; PAM type: YTN; PAM sequence: TTA
ctgtctcctttaaattgttg

SEQ ID NO: 218265 - DNA, 20 bp, Artificial Sequence
  Description of Artificial Sequence: Synthetic oligonucleotide
  Target: LAMA2; (-) strand; PAM type: YTN; PAM sequence: CTA
ttactgtctcctttaaattg

SEQ ID NO: 218266 - DNA, 20 bp, Artificial Sequence
  Description of Artificial Sequence: Synthetic oligonucleotide
  Target: LAMA2; (-) strand; PAM type: YTN; PAM sequence: TTG
agtccctattactgtctcct

SEQ ID NO: 218267 - DNA, 20 bp, Artificial Sequence
  Description of Artificial Sequence: Synthetic oligonucleotide
  Target: LAMA2; (-) strand; PAM type: YTN; PAM sequence: TTT
gagtccctattactgtctcc

SEQ ID NO: 218268 - DNA, 20 bp, Artificial Sequence
  Description of Artificial Sequence: Synthetic oligonucleotide
  Target: LAMA2; (-) strand; PAM type: YTN; PAM sequence: TTA
acgtttgagtccctattact

SEQ ID NO: 218269 - DNA, 20 bp, Artificial Sequence
  Description of Artificial Sequence: Synthetic oligonucleotide
  Target: LAMA2; (-) strand; PAM type: YTN; PAM sequence: TTA
ttaacgtttgagtccctatt

SEQ ID NO: 218270 - DNA, 20 bp, Artificial Sequence
  Description of Artificial Sequence: Synthetic oligonucleotide
  Target: LAMA2; (-) strand; PAM type: YTN; PAM sequence: CTT
attaacgtttgagtccctat

SEQ ID NO: 218271 - DNA, 20 bp, Artificial Sequence
  Description of Artificial Sequence: Synthetic oligonucleotide
  Target: LAMA2; (-) strand; PAM type: YTN; PAM sequence: TTA
gacatcttattaacgtttga

SEQ ID NO: 218272 - DNA, 20 bp, Artificial Sequence
  Description of Artificial Sequence: Synthetic oligonucleotide
  Target: LAMA2; (-) strand; PAM type: YTN; PAM sequence: TTT
agacatcttattaacgtttg

SEQ ID NO: 218273 - DNA, 20 bp, Artificial Sequence
  Description of Artificial Sequence: Synthetic oligonucleotide
  Target: LAMA2; (-) strand; PAM type: YTN; PAM sequence: TTT
tagacatcttattaacgttt

SEQ ID NO: 218274 - DNA, 20 bp, Artificial Sequence
  Description of Artificial Sequence: Synthetic oligonucleotide
  Target: LAMA2; (-) strand; PAM type: YTN; PAM sequence: CTA
aaatagaatgttttagacat

SEQ ID NO: 218275 - DNA, 20 bp, Artificial Sequence
  Description of Artificial Sequence: Synthetic oligonucleotide
  Target: LAMA2; (-) strand; PAM type: YTN; PAM sequence: CTG
gtaggaaaaagactaaaata

SEQ ID NO: 218276 - DNA, 20 bp, Artificial Sequence
  Description of Artificial Sequence: Synthetic oligonucleotide
  Target: LAMA2; (-) strand; PAM type: YTN; PAM sequence: CTG
gtgaaatctggtaggaaaaa

SEQ ID NO: 218277 - DNA, 20 bp, Artificial Sequence
  Description of Artificial Sequence: Synthetic oligonucleotide
  Target: LAMA2; (-) strand; PAM type: YTN; PAM sequence: TTC
tggtgaaatctggtaggaaa

SEQ ID NO: 218278 - DNA, 20 bp, Artificial Sequence
  Description of Artificial Sequence: Synthetic oligonucleotide
  Target: LAMA2; (-) strand; PAM type: YTN; PAM sequence: TTA
aaagaaataaataaaatcag

SEQ ID NO: 218279 - DNA, 20 bp, Artificial Sequence
  Description of Artificial Sequence: Synthetic oligonucleotide
  Target: LAMA2; (-) strand; PAM type: YTN; PAM sequence: TTT
aaaagaaataaataaaatca

SEQ ID NO: 218280 - DNA, 20 bp, Artificial Sequence
  Description of Artificial Sequence: Synthetic oligonucleotide
  Target: LAMA2; (-) strand; PAM type: YTN; PAM sequence: TTT
taaaagaaataaataaaatc

SEQ ID NO: 218281 - DNA, 20 bp, Artificial Sequence
  Description of Artificial Sequence: Synthetic oligonucleotide
  Target: LAMA2; (-) strand; PAM type: YTN; PAM sequence: CTA
gattttaaaagaaataaata

SEQ ID NO: 218282 - DNA, 20 bp, Artificial Sequence
  Description of Artificial Sequence: Synthetic oligonucleotide
  Target: LAMA2; (-) strand; PAM type: YTN; PAM sequence: CTG
aaacaaatcaaagggcatga

SEQ ID NO: 218283 - DNA, 20 bp, Artificial Sequence
  Description of Artificial Sequence: Synthetic oligonucleotide
  Target: LAMA2; (-) strand; PAM type: YTN; PAM sequence: TTC
tgaaacaaatcaaagggcat

SEQ ID NO: 218284 - DNA, 20 bp, Artificial Sequence
  Description of Artificial Sequence: Synthetic oligonucleotide
  Target: LAMA2; (-) strand; PAM type: YTN; PAM sequence: CTT
ctgaaacaaatcaaagggca

SEQ ID NO: 218285 - DNA, 20 bp, Artificial Sequence
  Description of Artificial Sequence: Synthetic oligonucleotide
  Target: LAMA2; (-) strand; PAM type: YTN; PAM sequence: TTC
ttctgaaacaaatcaaaggg

SEQ ID NO: 218286 - DNA, 20 bp, Artificial Sequence
  Description of Artificial Sequence: Synthetic oligonucleotide
  Target: LAMA2; (-) strand; PAM type: YTN; PAM sequence: TTT
cttctgaaacaaatcaaagg

SEQ ID NO: 218287 - DNA, 20 bp, Artificial Sequence
  Description of Artificial Sequence: Synthetic oligonucleotide
  Target: LAMA2; (-) strand; PAM type: YTN; PAM sequence: CTT
tcttctgaaacaaatcaaag

SEQ ID NO: 218288 - DNA, 20 bp, Artificial Sequence
  Description of Artificial Sequence: Synthetic oligonucleotide
  Target: LAMA2; (-) strand; PAM type: YTN; PAM sequence: CTG
ccaatcagctttcttctgaa

SEQ ID NO: 218289 - DNA, 20 bp, Artificial Sequence
  Description of Artificial Sequence: Synthetic oligonucleotide
  Target: LAMA2; (-) strand; PAM type: YTN; PAM sequence: TTA
ccccgcctgccaatcagctt

SEQ ID NO: 218290 - DNA, 20 bp, Artificial Sequence
  Description of Artificial Sequence: Synthetic oligonucleotide
  Target: LAMA2; (-) strand; PAM type: YTN; PAM sequence: TTT
accccgcctgccaatcagct

SEQ ID NO: 218291 - DNA, 20 bp, Artificial Sequence
  Description of Artificial Sequence: Synthetic oligonucleotide
  Target: LAMA2; (-) strand; PAM type: YTN; PAM sequence: TTT
taccccgcctgccaatcagc

SEQ ID NO: 218292 - DNA, 20 bp, Artificial Sequence
  Description of Artificial Sequence: Synthetic oligonucleotide
  Target: LAMA2; (-) strand; PAM type: YTN; PAM sequence: CTG
ttttaccccgcctgccaatc

SEQ ID NO: 218293 - DNA, 20 bp, Artificial Sequence
  Description of Artificial Sequence: Synthetic oligonucleotide
  Target: LAMA2; (-) strand; PAM type: YTN; PAM sequence: CTC
tgttttaccccgcctgccaa

SEQ ID NO: 218294 - DNA, 20 bp, Artificial Sequence
  Description of Artificial Sequence: Synthetic oligonucleotide
  Target: LAMA2; (-) strand; PAM type: YTN; PAM sequence: CTC
cctctgttttaccccgcctg

SEQ ID NO: 218295 - DNA, 20 bp, Artificial Sequence
  Description of Artificial Sequence: Synthetic oligonucleotide
  Target: LAMA2; (-) strand; PAM type: YTN; PAM sequence: CTG
cctccctctgttttaccccg

SEQ ID NO: 218296 - DNA, 20 bp, Artificial Sequence
  Description of Artificial Sequence: Synthetic oligonucleotide
  Target: LAMA2; (-) strand; PAM type: YTN; PAM sequence: CTG
aaaagctgcctccctctgtt

SEQ ID NO: 218297 - DNA, 20 bp, Artificial Sequence
  Description of Artificial Sequence: Synthetic oligonucleotide
  Target: LAMA2; (-) strand; PAM type: YTN; PAM sequence: CTA
ctgaaaagctgcctccctct

SEQ ID NO: 218298 - DNA, 20 bp, Artificial Sequence
  Description of Artificial Sequence: Synthetic oligonucleotide
  Target: LAMA2; (-) strand; PAM type: YTN; PAM sequence: TTG
aaaagtctactgaaaagctg

SEQ ID NO: 218299 - DNA, 20 bp, Artificial Sequence
  Description of Artificial Sequence: Synthetic oligonucleotide
  Target: LAMA2; (-) strand; PAM type: YTN; PAM sequence: TTT
gaaaagtctactgaaaagct

SEQ ID NO: 218300 - DNA, 20 bp, Artificial Sequence
  Description of Artificial Sequence: Synthetic oligonucleotide
  Target: LAMA2; (-) strand; PAM type: YTN; PAM sequence: CTC
aatatgtgtttgaaaagtct

SEQ ID NO: 218301 - DNA, 20 bp, Artificial Sequence
  Description of Artificial Sequence: Synthetic oligonucleotide
  Target: LAMA2; (-) strand; PAM type: YTN; PAM sequence: TTA
gccaggagtgagtatcacct

SEQ ID NO: 218302 - DNA, 20 bp, Artificial Sequence
  Description of Artificial Sequence: Synthetic oligonucleotide
  Target: LAMA2; (-) strand; PAM type: YTN; PAM sequence: CTG
gattagccaggagtgagtat

SEQ ID NO: 218303 - DNA, 20 bp, Artificial Sequence
  Description of Artificial Sequence: Synthetic oligonucleotide
  Target: LAMA2; (-) strand; PAM type: YTN; PAM sequence: TTC
ctggattagccaggagtgag

SEQ ID NO: 218304 - DNA, 20 bp, Artificial Sequence
  Description of Artificial Sequence: Synthetic oligonucleotide
  Target: LAMA2; (-) strand; PAM type: YTN; PAM sequence: TTA
atggcattcctggattagcc

SEQ ID NO: 218305 - DNA, 20 bp, Artificial Sequence
  Description of Artificial Sequence: Synthetic oligonucleotide
  Target: LAMA2; (-) strand; PAM type: YTN; PAM sequence: CTA
attaatggcattcctggatt

SEQ ID NO: 218306 - DNA, 20 bp, Artificial Sequence
  Description of Artificial Sequence: Synthetic oligonucleotide
  Target: LAMA2; (-) strand; PAM type: YTN; PAM sequence: TTA
actaattaatggcattcctg

SEQ ID NO: 218307 - DNA, 20 bp, Artificial Sequence
  Description of Artificial Sequence: Synthetic oligonucleotide
  Target: LAMA2; (-) strand; PAM type: YTN; PAM sequence: CTT
aactaattaatggcattcct

SEQ ID NO: 218308 - DNA, 20 bp, Artificial Sequence
  Description of Artificial Sequence: Synthetic oligonucleotide
  Target: LAMA2; (-) strand; PAM type: YTN; PAM sequence: TTA
agacatgagcttaactaatt

SEQ ID NO: 218309 - DNA, 20 bp, Artificial Sequence
  Description of Artificial Sequence: Synthetic oligonucleotide
  Target: LAMA2; (-) strand; PAM type: YTN; PAM sequence: CTA
gttaagacatgagcttaact

SEQ ID NO: 218310 - DNA, 20 bp, Artificial Sequence
  Description of Artificial Sequence: Synthetic oligonucleotide
  Target: LAMA2; (-) strand; PAM type: YTN; PAM sequence: CTC
ctagttaagacatgagctta

SEQ ID NO: 218311 - DNA, 20 bp, Artificial Sequence
  Description of Artificial Sequence: Synthetic oligonucleotide
  Target: LAMA2; (-) strand; PAM type: YTN; PAM sequence: TTG
aggagaagactcctagttaa

SEQ ID NO: 218312 - DNA, 20 bp, Artificial Sequence
  Description of Artificial Sequence: Synthetic oligonucleotide
  Target: LAMA2; (-) strand; PAM type: YTN; PAM sequence: TTA
ttgaggagaagactcctagt

SEQ ID NO: 218313 - DNA, 20 bp, Artificial Sequence
  Description of Artificial Sequence: Synthetic oligonucleotide
  Target: LAMA2; (-) strand; PAM type: YTN; PAM sequence: CTT
attgaggagaagactcctag

SEQ ID NO: 218314 - DNA, 20 bp, Artificial Sequence
  Description of Artificial Sequence: Synthetic oligonucleotide
  Target: LAMA2; (-) strand; PAM type: YTN; PAM sequence: TTG
cttattgaggagaagactcc

SEQ ID NO: 218315 - DNA, 20 bp, Artificial Sequence
  Description of Artificial Sequence: Synthetic oligonucleotide
  Target: LAMA2; (-) strand; PAM type: YTN; PAM sequence: TTG
agggatagaccaggaagaga

SEQ ID NO: 218316 - DNA, 20 bp, Artificial Sequence
  Description of Artificial Sequence: Synthetic oligonucleotide
  Target: LAMA2; (-) strand; PAM type: YTN; PAM sequence: TTT
gagggatagaccaggaagag

SEQ ID NO: 218317 - DNA, 20 bp, Artificial Sequence
  Description of Artificial Sequence: Synthetic oligonucleotide
  Target: LAMA2; (-) strand; PAM type: YTN; PAM sequence: TTT
tgagggatagaccaggaaga

SEQ ID NO: 218318 - DNA, 20 bp, Artificial Sequence
  Description of Artificial Sequence: Synthetic oligonucleotide
  Target: LAMA2; (-) strand; PAM type: YTN; PAM sequence: TTA
gttttgagggatagaccagg

SEQ ID NO: 218319 - DNA, 20 bp, Artificial Sequence
  Description of Artificial Sequence: Synthetic oligonucleotide
  Target: LAMA2; (-) strand; PAM type: YTN; PAM sequence: CTT
agttttgagggatagaccag

SEQ ID NO: 218320 - DNA, 20 bp, Artificial Sequence
  Description of Artificial Sequence: Synthetic oligonucleotide
  Target: LAMA2; (-) strand; PAM type: YTN; PAM sequence: TTC
ttagttttgagggatagacc

SEQ ID NO: 218321 - DNA, 20 bp, Artificial Sequence
  Description of Artificial Sequence: Synthetic oligonucleotide
  Target: LAMA2; (-) strand; PAM type: YTN; PAM sequence: TTG
gtaaacgcattcttagtttt

SEQ ID NO: 218322 - DNA, 20 bp, Artificial Sequence
  Description of Artificial Sequence: Synthetic oligonucleotide
  Target: LAMA2; (-) strand; PAM type: YTN; PAM sequence: TTT
ggtaaacgcattcttagttt

SEQ ID NO: 218323 - DNA, 20 bp, Artificial Sequence
  Description of Artificial Sequence: Synthetic oligonucleotide
  Target: LAMA2; (-) strand; PAM type: YTN; PAM sequence: TTG
tttggtaaacgcattcttag

SEQ ID NO: 218324 - DNA, 20 bp, Artificial Sequence
  Description of Artificial Sequence: Synthetic oligonucleotide
  Target: LAMA2; (-) strand; PAM type: YTN; PAM sequence: CTT
gtttggtaaacgcattctta

SEQ ID NO: 218325 - DNA, 20 bp, Artificial Sequence
  Description of Artificial Sequence: Synthetic oligonucleotide
  Target: LAMA2; (-) strand; PAM type: YTN; PAM sequence: CTG
taagataatcttgtttggta

SEQ ID NO: 218326 - DNA, 20 bp, Artificial Sequence
  Description of Artificial Sequence: Synthetic oligonucleotide
  Target: LAMA2; (-) strand; PAM type: YTN; PAM sequence: CTG
tagctgtaagataatcttgt

SEQ ID NO: 218327 - DNA, 20 bp, Artificial Sequence
  Description of Artificial Sequence: Synthetic oligonucleotide
  Target: LAMA2; (-) strand; PAM type: YTN; PAM sequence: CTC
tgtagctgtaagataatctt

SEQ ID NO: 218328 - DNA, 20 bp, Artificial Sequence
  Description of Artificial Sequence: Synthetic oligonucleotide
  Target: LAMA2; (-) strand; PAM type: YTN; PAM sequence: TTA
agaatatgtggagtgtgatc

SEQ ID NO: 218329 - DNA, 20 bp, Artificial Sequence
  Description of Artificial Sequence: Synthetic oligonucleotide
  Target: LAMA2; (-) strand; PAM type: YTN; PAM sequence: TTA
ggttaagaatatgtggagtg

SEQ ID NO: 218330 - DNA, 20 bp, Artificial Sequence
  Description of Artificial Sequence: Synthetic oligonucleotide
  Target: LAMA2; (-) strand; PAM type: YTN; PAM sequence: TTT
aggttaagaatatgtggagt

SEQ ID NO: 218331 - DNA, 20 bp, Artificial Sequence
  Description of Artificial Sequence: Synthetic oligonucleotide
  Target: LAMA2; (-) strand; PAM type: YTN; PAM sequence: CTG
caagatcagtgaataaaata

SEQ ID NO: 218332 - DNA, 20 bp, Artificial Sequence
  Description of Artificial Sequence: Synthetic oligonucleotide
  Target: LAMA2; (-) strand; PAM type: YTN; PAM sequence: CTC
tgcaagatcagtgaataaaa

SEQ ID NO: 218333 - DNA, 20 bp, Artificial Sequence
  Description of Artificial Sequence: Synthetic oligonucleotide
  Target: LAMA2; (-) strand; PAM type: YTN; PAM sequence: TTC
tctgcaagatcagtgaataa

SEQ ID NO: 218334 - DNA, 20 bp, Artificial Sequence
  Description of Artificial Sequence: Synthetic oligonucleotide
  Target: LAMA2; (-) strand; PAM type: YTN; PAM sequence: TTT
ctctgcaagatcagtgaata

SEQ ID NO: 218335 - DNA, 20 bp, Artificial Sequence
  Description of Artificial Sequence: Synthetic oligonucleotide
  Target: LAMA2; (-) strand; PAM type: YTN; PAM sequence: TTT
tctctgcaagatcagtgaat

SEQ ID NO: 218336 - DNA, 20 bp, Artificial Sequence
  Description of Artificial Sequence: Synthetic oligonucleotide
  Target: LAMA2; (-) strand; PAM type: YTN; PAM sequence: TTT
ttctctgcaagatcagtgaa

SEQ ID NO: 218337 - DNA, 20 bp, Artificial Sequence
  Description of Artificial Sequence: Synthetic oligonucleotide
  Target: LAMA2; (-) strand; PAM type: YTN; PAM sequence: TTG
tccaaacaaatttttctctg

SEQ ID NO: 218338 - DNA, 20 bp, Artificial Sequence
  Description of Artificial Sequence: Synthetic oligonucleotide
  Target: LAMA2; (-) strand; PAM type: YTN; PAM sequence: CTT
gtccaaacaaatttttctct

SEQ ID NO: 218339 - DNA, 20 bp, Artificial Sequence
  Description of Artificial Sequence: Synthetic oligonucleotide
  Target: LAMA2; (-) strand; PAM type: YTN; PAM sequence: TTA
acttgtccaaacaaattttt

SEQ ID NO: 218340 - DNA, 20 bp, Artificial Sequence
  Description of Artificial Sequence: Synthetic oligonucleotide
  Target: LAMA2; (-) strand; PAM type: YTN; PAM sequence: CTG
ttaacttgtccaaacaaatt

SEQ ID NO: 218341 - DNA, 20 bp, Artificial Sequence
  Description of Artificial Sequence: Synthetic oligonucleotide
  Target: LAMA2; (-) strand; PAM type: YTN; PAM sequence: TTA
aaactgttaacttgtccaaa

SEQ ID NO: 218342 - DNA, 20 bp, Artificial Sequence
  Description of Artificial Sequence: Synthetic oligonucleotide
  Target: LAMA2; (-) strand; PAM type: YTN; PAM sequence: TTC
cagttaaaactgttaacttg

SEQ ID NO: 218343 - DNA, 20 bp, Artificial Sequence
  Description of Artificial Sequence: Synthetic oligonucleotide
  Target: LAMA2; (-) strand; PAM type: YTN; PAM sequence: CTA
aaacataaattccagttaaa

SEQ ID NO: 218344 - DNA, 20 bp, Artificial Sequence
  Description of Artificial Sequence: Synthetic oligonucleotide
  Target: LAMA2; (-) strand; PAM type: YTN; PAM sequence: CTC
ctaaaacataaattccagtt

SEQ ID NO: 218345 - DNA, 20 bp, Artificial Sequence
  Description of Artificial Sequence: Synthetic oligonucleotide
  Target: LAMA2; (-) strand; PAM type: YTN; PAM sequence: CTC
ctcctaaaacataaattcca

SEQ ID NO: 218346 - DNA, 20 bp, Artificial Sequence
  Description of Artificial Sequence: Synthetic oligonucleotide
  Target: LAMA2; (-) strand; PAM type: YTN; PAM sequence: TTA
tcctcctcctaaaacataaa

SEQ ID NO: 218347 - DNA, 20 bp, Artificial Sequence
  Description of Artificial Sequence: Synthetic oligonucleotide
  Target: LAMA2; (-) strand; PAM type: YTN; PAM sequence: TTT
atcctcctcctaaaacataa

SEQ ID NO: 218348 - DNA, 20 bp, Artificial Sequence
  Description of Artificial Sequence: Synthetic oligonucleotide
  Target: LAMA2; (-) strand; PAM type: YTN; PAM sequence: TTG
catagaaatagtagtttatc

SEQ ID NO: 218349 - DNA, 20 bp, Artificial Sequence
  Description of Artificial Sequence: Synthetic oligonucleotide
  Target: LAMA2; (-) strand; PAM type: YTN; PAM sequence: TTT
gcatagaaatagtagtttat

SEQ ID NO: 218350 - DNA, 20 bp, Artificial Sequence
  Description of Artificial Sequence: Synthetic oligonucleotide
  Target: LAMA2; (-) strand; PAM type: YTN; PAM sequence: CTA
aaagtatagtaatatttgca

SEQ ID NO: 218351 - DNA, 20 bp, Artificial Sequence
  Description of Artificial Sequence: Synthetic oligonucleotide
  Target: LAMA2; (-) strand; PAM type: YTN; PAM sequence: TTC
taaaagtatagtaatatttg

SEQ ID NO: 218352 - DNA, 20 bp, Artificial Sequence
  Description of Artificial Sequence: Synthetic oligonucleotide
  Target: LAMA2; (-) strand; PAM type: YTN; PAM sequence: TTC
acatggattctaaaagtata

SEQ ID NO: 218353 - DNA, 20 bp, Artificial Sequence
  Description of Artificial Sequence: Synthetic oligonucleotide
  Target: LAMA2; (-) strand; PAM type: YTN; PAM sequence: CTA
ttcacatggattctaaaagt

SEQ ID NO: 218354 - DNA, 20 bp, Artificial Sequence
  Description of Artificial Sequence: Synthetic oligonucleotide
  Target: LAMA2; (-) strand; PAM type: YTN; PAM sequence: TTA
tactattcacatggattcta

SEQ ID NO: 218355 - DNA, 20 bp, Artificial Sequence
  Description of Artificial Sequence: Synthetic oligonucleotide
  Target: LAMA2; (-) strand; PAM type: YTN; PAM sequence: TTT
atactattcacatggattct

SEQ ID NO: 218356 - DNA, 20 bp, Artificial Sequence
  Description of Artificial Sequence: Synthetic oligonucleotide
  Target: LAMA2; (-) strand; PAM type: YTN; PAM sequence: TTT
tatactattcacatggattc

SEQ ID NO: 218357 - DNA, 20 bp, Artificial Sequence
  Description of Artificial Sequence: Synthetic oligonucleotide
  Target: LAMA2; (-) strand; PAM type: YTN; PAM sequence: TTA
gagaaaaatcattttatact

SEQ ID NO: 218358 - DNA, 20 bp, Artificial Sequence
  Description of Artificial Sequence: Synthetic oligonucleotide
  Target: LAMA2; (-) strand; PAM type: YTN; PAM sequence: TTT
agagaaaaatcattttatac

SEQ ID NO: 218359 - DNA, 20 bp, Artificial Sequence
  Description of Artificial Sequence: Synthetic oligonucleotide
  Target: LAMA2; (-) strand; PAM type: YTN; PAM sequence: CTT
tagagaaaaatcattttata

SEQ ID NO: 218360 - DNA, 20 bp, Artificial Sequence
  Description of Artificial Sequence: Synthetic oligonucleotide
  Target: LAMA2; (-) strand; PAM type: YTN; PAM sequence: CTA
ggctttagagaaaaatcatt

SEQ ID NO: 218361 - DNA, 20 bp, Artificial Sequence
  Description of Artificial Sequence: Synthetic oligonucleotide
  Target: LAMA2; (-) strand; PAM type: YTN; PAM sequence: TTC
taggctttagagaaaaatca

SEQ ID NO: 218362 - DNA, 20 bp, Artificial Sequence
  Description of Artificial Sequence: Synthetic oligonucleotide
  Target: LAMA2; (-) strand; PAM type: YTN; PAM sequence: TTA
atgattctaggctttagaga

SEQ ID NO: 218363 - DNA, 20 bp, Artificial Sequence
  Description of Artificial Sequence: Synthetic oligonucleotide
  Target: LAMA2; (-) strand; PAM type: YTN; PAM sequence: TTA
cattaatgattctaggcttt

SEQ ID NO: 218364 - DNA, 20 bp, Artificial Sequence
  Description of Artificial Sequence: Synthetic oligonucleotide
  Target: LAMA2; (-) strand; PAM type: YTN; PAM sequence: TTA
accattacattaatgattct

SEQ ID NO: 218365 - DNA, 20 bp, Artificial Sequence
  Description of Artificial Sequence: Synthetic oligonucleotide
  Target: LAMA2; (-) strand; PAM type: YTN; PAM sequence: TTT
aaccattacattaatgattc

SEQ ID NO: 218366 - DNA, 20 bp, Artificial Sequence
  Description of Artificial Sequence: Synthetic oligonucleotide
  Target: LAMA2; (-) strand; PAM type: YTN; PAM sequence: TTG
cagaaatgtttaaccattac

SEQ ID NO: 218367 - DNA, 20 bp, Artificial Sequence
  Description of Artificial Sequence: Synthetic oligonucleotide
  Target: LAMA2; (-) strand; PAM type: YTN; PAM sequence: TTA
ttgcagaaatgtttaaccat

SEQ ID NO: 218368 - DNA, 20 bp, Artificial Sequence
  Description of Artificial Sequence: Synthetic oligonucleotide
  Target: LAMA2; (-) strand; PAM type: YTN; PAM sequence: TTA
ttattgcagaaatgtttaac

SEQ ID NO: 218369 - DNA, 20 bp, Artificial Sequence
  Description of Artificial Sequence: Synthetic oligonucleotide
  Target: LAMA2; (-) strand; PAM type: YTN; PAM sequence: TTT
attattgcagaaatgtttaa

SEQ ID NO: 218370 - DNA, 20 bp, Artificial Sequence
  Description of Artificial Sequence: Synthetic oligonucleotide
  Target: LAMA2; (-) strand; PAM type: YTN; PAM sequence: TTT
tattattgcagaaatgttta

SEQ ID NO: 218371 - DNA, 20 bp, Artificial Sequence
  Description of Artificial Sequence: Synthetic oligonucleotide
  Target: LAMA2; (-) strand; PAM type: YTN; PAM sequence: TTA
tgttttattattgcagaaat

SEQ ID NO: 218372 - DNA, 20 bp, Artificial Sequence
  Description of Artificial Sequence: Synthetic oligonucleotide
  Target: LAMA2; (-) strand; PAM type: YTN; PAM sequence: TTT
atgttttattattgcagaaa

SEQ ID NO: 218373 - DNA, 20 bp, Artificial Sequence
  Description of Artificial Sequence: Synthetic oligonucleotide
  Target: LAMA2; (-) strand; PAM type: YTN; PAM sequence: TTT
tatgttttattattgcagaa

SEQ ID NO: 218374 - DNA, 20 bp, Artificial Sequence
  Description of Artificial Sequence: Synthetic oligonucleotide
  Target: LAMA2; (-) strand; PAM type: YTN; PAM sequence: TTC
cacgtattttatgttttatt

SEQ ID NO: 218375 - DNA, 20 bp, Artificial Sequence
  Description of Artificial Sequence: Synthetic oligonucleotide
  Target: LAMA2; (-) strand; PAM type: YTN; PAM sequence: TTT
ccacgtattttatgttttat

SEQ ID NO: 218376 - DNA, 20 bp, Artificial Sequence
  Description of Artificial Sequence: Synthetic oligonucleotide
  Target: LAMA2; (-) strand; PAM type: YTN; PAM sequence: TTG
aatatataaagtatttccac

SEQ ID NO: 218377 - DNA, 20 bp, Artificial Sequence
  Description of Artificial Sequence: Synthetic oligonucleotide
  Target: LAMA2; (-) strand; PAM type: YTN; PAM sequence: CTT
gaatatataaagtatttcca

SEQ ID NO: 218378 - DNA, 20 bp, Artificial Sequence
  Description of Artificial Sequence: Synthetic oligonucleotide
  Target: LAMA2; (-) strand; PAM type: YTN; PAM sequence: TTA
aaacttgaatatataaagta

SEQ ID NO: 218379 - DNA, 20 bp, Artificial Sequence
  Description of Artificial Sequence: Synthetic oligonucleotide
  Target: LAMA2; (-) strand; PAM type: YTN; PAM sequence: TTG
ttaaaacttgaatatataaa

SEQ ID NO: 218380 - DNA, 20 bp, Artificial Sequence
  Description of Artificial Sequence: Synthetic oligonucleotide
  Target: LAMA2; (-) strand; PAM type: YTN; PAM sequence: TTA
aatgattgttaaaacttgaa

SEQ ID NO: 218381 - DNA, 20 bp, Artificial Sequence
  Description of Artificial Sequence: Synthetic oligonucleotide
  Target: LAMA2; (-) strand; PAM type: YTN; PAM sequence: TTT
aaatgattgttaaaacttga

SEQ ID NO: 218382 - DNA, 20 bp, Artificial Sequence
  Description of Artificial Sequence: Synthetic oligonucleotide
  Target: LAMA2; (-) strand; PAM type: YTN; PAM sequence: TTA
atatgtttaaatgattgtta

SEQ ID NO: 218383 - DNA, 20 bp, Artificial Sequence
  Description of Artificial Sequence: Synthetic oligonucleotide
  Target: LAMA2; (-) strand; PAM type: YTN; PAM sequence: TTT
aatatgtttaaatgattgtt

SEQ ID NO: 218384 - DNA, 20 bp, Artificial Sequence
  Description of Artificial Sequence: Synthetic oligonucleotide
  Target: LAMA2; (-) strand; PAM type: YTN; PAM sequence: CTT
taatatgtttaaatgattgt

SEQ ID NO: 218385 - DNA, 20 bp, Artificial Sequence
  Description of Artificial Sequence: Synthetic oligonucleotide
  Target: LAMA2; (-) strand; PAM type: YTN; PAM sequence: TTG
gatcacctttaatatgttta

SEQ ID NO: 218386 - DNA, 20 bp, Artificial Sequence
  Description of Artificial Sequence: Synthetic oligonucleotide
  Target: LAMA2; (-) strand; PAM type: YTN; PAM sequence: CTG
aaaattggatcacctttaat

SEQ ID NO: 218387 - DNA, 20 bp, Artificial Sequence
  Description of Artificial Sequence: Synthetic oligonucleotide
  Target: LAMA2; (-) strand; PAM type: YTN; PAM sequence: TTC
aagactgaaaattggatcac

SEQ ID NO: 218388 - DNA, 20 bp, Artificial Sequence
  Description of Artificial Sequence: Synthetic oligonucleotide
  Target: LAMA2; (-) strand; PAM type: YTN; PAM sequence: CTT
caagactgaaaattggatca

SEQ ID NO: 218389 - DNA, 20 bp, Artificial Sequence
  Description of Artificial Sequence: Synthetic oligonucleotide
  Target: LAMA2; (-) strand; PAM type: YTN; PAM sequence: TTC
cttcaagactgaaaattgga

SEQ ID NO: 218390 - DNA, 20 bp, Artificial Sequence
  Description of Artificial Sequence: Synthetic oligonucleotide
  Target: LAMA2; (-) strand; PAM type: YTN; PAM sequence: CTT
ccttcaagactgaaaattgg

SEQ ID NO: 218391 - DNA, 20 bp, Artificial Sequence
  Description of Artificial Sequence: Synthetic oligonucleotide
  Target: LAMA2; (-) strand; PAM type: YTN; PAM sequence: TTG
acatgaaagaataatgacct

SEQ ID NO: 218392 - DNA, 20 bp, Artificial Sequence
  Description of Artificial Sequence: Synthetic oligonucleotide
  Target: LAMA2; (-) strand; PAM type: YTN; PAM sequence: TTA
atcagtaatcaggaatcagt

SEQ ID NO: 218393 - DNA, 20 bp, Artificial Sequence
  Description of Artificial Sequence: Synthetic oligonucleotide
  Target: LAMA2; (-) strand; PAM type: YTN; PAM sequence: TTT
aatcagtaatcaggaatcag

SEQ ID NO: 218394 - DNA, 20 bp, Artificial Sequence
  Description of Artificial Sequence: Synthetic oligonucleotide
  Target: LAMA2; (-) strand; PAM type: YTN; PAM sequence: CTT
taatcagtaatcaggaatca

SEQ ID NO: 218395 - DNA, 20 bp, Artificial Sequence
  Description of Artificial Sequence: Synthetic oligonucleotide
  Target: LAMA2; (-) strand; PAM type: YTN; PAM sequence: TTG
tacaacacatcctttaatca

SEQ ID NO: 218396 - DNA, 20 bp, Artificial Sequence
  Description of Artificial Sequence: Synthetic oligonucleotide
  Target: LAMA2; (-) strand; PAM type: YTN; PAM sequence: CTT
gtacaacacatcctttaatc

SEQ ID NO: 218397 - DNA, 20 bp, Artificial Sequence
  Description of Artificial Sequence: Synthetic oligonucleotide
  Target: LAMA2; (-) strand; PAM type: YTN; PAM sequence: CTC
cttgtacaacacatccttta

SEQ ID NO: 218398 - DNA, 20 bp, Artificial Sequence
  Description of Artificial Sequence: Synthetic oligonucleotide
  Target: LAMA2; (-) strand; PAM type: YTN; PAM sequence: TTC
cctccttgtacaacacatcc

SEQ ID NO: 218399 - DNA, 20 bp, Artificial Sequence
  Description of Artificial Sequence: Synthetic oligonucleotide
  Target: LAMA2; (-) strand; PAM type: YTN; PAM sequence: TTC
caaaattccctccttgtaca

SEQ ID NO: 218400 - DNA, 20 bp, Artificial Sequence
  Description of Artificial Sequence: Synthetic oligonucleotide
  Target: LAMA2; (-) strand; PAM type: YTN; PAM sequence: TTT
ccaaaattccctccttgtac

SEQ ID NO: 218401 - DNA, 20 bp, Artificial Sequence
  Description of Artificial Sequence: Synthetic oligonucleotide
  Target: LAMA2; (-) strand; PAM type: YTN; PAM sequence: TTT
tccaaaattccctccttgta

SEQ ID NO: 218402 - DNA, 20 bp, Artificial Sequence
  Description of Artificial Sequence: Synthetic oligonucleotide
  Target: LAMA2; (-) strand; PAM type: YTN; PAM sequence: TTG
tgaattttccaaaattccct

SEQ ID NO: 218403 - DNA, 20 bp, Artificial Sequence
  Description of Artificial Sequence: Synthetic oligonucleotide
  Target: LAMA2; (-) strand; PAM type: YTN; PAM sequence: TTT
gtgaattttccaaaattccc

SEQ ID NO: 218404 - DNA, 20 bp, Artificial Sequence
  Description of Artificial Sequence: Synthetic oligonucleotide
  Target: LAMA2; (-) strand; PAM type: YTN; PAM sequence: TTC
catgtatttgtgaattttcc

SEQ ID NO: 218405 - DNA, 20 bp, Artificial Sequence
  Description of Artificial Sequence: Synthetic oligonucleotide
  Target: LAMA2; (-) strand; PAM type: YTN; PAM sequence: TTT
ccatgtatttgtgaattttc

SEQ ID NO: 218406 - DNA, 20 bp, Artificial Sequence
  Description of Artificial Sequence: Synthetic oligonucleotide
  Target: LAMA2; (-) strand; PAM type: YTN; PAM sequence: TTA
atttccatgtatttgtgaat

SEQ ID NO: 218407 - DNA, 20 bp, Artificial Sequence
  Description of Artificial Sequence: Synthetic oligonucleotide
  Target: LAMA2; (-) strand; PAM type: YTN; PAM sequence: TTT
aatttccatgtatttgtgaa

SEQ ID NO: 218408 - DNA, 20 bp, Artificial Sequence
  Description of Artificial Sequence: Synthetic oligonucleotide
  Target: LAMA2; (-) strand; PAM type: YTN; PAM sequence: TTG
tttaatttccatgtatttgt

SEQ ID NO: 218409 - DNA, 20 bp, Artificial Sequence
  Description of Artificial Sequence: Synthetic oligonucleotide
  Target: LAMA2; (-) strand; PAM type: YTN; PAM sequence: TTG
ggagtatgttgtttaatttc

SEQ ID NO: 218410 - DNA, 20 bp, Artificial Sequence
  Description of Artificial Sequence: Synthetic oligonucleotide
  Target: LAMA2; (-) strand; PAM type: YTN; PAM sequence: TTT
gggagtatgttgtttaattt

SEQ ID NO: 218411 - DNA, 20 bp, Artificial Sequence
  Description of Artificial Sequence: Synthetic oligonucleotide
  Target: LAMA2; (-) strand; PAM type: YTN; PAM sequence: TTG
tttgggagtatgttgtttaa

SEQ ID NO: 218412 - DNA, 20 bp, Artificial Sequence
  Description of Artificial Sequence: Synthetic oligonucleotide
  Target: LAMA2; (-) strand; PAM type: YTN; PAM sequence: TTG
gttgtttgggagtatgttgt

SEQ ID NO: 218413 - DNA, 20 bp, Artificial Sequence
  Description of Artificial Sequence: Synthetic oligonucleotide
  Target: LAMA2; (-) strand; PAM type: YTN; PAM sequence: TTA
tccattggttgtttgggagt

SEQ ID NO: 218414 - DNA, 20 bp, Artificial Sequence
  Description of Artificial Sequence: Synthetic oligonucleotide
  Target: LAMA2; (-) strand; PAM type: YTN; PAM sequence: TTT
atccattggttgtttgggag

SEQ ID NO: 218415 - DNA, 20 bp, Artificial Sequence
  Description of Artificial Sequence: Synthetic oligonucleotide
  Target: LAMA2; (-) strand; PAM type: YTN; PAM sequence: CTT
tatccattggttgtttggga

SEQ ID NO: 218416 - DNA, 20 bp, Artificial Sequence
  Description of Artificial Sequence: Synthetic oligonucleotide
  Target: LAMA2; (-) strand; PAM type: YTN; PAM sequence: TTC
tttatccattggttgtttgg

SEQ ID NO: 218417 - DNA, 20 bp, Artificial Sequence
  Description of Artificial Sequence: Synthetic oligonucleotide
  Target: LAMA2; (-) strand; PAM type: YTN; PAM sequence: TTT
ctttatccattggttgtttg

SEQ ID NO: 218418 - DNA, 20 bp, Artificial Sequence
  Description of Artificial Sequence: Synthetic oligonucleotide
  Target: LAMA2; (-) strand; PAM type: YTN; PAM sequence: TTT
tctttatccattggttgttt

SEQ ID NO: 218419 - DNA, 20 bp, Artificial Sequence
  Description of Artificial Sequence: Synthetic oligonucleotide
  Target: LAMA2; (-) strand; PAM type: YTN; PAM sequence: TTT
ttctttatccattggttgtt

SEQ ID NO: 218420 - DNA, 20 bp, Artificial Sequence
  Description of Artificial Sequence: Synthetic oligonucleotide
  Target: LAMA2; (-) strand; PAM type: YTN; PAM sequence: TTT
tttctttatccattggttgt

SEQ ID NO: 218421 - DNA, 20 bp, Artificial Sequence
  Description of Artificial Sequence: Synthetic oligonucleotide
  Target: LAMA2; (-) strand; PAM type: YTN; PAM sequence: TTA
attttttctttatccattgg

SEQ ID NO: 218422 - DNA, 20 bp, Artificial Sequence
  Description of Artificial Sequence: Synthetic oligonucleotide
  Target: LAMA2; (-) strand; PAM type: YTN; PAM sequence: TTT
aattttttctttatccattg

SEQ ID NO: 218423 - DNA, 20 bp, Artificial Sequence
  Description of Artificial Sequence: Synthetic oligonucleotide
  Target: LAMA2; (-) strand; PAM type: YTN; PAM sequence: TTT
taattttttctttatccatt

SEQ ID NO: 218424 - DNA, 20 bp, Artificial Sequence
  Description of Artificial Sequence: Synthetic oligonucleotide
  Target: LAMA2; (-) strand; PAM type: YTN; PAM sequence: CTT
ttaattttttctttatccat

SEQ ID NO: 218425 - DNA, 20 bp, Artificial Sequence
  Description of Artificial Sequence: Synthetic oligonucleotide
  Target: LAMA2; (-) strand; PAM type: YTN; PAM sequence: CTC
ttttaattttttctttatcc

SEQ ID NO: 218426 - DNA, 20 bp, Artificial Sequence
  Description of Artificial Sequence: Synthetic oligonucleotide
  Target: LAMA2; (-) strand; PAM type: YTN; PAM sequence: TTC
tcttttaattttttctttat

SEQ ID NO: 218427 - DNA, 20 bp, Artificial Sequence
  Description of Artificial Sequence: Synthetic oligonucleotide
  Target: LAMA2; (-) strand; PAM type: YTN; PAM sequence: TTT
ctcttttaattttttcttta

SEQ ID NO: 218428 - DNA, 20 bp, Artificial Sequence
  Description of Artificial Sequence: Synthetic oligonucleotide
  Target: LAMA2; (-) strand; PAM type: YTN; PAM sequence: TTA
aatttctcttttaatttttt

SEQ ID NO: 218429 - DNA, 20 bp, Artificial Sequence
  Description of Artificial Sequence: Synthetic oligonucleotide
  Target: LAMA2; (-) strand; PAM type: YTN; PAM sequence: TTT
aaatttctcttttaattttt

SEQ ID NO: 218430 - DNA, 20 bp, Artificial Sequence
  Description of Artificial Sequence: Synthetic oligonucleotide
  Target: LAMA2; (-) strand; PAM type: YTN; PAM sequence: TTT
taaatttctcttttaatttt

SEQ ID NO: 218431 - DNA, 20 bp, Artificial Sequence
  Description of Artificial Sequence: Synthetic oligonucleotide
  Target: LAMA2; (-) strand; PAM type: YTN; PAM sequence: TTT
ttaaatttctcttttaattt

SEQ ID NO: 218432 - DNA, 20 bp, Artificial Sequence
  Description of Artificial Sequence: Synthetic oligonucleotide
  Target: LAMA2; (-) strand; PAM type: YTN; PAM sequence: TTA
tttttaaatttctcttttaa

SEQ ID NO: 218433 - DNA, 20 bp, Artificial Sequence
  Description of Artificial Sequence: Synthetic oligonucleotide
  Target: LAMA2; (-) strand; PAM type: YTN; PAM sequence: CTC
aagttatttttaaatttctc

SEQ ID NO: 218434 - DNA, 20 bp, Artificial Sequence
  Description of Artificial Sequence: Synthetic oligonucleotide
  Target: LAMA2; (-) strand; PAM type: YTN; PAM sequence: TTG
tctcaagttatttttaaatt

SEQ ID NO: 218435 - DNA, 20 bp, Artificial Sequence
  Description of Artificial Sequence: Synthetic oligonucleotide
  Target: LAMA2; (-) strand; PAM type: YTN; PAM sequence: TTT
gtctcaagttatttttaaat

SEQ ID NO: 218436 - DNA, 20 bp, Artificial Sequence
  Description of Artificial Sequence: Synthetic oligonucleotide
  Target: LAMA2; (-) strand; PAM type: YTN; PAM sequence: CTC
atttgtctcaagttattttt

SEQ ID NO: 218437 - DNA, 20 bp, Artificial Sequence
  Description of Artificial Sequence: Synthetic oligonucleotide
  Target: LAMA2; (-) strand; PAM type: YTN; PAM sequence: TTC
tcatttgtctcaagttattt

SEQ ID NO: 218438 - DNA, 20 bp, Artificial Sequence
  Description of Artificial Sequence: Synthetic oligonucleotide
  Target: LAMA2; (-) strand; PAM type: YTN; PAM sequence: TTA
gtgtgtccattctcatttgt

SEQ ID NO: 218439 - DNA, 20 bp, Artificial Sequence
  Description of Artificial Sequence: Synthetic oligonucleotide
  Target: LAMA2; (-) strand; PAM type: YTN; PAM sequence: TTA
tcagtgttagtgtgtccatt

SEQ ID NO: 218440 - DNA, 20 bp, Artificial Sequence
  Description of Artificial Sequence: Synthetic oligonucleotide
  Target: LAMA2; (-) strand; PAM type: YTN; PAM sequence: CTT
atcagtgttagtgtgtccat

SEQ ID NO: 218441 - DNA, 20 bp, Artificial Sequence
  Description of Artificial Sequence: Synthetic oligonucleotide
  Target: LAMA2; (-) strand; PAM type: YTN; PAM sequence: TTC
ttatcagtgttagtgtgtcc

SEQ ID NO: 218442 - DNA, 20 bp, Artificial Sequence
  Description of Artificial Sequence: Synthetic oligonucleotide
  Target: LAMA2; (-) strand; PAM type: YTN; PAM sequence: CTT
cttatcagtgttagtgtgtc

SEQ ID NO: 218443 - DNA, 20 bp, Artificial Sequence
  Description of Artificial Sequence: Synthetic oligonucleotide
  Target: LAMA2; (-) strand; PAM type: YTN; PAM sequence: TTC
ttcttatcagtgttagtgtg

SEQ ID NO: 218444 - DNA, 20 bp, Artificial Sequence
  Description of Artificial Sequence: Synthetic oligonucleotide
  Target: LAMA2; (-) strand; PAM type: YTN; PAM sequence: CTT
cttcttatcagtgttagtgt

SEQ ID NO: 218445 - DNA, 20 bp, Artificial Sequence
  Description of Artificial Sequence: Synthetic oligonucleotide
  Target: LAMA2; (-) strand; PAM type: YTN; PAM sequence: TTG
cttcttcttatcagtgttag

SEQ ID NO: 218446 - DNA, 20 bp, Artificial Sequence
  Description of Artificial Sequence: Synthetic oligonucleotide
  Target: LAMA2; (-) strand; PAM type: YTN; PAM sequence: TTT
gcttcttcttatcagtgtta

SEQ ID NO: 218447 - DNA, 20 bp, Artificial Sequence
  Description of Artificial Sequence: Synthetic oligonucleotide
  Target: LAMA2; (-) strand; PAM type: YTN; PAM sequence: TTT
tgcttcttcttatcagtgtt

SEQ ID NO: 218448 - DNA, 20 bp, Artificial Sequence
  Description of Artificial Sequence: Synthetic oligonucleotide
  Target: LAMA2; (-) strand; PAM type: YTN; PAM sequence: CTT
ttgcttcttcttatcagtgt

SEQ ID NO: 218449 - DNA, 20 bp, Artificial Sequence
  Description of Artificial Sequence: Synthetic oligonucleotide
  Target: LAMA2; (-) strand; PAM type: YTN; PAM sequence: CTG
cttttgcttcttcttatcag

SEQ ID NO: 218450 - DNA, 20 bp, Artificial Sequence
  Description of Artificial Sequence: Synthetic oligonucleotide
  Target: LAMA2; (-) strand; PAM type: YTN; PAM sequence: TTA
gaactgcttttgcttcttct

SEQ ID NO: 218451 - DNA, 20 bp, Artificial Sequence
  Description of Artificial Sequence: Synthetic oligonucleotide
  Target: LAMA2; (-) strand; PAM type: YTN; PAM sequence: CTT
agaactgcttttgcttcttc

SEQ ID NO: 218452 - DNA, 20 bp, Artificial Sequence
  Description of Artificial Sequence: Synthetic oligonucleotide
  Target: LAMA2; (-) strand; PAM type: YTN; PAM sequence: TTC
ttagaactgcttttgcttct

SEQ ID NO: 218453 - DNA, 20 bp, Artificial Sequence
  Description of Artificial Sequence: Synthetic oligonucleotide
  Target: LAMA2; (-) strand; PAM type: YTN; PAM sequence: CTT
cttagaactgcttttgcttc

SEQ ID NO: 218454 - DNA, 20 bp, Artificial Sequence
  Description of Artificial Sequence: Synthetic oligonucleotide
  Target: LAMA2; (-) strand; PAM type: YTN; PAM sequence: TTC
ttcttagaactgcttttgct

SEQ ID NO: 218455 - DNA, 20 bp, Artificial Sequence
  Description of Artificial Sequence: Synthetic oligonucleotide
  Target: LAMA2; (-) strand; PAM type: YTN; PAM sequence: TTT
cttcttagaactgcttttgc

SEQ ID NO: 218456 - DNA, 20 bp, Artificial Sequence
  Description of Artificial Sequence: Synthetic oligonucleotide
  Target: LAMA2; (-) strand; PAM type: YTN; PAM sequence: CTT
tcttcttagaactgcttttg

SEQ ID NO: 218457 - DNA, 20 bp, Artificial Sequence
  Description of Artificial Sequence: Synthetic oligonucleotide
  Target: LAMA2; (-) strand; PAM type: YTN; PAM sequence: CTA
tagcctttcttcttagaact

SEQ ID NO: 218458 - DNA, 20 bp, Artificial Sequence
  Description of Artificial Sequence: Synthetic oligonucleotide
  Target: LAMA2; (-) strand; PAM type: YTN; PAM sequence: TTA
ctatagcctttcttcttaga

SEQ ID NO: 218459 - DNA, 20 bp, Artificial Sequence
  Description of Artificial Sequence: Synthetic oligonucleotide
  Target: LAMA2; (-) strand; PAM type: YTN; PAM sequence: TTA
ttactatagcctttcttctt

SEQ ID NO: 218460 - DNA, 20 bp, Artificial Sequence
  Description of Artificial Sequence: Synthetic oligonucleotide
  Target: LAMA2; (-) strand; PAM type: YTN; PAM sequence: TTT
attactatagcctttcttct

SEQ ID NO: 218461 - DNA, 20 bp, Artificial Sequence
  Description of Artificial Sequence: Synthetic oligonucleotide
  Target: LAMA2; (-) strand; PAM type: YTN; PAM sequence: TTG
acgtaggtatttattactat

SEQ ID NO: 218462 - DNA, 20 bp, Artificial Sequence
  Description of Artificial Sequence: Synthetic oligonucleotide
  Target: LAMA2; (-) strand; PAM type: YTN; PAM sequence: TTT
gacgtaggtatttattacta

SEQ ID NO: 218463 - DNA, 20 bp, Artificial Sequence
  Description of Artificial Sequence: Synthetic oligonucleotide
  Target: LAMA2; (-) strand; PAM type: YTN; PAM sequence: TTT
tgacgtaggtatttattact

SEQ ID NO: 218464 - DNA, 20 bp, Artificial Sequence
  Description of Artificial Sequence: Synthetic oligonucleotide
  Target: LAMA2; (-) strand; PAM type: YTN; PAM sequence: TTT
ttgacgtaggtatttattac

SEQ ID NO: 218465 - DNA, 20 bp, Artificial Sequence
  Description of Artificial Sequence: Synthetic oligonucleotide
  Target: LAMA2; (-) strand; PAM type: YTN; PAM sequence: CTT
tttgacgtaggtatttatta

SEQ ID NO: 218466 - DNA, 20 bp, Artificial Sequence
  Description of Artificial Sequence: Synthetic oligonucleotide
  Target: LAMA2; (-) strand; PAM type: YTN; PAM sequence: TTC
tttttgacgtaggtatttat

SEQ ID NO: 218467 - DNA, 20 bp, Artificial Sequence
  Description of Artificial Sequence: Synthetic oligonucleotide
  Target: LAMA2; (-) strand; PAM type: YTN; PAM sequence: CTT
ctttttgacgtaggtattta

SEQ ID NO: 218468 - DNA, 20 bp, Artificial Sequence
  Description of Artificial Sequence: Synthetic oligonucleotide
  Target: LAMA2; (-) strand; PAM type: YTN; PAM sequence: TTC
ttctttttgacgtaggtatt

SEQ ID NO: 218469 - DNA, 20 bp, Artificial Sequence
  Description of Artificial Sequence: Synthetic oligonucleotide
  Target: LAMA2; (-) strand; PAM type: YTN; PAM sequence: TTT
cttctttttgacgtaggtat

SEQ ID NO: 218470 - DNA, 20 bp, Artificial Sequence
  Description of Artificial Sequence: Synthetic oligonucleotide
  Target: LAMA2; (-) strand; PAM type: YTN; PAM sequence: CTT
tcttctttttgacgtaggta

SEQ ID NO: 218471 - DNA, 20 bp, Artificial Sequence
  Description of Artificial Sequence: Synthetic oligonucleotide
  Target: LAMA2; (-) strand; PAM type: YTN; PAM sequence: TTA
gatctttcttctttttgacg

SEQ ID NO: 218472 - DNA, 20 bp, Artificial Sequence
  Description of Artificial Sequence: Synthetic oligonucleotide
  Target: LAMA2; (-) strand; PAM type: YTN; PAM sequence: TTT
agatctttcttctttttgac

SEQ ID NO: 218473 - DNA, 20 bp, Artificial Sequence
  Description of Artificial Sequence: Synthetic oligonucleotide
  Target: LAMA2; (-) strand; PAM type: YTN; PAM sequence: TTT
tagatctttcttctttttga

SEQ ID NO: 218474 - DNA, 20 bp, Artificial Sequence
  Description of Artificial Sequence: Synthetic oligonucleotide
  Target: LAMA2; (-) strand; PAM type: YTN; PAM sequence: TTA
attttagatctttcttcttt

SEQ ID NO: 218475 - DNA, 20 bp, Artificial Sequence
  Description of Artificial Sequence: Synthetic oligonucleotide
  Target: LAMA2; (-) strand; PAM type: YTN; PAM sequence: TTG
ttaattttagatctttcttc

SEQ ID NO: 218476 - DNA, 20 bp, Artificial Sequence
  Description of Artificial Sequence: Synthetic oligonucleotide
  Target: LAMA2; (-) strand; PAM type: YTN; PAM sequence: TTA
ggttgttaattttagatctt

SEQ ID NO: 218477 - DNA, 20 bp, Artificial Sequence
  Description of Artificial Sequence: Synthetic oligonucleotide
  Target: LAMA2; (-) strand; PAM type: YTN; PAM sequence: CTT
aggttgttaattttagatct

SEQ ID NO: 218478 - DNA, 20 bp, Artificial Sequence
  Description of Artificial Sequence: Synthetic oligonucleotide
  Target: LAMA2; (-) strand; PAM type: YTN; PAM sequence: TTG
aaatgtaaccttaggttgtt

SEQ ID NO: 218479 - DNA, 20 bp, Artificial Sequence
  Description of Artificial Sequence: Synthetic oligonucleotide
  Target: LAMA2; (-) strand; PAM type: YTN; PAM sequence: CTT
gaaatgtaaccttaggttgt

SEQ ID NO: 218480 - DNA, 20 bp, Artificial Sequence
  Description of Artificial Sequence: Synthetic oligonucleotide
  Target: LAMA2; (-) strand; PAM type: YTN; PAM sequence: TTC
ttgaaatgtaaccttaggtt

SEQ ID NO: 218481 - DNA, 20 bp, Artificial Sequence
  Description of Artificial Sequence: Synthetic oligonucleotide
  Target: LAMA2; (-) strand; PAM type: YTN; PAM sequence: TTT
cttgaaatgtaaccttaggt

SEQ ID NO: 218482 - DNA, 20 bp, Artificial Sequence
  Description of Artificial Sequence: Synthetic oligonucleotide
  Target: LAMA2; (-) strand; PAM type: YTN; PAM sequence: CTT
tcttgaaatgtaaccttagg

SEQ ID NO: 218483 - DNA, 20 bp, Artificial Sequence
  Description of Artificial Sequence: Synthetic oligonucleotide
  Target: LAMA2; (-) strand; PAM type: YTN; PAM sequence: TTG
ctttcttgaaatgtaacctt

SEQ ID NO: 218484 - DNA, 20 bp, Artificial Sequence
  Description of Artificial Sequence: Synthetic oligonucleotide
  Target: LAMA2; (-) strand; PAM type: YTN; PAM sequence: TTT
gctttcttgaaatgtaacct

SEQ ID NO: 218485 - DNA, 20 bp, Artificial Sequence
  Description of Artificial Sequence: Synthetic oligonucleotide
  Target: LAMA2; (-) strand; PAM type: YTN; PAM sequence: TTT
tgctttcttgaaatgtaacc

SEQ ID NO: 218486 - DNA, 20 bp, Artificial Sequence
  Description of Artificial Sequence: Synthetic oligonucleotide
  Target: LAMA2; (-) strand; PAM type: YTN; PAM sequence: TTT
ttgctttcttgaaatgtaac

SEQ ID NO: 218487 - DNA, 20 bp, Artificial Sequence
  Description of Artificial Sequence: Synthetic oligonucleotide
  Target: LAMA2; (-) strand; PAM type: YTN; PAM sequence: TTT
tttgctttcttgaaatgtaa

SEQ ID NO: 218488 - DNA, 20 bp, Artificial Sequence
  Description of Artificial Sequence: Synthetic oligonucleotide
  Target: LAMA2; (-) strand; PAM type: YTN; PAM sequence: TTT
ttttgctttcttgaaatgta

SEQ ID NO: 218489 - DNA, 20 bp, Artificial Sequence
  Description of Artificial Sequence: Synthetic oligonucleotide
  Target: LAMA2; (-) strand; PAM type: YTN; PAM sequence: TTT
tttttgctttcttgaaatgt

SEQ ID NO: 218490 - DNA, 20 bp, Artificial Sequence
  Description of Artificial Sequence: Synthetic oligonucleotide
  Target: LAMA2; (-) strand; PAM type: YTN; PAM sequence: TTT
ttttttgctttcttgaaatg

SEQ ID NO: 218491 - DNA, 20 bp, Artificial Sequence
  Description of Artificial Sequence: Synthetic oligonucleotide
  Target: LAMA2; (-) strand; PAM type: YTN; PAM sequence: TTT
tttttttgctttcttgaaat

SEQ ID NO: 218492 - DNA, 20 bp, Artificial Sequence
  Description of Artificial Sequence: Synthetic oligonucleotide
  Target: LAMA2; (-) strand; PAM type: YTN; PAM sequence: TTT
ttttttttgctttcttgaaa

SEQ ID NO: 218493 - DNA, 20 bp, Artificial Sequence
  Description of Artificial Sequence: Synthetic oligonucleotide
  Target: LAMA2; (-) strand; PAM type: YTN; PAM sequence: TTT
tttttttttgctttcttgaa

SEQ ID NO: 218494 - DNA, 20 bp, Artificial Sequence
  Description of Artificial Sequence: Synthetic oligonucleotide
  Target: LAMA2; (-) strand; PAM type: YTN; PAM sequence: TTT
ttttttttttgctttcttga

SEQ ID NO: 218495 - DNA, 20 bp, Artificial Sequence
  Description of Artificial Sequence: Synthetic oligonucleotide
  Target: LAMA2; (-) strand; PAM type: YTN; PAM sequence: TTT
tttttttttttgctttcttg

SEQ ID NO: 218496 - DNA, 20 bp, Artificial Sequence
  Description of Artificial Sequence: Synthetic oligonucleotide
  Target: LAMA2; (-) strand; PAM type: YTN; PAM sequence: TTT
ttttttttttttgctttctt

SEQ ID NO: 218497 - DNA, 20 bp, Artificial Sequence
  Description of Artificial Sequence: Synthetic oligonucleotide
  Target: LAMA2; (-) strand; PAM type: YTN; PAM sequence: TTC
atttttttttttttttgctt

SEQ ID NO: 218498 - DNA, 20 bp, Artificial Sequence
  Description of Artificial Sequence: Synthetic oligonucleotide
  Target: LAMA2; (-) strand; PAM type: YTN; PAM sequence: CTT
catttttttttttttttgct

SEQ ID NO: 218499 - DNA, 20 bp, Artificial Sequence
  Description of Artificial Sequence: Synthetic oligonucleotide
  Target: LAMA2; (-) strand; PAM type: YTN; PAM sequence: TTC
ttcatttttttttttttttg

SEQ ID NO: 218500 - DNA, 20 bp, Artificial Sequence
  Description of Artificial Sequence: Synthetic oligonucleotide
  Target: LAMA2; (-) strand; PAM type: YTN; PAM sequence: TTT
cttcattttttttttttttt

SEQ ID NO: 218501 - DNA, 20 bp, Artificial Sequence
  Description of Artificial Sequence: Synthetic oligonucleotide
  Target: LAMA2; (-) strand; PAM type: YTN; PAM sequence: TTT
tcttcatttttttttttttt

SEQ ID NO: 218502 - DNA, 20 bp, Artificial Sequence
  Description of Artificial Sequence: Synthetic oligonucleotide
  Target: LAMA2; (-) strand; PAM type: YTN; PAM sequence: CTT
ttcttcattttttttttttt

SEQ ID NO: 218503 - DNA, 20 bp, Artificial Sequence
  Description of Artificial Sequence: Synthetic oligonucleotide
  Target: LAMA2; (-) strand; PAM type: YTN; PAM sequence: TTA
tcttttcttcattttttttt

SEQ ID NO: 218504 - DNA, 20 bp, Artificial Sequence
  Description of Artificial Sequence: Synthetic oligonucleotide
  Target: LAMA2; (-) strand; PAM type: YTN; PAM sequence: TTT
atcttttcttcatttttttt

SEQ ID NO: 218505 - DNA, 20 bp, Artificial Sequence
  Description of Artificial Sequence: Synthetic oligonucleotide
  Target: LAMA2; (-) strand; PAM type: YTN; PAM sequence: TTT
tatcttttcttcattttttt

SEQ ID NO: 218506 - DNA, 20 bp, Artificial Sequence
  Description of Artificial Sequence: Synthetic oligonucleotide
  Target: LAMA2; (-) strand; PAM type: YTN; PAM sequence: CTT
ttatcttttcttcatttttt

SEQ ID NO: 218507 - DNA, 20 bp, Artificial Sequence
  Description of Artificial Sequence: Synthetic oligonucleotide
  Target: LAMA2; (-) strand; PAM type: YTN; PAM sequence: TTC
ttttatcttttcttcatttt

SEQ ID NO: 218508 - DNA, 20 bp, Artificial Sequence
  Description of Artificial Sequence: Synthetic oligonucleotide
  Target: LAMA2; (-) strand; PAM type: YTN; PAM sequence: TTT
cttttatcttttcttcattt

SEQ ID NO: 218509 - DNA, 20 bp, Artificial Sequence
  Description of Artificial Sequence: Synthetic oligonucleotide
  Target: LAMA2; (-) strand; PAM type: YTN; PAM sequence: CTT
tcttttatcttttcttcatt

SEQ ID NO: 218510 - DNA, 20 bp, Artificial Sequence
  Description of Artificial Sequence: Synthetic oligonucleotide
  Target: LAMA2; (-) strand; PAM type: YTN; PAM sequence: TTC
tttcttttatcttttcttca

SEQ ID NO: 218511 - DNA, 20 bp, Artificial Sequence
  Description of Artificial Sequence: Synthetic oligonucleotide
  Target: LAMA2; (-) strand; PAM type: YTN; PAM sequence: TTG
ttctttcttttatcttttct

SEQ ID NO: 218512 - DNA, 20 bp, Artificial Sequence
  Description of Artificial Sequence: Synthetic oligonucleotide
  Target: LAMA2; (-) strand; PAM type: YTN; PAM sequence: TTT
gttctttcttttatcttttc

SEQ ID NO: 218513 - DNA, 20 bp, Artificial Sequence
  Description of Artificial Sequence: Synthetic oligonucleotide
  Target: LAMA2; (-) strand; PAM type: YTN; PAM sequence: CTA
gtttgttctttcttttatct

SEQ ID NO: 218514 - DNA, 20 bp, Artificial Sequence
  Description of Artificial Sequence: Synthetic oligonucleotide
  Target: LAMA2; (-) strand; PAM type: YTN; PAM sequence: CTA
ggcctagtttgttctttctt

SEQ ID NO: 218515 - DNA, 20 bp, Artificial Sequence
  Description of Artificial Sequence: Synthetic oligonucleotide
  Target: LAMA2; (-) strand; PAM type: YTN; PAM sequence: TTC
taggcctagtttgttctttc

SEQ ID NO: 218516 - DNA, 20 bp, Artificial Sequence
  Description of Artificial Sequence: Synthetic oligonucleotide
  Target: LAMA2; (-) strand; PAM type: YTN; PAM sequence: CTT
ctaggcctagtttgttcttt

SEQ ID NO: 218517 - DNA, 20 bp, Artificial Sequence
  Description of Artificial Sequence: Synthetic oligonucleotide
  Target: LAMA2; (-) strand; PAM type: YTN; PAM sequence: CTA
cttctaggcctagtttgttc

SEQ ID NO: 218518 - DNA, 20 bp, Artificial Sequence
  Description of Artificial Sequence: Synthetic oligonucleotide
  Target: LAMA2; (-) strand; PAM type: YTN; PAM sequence: CTG
ctacttctaggcctagtttg

SEQ ID NO: 218519 - DNA, 20 bp, Artificial Sequence
  Description of Artificial Sequence: Synthetic oligonucleotide
  Target: LAMA2; (-) strand; PAM type: YTN; PAM sequence: TTC
tgctacttctaggcctagtt

SEQ ID NO: 218520 - DNA, 20 bp, Artificial Sequence
  Description of Artificial Sequence: Synthetic oligonucleotide
  Target: LAMA2; (-) strand; PAM type: YTN; PAM sequence: TTT
ctgctacttctaggcctagt

SEQ ID NO: 218521 - DNA, 20 bp, Artificial Sequence
  Description of Artificial Sequence: Synthetic oligonucleotide
  Target: LAMA2; (-) strand; PAM type: YTN; PAM sequence: CTT
tctgctacttctaggcctag

SEQ ID NO: 218522 - DNA, 20 bp, Artificial Sequence
  Description of Artificial Sequence: Synthetic oligonucleotide
  Target: LAMA2; (-) strand; PAM type: YTN; PAM sequence: TTC
tttctgctacttctaggcct

SEQ ID NO: 218523 - DNA, 20 bp, Artificial Sequence
  Description of Artificial Sequence: Synthetic oligonucleotide
  Target: LAMA2; (-) strand; PAM type: YTN; PAM sequence: CTT
ctttctgctacttctaggcc

SEQ ID NO: 218524 - DNA, 20 bp, Artificial Sequence
  Description of Artificial Sequence: Synthetic oligonucleotide
  Target: LAMA2; (-) strand; PAM type: YTN; PAM sequence: TTC
cttctttctgctacttctag

SEQ ID NO: 218525 - DNA, 20 bp, Artificial Sequence
  Description of Artificial Sequence: Synthetic oligonucleotide
  Target: LAMA2; (-) strand; PAM type: YTN; PAM sequence: TTT
ccttctttctgctacttcta

SEQ ID NO: 218526 - DNA, 20 bp, Artificial Sequence
  Description of Artificial Sequence: Synthetic oligonucleotide
  Target: LAMA2; (-) strand; PAM type: YTN; PAM sequence: TTA
tttccttctttctgctactt

SEQ ID NO: 218527 - DNA, 20 bp, Artificial Sequence
  Description of Artificial Sequence: Synthetic oligonucleotide
  Target: LAMA2; (-) strand; PAM type: YTN; PAM sequence: TTA
ttatttccttctttctgcta

SEQ ID NO: 218528 - DNA, 20 bp, Artificial Sequence
  Description of Artificial Sequence: Synthetic oligonucleotide
  Target: LAMA2; (-) strand; PAM type: YTN; PAM sequence: TTT
attatttccttctttctgct

SEQ ID NO: 218529 - DNA, 20 bp, Artificial Sequence
  Description of Artificial Sequence: Synthetic oligonucleotide
  Target: LAMA2; (-) strand; PAM type: YTN; PAM sequence: CTT
tattatttccttctttctgc

SEQ ID NO: 218530 - DNA, 20 bp, Artificial Sequence
  Description of Artificial Sequence: Synthetic oligonucleotide
  Target: LAMA2; (-) strand; PAM type: YTN; PAM sequence: CTA
cccagacctttattatttcc

SEQ ID NO: 218531 - DNA, 20 bp, Artificial Sequence
  Description of Artificial Sequence: Synthetic oligonucleotide
  Target: LAMA2; (-) strand; PAM type: YTN; PAM sequence: TTC
tacccagacctttattattt

SEQ ID NO: 218532 - DNA, 20 bp, Artificial Sequence
  Description of Artificial Sequence: Synthetic oligonucleotide
  Target: LAMA2; (-) strand; PAM type: YTN; PAM sequence: TTT
ctacccagacctttattatt

SEQ ID NO: 218533 - DNA, 20 bp, Artificial Sequence
  Description of Artificial Sequence: Synthetic oligonucleotide
  Target: LAMA2; (-) strand; PAM type: YTN; PAM sequence: TTA
tttctacccagacctttatt

SEQ ID NO: 218534 - DNA, 20 bp, Artificial Sequence
  Description of Artificial Sequence: Synthetic oligonucleotide
  Target: LAMA2; (-) strand; PAM type: YTN; PAM sequence: TTT
atttctacccagacctttat

SEQ ID NO: 218535 - DNA, 20 bp, Artificial Sequence
  Description of Artificial Sequence: Synthetic oligonucleotide
  Target: LAMA2; (-) strand; PAM type: YTN; PAM sequence: TTC
atttatttctacccagacct

SEQ ID NO: 218536 - DNA, 20 bp, Artificial Sequence
  Description of Artificial Sequence: Synthetic oligonucleotide
  Target: LAMA2; (-) strand; PAM type: YTN; PAM sequence: TTT
catttatttctacccagacc

SEQ ID NO: 218537 - DNA, 20 bp, Artificial Sequence
  Description of Artificial Sequence: Synthetic oligonucleotide
  Target: LAMA2; (-) strand; PAM type: YTN; PAM sequence: CTA
tttcatttatttctacccag

SEQ ID NO: 218538 - DNA, 20 bp, Artificial Sequence
  Description of Artificial Sequence: Synthetic oligonucleotide
  Target: LAMA2; (-) strand; PAM type: YTN; PAM sequence: CTC
tatttcatttatttctaccc

SEQ ID NO: 218539 - DNA, 20 bp, Artificial Sequence
  Description of Artificial Sequence: Synthetic oligonucleotide
  Target: LAMA2; (-) strand; PAM type: YTN; PAM sequence: CTA
gtctctatttcatttatttc

SEQ ID NO: 218540 - DNA, 20 bp, Artificial Sequence
  Description of Artificial Sequence: Synthetic oligonucleotide
  Target: LAMA2; (-) strand; PAM type: YTN; PAM sequence: TTC
cctagtctctatttcattta

SEQ ID NO: 218541 - DNA, 20 bp, Artificial Sequence
  Description of Artificial Sequence: Synthetic oligonucleotide
  Target: LAMA2; (-) strand; PAM type: YTN; PAM sequence: TTT
ccctagtctctatttcattt

SEQ ID NO: 218542 - DNA, 20 bp, Artificial Sequence
  Description of Artificial Sequence: Synthetic oligonucleotide
  Target: LAMA2; (-) strand; PAM type: YTN; PAM sequence: TTG
tttccctagtctctatttca

SEQ ID NO: 218543 - DNA, 20 bp, Artificial Sequence
  Description of Artificial Sequence: Synthetic oligonucleotide
  Target: LAMA2; (-) strand; PAM type: YTN; PAM sequence: TTC
cattgtttccctagtctcta

SEQ ID NO: 218544 - DNA, 20 bp, Artificial Sequence
  Description of Artificial Sequence: Synthetic oligonucleotide
  Target: LAMA2; (-) strand; PAM type: YTN; PAM sequence: CTT
ccattgtttccctagtctct

SEQ ID NO: 218545 - DNA, 20 bp, Artificial Sequence
  Description of Artificial Sequence: Synthetic oligonucleotide
  Target: LAMA2; (-) strand; PAM type: YTN; PAM sequence: CTC
ttccattgtttccctagtct

SEQ ID NO: 218546 - DNA, 20 bp, Artificial Sequence
  Description of Artificial Sequence: Synthetic oligonucleotide
  Target: LAMA2; (-) strand; PAM type: YTN; PAM sequence: CTA
atctcttccattgtttccct

SEQ ID NO: 218547 - DNA, 20 bp, Artificial Sequence
  Description of Artificial Sequence: Synthetic oligonucleotide
  Target: LAMA2; (-) strand; PAM type: YTN; PAM sequence: TTG
ctaatctcttccattgtttc

SEQ ID NO: 218548 - DNA, 20 bp, Artificial Sequence
  Description of Artificial Sequence: Synthetic oligonucleotide
  Target: LAMA2; (-) strand; PAM type: YTN; PAM sequence: TTT
gctaatctcttccattgttt

SEQ ID NO: 218549 - DNA, 20 bp, Artificial Sequence
  Description of Artificial Sequence: Synthetic oligonucleotide
  Target: LAMA2; (-) strand; PAM type: YTN; PAM sequence: TTT
tgctaatctcttccattgtt

SEQ ID NO: 218550 - DNA, 20 bp, Artificial Sequence
  Description of Artificial Sequence: Synthetic oligonucleotide
  Target: LAMA2; (-) strand; PAM type: YTN; PAM sequence: TTC
caaaacccaagtgacagttt

SEQ ID NO: 218551 - DNA, 20 bp, Artificial Sequence
  Description of Artificial Sequence: Synthetic oligonucleotide
  Target: LAMA2; (-) strand; PAM type: YTN; PAM sequence: TTT
ccaaaacccaagtgacagtt

SEQ ID NO: 218552 - DNA, 20 bp, Artificial Sequence
  Description of Artificial Sequence: Synthetic oligonucleotide
  Target: LAMA2; (-) strand; PAM type: YTN; PAM sequence: TTT
tccaaaacccaagtgacagt

SEQ ID NO: 218553 - DNA, 20 bp, Artificial Sequence
  Description of Artificial Sequence: Synthetic oligonucleotide
  Target: LAMA2; (-) strand; PAM type: YTN; PAM sequence: TTA
tattttccaaaacccaagtg

SEQ ID NO: 218554 - DNA, 20 bp, Artificial Sequence
  Description of Artificial Sequence: Synthetic oligonucleotide
  Target: LAMA2; (-) strand; PAM type: YTN; PAM sequence: CTT
atattttccaaaacccaagt

SEQ ID NO: 218555 - DNA, 20 bp, Artificial Sequence
  Description of Artificial Sequence: Synthetic oligonucleotide
  Target: LAMA2; (-) strand; PAM type: YTN; PAM sequence: TTA
gcttatattttccaaaaccc

SEQ ID NO: 218556 - DNA, 20 bp, Artificial Sequence
  Description of Artificial Sequence: Synthetic oligonucleotide
  Target: LAMA2; (-) strand; PAM type: YTN; PAM sequence: TTT
agcttatattttccaaaacc

SEQ ID NO: 218557 - DNA, 20 bp, Artificial Sequence
  Description of Artificial Sequence: Synthetic oligonucleotide
  Target: LAMA2; (-) strand; PAM type: YTN; PAM sequence: TTG
tcaatttagcttatattttc

SEQ ID NO: 218558 - DNA, 20 bp, Artificial Sequence
  Description of Artificial Sequence: Synthetic oligonucleotide
  Target: LAMA2; (-) strand; PAM type: YTN; PAM sequence: TTT
gtcaatttagcttatatttt

SEQ ID NO: 218559 - DNA, 20 bp, Artificial Sequence
  Description of Artificial Sequence: Synthetic oligonucleotide
  Target: LAMA2; (-) strand; PAM type: YTN; PAM sequence: TTT
tgtcaatttagcttatattt

SEQ ID NO: 218560 - DNA, 20 bp, Artificial Sequence
  Description of Artificial Sequence: Synthetic oligonucleotide
  Target: LAMA2; (-) strand; PAM type: YTN; PAM sequence: CTT
ttgtcaatttagcttatatt

SEQ ID NO: 218561 - DNA, 20 bp, Artificial Sequence
  Description of Artificial Sequence: Synthetic oligonucleotide
  Target: LAMA2; (-) strand; PAM type: YTN; PAM sequence: CTA
aacttttgtcaatttagctt

SEQ ID NO: 218562 - DNA, 20 bp, Artificial Sequence
  Description of Artificial Sequence: Synthetic oligonucleotide
  Target: LAMA2; (-) strand; PAM type: YTN; PAM sequence: TTA
gctaaacttttgtcaattta

SEQ ID NO: 218563 - DNA, 20 bp, Artificial Sequence
  Description of Artificial Sequence: Synthetic oligonucleotide
  Target: LAMA2; (-) strand; PAM type: YTN; PAM sequence: TTT
agctaaacttttgtcaattt

SEQ ID NO: 218564 - DNA, 20 bp, Artificial Sequence
  Description of Artificial Sequence: Synthetic oligonucleotide
  Target: LAMA2; (-) strand; PAM type: YTN; PAM sequence: TTA
gaaagtttagctaaactttt

SEQ ID NO: 218565 - DNA, 20 bp, Artificial Sequence
  Description of Artificial Sequence: Synthetic oligonucleotide
  Target: LAMA2; (-) strand; PAM type: YTN; PAM sequence: CTT
agaaagtttagctaaacttt

SEQ ID NO: 218566 - DNA, 20 bp, Artificial Sequence
  Description of Artificial Sequence: Synthetic oligonucleotide
  Target: LAMA2; (-) strand; PAM type: YTN; PAM sequence: TTC
ttagaaagtttagctaaact

SEQ ID NO: 218567 - DNA, 20 bp, Artificial Sequence
  Description of Artificial Sequence: Synthetic oligonucleotide
  Target: LAMA2; (-) strand; PAM type: YTN; PAM sequence: TTT
cttagaaagtttagctaaac

SEQ ID NO: 218568 - DNA, 20 bp, Artificial Sequence
  Description of Artificial Sequence: Synthetic oligonucleotide
  Target: LAMA2; (-) strand; PAM type: YTN; PAM sequence: TTT
tcttagaaagtttagctaaa

SEQ ID NO: 218569 - DNA, 20 bp, Artificial Sequence
  Description of Artificial Sequence: Synthetic oligonucleotide
  Target: LAMA2; (-) strand; PAM type: YTN; PAM sequence: TTT
ttcttagaaagtttagctaa

SEQ ID NO: 218570 - DNA, 20 bp, Artificial Sequence
  Description of Artificial Sequence: Synthetic oligonucleotide
  Target: LAMA2; (-) strand; PAM type: YTN; PAM sequence: TTT
tttcttagaaagtttagcta

SEQ ID NO: 218571 - DNA, 20 bp, Artificial Sequence
  Description of Artificial Sequence: Synthetic oligonucleotide
  Target: LAMA2; (-) strand; PAM type: YTN; PAM sequence: CTT
ttttcttagaaagtttagct

SEQ ID NO: 218572 - DNA, 20 bp, Artificial Sequence
  Description of Artificial Sequence: Synthetic oligonucleotide
  Target: LAMA2; (-) strand; PAM type: YTN; PAM sequence: CTG
atcttttttcttagaaagtt

SEQ ID NO: 218573 - DNA, 20 bp, Artificial Sequence
  Description of Artificial Sequence: Synthetic oligonucleotide
  Target: LAMA2; (-) strand; PAM type: YTN; PAM sequence: TTC
tgatcttttttcttagaaag

SEQ ID NO: 218574 - DNA, 20 bp, Artificial Sequence
  Description of Artificial Sequence: Synthetic oligonucleotide
  Target: LAMA2; (-) strand; PAM type: YTN; PAM sequence: TTC
aattctgatcttttttctta

SEQ ID NO: 218575 - DNA, 20 bp, Artificial Sequence
  Description of Artificial Sequence: Synthetic oligonucleotide
  Target: LAMA2; (-) strand; PAM type: YTN; PAM sequence: TTT
caattctgatcttttttctt

SEQ ID NO: 218576 - DNA, 20 bp, Artificial Sequence
  Description of Artificial Sequence: Synthetic oligonucleotide
  Target: LAMA2; (-) strand; PAM type: YTN; PAM sequence: CTT
tcaattctgatcttttttct

SEQ ID NO: 218577 - DNA, 20 bp, Artificial Sequence
  Description of Artificial Sequence: Synthetic oligonucleotide
  Target: LAMA2; (-) strand; PAM type: YTN; PAM sequence: CTC
tttcaattctgatctttttt

SEQ ID NO: 218578 - DNA, 20 bp, Artificial Sequence
  Description of Artificial Sequence: Synthetic oligonucleotide
  Target: LAMA2; (-) strand; PAM type: YTN; PAM sequence: CTC
ctctttcaattctgatcttt

SEQ ID NO: 218579 - DNA, 20 bp, Artificial Sequence
  Description of Artificial Sequence: Synthetic oligonucleotide
  Target: LAMA2; (-) strand; PAM type: YTN; PAM sequence: CTG
aagtatcagtagtaatgtct

SEQ ID NO: 218580 - DNA, 20 bp, Artificial Sequence
  Description of Artificial Sequence: Synthetic oligonucleotide
  Target: LAMA2; (-) strand; PAM type: YTN; PAM sequence: TTC
tgaagtatcagtagtaatgt

SEQ ID NO: 218581 - DNA, 20 bp, Artificial Sequence
  Description of Artificial Sequence: Synthetic oligonucleotide
  Target: LAMA2; (-) strand; PAM type: YTN; PAM sequence: TTT
ctgaagtatcagtagtaatg

SEQ ID NO: 218582 - DNA, 20 bp, Artificial Sequence
  Description of Artificial Sequence: Synthetic oligonucleotide
  Target: LAMA2; (-) strand; PAM type: YTN; PAM sequence: TTG
tatttctgaagtatcagtag

SEQ ID NO: 218583 - DNA, 20 bp, Artificial Sequence
  Description of Artificial Sequence: Synthetic oligonucleotide
  Target: LAMA2; (-) strand; PAM type: YTN; PAM sequence: TTT
gtatttctgaagtatcagta

SEQ ID NO: 218584 - DNA, 20 bp, Artificial Sequence
  Description of Artificial Sequence: Synthetic oligonucleotide
  Target: LAMA2; (-) strand; PAM type: YTN; PAM sequence: CTT
tgtatttctgaagtatcagt

SEQ ID NO: 218585 - DNA, 20 bp, Artificial Sequence
  Description of Artificial Sequence: Synthetic oligonucleotide
  Target: LAMA2; (-) strand; PAM type: YTN; PAM sequence: TTA
tgatcctttgtatttctgaa

SEQ ID NO: 218586 - DNA, 20 bp, Artificial Sequence
  Description of Artificial Sequence: Synthetic oligonucleotide
  Target: LAMA2; (-) strand; PAM type: YTN; PAM sequence: CTT
atgatcctttgtatttctga

SEQ ID NO: 218587 - DNA, 20 bp, Artificial Sequence
  Description of Artificial Sequence: Synthetic oligonucleotide
  Target: LAMA2; (-) strand; PAM type: YTN; PAM sequence: TTG
agagtagtcacttatgatcc

SEQ ID NO: 218588 - DNA, 20 bp, Artificial Sequence
  Description of Artificial Sequence: Synthetic oligonucleotide
  Target: LAMA2; (-) strand; PAM type: YTN; PAM sequence: TTG
ttgagagtagtcacttatga

SEQ ID NO: 218589 - DNA, 20 bp, Artificial Sequence
  Description of Artificial Sequence: Synthetic oligonucleotide
  Target: LAMA2; (-) strand; PAM type: YTN; PAM sequence: TTG
gcatataattgttgagagta

SEQ ID NO: 218590 - DNA, 20 bp, Artificial Sequence
  Description of Artificial Sequence: Synthetic oligonucleotide
  Target: LAMA2; (-) strand; PAM type: YTN; PAM sequence: TTG
ttggcatataattgttgaga

SEQ ID NO: 218591 - DNA, 20 bp, Artificial Sequence
  Description of Artificial Sequence: Synthetic oligonucleotide
  Target: LAMA2; (-) strand; PAM type: YTN; PAM sequence: TTT
gttggcatataattgttgag

SEQ ID NO: 218592 - DNA, 20 bp, Artificial Sequence
  Description of Artificial Sequence: Synthetic oligonucleotide
  Target: LAMA2; (-) strand; PAM type: YTN; PAM sequence: TTA
tccagtttgttggcatataa

SEQ ID NO: 218593 - DNA, 20 bp, Artificial Sequence
  Description of Artificial Sequence: Synthetic oligonucleotide
  Target: LAMA2; (-) strand; PAM type: YTN; PAM sequence: CTA
ggttatccagtttgttggca

SEQ ID NO: 218594 - DNA, 20 bp, Artificial Sequence
  Description of Artificial Sequence: Synthetic oligonucleotide
  Target: LAMA2; (-) strand; PAM type: YTN; PAM sequence: TTC
taggttatccagtttgttgg

SEQ ID NO: 218595 - DNA, 20 bp, Artificial Sequence
  Description of Artificial Sequence: Synthetic oligonucleotide
  Target: LAMA2; (-) strand; PAM type: YTN; PAM sequence: TTT
ctaggttatccagtttgttg

SEQ ID NO: 218596 - DNA, 20 bp, Artificial Sequence
  Description of Artificial Sequence: Synthetic oligonucleotide
  Target: LAMA2; (-) strand; PAM type: YTN; PAM sequence: TTT
tctaggttatccagtttgtt

SEQ ID NO: 218597 - DNA, 20 bp, Artificial Sequence
  Description of Artificial Sequence: Synthetic oligonucleotide
  Target: LAMA2; (-) strand; PAM type: YTN; PAM sequence: TTT
ttctaggttatccagtttgt

SEQ ID NO: 218598 - DNA, 20 bp, Artificial Sequence
  Description of Artificial Sequence: Synthetic oligonucleotide
  Target: LAMA2; (-) strand; PAM type: YTN; PAM sequence: TTT
tttctaggttatccagtttg

SEQ ID NO: 218599 - DNA, 20 bp, Artificial Sequence
  Description of Artificial Sequence: Synthetic oligonucleotide
  Target: LAMA2; (-) strand; PAM type: YTN; PAM sequence: TTC
cattttttctaggttatcca

SEQ ID NO: 218600 - DNA, 20 bp, Artificial Sequence
  Description of Artificial Sequence: Synthetic oligonucleotide
  Target: LAMA2; (-) strand; PAM type: YTN; PAM sequence: TTT
ccattttttctaggttatcc

SEQ ID NO: 218601 - DNA, 20 bp, Artificial Sequence
  Description of Artificial Sequence: Synthetic oligonucleotide
  Target: LAMA2; (-) strand; PAM type: YTN; PAM sequence: TTT
tccattttttctaggttatc

SEQ ID NO: 218602 - DNA, 20 bp, Artificial Sequence
  Description of Artificial Sequence: Synthetic oligonucleotide
  Target: LAMA2; (-) strand; PAM type: YTN; PAM sequence: TTT
ttccattttttctaggttat

SEQ ID NO: 218603 - DNA, 20 bp, Artificial Sequence
  Description of Artificial Sequence: Synthetic oligonucleotide
  Target: LAMA2; (-) strand; PAM type: YTN; PAM sequence: CTA
ggaatttttccattttttct

SEQ ID NO: 218604 - DNA, 20 bp, Artificial Sequence
  Description of Artificial Sequence: Synthetic oligonucleotide
  Target: LAMA2; (-) strand; PAM type: YTN; PAM sequence: TTA
gtaggtctaggaatttttcc

SEQ ID NO: 218605 - DNA, 20 bp, Artificial Sequence
  Description of Artificial Sequence: Synthetic oligonucleotide
  Target: LAMA2; (-) strand; PAM type: YTN; PAM sequence: TTC
agtgttagtaggtctaggaa

SEQ ID NO: 218606 - DNA, 20 bp, Artificial Sequence
  Description of Artificial Sequence: Synthetic oligonucleotide
  Target: LAMA2; (-) strand; PAM type: YTN; PAM sequence: TTC
atgattcagtgttagtaggt

SEQ ID NO: 218607 - DNA, 20 bp, Artificial Sequence
  Description of Artificial Sequence: Synthetic oligonucleotide
  Target: LAMA2; (-) strand; PAM type: YTN; PAM sequence: CTT
catgattcagtgttagtagg

SEQ ID NO: 218608 - DNA, 20 bp, Artificial Sequence
  Description of Artificial Sequence: Synthetic oligonucleotide
  Target: LAMA2; (-) strand; PAM type: YTN; PAM sequence: TTC
ttcatgattcagtgttagta

SEQ ID NO: 218609 - DNA, 20 bp, Artificial Sequence
  Description of Artificial Sequence: Synthetic oligonucleotide
  Target: LAMA2; (-) strand; PAM type: YTN; PAM sequence: TTT
cttcatgattcagtgttagt

SEQ ID NO: 218610 - DNA, 20 bp, Artificial Sequence
  Description of Artificial Sequence: Synthetic oligonucleotide
  Target: LAMA2; (-) strand; PAM type: YTN; PAM sequence: CTA
tttcttcatgattcagtgtt

SEQ ID NO: 218611 - DNA, 20 bp, Artificial Sequence
  Description of Artificial Sequence: Synthetic oligonucleotide
  Target: LAMA2; (-) strand; PAM type: YTN; PAM sequence: TTA
tctatttcttcatgattcag

SEQ ID NO: 218612 - DNA, 20 bp, Artificial Sequence
  Description of Artificial Sequence: Synthetic oligonucleotide
  Target: LAMA2; (-) strand; PAM type: YTN; PAM sequence: CTC
atgttatctatttcttcatg

SEQ ID NO: 218613 - DNA, 20 bp, Artificial Sequence
  Description of Artificial Sequence: Synthetic oligonucleotide
  Target: LAMA2; (-) strand; PAM type: YTN; PAM sequence: CTG
ctcatgttatctatttcttc

SEQ ID NO: 218614 - DNA, 20 bp, Artificial Sequence
  Description of Artificial Sequence: Synthetic oligonucleotide
  Target: LAMA2; (-) strand; PAM type: YTN; PAM sequence: TTG
atctgctcatgttatctatt

SEQ ID NO: 218615 - DNA, 20 bp, Artificial Sequence
  Description of Artificial Sequence: Synthetic oligonucleotide
  Target: LAMA2; (-) strand; PAM type: YTN; PAM sequence: TTC
attgatctgctcatgttatc

SEQ ID NO: 218616 - DNA, 20 bp, Artificial Sequence
  Description of Artificial Sequence: Synthetic oligonucleotide
  Target: LAMA2; (-) strand; PAM type: YTN; PAM sequence: CTT
cattgatctgctcatgttat

SEQ ID NO: 218617 - DNA, 20 bp, Artificial Sequence
  Description of Artificial Sequence: Synthetic oligonucleotide
  Target: LAMA2; (-) strand; PAM type: YTN; PAM sequence: CTC
ttcattgatctgctcatgtt

SEQ ID NO: 218618 - DNA, 20 bp, Artificial Sequence
  Description of Artificial Sequence: Synthetic oligonucleotide
  Target: LAMA2; (-) strand; PAM type: YTN; PAM sequence: TTA
ctcttcattgatctgctcat

SEQ ID NO: 218619 - DNA, 20 bp, Artificial Sequence
  Description of Artificial Sequence: Synthetic oligonucleotide
  Target: LAMA2; (-) strand; PAM type: YTN; PAM sequence: CTT
actcttcattgatctgctca

SEQ ID NO: 218620 - DNA, 20 bp, Artificial Sequence
  Description of Artificial Sequence: Synthetic oligonucleotide
  Target: LAMA2; (-) strand; PAM type: YTN; PAM sequence: CTC
cttactcttcattgatctgc

SEQ ID NO: 218621 - DNA, 20 bp, Artificial Sequence
  Description of Artificial Sequence: Synthetic oligonucleotide
  Target: LAMA2; (-) strand; PAM type: YTN; PAM sequence: TTC
aatctccttactcttcattg

SEQ ID NO: 218622 - DNA, 20 bp, Artificial Sequence
  Description of Artificial Sequence: Synthetic oligonucleotide
  Target: LAMA2; (-) strand; PAM type: YTN; PAM sequence: CTG
attcaatctccttactcttc

SEQ ID NO: 218623 - DNA, 20 bp, Artificial Sequence
  Description of Artificial Sequence: Synthetic oligonucleotide
  Target: LAMA2; (-) strand; PAM type: YTN; PAM sequence: TTC
ctgattcaatctccttactc

SEQ ID NO: 218624 - DNA, 20 bp, Artificial Sequence
  Description of Artificial Sequence: Synthetic oligonucleotide
  Target: LAMA2; (-) strand; PAM type: YTN; PAM sequence: TTA
ttcctgattcaatctcctta

SEQ ID NO: 218625 - DNA, 20 bp, Artificial Sequence
  Description of Artificial Sequence: Synthetic oligonucleotide
  Target: LAMA2; (-) strand; PAM type: YTN; PAM sequence: CTT
attcctgattcaatctcctt

SEQ ID NO: 218626 - DNA, 20 bp, Artificial Sequence
  Description of Artificial Sequence: Synthetic oligonucleotide
  Target: LAMA2; (-) strand; PAM type: YTN; PAM sequence: TTC
ttattcctgattcaatctcc

SEQ ID NO: 218627 - DNA, 20 bp, Artificial Sequence
  Description of Artificial Sequence: Synthetic oligonucleotide
  Target: LAMA2; (-) strand; PAM type: YTN; PAM sequence: TTT
cttattcctgattcaatctc

SEQ ID NO: 218628 - DNA, 20 bp, Artificial Sequence
  Description of Artificial Sequence: Synthetic oligonucleotide
  Target: LAMA2; (-) strand; PAM type: YTN; PAM sequence: TTG
atagggtatttcttattcct

SEQ ID NO: 218629 - DNA, 20 bp, Artificial Sequence
  Description of Artificial Sequence: Synthetic oligonucleotide
  Target: LAMA2; (-) strand; PAM type: YTN; PAM sequence: TTT
gatagggtatttcttattcc

SEQ ID NO: 218630 - DNA, 20 bp, Artificial Sequence
  Description of Artificial Sequence: Synthetic oligonucleotide
  Target: LAMA2; (-) strand; PAM type: YTN; PAM sequence: CTT
tgatagggtatttcttattc

SEQ ID NO: 218631 - DNA, 20 bp, Artificial Sequence
  Description of Artificial Sequence: Synthetic oligonucleotide
  Target: LAMA2; (-) strand; PAM type: YTN; PAM sequence: TTC
tttgatagggtatttcttat

SEQ ID NO: 218632 - DNA, 20 bp, Artificial Sequence
  Description of Artificial Sequence: Synthetic oligonucleotide
  Target: LAMA2; (-) strand; PAM type: YTN; PAM sequence: TTT
ctttgatagggtatttctta

SEQ ID NO: 218633 - DNA, 20 bp, Artificial Sequence
  Description of Artificial Sequence: Synthetic oligonucleotide
  Target: LAMA2; (-) strand; PAM type: YTN; PAM sequence: TTT
tctttgatagggtatttctt

SEQ ID NO: 218634 - DNA, 20 bp, Artificial Sequence
  Description of Artificial Sequence: Synthetic oligonucleotide
  Target: LAMA2; (-) strand; PAM type: YTN; PAM sequence: CTT
ttctttgatagggtatttct

SEQ ID NO: 218635 - DNA, 20 bp, Artificial Sequence
  Description of Artificial Sequence: Synthetic oligonucleotide
  Target: LAMA2; (-) strand; PAM type: YTN; PAM sequence: CTG
ggcttttctttgatagggta

SEQ ID NO: 218636 - DNA, 20 bp, Artificial Sequence
  Description of Artificial Sequence: Synthetic oligonucleotide
  Target: LAMA2; (-) strand; PAM type: YTN; PAM sequence: TTC
tgggcttttctttgataggg

SEQ ID NO: 218637 - DNA, 20 bp, Artificial Sequence
  Description of Artificial Sequence: Synthetic oligonucleotide
  Target: LAMA2; (-) strand; PAM type: YTN; PAM sequence: TTC
agcagtaaaaccatcaggtt

SEQ ID NO: 218638 - DNA, 20 bp, Artificial Sequence
  Description of Artificial Sequence: Synthetic oligonucleotide
  Target: LAMA2; (-) strand; PAM type: YTN; PAM sequence: TTG
gtagaattcagcagtaaaac

SEQ ID NO: 218639 - DNA, 20 bp, Artificial Sequence
  Description of Artificial Sequence: Synthetic oligonucleotide
  Target: LAMA2; (-) strand; PAM type: YTN; PAM sequence: TTT
ggtagaattcagcagtaaaa

SEQ ID NO: 218640 - DNA, 20 bp, Artificial Sequence
  Description of Artificial Sequence: Synthetic oligonucleotide
  Target: LAMA2; (-) strand; PAM type: YTN; PAM sequence: TTA
aatgtttggtagaattcagc

SEQ ID NO: 218641 - DNA, 20 bp, Artificial Sequence
  Description of Artificial Sequence: Synthetic oligonucleotide
  Target: LAMA2; (-) strand; PAM type: YTN; PAM sequence: CTT
aaatgtttggtagaattcag

SEQ ID NO: 218642 - DNA, 20 bp, Artificial Sequence
  Description of Artificial Sequence: Synthetic oligonucleotide
  Target: LAMA2; (-) strand; PAM type: YTN; PAM sequence: TTC
cttaaatgtttggtagaatt

SEQ ID NO: 218643 - DNA, 20 bp, Artificial Sequence
  Description of Artificial Sequence: Synthetic oligonucleotide
  Target: LAMA2; (-) strand; PAM type: YTN; PAM sequence: TTA
gttccttaaatgtttggtag

SEQ ID NO: 218644 - DNA, 20 bp, Artificial Sequence
  Description of Artificial Sequence: Synthetic oligonucleotide
  Target: LAMA2; (-) strand; PAM type: YTN; PAM sequence: TTG
gtattagttccttaaatgtt

SEQ ID NO: 218645 - DNA, 20 bp, Artificial Sequence
  Description of Artificial Sequence: Synthetic oligonucleotide
  Target: LAMA2; (-) strand; PAM type: YTN; PAM sequence: TTG
agaaggattggtattagttc

SEQ ID NO: 218646 - DNA, 20 bp, Artificial Sequence
  Description of Artificial Sequence: Synthetic oligonucleotide
  Target: LAMA2; (-) strand; PAM type: YTN; PAM sequence: TTT
gagaaggattggtattagtt

SEQ ID NO: 218647 - DNA, 20 bp, Artificial Sequence
  Description of Artificial Sequence: Synthetic oligonucleotide
  Target: LAMA2; (-) strand; PAM type: YTN; PAM sequence: TTT
tgagaaggattggtattagt

SEQ ID NO: 218648 - DNA, 20 bp, Artificial Sequence
  Description of Artificial Sequence: Synthetic oligonucleotide
  Target: LAMA2; (-) strand; PAM type: YTN; PAM sequence: TTG
gaggattttgagaaggattg

SEQ ID NO: 218649 - DNA, 20 bp, Artificial Sequence
  Description of Artificial Sequence: Synthetic oligonucleotide
  Target: LAMA2; (-) strand; PAM type: YTN; PAM sequence: TTT
ggaggattttgagaaggatt

SEQ ID NO: 218650 - DNA, 20 bp, Artificial Sequence
  Description of Artificial Sequence: Synthetic oligonucleotide
  Target: LAMA2; (-) strand; PAM type: YTN; PAM sequence: TTA
tttggaggattttgagaagg

SEQ ID NO: 218651 - DNA, 20 bp, Artificial Sequence
  Description of Artificial Sequence: Synthetic oligonucleotide
  Target: LAMA2; (-) strand; PAM type: YTN; PAM sequence: TTC
agttatttggaggattttga

SEQ ID NO: 218652 - DNA, 20 bp, Artificial Sequence
  Description of Artificial Sequence: Synthetic oligonucleotide
  Target: LAMA2; (-) strand; PAM type: YTN; PAM sequence: CTT
cagttatttggaggattttg

SEQ ID NO: 218653 - DNA, 20 bp, Artificial Sequence
  Description of Artificial Sequence: Synthetic oligonucleotide
  Target: LAMA2; (-) strand; PAM type: YTN; PAM sequence: CTC
atcttcagttatttggagga

SEQ ID NO: 218654 - DNA, 20 bp, Artificial Sequence
  Description of Artificial Sequence: Synthetic oligonucleotide
  Target: LAMA2; (-) strand; PAM type: YTN; PAM sequence: CTC
cctcatcttcagttatttgg

SEQ ID NO: 218655 - DNA, 20 bp, Artificial Sequence
  Description of Artificial Sequence: Synthetic oligonucleotide
  Target: LAMA2; (-) strand; PAM type: YTN; PAM sequence: TTG
gaagtactccctcatcttca

SEQ ID NO: 218656 - DNA, 20 bp, Artificial Sequence
  Description of Artificial Sequence: Synthetic oligonucleotide
  Target: LAMA2; (-) strand; PAM type: YTN; PAM sequence: TTT
ggaagtactccctcatcttc

SEQ ID NO: 218657 - DNA, 20 bp, Artificial Sequence
  Description of Artificial Sequence: Synthetic oligonucleotide
  Target: LAMA2; (-) strand; PAM type: YTN; PAM sequence: CTC
ataaaataagtttggaagta

SEQ ID NO: 218658 - DNA, 20 bp, Artificial Sequence
  Description of Artificial Sequence: Synthetic oligonucleotide
  Target: LAMA2; (-) strand; PAM type: YTN; PAM sequence: CTG
gcctcataaaataagtttgg

SEQ ID NO: 218659 - DNA, 20 bp, Artificial Sequence
  Description of Artificial Sequence: Synthetic oligonucleotide
  Target: LAMA2; (-) strand; PAM type: YTN; PAM sequence: CTA
atggctggcctcataaaata

SEQ ID NO: 218660 - DNA, 20 bp, Artificial Sequence
  Description of Artificial Sequence: Synthetic oligonucleotide
  Target: LAMA2; (-) strand; PAM type: YTN; PAM sequence: TTG
gtatcaggctaatggctggc

SEQ ID NO: 218661 - DNA, 20 bp, Artificial Sequence
  Description of Artificial Sequence: Synthetic oligonucleotide
  Target: LAMA2; (-) strand; PAM type: YTN; PAM sequence: TTT
ggtatcaggctaatggctgg

SEQ ID NO: 218662 - DNA, 20 bp, Artificial Sequence
  Description of Artificial Sequence: Synthetic oligonucleotide
  Target: LAMA2; (-) strand; PAM type: YTN; PAM sequence: CTT
tggtatcaggctaatggctg

SEQ ID NO: 218663 - DNA, 20 bp, Artificial Sequence
  Description of Artificial Sequence: Synthetic oligonucleotide
  Target: LAMA2; (-) strand; PAM type: YTN; PAM sequence: TTG
gctttggtatcaggctaatg

SEQ ID NO: 218664 - DNA, 20 bp, Artificial Sequence
  Description of Artificial Sequence: Synthetic oligonucleotide
  Target: LAMA2; (-) strand; PAM type: YTN; PAM sequence: TTT
ggctttggtatcaggctaat

SEQ ID NO: 218665 - DNA, 20 bp, Artificial Sequence
  Description of Artificial Sequence: Synthetic oligonucleotide
  Target: LAMA2; (-) strand; PAM type: YTN; PAM sequence: CTT
tggctttggtatcaggctaa

SEQ ID NO: 218666 - DNA, 20 bp, Artificial Sequence
  Description of Artificial Sequence: Synthetic oligonucleotide
  Target: LAMA2; (-) strand; PAM type: YTN; PAM sequence: TTG
cagtgtctttggctttggta

SEQ ID NO: 218667 - DNA, 20 bp, Artificial Sequence
  Description of Artificial Sequence: Synthetic oligonucleotide
  Target: LAMA2; (-) strand; PAM type: YTN; PAM sequence: CTT
gcagtgtctttggctttggt

SEQ ID NO: 218668 - DNA, 20 bp, Artificial Sequence
  Description of Artificial Sequence: Synthetic oligonucleotide
  Target: LAMA2; (-) strand; PAM type: YTN; PAM sequence: TTC
ttgcagtgtctttggctttg

SEQ ID NO: 218669 - DNA, 20 bp, Artificial Sequence
  Description of Artificial Sequence: Synthetic oligonucleotide
  Target: LAMA2; (-) strand; PAM type: YTN; PAM sequence: TTT
cttgcagtgtctttggcttt

SEQ ID NO: 218670 - DNA, 20 bp, Artificial Sequence
  Description of Artificial Sequence: Synthetic oligonucleotide
  Target: LAMA2; (-) strand; PAM type: YTN; PAM sequence: TTT
tcttgcagtgtctttggctt

SEQ ID NO: 218671 - DNA, 20 bp, Artificial Sequence
  Description of Artificial Sequence: Synthetic oligonucleotide
  Target: LAMA2; (-) strand; PAM type: YTN; PAM sequence: CTT
ttcttgcagtgtctttggct

SEQ ID NO: 218672 - DNA, 20 bp, Artificial Sequence
  Description of Artificial Sequence: Synthetic oligonucleotide
  Target: LAMA2; (-) strand; PAM type: YTN; PAM sequence: CTG
taatgtacttttcttgcagt

SEQ ID NO: 218673 - DNA, 20 bp, Artificial Sequence
  Description of Artificial Sequence: Synthetic oligonucleotide
  Target: LAMA2; (-) strand; PAM type: YTN; PAM sequence: TTG
atctgtaatgtacttttctt

SEQ ID NO: 218674 - DNA, 20 bp, Artificial Sequence
  Description of Artificial Sequence: Synthetic oligonucleotide
  Target: LAMA2; (-) strand; PAM type: YTN; PAM sequence: TTC
atcaaaaatattgatctgta

SEQ ID NO: 218675 - DNA, 20 bp, Artificial Sequence
  Description of Artificial Sequence: Synthetic oligonucleotide
  Target: LAMA2; (-) strand; PAM type: YTN; PAM sequence: CTA
tgttcatcaaaaatattgat

SEQ ID NO: 218676 - DNA, 20 bp, Artificial Sequence
  Description of Artificial Sequence: Synthetic oligonucleotide
  Target: LAMA2; (-) strand; PAM type: YTN; PAM sequence: TTG
catctatgttcatcaaaaat

SEQ ID NO: 218677 - DNA, 20 bp, Artificial Sequence
  Description of Artificial Sequence: Synthetic oligonucleotide
  Target: LAMA2; (-) strand; PAM type: YTN; PAM sequence: TTT
gcatctatgttcatcaaaaa

SEQ ID NO: 218678 - DNA, 20 bp, Artificial Sequence
  Description of Artificial Sequence: Synthetic oligonucleotide
  Target: LAMA2; (-) strand; PAM type: YTN; PAM sequence: TTT
tgcatctatgttcatcaaaa

SEQ ID NO: 218679 - DNA, 20 bp, Artificial Sequence
  Description of Artificial Sequence: Synthetic oligonucleotide
  Target: LAMA2; (-) strand; PAM type: YTN; PAM sequence: TTG
aggagttttgcatctatgtt

SEQ ID NO: 218680 - DNA, 20 bp, Artificial Sequence
  Description of Artificial Sequence: Synthetic oligonucleotide
  Target: LAMA2; (-) strand; PAM type: YTN; PAM sequence: CTT
gaggagttttgcatctatgt

SEQ ID NO: 218681 - DNA, 20 bp, Artificial Sequence
  Description of Artificial Sequence: Synthetic oligonucleotide
  Target: LAMA2; (-) strand; PAM type: YTN; PAM sequence: TTC
ttgaggagttttgcatctat

SEQ ID NO: 218682 - DNA, 20 bp, Artificial Sequence
  Description of Artificial Sequence: Synthetic oligonucleotide
  Target: LAMA2; (-) strand; PAM type: YTN; PAM sequence: TTT
cttgaggagttttgcatcta

SEQ ID NO: 218683 - DNA, 20 bp, Artificial Sequence
  Description of Artificial Sequence: Synthetic oligonucleotide
  Target: LAMA2; (-) strand; PAM type: YTN; PAM sequence: TTT
tcttgaggagttttgcatct

SEQ ID NO: 218684 - DNA, 20 bp, Artificial Sequence
  Description of Artificial Sequence: Synthetic oligonucleotide
  Target: LAMA2; (-) strand; PAM type: YTN; PAM sequence: TTA
gtattttcttgaggagtttt

SEQ ID NO: 218685 - DNA, 20 bp, Artificial Sequence
  Description of Artificial Sequence: Synthetic oligonucleotide
  Target: LAMA2; (-) strand; PAM type: YTN; PAM sequence: TTG
ttagtattttcttgaggagt

SEQ ID NO: 218686 - DNA, 20 bp, Artificial Sequence
  Description of Artificial Sequence: Synthetic oligonucleotide
  Target: LAMA2; (-) strand; PAM type: YTN; PAM sequence: TTT
gttagtattttcttgaggag

SEQ ID NO: 218687 - DNA, 20 bp, Artificial Sequence
  Description of Artificial Sequence: Synthetic oligonucleotide
  Target: LAMA2; (-) strand; PAM type: YTN; PAM sequence: TTG
gtttgttagtattttcttga

SEQ ID NO: 218688 - DNA, 20 bp, Artificial Sequence
  Description of Artificial Sequence: Synthetic oligonucleotide
  Target: LAMA2; (-) strand; PAM type: YTN; PAM sequence: TTT
ggtttgttagtattttcttg

SEQ ID NO: 218689 - DNA, 20 bp, Artificial Sequence
  Description of Artificial Sequence: Synthetic oligonucleotide
  Target: LAMA2; (-) strand; PAM type: YTN; PAM sequence: CTG
aatttggtttgttagtattt

SEQ ID NO: 218690 - DNA, 20 bp, Artificial Sequence
  Description of Artificial Sequence: Synthetic oligonucleotide
  Target: LAMA2; (-) strand; PAM type: YTN; PAM sequence: CTG
ctgaatttggtttgttagta

SEQ ID NO: 218691 - DNA, 20 bp, Artificial Sequence
  Description of Artificial Sequence: Synthetic oligonucleotide
  Target: LAMA2; (-) strand; PAM type: YTN; PAM sequence: TTA
atgtgctgctgaatttggtt

SEQ ID NO: 218692 - DNA, 20 bp, Artificial Sequence
  Description of Artificial Sequence: Synthetic oligonucleotide
  Target: LAMA2; (-) strand; PAM type: YTN; PAM sequence: TTT
aatgtgctgctgaatttggt

SEQ ID NO: 218693 - DNA, 20 bp, Artificial Sequence
  Description of Artificial Sequence: Synthetic oligonucleotide
  Target: LAMA2; (-) strand; PAM type: YTN; PAM sequence: TTT
taatgtgctgctgaatttgg

SEQ ID NO: 218694 - DNA, 20 bp, Artificial Sequence
  Description of Artificial Sequence: Synthetic oligonucleotide
  Target: LAMA2; (-) strand; PAM type: YTN; PAM sequence: CTT
ttaatgtgctgctgaatttg

SEQ ID NO: 218695 - DNA, 20 bp, Artificial Sequence
  Description of Artificial Sequence: Synthetic oligonucleotide
  Target: LAMA2; (-) strand; PAM type: YTN; PAM sequence: TTG
atcacagtgaatgatccttt

SEQ ID NO: 218696 - DNA, 20 bp, Artificial Sequence
  Description of Artificial Sequence: Synthetic oligonucleotide
  Target: LAMA2; (-) strand; PAM type: YTN; PAM sequence: CTT
gatcacagtgaatgatcctt

SEQ ID NO: 218697 - DNA, 20 bp, Artificial Sequence
  Description of Artificial Sequence: Synthetic oligonucleotide
  Target: LAMA2; (-) strand; PAM type: YTN; PAM sequence: CTG
gtagtgatcccacttgatca

SEQ ID NO: 218698 - DNA, 20 bp, Artificial Sequence
  Description of Artificial Sequence: Synthetic oligonucleotide
  Target: LAMA2; (-) strand; PAM type: YTN; PAM sequence: TTA
aaccatggcatccctggtag

SEQ ID NO: 218699 - DNA, 20 bp, Artificial Sequence
  Description of Artificial Sequence: Synthetic oligonucleotide
  Target: LAMA2; (-) strand; PAM type: YTN; PAM sequence: TTG
caaaggttaaaccatggcat

SEQ ID NO: 218700 - DNA, 20 bp, Artificial Sequence
  Description of Artificial Sequence: Synthetic oligonucleotide
  Target: LAMA2; (-) strand; PAM type: YTN; PAM sequence: TTT
gcaaaggttaaaccatggca

SEQ ID NO: 218701 - DNA, 20 bp, Artificial Sequence
  Description of Artificial Sequence: Synthetic oligonucleotide
  Target: LAMA2; (-) strand; PAM type: YTN; PAM sequence: TTA
tagatttgcaaaggttaaac

SEQ ID NO: 218702 - DNA, 20 bp, Artificial Sequence
  Description of Artificial Sequence: Synthetic oligonucleotide
  Target: LAMA2; (-) strand; PAM type: YTN; PAM sequence: TTT
atagatttgcaaaggttaaa

SEQ ID NO: 218703 - DNA, 20 bp, Artificial Sequence
  Description of Artificial Sequence: Synthetic oligonucleotide
  Target: LAMA2; (-) strand; PAM type: YTN; PAM sequence: CTA
atgtaaggtatcacatttat

SEQ ID NO: 218704 - DNA, 20 bp, Artificial Sequence
  Description of Artificial Sequence: Synthetic oligonucleotide
  Target: LAMA2; (-) strand; PAM type: YTN; PAM sequence: CTA
ctaatgtaaggtatcacatt

SEQ ID NO: 218705 - DNA, 20 bp, Artificial Sequence
  Description of Artificial Sequence: Synthetic oligonucleotide
  Target: LAMA2; (-) strand; PAM type: YTN; PAM sequence: TTC
tactaatgtaaggtatcaca

SEQ ID NO: 218706 - DNA, 20 bp, Artificial Sequence
  Description of Artificial Sequence: Synthetic oligonucleotide
  Target: LAMA2; (-) strand; PAM type: YTN; PAM sequence: TTC
attctactaatgtaaggtat

SEQ ID NO: 218707 - DNA, 20 bp, Artificial Sequence
  Description of Artificial Sequence: Synthetic oligonucleotide
  Target: LAMA2; (-) strand; PAM type: YTN; PAM sequence: CTT
cattctactaatgtaaggta

SEQ ID NO: 218708 - DNA, 20 bp, Artificial Sequence
  Description of Artificial Sequence: Synthetic oligonucleotide
  Target: LAMA2; (-) strand; PAM type: YTN; PAM sequence: TTG
tccttcattctactaatgta

SEQ ID NO: 218709 - DNA, 20 bp, Artificial Sequence
  Description of Artificial Sequence: Synthetic oligonucleotide
  Target: LAMA2; (-) strand; PAM type: YTN; PAM sequence: TTT
gtccttcattctactaatgt

SEQ ID NO: 218710 - DNA, 20 bp, Artificial Sequence
  Description of Artificial Sequence: Synthetic oligonucleotide
  Target: LAMA2; (-) strand; PAM type: YTN; PAM sequence: TTT
tgtccttcattctactaatg

SEQ ID NO: 218711 - DNA, 20 bp, Artificial Sequence
  Description of Artificial Sequence: Synthetic oligonucleotide
  Target: LAMA2; (-) strand; PAM type: YTN; PAM sequence: TTT
ttgtccttcattctactaat

SEQ ID NO: 218712 - DNA, 20 bp, Artificial Sequence
  Description of Artificial Sequence: Synthetic oligonucleotide
  Target: LAMA2; (-) strand; PAM type: YTN; PAM sequence: TTG
agatgatcatatgatttttg

SEQ ID NO: 218713 - DNA, 20 bp, Artificial Sequence
  Description of Artificial Sequence: Synthetic oligonucleotide
  Target: LAMA2; (-) strand; PAM type: YTN; PAM sequence: CTA
ttgagatgatcatatgattt

SEQ ID NO: 218714 - DNA, 20 bp, Artificial Sequence
  Description of Artificial Sequence: Synthetic oligonucleotide
  Target: LAMA2; (-) strand; PAM type: YTN; PAM sequence: CTG
catctattgagatgatcata

SEQ ID NO: 218715 - DNA, 20 bp, Artificial Sequence
  Description of Artificial Sequence: Synthetic oligonucleotide
  Target: LAMA2; (-) strand; PAM type: YTN; PAM sequence: TTC
tgcatctattgagatgatca

SEQ ID NO: 218716 - DNA, 20 bp, Artificial Sequence
  Description of Artificial Sequence: Synthetic oligonucleotide
  Target: LAMA2; (-) strand; PAM type: YTN; PAM sequence: TTT
ctgcatctattgagatgatc

SEQ ID NO: 218717 - DNA, 20 bp, Artificial Sequence
  Description of Artificial Sequence: Synthetic oligonucleotide
  Target: LAMA2; (-) strand; PAM type: YTN; PAM sequence: TTT
tctgcatctattgagatgat

SEQ ID NO: 218718 - DNA, 20 bp, Artificial Sequence
  Description of Artificial Sequence: Synthetic oligonucleotide
  Target: LAMA2; (-) strand; PAM type: YTN; PAM sequence: TTT
ttctgcatctattgagatga

SEQ ID NO: 218719 - DNA, 20 bp, Artificial Sequence
  Description of Artificial Sequence: Synthetic oligonucleotide
  Target: LAMA2; (-) strand; PAM type: YTN; PAM sequence: CTT
tttctgcatctattgagatg

SEQ ID NO: 218720 - DNA, 20 bp, Artificial Sequence
  Description of Artificial Sequence: Synthetic oligonucleotide
  Target: LAMA2; (-) strand; PAM type: YTN; PAM sequence: TTG
tcaaatgctttttctgcatc

SEQ ID NO: 218721 - DNA, 20 bp, Artificial Sequence
  Description of Artificial Sequence: Synthetic oligonucleotide
  Target: LAMA2; (-) strand; PAM type: YTN; PAM sequence: TTT
gtcaaatgctttttctgcat

SEQ ID NO: 218722 - DNA, 20 bp, Artificial Sequence
  Description of Artificial Sequence: Synthetic oligonucleotide
  Target: LAMA2; (-) strand; PAM type: YTN; PAM sequence: TTT
tgtcaaatgctttttctgca

SEQ ID NO: 218723 - DNA, 20 bp, Artificial Sequence
  Description of Artificial Sequence: Synthetic oligonucleotide
  Target: LAMA2; (-) strand; PAM type: YTN; PAM sequence: TTG
aattttgtcaaatgcttttt

SEQ ID NO: 218724 - DNA, 20 bp, Artificial Sequence
  Description of Artificial Sequence: Synthetic oligonucleotide
  Target: LAMA2; (-) strand; PAM type: YTN; PAM sequence: TTA
aacaatgttgaattttgtca

SEQ ID NO: 218725 - DNA, 20 bp, Artificial Sequence
  Description of Artificial Sequence: Synthetic oligonucleotide
  Target: LAMA2; (-) strand; PAM type: YTN; PAM sequence: TTA
tcattaaacaatgttgaatt

SEQ ID NO: 218726 - DNA, 20 bp, Artificial Sequence
  Description of Artificial Sequence: Synthetic oligonucleotide
  Target: LAMA2; (-) strand; PAM type: YTN; PAM sequence: TTT
atcattaaacaatgttgaat

SEQ ID NO: 218727 - DNA, 20 bp, Artificial Sequence
  Description of Artificial Sequence: Synthetic oligonucleotide
  Target: LAMA2; (-) strand; PAM type: YTN; PAM sequence: TTT
tatcattaaacaatgttgaa

SEQ ID NO: 218728 - DNA, 20 bp, Artificial Sequence
  Description of Artificial Sequence: Synthetic oligonucleotide
  Target: LAMA2; (-) strand; PAM type: YTN; PAM sequence: CTT
ttatcattaaacaatgttga

SEQ ID NO: 218729 - DNA, 20 bp, Artificial Sequence
  Description of Artificial Sequence: Synthetic oligonucleotide
  Target: LAMA2; (-) strand; PAM type: YTN; PAM sequence: TTG
acagcttttatcattaaaca

SEQ ID NO: 218730 - DNA, 20 bp, Artificial Sequence
  Description of Artificial Sequence: Synthetic oligonucleotide
  Target: LAMA2; (-) strand; PAM type: YTN; PAM sequence: TTG
ttgacagcttttatcattaa

SEQ ID NO: 218731 - DNA, 20 bp, Artificial Sequence
  Description of Artificial Sequence: Synthetic oligonucleotide
  Target: LAMA2; (-) strand; PAM type: YTN; PAM sequence: TTT
gttgacagcttttatcatta

SEQ ID NO: 218732 - DNA, 20 bp, Artificial Sequence
  Description of Artificial Sequence: Synthetic oligonucleotide
  Target: LAMA2; (-) strand; PAM type: YTN; PAM sequence: CTA
atttgttgacagcttttatc

SEQ ID NO: 218733 - DNA, 20 bp, Artificial Sequence
  Description of Artificial Sequence: Synthetic oligonucleotide
  Target: LAMA2; (-) strand; PAM type: YTN; PAM sequence: CTA
tagctaatttgttgacagct

SEQ ID NO: 218734 - DNA, 20 bp, Artificial Sequence
  Description of Artificial Sequence: Synthetic oligonucleotide
  Target: LAMA2; (-) strand; PAM type: YTN; PAM sequence: TTC
tatagctaatttgttgacag

SEQ ID NO: 218735 - DNA, 20 bp, Artificial Sequence
  Description of Artificial Sequence: Synthetic oligonucleotide
  Target: LAMA2; (-) strand; PAM type: YTN; PAM sequence: CTT
ctatagctaatttgttgaca

SEQ ID NO: 218736 - DNA, 20 bp, Artificial Sequence
  Description of Artificial Sequence: Synthetic oligonucleotide
  Target: LAMA2; (-) strand; PAM type: YTN; PAM sequence: TTC
cttctatagctaatttgttg

SEQ ID NO: 218737 - DNA, 20 bp, Artificial Sequence
  Description of Artificial Sequence: Synthetic oligonucleotide
  Target: LAMA2; (-) strand; PAM type: YTN; PAM sequence: TTG
acgtacattccttctatagc

SEQ ID NO: 218738 - DNA, 20 bp, Artificial Sequence
  Description of Artificial Sequence: Synthetic oligonucleotide
  Target: LAMA2; (-) strand; PAM type: YTN; PAM sequence: TTA
tgttgacgtacattccttct

SEQ ID NO: 218739 - DNA, 20 bp, Artificial Sequence
  Description of Artificial Sequence: Synthetic oligonucleotide
  Target: LAMA2; (-) strand; PAM type: YTN; PAM sequence: TTA
ttatgttgacgtacattcct

SEQ ID NO: 218740 - DNA, 20 bp, Artificial Sequence
  Description of Artificial Sequence: Synthetic oligonucleotide
  Target: LAMA2; (-) strand; PAM type: YTN; PAM sequence: TTT
attatgttgacgtacattcc

SEQ ID NO: 218741 - DNA, 20 bp, Artificial Sequence
  Description of Artificial Sequence: Synthetic oligonucleotide
  Target: LAMA2; (-) strand; PAM type: YTN; PAM sequence: CTT
tattatgttgacgtacattc

SEQ ID NO: 218742 - DNA, 20 bp, Artificial Sequence
  Description of Artificial Sequence: Synthetic oligonucleotide
  Target: LAMA2; (-) strand; PAM type: YTN; PAM sequence: CTG
aggatgtgtcatatacagtc

SEQ ID NO: 218743 - DNA, 20 bp, Artificial Sequence
  Description of Artificial Sequence: Synthetic oligonucleotide
  Target: LAMA2; (-) strand; PAM type: YTN; PAM sequence: TTA
gctgaggatgtgtcatatac

SEQ ID NO: 218744 - DNA, 20 bp, Artificial Sequence
  Description of Artificial Sequence: Synthetic oligonucleotide
  Target: LAMA2; (-) strand; PAM type: YTN; PAM sequence: TTG
agtatgatgttagctgagga

SEQ ID NO: 218745 - DNA, 20 bp, Artificial Sequence
  Description of Artificial Sequence: Synthetic oligonucleotide
  Target: LAMA2; (-) strand; PAM type: YTN; PAM sequence: CTA
ttgagtatgatgttagctga

SEQ ID NO: 218746 - DNA, 20 bp, Artificial Sequence
  Description of Artificial Sequence: Synthetic oligonucleotide
  Target: LAMA2; (-) strand; PAM type: YTN; PAM sequence: TTC
actattgagtatgatgttag

SEQ ID NO: 218747 - DNA, 20 bp, Artificial Sequence
  Description of Artificial Sequence: Synthetic oligonucleotide
  Target: LAMA2; (-) strand; PAM type: YTN; PAM sequence: TTT
cactattgagtatgatgtta

SEQ ID NO: 218748 - DNA, 20 bp, Artificial Sequence
  Description of Artificial Sequence: Synthetic oligonucleotide
  Target: LAMA2; (-) strand; PAM type: YTN; PAM sequence: TTT
tcactattgagtatgatgtt

SEQ ID NO: 218749 - DNA, 20 bp, Artificial Sequence
  Description of Artificial Sequence: Synthetic oligonucleotide
  Target: LAMA2; (-) strand; PAM type: YTN; PAM sequence: CTT
ttcactattgagtatgatgt

SEQ ID NO: 218750 - DNA, 20 bp, Artificial Sequence
  Description of Artificial Sequence: Synthetic oligonucleotide
  Target: LAMA2; (-) strand; PAM type: YTN; PAM sequence: TTC
agcttttcactattgagtat

SEQ ID NO: 218751 - DNA, 20 bp, Artificial Sequence
  Description of Artificial Sequence: Synthetic oligonucleotide
  Target: LAMA2; (-) strand; PAM type: YTN; PAM sequence: TTT
cagcttttcactattgagta

SEQ ID NO: 218752 - DNA, 20 bp, Artificial Sequence
  Description of Artificial Sequence: Synthetic oligonucleotide
  Target: LAMA2; (-) strand; PAM type: YTN; PAM sequence: CTT
tcagcttttcactattgagt

SEQ ID NO: 218753 - DNA, 20 bp, Artificial Sequence
  Description of Artificial Sequence: Synthetic oligonucleotide
  Target: LAMA2; (-) strand; PAM type: YTN; PAM sequence: TTA
gagaaaaacctttcagcttt

SEQ ID NO: 218754 - DNA, 20 bp, Artificial Sequence
  Description of Artificial Sequence: Synthetic oligonucleotide
  Target: LAMA2; (-) strand; PAM type: YTN; PAM sequence: CTT
agagaaaaacctttcagctt

SEQ ID NO: 218755 - DNA, 20 bp, Artificial Sequence
  Description of Artificial Sequence: Synthetic oligonucleotide
  Target: LAMA2; (-) strand; PAM type: YTN; PAM sequence: CTG
atcttagagaaaaacctttc

SEQ ID NO: 218756 - DNA, 20 bp, Artificial Sequence
  Description of Artificial Sequence: Synthetic oligonucleotide
  Target: LAMA2; (-) strand; PAM type: YTN; PAM sequence: TTC
ctgatcttagagaaaaacct

SEQ ID NO: 218757 - DNA, 20 bp, Artificial Sequence
  Description of Artificial Sequence: Synthetic oligonucleotide
  Target: LAMA2; (-) strand; PAM type: YTN; PAM sequence: TTA
ttcctgatcttagagaaaaa

SEQ ID NO: 218758 - DNA, 20 bp, Artificial Sequence
  Description of Artificial Sequence: Synthetic oligonucleotide
  Target: LAMA2; (-) strand; PAM type: YTN; PAM sequence: CTT
attcctgatcttagagaaaa

SEQ ID NO: 218759 - DNA, 20 bp, Artificial Sequence
  Description of Artificial Sequence: Synthetic oligonucleotide
  Target: LAMA2; (-) strand; PAM type: YTN; PAM sequence: TTG
tcttattcctgatcttagag

SEQ ID NO: 218760 - DNA, 20 bp, Artificial Sequence
  Description of Artificial Sequence: Synthetic oligonucleotide
  Target: LAMA2; (-) strand; PAM type: YTN; PAM sequence: CTT
gtcttattcctgatcttaga

SEQ ID NO: 218761 - DNA, 20 bp, Artificial Sequence
  Description of Artificial Sequence: Synthetic oligonucleotide
  Target: LAMA2; (-) strand; PAM type: YTN; PAM sequence: TTA
tgccaaatagaagtggtgca

SEQ ID NO: 218762 - DNA, 20 bp, Artificial Sequence
  Description of Artificial Sequence: Synthetic oligonucleotide
  Target: LAMA2; (-) strand; PAM type: YTN; PAM sequence: TTC
cagtattatgccaaatagaa

SEQ ID NO: 218763 - DNA, 20 bp, Artificial Sequence
  Description of Artificial Sequence: Synthetic oligonucleotide
  Target: LAMA2; (-) strand; PAM type: YTN; PAM sequence: CTT
ccagtattatgccaaataga

SEQ ID NO: 218764 - DNA, 20 bp, Artificial Sequence
  Description of Artificial Sequence: Synthetic oligonucleotide
  Target: LAMA2; (-) strand; PAM type: YTN; PAM sequence: CTA
ggtcttccagtattatgcca

SEQ ID NO: 218765 - DNA, 20 bp, Artificial Sequence
  Description of Artificial Sequence: Synthetic oligonucleotide
  Target: LAMA2; (-) strand; PAM type: YTN; PAM sequence: CTG
gctaggtcttccagtattat

SEQ ID NO: 218766 - DNA, 20 bp, Artificial Sequence
  Description of Artificial Sequence: Synthetic oligonucleotide
  Target: LAMA2; (-) strand; PAM type: YTN; PAM sequence: CTC
tggctaggtcttccagtatt

SEQ ID NO: 218767 - DNA, 20 bp, Artificial Sequence
  Description of Artificial Sequence: Synthetic oligonucleotide
  Target: LAMA2; (-) strand; PAM type: YTN; PAM sequence: TTC
tctggctaggtcttccagta

SEQ ID NO: 218768 - DNA, 20 bp, Artificial Sequence
  Description of Artificial Sequence: Synthetic oligonucleotide
  Target: LAMA2; (-) strand; PAM type: YTN; PAM sequence: TTT
ctctggctaggtcttccagt

SEQ ID NO: 218769 - DNA, 20 bp, Artificial Sequence
  Description of Artificial Sequence: Synthetic oligonucleotide
  Target: LAMA2; (-) strand; PAM type: YTN; PAM sequence: CTG
atttctctggctaggtcttc

SEQ ID NO: 218770 - DNA, 20 bp, Artificial Sequence
  Description of Artificial Sequence: Synthetic oligonucleotide
  Target: LAMA2; (-) strand; PAM type: YTN; PAM sequence: TTG
cctgatttctctggctaggt

SEQ ID NO: 218771 - DNA, 20 bp, Artificial Sequence
  Description of Artificial Sequence: Synthetic oligonucleotide
  Target: LAMA2; (-) strand; PAM type: YTN; PAM sequence: TTT
gcctgatttctctggctagg

SEQ ID NO: 218772 - DNA, 20 bp, Artificial Sequence
  Description of Artificial Sequence: Synthetic oligonucleotide
  Target: LAMA2; (-) strand; PAM type: YTN; PAM sequence: TTT
tgcctgatttctctggctag

SEQ ID NO: 218773 - DNA, 20 bp, Artificial Sequence
  Description of Artificial Sequence: Synthetic oligonucleotide
  Target: LAMA2; (-) strand; PAM type: YTN; PAM sequence: TTT
ttgcctgatttctctggcta

SEQ ID NO: 218774 - DNA, 20 bp, Artificial Sequence
  Description of Artificial Sequence: Synthetic oligonucleotide
  Target: LAMA2; (-) strand; PAM type: YTN; PAM sequence: TTT
tttgcctgatttctctggct

SEQ ID NO: 218775 - DNA, 20 bp, Artificial Sequence
  Description of Artificial Sequence: Synthetic oligonucleotide
  Target: LAMA2; (-) strand; PAM type: YTN; PAM sequence: TTT
ttttgcctgatttctctggc

SEQ ID NO: 218776 - DNA, 20 bp, Artificial Sequence
  Description of Artificial Sequence: Synthetic oligonucleotide
  Target: LAMA2; (-) strand; PAM type: YTN; PAM sequence: CTT
tttttgcctgatttctctgg

SEQ ID NO: 218777 - DNA, 20 bp, Artificial Sequence
  Description of Artificial Sequence: Synthetic oligonucleotide
  Target: LAMA2; (-) strand; PAM type: YTN; PAM sequence: TTC
tttttttgcctgatttctct

SEQ ID NO: 218778 - DNA, 20 bp, Artificial Sequence
  Description of Artificial Sequence: Synthetic oligonucleotide
  Target: LAMA2; (-) strand; PAM type: YTN; PAM sequence: TTT
ctttttttgcctgatttctc

SEQ ID NO: 218779 - DNA, 20 bp, Artificial Sequence
  Description of Artificial Sequence: Synthetic oligonucleotide
  Target: LAMA2; (-) strand; PAM type: YTN; PAM sequence: TTA
tttctttttttgcctgattt

SEQ ID NO: 218780 - DNA, 20 bp, Artificial Sequence
  Description of Artificial Sequence: Synthetic oligonucleotide
  Target: LAMA2; (-) strand; PAM type: YTN; PAM sequence: TTT
atttctttttttgcctgatt

SEQ ID NO: 218781 - DNA, 20 bp, Artificial Sequence
  Description of Artificial Sequence: Synthetic oligonucleotide
  Target: LAMA2; (-) strand; PAM type: YTN; PAM sequence: TTT
tatttctttttttgcctgat

SEQ ID NO: 218782 - DNA, 20 bp, Artificial Sequence
  Description of Artificial Sequence: Synthetic oligonucleotide
  Target: LAMA2; (-) strand; PAM type: YTN; PAM sequence: TTG
atgacaattttatttctttt

SEQ ID NO: 218783 - DNA, 20 bp, Artificial Sequence
  Description of Artificial Sequence: Synthetic oligonucleotide
  Target: LAMA2; (-) strand; PAM type: YTN; PAM sequence: TTT
gatgacaattttatttcttt

SEQ ID NO: 218784 - DNA, 20 bp, Artificial Sequence
  Description of Artificial Sequence: Synthetic oligonucleotide
  Target: LAMA2; (-) strand; PAM type: YTN; PAM sequence: TTT
tgatgacaattttatttctt

SEQ ID NO: 218785 - DNA, 20 bp, Artificial Sequence
  Description of Artificial Sequence: Synthetic oligonucleotide
  Target: LAMA2; (-) strand; PAM type: YTN; PAM sequence: TTC
aattttgatgacaattttat

SEQ ID NO: 218786 - DNA, 20 bp, Artificial Sequence
  Description of Artificial Sequence: Synthetic oligonucleotide
  Target: LAMA2; (-) strand; PAM type: YTN; PAM sequence: TTT
caattttgatgacaatttta

SEQ ID NO: 218787 - DNA, 20 bp, Artificial Sequence
  Description of Artificial Sequence: Synthetic oligonucleotide
  Target: LAMA2; (-) strand; PAM type: YTN; PAM sequence: TTT
tcaattttgatgacaatttt

SEQ ID NO: 218788 - DNA, 20 bp, Artificial Sequence
  Description of Artificial Sequence: Synthetic oligonucleotide
  Target: LAMA2; (-) strand; PAM type: YTN; PAM sequence: TTT
ttcaattttgatgacaattt

SEQ ID NO: 218789 - DNA, 20 bp, Artificial Sequence
  Description of Artificial Sequence: Synthetic oligonucleotide
  Target: LAMA2; (-) strand; PAM type: YTN; PAM sequence: CTT
tttcaattttgatgacaatt

SEQ ID NO: 218790 - DNA, 20 bp, Artificial Sequence
  Description of Artificial Sequence: Synthetic oligonucleotide
  Target: LAMA2; (-) strand; PAM type: YTN; PAM sequence: TTC
tttttcaattttgatgacaa

SEQ ID NO: 218791 - DNA, 20 bp, Artificial Sequence
  Description of Artificial Sequence: Synthetic oligonucleotide
  Target: LAMA2; (-) strand; PAM type: YTN; PAM sequence: TTT
ctttttcaattttgatgaca

SEQ ID NO: 218792 - DNA, 20 bp, Artificial Sequence
  Description of Artificial Sequence: Synthetic oligonucleotide
  Target: LAMA2; (-) strand; PAM type: YTN; PAM sequence: TTT
tctttttcaattttgatgac

SEQ ID NO: 218793 - DNA, 20 bp, Artificial Sequence
  Description of Artificial Sequence: Synthetic oligonucleotide
  Target: LAMA2; (-) strand; PAM type: YTN; PAM sequence: TTT
ttctttttcaattttgatga

SEQ ID NO: 218794 - DNA, 20 bp, Artificial Sequence
  Description of Artificial Sequence: Synthetic oligonucleotide
  Target: LAMA2; (-) strand; PAM type: YTN; PAM sequence: CTT
tttctttttcaattttgatg

SEQ ID NO: 218795 - DNA, 20 bp, Artificial Sequence
  Description of Artificial Sequence: Synthetic oligonucleotide
  Target: LAMA2; (-) strand; PAM type: YTN; PAM sequence: TTA
cctttttctttttcaatttt

SEQ ID NO: 218796 - DNA, 20 bp, Artificial Sequence
  Description of Artificial Sequence: Synthetic oligonucleotide
  Target: LAMA2; (-) strand; PAM type: YTN; PAM sequence: TTT
acctttttctttttcaattt

SEQ ID NO: 218797 - DNA, 20 bp, Artificial Sequence
  Description of Artificial Sequence: Synthetic oligonucleotide
  Target: LAMA2; (-) strand; PAM type: YTN; PAM sequence: CTT
tacctttttctttttcaatt

SEQ ID NO: 218798 - DNA, 20 bp, Artificial Sequence
  Description of Artificial Sequence: Synthetic oligonucleotide
  Target: LAMA2; (-) strand; PAM type: YTN; PAM sequence: CTG
caaaaagagacactttacct

SEQ ID NO: 218799 - DNA, 20 bp, Artificial Sequence
  Description of Artificial Sequence: Synthetic oligonucleotide
  Target: LAMA2; (-) strand; PAM type: YTN; PAM sequence: TTA
tgtcatctgcaaaaagagac

SEQ ID NO: 218800 - DNA, 20 bp, Artificial Sequence
  Description of Artificial Sequence: Synthetic oligonucleotide
  Target: LAMA2; (-) strand; PAM type: YTN; PAM sequence: CTA
tatgtaagattatgtcatct

SEQ ID NO: 218801 - DNA, 20 bp, Artificial Sequence
  Description of Artificial Sequence: Synthetic oligonucleotide
  Target: LAMA2; (-) strand; PAM type: YTN; PAM sequence: TTC
tatatgtaagattatgtcat

SEQ ID NO: 218802 - DNA, 20 bp, Artificial Sequence
  Description of Artificial Sequence: Synthetic oligonucleotide
  Target: LAMA2; (-) strand; PAM type: YTN; PAM sequence: TTT
ctatatgtaagattatgtca

SEQ ID NO: 218803 - DNA, 20 bp, Artificial Sequence
  Description of Artificial Sequence: Synthetic oligonucleotide
  Target: LAMA2; (-) strand; PAM type: YTN; PAM sequence: TTT
tctatatgtaagattatgtc

SEQ ID NO: 218804 - DNA, 20 bp, Artificial Sequence
  Description of Artificial Sequence: Synthetic oligonucleotide
  Target: LAMA2; (-) strand; PAM type: YTN; PAM sequence: TTG
gtggagtcagggttttctat

SEQ ID NO: 218805 - DNA, 20 bp, Artificial Sequence
  Description of Artificial Sequence: Synthetic oligonucleotide
  Target: LAMA2; (-) strand; PAM type: YTN; PAM sequence: TTT
ggtggagtcagggttttcta

SEQ ID NO: 218806 - DNA, 20 bp, Artificial Sequence
  Description of Artificial Sequence: Synthetic oligonucleotide
  Target: LAMA2; (-) strand; PAM type: YTN; PAM sequence: TTT
tggtggagtcagggttttct

SEQ ID NO: 218807 - DNA, 20 bp, Artificial Sequence
  Description of Artificial Sequence: Synthetic oligonucleotide
  Target: LAMA2; (-) strand; PAM type: YTN; PAM sequence: TTA
ttttggtggagtcagggttt

SEQ ID NO: 218808 - DNA, 20 bp, Artificial Sequence
  Description of Artificial Sequence: Synthetic oligonucleotide
  Target: LAMA2; (-) strand; PAM type: YTN; PAM sequence: CTA
acagttattttggtggagtc

SEQ ID NO: 218809 - DNA, 20 bp, Artificial Sequence
  Description of Artificial Sequence: Synthetic oligonucleotide
  Target: LAMA2; (-) strand; PAM type: YTN; PAM sequence: TTC
taacagttattttggtggag

SEQ ID NO: 218810 - DNA, 20 bp, Artificial Sequence
  Description of Artificial Sequence: Synthetic oligonucleotide
  Target: LAMA2; (-) strand; PAM type: YTN; PAM sequence: TTA
gttctaacagttattttggt

SEQ ID NO: 218811 - DNA, 20 bp, Artificial Sequence
  Description of Artificial Sequence: Synthetic oligonucleotide
  Target: LAMA2; (-) strand; PAM type: YTN; PAM sequence: TTA
ttagttctaacagttatttt

SEQ ID NO: 218812 - DNA, 20 bp, Artificial Sequence
  Description of Artificial Sequence: Synthetic oligonucleotide
  Target: LAMA2; (-) strand; PAM type: YTN; PAM sequence: TTT
attagttctaacagttattt

SEQ ID NO: 218813 - DNA, 20 bp, Artificial Sequence
  Description of Artificial Sequence: Synthetic oligonucleotide
  Target: LAMA2; (-) strand; PAM type: YTN; PAM sequence: TTG
tttattagttctaacagtta

SEQ ID NO: 218814 - DNA, 20 bp, Artificial Sequence
  Description of Artificial Sequence: Synthetic oligonucleotide
  Target: LAMA2; (-) strand; PAM type: YTN; PAM sequence: TTT
gtttattagttctaacagtt

SEQ ID NO: 218815 - DNA, 20 bp, Artificial Sequence
  Description of Artificial Sequence: Synthetic oligonucleotide
  Target: LAMA2; (-) strand; PAM type: YTN; PAM sequence: TTA
cagaatttgtttattagttc

SEQ ID NO: 218816 - DNA, 20 bp, Artificial Sequence
  Description of Artificial Sequence: Synthetic oligonucleotide
  Target: LAMA2; (-) strand; PAM type: YTN; PAM sequence: TTT
acagaatttgtttattagtt

SEQ ID NO: 218817 - DNA, 20 bp, Artificial Sequence
  Description of Artificial Sequence: Synthetic oligonucleotide
  Target: LAMA2; (-) strand; PAM type: YTN; PAM sequence: CTA
atttacagaatttgtttatt

SEQ ID NO: 218818 - DNA, 20 bp, Artificial Sequence
  Description of Artificial Sequence: Synthetic oligonucleotide
  Target: LAMA2; (-) strand; PAM type: YTN; PAM sequence: CTG
ctaatttacagaatttgttt

SEQ ID NO: 218819 - DNA, 20 bp, Artificial Sequence
  Description of Artificial Sequence: Synthetic oligonucleotide
  Target: LAMA2; (-) strand; PAM type: YTN; PAM sequence: TTG
tatcctgctaatttacagaa

SEQ ID NO: 218820 - DNA, 20 bp, Artificial Sequence
  Description of Artificial Sequence: Synthetic oligonucleotide
  Target: LAMA2; (-) strand; PAM type: YTN; PAM sequence: TTT
gtatcctgctaatttacaga

SEQ ID NO: 218821 - DNA, 20 bp, Artificial Sequence
  Description of Artificial Sequence: Synthetic oligonucleotide
  Target: LAMA2; (-) strand; PAM type: YTN; PAM sequence: TTT
tgtatcctgctaatttacag

SEQ ID NO: 218822 - DNA, 20 bp, Artificial Sequence
  Description of Artificial Sequence: Synthetic oligonucleotide
  Target: LAMA2; (-) strand; PAM type: YTN; PAM sequence: TTG
attttgtatcctgctaattt

SEQ ID NO: 218823 - DNA, 20 bp, Artificial Sequence
  Description of Artificial Sequence: Synthetic oligonucleotide
  Target: LAMA2; (-) strand; PAM type: YTN; PAM sequence: TTA
gtatattgattttgtatcct

SEQ ID NO: 218824 - DNA, 20 bp, Artificial Sequence
  Description of Artificial Sequence: Synthetic oligonucleotide
  Target: LAMA2; (-) strand; PAM type: YTN; PAM sequence: TTT
agtatattgattttgtatcc

SEQ ID NO: 218825 - DNA, 20 bp, Artificial Sequence
  Description of Artificial Sequence: Synthetic oligonucleotide
  Target: LAMA2; (-) strand; PAM type: YTN; PAM sequence: TTT
tagtatattgattttgtatc

SEQ ID NO: 218826 - DNA, 20 bp, Artificial Sequence
  Description of Artificial Sequence: Synthetic oligonucleotide
  Target: LAMA2; (-) strand; PAM type: YTN; PAM sequence: CTA
attttagtatattgattttg

SEQ ID NO: 218827 - DNA, 20 bp, Artificial Sequence
  Description of Artificial Sequence: Synthetic oligonucleotide
  Target: LAMA2; (-) strand; PAM type: YTN; PAM sequence: TTG
ctaattttagtatattgatt

SEQ ID NO: 218828 - DNA, 20 bp, Artificial Sequence
  Description of Artificial Sequence: Synthetic oligonucleotide
  Target: LAMA2; (-) strand; PAM type: YTN; PAM sequence: TTA
tggaaatgttgctaatttta

SEQ ID NO: 218829 - DNA, 20 bp, Artificial Sequence
  Description of Artificial Sequence: Synthetic oligonucleotide
  Target: LAMA2; (-) strand; PAM type: YTN; PAM sequence: TTT
atggaaatgttgctaatttt

SEQ ID NO: 218830 - DNA, 20 bp, Artificial Sequence
  Description of Artificial Sequence: Synthetic oligonucleotide
  Target: LAMA2; (-) strand; PAM type: YTN; PAM sequence: TTA
gtttatggaaatgttgctaa

SEQ ID NO: 218831 - DNA, 20 bp, Artificial Sequence
  Description of Artificial Sequence: Synthetic oligonucleotide
  Target: LAMA2; (-) strand; PAM type: YTN; PAM sequence: CTC
gttagtttatggaaatgttg

SEQ ID NO: 218832 - DNA, 20 bp, Artificial Sequence
  Description of Artificial Sequence: Synthetic oligonucleotide
  Target: LAMA2; (-) strand; PAM type: YTN; PAM sequence: TTC
ctcgttagtttatggaaatg

SEQ ID NO: 218833 - DNA, 20 bp, Artificial Sequence
  Description of Artificial Sequence: Synthetic oligonucleotide
  Target: LAMA2; (-) strand; PAM type: YTN; PAM sequence: TTA
aagatagttcctcgttagtt

SEQ ID NO: 218834 - DNA, 20 bp, Artificial Sequence
  Description of Artificial Sequence: Synthetic oligonucleotide
  Target: LAMA2; (-) strand; PAM type: YTN; PAM sequence: TTT
aaagatagttcctcgttagt

SEQ ID NO: 218835 - DNA, 20 bp, Artificial Sequence
  Description of Artificial Sequence: Synthetic oligonucleotide
  Target: LAMA2; (-) strand; PAM type: YTN; PAM sequence: TTT
taaagatagttcctcgttag

SEQ ID NO: 218836 - DNA, 20 bp, Artificial Sequence
  Description of Artificial Sequence: Synthetic oligonucleotide
  Target: LAMA2; (-) strand; PAM type: YTN; PAM sequence: TTT
ttaaagatagttcctcgtta

SEQ ID NO: 218837 - DNA, 20 bp, Artificial Sequence
  Description of Artificial Sequence: Synthetic oligonucleotide
  Target: LAMA2; (-) strand; PAM type: YTN; PAM sequence: TTT
tttaaagatagttcctcgtt

SEQ ID NO: 218838 - DNA, 20 bp, Artificial Sequence
  Description of Artificial Sequence: Synthetic oligonucleotide
  Target: LAMA2; (-) strand; PAM type: YTN; PAM sequence: TTT
ttttaaagatagttcctcgt

SEQ ID NO: 218839 - DNA, 20 bp, Artificial Sequence
  Description of Artificial Sequence: Synthetic oligonucleotide
  Target: LAMA2; (-) strand; PAM type: YTN; PAM sequence: TTG
atttttttaaagatagttcc

SEQ ID NO: 218840 - DNA, 20 bp, Artificial Sequence
  Description of Artificial Sequence: Synthetic oligonucleotide
  Target: LAMA2; (-) strand; PAM type: YTN; PAM sequence: TTA
ttgatttttttaaagatagt

SEQ ID NO: 218841 - DNA, 20 bp, Artificial Sequence
  Description of Artificial Sequence: Synthetic oligonucleotide
  Target: LAMA2; (-) strand; PAM type: YTN; PAM sequence: TTT
attgatttttttaaagatag

SEQ ID NO: 218842 - DNA, 20 bp, Artificial Sequence
  Description of Artificial Sequence: Synthetic oligonucleotide
  Target: LAMA2; (-) strand; PAM type: YTN; PAM sequence: TTT
tattgatttttttaaagata

SEQ ID NO: 218843 - DNA, 20 bp, Artificial Sequence
  Description of Artificial Sequence: Synthetic oligonucleotide
  Target: LAMA2; (-) strand; PAM type: YTN; PAM sequence: TTA
ttttattgatttttttaaag

SEQ ID NO: 218844 - DNA, 20 bp, Artificial Sequence
  Description of Artificial Sequence: Synthetic oligonucleotide
  Target: LAMA2; (-) strand; PAM type: YTN; PAM sequence: CTA
tggtgaatgggattatttta

SEQ ID NO: 218845 - DNA, 20 bp, Artificial Sequence
  Description of Artificial Sequence: Synthetic oligonucleotide
  Target: LAMA2; (-) strand; PAM type: YTN; PAM sequence: TTA
gctatggtgaatgggattat

SEQ ID NO: 218846 - DNA, 20 bp, Artificial Sequence
  Description of Artificial Sequence: Synthetic oligonucleotide
  Target: LAMA2; (-) strand; PAM type: YTN; PAM sequence: TTT
agctatggtgaatgggatta

SEQ ID NO: 218847 - DNA, 20 bp, Artificial Sequence
  Description of Artificial Sequence: Synthetic oligonucleotide
  Target: LAMA2; (-) strand; PAM type: YTN; PAM sequence: TTT
tagctatggtgaatgggatt

SEQ ID NO: 218848 - DNA, 20 bp, Artificial Sequence
  Description of Artificial Sequence: Synthetic oligonucleotide
  Target: LAMA2; (-) strand; PAM type: YTN; PAM sequence: CTT
ttagctatggtgaatgggat

SEQ ID NO: 218849 - DNA, 20 bp, Artificial Sequence
  Description of Artificial Sequence: Synthetic oligonucleotide
  Target: LAMA2; (-) strand; PAM type: YTN; PAM sequence: TTC
ttttagctatggtgaatggg

SEQ ID NO: 218850 - DNA, 20 bp, Artificial Sequence
  Description of Artificial Sequence: Synthetic oligonucleotide
  Target: LAMA2; (-) strand; PAM type: YTN; PAM sequence: TTT
cttttagctatggtgaatgg

SEQ ID NO: 218851 - DNA, 20 bp, Artificial Sequence
  Description of Artificial Sequence: Synthetic oligonucleotide
  Target: LAMA2; (-) strand; PAM type: YTN; PAM sequence: TTT
tcttttagctatggtgaatg

SEQ ID NO: 218852 - DNA, 20 bp, Artificial Sequence
  Description of Artificial Sequence: Synthetic oligonucleotide
  Target: LAMA2; (-) strand; PAM type: YTN; PAM sequence: TTT
ttcttttagctatggtgaat

SEQ ID NO: 218853 - DNA, 20 bp, Artificial Sequence
  Description of Artificial Sequence: Synthetic oligonucleotide
  Target: LAMA2; (-) strand; PAM type: YTN; PAM sequence: TTA
tttttcttttagctatggtg

SEQ ID NO: 218854 - DNA, 20 bp, Artificial Sequence
  Description of Artificial Sequence: Synthetic oligonucleotide
  Target: LAMA2; (-) strand; PAM type: YTN; PAM sequence: TTT
atttttcttttagctatggt

SEQ ID NO: 218855 - DNA, 20 bp, Artificial Sequence
  Description of Artificial Sequence: Synthetic oligonucleotide
  Target: LAMA2; (-) strand; PAM type: YTN; PAM sequence: TTT
tatttttcttttagctatgg

SEQ ID NO: 218856 - DNA, 20 bp, Artificial Sequence
  Description of Artificial Sequence: Synthetic oligonucleotide
  Target: LAMA2; (-) strand; PAM type: YTN; PAM sequence: TTT
ttatttttcttttagctatg

SEQ ID NO: 218857 - DNA, 20 bp, Artificial Sequence
  Description of Artificial Sequence: Synthetic oligonucleotide
  Target: LAMA2; (-) strand; PAM type: YTN; PAM sequence: TTT
tttatttttcttttagctat

SEQ ID NO: 218858 - DNA, 20 bp, Artificial Sequence
  Description of Artificial Sequence: Synthetic oligonucleotide
  Target: LAMA2; (-) strand; PAM type: YTN; PAM sequence: TTA
ccaaattttttatttttctt

SEQ ID NO: 218859 - DNA, 20 bp, Artificial Sequence
  Description of Artificial Sequence: Synthetic oligonucleotide
  Target: LAMA2; (-) strand; PAM type: YTN; PAM sequence: TTA
ttaccaaattttttattttt

SEQ ID NO: 218860 - DNA, 20 bp, Artificial Sequence
  Description of Artificial Sequence: Synthetic oligonucleotide
  Target: LAMA2; (-) strand; PAM type: YTN; PAM sequence: TTT
attaccaaattttttatttt

SEQ ID NO: 218861 - DNA, 20 bp, Artificial Sequence
  Description of Artificial Sequence: Synthetic oligonucleotide
  Target: LAMA2; (-) strand; PAM type: YTN; PAM sequence: TTA
aatttattaccaaatttttt

SEQ ID NO: 218862 - DNA, 20 bp, Artificial Sequence
  Description of Artificial Sequence: Synthetic oligonucleotide
  Target: LAMA2; (-) strand; PAM type: YTN; PAM sequence: TTG
gttaaatttattaccaaatt

SEQ ID NO: 218863 - DNA, 20 bp, Artificial Sequence
  Description of Artificial Sequence: Synthetic oligonucleotide
  Target: LAMA2; (-) strand; PAM type: YTN; PAM sequence: CTT
ggttaaatttattaccaaat

SEQ ID NO: 218864 - DNA, 20 bp, Artificial Sequence
  Description of Artificial Sequence: Synthetic oligonucleotide
  Target: LAMA2; (-) strand; PAM type: YTN; PAM sequence: CTC
ttggttaaatttattaccaa

SEQ ID NO: 218865 - DNA, 20 bp, Artificial Sequence
  Description of Artificial Sequence: Synthetic oligonucleotide
  Target: LAMA2; (-) strand; PAM type: YTN; PAM sequence: TTG
ggtggggacacagagccaaa

SEQ ID NO: 218866 - DNA, 20 bp, Artificial Sequence
  Description of Artificial Sequence: Synthetic oligonucleotide
  Target: LAMA2; (-) strand; PAM type: YTN; PAM sequence: TTT
gggtggggacacagagccaa

SEQ ID NO: 218867 - DNA, 20 bp, Artificial Sequence
  Description of Artificial Sequence: Synthetic oligonucleotide
  Target: LAMA2; (-) strand; PAM type: YTN; PAM sequence: TTC
aagatgaaatttgggtgggg

SEQ ID NO: 218868 - DNA, 20 bp, Artificial Sequence
  Description of Artificial Sequence: Synthetic oligonucleotide
  Target: LAMA2; (-) strand; PAM type: YTN; PAM sequence: TTG
gagtacaattcaagatgaaa

SEQ ID NO: 218869 - DNA, 20 bp, Artificial Sequence
  Description of Artificial Sequence: Synthetic oligonucleotide
  Target: LAMA2; (-) strand; PAM type: YTN; PAM sequence: TTA
ttggagtacaattcaagatg

SEQ ID NO: 218870 - DNA, 20 bp, Artificial Sequence
  Description of Artificial Sequence: Synthetic oligonucleotide
  Target: LAMA2; (-) strand; PAM type: YTN; PAM sequence: CTC
ccacaacacatgggaattat

SEQ ID NO: 218871 - DNA, 20 bp, Artificial Sequence
  Description of Artificial Sequence: Synthetic oligonucleotide
  Target: LAMA2; (-) strand; PAM type: YTN; PAM sequence: CTC
ccaccaggtccctcccacaa

SEQ ID NO: 218872 - DNA, 20 bp, Artificial Sequence
  Description of Artificial Sequence: Synthetic oligonucleotide
  Target: LAMA2; (-) strand; PAM type: YTN; PAM sequence: TTC
agccatctcccaccaggtcc

SEQ ID NO: 218873 - DNA, 20 bp, Artificial Sequence
  Description of Artificial Sequence: Synthetic oligonucleotide
  Target: LAMA2; (-) strand; PAM type: YTN; PAM sequence: CTC
ccatgattcagccatctccc

SEQ ID NO: 218874 - DNA, 20 bp, Artificial Sequence
  Description of Artificial Sequence: Synthetic oligonucleotide
  Target: LAMA2; (-) strand; PAM type: YTN; PAM sequence: CTA
ccacgacaacagcatggggg

SEQ ID NO: 218875 - DNA, 20 bp, Artificial Sequence
  Description of Artificial Sequence: Synthetic oligonucleotide
  Target: LAMA2; (-) strand; PAM type: YTN; PAM sequence: TTC
actaccacgacaacagcatg

SEQ ID NO: 218876 - DNA, 20 bp, Artificial Sequence
  Description of Artificial Sequence: Synthetic oligonucleotide
  Target: LAMA2; (-) strand; PAM type: YTN; PAM sequence: TTT
cactaccacgacaacagcat

SEQ ID NO: 218877 - DNA, 20 bp, Artificial Sequence
  Description of Artificial Sequence: Synthetic oligonucleotide
  Target: LAMA2; (-) strand; PAM type: YTN; PAM sequence: TTT
tcactaccacgacaacagca

SEQ ID NO: 218878 - DNA, 20 bp, Artificial Sequence
  Description of Artificial Sequence: Synthetic oligonucleotide
  Target: LAMA2; (-) strand; PAM type: YTN; PAM sequence: CTT
ttcactaccacgacaacagc

SEQ ID NO: 218879 - DNA, 20 bp, Artificial Sequence
  Description of Artificial Sequence: Synthetic oligonucleotide
  Target: LAMA2; (-) strand; PAM type: YTN; PAM sequence: CTC
atgagacttttcactaccac

SEQ ID NO: 218880 - DNA, 20 bp, Artificial Sequence
  Description of Artificial Sequence: Synthetic oligonucleotide
  Target: LAMA2; (-) strand; PAM type: YTN; PAM sequence: CTA
ccagatctcatgagactttt

SEQ ID NO: 218881 - DNA, 20 bp, Artificial Sequence
  Description of Artificial Sequence: Synthetic oligonucleotide
  Target: LAMA2; (-) strand; PAM type: YTN; PAM sequence: CTG
ataaaactaccagatctcat

SEQ ID NO: 218882 - DNA, 20 bp, Artificial Sequence
  Description of Artificial Sequence: Synthetic oligonucleotide
  Target: LAMA2; (-) strand; PAM type: YTN; PAM sequence: TTA
catggatggcagcaggcaag

SEQ ID NO: 218883 - DNA, 20 bp, Artificial Sequence
  Description of Artificial Sequence: Synthetic oligonucleotide
  Target: LAMA2; (-) strand; PAM type: YTN; PAM sequence: CTT
acatggatggcagcaggcaa

SEQ ID NO: 218884 - DNA, 20 bp, Artificial Sequence
  Description of Artificial Sequence: Synthetic oligonucleotide
  Target: LAMA2; (-) strand; PAM type: YTN; PAM sequence: CTG
tcttacatggatggcagcag

SEQ ID NO: 218885 - DNA, 20 bp, Artificial Sequence
  Description of Artificial Sequence: Synthetic oligonucleotide
  Target: LAMA2; (-) strand; PAM type: YTN; PAM sequence: CTC
acaatcatggtggaaggtaa

SEQ ID NO: 218886 - DNA, 20 bp, Artificial Sequence
  Description of Artificial Sequence: Synthetic oligonucleotide
  Target: LAMA2; (-) strand; PAM type: YTN; PAM sequence: CTG
gggaagcctcacaatcatgg

SEQ ID NO: 218887 - DNA, 20 bp, Artificial Sequence
  Description of Artificial Sequence: Synthetic oligonucleotide
  Target: LAMA2; (-) strand; PAM type: YTN; PAM sequence: TTC
catgtggctggggaagcctc

SEQ ID NO: 218888 - DNA, 20 bp, Artificial Sequence
  Description of Artificial Sequence: Synthetic oligonucleotide
  Target: LAMA2; (-) strand; PAM type: YTN; PAM sequence: TTA
tagttccatgtggctgggga

SEQ ID NO: 218889 - DNA, 20 bp, Artificial Sequence
  Description of Artificial Sequence: Synthetic oligonucleotide
  Target: LAMA2; (-) strand; PAM type: YTN; PAM sequence: CTT
atagttccatgtggctgggg

SEQ ID NO: 218890 - DNA, 20 bp, Artificial Sequence
  Description of Artificial Sequence: Synthetic oligonucleotide
  Target: LAMA2; (-) strand; PAM type: YTN; PAM sequence: TTG
gacttatagttccatgtggc

SEQ ID NO: 218891 - DNA, 20 bp, Artificial Sequence
  Description of Artificial Sequence: Synthetic oligonucleotide
  Target: LAMA2; (-) strand; PAM type: YTN; PAM sequence: TTA
attggacttatagttccatg

SEQ ID NO: 218892 - DNA, 20 bp, Artificial Sequence
  Description of Artificial Sequence: Synthetic oligonucleotide
  Target: LAMA2; (-) strand; PAM type: YTN; PAM sequence: TTT
aattggacttatagttccat

SEQ ID NO: 218893 - DNA, 20 bp, Artificial Sequence
  Description of Artificial Sequence: Synthetic oligonucleotide
  Target: LAMA2; (-) strand; PAM type: YTN; PAM sequence: TTA
caaaagaaagaggtttaatt

SEQ ID NO: 218894 - DNA, 20 bp, Artificial Sequence
  Description of Artificial Sequence: Synthetic oligonucleotide
  Target: LAMA2; (-) strand; PAM type: YTN; PAM sequence: TTT
acaaaagaaagaggtttaat

SEQ ID NO: 218895 - DNA, 20 bp, Artificial Sequence
  Description of Artificial Sequence: Synthetic oligonucleotide
  Target: LAMA2; (-) strand; PAM type: YTN; PAM sequence: CTG
ggcaatttacaaaagaaaga

SEQ ID NO: 218896 - DNA, 20 bp, Artificial Sequence
  Description of Artificial Sequence: Synthetic oligonucleotide
  Target: LAMA2; (-) strand; PAM type: YTN; PAM sequence: CTG
agactgggcaatttacaaaa

SEQ ID NO: 218897 - DNA, 20 bp, Artificial Sequence
  Description of Artificial Sequence: Synthetic oligonucleotide
  Target: LAMA2; (-) strand; PAM type: YTN; PAM sequence: CTC
aaaaaaaaaaaaaaaaaaaa

SEQ ID NO: 218898 - DNA, 20 bp, Artificial Sequence
  Description of Artificial Sequence: Synthetic oligonucleotide
  Target: LAMA2; (-) strand; PAM type: YTN; PAM sequence: CTG
cgtctcaaaaaaaaaaaaaa

SEQ ID NO: 218899 - DNA, 20 bp, Artificial Sequence
  Description of Artificial Sequence: Synthetic oligonucleotide
  Target: LAMA2; (-) strand; PAM type: YTN; PAM sequence: CTG
ggcgacagagcgagactgcg

SEQ ID NO: 218900 - DNA, 20 bp, Artificial Sequence
  Description of Artificial Sequence: Synthetic oligonucleotide
  Target: LAMA2; (-) strand; PAM type: YTN; PAM sequence: CTC
cagcctgggcgacagagcga

SEQ ID NO: 218901 - DNA, 20 bp, Artificial Sequence
  Description of Artificial Sequence: Synthetic oligonucleotide
  Target: LAMA2; (-) strand; PAM type: YTN; PAM sequence: CTG
cactccagcctgggcgacag

SEQ ID NO: 218902 - DNA, 20 bp, Artificial Sequence
  Description of Artificial Sequence: Synthetic oligonucleotide
  Target: LAMA2; (-) strand; PAM type: YTN; PAM sequence: TTG
cagtgagccgagatcccgcc

SEQ ID NO: 218903 - DNA, 20 bp, Artificial Sequence
  Description of Artificial Sequence: Synthetic oligonucleotide
  Target: LAMA2; (-) strand; PAM type: YTN; PAM sequence: CTT
gcagtgagccgagatcccgc

SEQ ID NO: 218904 - DNA, 20 bp, Artificial Sequence
  Description of Artificial Sequence: Synthetic oligonucleotide
  Target: LAMA2; (-) strand; PAM type: YTN; PAM sequence: CTG
aggcaggagaatggcatgaa

SEQ ID NO: 218905 - DNA, 20 bp, Artificial Sequence
  Description of Artificial Sequence: Synthetic oligonucleotide
  Target: LAMA2; (-) strand; PAM type: YTN; PAM sequence: TTG
ggaggctgaggcaggagaat

SEQ ID NO: 218906 - DNA, 20 bp, Artificial Sequence
  Description of Artificial Sequence: Synthetic oligonucleotide
  Target: LAMA2; (-) strand; PAM type: YTN; PAM sequence: CTT
gggaggctgaggcaggagaa

SEQ ID NO: 218907 - DNA, 20 bp, Artificial Sequence
  Description of Artificial Sequence: Synthetic oligonucleotide
  Target: LAMA2; (-) strand; PAM type: YTN; PAM sequence: CTA
cttgggaggctgaggcagga

SEQ ID NO: 218908 - DNA, 20 bp, Artificial Sequence
  Description of Artificial Sequence: Synthetic oligonucleotide
  Target: LAMA2; (-) strand; PAM type: YTN; PAM sequence: CTG
tagtcccagctacttgggag

SEQ ID NO: 218909 - DNA, 20 bp, Artificial Sequence
  Description of Artificial Sequence: Synthetic oligonucleotide
  Target: LAMA2; (-) strand; PAM type: YTN; PAM sequence: TTA
gccgggcgtagtggcgggcg

SEQ ID NO: 218910 - DNA, 20 bp, Artificial Sequence
  Description of Artificial Sequence: Synthetic oligonucleotide
  Target: LAMA2; (-) strand; PAM type: YTN; PAM sequence: CTA
aaaatacaaaaaattagccg

SEQ ID NO: 218911 - DNA, 20 bp, Artificial Sequence
  Description of Artificial Sequence: Synthetic oligonucleotide
  Target: LAMA2; (-) strand; PAM type: YTN; PAM sequence: CTA
ctaaaaatacaaaaaattag

SEQ ID NO: 218912 - DNA, 20 bp, Artificial Sequence
  Description of Artificial Sequence: Synthetic oligonucleotide
  Target: LAMA2; (-) strand; PAM type: YTN; PAM sequence: CTC
tactaaaaatacaaaaaatt

SEQ ID NO: 218913 - DNA, 20 bp, Artificial Sequence
  Description of Artificial Sequence: Synthetic oligonucleotide
  Target: LAMA2; (-) strand; PAM type: YTN; PAM sequence: CTA
aaacggtgaaaccccgtctc

SEQ ID NO: 218914 - DNA, 20 bp, Artificial Sequence
  Description of Artificial Sequence: Synthetic oligonucleotide
  Target: LAMA2; (-) strand; PAM type: YTN; PAM sequence: TTG
ggaggccgaggcgggcggat

SEQ ID NO: 218915 - DNA, 20 bp, Artificial Sequence
  Description of Artificial Sequence: Synthetic oligonucleotide
  Target: LAMA2; (-) strand; PAM type: YTN; PAM sequence: TTT
gggaggccgaggcgggcgga

SEQ ID NO: 218916 - DNA, 20 bp, Artificial Sequence
  Description of Artificial Sequence: Synthetic oligonucleotide
  Target: LAMA2; (-) strand; PAM type: YTN; PAM sequence: CTT
tgggaggccgaggcgggcgg

SEQ ID NO: 218917 - DNA, 20 bp, Artificial Sequence
  Description of Artificial Sequence: Synthetic oligonucleotide
  Target: LAMA2; (-) strand; PAM type: YTN; PAM sequence: CTG
taatcccagcactttgggag

SEQ ID NO: 218918 - DNA, 20 bp, Artificial Sequence
  Description of Artificial Sequence: Synthetic oligonucleotide
  Target: LAMA2; (-) strand; PAM type: YTN; PAM sequence: CTC
acgcctgtaatcccagcact

SEQ ID NO: 218919 - DNA, 20 bp, Artificial Sequence
  Description of Artificial Sequence: Synthetic oligonucleotide
  Target: LAMA2; (-) strand; PAM type: YTN; PAM sequence: CTG
aggccgggcgcggtggctca

SEQ ID NO: 218920 - DNA, 20 bp, Artificial Sequence
  Description of Artificial Sequence: Synthetic oligonucleotide
  Target: LAMA2; (-) strand; PAM type: YTN; PAM sequence: CTG
ataaagacatacctgaggcc

SEQ ID NO: 218921 - DNA, 20 bp, Artificial Sequence
  Description of Artificial Sequence: Synthetic oligonucleotide
  Target: LAMA2; (-) strand; PAM type: YTN; PAM sequence: CTG
ctgataaagacatacctgag

SEQ ID NO: 218922 - DNA, 20 bp, Artificial Sequence
  Description of Artificial Sequence: Synthetic oligonucleotide
  Target: LAMA2; (-) strand; PAM type: YTN; PAM sequence: TTA
cactgctgataaagacatac

SEQ ID NO: 218923 - DNA, 20 bp, Artificial Sequence
  Description of Artificial Sequence: Synthetic oligonucleotide
  Target: LAMA2; (-) strand; PAM type: YTN; PAM sequence: TTT
acactgctgataaagacata

SEQ ID NO: 218924 - DNA, 20 bp, Artificial Sequence
  Description of Artificial Sequence: Synthetic oligonucleotide
  Target: LAMA2; (-) strand; PAM type: YTN; PAM sequence: TTT
tacactgctgataaagacat

SEQ ID NO: 218925 - DNA, 20 bp, Artificial Sequence
  Description of Artificial Sequence: Synthetic oligonucleotide
  Target: LAMA2; (-) strand; PAM type: YTN; PAM sequence: TTT
ttacactgctgataaagaca

SEQ ID NO: 218926 - DNA, 20 bp, Artificial Sequence
  Description of Artificial Sequence: Synthetic oligonucleotide
  Target: LAMA2; (-) strand; PAM type: YTN; PAM sequence: CTG
tttttacactgctgataaag

SEQ ID NO: 218927 - DNA, 20 bp, Artificial Sequence
  Description of Artificial Sequence: Synthetic oligonucleotide
  Target: LAMA2; (-) strand; PAM type: YTN; PAM sequence: TTA
gtctgtttttacactgctga

SEQ ID NO: 218928 - DNA, 20 bp, Artificial Sequence
  Description of Artificial Sequence: Synthetic oligonucleotide
  Target: LAMA2; (-) strand; PAM type: YTN; PAM sequence: CTG
tattagtctgtttttacact

SEQ ID NO: 218929 - DNA, 20 bp, Artificial Sequence
  Description of Artificial Sequence: Synthetic oligonucleotide
  Target: LAMA2; (-) strand; PAM type: YTN; PAM sequence: CTC
tgtattagtctgtttttaca

SEQ ID NO: 218930 - DNA, 20 bp, Artificial Sequence
  Description of Artificial Sequence: Synthetic oligonucleotide
  Target: LAMA2; (-) strand; PAM type: YTN; PAM sequence: TTC
atctctgtattagtctgttt

SEQ ID NO: 218931 - DNA, 20 bp, Artificial Sequence
  Description of Artificial Sequence: Synthetic oligonucleotide
  Target: LAMA2; (-) strand; PAM type: YTN; PAM sequence: TTT
catctctgtattagtctgtt

SEQ ID NO: 218932 - DNA, 20 bp, Artificial Sequence
  Description of Artificial Sequence: Synthetic oligonucleotide
  Target: LAMA2; (-) strand; PAM type: YTN; PAM sequence: CTT
tcatctctgtattagtctgt

SEQ ID NO: 218933 - DNA, 20 bp, Artificial Sequence
  Description of Artificial Sequence: Synthetic oligonucleotide
  Target: LAMA2; (-) strand; PAM type: YTN; PAM sequence: TTC
agtgtaccagtctttcatct

SEQ ID NO: 218934 - DNA, 20 bp, Artificial Sequence
  Description of Artificial Sequence: Synthetic oligonucleotide
  Target: LAMA2; (-) strand; PAM type: YTN; PAM sequence: TTT
cagtgtaccagtctttcatc

SEQ ID NO: 218935 - DNA, 20 bp, Artificial Sequence
  Description of Artificial Sequence: Synthetic oligonucleotide
  Target: LAMA2; (-) strand; PAM type: YTN; PAM sequence: TTT
tcagtgtaccagtctttcat

SEQ ID NO: 218936 - DNA, 20 bp, Artificial Sequence
  Description of Artificial Sequence: Synthetic oligonucleotide
  Target: LAMA2; (-) strand; PAM type: YTN; PAM sequence: TTA
cagttttcagtgtaccagtc

SEQ ID NO: 218937 - DNA, 20 bp, Artificial Sequence
  Description of Artificial Sequence: Synthetic oligonucleotide
  Target: LAMA2; (-) strand; PAM type: YTN; PAM sequence: TTT
acagttttcagtgtaccagt

SEQ ID NO: 218938 - DNA, 20 bp, Artificial Sequence
  Description of Artificial Sequence: Synthetic oligonucleotide
  Target: LAMA2; (-) strand; PAM type: YTN; PAM sequence: TTT
tacagttttcagtgtaccag

SEQ ID NO: 218939 - DNA, 20 bp, Artificial Sequence
  Description of Artificial Sequence: Synthetic oligonucleotide
  Target: LAMA2; (-) strand; PAM type: YTN; PAM sequence: CTG
ttttacagttttcagtgtac

SEQ ID NO: 218940 - DNA, 20 bp, Artificial Sequence
  Description of Artificial Sequence: Synthetic oligonucleotide
  Target: LAMA2; (-) strand; PAM type: YTN; PAM sequence: TTC
atcactgttttacagttttc

SEQ ID NO: 218941 - DNA, 20 bp, Artificial Sequence
  Description of Artificial Sequence: Synthetic oligonucleotide
  Target: LAMA2; (-) strand; PAM type: YTN; PAM sequence: TTT
catcactgttttacagtttt

SEQ ID NO: 218942 - DNA, 20 bp, Artificial Sequence
  Description of Artificial Sequence: Synthetic oligonucleotide
  Target: LAMA2; (-) strand; PAM type: YTN; PAM sequence: TTA
tttcatcactgttttacagt

SEQ ID NO: 218943 - DNA, 20 bp, Artificial Sequence
  Description of Artificial Sequence: Synthetic oligonucleotide
  Target: LAMA2; (-) strand; PAM type: YTN; PAM sequence: TTT
atttcatcactgttttacag

SEQ ID NO: 218944 - DNA, 20 bp, Artificial Sequence
  Description of Artificial Sequence: Synthetic oligonucleotide
  Target: LAMA2; (-) strand; PAM type: YTN; PAM sequence: TTC
aatttatttcatcactgttt

SEQ ID NO: 218945 - DNA, 20 bp, Artificial Sequence
  Description of Artificial Sequence: Synthetic oligonucleotide
  Target: LAMA2; (-) strand; PAM type: YTN; PAM sequence: CTT
caatttatttcatcactgtt

SEQ ID NO: 218946 - DNA, 20 bp, Artificial Sequence
  Description of Artificial Sequence: Synthetic oligonucleotide
  Target: LAMA2; (-) strand; PAM type: YTN; PAM sequence: TTG
tgtcttcaatttatttcatc

SEQ ID NO: 218947 - DNA, 20 bp, Artificial Sequence
  Description of Artificial Sequence: Synthetic oligonucleotide
  Target: LAMA2; (-) strand; PAM type: YTN; PAM sequence: TTT
gtgtcttcaatttatttcat

SEQ ID NO: 218948 - DNA, 20 bp, Artificial Sequence
  Description of Artificial Sequence: Synthetic oligonucleotide
  Target: LAMA2; (-) strand; PAM type: YTN; PAM sequence: TTA
tttgtgtcttcaatttattt

SEQ ID NO: 218949 - DNA, 20 bp, Artificial Sequence
  Description of Artificial Sequence: Synthetic oligonucleotide
  Target: LAMA2; (-) strand; PAM type: YTN; PAM sequence: TTT
atttgtgtcttcaatttatt

SEQ ID NO: 218950 - DNA, 20 bp, Artificial Sequence
  Description of Artificial Sequence: Synthetic oligonucleotide
  Target: LAMA2; (-) strand; PAM type: YTN; PAM sequence: TTC
ccatttatttgtgtcttcaa

SEQ ID NO: 218951 - DNA, 20 bp, Artificial Sequence
  Description of Artificial Sequence: Synthetic oligonucleotide
  Target: LAMA2; (-) strand; PAM type: YTN; PAM sequence: TTT
cccatttatttgtgtcttca

SEQ ID NO: 218952 - DNA, 20 bp, Artificial Sequence
  Description of Artificial Sequence: Synthetic oligonucleotide
  Target: LAMA2; (-) strand; PAM type: YTN; PAM sequence: TTT
tcccatttatttgtgtcttc

SEQ ID NO: 218953 - DNA, 20 bp, Artificial Sequence
  Description of Artificial Sequence: Synthetic oligonucleotide
  Target: LAMA2; (-) strand; PAM type: YTN; PAM sequence: TTC
cacaaaacacaggatgtttt

SEQ ID NO: 218954 - DNA, 20 bp, Artificial Sequence
  Description of Artificial Sequence: Synthetic oligonucleotide
  Target: LAMA2; (-) strand; PAM type: YTN; PAM sequence: TTA
ttccacaaaacacaggatgt

SEQ ID NO: 218955 - DNA, 20 bp, Artificial Sequence
  Description of Artificial Sequence: Synthetic oligonucleotide
  Target: LAMA2; (-) strand; PAM type: YTN; PAM sequence: TTA
gttattccacaaaacacagg

SEQ ID NO: 218956 - DNA, 20 bp, Artificial Sequence
  Description of Artificial Sequence: Synthetic oligonucleotide
  Target: LAMA2; (-) strand; PAM type: YTN; PAM sequence: TTA
ataatattagttattccaca

SEQ ID NO: 218957 - DNA, 20 bp, Artificial Sequence
  Description of Artificial Sequence: Synthetic oligonucleotide
  Target: LAMA2; (-) strand; PAM type: YTN; PAM sequence: TTT
aataatattagttattccac

SEQ ID NO: 218958 - DNA, 20 bp, Artificial Sequence
  Description of Artificial Sequence: Synthetic oligonucleotide
  Target: LAMA2; (-) strand; PAM type: YTN; PAM sequence: TTT
taataatattagttattcca

SEQ ID NO: 218959 - DNA, 20 bp, Artificial Sequence
  Description of Artificial Sequence: Synthetic oligonucleotide
  Target: LAMA2; (-) strand; PAM type: YTN; PAM sequence: TTG
agtagtatggacattttaat

SEQ ID NO: 218960 - DNA, 20 bp, Artificial Sequence
  Description of Artificial Sequence: Synthetic oligonucleotide
  Target: LAMA2; (-) strand; PAM type: YTN; PAM sequence: CTG
tggatcacattgagtagtat

SEQ ID NO: 218961 - DNA, 20 bp, Artificial Sequence
  Description of Artificial Sequence: Synthetic oligonucleotide
  Target: LAMA2; (-) strand; PAM type: YTN; PAM sequence: CTG
aatctgtggatcacattgag

SEQ ID NO: 218962 - DNA, 20 bp, Artificial Sequence
  Description of Artificial Sequence: Synthetic oligonucleotide
  Target: LAMA2; (-) strand; PAM type: YTN; PAM sequence: TTG
cactgaatctgtggatcaca

SEQ ID NO: 218963 - DNA, 20 bp, Artificial Sequence
  Description of Artificial Sequence: Synthetic oligonucleotide
  Target: LAMA2; (-) strand; PAM type: YTN; PAM sequence: TTG
acaagaattgcactgaatct

SEQ ID NO: 218964 - DNA, 20 bp, Artificial Sequence
  Description of Artificial Sequence: Synthetic oligonucleotide
  Target: LAMA2; (-) strand; PAM type: YTN; PAM sequence: TTT
gacaagaattgcactgaatc

SEQ ID NO: 218965 - DNA, 20 bp, Artificial Sequence
  Description of Artificial Sequence: Synthetic oligonucleotide
  Target: LAMA2; (-) strand; PAM type: YTN; PAM sequence: TTT
tgacaagaattgcactgaat

SEQ ID NO: 218966 - DNA, 20 bp, Artificial Sequence
  Description of Artificial Sequence: Synthetic oligonucleotide
  Target: LAMA2; (-) strand; PAM type: YTN; PAM sequence: TTG
gaattttgacaagaattgca

SEQ ID NO: 218967 - DNA, 20 bp, Artificial Sequence
  Description of Artificial Sequence: Synthetic oligonucleotide
  Target: LAMA2; (-) strand; PAM type: YTN; PAM sequence: CTG
tgaaaaacgtcattggaatt

SEQ ID NO: 218968 - DNA, 20 bp, Artificial Sequence
  Description of Artificial Sequence: Synthetic oligonucleotide
  Target: LAMA2; (-) strand; PAM type: YTN; PAM sequence: TTC
tgtgaaaaacgtcattggaa

SEQ ID NO: 218969 - DNA, 20 bp, Artificial Sequence
  Description of Artificial Sequence: Synthetic oligonucleotide
  Target: LAMA2; (-) strand; PAM type: YTN; PAM sequence: TTT
ctgtgaaaaacgtcattgga

SEQ ID NO: 218970 - DNA, 20 bp, Artificial Sequence
  Description of Artificial Sequence: Synthetic oligonucleotide
  Target: LAMA2; (-) strand; PAM type: YTN; PAM sequence: TTA
tttctgtgaaaaacgtcatt

SEQ ID NO: 218971 - DNA, 20 bp, Artificial Sequence
  Description of Artificial Sequence: Synthetic oligonucleotide
  Target: LAMA2; (-) strand; PAM type: YTN; PAM sequence: TTT
atttctgtgaaaaacgtcat

SEQ ID NO: 218972 - DNA, 20 bp, Artificial Sequence
  Description of Artificial Sequence: Synthetic oligonucleotide
  Target: LAMA2; (-) strand; PAM type: YTN; PAM sequence: TTT
tatttctgtgaaaaacgtca

SEQ ID NO: 218973 - DNA, 20 bp, Artificial Sequence
  Description of Artificial Sequence: Synthetic oligonucleotide
  Target: LAMA2; (-) strand; PAM type: YTN; PAM sequence: TTT
ttatttctgtgaaaaacgtc

SEQ ID NO: 218974 - DNA, 20 bp, Artificial Sequence
  Description of Artificial Sequence: Synthetic oligonucleotide
  Target: LAMA2; (-) strand; PAM type: YTN; PAM sequence: TTA
tttttatttctgtgaaaaac

SEQ ID NO: 218975 - DNA, 20 bp, Artificial Sequence
  Description of Artificial Sequence: Synthetic oligonucleotide
  Target: LAMA2; (-) strand; PAM type: YTN; PAM sequence: TTT
atttttatttctgtgaaaaa

SEQ ID NO: 218976 - DNA, 20 bp, Artificial Sequence
  Description of Artificial Sequence: Synthetic oligonucleotide
  Target: LAMA2; (-) strand; PAM type: YTN; PAM sequence: TTA
ggatttatttttatttctgt

SEQ ID NO: 218977 - DNA, 20 bp, Artificial Sequence
  Description of Artificial Sequence: Synthetic oligonucleotide
  Target: LAMA2; (-) strand; PAM type: YTN; PAM sequence: TTT
aggatttatttttatttctg

SEQ ID NO: 218978 - DNA, 20 bp, Artificial Sequence
  Description of Artificial Sequence: Synthetic oligonucleotide
  Target: LAMA2; (-) strand; PAM type: YTN; PAM sequence: TTC
cataaaatatttaggattta

SEQ ID NO: 218979 - DNA, 20 bp, Artificial Sequence
  Description of Artificial Sequence: Synthetic oligonucleotide
  Target: LAMA2; (-) strand; PAM type: YTN; PAM sequence: TTG
tggttccataaaatatttag

SEQ ID NO: 218980 - DNA, 20 bp, Artificial Sequence
  Description of Artificial Sequence: Synthetic oligonucleotide
  Target: LAMA2; (-) strand; PAM type: YTN; PAM sequence: TTT
gtggttccataaaatattta

SEQ ID NO: 218981 - DNA, 20 bp, Artificial Sequence
  Description of Artificial Sequence: Synthetic oligonucleotide
  Target: LAMA2; (-) strand; PAM type: YTN; PAM sequence: TTT
tgtggttccataaaatattt

SEQ ID NO: 218982 - DNA, 20 bp, Artificial Sequence
  Description of Artificial Sequence: Synthetic oligonucleotide
  Target: LAMA2; (-) strand; PAM type: YTN; PAM sequence: CTT
ttgtggttccataaaatatt

SEQ ID NO: 218983 - DNA, 20 bp, Artificial Sequence
  Description of Artificial Sequence: Synthetic oligonucleotide
  Target: LAMA2; (-) strand; PAM type: YTN; PAM sequence: TTA
gcaccttttgtggttccata

SEQ ID NO: 218984 - DNA, 20 bp, Artificial Sequence
  Description of Artificial Sequence: Synthetic oligonucleotide
  Target: LAMA2; (-) strand; PAM type: YTN; PAM sequence: TTT
agcaccttttgtggttccat

SEQ ID NO: 218985 - DNA, 20 bp, Artificial Sequence
  Description of Artificial Sequence: Synthetic oligonucleotide
  Target: LAMA2; (-) strand; PAM type: YTN; PAM sequence: CTT
tagcaccttttgtggttcca

SEQ ID NO: 218986 - DNA, 20 bp, Artificial Sequence
  Description of Artificial Sequence: Synthetic oligonucleotide
  Target: LAMA2; (-) strand; PAM type: YTN; PAM sequence: TTG
ctttagcaccttttgtggtt

SEQ ID NO: 218987 - DNA, 20 bp, Artificial Sequence
  Description of Artificial Sequence: Synthetic oligonucleotide
  Target: LAMA2; (-) strand; PAM type: YTN; PAM sequence: CTC
aagattgctttagcaccttt

SEQ ID NO: 218988 - DNA, 20 bp, Artificial Sequence
  Description of Artificial Sequence: Synthetic oligonucleotide
  Target: LAMA2; (-) strand; PAM type: YTN; PAM sequence: TTG
ctcaagattgctttagcacc

SEQ ID NO: 218989 - DNA, 20 bp, Artificial Sequence
  Description of Artificial Sequence: Synthetic oligonucleotide
  Target: LAMA2; (-) strand; PAM type: YTN; PAM sequence: TTT
gctcaagattgctttagcac

SEQ ID NO: 218990 - DNA, 20 bp, Artificial Sequence
  Description of Artificial Sequence: Synthetic oligonucleotide
  Target: LAMA2; (-) strand; PAM type: YTN; PAM sequence: TTT
tgctcaagattgctttagca

SEQ ID NO: 218991 - DNA, 20 bp, Artificial Sequence
  Description of Artificial Sequence: Synthetic oligonucleotide
  Target: LAMA2; (-) strand; PAM type: YTN; PAM sequence: TTT
ttgctcaagattgctttagc

SEQ ID NO: 218992 - DNA, 20 bp, Artificial Sequence
  Description of Artificial Sequence: Synthetic oligonucleotide
  Target: LAMA2; (-) strand; PAM type: YTN; PAM sequence: CTT
tttgctcaagattgctttag

SEQ ID NO: 218993 - DNA, 20 bp, Artificial Sequence
  Description of Artificial Sequence: Synthetic oligonucleotide
  Target: LAMA2; (-) strand; PAM type: YTN; PAM sequence: TTC
tttttgctcaagattgcttt

SEQ ID NO: 218994 - DNA, 20 bp, Artificial Sequence
  Description of Artificial Sequence: Synthetic oligonucleotide
  Target: LAMA2; (-) strand; PAM type: YTN; PAM sequence: TTG
ttctttttgctcaagattgc

SEQ ID NO: 218995 - DNA, 20 bp, Artificial Sequence
  Description of Artificial Sequence: Synthetic oligonucleotide
  Target: LAMA2; (-) strand; PAM type: YTN; PAM sequence: TTT
gttctttttgctcaagattg

SEQ ID NO: 218996 - DNA, 20 bp, Artificial Sequence
  Description of Artificial Sequence: Synthetic oligonucleotide
  Target: LAMA2; (-) strand; PAM type: YTN; PAM sequence: CTT
tgttctttttgctcaagatt

SEQ ID NO: 218997 - DNA, 20 bp, Artificial Sequence
  Description of Artificial Sequence: Synthetic oligonucleotide
  Target: LAMA2; (-) strand; PAM type: YTN; PAM sequence: TTC
cagctttgttctttttgctc

SEQ ID NO: 218998 - DNA, 20 bp, Artificial Sequence
  Description of Artificial Sequence: Synthetic oligonucleotide
  Target: LAMA2; (-) strand; PAM type: YTN; PAM sequence: CTT
ccagctttgttctttttgct

SEQ ID NO: 218999 - DNA, 20 bp, Artificial Sequence
  Description of Artificial Sequence: Synthetic oligonucleotide
  Target: LAMA2; (-) strand; PAM type: YTN; PAM sequence: TTA
aagtcagatagtgtgatgct

SEQ ID NO: 219000 - DNA, 20 bp, Artificial Sequence
  Description of Artificial Sequence: Synthetic oligonucleotide
  Target: LAMA2; (-) strand; PAM type: YTN; PAM sequence: TTT
aaagtcagatagtgtgatgc

SEQ ID NO: 219001 - DNA, 20 bp, Artificial Sequence
  Description of Artificial Sequence: Synthetic oligonucleotide
  Target: LAMA2; (-) strand; PAM type: YTN; PAM sequence: TTT
taaagtcagatagtgtgatg

SEQ ID NO: 219002 - DNA, 20 bp, Artificial Sequence
  Description of Artificial Sequence: Synthetic oligonucleotide
  Target: LAMA2; (-) strand; PAM type: YTN; PAM sequence: TTG
tagtatattttaaagtcaga

SEQ ID NO: 219003 - DNA, 20 bp, Artificial Sequence
  Description of Artificial Sequence: Synthetic oligonucleotide
  Target: LAMA2; (-) strand; PAM type: YTN; PAM sequence: TTT
gtagtatattttaaagtcag

SEQ ID NO: 219004 - DNA, 20 bp, Artificial Sequence
  Description of Artificial Sequence: Synthetic oligonucleotide
  Target: LAMA2; (-) strand; PAM type: YTN; PAM sequence: CTT
tgtagtatattttaaagtca

SEQ ID NO: 219005 - DNA, 20 bp, Artificial Sequence
  Description of Artificial Sequence: Synthetic oligonucleotide
  Target: LAMA2; (-) strand; PAM type: YTN; PAM sequence: CTA
cagctttgtagtatatttta

SEQ ID NO: 219006 - DNA, 20 bp, Artificial Sequence
  Description of Artificial Sequence: Synthetic oligonucleotide
  Target: LAMA2; (-) strand; PAM type: YTN; PAM sequence: TTA
ctacagctttgtagtatatt

SEQ ID NO: 219007 - DNA, 20 bp, Artificial Sequence
  Description of Artificial Sequence: Synthetic oligonucleotide
  Target: LAMA2; (-) strand; PAM type: YTN; PAM sequence: TTG
attactacagctttgtagta

SEQ ID NO: 219008 - DNA, 20 bp, Artificial Sequence
  Description of Artificial Sequence: Synthetic oligonucleotide
  Target: LAMA2; (-) strand; PAM type: YTN; PAM sequence: TTT
gattactacagctttgtagt

SEQ ID NO: 219009 - DNA, 20 bp, Artificial Sequence
  Description of Artificial Sequence: Synthetic oligonucleotide
  Target: LAMA2; (-) strand; PAM type: YTN; PAM sequence: TTT
tgattactacagctttgtag

SEQ ID NO: 219010 - DNA, 20 bp, Artificial Sequence
  Description of Artificial Sequence: Synthetic oligonucleotide
  Target: LAMA2; (-) strand; PAM type: YTN; PAM sequence: CTG
ttttgattactacagctttg

SEQ ID NO: 219011 - DNA, 20 bp, Artificial Sequence
  Description of Artificial Sequence: Synthetic oligonucleotide
  Target: LAMA2; (-) strand; PAM type: YTN; PAM sequence: TTA
gcagcatactgttttgatta

SEQ ID NO: 219012 - DNA, 20 bp, Artificial Sequence
  Description of Artificial Sequence: Synthetic oligonucleotide
  Target: LAMA2; (-) strand; PAM type: YTN; PAM sequence: TTA
agttagcagcatactgtttt

SEQ ID NO: 219013 - DNA, 20 bp, Artificial Sequence
  Description of Artificial Sequence: Synthetic oligonucleotide
  Target: LAMA2; (-) strand; PAM type: YTN; PAM sequence: TTT
aagttagcagcatactgttt

SEQ ID NO: 219014 - DNA, 20 bp, Artificial Sequence
  Description of Artificial Sequence: Synthetic oligonucleotide
  Target: LAMA2; (-) strand; PAM type: YTN; PAM sequence: TTT
taagttagcagcatactgtt

SEQ ID NO: 219015 - DNA, 20 bp, Artificial Sequence
  Description of Artificial Sequence: Synthetic oligonucleotide
  Target: LAMA2; (-) strand; PAM type: YTN; PAM sequence: TTT
ttaagttagcagcatactgt

SEQ ID NO: 219016 - DNA, 20 bp, Artificial Sequence
  Description of Artificial Sequence: Synthetic oligonucleotide
  Target: LAMA2; (-) strand; PAM type: YTN; PAM sequence: CTG
tttttaagttagcagcatac

SEQ ID NO: 219017 - DNA, 20 bp, Artificial Sequence
  Description of Artificial Sequence: Synthetic oligonucleotide
  Target: LAMA2; (-) strand; PAM type: YTN; PAM sequence: CTA
tgtatctgtttttaagttag

SEQ ID NO: 219018 - DNA, 20 bp, Artificial Sequence
  Description of Artificial Sequence: Synthetic oligonucleotide
  Target: LAMA2; (-) strand; PAM type: YTN; PAM sequence: TTG
gtctatgtatctgtttttaa

SEQ ID NO: 219019 - DNA, 20 bp, Artificial Sequence
  Description of Artificial Sequence: Synthetic oligonucleotide
  Target: LAMA2; (-) strand; PAM type: YTN; PAM sequence: CTG
ttggtctatgtatctgtttt

SEQ ID NO: 219020 - DNA, 20 bp, Artificial Sequence
  Description of Artificial Sequence: Synthetic oligonucleotide
  Target: LAMA2; (-) strand; PAM type: YTN; PAM sequence: TTC
tgttggtctatgtatctgtt

SEQ ID NO: 219021 - DNA, 20 bp, Artificial Sequence
  Description of Artificial Sequence: Synthetic oligonucleotide
  Target: LAMA2; (-) strand; PAM type: YTN; PAM sequence: CTA
ttctgttggtctatgtatct

SEQ ID NO: 219022 - DNA, 20 bp, Artificial Sequence
  Description of Artificial Sequence: Synthetic oligonucleotide
  Target: LAMA2; (-) strand; PAM type: YTN; PAM sequence: TTC
tattctgttggtctatgtat

SEQ ID NO: 219023 - DNA, 20 bp, Artificial Sequence
  Description of Artificial Sequence: Synthetic oligonucleotide
  Target: LAMA2; (-) strand; PAM type: YTN; PAM sequence: CTA
ttctattctgttggtctatg

SEQ ID NO: 219024 - DNA, 20 bp, Artificial Sequence
  Description of Artificial Sequence: Synthetic oligonucleotide
  Target: LAMA2; (-) strand; PAM type: YTN; PAM sequence: CTC
ctattctattctgttggtct

SEQ ID NO: 219025 - DNA, 20 bp, Artificial Sequence
  Description of Artificial Sequence: Synthetic oligonucleotide
  Target: LAMA2; (-) strand; PAM type: YTN; PAM sequence: CTG
ggctcctattctattctgtt

SEQ ID NO: 219026 - DNA, 20 bp, Artificial Sequence
  Description of Artificial Sequence: Synthetic oligonucleotide
  Target: LAMA2; (-) strand; PAM type: YTN; PAM sequence: TTC
tgggctcctattctattctg

SEQ ID NO: 219027 - DNA, 20 bp, Artificial Sequence
  Description of Artificial Sequence: Synthetic oligonucleotide
  Target: LAMA2; (-) strand; PAM type: YTN; PAM sequence: TTT
ctgggctcctattctattct

SEQ ID NO: 219028 - DNA, 20 bp, Artificial Sequence
  Description of Artificial Sequence: Synthetic oligonucleotide
  Target: LAMA2; (-) strand; PAM type: YTN; PAM sequence: TTA
tttctgggctcctattctat

SEQ ID NO: 219029 - DNA, 20 bp, Artificial Sequence
  Description of Artificial Sequence: Synthetic oligonucleotide
  Target: LAMA2; (-) strand; PAM type: YTN; PAM sequence: TTT
atttctgggctcctattcta

SEQ ID NO: 219030 - DNA, 20 bp, Artificial Sequence
  Description of Artificial Sequence: Synthetic oligonucleotide
  Target: LAMA2; (-) strand; PAM type: YTN; PAM sequence: TTA
gatttatttctgggctccta

SEQ ID NO: 219031 - DNA, 20 bp, Artificial Sequence
  Description of Artificial Sequence: Synthetic oligonucleotide
  Target: LAMA2; (-) strand; PAM type: YTN; PAM sequence: CTT
agatttatttctgggctcct

SEQ ID NO: 219032 - DNA, 20 bp, Artificial Sequence
  Description of Artificial Sequence: Synthetic oligonucleotide
  Target: LAMA2; (-) strand; PAM type: YTN; PAM sequence: TTG
accataaatgcttagattta

SEQ ID NO: 219033 - DNA, 20 bp, Artificial Sequence
  Description of Artificial Sequence: Synthetic oligonucleotide
  Target: LAMA2; (-) strand; PAM type: YTN; PAM sequence: TTG
tcaaaaatcaattgaccata

SEQ ID NO: 219034 - DNA, 20 bp, Artificial Sequence
  Description of Artificial Sequence: Synthetic oligonucleotide
  Target: LAMA2; (-) strand; PAM type: YTN; PAM sequence: TTT
gtcaaaaatcaattgaccat

SEQ ID NO: 219035 - DNA, 20 bp, Artificial Sequence
  Description of Artificial Sequence: Synthetic oligonucleotide
  Target: LAMA2; (-) strand; PAM type: YTN; PAM sequence: CTT
tgtcaaaaatcaattgacca

SEQ ID NO: 219036 - DNA, 20 bp, Artificial Sequence
  Description of Artificial Sequence: Synthetic oligonucleotide
  Target: LAMA2; (-) strand; PAM type: YTN; PAM sequence: TTG
gcatctttgtcaaaaatcaa

SEQ ID NO: 219037 - DNA, 20 bp, Artificial Sequence
  Description of Artificial Sequence: Synthetic oligonucleotide
  Target: LAMA2; (-) strand; PAM type: YTN; PAM sequence: CTT
ggcatctttgtcaaaaatca

SEQ ID NO: 219038 - DNA, 20 bp, Artificial Sequence
  Description of Artificial Sequence: Synthetic oligonucleotide
  Target: LAMA2; (-) strand; PAM type: YTN; PAM sequence: TTC
ttggcatctttgtcaaaaat

SEQ ID NO: 219039 - DNA, 20 bp, Artificial Sequence
  Description of Artificial Sequence: Synthetic oligonucleotide
  Target: LAMA2; (-) strand; PAM type: YTN; PAM sequence: TTG
tgtgttcttggcatctttgt

SEQ ID NO: 219040 - DNA, 20 bp, Artificial Sequence
  Description of Artificial Sequence: Synthetic oligonucleotide
  Target: LAMA2; (-) strand; PAM type: YTN; PAM sequence: TTC
aatcccattgtgtgttcttg

SEQ ID NO: 219041 - DNA, 20 bp, Artificial Sequence
  Description of Artificial Sequence: Synthetic oligonucleotide
  Target: LAMA2; (-) strand; PAM type: YTN; PAM sequence: CTG
gacagacagttcaatcccat

SEQ ID NO: 219042 - DNA, 20 bp, Artificial Sequence
  Description of Artificial Sequence: Synthetic oligonucleotide
  Target: LAMA2; (-) strand; PAM type: YTN; PAM sequence: TTC
actggacagacagttcaatc

SEQ ID NO: 219043 - DNA, 20 bp, Artificial Sequence
  Description of Artificial Sequence: Synthetic oligonucleotide
  Target: LAMA2; (-) strand; PAM type: YTN; PAM sequence: CTT
cactggacagacagttcaat

SEQ ID NO: 219044 - DNA, 20 bp, Artificial Sequence
  Description of Artificial Sequence: Synthetic oligonucleotide
  Target: LAMA2; (-) strand; PAM type: YTN; PAM sequence: CTC
caaacacccttcactggaca

SEQ ID NO: 219045 - DNA, 20 bp, Artificial Sequence
  Description of Artificial Sequence: Synthetic oligonucleotide
  Target: LAMA2; (-) strand; PAM type: YTN; PAM sequence: CTG
ctccaaacacccttcactgg

SEQ ID NO: 219046 - DNA, 20 bp, Artificial Sequence
  Description of Artificial Sequence: Synthetic oligonucleotide
  Target: LAMA2; (-) strand; PAM type: YTN; PAM sequence: CTA
ctgctccaaacacccttcac

SEQ ID NO: 219047 - DNA, 20 bp, Artificial Sequence
  Description of Artificial Sequence: Synthetic oligonucleotide
  Target: LAMA2; (-) strand; PAM type: YTN; PAM sequence: CTG
catgtggacatctactgctc

SEQ ID NO: 219048 - DNA, 20 bp, Artificial Sequence
  Description of Artificial Sequence: Synthetic oligonucleotide
  Target: LAMA2; (-) strand; PAM type: YTN; PAM sequence: TTC
tgcatgtggacatctactgc

SEQ ID NO: 219049 - DNA, 20 bp, Artificial Sequence
  Description of Artificial Sequence: Synthetic oligonucleotide
  Target: LAMA2; (-) strand; PAM type: YTN; PAM sequence: CTT
ctgcatgtggacatctactg

SEQ ID NO: 219050 - DNA, 20 bp, Artificial Sequence
  Description of Artificial Sequence: Synthetic oligonucleotide
  Target: LAMA2; (-) strand; PAM type: YTN; PAM sequence: TTC
ttctgcatgtggacatctac

SEQ ID NO: 219051 - DNA, 20 bp, Artificial Sequence
  Description of Artificial Sequence: Synthetic oligonucleotide
  Target: LAMA2; (-) strand; PAM type: YTN; PAM sequence: CTC
attcttctgcatgtggacat

SEQ ID NO: 219052 - DNA, 20 bp, Artificial Sequence
  Description of Artificial Sequence: Synthetic oligonucleotide
  Target: LAMA2; (-) strand; PAM type: YTN; PAM sequence: CTA
tactcattcttctgcatgtg

SEQ ID NO: 219053 - DNA, 20 bp, Artificial Sequence
  Description of Artificial Sequence: Synthetic oligonucleotide
  Target: LAMA2; (-) strand; PAM type: YTN; PAM sequence: TTA
tatggcatgagataagggtc

SEQ ID NO: 219054 - DNA, 20 bp, Artificial Sequence
  Description of Artificial Sequence: Synthetic oligonucleotide
  Target: LAMA2; (-) strand; PAM type: YTN; PAM sequence: TTT
atatggcatgagataagggt

SEQ ID NO: 219055 - DNA, 20 bp, Artificial Sequence
  Description of Artificial Sequence: Synthetic oligonucleotide
  Target: LAMA2; (-) strand; PAM type: YTN; PAM sequence: TTT
tatatggcatgagataaggg

SEQ ID NO: 219056 - DNA, 20 bp, Artificial Sequence
  Description of Artificial Sequence: Synthetic oligonucleotide
  Target: LAMA2; (-) strand; PAM type: YTN; PAM sequence: TTT
ttatatggcatgagataagg

SEQ ID NO: 219057 - DNA, 20 bp, Artificial Sequence
  Description of Artificial Sequence: Synthetic oligonucleotide
  Target: LAMA2; (-) strand; PAM type: YTN; PAM sequence: TTT
tttatatggcatgagataag

SEQ ID NO: 219058 - DNA, 20 bp, Artificial Sequence
  Description of Artificial Sequence: Synthetic oligonucleotide
  Target: LAMA2; (-) strand; PAM type: YTN; PAM sequence: TTG
aatggattttttatatggca

SEQ ID NO: 219059 - DNA, 20 bp, Artificial Sequence
  Description of Artificial Sequence: Synthetic oligonucleotide
  Target: LAMA2; (-) strand; PAM type: YTN; PAM sequence: TTT
gaatggattttttatatggc

SEQ ID NO: 219060 - DNA, 20 bp, Artificial Sequence
  Description of Artificial Sequence: Synthetic oligonucleotide
  Target: LAMA2; (-) strand; PAM type: YTN; PAM sequence: TTA
gaatttgaatggatttttta

SEQ ID NO: 219061 - DNA, 20 bp, Artificial Sequence
  Description of Artificial Sequence: Synthetic oligonucleotide
  Target: LAMA2; (-) strand; PAM type: YTN; PAM sequence: TTT
agaatttgaatggatttttt

SEQ ID NO: 219062 - DNA, 20 bp, Artificial Sequence
  Description of Artificial Sequence: Synthetic oligonucleotide
  Target: LAMA2; (-) strand; PAM type: YTN; PAM sequence: TTC
atttagaatttgaatggatt

SEQ ID NO: 219063 - DNA, 20 bp, Artificial Sequence
  Description of Artificial Sequence: Synthetic oligonucleotide
  Target: LAMA2; (-) strand; PAM type: YTN; PAM sequence: TTA
attcatttagaatttgaatg

SEQ ID NO: 219064 - DNA, 20 bp, Artificial Sequence
  Description of Artificial Sequence: Synthetic oligonucleotide
  Target: LAMA2; (-) strand; PAM type: YTN; PAM sequence: TTT
aattcatttagaatttgaat

SEQ ID NO: 219065 - DNA, 20 bp, Artificial Sequence
  Description of Artificial Sequence: Synthetic oligonucleotide
  Target: LAMA2; (-) strand; PAM type: YTN; PAM sequence: CTT
taattcatttagaatttgaa

SEQ ID NO: 219066 - DNA, 20 bp, Artificial Sequence
  Description of Artificial Sequence: Synthetic oligonucleotide
  Target: LAMA2; (-) strand; PAM type: YTN; PAM sequence: TTC
agtctttaattcatttagaa

SEQ ID NO: 219067 - DNA, 20 bp, Artificial Sequence
  Description of Artificial Sequence: Synthetic oligonucleotide
  Target: LAMA2; (-) strand; PAM type: YTN; PAM sequence: TTT
cagtctttaattcatttaga

SEQ ID NO: 219068 - DNA, 20 bp, Artificial Sequence
  Description of Artificial Sequence: Synthetic oligonucleotide
  Target: LAMA2; (-) strand; PAM type: YTN; PAM sequence: TTA
cagtttcagtctttaattca

SEQ ID NO: 219069 - DNA, 20 bp, Artificial Sequence
  Description of Artificial Sequence: Synthetic oligonucleotide
  Target: LAMA2; (-) strand; PAM type: YTN; PAM sequence: TTT
acagtttcagtctttaattc

SEQ ID NO: 219070 - DNA, 20 bp, Artificial Sequence
  Description of Artificial Sequence: Synthetic oligonucleotide
  Target: LAMA2; (-) strand; PAM type: YTN; PAM sequence: TTT
tacagtttcagtctttaatt

SEQ ID NO: 219071 - DNA, 20 bp, Artificial Sequence
  Description of Artificial Sequence: Synthetic oligonucleotide
  Target: LAMA2; (-) strand; PAM type: YTN; PAM sequence: TTC
agtagttttacagtttcagt

SEQ ID NO: 219072 - DNA, 20 bp, Artificial Sequence
  Description of Artificial Sequence: Synthetic oligonucleotide
  Target: LAMA2; (-) strand; PAM type: YTN; PAM sequence: TTT
cagtagttttacagtttcag

SEQ ID NO: 219073 - DNA, 20 bp, Artificial Sequence
  Description of Artificial Sequence: Synthetic oligonucleotide
  Target: LAMA2; (-) strand; PAM type: YTN; PAM sequence: CTT
tcagtagttttacagtttca

SEQ ID NO: 219074 - DNA, 20 bp, Artificial Sequence
  Description of Artificial Sequence: Synthetic oligonucleotide
  Target: LAMA2; (-) strand; PAM type: YTN; PAM sequence: TTC
tttcagtagttttacagttt

SEQ ID NO: 219075 - DNA, 20 bp, Artificial Sequence
  Description of Artificial Sequence: Synthetic oligonucleotide
  Target: LAMA2; (-) strand; PAM type: YTN; PAM sequence: TTT
ctttcagtagttttacagtt

SEQ ID NO: 219076 - DNA, 20 bp, Artificial Sequence
  Description of Artificial Sequence: Synthetic oligonucleotide
  Target: LAMA2; (-) strand; PAM type: YTN; PAM sequence: TTT
tctttcagtagttttacagt

SEQ ID NO: 219077 - DNA, 20 bp, Artificial Sequence
  Description of Artificial Sequence: Synthetic oligonucleotide
  Target: LAMA2; (-) strand; PAM type: YTN; PAM sequence: CTG
tgttttctttcagtagtttt

SEQ ID NO: 219078 - DNA, 20 bp, Artificial Sequence
  Description of Artificial Sequence: Synthetic oligonucleotide
  Target: LAMA2; (-) strand; PAM type: YTN; PAM sequence: TTC
ccctgtgttttctttcagta

SEQ ID NO: 219079 - DNA, 20 bp, Artificial Sequence
  Description of Artificial Sequence: Synthetic oligonucleotide
  Target: LAMA2; (-) strand; PAM type: YTN; PAM sequence: TTT
cccctgtgttttctttcagt

SEQ ID NO: 219080 - DNA, 20 bp, Artificial Sequence
  Description of Artificial Sequence: Synthetic oligonucleotide
  Target: LAMA2; (-) strand; PAM type: YTN; PAM sequence: TTT
tcccctgtgttttctttcag

SEQ ID NO: 219081 - DNA, 20 bp, Artificial Sequence
  Description of Artificial Sequence: Synthetic oligonucleotide
  Target: LAMA2; (-) strand; PAM type: YTN; PAM sequence: CTT
ttcccctgtgttttctttca

SEQ ID NO: 219082 - DNA, 20 bp, Artificial Sequence
  Description of Artificial Sequence: Synthetic oligonucleotide
  Target: LAMA2; (-) strand; PAM type: YTN; PAM sequence: TTG
cccagaccaatgtcatggaa

SEQ ID NO: 219083 - DNA, 20 bp, Artificial Sequence
  Description of Artificial Sequence: Synthetic oligonucleotide
  Target: LAMA2; (-) strand; PAM type: YTN; PAM sequence: TTA
aaaaatcattgcccagacca

SEQ ID NO: 219084 - DNA, 20 bp, Artificial Sequence
  Description of Artificial Sequence: Synthetic oligonucleotide
  Target: LAMA2; (-) strand; PAM type: YTN; PAM sequence: TTT
aaaaaatcattgcccagacc

SEQ ID NO: 219085 - DNA, 20 bp, Artificial Sequence
  Description of Artificial Sequence: Synthetic oligonucleotide
  Target: LAMA2; (-) strand; PAM type: YTN; PAM sequence: CTT
taaaaaatcattgcccagac

SEQ ID NO: 219086 - DNA, 20 bp, Artificial Sequence
  Description of Artificial Sequence: Synthetic oligonucleotide
  Target: LAMA2; (-) strand; PAM type: YTN; PAM sequence: TTA
tatctttaaaaaatcattgc

SEQ ID NO: 219087 - DNA, 20 bp, Artificial Sequence
  Description of Artificial Sequence: Synthetic oligonucleotide
  Target: LAMA2; (-) strand; PAM type: YTN; PAM sequence: TTT
atatctttaaaaaatcattg

SEQ ID NO: 219088 - DNA, 20 bp, Artificial Sequence
  Description of Artificial Sequence: Synthetic oligonucleotide
  Target: LAMA2; (-) strand; PAM type: YTN; PAM sequence: TTG
gggtttatatctttaaaaaa

SEQ ID NO: 219089 - DNA, 20 bp, Artificial Sequence
  Description of Artificial Sequence: Synthetic oligonucleotide
  Target: LAMA2; (-) strand; PAM type: YTN; PAM sequence: TTT
ggggtttatatctttaaaaa

SEQ ID NO: 219090 - DNA, 20 bp, Artificial Sequence
  Description of Artificial Sequence: Synthetic oligonucleotide
  Target: LAMA2; (-) strand; PAM type: YTN; PAM sequence: CTT
tggggtttatatctttaaaa

SEQ ID NO: 219091 - DNA, 20 bp, Artificial Sequence
  Description of Artificial Sequence: Synthetic oligonucleotide
  Target: LAMA2; (-) strand; PAM type: YTN; PAM sequence: CTG
tgctttggggtttatatctt

SEQ ID NO: 219092 - DNA, 20 bp, Artificial Sequence
  Description of Artificial Sequence: Synthetic oligonucleotide
  Target: LAMA2; (-) strand; PAM type: YTN; PAM sequence: TTC
ctgtgctttggggtttatat

SEQ ID NO: 219093 - DNA, 20 bp, Artificial Sequence
  Description of Artificial Sequence: Synthetic oligonucleotide
  Target: LAMA2; (-) strand; PAM type: YTN; PAM sequence: TTT
cctgtgctttggggtttata

SEQ ID NO: 219094 - DNA, 20 bp, Artificial Sequence
  Description of Artificial Sequence: Synthetic oligonucleotide
  Target: LAMA2; (-) strand; PAM type: YTN; PAM sequence: TTG
tgtttcctgtgctttggggt

SEQ ID NO: 219095 - DNA, 20 bp, Artificial Sequence
  Description of Artificial Sequence: Synthetic oligonucleotide
  Target: LAMA2; (-) strand; PAM type: YTN; PAM sequence: TTA
ttgtgtttcctgtgctttgg

SEQ ID NO: 219096 - DNA, 20 bp, Artificial Sequence
  Description of Artificial Sequence: Synthetic oligonucleotide
  Target: LAMA2; (-) strand; PAM type: YTN; PAM sequence: TTT
attgtgtttcctgtgctttg

SEQ ID NO: 219097 - DNA, 20 bp, Artificial Sequence
  Description of Artificial Sequence: Synthetic oligonucleotide
  Target: LAMA2; (-) strand; PAM type: YTN; PAM sequence: TTT
tattgtgtttcctgtgcttt

SEQ ID NO: 219098 - DNA, 20 bp, Artificial Sequence
  Description of Artificial Sequence: Synthetic oligonucleotide
  Target: LAMA2; (-) strand; PAM type: YTN; PAM sequence: CTA
tgttttattgtgtttcctgt

SEQ ID NO: 219099 - DNA, 20 bp, Artificial Sequence
  Description of Artificial Sequence: Synthetic oligonucleotide
  Target: LAMA2; (-) strand; PAM type: YTN; PAM sequence: TTG
tctatgttttattgtgtttc

SEQ ID NO: 219100 - DNA, 20 bp, Artificial Sequence
  Description of Artificial Sequence: Synthetic oligonucleotide
  Target: LAMA2; (-) strand; PAM type: YTN; PAM sequence: TTT
gtctatgttttattgtgttt

SEQ ID NO: 219101 - DNA, 20 bp, Artificial Sequence
  Description of Artificial Sequence: Synthetic oligonucleotide
  Target: LAMA2; (-) strand; PAM type: YTN; PAM sequence: CTC
atttgtctatgttttattgt

SEQ ID NO: 219102 - DNA, 20 bp, Artificial Sequence
  Description of Artificial Sequence: Synthetic oligonucleotide
  Target: LAMA2; (-) strand; PAM type: YTN; PAM sequence: TTA
atgtaatctcatttgtctat

SEQ ID NO: 219103 - DNA, 20 bp, Artificial Sequence
  Description of Artificial Sequence: Synthetic oligonucleotide
  Target: LAMA2; (-) strand; PAM type: YTN; PAM sequence: TTT
aatgtaatctcatttgtcta

SEQ ID NO: 219104 - DNA, 20 bp, Artificial Sequence
  Description of Artificial Sequence: Synthetic oligonucleotide
  Target: LAMA2; (-) strand; PAM type: YTN; PAM sequence: TTC
agtttaatgtaatctcattt

SEQ ID NO: 219105 - DNA, 20 bp, Artificial Sequence
  Description of Artificial Sequence: Synthetic oligonucleotide
  Target: LAMA2; (-) strand; PAM type: YTN; PAM sequence: TTT
cagtttaatgtaatctcatt

SEQ ID NO: 219106 - DNA, 20 bp, Artificial Sequence
  Description of Artificial Sequence: Synthetic oligonucleotide
  Target: LAMA2; (-) strand; PAM type: YTN; PAM sequence: TTA
tccagatgtgtttcagttta

SEQ ID NO: 219107 - DNA, 20 bp, Artificial Sequence
  Description of Artificial Sequence: Synthetic oligonucleotide
  Target: LAMA2; (-) strand; PAM type: YTN; PAM sequence: CTG
gttatccagatgtgtttcag

SEQ ID NO: 219108 - DNA, 20 bp, Artificial Sequence
  Description of Artificial Sequence: Synthetic oligonucleotide
  Target: LAMA2; (-) strand; PAM type: YTN; PAM sequence: TTC
cctggttatccagatgtgtt

SEQ ID NO: 219109 - DNA, 20 bp, Artificial Sequence
  Description of Artificial Sequence: Synthetic oligonucleotide
  Target: LAMA2; (-) strand; PAM type: YTN; PAM sequence: TTT
ccctggttatccagatgtgt

SEQ ID NO: 219110 - DNA, 20 bp, Artificial Sequence
  Description of Artificial Sequence: Synthetic oligonucleotide
  Target: LAMA2; (-) strand; PAM type: YTN; PAM sequence: TTG
tttccctggttatccagatg

SEQ ID NO: 219111 - DNA, 20 bp, Artificial Sequence
  Description of Artificial Sequence: Synthetic oligonucleotide
  Target: LAMA2; (-) strand; PAM type: YTN; PAM sequence: TTG
attgtttccctggttatcca

SEQ ID NO: 219112 - DNA, 20 bp, Artificial Sequence
  Description of Artificial Sequence: Synthetic oligonucleotide
  Target: LAMA2; (-) strand; PAM type: YTN; PAM sequence: TTG
aagagcagccatgttgattg

SEQ ID NO: 219113 - DNA, 20 bp, Artificial Sequence
  Description of Artificial Sequence: Synthetic oligonucleotide
  Target: LAMA2; (-) strand; PAM type: YTN; PAM sequence: TTT
gaagagcagccatgttgatt

SEQ ID NO: 219114 - DNA, 20 bp, Artificial Sequence
  Description of Artificial Sequence: Synthetic oligonucleotide
  Target: LAMA2; (-) strand; PAM type: YTN; PAM sequence: TTC
agtgatttgaagagcagcca

SEQ ID NO: 219115 - DNA, 20 bp, Artificial Sequence
  Description of Artificial Sequence: Synthetic oligonucleotide
  Target: LAMA2; (-) strand; PAM type: YTN; PAM sequence: TTA
gcagtgacccaaatagtacc

SEQ ID NO: 219116 - DNA, 20 bp, Artificial Sequence
  Description of Artificial Sequence: Synthetic oligonucleotide
  Target: LAMA2; (-) strand; PAM type: YTN; PAM sequence: TTT
agcagtgacccaaatagtac

SEQ ID NO: 219117 - DNA, 20 bp, Artificial Sequence
  Description of Artificial Sequence: Synthetic oligonucleotide
  Target: LAMA2; (-) strand; PAM type: YTN; PAM sequence: TTC
accaatttagcagtgaccca

SEQ ID NO: 219118 - DNA, 20 bp, Artificial Sequence
  Description of Artificial Sequence: Synthetic oligonucleotide
  Target: LAMA2; (-) strand; PAM type: YTN; PAM sequence: TTG
gtattcaccaatttagcagt

SEQ ID NO: 219119 - DNA, 20 bp, Artificial Sequence
  Description of Artificial Sequence: Synthetic oligonucleotide
  Target: LAMA2; (-) strand; PAM type: YTN; PAM sequence: TTT
ggtattcaccaatttagcag

SEQ ID NO: 219120 - DNA, 20 bp, Artificial Sequence
  Description of Artificial Sequence: Synthetic oligonucleotide
  Target: LAMA2; (-) strand; PAM type: YTN; PAM sequence: TTA
gtttggtattcaccaattta

SEQ ID NO: 219121 - DNA, 20 bp, Artificial Sequence
  Description of Artificial Sequence: Synthetic oligonucleotide
  Target: LAMA2; (-) strand; PAM type: YTN; PAM sequence: CTG
tgttagtttggtattcacca

SEQ ID NO: 219122 - DNA, 20 bp, Artificial Sequence
  Description of Artificial Sequence: Synthetic oligonucleotide
  Target: LAMA2; (-) strand; PAM type: YTN; PAM sequence: TTC
tgtgttagtttggtattcac

SEQ ID NO: 219123 - DNA, 20 bp, Artificial Sequence
  Description of Artificial Sequence: Synthetic oligonucleotide
  Target: LAMA2; (-) strand; PAM type: YTN; PAM sequence: CTT
ctgtgttagtttggtattca

SEQ ID NO: 219124 - DNA, 20 bp, Artificial Sequence
  Description of Artificial Sequence: Synthetic oligonucleotide
  Target: LAMA2; (-) strand; PAM type: YTN; PAM sequence: CTC
ttctgtgttagtttggtatt

SEQ ID NO: 219125 - DNA, 20 bp, Artificial Sequence
  Description of Artificial Sequence: Synthetic oligonucleotide
  Target: LAMA2; (-) strand; PAM type: YTN; PAM sequence: TTA
taatctcttctgtgttagtt

SEQ ID NO: 219126 - DNA, 20 bp, Artificial Sequence
  Description of Artificial Sequence: Synthetic oligonucleotide
  Target: LAMA2; (-) strand; PAM type: YTN; PAM sequence: TTG
gaacatgtatattataatct

SEQ ID NO: 219127 - DNA, 20 bp, Artificial Sequence
  Description of Artificial Sequence: Synthetic oligonucleotide
  Target: LAMA2; (-) strand; PAM type: YTN; PAM sequence: TTT
ggaacatgtatattataatc

SEQ ID NO: 219128 - DNA, 20 bp, Artificial Sequence
  Description of Artificial Sequence: Synthetic oligonucleotide
  Target: LAMA2; (-) strand; PAM type: YTN; PAM sequence: CTA
catttggaacatgtatatta

SEQ ID NO: 219129 - DNA, 20 bp, Artificial Sequence
  Description of Artificial Sequence: Synthetic oligonucleotide
  Target: LAMA2; (-) strand; PAM type: YTN; PAM sequence: CTC
aggtaaggtataatctacat

SEQ ID NO: 219130 - DNA, 20 bp, Artificial Sequence
  Description of Artificial Sequence: Synthetic oligonucleotide
  Target: LAMA2; (-) strand; PAM type: YTN; PAM sequence: TTA
aggtatactcaggtaaggta

SEQ ID NO: 219131 - DNA, 20 bp, Artificial Sequence
  Description of Artificial Sequence: Synthetic oligonucleotide
  Target: LAMA2; (-) strand; PAM type: YTN; PAM sequence: CTT
aaggtatactcaggtaaggt

SEQ ID NO: 219132 - DNA, 20 bp, Artificial Sequence
  Description of Artificial Sequence: Synthetic oligonucleotide
  Target: LAMA2; (-) strand; PAM type: YTN; PAM sequence: TTG
tacttaaggtatactcaggt

SEQ ID NO: 219133 - DNA, 20 bp, Artificial Sequence
  Description of Artificial Sequence: Synthetic oligonucleotide
  Target: LAMA2; (-) strand; PAM type: YTN; PAM sequence: CTG
ttgtacttaaggtatactca

SEQ ID NO: 219134 - DNA, 20 bp, Artificial Sequence
  Description of Artificial Sequence: Synthetic oligonucleotide
  Target: LAMA2; (-) strand; PAM type: YTN; PAM sequence: TTC
tgttgtacttaaggtatact

SEQ ID NO: 219135 - DNA, 20 bp, Artificial Sequence
  Description of Artificial Sequence: Synthetic oligonucleotide
  Target: LAMA2; (-) strand; PAM type: YTN; PAM sequence: CTA
tattctgttgtacttaaggt

SEQ ID NO: 219136 - DNA, 20 bp, Artificial Sequence
  Description of Artificial Sequence: Synthetic oligonucleotide
  Target: LAMA2; (-) strand; PAM type: YTN; PAM sequence: TTA
actatattctgttgtactta

SEQ ID NO: 219137 - DNA, 20 bp, Artificial Sequence
  Description of Artificial Sequence: Synthetic oligonucleotide
  Target: LAMA2; (-) strand; PAM type: YTN; PAM sequence: TTT
aactatattctgttgtactt

SEQ ID NO: 219138 - DNA, 20 bp, Artificial Sequence
  Description of Artificial Sequence: Synthetic oligonucleotide
  Target: LAMA2; (-) strand; PAM type: YTN; PAM sequence: TTT
taactatattctgttgtact

SEQ ID NO: 219139 - DNA, 20 bp, Artificial Sequence
  Description of Artificial Sequence: Synthetic oligonucleotide
  Target: LAMA2; (-) strand; PAM type: YTN; PAM sequence: CTG
tgattttaactatattctgt

SEQ ID NO: 219140 - DNA, 20 bp, Artificial Sequence
  Description of Artificial Sequence: Synthetic oligonucleotide
  Target: LAMA2; (-) strand; PAM type: YTN; PAM sequence: TTA
aaacaggtaaagaactgtga

SEQ ID NO: 219141 - DNA, 20 bp, Artificial Sequence
  Description of Artificial Sequence: Synthetic oligonucleotide
  Target: LAMA2; (-) strand; PAM type: YTN; PAM sequence: CTA
tatacaattaaaacaggtaa

SEQ ID NO: 219142 - DNA, 20 bp, Artificial Sequence
  Description of Artificial Sequence: Synthetic oligonucleotide
  Target: LAMA2; (-) strand; PAM type: YTN; PAM sequence: TTA
aaaatctatatacaattaaa

SEQ ID NO: 219143 - DNA, 20 bp, Artificial Sequence
  Description of Artificial Sequence: Synthetic oligonucleotide
  Target: LAMA2; (-) strand; PAM type: YTN; PAM sequence: CTT
aaaaatctatatacaattaa

SEQ ID NO: 219144 - DNA, 20 bp, Artificial Sequence
  Description of Artificial Sequence: Synthetic oligonucleotide
  Target: LAMA2; (-) strand; PAM type: YTN; PAM sequence: CTG
aacaaatgatcttaaaaatc

SEQ ID NO: 219145 - DNA, 20 bp, Artificial Sequence
  Description of Artificial Sequence: Synthetic oligonucleotide
  Target: LAMA2; (-) strand; PAM type: YTN; PAM sequence: TTG
tgatactgaacaaatgatct

SEQ ID NO: 219146 - DNA, 20 bp, Artificial Sequence
  Description of Artificial Sequence: Synthetic oligonucleotide
  Target: LAMA2; (-) strand; PAM type: YTN; PAM sequence: CTT
gtgatactgaacaaatgatc

SEQ ID NO: 219147 - DNA, 20 bp, Artificial Sequence
  Description of Artificial Sequence: Synthetic oligonucleotide
  Target: LAMA2; (-) strand; PAM type: YTN; PAM sequence: CTA
cttgtgatactgaacaaatg

SEQ ID NO: 219148 - DNA, 20 bp, Artificial Sequence
  Description of Artificial Sequence: Synthetic oligonucleotide
  Target: LAMA2; (-) strand; PAM type: YTN; PAM sequence: TTC
tacttgtgatactgaacaaa

SEQ ID NO: 219149 - DNA, 20 bp, Artificial Sequence
  Description of Artificial Sequence: Synthetic oligonucleotide
  Target: LAMA2; (-) strand; PAM type: YTN; PAM sequence: TTA
accacagattctacttgtga

SEQ ID NO: 219150 - DNA, 20 bp, Artificial Sequence
  Description of Artificial Sequence: Synthetic oligonucleotide
  Target: LAMA2; (-) strand; PAM type: YTN; PAM sequence: CTA
attaaccacagattctactt

SEQ ID NO: 219151 - DNA, 20 bp, Artificial Sequence
  Description of Artificial Sequence: Synthetic oligonucleotide
  Target: LAMA2; (-) strand; PAM type: YTN; PAM sequence: TTC
taattaaccacagattctac

SEQ ID NO: 219152 - DNA, 20 bp, Artificial Sequence
  Description of Artificial Sequence: Synthetic oligonucleotide
  Target: LAMA2; (-) strand; PAM type: YTN; PAM sequence: TTT
ctaattaaccacagattcta

SEQ ID NO: 219153 - DNA, 20 bp, Artificial Sequence
  Description of Artificial Sequence: Synthetic oligonucleotide
  Target: LAMA2; (-) strand; PAM type: YTN; PAM sequence: TTT
tctaattaaccacagattct

SEQ ID NO: 219154 - DNA, 20 bp, Artificial Sequence
  Description of Artificial Sequence: Synthetic oligonucleotide
  Target: LAMA2; (-) strand; PAM type: YTN; PAM sequence: TTA
aagggaaaatatattttcta

SEQ ID NO: 219155 - DNA, 20 bp, Artificial Sequence
  Description of Artificial Sequence: Synthetic oligonucleotide
  Target: LAMA2; (-) strand; PAM type: YTN; PAM sequence: TTT
aaagggaaaatatattttct

SEQ ID NO: 219156 - DNA, 20 bp, Artificial Sequence
  Description of Artificial Sequence: Synthetic oligonucleotide
  Target: LAMA2; (-) strand; PAM type: YTN; PAM sequence: TTC
atttaaagggaaaatatatt

SEQ ID NO: 219157 - DNA, 20 bp, Artificial Sequence
  Description of Artificial Sequence: Synthetic oligonucleotide
  Target: LAMA2; (-) strand; PAM type: YTN; PAM sequence: TTA
aaagtcagcacaaattcatt

SEQ ID NO: 219158 - DNA, 20 bp, Artificial Sequence
  Description of Artificial Sequence: Synthetic oligonucleotide
  Target: LAMA2; (-) strand; PAM type: YTN; PAM sequence: TTT
aaaagtcagcacaaattcat

SEQ ID NO: 219159 - DNA, 20 bp, Artificial Sequence
  Description of Artificial Sequence: Synthetic oligonucleotide
  Target: LAMA2; (-) strand; PAM type: YTN; PAM sequence: TTT
taaaagtcagcacaaattca

SEQ ID NO: 219160 - DNA, 20 bp, Artificial Sequence
  Description of Artificial Sequence: Synthetic oligonucleotide
  Target: LAMA2; (-) strand; PAM type: YTN; PAM sequence: TTA
ataattttaaaagtcagcac

SEQ ID NO: 219161 - DNA, 20 bp, Artificial Sequence
  Description of Artificial Sequence: Synthetic oligonucleotide
  Target: LAMA2; (-) strand; PAM type: YTN; PAM sequence: TTA
ttaataattttaaaagtcag

SEQ ID NO: 219162 - DNA, 20 bp, Artificial Sequence
  Description of Artificial Sequence: Synthetic oligonucleotide
  Target: LAMA2; (-) strand; PAM type: YTN; PAM sequence: TTT
attaataattttaaaagtca

SEQ ID NO: 219163 - DNA, 20 bp, Artificial Sequence
  Description of Artificial Sequence: Synthetic oligonucleotide
  Target: LAMA2; (-) strand; PAM type: YTN; PAM sequence: CTT
tattaataattttaaaagtc

SEQ ID NO: 219164 - DNA, 20 bp, Artificial Sequence
  Description of Artificial Sequence: Synthetic oligonucleotide
  Target: LAMA2; (-) strand; PAM type: YTN; PAM sequence: CTG
tcacctttattaataatttt

SEQ ID NO: 219165 - DNA, 20 bp, Artificial Sequence
  Description of Artificial Sequence: Synthetic oligonucleotide
  Target: LAMA2; (-) strand; PAM type: YTN; PAM sequence: CTA
gctgtcacctttattaataa

SEQ ID NO: 219166 - DNA, 20 bp, Artificial Sequence
  Description of Artificial Sequence: Synthetic oligonucleotide
  Target: LAMA2; (-) strand; PAM type: YTN; PAM sequence: TTC
aatatagacaccaaagctag

SEQ ID NO: 219167 - DNA, 20 bp, Artificial Sequence
  Description of Artificial Sequence: Synthetic oligonucleotide
  Target: LAMA2; (-) strand; PAM type: YTN; PAM sequence: CTT
caatatagacaccaaagcta

SEQ ID NO: 219168 - DNA, 20 bp, Artificial Sequence
  Description of Artificial Sequence: Synthetic oligonucleotide
  Target: LAMA2; (-) strand; PAM type: YTN; PAM sequence: TTC
ttcaatatagacaccaaagc

SEQ ID NO: 219169 - DNA, 20 bp, Artificial Sequence
  Description of Artificial Sequence: Synthetic oligonucleotide
  Target: LAMA2; (-) strand; PAM type: YTN; PAM sequence: TTT
cttcaatatagacaccaaag

SEQ ID NO: 219170 - DNA, 20 bp, Artificial Sequence
  Description of Artificial Sequence: Synthetic oligonucleotide
  Target: LAMA2; (-) strand; PAM type: YTN; PAM sequence: TTT
tcttcaatatagacaccaaa

SEQ ID NO: 219171 - DNA, 20 bp, Artificial Sequence
  Description of Artificial Sequence: Synthetic oligonucleotide
  Target: LAMA2; (-) strand; PAM type: YTN; PAM sequence: TTA
ggatgaacattttcttcaat

SEQ ID NO: 219172 - DNA, 20 bp, Artificial Sequence
  Description of Artificial Sequence: Synthetic oligonucleotide
  Target: LAMA2; (-) strand; PAM type: YTN; PAM sequence: TTG
aaagcagaccaaagggtaga

SEQ ID NO: 219173 - DNA, 20 bp, Artificial Sequence
  Description of Artificial Sequence: Synthetic oligonucleotide
  Target: LAMA2; (-) strand; PAM type: YTN; PAM sequence: CTG
tgttgaaagcagaccaaagg

SEQ ID NO: 219174 - DNA, 20 bp, Artificial Sequence
  Description of Artificial Sequence: Synthetic oligonucleotide
  Target: LAMA2; (-) strand; PAM type: YTN; PAM sequence: CTG
ctgtgttgaaagcagaccaa

SEQ ID NO: 219175 - DNA, 20 bp, Artificial Sequence
  Description of Artificial Sequence: Synthetic oligonucleotide
  Target: LAMA2; (-) strand; PAM type: YTN; PAM sequence: CTG
tgactgctgtgttgaaagca

SEQ ID NO: 219176 - DNA, 20 bp, Artificial Sequence
  Description of Artificial Sequence: Synthetic oligonucleotide
  Target: LAMA2; (-) strand; PAM type: YTN; PAM sequence: TTG
ctgtgactgctgtgttgaaa

SEQ ID NO: 219177 - DNA, 20 bp, Artificial Sequence
  Description of Artificial Sequence: Synthetic oligonucleotide
  Target: LAMA2; (-) strand; PAM type: YTN; PAM sequence: CTA
atgagattgctgtgactgct

SEQ ID NO: 219178 - DNA, 20 bp, Artificial Sequence
  Description of Artificial Sequence: Synthetic oligonucleotide
  Target: LAMA2; (-) strand; PAM type: YTN; PAM sequence: CTG
tactaatgagattgctgtga

SEQ ID NO: 219179 - DNA, 20 bp, Artificial Sequence
  Description of Artificial Sequence: Synthetic oligonucleotide
  Target: LAMA2; (-) strand; PAM type: YTN; PAM sequence: TTA
tgtgatctgtactaatgaga

SEQ ID NO: 219180 - DNA, 20 bp, Artificial Sequence
  Description of Artificial Sequence: Synthetic oligonucleotide
  Target: LAMA2; (-) strand; PAM type: YTN; PAM sequence: TTA
gtggaaagtgttatgtgatc

SEQ ID NO: 219181 - DNA, 20 bp, Artificial Sequence
  Description of Artificial Sequence: Synthetic oligonucleotide
  Target: LAMA2; (-) strand; PAM type: YTN; PAM sequence: TTT
agtggaaagtgttatgtgat

SEQ ID NO: 219182 - DNA, 20 bp, Artificial Sequence
  Description of Artificial Sequence: Synthetic oligonucleotide
  Target: LAMA2; (-) strand; PAM type: YTN; PAM sequence: TTT
tagtggaaagtgttatgtga

SEQ ID NO: 219183 - DNA, 20 bp, Artificial Sequence
  Description of Artificial Sequence: Synthetic oligonucleotide
  Target: LAMA2; (-) strand; PAM type: YTN; PAM sequence: CTT
ttagtggaaagtgttatgtg

SEQ ID NO: 219184 - DNA, 20 bp, Artificial Sequence
  Description of Artificial Sequence: Synthetic oligonucleotide
  Target: LAMA2; (-) strand; PAM type: YTN; PAM sequence: TTC
cacttttagtggaaagtgtt

SEQ ID NO: 219185 - DNA, 20 bp, Artificial Sequence
  Description of Artificial Sequence: Synthetic oligonucleotide
  Target: LAMA2; (-) strand; PAM type: YTN; PAM sequence: TTT
ccacttttagtggaaagtgt

SEQ ID NO: 219186 - DNA, 20 bp, Artificial Sequence
  Description of Artificial Sequence: Synthetic oligonucleotide
  Target: LAMA2; (-) strand; PAM type: YTN; PAM sequence: CTA
ataagatttccacttttagt

SEQ ID NO: 219187 - DNA, 20 bp, Artificial Sequence
  Description of Artificial Sequence: Synthetic oligonucleotide
  Target: LAMA2; (-) strand; PAM type: YTN; PAM sequence: CTG
tactaataagatttccactt

SEQ ID NO: 219188 - DNA, 20 bp, Artificial Sequence
  Description of Artificial Sequence: Synthetic oligonucleotide
  Target: LAMA2; (-) strand; PAM type: YTN; PAM sequence: TTG
tgtgatctgtactaataaga

SEQ ID NO: 219189 - DNA, 20 bp, Artificial Sequence
  Description of Artificial Sequence: Synthetic oligonucleotide
  Target: LAMA2; (-) strand; PAM type: YTN; PAM sequence: TTA
gtggaaagtgttgtgtgatc

SEQ ID NO: 219190 - DNA, 20 bp, Artificial Sequence
  Description of Artificial Sequence: Synthetic oligonucleotide
  Target: LAMA2; (-) strand; PAM type: YTN; PAM sequence: TTT
agtggaaagtgttgtgtgat

SEQ ID NO: 219191 - DNA, 20 bp, Artificial Sequence
  Description of Artificial Sequence: Synthetic oligonucleotide
  Target: LAMA2; (-) strand; PAM type: YTN; PAM sequence: TTT
tagtggaaagtgttgtgtga

SEQ ID NO: 219192 - DNA, 20 bp, Artificial Sequence
  Description of Artificial Sequence: Synthetic oligonucleotide
  Target: LAMA2; (-) strand; PAM type: YTN; PAM sequence: CTT
ttagtggaaagtgttgtgtg

SEQ ID NO: 219193 - DNA, 20 bp, Artificial Sequence
  Description of Artificial Sequence: Synthetic oligonucleotide
  Target: LAMA2; (-) strand; PAM type: YTN; PAM sequence: CTG
aatgtgatggaaaaccagta

SEQ ID NO: 219194 - DNA, 20 bp, Artificial Sequence
  Description of Artificial Sequence: Synthetic oligonucleotide
  Target: LAMA2; (-) strand; PAM type: YTN; PAM sequence: TTC
ccactgaatgtgatggaaaa

SEQ ID NO: 219195 - DNA, 20 bp, Artificial Sequence
  Description of Artificial Sequence: Synthetic oligonucleotide
  Target: LAMA2; (-) strand; PAM type: YTN; PAM sequence: TTT
cccactgaatgtgatggaaa

SEQ ID NO: 219196 - DNA, 20 bp, Artificial Sequence
  Description of Artificial Sequence: Synthetic oligonucleotide
  Target: LAMA2; (-) strand; PAM type: YTN; PAM sequence: TTT
tcccactgaatgtgatggaa

SEQ ID NO: 219197 - DNA, 20 bp, Artificial Sequence
  Description of Artificial Sequence: Synthetic oligonucleotide
  Target: LAMA2; (-) strand; PAM type: YTN; PAM sequence: CTT
ttcccactgaatgtgatgga

SEQ ID NO: 219198 - DNA, 20 bp, Artificial Sequence
  Description of Artificial Sequence: Synthetic oligonucleotide
  Target: LAMA2; (-) strand; PAM type: YTN; PAM sequence: TTG
tgcttttcccactgaatgtg

SEQ ID NO: 219199 - DNA, 20 bp, Artificial Sequence
  Description of Artificial Sequence: Synthetic oligonucleotide
  Target: LAMA2; (-) strand; PAM type: YTN; PAM sequence: TTG
tgggtcattgtgcttttccc

SEQ ID NO: 219200 - DNA, 20 bp, Artificial Sequence
  Description of Artificial Sequence: Synthetic oligonucleotide
  Target: LAMA2; (-) strand; PAM type: YTN; PAM sequence: CTT
gtgggtcattgtgcttttcc

SEQ ID NO: 219201 - DNA, 20 bp, Artificial Sequence
  Description of Artificial Sequence: Synthetic oligonucleotide
  Target: LAMA2; (-) strand; PAM type: YTN; PAM sequence: TTA
aggccttgtgggtcattgtg

SEQ ID NO: 219202 - DNA, 20 bp, Artificial Sequence
  Description of Artificial Sequence: Synthetic oligonucleotide
  Target: LAMA2; (-) strand; PAM type: YTN; PAM sequence: CTT
aaggccttgtgggtcattgt

SEQ ID NO: 219203 - DNA, 20 bp, Artificial Sequence
  Description of Artificial Sequence: Synthetic oligonucleotide
  Target: LAMA2; (-) strand; PAM type: YTN; PAM sequence: CTG
aggaagagagatcagatgag

SEQ ID NO: 219204 - DNA, 20 bp, Artificial Sequence
  Description of Artificial Sequence: Synthetic oligonucleotide
  Target: LAMA2; (-) strand; PAM type: YTN; PAM sequence: CTG
ggcaactgaggaagagagat

SEQ ID NO: 219205 - DNA, 20 bp, Artificial Sequence
  Description of Artificial Sequence: Synthetic oligonucleotide
  Target: LAMA2; (-) strand; PAM type: YTN; PAM sequence: TTC
aagacatagcgggatgacca

SEQ ID NO: 219206 - DNA, 20 bp, Artificial Sequence
  Description of Artificial Sequence: Synthetic oligonucleotide
  Target: LAMA2; (-) strand; PAM type: YTN; PAM sequence: CTG
aggcaggtgtgagtgttcaa

SEQ ID NO: 219207 - DNA, 20 bp, Artificial Sequence
  Description of Artificial Sequence: Synthetic oligonucleotide
  Target: LAMA2; (-) strand; PAM type: YTN; PAM sequence: CTA
gacataagaaatatcaagtg

SEQ ID NO: 219208 - DNA, 20 bp, Artificial Sequence
  Description of Artificial Sequence: Synthetic oligonucleotide
  Target: LAMA2; (-) strand; PAM type: YTN; PAM sequence: TTC
tagacataagaaatatcaag

SEQ ID NO: 219209 - DNA, 20 bp, Artificial Sequence
  Description of Artificial Sequence: Synthetic oligonucleotide
  Target: LAMA2; (-) strand; PAM type: YTN; PAM sequence: TTG
aagaaaataattctagacat

SEQ ID NO: 219210 - DNA, 20 bp, Artificial Sequence
  Description of Artificial Sequence: Synthetic oligonucleotide
  Target: LAMA2; (-) strand; PAM type: YTN; PAM sequence: TTG
aaattgaagaaaataattct

SEQ ID NO: 219211 - DNA, 20 bp, Artificial Sequence
  Description of Artificial Sequence: Synthetic oligonucleotide
  Target: LAMA2; (-) strand; PAM type: YTN; PAM sequence: CTA
cattgaaattgaagaaaata

SEQ ID NO: 219212 - DNA, 20 bp, Artificial Sequence
  Description of Artificial Sequence: Synthetic oligonucleotide
  Target: LAMA2; (-) strand; PAM type: YTN; PAM sequence: TTG
aataaaaaccaaaaggaggt

SEQ ID NO: 219213 - DNA, 20 bp, Artificial Sequence
  Description of Artificial Sequence: Synthetic oligonucleotide
  Target: LAMA2; (-) strand; PAM type: YTN; PAM sequence: CTT
gaataaaaaccaaaaggagg

SEQ ID NO: 219214 - DNA, 20 bp, Artificial Sequence
  Description of Artificial Sequence: Synthetic oligonucleotide
  Target: LAMA2; (-) strand; PAM type: YTN; PAM sequence: TTG
agaaggtaacacttgaataa

SEQ ID NO: 219215 - DNA, 20 bp, Artificial Sequence
  Description of Artificial Sequence: Synthetic oligonucleotide
  Target: LAMA2; (-) strand; PAM type: YTN; PAM sequence: TTG
ttgagaaggtaacacttgaa

SEQ ID NO: 219216 - DNA, 20 bp, Artificial Sequence
  Description of Artificial Sequence: Synthetic oligonucleotide
  Target: LAMA2; (-) strand; PAM type: YTN; PAM sequence: CTT
gttgagaaggtaacacttga

SEQ ID NO: 219217 - DNA, 20 bp, Artificial Sequence
  Description of Artificial Sequence: Synthetic oligonucleotide
  Target: LAMA2; (-) strand; PAM type: YTN; PAM sequence: TTG
tcaaggaggcccttgttgag

SEQ ID NO: 219218 - DNA, 20 bp, Artificial Sequence
  Description of Artificial Sequence: Synthetic oligonucleotide
  Target: LAMA2; (-) strand; PAM type: YTN; PAM sequence: TTA
aatagagttgtcaaggaggc

SEQ ID NO: 219219 - DNA, 20 bp, Artificial Sequence
  Description of Artificial Sequence: Synthetic oligonucleotide
  Target: LAMA2; (-) strand; PAM type: YTN; PAM sequence: TTT
aaatagagttgtcaaggagg

SEQ ID NO: 219220 - DNA, 20 bp, Artificial Sequence
  Description of Artificial Sequence: Synthetic oligonucleotide
  Target: LAMA2; (-) strand; PAM type: YTN; PAM sequence: TTT
taaatagagttgtcaaggag

SEQ ID NO: 219221 - DNA, 20 bp, Artificial Sequence
  Description of Artificial Sequence: Synthetic oligonucleotide
  Target: LAMA2; (-) strand; PAM type: YTN; PAM sequence: CTG
caattttaaatagagttgtc

SEQ ID NO: 219222 - DNA, 20 bp, Artificial Sequence
  Description of Artificial Sequence: Synthetic oligonucleotide
  Target: LAMA2; (-) strand; PAM type: YTN; PAM sequence: CTG
ggagctgcaattttaaatag

SEQ ID NO: 219223 - DNA, 20 bp, Artificial Sequence
  Description of Artificial Sequence: Synthetic oligonucleotide
  Target: LAMA2; (-) strand; PAM type: YTN; PAM sequence: TTA
ggaagtggacaggctgggag

SEQ ID NO: 219224 - DNA, 20 bp, Artificial Sequence
  Description of Artificial Sequence: Synthetic oligonucleotide
  Target: LAMA2; (-) strand; PAM type: YTN; PAM sequence: TTT
aggaagtggacaggctggga

SEQ ID NO: 219225 - DNA, 20 bp, Artificial Sequence
  Description of Artificial Sequence: Synthetic oligonucleotide
  Target: LAMA2; (-) strand; PAM type: YTN; PAM sequence: TTA
tggagaaaaataaagcagga

SEQ ID NO: 219226 - DNA, 20 bp, Artificial Sequence
  Description of Artificial Sequence: Synthetic oligonucleotide
  Target: LAMA2; (-) strand; PAM type: YTN; PAM sequence: TTT
atggagaaaaataaagcagg

SEQ ID NO: 219227 - DNA, 20 bp, Artificial Sequence
  Description of Artificial Sequence: Synthetic oligonucleotide
  Target: LAMA2; (-) strand; PAM type: YTN; PAM sequence: TTT
tatggagaaaaataaagcag

SEQ ID NO: 219228 - DNA, 20 bp, Artificial Sequence
  Description of Artificial Sequence: Synthetic oligonucleotide
  Target: LAMA2; (-) strand; PAM type: YTN; PAM sequence: TTA
gatggtgatatattttatgg

SEQ ID NO: 219229 - DNA, 20 bp, Artificial Sequence
  Description of Artificial Sequence: Synthetic oligonucleotide
  Target: LAMA2; (-) strand; PAM type: YTN; PAM sequence: CTG
aacagtaacatgtacatagt

SEQ ID NO: 219230 - DNA, 20 bp, Artificial Sequence
  Description of Artificial Sequence: Synthetic oligonucleotide
  Target: LAMA2; (-) strand; PAM type: YTN; PAM sequence: TTC
aactgaacagtaacatgtac

SEQ ID NO: 219231 - DNA, 20 bp, Artificial Sequence
  Description of Artificial Sequence: Synthetic oligonucleotide
  Target: LAMA2; (-) strand; PAM type: YTN; PAM sequence: TTA
gaaagataaatattcaactg

SEQ ID NO: 219232 - DNA, 20 bp, Artificial Sequence
  Description of Artificial Sequence: Synthetic oligonucleotide
  Target: LAMA2; (-) strand; PAM type: YTN; PAM sequence: TTT
agaaagataaatattcaact

SEQ ID NO: 219233 - DNA, 20 bp, Artificial Sequence
  Description of Artificial Sequence: Synthetic oligonucleotide
  Target: LAMA2; (-) strand; PAM type: YTN; PAM sequence: TTG
catttagaaagataaatatt

SEQ ID NO: 219234 - DNA, 20 bp, Artificial Sequence
  Description of Artificial Sequence: Synthetic oligonucleotide
  Target: LAMA2; (-) strand; PAM type: YTN; PAM sequence: CTC
cacgcacaaaaaaattgcat

SEQ ID NO: 219235 - DNA, 20 bp, Artificial Sequence
  Description of Artificial Sequence: Synthetic oligonucleotide
  Target: LAMA2; (-) strand; PAM type: YTN; PAM sequence: TTA
caacaacaaatagctccacg

SEQ ID NO: 219236 - DNA, 20 bp, Artificial Sequence
  Description of Artificial Sequence: Synthetic oligonucleotide
  Target: LAMA2; (-) strand; PAM type: YTN; PAM sequence: TTA
gaaagcaatgattacaacaa

SEQ ID NO: 219237 - DNA, 20 bp, Artificial Sequence
  Description of Artificial Sequence: Synthetic oligonucleotide
  Target: LAMA2; (-) strand; PAM type: YTN; PAM sequence: CTT
agaaagcaatgattacaaca

SEQ ID NO: 219238 - DNA, 20 bp, Artificial Sequence
  Description of Artificial Sequence: Synthetic oligonucleotide
  Target: LAMA2; (-) strand; PAM type: YTN; PAM sequence: CTA
agtgcttagaaagcaatgat

SEQ ID NO: 219239 - DNA, 20 bp, Artificial Sequence
  Description of Artificial Sequence: Synthetic oligonucleotide
  Target: LAMA2; (-) strand; PAM type: YTN; PAM sequence: TTC
taagtgcttagaaagcaatg

SEQ ID NO: 219240 - DNA, 20 bp, Artificial Sequence
  Description of Artificial Sequence: Synthetic oligonucleotide
  Target: LAMA2; (-) strand; PAM type: YTN; PAM sequence: CTA
ttctaagtgcttagaaagca

SEQ ID NO: 219241 - DNA, 20 bp, Artificial Sequence
  Description of Artificial Sequence: Synthetic oligonucleotide
  Target: LAMA2; (-) strand; PAM type: YTN; PAM sequence: TTG
tgcactattctaagtgctta

SEQ ID NO: 219242 - DNA, 20 bp, Artificial Sequence
  Description of Artificial Sequence: Synthetic oligonucleotide
  Target: LAMA2; (-) strand; PAM type: YTN; PAM sequence: CTA
tatgttgtgcactattctaa

SEQ ID NO: 219243 - DNA, 20 bp, Artificial Sequence
  Description of Artificial Sequence: Synthetic oligonucleotide
  Target: LAMA2; (-) strand; PAM type: YTN; PAM sequence: TTC
ctatatgttgtgcactattc

SEQ ID NO: 219244 - DNA, 20 bp, Artificial Sequence
  Description of Artificial Sequence: Synthetic oligonucleotide
  Target: LAMA2; (-) strand; PAM type: YTN; PAM sequence: CTT
cctatatgttgtgcactatt

SEQ ID NO: 219245 - DNA, 20 bp, Artificial Sequence
  Description of Artificial Sequence: Synthetic oligonucleotide
  Target: LAMA2; (-) strand; PAM type: YTN; PAM sequence: TTG
aatgcttcctatatgttgtg

SEQ ID NO: 219246 - DNA, 20 bp, Artificial Sequence
  Description of Artificial Sequence: Synthetic oligonucleotide
  Target: LAMA2; (-) strand; PAM type: YTN; PAM sequence: TTA
atacaaacacattgaatgct

SEQ ID NO: 219247 - DNA, 20 bp, Artificial Sequence
  Description of Artificial Sequence: Synthetic oligonucleotide
  Target: LAMA2; (-) strand; PAM type: YTN; PAM sequence: CTT
aatacaaacacattgaatgc

SEQ ID NO: 219248 - DNA, 20 bp, Artificial Sequence
  Description of Artificial Sequence: Synthetic oligonucleotide
  Target: LAMA2; (-) strand; PAM type: YTN; PAM sequence: TTA
acttaatacaaacacattga

SEQ ID NO: 219249 - DNA, 20 bp, Artificial Sequence
  Description of Artificial Sequence: Synthetic oligonucleotide
  Target: LAMA2; (-) strand; PAM type: YTN; PAM sequence: TTA
ttaacttaatacaaacacat

SEQ ID NO: 219250 - DNA, 20 bp, Artificial Sequence
  Description of Artificial Sequence: Synthetic oligonucleotide
  Target: LAMA2; (-) strand; PAM type: YTN; PAM sequence: TTT
attaacttaatacaaacaca

SEQ ID NO: 219251 - DNA, 20 bp, Artificial Sequence
  Description of Artificial Sequence: Synthetic oligonucleotide
  Target: LAMA2; (-) strand; PAM type: YTN; PAM sequence: TTC
agtcatttattaacttaata

SEQ ID NO: 219252 - DNA, 20 bp, Artificial Sequence
  Description of Artificial Sequence: Synthetic oligonucleotide
  Target: LAMA2; (-) strand; PAM type: YTN; PAM sequence: TTC
attcagtcatttattaactt

SEQ ID NO: 219253 - DNA, 20 bp, Artificial Sequence
  Description of Artificial Sequence: Synthetic oligonucleotide
  Target: LAMA2; (-) strand; PAM type: YTN; PAM sequence: TTA
ttcattcagtcatttattaa

SEQ ID NO: 219254 - DNA, 20 bp, Artificial Sequence
  Description of Artificial Sequence: Synthetic oligonucleotide
  Target: LAMA2; (-) strand; PAM type: YTN; PAM sequence: CTA
gttattcattcagtcattta

SEQ ID NO: 219255 - DNA, 20 bp, Artificial Sequence
  Description of Artificial Sequence: Synthetic oligonucleotide
  Target: LAMA2; (-) strand; PAM type: YTN; PAM sequence: TTG
tactagttattcattcagtc

SEQ ID NO: 219256 - DNA, 20 bp, Artificial Sequence
  Description of Artificial Sequence: Synthetic oligonucleotide
  Target: LAMA2; (-) strand; PAM type: YTN; PAM sequence: TTT
gtactagttattcattcagt

SEQ ID NO: 219257 - DNA, 20 bp, Artificial Sequence
  Description of Artificial Sequence: Synthetic oligonucleotide
  Target: LAMA2; (-) strand; PAM type: YTN; PAM sequence: TTG
gtggtttgtactagttattc

SEQ ID NO: 219258 - DNA, 20 bp, Artificial Sequence
  Description of Artificial Sequence: Synthetic oligonucleotide
  Target: LAMA2; (-) strand; PAM type: YTN; PAM sequence: TTA
tggattggtggtttgtacta

SEQ ID NO: 219259 - DNA, 20 bp, Artificial Sequence
  Description of Artificial Sequence: Synthetic oligonucleotide
  Target: LAMA2; (-) strand; PAM type: YTN; PAM sequence: TTA
aattatggattggtggtttg

SEQ ID NO: 219260 - DNA, 20 bp, Artificial Sequence
  Description of Artificial Sequence: Synthetic oligonucleotide
  Target: LAMA2; (-) strand; PAM type: YTN; PAM sequence: CTT
aaattatggattggtggttt

SEQ ID NO: 219261 - DNA, 20 bp, Artificial Sequence
  Description of Artificial Sequence: Synthetic oligonucleotide
  Target: LAMA2; (-) strand; PAM type: YTN; PAM sequence: TTC
ttaaattatggattggtggt

SEQ ID NO: 219262 - DNA, 20 bp, Artificial Sequence
  Description of Artificial Sequence: Synthetic oligonucleotide
  Target: LAMA2; (-) strand; PAM type: YTN; PAM sequence: TTC
aataagattcttaaattatg

SEQ ID NO: 219263 - DNA, 20 bp, Artificial Sequence
  Description of Artificial Sequence: Synthetic oligonucleotide
  Target: LAMA2; (-) strand; PAM type: YTN; PAM sequence: CTC
agattcaataagattcttaa

SEQ ID NO: 219264 - DNA, 20 bp, Artificial Sequence
  Description of Artificial Sequence: Synthetic oligonucleotide
  Target: LAMA2; (-) strand; PAM type: YTN; PAM sequence: TTC
tcagattcaataagattctt

SEQ ID NO: 219265 - DNA, 20 bp, Artificial Sequence
  Description of Artificial Sequence: Synthetic oligonucleotide
  Target: LAMA2; (-) strand; PAM type: YTN; PAM sequence: TTA
attctcagattcaataagat

SEQ ID NO: 219266 - DNA, 20 bp, Artificial Sequence
  Description of Artificial Sequence: Synthetic oligonucleotide
  Target: LAMA2; (-) strand; PAM type: YTN; PAM sequence: TTT
aattctcagattcaataaga

SEQ ID NO: 219267 - DNA, 20 bp, Artificial Sequence
  Description of Artificial Sequence: Synthetic oligonucleotide
  Target: LAMA2; (-) strand; PAM type: YTN; PAM sequence: CTT
taattctcagattcaataag

SEQ ID NO: 219268 - DNA, 20 bp, Artificial Sequence
  Description of Artificial Sequence: Synthetic oligonucleotide
  Target: LAMA2; (-) strand; PAM type: YTN; PAM sequence: TTA
atcctttaattctcagattc

SEQ ID NO: 219269 - DNA, 20 bp, Artificial Sequence
  Description of Artificial Sequence: Synthetic oligonucleotide
  Target: LAMA2; (-) strand; PAM type: YTN; PAM sequence: CTT
aatcctttaattctcagatt

SEQ ID NO: 219270 - DNA, 20 bp, Artificial Sequence
  Description of Artificial Sequence: Synthetic oligonucleotide
  Target: LAMA2; (-) strand; PAM type: YTN; PAM sequence: TTA
tcataagaagcacagtgaaa

SEQ ID NO: 219271 - DNA, 20 bp, Artificial Sequence
  Description of Artificial Sequence: Synthetic oligonucleotide
  Target: LAMA2; (-) strand; PAM type: YTN; PAM sequence: TTT
atcataagaagcacagtgaa

SEQ ID NO: 219272 - DNA, 20 bp, Artificial Sequence
  Description of Artificial Sequence: Synthetic oligonucleotide
  Target: LAMA2; (-) strand; PAM type: YTN; PAM sequence: TTT
tatcataagaagcacagtga

SEQ ID NO: 219273 - DNA, 20 bp, Artificial Sequence
  Description of Artificial Sequence: Synthetic oligonucleotide
  Target: LAMA2; (-) strand; PAM type: YTN; PAM sequence: TTA
gaaaaagtgcagtgtgtttt

SEQ ID NO: 219274 - DNA, 20 bp, Artificial Sequence
  Description of Artificial Sequence: Synthetic oligonucleotide
  Target: LAMA2; (-) strand; PAM type: YTN; PAM sequence: TTC
ataattagaaaaagtgcagt

SEQ ID NO: 219275 - DNA, 20 bp, Artificial Sequence
  Description of Artificial Sequence: Synthetic oligonucleotide
  Target: LAMA2; (-) strand; PAM type: YTN; PAM sequence: TTT
cataattagaaaaagtgcag

SEQ ID NO: 219276 - DNA, 20 bp, Artificial Sequence
  Description of Artificial Sequence: Synthetic oligonucleotide
  Target: LAMA2; (-) strand; PAM type: YTN; PAM sequence: TTA
aaggaaatttcataattaga

SEQ ID NO: 219277 - DNA, 20 bp, Artificial Sequence
  Description of Artificial Sequence: Synthetic oligonucleotide
  Target: LAMA2; (-) strand; PAM type: YTN; PAM sequence: CTT
aaaggaaatttcataattag

SEQ ID NO: 219278 - DNA, 20 bp, Artificial Sequence
  Description of Artificial Sequence: Synthetic oligonucleotide
  Target: LAMA2; (-) strand; PAM type: YTN; PAM sequence: TTC
aaccttaaaggaaatttcat

SEQ ID NO: 219279 - DNA, 20 bp, Artificial Sequence
  Description of Artificial Sequence: Synthetic oligonucleotide
  Target: LAMA2; (-) strand; PAM type: YTN; PAM sequence: CTA
aaacaatgccattcaacctt

SEQ ID NO: 219280 - DNA, 20 bp, Artificial Sequence
  Description of Artificial Sequence: Synthetic oligonucleotide
  Target: LAMA2; (-) strand; PAM type: YTN; PAM sequence: TTA
taatagcccaaatagactaa

SEQ ID NO: 219281 - DNA, 20 bp, Artificial Sequence
  Description of Artificial Sequence: Synthetic oligonucleotide
  Target: LAMA2; (-) strand; PAM type: YTN; PAM sequence: TTG
ttataatagcccaaatagac

SEQ ID NO: 219282 - DNA, 20 bp, Artificial Sequence
  Description of Artificial Sequence: Synthetic oligonucleotide
  Target: LAMA2; (-) strand; PAM type: YTN; PAM sequence: TTT
gttataatagcccaaataga

SEQ ID NO: 219283 - DNA, 20 bp, Artificial Sequence
  Description of Artificial Sequence: Synthetic oligonucleotide
  Target: LAMA2; (-) strand; PAM type: YTN; PAM sequence: CTT
tgttataatagcccaaatag

SEQ ID NO: 219284 - DNA, 20 bp, Artificial Sequence
  Description of Artificial Sequence: Synthetic oligonucleotide
  Target: LAMA2; (-) strand; PAM type: YTN; PAM sequence: CTG
gtactttgttataatagccc

SEQ ID NO: 219285 - DNA, 20 bp, Artificial Sequence
  Description of Artificial Sequence: Synthetic oligonucleotide
  Target: LAMA2; (-) strand; PAM type: YTN; PAM sequence: CTC
atctggtactttgttataat

SEQ ID NO: 219286 - DNA, 20 bp, Artificial Sequence
  Description of Artificial Sequence: Synthetic oligonucleotide
  Target: LAMA2; (-) strand; PAM type: YTN; PAM sequence: TTA
taagccacctcatctggtac

SEQ ID NO: 219287 - DNA, 20 bp, Artificial Sequence
  Description of Artificial Sequence: Synthetic oligonucleotide
  Target: LAMA2; (-) strand; PAM type: YTN; PAM sequence: TTT
ataagccacctcatctggta

SEQ ID NO: 219288 - DNA, 20 bp, Artificial Sequence
  Description of Artificial Sequence: Synthetic oligonucleotide
  Target: LAMA2; (-) strand; PAM type: YTN; PAM sequence: CTG
cagtttataagccacctcat

SEQ ID NO: 219289 - DNA, 20 bp, Artificial Sequence
  Description of Artificial Sequence: Synthetic oligonucleotide
  Target: LAMA2; (-) strand; PAM type: YTN; PAM sequence: TTG
ctgcagtttataagccacct

SEQ ID NO: 219290 - DNA, 20 bp, Artificial Sequence
  Description of Artificial Sequence: Synthetic oligonucleotide
  Target: LAMA2; (-) strand; PAM type: YTN; PAM sequence: CTA
tgagaaataaattgctgcag

SEQ ID NO: 219291 - DNA, 20 bp, Artificial Sequence
  Description of Artificial Sequence: Synthetic oligonucleotide
  Target: LAMA2; (-) strand; PAM type: YTN; PAM sequence: CTC
cagaactatgagaaataaat

SEQ ID NO: 219292 - DNA, 20 bp, Artificial Sequence
  Description of Artificial Sequence: Synthetic oligonucleotide
  Target: LAMA2; (-) strand; PAM type: YTN; PAM sequence: TTG
gacgtcaagcctccagaact

SEQ ID NO: 219293 - DNA, 20 bp, Artificial Sequence
  Description of Artificial Sequence: Synthetic oligonucleotide
  Target: LAMA2; (-) strand; PAM type: YTN; PAM sequence: CTT
ggacgtcaagcctccagaac

SEQ ID NO: 219294 - DNA, 20 bp, Artificial Sequence
  Description of Artificial Sequence: Synthetic oligonucleotide
  Target: LAMA2; (-) strand; PAM type: YTN; PAM sequence: TTG
atcttggacgtcaagcctcc

SEQ ID NO: 219295 - DNA, 20 bp, Artificial Sequence
  Description of Artificial Sequence: Synthetic oligonucleotide
  Target: LAMA2; (-) strand; PAM type: YTN; PAM sequence: TTT
gatcttggacgtcaagcctc

SEQ ID NO: 219296 - DNA, 20 bp, Artificial Sequence
  Description of Artificial Sequence: Synthetic oligonucleotide
  Target: LAMA2; (-) strand; PAM type: YTN; PAM sequence: CTT
tgatcttggacgtcaagcct

SEQ ID NO: 219297 - DNA, 20 bp, Artificial Sequence
  Description of Artificial Sequence: Synthetic oligonucleotide
  Target: LAMA2; (-) strand; PAM type: YTN; PAM sequence: CTG
ccagtgctttgatcttggac

SEQ ID NO: 219298 - DNA, 20 bp, Artificial Sequence
  Description of Artificial Sequence: Synthetic oligonucleotide
  Target: LAMA2; (-) strand; PAM type: YTN; PAM sequence: TTG
aatctgccagtgctttgatc

SEQ ID NO: 219299 - DNA, 20 bp, Artificial Sequence
  Description of Artificial Sequence: Synthetic oligonucleotide
  Target: LAMA2; (-) strand; PAM type: YTN; PAM sequence: CTC
accagacattgaatctgcca

SEQ ID NO: 219300 - DNA, 20 bp, Artificial Sequence
  Description of Artificial Sequence: Synthetic oligonucleotide
  Target: LAMA2; (-) strand; PAM type: YTN; PAM sequence: CTA
tgaaccaggaagcagaccct

SEQ ID NO: 219301 - DNA, 20 bp, Artificial Sequence
  Description of Artificial Sequence: Synthetic oligonucleotide
  Target: LAMA2; (-) strand; PAM type: YTN; PAM sequence: CTA
cagcaagaagaaggccatct

SEQ ID NO: 219302 - DNA, 20 bp, Artificial Sequence
  Description of Artificial Sequence: Synthetic oligonucleotide
  Target: LAMA2; (-) strand; PAM type: YTN; PAM sequence: CTG
ccatgtgaggctacagcaag

SEQ ID NO: 219303 - DNA, 20 bp, Artificial Sequence
  Description of Artificial Sequence: Synthetic oligonucleotide
  Target: LAMA2; (-) strand; PAM type: YTN; PAM sequence: TTC
tgccatgtgaggctacagca

SEQ ID NO: 219304 - DNA, 20 bp, Artificial Sequence
  Description of Artificial Sequence: Synthetic oligonucleotide
  Target: LAMA2; (-) strand; PAM type: YTN; PAM sequence: CTT
ctgccatgtgaggctacagc

SEQ ID NO: 219305 - DNA, 20 bp, Artificial Sequence
  Description of Artificial Sequence: Synthetic oligonucleotide
  Target: LAMA2; (-) strand; PAM type: YTN; PAM sequence: TTG
ccccttctgccatgtgaggc

SEQ ID NO: 219306 - DNA, 20 bp, Artificial Sequence
  Description of Artificial Sequence: Synthetic oligonucleotide
  Target: LAMA2; (-) strand; PAM type: YTN; PAM sequence: TTT
gccccttctgccatgtgagg

SEQ ID NO: 219307 - DNA, 20 bp, Artificial Sequence
  Description of Artificial Sequence: Synthetic oligonucleotide
  Target: LAMA2; (-) strand; PAM type: YTN; PAM sequence: TTA
tttgccccttctgccatgtg

SEQ ID NO: 219308 - DNA, 20 bp, Artificial Sequence
  Description of Artificial Sequence: Synthetic oligonucleotide
  Target: LAMA2; (-) strand; PAM type: YTN; PAM sequence: CTT
atttgccccttctgccatgt

SEQ ID NO: 219309 - DNA, 20 bp, Artificial Sequence
  Description of Artificial Sequence: Synthetic oligonucleotide
  Target: LAMA2; (-) strand; PAM type: YTN; PAM sequence: TTA
taaatgaaaccccagaaagc

SEQ ID NO: 219310 - DNA, 20 bp, Artificial Sequence
  Description of Artificial Sequence: Synthetic oligonucleotide
  Target: LAMA2; (-) strand; PAM type: YTN; PAM sequence: CTT
ataaatgaaaccccagaaag

SEQ ID NO: 219311 - DNA, 20 bp, Artificial Sequence
  Description of Artificial Sequence: Synthetic oligonucleotide
  Target: LAMA2; (-) strand; PAM type: YTN; PAM sequence: TTA
gtacccttataaatgaaacc

SEQ ID NO: 219312 - DNA, 20 bp, Artificial Sequence
  Description of Artificial Sequence: Synthetic oligonucleotide
  Target: LAMA2; (-) strand; PAM type: YTN; PAM sequence: TTA
ggtcatgaggacagagcccc

SEQ ID NO: 219313 - DNA, 20 bp, Artificial Sequence
  Description of Artificial Sequence: Synthetic oligonucleotide
  Target: LAMA2; (-) strand; PAM type: YTN; PAM sequence: TTG
gggaggtaattaggtcatga

SEQ ID NO: 219314 - DNA, 20 bp, Artificial Sequence
  Description of Artificial Sequence: Synthetic oligonucleotide
  Target: LAMA2; (-) strand; PAM type: YTN; PAM sequence: TTA
ggtgatggggattggggagg

SEQ ID NO: 219315 - DNA, 20 bp, Artificial Sequence
  Description of Artificial Sequence: Synthetic oligonucleotide
  Target: LAMA2; (-) strand; PAM type: YTN; PAM sequence: CTA
atgtgatggtattaggtgat

SEQ ID NO: 219316 - DNA, 20 bp, Artificial Sequence
  Description of Artificial Sequence: Synthetic oligonucleotide
  Target: LAMA2; (-) strand; PAM type: YTN; PAM sequence: CTA
acccctaatgtgatggtatt

SEQ ID NO: 219317 - DNA, 20 bp, Artificial Sequence
  Description of Artificial Sequence: Synthetic oligonucleotide
  Target: LAMA2; (-) strand; PAM type: YTN; PAM sequence: TTG
aaatcctaacccctaatgtg

SEQ ID NO: 219318 - DNA, 20 bp, Artificial Sequence
  Description of Artificial Sequence: Synthetic oligonucleotide
  Target: LAMA2; (-) strand; PAM type: YTN; PAM sequence: TTC
atatgttgaaatcctaaccc

SEQ ID NO: 219319 - DNA, 20 bp, Artificial Sequence
  Description of Artificial Sequence: Synthetic oligonucleotide
  Target: LAMA2; (-) strand; PAM type: YTN; PAM sequence: CTA
aaattcatatgttgaaatcc

SEQ ID NO: 219320 - DNA, 20 bp, Artificial Sequence
  Description of Artificial Sequence: Synthetic oligonucleotide
  Target: LAMA2; (-) strand; PAM type: YTN; PAM sequence: TTC
ccctaaaattcatatgttga

SEQ ID NO: 219321 - DNA, 20 bp, Artificial Sequence
  Description of Artificial Sequence: Synthetic oligonucleotide
  Target: LAMA2; (-) strand; PAM type: YTN; PAM sequence: CTG
ttcccctaaaattcatatgt

SEQ ID NO: 219322 - DNA, 20 bp, Artificial Sequence
  Description of Artificial Sequence: Synthetic oligonucleotide
  Target: LAMA2; (-) strand; PAM type: YTN; PAM sequence: TTC
tgttcccctaaaattcatat

SEQ ID NO: 219323 - DNA, 20 bp, Artificial Sequence
  Description of Artificial Sequence: Synthetic oligonucleotide
  Target: LAMA2; (-) strand; PAM type: YTN; PAM sequence: TTT
ctgttcccctaaaattcata

SEQ ID NO: 219324 - DNA, 20 bp, Artificial Sequence
  Description of Artificial Sequence: Synthetic oligonucleotide
  Target: LAMA2; (-) strand; PAM type: YTN; PAM sequence: CTG
aatgtttctgttcccctaaa

SEQ ID NO: 219325 - DNA, 20 bp, Artificial Sequence
  Description of Artificial Sequence: Synthetic oligonucleotide
  Target: LAMA2; (-) strand; PAM type: YTN; PAM sequence: CTA
tagactgaatgtttctgttc

SEQ ID NO: 219326 - DNA, 20 bp, Artificial Sequence
  Description of Artificial Sequence: Synthetic oligonucleotide
  Target: LAMA2; (-) strand; PAM type: YTN; PAM sequence: TTC
tatagactgaatgtttctgt

SEQ ID NO: 219327 - DNA, 20 bp, Artificial Sequence
  Description of Artificial Sequence: Synthetic oligonucleotide
  Target: LAMA2; (-) strand; PAM type: YTN; PAM sequence: TTT
ctatagactgaatgtttctg

SEQ ID NO: 219328 - DNA, 20 bp, Artificial Sequence
  Description of Artificial Sequence: Synthetic oligonucleotide
  Target: LAMA2; (-) strand; PAM type: YTN; PAM sequence: CTT
tctatagactgaatgtttct

SEQ ID NO: 219329 - DNA, 20 bp, Artificial Sequence
  Description of Artificial Sequence: Synthetic oligonucleotide
  Target: LAMA2; (-) strand; PAM type: YTN; PAM sequence: TTC
acgctttctatagactgaat

SEQ ID NO: 219330 - DNA, 20 bp, Artificial Sequence
  Description of Artificial Sequence: Synthetic oligonucleotide
  Target: LAMA2; (-) strand; PAM type: YTN; PAM sequence: CTT
cacgctttctatagactgaa

SEQ ID NO: 219331 - DNA, 20 bp, Artificial Sequence
  Description of Artificial Sequence: Synthetic oligonucleotide
  Target: LAMA2; (-) strand; PAM type: YTN; PAM sequence: TTA
cttcacgctttctatagact

SEQ ID NO: 219332 - DNA, 20 bp, Artificial Sequence
  Description of Artificial Sequence: Synthetic oligonucleotide
  Target: LAMA2; (-) strand; PAM type: YTN; PAM sequence: TTT
acttcacgctttctatagac

SEQ ID NO: 219333 - DNA, 20 bp, Artificial Sequence
  Description of Artificial Sequence: Synthetic oligonucleotide
  Target: LAMA2; (-) strand; PAM type: YTN; PAM sequence: CTG
gaagaaaatttacttcacgc

SEQ ID NO: 219334 - DNA, 20 bp, Artificial Sequence
  Description of Artificial Sequence: Synthetic oligonucleotide
  Target: LAMA2; (-) strand; PAM type: YTN; PAM sequence: TTA
aaagcagagtaagaacatgc

SEQ ID NO: 219335 - DNA, 20 bp, Artificial Sequence
  Description of Artificial Sequence: Synthetic oligonucleotide
  Target: LAMA2; (-) strand; PAM type: YTN; PAM sequence: CTT
aaaagcagagtaagaacatg

SEQ ID NO: 219336 - DNA, 20 bp, Artificial Sequence
  Description of Artificial Sequence: Synthetic oligonucleotide
  Target: LAMA2; (-) strand; PAM type: YTN; PAM sequence: TTA
gaatacgcttaaaagcagag

SEQ ID NO: 219337 - DNA, 20 bp, Artificial Sequence
  Description of Artificial Sequence: Synthetic oligonucleotide
  Target: LAMA2; (-) strand; PAM type: YTN; PAM sequence: TTT
agaatacgcttaaaagcaga

SEQ ID NO: 219338 - DNA, 20 bp, Artificial Sequence
  Description of Artificial Sequence: Synthetic oligonucleotide
  Target: LAMA2; (-) strand; PAM type: YTN; PAM sequence: CTG
aaatttagaatacgcttaaa

SEQ ID NO: 219339 - DNA, 20 bp, Artificial Sequence
  Description of Artificial Sequence: Synthetic oligonucleotide
  Target: LAMA2; (-) strand; PAM type: YTN; PAM sequence: CTG
taagtgtggtaaagtcacat

SEQ ID NO: 219340 - DNA, 20 bp, Artificial Sequence
  Description of Artificial Sequence: Synthetic oligonucleotide
  Target: LAMA2; (-) strand; PAM type: YTN; PAM sequence: CTA
aataaagctgtaagtgtggt

SEQ ID NO: 219341 - DNA, 20 bp, Artificial Sequence
  Description of Artificial Sequence: Synthetic oligonucleotide
  Target: LAMA2; (-) strand; PAM type: YTN; PAM sequence: TTC
ctaaataaagctgtaagtgt

SEQ ID NO: 219342 - DNA, 20 bp, Artificial Sequence
  Description of Artificial Sequence: Synthetic oligonucleotide
  Target: LAMA2; (-) strand; PAM type: YTN; PAM sequence: TTT
cctaaataaagctgtaagtg

SEQ ID NO: 219343 - DNA, 20 bp, Artificial Sequence
  Description of Artificial Sequence: Synthetic oligonucleotide
  Target: LAMA2; (-) strand; PAM type: YTN; PAM sequence: TTT
tcctaaataaagctgtaagt

SEQ ID NO: 219344 - DNA, 20 bp, Artificial Sequence
  Description of Artificial Sequence: Synthetic oligonucleotide
  Target: LAMA2; (-) strand; PAM type: YTN; PAM sequence: CTT
ttcctaaataaagctgtaag

SEQ ID NO: 219345 - DNA, 20 bp, Artificial Sequence
  Description of Artificial Sequence: Synthetic oligonucleotide
  Target: LAMA2; (-) strand; PAM type: YTN; PAM sequence: CTC
ttttcctaaataaagctgta

SEQ ID NO: 219346 - DNA, 20 bp, Artificial Sequence
  Description of Artificial Sequence: Synthetic oligonucleotide
  Target: LAMA2; (-) strand; PAM type: YTN; PAM sequence: TTA
acatctcttttcctaaataa

SEQ ID NO: 219347 - DNA, 20 bp, Artificial Sequence
  Description of Artificial Sequence: Synthetic oligonucleotide
  Target: LAMA2; (-) strand; PAM type: YTN; PAM sequence: TTA
aaataattaacatctctttt

SEQ ID NO: 219348 - DNA, 20 bp, Artificial Sequence
  Description of Artificial Sequence: Synthetic oligonucleotide
  Target: LAMA2; (-) strand; PAM type: YTN; PAM sequence: TTA
caaaagaagagttaaaataa

SEQ ID NO: 219349 - DNA, 20 bp, Artificial Sequence
  Description of Artificial Sequence: Synthetic oligonucleotide
  Target: LAMA2; (-) strand; PAM type: YTN; PAM sequence: CTG
ttacaaaagaagagttaaaa

SEQ ID NO: 219350 - DNA, 20 bp, Artificial Sequence
  Description of Artificial Sequence: Synthetic oligonucleotide
  Target: LAMA2; (-) strand; PAM type: YTN; PAM sequence: CTC
tgttacaaaagaagagttaa

SEQ ID NO: 219351 - DNA, 20 bp, Artificial Sequence
  Description of Artificial Sequence: Synthetic oligonucleotide
  Target: LAMA2; (-) strand; PAM type: YTN; PAM sequence: TTC
tctgttacaaaagaagagtt

SEQ ID NO: 219352 - DNA, 20 bp, Artificial Sequence
  Description of Artificial Sequence: Synthetic oligonucleotide
  Target: LAMA2; (-) strand; PAM type: YTN; PAM sequence: CTT
ctctgttacaaaagaagagt

SEQ ID NO: 219353 - DNA, 20 bp, Artificial Sequence
  Description of Artificial Sequence: Synthetic oligonucleotide
  Target: LAMA2; (-) strand; PAM type: YTN; PAM sequence: CTA
tgaggaaaaaatacaatgtc

SEQ ID NO: 219354 - DNA, 20 bp, Artificial Sequence
  Description of Artificial Sequence: Synthetic oligonucleotide
  Target: LAMA2; (-) strand; PAM type: YTN; PAM sequence: TTC
tatgaggaaaaaatacaatg

SEQ ID NO: 219355 - DNA, 20 bp, Artificial Sequence
  Description of Artificial Sequence: Synthetic oligonucleotide
  Target: LAMA2; (-) strand; PAM type: YTN; PAM sequence: TTG
ttctatgaggaaaaaataca

SEQ ID NO: 219356 - DNA, 20 bp, Artificial Sequence
  Description of Artificial Sequence: Synthetic oligonucleotide
  Target: LAMA2; (-) strand; PAM type: YTN; PAM sequence: TTT
gttctatgaggaaaaaatac

SEQ ID NO: 219357 - DNA, 20 bp, Artificial Sequence
  Description of Artificial Sequence: Synthetic oligonucleotide
  Target: LAMA2; (-) strand; PAM type: YTN; PAM sequence: TTT
tgttctatgaggaaaaaata

SEQ ID NO: 219358 - DNA, 20 bp, Artificial Sequence
  Description of Artificial Sequence: Synthetic oligonucleotide
  Target: LAMA2; (-) strand; PAM type: YTN; PAM sequence: CTT
ttgttctatgaggaaaaaat

SEQ ID NO: 219359 - DNA, 20 bp, Artificial Sequence
  Description of Artificial Sequence: Synthetic oligonucleotide
  Target: LAMA2; (-) strand; PAM type: YTN; PAM sequence: CTA
acttttgttctatgaggaaa

SEQ ID NO: 219360 - DNA, 20 bp, Artificial Sequence
  Description of Artificial Sequence: Synthetic oligonucleotide
  Target: LAMA2; (-) strand; PAM type: YTN; PAM sequence: TTA
tactaacttttgttctatga

SEQ ID NO: 219361 - DNA, 20 bp, Artificial Sequence
  Description of Artificial Sequence: Synthetic oligonucleotide
  Target: LAMA2; (-) strand; PAM type: YTN; PAM sequence: TTT
atactaacttttgttctatg

SEQ ID NO: 219362 - DNA, 20 bp, Artificial Sequence
  Description of Artificial Sequence: Synthetic oligonucleotide
  Target: LAMA2; (-) strand; PAM type: YTN; PAM sequence: TTT
tatactaacttttgttctat

SEQ ID NO: 219363 - DNA, 20 bp, Artificial Sequence
  Description of Artificial Sequence: Synthetic oligonucleotide
  Target: LAMA2; (-) strand; PAM type: YTN; PAM sequence: CTT
ttatactaacttttgttcta

SEQ ID NO: 219364 - DNA, 20 bp, Artificial Sequence
  Description of Artificial Sequence: Synthetic oligonucleotide
  Target: LAMA2; (-) strand; PAM type: YTN; PAM sequence: TTC
ttttatactaacttttgttc

SEQ ID NO: 219365 - DNA, 20 bp, Artificial Sequence
  Description of Artificial Sequence: Synthetic oligonucleotide
  Target: LAMA2; (-) strand; PAM type: YTN; PAM sequence: TTT
cttttatactaacttttgtt

SEQ ID NO: 219366 - DNA, 20 bp, Artificial Sequence
  Description of Artificial Sequence: Synthetic oligonucleotide
  Target: LAMA2; (-) strand; PAM type: YTN; PAM sequence: CTT
tcttttatactaacttttgt

SEQ ID NO: 219367 - DNA, 20 bp, Artificial Sequence
  Description of Artificial Sequence: Synthetic oligonucleotide
  Target: LAMA2; (-) strand; PAM type: YTN; PAM sequence: TTC
cctttcttttatactaactt

SEQ ID NO: 219368 - DNA, 20 bp, Artificial Sequence
  Description of Artificial Sequence: Synthetic oligonucleotide
  Target: LAMA2; (-) strand; PAM type: YTN; PAM sequence: TTT
ccctttcttttatactaact

SEQ ID NO: 219369 - DNA, 20 bp, Artificial Sequence
  Description of Artificial Sequence: Synthetic oligonucleotide
  Target: LAMA2; (-) strand; PAM type: YTN; PAM sequence: TTT
tccctttcttttatactaac

SEQ ID NO: 219370 - DNA, 20 bp, Artificial Sequence
  Description of Artificial Sequence: Synthetic oligonucleotide
  Target: LAMA2; (-) strand; PAM type: YTN; PAM sequence: TTT
ttccctttcttttatactaa

SEQ ID NO: 219371 - DNA, 20 bp, Artificial Sequence
  Description of Artificial Sequence: Synthetic oligonucleotide
  Target: LAMA2; (-) strand; PAM type: YTN; PAM sequence: TTT
tttccctttcttttatacta

SEQ ID NO: 219372 - DNA, 20 bp, Artificial Sequence
  Description of Artificial Sequence: Synthetic oligonucleotide
  Target: LAMA2; (-) strand; PAM type: YTN; PAM sequence: CTT
ttttccctttcttttatact

SEQ ID NO: 219373 - DNA, 20 bp, Artificial Sequence
  Description of Artificial Sequence: Synthetic oligonucleotide
  Target: LAMA2; (-) strand; PAM type: YTN; PAM sequence: TTG
tatggccttttttccctttc

SEQ ID NO: 219374 - DNA, 20 bp, Artificial Sequence
  Description of Artificial Sequence: Synthetic oligonucleotide
  Target: LAMA2; (-) strand; PAM type: YTN; PAM sequence: TTA
aacagcatcattgtatggcc

SEQ ID NO: 219375 - DNA, 20 bp, Artificial Sequence
  Description of Artificial Sequence: Synthetic oligonucleotide
  Target: LAMA2; (-) strand; PAM type: YTN; PAM sequence: TTT
aaacagcatcattgtatggc

SEQ ID NO: 219376 - DNA, 20 bp, Artificial Sequence
  Description of Artificial Sequence: Synthetic oligonucleotide
  Target: LAMA2; (-) strand; PAM type: YTN; PAM sequence: TTG
tttaaacagcatcattgtat

SEQ ID NO: 219377 - DNA, 20 bp, Artificial Sequence
  Description of Artificial Sequence: Synthetic oligonucleotide
  Target: LAMA2; (-) strand; PAM type: YTN; PAM sequence: CTT
gtttaaacagcatcattgta

SEQ ID NO: 219378 - DNA, 20 bp, Artificial Sequence
  Description of Artificial Sequence: Synthetic oligonucleotide
  Target: LAMA2; (-) strand; PAM type: YTN; PAM sequence: CTC
ttgtttaaacagcatcattg

SEQ ID NO: 219379 - DNA, 20 bp, Artificial Sequence
  Description of Artificial Sequence: Synthetic oligonucleotide
  Target: LAMA2; (-) strand; PAM type: YTN; PAM sequence: TTA
cactcttgtttaaacagcat

SEQ ID NO: 219380 - DNA, 20 bp, Artificial Sequence
  Description of Artificial Sequence: Synthetic oligonucleotide
  Target: LAMA2; (-) strand; PAM type: YTN; PAM sequence: TTT
acactcttgtttaaacagca

SEQ ID NO: 219381 - DNA, 20 bp, Artificial Sequence
  Description of Artificial Sequence: Synthetic oligonucleotide
  Target: LAMA2; (-) strand; PAM type: YTN; PAM sequence: CTA
catttacactcttgtttaaa

SEQ ID NO: 219382 - DNA, 20 bp, Artificial Sequence
  Description of Artificial Sequence: Synthetic oligonucleotide
  Target: LAMA2; (-) strand; PAM type: YTN; PAM sequence: TTA
gatcaaaatacatatcctac

SEQ ID NO: 219383 - DNA, 20 bp, Artificial Sequence
  Description of Artificial Sequence: Synthetic oligonucleotide
  Target: LAMA2; (-) strand; PAM type: YTN; PAM sequence: TTT
agatcaaaatacatatccta

SEQ ID NO: 219384 - DNA, 20 bp, Artificial Sequence
  Description of Artificial Sequence: Synthetic oligonucleotide
  Target: LAMA2; (-) strand; PAM type: YTN; PAM sequence: TTT
tagatcaaaatacatatcct

SEQ ID NO: 219385 - DNA, 20 bp, Artificial Sequence
  Description of Artificial Sequence: Synthetic oligonucleotide
  Target: LAMA2; (-) strand; PAM type: YTN; PAM sequence: TTA
tcaacattttagatcaaaat

SEQ ID NO: 219386 - DNA, 20 bp, Artificial Sequence
  Description of Artificial Sequence: Synthetic oligonucleotide
  Target: LAMA2; (-) strand; PAM type: YTN; PAM sequence: TTT
atcaacattttagatcaaaa

SEQ ID NO: 219387 - DNA, 20 bp, Artificial Sequence
  Description of Artificial Sequence: Synthetic oligonucleotide
  Target: LAMA2; (-) strand; PAM type: YTN; PAM sequence: TTG
gtttatcaacattttagatc

SEQ ID NO: 219388 - DNA, 20 bp, Artificial Sequence
  Description of Artificial Sequence: Synthetic oligonucleotide
  Target: LAMA2; (-) strand; PAM type: YTN; PAM sequence: TTT
ggtttatcaacattttagat

SEQ ID NO: 219389 - DNA, 20 bp, Artificial Sequence
  Description of Artificial Sequence: Synthetic oligonucleotide
  Target: LAMA2; (-) strand; PAM type: YTN; PAM sequence: CTA
gaatttggtttatcaacatt

SEQ ID NO: 219390 - DNA, 20 bp, Artificial Sequence
  Description of Artificial Sequence: Synthetic oligonucleotide
  Target: LAMA2; (-) strand; PAM type: YTN; PAM sequence: TTG
ctagaatttggtttatcaac

SEQ ID NO: 219391 - DNA, 20 bp, Artificial Sequence
  Description of Artificial Sequence: Synthetic oligonucleotide
  Target: LAMA2; (-) strand; PAM type: YTN; PAM sequence: TTC
atggtattgctagaatttgg

SEQ ID NO: 219392 - DNA, 20 bp, Artificial Sequence
  Description of Artificial Sequence: Synthetic oligonucleotide
  Target: LAMA2; (-) strand; PAM type: YTN; PAM sequence: TTT
catggtattgctagaatttg

SEQ ID NO: 219393 - DNA, 20 bp, Artificial Sequence
  Description of Artificial Sequence: Synthetic oligonucleotide
  Target: LAMA2; (-) strand; PAM type: YTN; PAM sequence: TTT
tcatggtattgctagaattt

SEQ ID NO: 219394 - DNA, 20 bp, Artificial Sequence
  Description of Artificial Sequence: Synthetic oligonucleotide
  Target: LAMA2; (-) strand; PAM type: YTN; PAM sequence: TTA
cattttcatggtattgctag

SEQ ID NO: 219395 - DNA, 20 bp, Artificial Sequence
  Description of Artificial Sequence: Synthetic oligonucleotide
  Target: LAMA2; (-) strand; PAM type: YTN; PAM sequence: TTT
acattttcatggtattgcta

SEQ ID NO: 219396 - DNA, 20 bp, Artificial Sequence
  Description of Artificial Sequence: Synthetic oligonucleotide
  Target: LAMA2; (-) strand; PAM type: YTN; PAM sequence: CTC
caaaatgtttacattttcat

SEQ ID NO: 219397 - DNA, 20 bp, Artificial Sequence
  Description of Artificial Sequence: Synthetic oligonucleotide
  Target: LAMA2; (-) strand; PAM type: YTN; PAM sequence: CTG
ggtctccaaaatgtttacat

SEQ ID NO: 219398 - DNA, 20 bp, Artificial Sequence
  Description of Artificial Sequence: Synthetic oligonucleotide
  Target: LAMA2; (-) strand; PAM type: YTN; PAM sequence: TTG
aaataggatctgggtctcca

SEQ ID NO: 219399 - DNA, 20 bp, Artificial Sequence
  Description of Artificial Sequence: Synthetic oligonucleotide
  Target: LAMA2; (-) strand; PAM type: YTN; PAM sequence: TTT
gaaataggatctgggtctcc

SEQ ID NO: 219400 - DNA, 20 bp, Artificial Sequence
  Description of Artificial Sequence: Synthetic oligonucleotide
  Target: LAMA2; (-) strand; PAM type: YTN; PAM sequence: CTA
tttgaaataggatctgggtc

SEQ ID NO: 219401 - DNA, 20 bp, Artificial Sequence
  Description of Artificial Sequence: Synthetic oligonucleotide
  Target: LAMA2; (-) strand; PAM type: YTN; PAM sequence: CTC
tatttgaaataggatctggg

SEQ ID NO: 219402 - DNA, 20 bp, Artificial Sequence
  Description of Artificial Sequence: Synthetic oligonucleotide
  Target: LAMA2; (-) strand; PAM type: YTN; PAM sequence: TTG
actctatttgaaataggatc

SEQ ID NO: 219403 - DNA, 20 bp, Artificial Sequence
  Description of Artificial Sequence: Synthetic oligonucleotide
  Target: LAMA2; (-) strand; PAM type: YTN; PAM sequence: CTT
gactctatttgaaataggat

SEQ ID NO: 219404 - DNA, 20 bp, Artificial Sequence
  Description of Artificial Sequence: Synthetic oligonucleotide
  Target: LAMA2; (-) strand; PAM type: YTN; PAM sequence: CTA
gggcagtcatcttgactcta

SEQ ID NO: 219405 - DNA, 20 bp, Artificial Sequence
  Description of Artificial Sequence: Synthetic oligonucleotide
  Target: LAMA2; (-) strand; PAM type: YTN; PAM sequence: TTC
tagggcagtcatcttgactc

SEQ ID NO: 219406 - DNA, 20 bp, Artificial Sequence
  Description of Artificial Sequence: Synthetic oligonucleotide
  Target: LAMA2; (-) strand; PAM type: YTN; PAM sequence: TTT
ctagggcagtcatcttgact

SEQ ID NO: 219407 - DNA, 20 bp, Artificial Sequence
  Description of Artificial Sequence: Synthetic oligonucleotide
  Target: LAMA2; (-) strand; PAM type: YTN; PAM sequence: TTT
tctagggcagtcatcttgac

SEQ ID NO: 219408 - DNA, 20 bp, Artificial Sequence
  Description of Artificial Sequence: Synthetic oligonucleotide
  Target: LAMA2; (-) strand; PAM type: YTN; PAM sequence: TTC
aagaagcattttctagggca

SEQ ID NO: 219409 - DNA, 20 bp, Artificial Sequence
  Description of Artificial Sequence: Synthetic oligonucleotide
  Target: LAMA2; (-) strand; PAM type: YTN; PAM sequence: CTT
caagaagcattttctagggc

SEQ ID NO: 219410 - DNA, 20 bp, Artificial Sequence
  Description of Artificial Sequence: Synthetic oligonucleotide
  Target: LAMA2; (-) strand; PAM type: YTN; PAM sequence: TTC
catgacttcaagaagcattt

SEQ ID NO: 219411 - DNA, 20 bp, Artificial Sequence
  Description of Artificial Sequence: Synthetic oligonucleotide
  Target: LAMA2; (-) strand; PAM type: YTN; PAM sequence: TTA
ttccatgacttcaagaagca

SEQ ID NO: 219412 - DNA, 20 bp, Artificial Sequence
  Description of Artificial Sequence: Synthetic oligonucleotide
  Target: LAMA2; (-) strand; PAM type: YTN; PAM sequence: TTT
attccatgacttcaagaagc

SEQ ID NO: 219413 - DNA, 20 bp, Artificial Sequence
  Description of Artificial Sequence: Synthetic oligonucleotide
  Target: LAMA2; (-) strand; PAM type: YTN; PAM sequence: CTA
atttattccatgacttcaag

SEQ ID NO: 219414 - DNA, 20 bp, Artificial Sequence
  Description of Artificial Sequence: Synthetic oligonucleotide
  Target: LAMA2; (-) strand; PAM type: YTN; PAM sequence: TTA
aataaacaatcatctaattt

SEQ ID NO: 219415 - DNA, 20 bp, Artificial Sequence
  Description of Artificial Sequence: Synthetic oligonucleotide
  Target: LAMA2; (-) strand; PAM type: YTN; PAM sequence: TTT
aaataaacaatcatctaatt

SEQ ID NO: 219416 - DNA, 20 bp, Artificial Sequence
  Description of Artificial Sequence: Synthetic oligonucleotide
  Target: LAMA2; (-) strand; PAM type: YTN; PAM sequence: TTT
taaataaacaatcatctaat

SEQ ID NO: 219417 - DNA, 20 bp, Artificial Sequence
  Description of Artificial Sequence: Synthetic oligonucleotide
  Target: LAMA2; (-) strand; PAM type: YTN; PAM sequence: TTT
ttaaataaacaatcatctaa

SEQ ID NO: 219418 - DNA, 20 bp, Artificial Sequence
  Description of Artificial Sequence: Synthetic oligonucleotide
  Target: LAMA2; (-) strand; PAM type: YTN; PAM sequence: TTT
tttaaataaacaatcatcta

SEQ ID NO: 219419 - DNA, 20 bp, Artificial Sequence
  Description of Artificial Sequence: Synthetic oligonucleotide
  Target: LAMA2; (-) strand; PAM type: YTN; PAM sequence: TTT
ttttaaataaacaatcatct

SEQ ID NO: 219420 - DNA, 20 bp, Artificial Sequence
  Description of Artificial Sequence: Synthetic oligonucleotide
  Target: LAMA2; (-) strand; PAM type: YTN; PAM sequence: TTT
tttttaaataaacaatcatc

SEQ ID NO: 219421 - DNA, 20 bp, Artificial Sequence
  Description of Artificial Sequence: Synthetic oligonucleotide
  Target: LAMA2; (-) strand; PAM type: YTN; PAM sequence: TTT
ttttttaaataaacaatcat

SEQ ID NO: 219422 - DNA, 20 bp, Artificial Sequence
  Description of Artificial Sequence: Synthetic oligonucleotide
  Target: LAMA2; (-) strand; PAM type: YTN; PAM sequence: CTT
tttttttaaataaacaatca

SEQ ID NO: 219423 - DNA, 20 bp, Artificial Sequence
  Description of Artificial Sequence: Synthetic oligonucleotide
  Target: LAMA2; (-) strand; PAM type: YTN; PAM sequence: TTC
tttttttttaaataaacaat

SEQ ID NO: 219424 - DNA, 20 bp, Artificial Sequence
  Description of Artificial Sequence: Synthetic oligonucleotide
  Target: LAMA2; (-) strand; PAM type: YTN; PAM sequence: TTG
ttctttttttttaaataaac

SEQ ID NO: 219425 - DNA, 20 bp, Artificial Sequence
  Description of Artificial Sequence: Synthetic oligonucleotide
  Target: LAMA2; (-) strand; PAM type: YTN; PAM sequence: TTA
ttgttctttttttttaaata

SEQ ID NO: 219426 - DNA, 20 bp, Artificial Sequence
  Description of Artificial Sequence: Synthetic oligonucleotide
  Target: LAMA2; (-) strand; PAM type: YTN; PAM sequence: CTA
tgtattattgttcttttttt

SEQ ID NO: 219427 - DNA, 20 bp, Artificial Sequence
  Description of Artificial Sequence: Synthetic oligonucleotide
  Target: LAMA2; (-) strand; PAM type: YTN; PAM sequence: CTC
ctatgtattattgttctttt

SEQ ID NO: 219428 - DNA, 20 bp, Artificial Sequence
  Description of Artificial Sequence: Synthetic oligonucleotide
  Target: LAMA2; (-) strand; PAM type: YTN; PAM sequence: TTA
acagatctcctatgtattat

SEQ ID NO: 219429 - DNA, 20 bp, Artificial Sequence
  Description of Artificial Sequence: Synthetic oligonucleotide
  Target: LAMA2; (-) strand; PAM type: YTN; PAM sequence: TTT
aacagatctcctatgtatta

SEQ ID NO: 219430 - DNA, 20 bp, Artificial Sequence
  Description of Artificial Sequence: Synthetic oligonucleotide
  Target: LAMA2; (-) strand; PAM type: YTN; PAM sequence: TTT
taacagatctcctatgtatt

SEQ ID NO: 219431 - DNA, 20 bp, Artificial Sequence
  Description of Artificial Sequence: Synthetic oligonucleotide
  Target: LAMA2; (-) strand; PAM type: YTN; PAM sequence: TTT
ttaacagatctcctatgtat

SEQ ID NO: 219432 - DNA, 20 bp, Artificial Sequence
  Description of Artificial Sequence: Synthetic oligonucleotide
  Target: LAMA2; (-) strand; PAM type: YTN; PAM sequence: TTT
tttaacagatctcctatgta

SEQ ID NO: 219433 - DNA, 20 bp, Artificial Sequence
  Description of Artificial Sequence: Synthetic oligonucleotide
  Target: LAMA2; (-) strand; PAM type: YTN; PAM sequence: CTC
acagattttttaacagatct

SEQ ID NO: 219434 - DNA, 20 bp, Artificial Sequence
  Description of Artificial Sequence: Synthetic oligonucleotide
  Target: LAMA2; (-) strand; PAM type: YTN; PAM sequence: TTC
ctcacagattttttaacaga

SEQ ID NO: 219435 - DNA, 20 bp, Artificial Sequence
  Description of Artificial Sequence: Synthetic oligonucleotide
  Target: LAMA2; (-) strand; PAM type: YTN; PAM sequence: TTT
cctcacagattttttaacag

SEQ ID NO: 219436 - DNA, 20 bp, Artificial Sequence
  Description of Artificial Sequence: Synthetic oligonucleotide
  Target: LAMA2; (-) strand; PAM type: YTN; PAM sequence: CTT
tcctcacagattttttaaca

SEQ ID NO: 219437 - DNA, 20 bp, Artificial Sequence
  Description of Artificial Sequence: Synthetic oligonucleotide
  Target: LAMA2; (-) strand; PAM type: YTN; PAM sequence: CTC
tttcctcacagattttttaa

SEQ ID NO: 219438 - DNA, 20 bp, Artificial Sequence
  Description of Artificial Sequence: Synthetic oligonucleotide
  Target: LAMA2; (-) strand; PAM type: YTN; PAM sequence: TTA
acagctctttcctcacagat

SEQ ID NO: 219439 - DNA, 20 bp, Artificial Sequence
  Description of Artificial Sequence: Synthetic oligonucleotide
  Target: LAMA2; (-) strand; PAM type: YTN; PAM sequence: TTT
aacagctctttcctcacaga

SEQ ID NO: 219440 - DNA, 20 bp, Artificial Sequence
  Description of Artificial Sequence: Synthetic oligonucleotide
  Target: LAMA2; (-) strand; PAM type: YTN; PAM sequence: TTT
taacagctctttcctcacag

SEQ ID NO: 219441 - DNA, 20 bp, Artificial Sequence
  Description of Artificial Sequence: Synthetic oligonucleotide
  Target: LAMA2; (-) strand; PAM type: YTN; PAM sequence: TTC
aacattttaacagctctttc

SEQ ID NO: 219442 - DNA, 20 bp, Artificial Sequence
  Description of Artificial Sequence: Synthetic oligonucleotide
  Target: LAMA2; (-) strand; PAM type: YTN; PAM sequence: TTT
caacattttaacagctcttt

SEQ ID NO: 219443 - DNA, 20 bp, Artificial Sequence
  Description of Artificial Sequence: Synthetic oligonucleotide
  Target: LAMA2; (-) strand; PAM type: YTN; PAM sequence: TTC
atgtggtttcaacattttaa

SEQ ID NO: 219444 - DNA, 20 bp, Artificial Sequence
  Description of Artificial Sequence: Synthetic oligonucleotide
  Target: LAMA2; (-) strand; PAM type: YTN; PAM sequence: TTC
cataacagaattcatgtggt

SEQ ID NO: 219445 - DNA, 20 bp, Artificial Sequence
  Description of Artificial Sequence: Synthetic oligonucleotide
  Target: LAMA2; (-) strand; PAM type: YTN; PAM sequence: TTT
ccataacagaattcatgtgg

SEQ ID NO: 219446 - DNA, 20 bp, Artificial Sequence
  Description of Artificial Sequence: Synthetic oligonucleotide
  Target: LAMA2; (-) strand; PAM type: YTN; PAM sequence: CTT
tccataacagaattcatgtg

SEQ ID NO: 219447 - DNA, 20 bp, Artificial Sequence
  Description of Artificial Sequence: Synthetic oligonucleotide
  Target: LAMA2; (-) strand; PAM type: YTN; PAM sequence: TTC
agactttccataacagaatt

SEQ ID NO: 219448 - DNA, 20 bp, Artificial Sequence
  Description of Artificial Sequence: Synthetic oligonucleotide
  Target: LAMA2; (-) strand; PAM type: YTN; PAM sequence: TTG
ttcagactttccataacaga

SEQ ID NO: 219449 - DNA, 20 bp, Artificial Sequence
  Description of Artificial Sequence: Synthetic oligonucleotide
  Target: LAMA2; (-) strand; PAM type: YTN; PAM sequence: CTT
gttcagactttccataacag

SEQ ID NO: 219450 - DNA, 20 bp, Artificial Sequence
  Description of Artificial Sequence: Synthetic oligonucleotide
  Target: LAMA2; (-) strand; PAM type: YTN; PAM sequence: TTA
gaaagtcttgttcagacttt

SEQ ID NO: 219451 - DNA, 20 bp, Artificial Sequence
  Description of Artificial Sequence: Synthetic oligonucleotide
  Target: LAMA2; (-) strand; PAM type: YTN; PAM sequence: TTT
agaaagtcttgttcagactt

SEQ ID NO: 219452 - DNA, 20 bp, Artificial Sequence
  Description of Artificial Sequence: Synthetic oligonucleotide
  Target: LAMA2; (-) strand; PAM type: YTN; PAM sequence: TTT
tagaaagtcttgttcagact

SEQ ID NO: 219453 - DNA, 20 bp, Artificial Sequence
  Description of Artificial Sequence: Synthetic oligonucleotide
  Target: LAMA2; (-) strand; PAM type: YTN; PAM sequence: CTA
ttttagaaagtcttgttcag

SEQ ID NO: 219454 - DNA, 20 bp, Artificial Sequence
  Description of Artificial Sequence: Synthetic oligonucleotide
  Target: LAMA2; (-) strand; PAM type: YTN; PAM sequence: TTC
aatctattttagaaagtctt

SEQ ID NO: 219455 - DNA, 20 bp, Artificial Sequence
  Description of Artificial Sequence: Synthetic oligonucleotide
  Target: LAMA2; (-) strand; PAM type: YTN; PAM sequence: CTG
cccacattcaatctatttta

SEQ ID NO: 219456 - DNA, 20 bp, Artificial Sequence
  Description of Artificial Sequence: Synthetic oligonucleotide
  Target: LAMA2; (-) strand; PAM type: YTN; PAM sequence: CTG
tgaaaactgcccacattcaa

SEQ ID NO: 219457 - DNA, 20 bp, Artificial Sequence
  Description of Artificial Sequence: Synthetic oligonucleotide
  Target: LAMA2; (-) strand; PAM type: YTN; PAM sequence: TTG
tgtgtggaagtcatcaggca

SEQ ID NO: 219458 - DNA, 20 bp, Artificial Sequence
  Description of Artificial Sequence: Synthetic oligonucleotide
  Target: LAMA2; (-) strand; PAM type: YTN; PAM sequence: TTT
gtgtgtggaagtcatcaggc

SEQ ID NO: 219459 - DNA, 20 bp, Artificial Sequence
  Description of Artificial Sequence: Synthetic oligonucleotide
  Target: LAMA2; (-) strand; PAM type: YTN; PAM sequence: TTT
tgtgtgtggaagtcatcagg

SEQ ID NO: 219460 - DNA, 20 bp, Artificial Sequence
  Description of Artificial Sequence: Synthetic oligonucleotide
  Target: LAMA2; (-) strand; PAM type: YTN; PAM sequence: TTC
caccaaaaggatgaaatgtg

SEQ ID NO: 219461 - DNA, 20 bp, Artificial Sequence
  Description of Artificial Sequence: Synthetic oligonucleotide
  Target: LAMA2; (-) strand; PAM type: YTN; PAM sequence: TTG
gaaaatacacagtattccac

SEQ ID NO: 219462 - DNA, 20 bp, Artificial Sequence
  Description of Artificial Sequence: Synthetic oligonucleotide
  Target: LAMA2; (-) strand; PAM type: YTN; PAM sequence: CTA
agaataaaattggaaaatac

SEQ ID NO: 219463 - DNA, 20 bp, Artificial Sequence
  Description of Artificial Sequence: Synthetic oligonucleotide
  Target: LAMA2; (-) strand; PAM type: YTN; PAM sequence: CTC
taagaataaaattggaaaat

SEQ ID NO: 219464 - DNA, 20 bp, Artificial Sequence
  Description of Artificial Sequence: Synthetic oligonucleotide
  Target: LAMA2; (-) strand; PAM type: YTN; PAM sequence: TTA
aactctaagaataaaattgg

SEQ ID NO: 219465 - DNA, 20 bp, Artificial Sequence
  Description of Artificial Sequence: Synthetic oligonucleotide
  Target: LAMA2; (-) strand; PAM type: YTN; PAM sequence: TTA
tatataatatatataacaaa

SEQ ID NO: 219466 - DNA, 20 bp, Artificial Sequence
  Description of Artificial Sequence: Synthetic oligonucleotide
  Target: LAMA2; (-) strand; PAM type: YTN; PAM sequence: TTA
gttatatataatatatataa

SEQ ID NO: 219467 - DNA, 20 bp, Artificial Sequence
  Description of Artificial Sequence: Synthetic oligonucleotide
  Target: LAMA2; (-) strand; PAM type: YTN; PAM sequence: TTG
tatattagttatatataata

SEQ ID NO: 219468 - DNA, 20 bp, Artificial Sequence
  Description of Artificial Sequence: Synthetic oligonucleotide
  Target: LAMA2; (-) strand; PAM type: YTN; PAM sequence: TTA
aataaataatataattgtat

SEQ ID NO: 219469 - DNA, 20 bp, Artificial Sequence
  Description of Artificial Sequence: Synthetic oligonucleotide
  Target: LAMA2; (-) strand; PAM type: YTN; PAM sequence: TTT
aaataaataatataattgta

SEQ ID NO: 219470 - DNA, 20 bp, Artificial Sequence
  Description of Artificial Sequence: Synthetic oligonucleotide
  Target: LAMA2; (-) strand; PAM type: YTN; PAM sequence: TTT
taaataaataatataattgt

SEQ ID NO: 219471 - DNA, 20 bp, Artificial Sequence
  Description of Artificial Sequence: Synthetic oligonucleotide
  Target: LAMA2; (-) strand; PAM type: YTN; PAM sequence: TTT
ttaaataaataatataattg

SEQ ID NO: 219472 - DNA, 20 bp, Artificial Sequence
  Description of Artificial Sequence: Synthetic oligonucleotide
  Target: LAMA2; (-) strand; PAM type: YTN; PAM sequence: TTA
tttttaaataaataatataa

SEQ ID NO: 219473 - DNA, 20 bp, Artificial Sequence
  Description of Artificial Sequence: Synthetic oligonucleotide
  Target: LAMA2; (-) strand; PAM type: YTN; PAM sequence: CTT
atttttaaataaataatata

SEQ ID NO: 219474 - DNA, 20 bp, Artificial Sequence
  Description of Artificial Sequence: Synthetic oligonucleotide
  Target: LAMA2; (-) strand; PAM type: YTN; PAM sequence: TTC
cttatttttaaataaataat

SEQ ID NO: 219475 - DNA, 20 bp, Artificial Sequence
  Description of Artificial Sequence: Synthetic oligonucleotide
  Target: LAMA2; (-) strand; PAM type: YTN; PAM sequence: TTA
attccttatttttaaataaa

SEQ ID NO: 219476 - DNA, 20 bp, Artificial Sequence
  Description of Artificial Sequence: Synthetic oligonucleotide
  Target: LAMA2; (-) strand; PAM type: YTN; PAM sequence: TTT
aattccttatttttaaataa

SEQ ID NO: 219477 - DNA, 20 bp, Artificial Sequence
  Description of Artificial Sequence: Synthetic oligonucleotide
  Target: LAMA2; (-) strand; PAM type: YTN; PAM sequence: TTT
taattccttatttttaaata

SEQ ID NO: 219478 - DNA, 20 bp, Artificial Sequence
  Description of Artificial Sequence: Synthetic oligonucleotide
  Target: LAMA2; (-) strand; PAM type: YTN; PAM sequence: TTT
ttaattccttatttttaaat

SEQ ID NO: 219479 - DNA, 20 bp, Artificial Sequence
  Description of Artificial Sequence: Synthetic oligonucleotide
  Target: LAMA2; (-) strand; PAM type: YTN; PAM sequence: TTG
tttttaattccttattttta

SEQ ID NO: 219480 - DNA, 20 bp, Artificial Sequence
  Description of Artificial Sequence: Synthetic oligonucleotide
  Target: LAMA2; (-) strand; PAM type: YTN; PAM sequence: TTA
aaaacaaataatataattgt

SEQ ID NO: 219481 - DNA, 20 bp, Artificial Sequence
  Description of Artificial Sequence: Synthetic oligonucleotide
  Target: LAMA2; (-) strand; PAM type: YTN; PAM sequence: TTT
aaaaacaaataatataattg

SEQ ID NO: 219482 - DNA, 20 bp, Artificial Sequence
  Description of Artificial Sequence: Synthetic oligonucleotide
  Target: LAMA2; (-) strand; PAM type: YTN; PAM sequence: TTA
tttaaaaacaaataatataa

SEQ ID NO: 219483 - DNA, 20 bp, Artificial Sequence
  Description of Artificial Sequence: Synthetic oligonucleotide
  Target: LAMA2; (-) strand; PAM type: YTN; PAM sequence: CTT
atttaaaaacaaataatata

SEQ ID NO: 219484 - DNA, 20 bp, Artificial Sequence
  Description of Artificial Sequence: Synthetic oligonucleotide
  Target: LAMA2; (-) strand; PAM type: YTN; PAM sequence: TTC
cttatttaaaaacaaataat

SEQ ID NO: 219485 - DNA, 20 bp, Artificial Sequence
  Description of Artificial Sequence: Synthetic oligonucleotide
  Target: LAMA2; (-) strand; PAM type: YTN; PAM sequence: TTG
taattccttatttaaaaaca

SEQ ID NO: 219486 - DNA, 20 bp, Artificial Sequence
  Description of Artificial Sequence: Synthetic oligonucleotide
  Target: LAMA2; (-) strand; PAM type: YTN; PAM sequence: TTT
gtaattccttatttaaaaac

SEQ ID NO: 219487 - DNA, 20 bp, Artificial Sequence
  Description of Artificial Sequence: Synthetic oligonucleotide
  Target: LAMA2; (-) strand; PAM type: YTN; PAM sequence: TTT
tgtaattccttatttaaaaa

SEQ ID NO: 219488 - DNA, 20 bp, Artificial Sequence
  Description of Artificial Sequence: Synthetic oligonucleotide
  Target: LAMA2; (-) strand; PAM type: YTN; PAM sequence: TTA
ttttgtaattccttatttaa

SEQ ID NO: 219489 - DNA, 20 bp, Artificial Sequence
  Description of Artificial Sequence: Synthetic oligonucleotide
  Target: LAMA2; (-) strand; PAM type: YTN; PAM sequence: TTC
attattttgtaattccttat

SEQ ID NO: 219490 - DNA, 20 bp, Artificial Sequence
  Description of Artificial Sequence: Synthetic oligonucleotide
  Target: LAMA2; (-) strand; PAM type: YTN; PAM sequence: CTT
cattattttgtaattcctta

SEQ ID NO: 219491 - DNA, 20 bp, Artificial Sequence
  Description of Artificial Sequence: Synthetic oligonucleotide
  Target: LAMA2; (-) strand; PAM type: YTN; PAM sequence: CTC
ttcattattttgtaattcct

SEQ ID NO: 219492 - DNA, 20 bp, Artificial Sequence
  Description of Artificial Sequence: Synthetic oligonucleotide
  Target: LAMA2; (-) strand; PAM type: YTN; PAM sequence: CTA
taataaatacggtctcttca

SEQ ID NO: 219493 - DNA, 20 bp, Artificial Sequence
  Description of Artificial Sequence: Synthetic oligonucleotide
  Target: LAMA2; (-) strand; PAM type: YTN; PAM sequence: TTC
aagatctataataaatacgg

SEQ ID NO: 219494 - DNA, 20 bp, Artificial Sequence
  Description of Artificial Sequence: Synthetic oligonucleotide
  Target: LAMA2; (-) strand; PAM type: YTN; PAM sequence: TTT
caagatctataataaatacg

SEQ ID NO: 219495 - DNA, 20 bp, Artificial Sequence
  Description of Artificial Sequence: Synthetic oligonucleotide
  Target: LAMA2; (-) strand; PAM type: YTN; PAM sequence: TTA
gtcacagtttcaagatctat

SEQ ID NO: 219496 - DNA, 20 bp, Artificial Sequence
  Description of Artificial Sequence: Synthetic oligonucleotide
  Target: LAMA2; (-) strand; PAM type: YTN; PAM sequence: TTT
agtcacagtttcaagatcta

SEQ ID NO: 219497 - DNA, 20 bp, Artificial Sequence
  Description of Artificial Sequence: Synthetic oligonucleotide
  Target: LAMA2; (-) strand; PAM type: YTN; PAM sequence: TTT
tagtcacagtttcaagatct

SEQ ID NO: 219498 - DNA, 20 bp, Artificial Sequence
  Description of Artificial Sequence: Synthetic oligonucleotide
  Target: LAMA2; (-) strand; PAM type: YTN; PAM sequence: TTT
ttagtcacagtttcaagatc

SEQ ID NO: 219499 - DNA, 20 bp, Artificial Sequence
  Description of Artificial Sequence: Synthetic oligonucleotide
  Target: LAMA2; (-) strand; PAM type: YTN; PAM sequence: CTG
tgcatggggtttttagtcac

SEQ ID NO: 219500 - DNA, 20 bp, Artificial Sequence
  Description of Artificial Sequence: Synthetic oligonucleotide
  Target: LAMA2; (-) strand; PAM type: YTN; PAM sequence: CTC
tgtgcatggggtttttagtc

SEQ ID NO: 219501 - DNA, 20 bp, Artificial Sequence
  Description of Artificial Sequence: Synthetic oligonucleotide
  Target: LAMA2; (-) strand; PAM type: YTN; PAM sequence: TTC
tctgtgcatggggtttttag

SEQ ID NO: 219502 - DNA, 20 bp, Artificial Sequence
  Description of Artificial Sequence: Synthetic oligonucleotide
  Target: LAMA2; (-) strand; PAM type: YTN; PAM sequence: TTT
ctctgtgcatggggttttta

SEQ ID NO: 219503 - DNA, 20 bp, Artificial Sequence
  Description of Artificial Sequence: Synthetic oligonucleotide
  Target: LAMA2; (-) strand; PAM type: YTN; PAM sequence: TTT
tctctgtgcatggggttttt

SEQ ID NO: 219504 - DNA, 20 bp, Artificial Sequence
  Description of Artificial Sequence: Synthetic oligonucleotide
  Target: LAMA2; (-) strand; PAM type: YTN; PAM sequence: CTC
aagaattttctctgtgcatg

SEQ ID NO: 219505 - DNA, 20 bp, Artificial Sequence
  Description of Artificial Sequence: Synthetic oligonucleotide
  Target: LAMA2; (-) strand; PAM type: YTN; PAM sequence: TTG
actcaagaattttctctgtg

SEQ ID NO: 219506 - DNA, 20 bp, Artificial Sequence
  Description of Artificial Sequence: Synthetic oligonucleotide
  Target: LAMA2; (-) strand; PAM type: YTN; PAM sequence: TTT
gactcaagaattttctctgt

SEQ ID NO: 219507 - DNA, 20 bp, Artificial Sequence
  Description of Artificial Sequence: Synthetic oligonucleotide
  Target: LAMA2; (-) strand; PAM type: YTN; PAM sequence: TTC
atcaatgaagccatttgact

SEQ ID NO: 219508 - DNA, 20 bp, Artificial Sequence
  Description of Artificial Sequence: Synthetic oligonucleotide
  Target: LAMA2; (-) strand; PAM type: YTN; PAM sequence: CTA
ttcatcaatgaagccatttg

SEQ ID NO: 219509 - DNA, 20 bp, Artificial Sequence
  Description of Artificial Sequence: Synthetic oligonucleotide
  Target: LAMA2; (-) strand; PAM type: YTN; PAM sequence: TTC
tattcatcaatgaagccatt

SEQ ID NO: 219510 - DNA, 20 bp, Artificial Sequence
  Description of Artificial Sequence: Synthetic oligonucleotide
  Target: LAMA2; (-) strand; PAM type: YTN; PAM sequence: CTT
ctattcatcaatgaagccat

SEQ ID NO: 219511 - DNA, 20 bp, Artificial Sequence
  Description of Artificial Sequence: Synthetic oligonucleotide
  Target: LAMA2; (-) strand; PAM type: YTN; PAM sequence: CTA
acttctattcatcaatgaag

SEQ ID NO: 219512 - DNA, 20 bp, Artificial Sequence
  Description of Artificial Sequence: Synthetic oligonucleotide
  Target: LAMA2; (-) strand; PAM type: YTN; PAM sequence: TTC
taacttctattcatcaatga

SEQ ID NO: 219513 - DNA, 20 bp, Artificial Sequence
  Description of Artificial Sequence: Synthetic oligonucleotide
  Target: LAMA2; (-) strand; PAM type: YTN; PAM sequence: TTG
taacaataaccagtattcta

SEQ ID NO: 219514 - DNA, 20 bp, Artificial Sequence
  Description of Artificial Sequence: Synthetic oligonucleotide
  Target: LAMA2; (-) strand; PAM type: YTN; PAM sequence: CTT
gtaacaataaccagtattct

SEQ ID NO: 219515 - DNA, 20 bp, Artificial Sequence
  Description of Artificial Sequence: Synthetic oligonucleotide
  Target: LAMA2; (-) strand; PAM type: YTN; PAM sequence: CTC
cttgtaacaataaccagtat

SEQ ID NO: 219516 - DNA, 20 bp, Artificial Sequence
  Description of Artificial Sequence: Synthetic oligonucleotide
  Target: LAMA2; (-) strand; PAM type: YTN; PAM sequence: CTC
tccttgtaacaataaccagt

SEQ ID NO: 219517 - DNA, 20 bp, Artificial Sequence
  Description of Artificial Sequence: Synthetic oligonucleotide
  Target: LAMA2; (-) strand; PAM type: YTN; PAM sequence: TTC
cctctccttgtaacaataac

SEQ ID NO: 219518 - DNA, 20 bp, Artificial Sequence
  Description of Artificial Sequence: Synthetic oligonucleotide
  Target: LAMA2; (-) strand; PAM type: YTN; PAM sequence: CTT
ccctctccttgtaacaataa

SEQ ID NO: 219519 - DNA, 20 bp, Artificial Sequence
  Description of Artificial Sequence: Synthetic oligonucleotide
  Target: LAMA2; (-) strand; PAM type: YTN; PAM sequence: TTA
tcttccctctccttgtaaca

SEQ ID NO: 219520 - DNA, 20 bp, Artificial Sequence
  Description of Artificial Sequence: Synthetic oligonucleotide
  Target: LAMA2; (-) strand; PAM type: YTN; PAM sequence: CTC
ccagtcattatcttccctct

SEQ ID NO: 219521 - DNA, 20 bp, Artificial Sequence
  Description of Artificial Sequence: Synthetic oligonucleotide
  Target: LAMA2; (-) strand; PAM type: YTN; PAM sequence: CTC
tcccagtcattatcttccct

SEQ ID NO: 219522 - DNA, 20 bp, Artificial Sequence
  Description of Artificial Sequence: Synthetic oligonucleotide
  Target: LAMA2; (-) strand; PAM type: YTN; PAM sequence: CTC
ataccctctcccagtcatta

SEQ ID NO: 219523 - DNA, 20 bp, Artificial Sequence
  Description of Artificial Sequence: Synthetic oligonucleotide
  Target: LAMA2; (-) strand; PAM type: YTN; PAM sequence: TTC
ctcataccctctcccagtca

SEQ ID NO: 219524 - DNA, 20 bp, Artificial Sequence
  Description of Artificial Sequence: Synthetic oligonucleotide
  Target: LAMA2; (-) strand; PAM type: YTN; PAM sequence: TTT
cctcataccctctcccagtc

SEQ ID NO: 219525 - DNA, 20 bp, Artificial Sequence
  Description of Artificial Sequence: Synthetic oligonucleotide
  Target: LAMA2; (-) strand; PAM type: YTN; PAM sequence: CTT
tcctcataccctctcccagt

SEQ ID NO: 219526 - DNA, 20 bp, Artificial Sequence
  Description of Artificial Sequence: Synthetic oligonucleotide
  Target: LAMA2; (-) strand; PAM type: YTN; PAM sequence: TTA
tataatcaaaaataagaaat

SEQ ID NO: 219527 - DNA, 20 bp, Artificial Sequence
  Description of Artificial Sequence: Synthetic oligonucleotide
  Target: LAMA2; (-) strand; PAM type: YTN; PAM sequence: TTG
tacaattatataatcaaaaa

SEQ ID NO: 219528 - DNA, 20 bp, Artificial Sequence
  Description of Artificial Sequence: Synthetic oligonucleotide
  Target: LAMA2; (-) strand; PAM type: YTN; PAM sequence: TTA
ttgtacaattatataatcaa

SEQ ID NO: 219529 - DNA, 20 bp, Artificial Sequence
  Description of Artificial Sequence: Synthetic oligonucleotide
  Target: LAMA2; (-) strand; PAM type: YTN; PAM sequence: TTA
ttattgtacaattatataat

SEQ ID NO: 219530 - DNA, 20 bp, Artificial Sequence
  Description of Artificial Sequence: Synthetic oligonucleotide
  Target: LAMA2; (-) strand; PAM type: YTN; PAM sequence: CTA
acacattattattgtacaat

SEQ ID NO: 219531 - DNA, 20 bp, Artificial Sequence
  Description of Artificial Sequence: Synthetic oligonucleotide
  Target: LAMA2; (-) strand; PAM type: YTN; PAM sequence: CTA
tgtactaacacattattatt

SEQ ID NO: 219532 - DNA, 20 bp, Artificial Sequence
  Description of Artificial Sequence: Synthetic oligonucleotide
  Target: LAMA2; (-) strand; PAM type: YTN; PAM sequence: TTC
tatgtactaacacattatta

SEQ ID NO: 219533 - DNA, 20 bp, Artificial Sequence
  Description of Artificial Sequence: Synthetic oligonucleotide
  Target: LAMA2; (-) strand; PAM type: YTN; PAM sequence: TTA
gttctatgtactaacacatt

SEQ ID NO: 219534 - DNA, 20 bp, Artificial Sequence
  Description of Artificial Sequence: Synthetic oligonucleotide
  Target: LAMA2; (-) strand; PAM type: YTN; PAM sequence: TTA
tattagttctatgtactaac

SEQ ID NO: 219535 - DNA, 20 bp, Artificial Sequence
  Description of Artificial Sequence: Synthetic oligonucleotide
  Target: LAMA2; (-) strand; PAM type: YTN; PAM sequence: TTA
caattatattagttctatgt

SEQ ID NO: 219536 - DNA, 20 bp, Artificial Sequence
  Description of Artificial Sequence: Synthetic oligonucleotide
  Target: LAMA2; (-) strand; PAM type: YTN; PAM sequence: TTT
acaattatattagttctatg

SEQ ID NO: 219537 - DNA, 20 bp, Artificial Sequence
  Description of Artificial Sequence: Synthetic oligonucleotide
  Target: LAMA2; (-) strand; PAM type: YTN; PAM sequence: TTA
tttacaattatattagttct

SEQ ID NO: 219538 - DNA, 20 bp, Artificial Sequence
  Description of Artificial Sequence: Synthetic oligonucleotide
  Target: LAMA2; (-) strand; PAM type: YTN; PAM sequence: CTT
atttacaattatattagttc

SEQ ID NO: 219539 - DNA, 20 bp, Artificial Sequence
  Description of Artificial Sequence: Synthetic oligonucleotide
  Target: LAMA2; (-) strand; PAM type: YTN; PAM sequence: TTA
tatataaacacacttattta

SEQ ID NO: 219540 - DNA, 20 bp, Artificial Sequence
  Description of Artificial Sequence: Synthetic oligonucleotide
  Target: LAMA2; (-) strand; PAM type: YTN; PAM sequence: TTA
ttatatataaacacacttat

SEQ ID NO: 219541 - DNA, 20 bp, Artificial Sequence
  Description of Artificial Sequence: Synthetic oligonucleotide
  Target: LAMA2; (-) strand; PAM type: YTN; PAM sequence: TTT
attatatataaacacactta

SEQ ID NO: 219542 - DNA, 20 bp, Artificial Sequence
  Description of Artificial Sequence: Synthetic oligonucleotide
  Target: LAMA2; (-) strand; PAM type: YTN; PAM sequence: TTT
tattatatataaacacactt

SEQ ID NO: 219543 - DNA, 20 bp, Artificial Sequence
  Description of Artificial Sequence: Synthetic oligonucleotide
  Target: LAMA2; (-) strand; PAM type: YTN; PAM sequence: TTG
tatattttattatatataaa

SEQ ID NO: 219544 - DNA, 20 bp, Artificial Sequence
  Description of Artificial Sequence: Synthetic oligonucleotide
  Target: LAMA2; (-) strand; PAM type: YTN; PAM sequence: TTT
gtatattttattatatataa

SEQ ID NO: 219545 - DNA, 20 bp, Artificial Sequence
  Description of Artificial Sequence: Synthetic oligonucleotide
  Target: LAMA2; (-) strand; PAM type: YTN; PAM sequence: TTT
tgtatattttattatatata

SEQ ID NO: 219546 - DNA, 20 bp, Artificial Sequence
  Description of Artificial Sequence: Synthetic oligonucleotide
  Target: LAMA2; (-) strand; PAM type: YTN; PAM sequence: CTA
tattttgtatattttattat

SEQ ID NO: 219547 - DNA, 20 bp, Artificial Sequence
  Description of Artificial Sequence: Synthetic oligonucleotide
  Target: LAMA2; (-) strand; PAM type: YTN; PAM sequence: TTA
tctatattttgtatatttta

SEQ ID NO: 219548 - DNA, 20 bp, Artificial Sequence
  Description of Artificial Sequence: Synthetic oligonucleotide
  Target: LAMA2; (-) strand; PAM type: YTN; PAM sequence: TTA
tacaatatattatctatatt

SEQ ID NO: 219549 - DNA, 20 bp, Artificial Sequence
  Description of Artificial Sequence: Synthetic oligonucleotide
  Target: LAMA2; (-) strand; PAM type: YTN; PAM sequence: TTA
tacattatacaatatattat

SEQ ID NO: 219550 - DNA, 20 bp, Artificial Sequence
  Description of Artificial Sequence: Synthetic oligonucleotide
  Target: LAMA2; (-) strand; PAM type: YTN; PAM sequence: TTG
tatataattatacattatac

SEQ ID NO: 219551 - DNA, 20 bp, Artificial Sequence
  Description of Artificial Sequence: Synthetic oligonucleotide
  Target: LAMA2; (-) strand; PAM type: YTN; PAM sequence: TTA
tattgtatataattatacat

SEQ ID NO: 219552 - DNA, 20 bp, Artificial Sequence
  Description of Artificial Sequence: Synthetic oligonucleotide
  Target: LAMA2; (-) strand; PAM type: YTN; PAM sequence: TTA
ttatattgtatataattata

SEQ ID NO: 219553 - DNA, 20 bp, Artificial Sequence
  Description of Artificial Sequence: Synthetic oligonucleotide
  Target: LAMA2; (-) strand; PAM type: YTN; PAM sequence: TTT
attatattgtatataattat

SEQ ID NO: 219554 - DNA, 20 bp, Artificial Sequence
  Description of Artificial Sequence: Synthetic oligonucleotide
  Target: LAMA2; (-) strand; PAM type: YTN; PAM sequence: TTT
tattatattgtatataatta

SEQ ID NO: 219555 - DNA, 20 bp, Artificial Sequence
  Description of Artificial Sequence: Synthetic oligonucleotide
  Target: LAMA2; (-) strand; PAM type: YTN; PAM sequence: TTT
ttattatattgtatataatt

SEQ ID NO: 219556 - DNA, 20 bp, Artificial Sequence
  Description of Artificial Sequence: Synthetic oligonucleotide
  Target: LAMA2; (-) strand; PAM type: YTN; PAM sequence: TTA
tcacatttttattatattgt

SEQ ID NO: 219557 - DNA, 20 bp, Artificial Sequence
  Description of Artificial Sequence: Synthetic oligonucleotide
  Target: LAMA2; (-) strand; PAM type: YTN; PAM sequence: TTT
atcacatttttattatattg

SEQ ID NO: 219558 - DNA, 20 bp, Artificial Sequence
  Description of Artificial Sequence: Synthetic oligonucleotide
  Target: LAMA2; (-) strand; PAM type: YTN; PAM sequence: TTA
tttatcacatttttattata

SEQ ID NO: 219559 - DNA, 20 bp, Artificial Sequence
  Description of Artificial Sequence: Synthetic oligonucleotide
  Target: LAMA2; (-) strand; PAM type: YTN; PAM sequence: TTA
tacaatattatttatcacat

SEQ ID NO: 219560 - DNA, 20 bp, Artificial Sequence
  Description of Artificial Sequence: Synthetic oligonucleotide
  Target: LAMA2; (-) strand; PAM type: YTN; PAM sequence: TTA
tatattatacaatattattt

SEQ ID NO: 219561 - DNA, 20 bp, Artificial Sequence
  Description of Artificial Sequence: Synthetic oligonucleotide
  Target: LAMA2; (-) strand; PAM type: YTN; PAM sequence: TTG
tatataattatatattatac

SEQ ID NO: 219562 - DNA, 20 bp, Artificial Sequence
  Description of Artificial Sequence: Synthetic oligonucleotide
  Target: LAMA2; (-) strand; PAM type: YTN; PAM sequence: TTA
atataattgtatataattat

SEQ ID NO: 219563 - DNA, 20 bp, Artificial Sequence
  Description of Artificial Sequence: Synthetic oligonucleotide
  Target: LAMA2; (-) strand; PAM type: YTN; PAM sequence: TTA
gtacatataattaatataat

SEQ ID NO: 219564 - DNA, 20 bp, Artificial Sequence
  Description of Artificial Sequence: Synthetic oligonucleotide
  Target: LAMA2; (-) strand; PAM type: YTN; PAM sequence: CTA
atacattagtacatataatt

SEQ ID NO: 219565 - DNA, 20 bp, Artificial Sequence
  Description of Artificial Sequence: Synthetic oligonucleotide
  Target: LAMA2; (-) strand; PAM type: YTN; PAM sequence: TTA
tatataggtacatataaata

SEQ ID NO: 219566 - DNA, 20 bp, Artificial Sequence
  Description of Artificial Sequence: Synthetic oligonucleotide
  Target: LAMA2; (-) strand; PAM type: YTN; PAM sequence: CTT
atatataggtacatataaat

SEQ ID NO: 219567 - DNA, 20 bp, Artificial Sequence
  Description of Artificial Sequence: Synthetic oligonucleotide
  Target: LAMA2; (-) strand; PAM type: YTN; PAM sequence: CTA
gaaaaagtcttatatatagg

SEQ ID NO: 219568 - DNA, 20 bp, Artificial Sequence
  Description of Artificial Sequence: Synthetic oligonucleotide
  Target: LAMA2; (-) strand; PAM type: YTN; PAM sequence: TTC
tagaaaaagtcttatatata

SEQ ID NO: 219569 - DNA, 20 bp, Artificial Sequence
  Description of Artificial Sequence: Synthetic oligonucleotide
  Target: LAMA2; (-) strand; PAM type: YTN; PAM sequence: TTT
ctagaaaaagtcttatatat

SEQ ID NO: 219570 - DNA, 20 bp, Artificial Sequence
  Description of Artificial Sequence: Synthetic oligonucleotide
  Target: LAMA2; (-) strand; PAM type: YTN; PAM sequence: TTC
aaatatgtagtcaatttcta

SEQ ID NO: 219571 - DNA, 20 bp, Artificial Sequence
  Description of Artificial Sequence: Synthetic oligonucleotide
  Target: LAMA2; (-) strand; PAM type: YTN; PAM sequence: CTC
acaattcaaatatgtagtca

SEQ ID NO: 219572 - DNA, 20 bp, Artificial Sequence
  Description of Artificial Sequence: Synthetic oligonucleotide
  Target: LAMA2; (-) strand; PAM type: YTN; PAM sequence: CTG
tctcacaattcaaatatgta

SEQ ID NO: 219573 - DNA, 20 bp, Artificial Sequence
  Description of Artificial Sequence: Synthetic oligonucleotide
  Target: LAMA2; (-) strand; PAM type: YTN; PAM sequence: CTA
tgaatcaaaacatacatgct

SEQ ID NO: 219574 - DNA, 20 bp, Artificial Sequence
  Description of Artificial Sequence: Synthetic oligonucleotide
  Target: LAMA2; (-) strand; PAM type: YTN; PAM sequence: TTA
tctatgaatcaaaacataca

SEQ ID NO: 219575 - DNA, 20 bp, Artificial Sequence
  Description of Artificial Sequence: Synthetic oligonucleotide
  Target: LAMA2; (-) strand; PAM type: YTN; PAM sequence: CTT
atctatgaatcaaaacatac

SEQ ID NO: 219576 - DNA, 20 bp, Artificial Sequence
  Description of Artificial Sequence: Synthetic oligonucleotide
  Target: LAMA2; (-) strand; PAM type: YTN; PAM sequence: TTG
gaaacatatcttatctatga

SEQ ID NO: 219577 - DNA, 20 bp, Artificial Sequence
  Description of Artificial Sequence: Synthetic oligonucleotide
  Target: LAMA2; (-) strand; PAM type: YTN; PAM sequence: TTA
gagatatgggtaatattgga

SEQ ID NO: 219578 - DNA, 20 bp, Artificial Sequence
  Description of Artificial Sequence: Synthetic oligonucleotide
  Target: LAMA2; (-) strand; PAM type: YTN; PAM sequence: TTT
agagatatgggtaatattgg

SEQ ID NO: 219579 - DNA, 20 bp, Artificial Sequence
  Description of Artificial Sequence: Synthetic oligonucleotide
  Target: LAMA2; (-) strand; PAM type: YTN; PAM sequence: TTT
tagagatatgggtaatattg

SEQ ID NO: 219580 - DNA, 20 bp, Artificial Sequence
  Description of Artificial Sequence: Synthetic oligonucleotide
  Target: LAMA2; (-) strand; PAM type: YTN; PAM sequence: TTG
tattttagagatatgggtaa

SEQ ID NO: 219581 - DNA, 20 bp, Artificial Sequence
  Description of Artificial Sequence: Synthetic oligonucleotide
  Target: LAMA2; (-) strand; PAM type: YTN; PAM sequence: TTT
gtattttagagatatgggta

SEQ ID NO: 219582 - DNA, 20 bp, Artificial Sequence
  Description of Artificial Sequence: Synthetic oligonucleotide
  Target: LAMA2; (-) strand; PAM type: YTN; PAM sequence: TTG
ccatgtttgtattttagaga

SEQ ID NO: 219583 - DNA, 20 bp, Artificial Sequence
  Description of Artificial Sequence: Synthetic oligonucleotide
  Target: LAMA2; (-) strand; PAM type: YTN; PAM sequence: TTT
gccatgtttgtattttagag

SEQ ID NO: 219584 - DNA, 20 bp, Artificial Sequence
  Description of Artificial Sequence: Synthetic oligonucleotide
  Target: LAMA2; (-) strand; PAM type: YTN; PAM sequence: TTT
tgccatgtttgtattttaga

SEQ ID NO: 219585 - DNA, 20 bp, Artificial Sequence
  Description of Artificial Sequence: Synthetic oligonucleotide
  Target: LAMA2; (-) strand; PAM type: YTN; PAM sequence: TTT
ttgccatgtttgtattttag

SEQ ID NO: 219586 - DNA, 20 bp, Artificial Sequence
  Description of Artificial Sequence: Synthetic oligonucleotide
  Target: LAMA2; (-) strand; PAM type: YTN; PAM sequence: TTT
tttgccatgtttgtatttta

SEQ ID NO: 219587 - DNA, 20 bp, Artificial Sequence
  Description of Artificial Sequence: Synthetic oligonucleotide
  Target: LAMA2; (-) strand; PAM type: YTN; PAM sequence: TTT
ttttgccatgtttgtatttt

SEQ ID NO: 219588 - DNA, 20 bp, Artificial Sequence
  Description of Artificial Sequence: Synthetic oligonucleotide
  Target: LAMA2; (-) strand; PAM type: YTN; PAM sequence: CTT
tttttgccatgtttgtattt

SEQ ID NO: 219589 - DNA, 20 bp, Artificial Sequence
  Description of Artificial Sequence: Synthetic oligonucleotide
  Target: LAMA2; (-) strand; PAM type: YTN; PAM sequence: CTC
cagcctttttttgccatgtt

SEQ ID NO: 219590 - DNA, 20 bp, Artificial Sequence
  Description of Artificial Sequence: Synthetic oligonucleotide
  Target: LAMA2; (-) strand; PAM type: YTN; PAM sequence: CTC
actccagcctttttttgcca

SEQ ID NO: 219591 - DNA, 20 bp, Artificial Sequence
  Description of Artificial Sequence: Synthetic oligonucleotide
  Target: LAMA2; (-) strand; PAM type: YTN; PAM sequence: TTA
gtctcactccagcctttttt

SEQ ID NO: 219592 - DNA, 20 bp, Artificial Sequence
  Description of Artificial Sequence: Synthetic oligonucleotide
  Target: LAMA2; (-) strand; PAM type: YTN; PAM sequence: CTT
agtctcactccagccttttt

SEQ ID NO: 219593 - DNA, 20 bp, Artificial Sequence
  Description of Artificial Sequence: Synthetic oligonucleotide
  Target: LAMA2; (-) strand; PAM type: YTN; PAM sequence: CTC
cttagtctcactccagcctt

SEQ ID NO: 219594 - DNA, 20 bp, Artificial Sequence
  Description of Artificial Sequence: Synthetic oligonucleotide
  Target: LAMA2; (-) strand; PAM type: YTN; PAM sequence: TTC
tccttagtctcactccagcc

SEQ ID NO: 219595 - DNA, 20 bp, Artificial Sequence
  Description of Artificial Sequence: Synthetic oligonucleotide
  Target: LAMA2; (-) strand; PAM type: YTN; PAM sequence: TTT
ctccttagtctcactccagc

SEQ ID NO: 219596 - DNA, 20 bp, Artificial Sequence
  Description of Artificial Sequence: Synthetic oligonucleotide
  Target: LAMA2; (-) strand; PAM type: YTN; PAM sequence: CTT
tctccttagtctcactccag

SEQ ID NO: 219597 - DNA, 20 bp, Artificial Sequence
  Description of Artificial Sequence: Synthetic oligonucleotide
  Target: LAMA2; (-) strand; PAM type: YTN; PAM sequence: CTC
ctttctccttagtctcactc

SEQ ID NO: 219598 - DNA, 20 bp, Artificial Sequence
  Description of Artificial Sequence: Synthetic oligonucleotide
  Target: LAMA2; (-) strand; PAM type: YTN; PAM sequence: CTC
ctcctttctccttagtctca

SEQ ID NO: 219599 - DNA, 20 bp, Artificial Sequence
  Description of Artificial Sequence: Synthetic oligonucleotide
  Target: LAMA2; (-) strand; PAM type: YTN; PAM sequence: TTA
tagctcctcctttctcctta

SEQ ID NO: 219600 - DNA, 20 bp, Artificial Sequence
  Description of Artificial Sequence: Synthetic oligonucleotide
  Target: LAMA2; (-) strand; PAM type: YTN; PAM sequence: CTT
atagctcctcctttctcctt

SEQ ID NO: 219601 - DNA, 20 bp, Artificial Sequence
  Description of Artificial Sequence: Synthetic oligonucleotide
  Target: LAMA2; (-) strand; PAM type: YTN; PAM sequence: CTG
ggcacacttatagctcctcc

SEQ ID NO: 219602 - DNA, 20 bp, Artificial Sequence
  Description of Artificial Sequence: Synthetic oligonucleotide
  Target: LAMA2; (-) strand; PAM type: YTN; PAM sequence: CTA
aggtaaatgtaccaacgcat

SEQ ID NO: 219603 - DNA, 20 bp, Artificial Sequence
  Description of Artificial Sequence: Synthetic oligonucleotide
  Target: LAMA2; (-) strand; PAM type: YTN; PAM sequence: TTA
cctaaggtaaatgtaccaac

SEQ ID NO: 219604 - DNA, 20 bp, Artificial Sequence
  Description of Artificial Sequence: Synthetic oligonucleotide
  Target: LAMA2; (-) strand; PAM type: YTN; PAM sequence: TTG
aagagcataaaagtgggaca

SEQ ID NO: 219605 - DNA, 20 bp, Artificial Sequence
  Description of Artificial Sequence: Synthetic oligonucleotide
  Target: LAMA2; (-) strand; PAM type: YTN; PAM sequence: CTA
gaccaaattgaagagcataa

SEQ ID NO: 219606 - DNA, 20 bp, Artificial Sequence
  Description of Artificial Sequence: Synthetic oligonucleotide
  Target: LAMA2; (-) strand; PAM type: YTN; PAM sequence: TTA
cactagaccaaattgaagag

SEQ ID NO: 219607 - DNA, 20 bp, Artificial Sequence
  Description of Artificial Sequence: Synthetic oligonucleotide
  Target: LAMA2; (-) strand; PAM type: YTN; PAM sequence: TTT
acactagaccaaattgaaga

SEQ ID NO: 219608 - DNA, 20 bp, Artificial Sequence
  Description of Artificial Sequence: Synthetic oligonucleotide
  Target: LAMA2; (-) strand; PAM type: YTN; PAM sequence: TTT
tacactagaccaaattgaag

SEQ ID NO: 219609 - DNA, 20 bp, Artificial Sequence
  Description of Artificial Sequence: Synthetic oligonucleotide
  Target: LAMA2; (-) strand; PAM type: YTN; PAM sequence: CTC
cattttacactagaccaaat

SEQ ID NO: 219610 - DNA, 20 bp, Artificial Sequence
  Description of Artificial Sequence: Synthetic oligonucleotide
  Target: LAMA2; (-) strand; PAM type: YTN; PAM sequence: TTG
ctccattttacactagacca

SEQ ID NO: 219611 - DNA, 20 bp, Artificial Sequence
  Description of Artificial Sequence: Synthetic oligonucleotide
  Target: LAMA2; (-) strand; PAM type: YTN; PAM sequence: TTT
gctccattttacactagacc

SEQ ID NO: 219612 - DNA, 20 bp, Artificial Sequence
  Description of Artificial Sequence: Synthetic oligonucleotide
  Target: LAMA2; (-) strand; PAM type: YTN; PAM sequence: CTA
tttgctccattttacactag

SEQ ID NO: 219613 - DNA, 20 bp, Artificial Sequence
  Description of Artificial Sequence: Synthetic oligonucleotide
  Target: LAMA2; (-) strand; PAM type: YTN; PAM sequence: CTC
gtaataaggaagtgggccta

SEQ ID NO: 219614 - DNA, 20 bp, Artificial Sequence
  Description of Artificial Sequence: Synthetic oligonucleotide
  Target: LAMA2; (-) strand; PAM type: YTN; PAM sequence: TTA
taatatgcctcgtaataagg

SEQ ID NO: 219615 - DNA, 20 bp, Artificial Sequence
  Description of Artificial Sequence: Synthetic oligonucleotide
  Target: LAMA2; (-) strand; PAM type: YTN; PAM sequence: CTT
ataatatgcctcgtaataag

SEQ ID NO: 219616 - DNA, 20 bp, Artificial Sequence
  Description of Artificial Sequence: Synthetic oligonucleotide
  Target: LAMA2; (-) strand; PAM type: YTN; PAM sequence: TTA
tccttataatatgcctcgta

SEQ ID NO: 219617 - DNA, 20 bp, Artificial Sequence
  Description of Artificial Sequence: Synthetic oligonucleotide
  Target: LAMA2; (-) strand; PAM type: YTN; PAM sequence: TTT
atccttataatatgcctcgt

SEQ ID NO: 219618 - DNA, 20 bp, Artificial Sequence
  Description of Artificial Sequence: Synthetic oligonucleotide
  Target: LAMA2; (-) strand; PAM type: YTN; PAM sequence: CTT
tatccttataatatgcctcg

SEQ ID NO: 219619 - DNA, 20 bp, Artificial Sequence
  Description of Artificial Sequence: Synthetic oligonucleotide
  Target: LAMA2; (-) strand; PAM type: YTN; PAM sequence: CTA
taacacatcactttatcctt

SEQ ID NO: 219620 - DNA, 20 bp, Artificial Sequence
  Description of Artificial Sequence: Synthetic oligonucleotide
  Target: LAMA2; (-) strand; PAM type: YTN; PAM sequence: TTG
cctataacacatcactttat

SEQ ID NO: 219621 - DNA, 20 bp, Artificial Sequence
  Description of Artificial Sequence: Synthetic oligonucleotide
  Target: LAMA2; (-) strand; PAM type: YTN; PAM sequence: TTT
gcctataacacatcacttta

SEQ ID NO: 219622 - DNA, 20 bp, Artificial Sequence
  Description of Artificial Sequence: Synthetic oligonucleotide
  Target: LAMA2; (-) strand; PAM type: YTN; PAM sequence: CTT
tgcctataacacatcacttt

SEQ ID NO: 219623 - DNA, 20 bp, Artificial Sequence
  Description of Artificial Sequence: Synthetic oligonucleotide
  Target: LAMA2; (-) strand; PAM type: YTN; PAM sequence: CTC
tttgcctataacacatcact

SEQ ID NO: 219624 - DNA, 20 bp, Artificial Sequence
  Description of Artificial Sequence: Synthetic oligonucleotide
  Target: LAMA2; (-) strand; PAM type: YTN; PAM sequence: CTA
tgctctttgcctataacaca

SEQ ID NO: 219625 - DNA, 20 bp, Artificial Sequence
  Description of Artificial Sequence: Synthetic oligonucleotide
  Target: LAMA2; (-) strand; PAM type: YTN; PAM sequence: CTA
aagtgcagcagtgtgctatg

SEQ ID NO: 219626 - DNA, 20 bp, Artificial Sequence
  Description of Artificial Sequence: Synthetic oligonucleotide
  Target: LAMA2; (-) strand; PAM type: YTN; PAM sequence: CTG
agtatcacctaaagtgcagc

SEQ ID NO: 219627 - DNA, 20 bp, Artificial Sequence
  Description of Artificial Sequence: Synthetic oligonucleotide
  Target: LAMA2; (-) strand; PAM type: YTN; PAM sequence: TTC
tgagtatcacctaaagtgca

SEQ ID NO: 219628 - DNA, 20 bp, Artificial Sequence
  Description of Artificial Sequence: Synthetic oligonucleotide
  Target: LAMA2; (-) strand; PAM type: YTN; PAM sequence: TTT
ctgagtatcacctaaagtgc

SEQ ID NO: 219629 - DNA, 20 bp, Artificial Sequence
  Description of Artificial Sequence: Synthetic oligonucleotide
  Target: LAMA2; (-) strand; PAM type: YTN; PAM sequence: TTT
tctgagtatcacctaaagtg

SEQ ID NO: 219630 - DNA, 20 bp, Artificial Sequence
  Description of Artificial Sequence: Synthetic oligonucleotide
  Target: LAMA2; (-) strand; PAM type: YTN; PAM sequence: TTC
aatgtggaagaccaaaagta

SEQ ID NO: 219631 - DNA, 20 bp, Artificial Sequence
  Description of Artificial Sequence: Synthetic oligonucleotide
  Target: LAMA2; (-) strand; PAM type: YTN; PAM sequence: TTT
caatgtggaagaccaaaagt

SEQ ID NO: 219632 - DNA, 20 bp, Artificial Sequence
  Description of Artificial Sequence: Synthetic oligonucleotide
  Target: LAMA2; (-) strand; PAM type: YTN; PAM sequence: TTT
tcaatgtggaagaccaaaag

SEQ ID NO: 219633 - DNA, 20 bp, Artificial Sequence
  Description of Artificial Sequence: Synthetic oligonucleotide
  Target: LAMA2; (-) strand; PAM type: YTN; PAM sequence: TTA
ttttcaatgtggaagaccaa

SEQ ID NO: 219634 - DNA, 20 bp, Artificial Sequence
  Description of Artificial Sequence: Synthetic oligonucleotide
  Target: LAMA2; (-) strand; PAM type: YTN; PAM sequence: TTC
accattattttcaatgtgga

SEQ ID NO: 219635 - DNA, 20 bp, Artificial Sequence
  Description of Artificial Sequence: Synthetic oligonucleotide
  Target: LAMA2; (-) strand; PAM type: YTN; PAM sequence: CTC
cattcaccattattttcaat

SEQ ID NO: 219636 - DNA, 20 bp, Artificial Sequence
  Description of Artificial Sequence: Synthetic oligonucleotide
  Target: LAMA2; (-) strand; PAM type: YTN; PAM sequence: TTC
tccattcaccattattttca

SEQ ID NO: 219637 - DNA, 20 bp, Artificial Sequence
  Description of Artificial Sequence: Synthetic oligonucleotide
  Target: LAMA2; (-) strand; PAM type: YTN; PAM sequence: TTA
ttctccattcaccattattt

SEQ ID NO: 219638 - DNA, 20 bp, Artificial Sequence
  Description of Artificial Sequence: Synthetic oligonucleotide
  Target: LAMA2; (-) strand; PAM type: YTN; PAM sequence: TTT
attctccattcaccattatt

SEQ ID NO: 219639 - DNA, 20 bp, Artificial Sequence
  Description of Artificial Sequence: Synthetic oligonucleotide
  Target: LAMA2; (-) strand; PAM type: YTN; PAM sequence: TTA
gcccatttattctccattca

SEQ ID NO: 219640 - DNA, 20 bp, Artificial Sequence
  Description of Artificial Sequence: Synthetic oligonucleotide
  Target: LAMA2; (-) strand; PAM type: YTN; PAM sequence: CTT
agcccatttattctccattc

SEQ ID NO: 219641 - DNA, 20 bp, Artificial Sequence
  Description of Artificial Sequence: Synthetic oligonucleotide
  Target: LAMA2; (-) strand; PAM type: YTN; PAM sequence: TTA
caacttagcccatttattct

SEQ ID NO: 219642 - DNA, 20 bp, Artificial Sequence
  Description of Artificial Sequence: Synthetic oligonucleotide
  Target: LAMA2; (-) strand; PAM type: YTN; PAM sequence: TTC
acattacaacttagcccatt

SEQ ID NO: 219643 - DNA, 20 bp, Artificial Sequence
  Description of Artificial Sequence: Synthetic oligonucleotide
  Target: LAMA2; (-) strand; PAM type: YTN; PAM sequence: TTT
cacattacaacttagcccat

SEQ ID NO: 219644 - DNA, 20 bp, Artificial Sequence
  Description of Artificial Sequence: Synthetic oligonucleotide
  Target: LAMA2; (-) strand; PAM type: YTN; PAM sequence: TTT
tcacattacaacttagccca

SEQ ID NO: 219645 - DNA, 20 bp, Artificial Sequence
  Description of Artificial Sequence: Synthetic oligonucleotide
  Target: LAMA2; (-) strand; PAM type: YTN; PAM sequence: TTT
ttcacattacaacttagccc

SEQ ID NO: 219646 - DNA, 20 bp, Artificial Sequence
  Description of Artificial Sequence: Synthetic oligonucleotide
  Target: LAMA2; (-) strand; PAM type: YTN; PAM sequence: TTC
catttttcacattacaactt

SEQ ID NO: 219647 - DNA, 20 bp, Artificial Sequence
  Description of Artificial Sequence: Synthetic oligonucleotide
  Target: LAMA2; (-) strand; PAM type: YTN; PAM sequence: TTT
ccatttttcacattacaact

SEQ ID NO: 219648 - DNA, 20 bp, Artificial Sequence
  Description of Artificial Sequence: Synthetic oligonucleotide
  Target: LAMA2; (-) strand; PAM type: YTN; PAM sequence: TTT
tccatttttcacattacaac

SEQ ID NO: 219649 - DNA, 20 bp, Artificial Sequence
  Description of Artificial Sequence: Synthetic oligonucleotide
  Target: LAMA2; (-) strand; PAM type: YTN; PAM sequence: TTA
ttttccatttttcacattac

SEQ ID NO: 219650 - DNA, 20 bp, Artificial Sequence
  Description of Artificial Sequence: Synthetic oligonucleotide
  Target: LAMA2; (-) strand; PAM type: YTN; PAM sequence: TTG
ttattttccatttttcacat

SEQ ID NO: 219651 - DNA, 20 bp, Artificial Sequence
  Description of Artificial Sequence: Synthetic oligonucleotide
  Target: LAMA2; (-) strand; PAM type: YTN; PAM sequence: TTT
gttattttccatttttcaca

SEQ ID NO: 219652 - DNA, 20 bp, Artificial Sequence
  Description of Artificial Sequence: Synthetic oligonucleotide
  Target: LAMA2; (-) strand; PAM type: YTN; PAM sequence: TTT
tgttattttccatttttcac

SEQ ID NO: 219653 - DNA, 20 bp, Artificial Sequence
  Description of Artificial Sequence: Synthetic oligonucleotide
  Target: LAMA2; (-) strand; PAM type: YTN; PAM sequence: TTG
ttttgttattttccattttt

SEQ ID NO: 219654 - DNA, 20 bp, Artificial Sequence
  Description of Artificial Sequence: Synthetic oligonucleotide
  Target: LAMA2; (-) strand; PAM type: YTN; PAM sequence: TTT
gttttgttattttccatttt

SEQ ID NO: 219655 - DNA, 20 bp, Artificial Sequence
  Description of Artificial Sequence: Synthetic oligonucleotide
  Target: LAMA2; (-) strand; PAM type: YTN; PAM sequence: TTT
tgttttgttattttccattt

SEQ ID NO: 219656 - DNA, 20 bp, Artificial Sequence
  Description of Artificial Sequence: Synthetic oligonucleotide
  Target: LAMA2; (-) strand; PAM type: YTN; PAM sequence: CTT
ttgttttgttattttccatt

SEQ ID NO: 219657 - DNA, 20 bp, Artificial Sequence
  Description of Artificial Sequence: Synthetic oligonucleotide
  Target: LAMA2; (-) strand; PAM type: YTN; PAM sequence: TTG
agcttttgttttgttatttt

SEQ ID NO: 219658 - DNA, 20 bp, Artificial Sequence
  Description of Artificial Sequence: Synthetic oligonucleotide
  Target: LAMA2; (-) strand; PAM type: YTN; PAM sequence: TTT
gagcttttgttttgttattt

SEQ ID NO: 219659 - DNA, 20 bp, Artificial Sequence
  Description of Artificial Sequence: Synthetic oligonucleotide
  Target: LAMA2; (-) strand; PAM type: YTN; PAM sequence: TTT
tgagcttttgttttgttatt

SEQ ID NO: 219660 - DNA, 20 bp, Artificial Sequence
  Description of Artificial Sequence: Synthetic oligonucleotide
  Target: LAMA2; (-) strand; PAM type: YTN; PAM sequence: TTT
ttgagcttttgttttgttat

SEQ ID NO: 219661 - DNA, 20 bp, Artificial Sequence
  Description of Artificial Sequence: Synthetic oligonucleotide
  Target: LAMA2; (-) strand; PAM type: YTN; PAM sequence: TTA
aagcatttttgagcttttgt

SEQ ID NO: 219662 - DNA, 20 bp, Artificial Sequence
  Description of Artificial Sequence: Synthetic oligonucleotide
  Target: LAMA2; (-) strand; PAM type: YTN; PAM sequence: TTC
aatatccagtaattaaagca

SEQ ID NO: 219663 - DNA, 20 bp, Artificial Sequence
  Description of Artificial Sequence: Synthetic oligonucleotide
  Target: LAMA2; (-) strand; PAM type: YTN; PAM sequence: TTT
caatatccagtaattaaagc

SEQ ID NO: 219664 - DNA, 20 bp, Artificial Sequence
  Description of Artificial Sequence: Synthetic oligonucleotide
  Target: LAMA2; (-) strand; PAM type: YTN; PAM sequence: CTC
ataggtatcatttcaatatc

SEQ ID NO: 219665 - DNA, 20 bp, Artificial Sequence
  Description of Artificial Sequence: Synthetic oligonucleotide
  Target: LAMA2; (-) strand; PAM type: YTN; PAM sequence: TTA
ggtgatatacaaagtgaacc

SEQ ID NO: 219666 - DNA, 20 bp, Artificial Sequence
  Description of Artificial Sequence: Synthetic oligonucleotide
  Target: LAMA2; (-) strand; PAM type: YTN; PAM sequence: CTT
aggtgatatacaaagtgaac

SEQ ID NO: 219667 - DNA, 20 bp, Artificial Sequence
  Description of Artificial Sequence: Synthetic oligonucleotide
  Target: LAMA2; (-) strand; PAM type: YTN; PAM sequence: TTC
ttaggtgatatacaaagtga

SEQ ID NO: 219668 - DNA, 20 bp, Artificial Sequence
  Description of Artificial Sequence: Synthetic oligonucleotide
  Target: LAMA2; (-) strand; PAM type: YTN; PAM sequence: TTG
agtaaaataatattcttagg

SEQ ID NO: 219669 - DNA, 20 bp, Artificial Sequence
  Description of Artificial Sequence: Synthetic oligonucleotide
  Target: LAMA2; (-) strand; PAM type: YTN; PAM sequence: CTA
aaaatatattgagtaaaata

SEQ ID NO: 219670 - DNA, 20 bp, Artificial Sequence
  Description of Artificial Sequence: Synthetic oligonucleotide
  Target: LAMA2; (-) strand; PAM type: YTN; PAM sequence: TTA
atgtccataaagtgctaaaa

SEQ ID NO: 219671 - DNA, 20 bp, Artificial Sequence
  Description of Artificial Sequence: Synthetic oligonucleotide
  Target: LAMA2; (-) strand; PAM type: YTN; PAM sequence: CTC
catagaaatattaatgtcca

SEQ ID NO: 219672 - DNA, 20 bp, Artificial Sequence
  Description of Artificial Sequence: Synthetic oligonucleotide
  Target: LAMA2; (-) strand; PAM type: YTN; PAM sequence: TTC
tccatagaaatattaatgtc

SEQ ID NO: 219673 - DNA, 20 bp, Artificial Sequence
  Description of Artificial Sequence: Synthetic oligonucleotide
  Target: LAMA2; (-) strand; PAM type: YTN; PAM sequence: TTT
ctccatagaaatattaatgt

SEQ ID NO: 219674 - DNA, 20 bp, Artificial Sequence
  Description of Artificial Sequence: Synthetic oligonucleotide
  Target: LAMA2; (-) strand; PAM type: YTN; PAM sequence: CTT
tctccatagaaatattaatg

SEQ ID NO: 219675 - DNA, 20 bp, Artificial Sequence
  Description of Artificial Sequence: Synthetic oligonucleotide
  Target: LAMA2; (-) strand; PAM type: YTN; PAM sequence: TTA
agctttctccatagaaatat

SEQ ID NO: 219676 - DNA, 20 bp, Artificial Sequence
  Description of Artificial Sequence: Synthetic oligonucleotide
  Target: LAMA2; (-) strand; PAM type: YTN; PAM sequence: TTT
aagctttctccatagaaata

SEQ ID NO: 219677 - DNA, 20 bp, Artificial Sequence
  Description of Artificial Sequence: Synthetic oligonucleotide
  Target: LAMA2; (-) strand; PAM type: YTN; PAM sequence: TTT
taagctttctccatagaaat

SEQ ID NO: 219678 - DNA, 20 bp, Artificial Sequence
  Description of Artificial Sequence: Synthetic oligonucleotide
  Target: LAMA2; (-) strand; PAM type: YTN; PAM sequence: TTT
ttaagctttctccatagaaa

SEQ ID NO: 219679 - DNA, 20 bp, Artificial Sequence
  Description of Artificial Sequence: Synthetic oligonucleotide
  Target: LAMA2; (-) strand; PAM type: YTN; PAM sequence: CTT
tttaagctttctccatagaa

SEQ ID NO: 219680 - DNA, 20 bp, Artificial Sequence
  Description of Artificial Sequence: Synthetic oligonucleotide
  Target: LAMA2; (-) strand; PAM type: YTN; PAM sequence: TTC
aatgcacaagtgacactttt

SEQ ID NO: 219681 - DNA, 20 bp, Artificial Sequence
  Description of Artificial Sequence: Synthetic oligonucleotide
  Target: LAMA2; (-) strand; PAM type: YTN; PAM sequence: TTT
caatgcacaagtgacacttt

SEQ ID NO: 219682 - DNA, 20 bp, Artificial Sequence
  Description of Artificial Sequence: Synthetic oligonucleotide
  Target: LAMA2; (-) strand; PAM type: YTN; PAM sequence: TTA
caaaagagtttcaatgcaca

SEQ ID NO: 219683 - DNA, 20 bp, Artificial Sequence
  Description of Artificial Sequence: Synthetic oligonucleotide
  Target: LAMA2; (-) strand; PAM type: YTN; PAM sequence: CTG
ttacaaaagagtttcaatgc

SEQ ID NO: 219684 - DNA, 20 bp, Artificial Sequence
  Description of Artificial Sequence: Synthetic oligonucleotide
  Target: LAMA2; (-) strand; PAM type: YTN; PAM sequence: CTG
gaggatatcatgacaacaac

SEQ ID NO: 219685 - DNA, 20 bp, Artificial Sequence
  Description of Artificial Sequence: Synthetic oligonucleotide
  Target: LAMA2; (-) strand; PAM type: YTN; PAM sequence: TTA
agtaatctggaggatatcat

SEQ ID NO: 219686 - DNA, 20 bp, Artificial Sequence
  Description of Artificial Sequence: Synthetic oligonucleotide
  Target: LAMA2; (-) strand; PAM type: YTN; PAM sequence: TTT
aagtaatctggaggatatca

SEQ ID NO: 219687 - DNA, 20 bp, Artificial Sequence
  Description of Artificial Sequence: Synthetic oligonucleotide
  Target: LAMA2; (-) strand; PAM type: YTN; PAM sequence: TTA
aaaatttaagtaatctggag

SEQ ID NO: 219688 - DNA, 20 bp, Artificial Sequence
  Description of Artificial Sequence: Synthetic oligonucleotide
  Target: LAMA2; (-) strand; PAM type: YTN; PAM sequence: TTG
gttaaaaatttaagtaatct

SEQ ID NO: 219689 - DNA, 20 bp, Artificial Sequence
  Description of Artificial Sequence: Synthetic oligonucleotide
  Target: LAMA2; (-) strand; PAM type: YTN; PAM sequence: CTT
ggttaaaaatttaagtaatc

SEQ ID NO: 219690 - DNA, 20 bp, Artificial Sequence
  Description of Artificial Sequence: Synthetic oligonucleotide
  Target: LAMA2; (-) strand; PAM type: YTN; PAM sequence: TTC
ttggttaaaaatttaagtaa

SEQ ID NO: 219691 - DNA, 20 bp, Artificial Sequence
  Description of Artificial Sequence: Synthetic oligonucleotide
  Target: LAMA2; (-) strand; PAM type: YTN; PAM sequence: CTT
cttggttaaaaatttaagta

SEQ ID NO: 219692 - DNA, 20 bp, Artificial Sequence
  Description of Artificial Sequence: Synthetic oligonucleotide
  Target: LAMA2; (-) strand; PAM type: YTN; PAM sequence: TTA
cttcttggttaaaaatttaa

SEQ ID NO: 219693 - DNA, 20 bp, Artificial Sequence
  Description of Artificial Sequence: Synthetic oligonucleotide
  Target: LAMA2; (-) strand; PAM type: YTN; PAM sequence: CTA
gtaataagtaaggttacttc

SEQ ID NO: 219694 - DNA, 20 bp, Artificial Sequence
  Description of Artificial Sequence: Synthetic oligonucleotide
  Target: LAMA2; (-) strand; PAM type: YTN; PAM sequence: TTA
aggaaagagcatactagtaa

SEQ ID NO: 219695 - DNA, 20 bp, Artificial Sequence
  Description of Artificial Sequence: Synthetic oligonucleotide
  Target: LAMA2; (-) strand; PAM type: YTN; PAM sequence: TTT
aaggaaagagcatactagta

SEQ ID NO: 219696 - DNA, 20 bp, Artificial Sequence
  Description of Artificial Sequence: Synthetic oligonucleotide
  Target: LAMA2; (-) strand; PAM type: YTN; PAM sequence: TTT
taaggaaagagcatactagt

SEQ ID NO: 219697 - DNA, 20 bp, Artificial Sequence
  Description of Artificial Sequence: Synthetic oligonucleotide
  Target: LAMA2; (-) strand; PAM type: YTN; PAM sequence: CTT
ttaaggaaagagcatactag

SEQ ID NO: 219698 - DNA, 20 bp, Artificial Sequence
  Description of Artificial Sequence: Synthetic oligonucleotide
  Target: LAMA2; (-) strand; PAM type: YTN; PAM sequence: TTA
aaataacataaatcagaaaa

SEQ ID NO: 219699 - DNA, 20 bp, Artificial Sequence
  Description of Artificial Sequence: Synthetic oligonucleotide
  Target: LAMA2; (-) strand; PAM type: YTN; PAM sequence: TTG
atataattaaaataacataa

SEQ ID NO: 219700 - DNA, 20 bp, Artificial Sequence
  Description of Artificial Sequence: Synthetic oligonucleotide
  Target: LAMA2; (-) strand; PAM type: YTN; PAM sequence: CTG
tacataataacaagattgat

SEQ ID NO: 219701 - DNA, 20 bp, Artificial Sequence
  Description of Artificial Sequence: Synthetic oligonucleotide
  Target: LAMA2; (-) strand; PAM type: YTN; PAM sequence: TTA
aaaactgtacataataacaa

SEQ ID NO: 219702 - DNA, 20 bp, Artificial Sequence
  Description of Artificial Sequence: Synthetic oligonucleotide
  Target: LAMA2; (-) strand; PAM type: YTN; PAM sequence: TTA
aaataattaaaaactgtaca

SEQ ID NO: 219703 - DNA, 20 bp, Artificial Sequence
  Description of Artificial Sequence: Synthetic oligonucleotide
  Target: LAMA2; (-) strand; PAM type: YTN; PAM sequence: TTA
ttaaaataattaaaaactgt

SEQ ID NO: 219704 - DNA, 20 bp, Artificial Sequence
  Description of Artificial Sequence: Synthetic oligonucleotide
  Target: LAMA2; (-) strand; PAM type: YTN; PAM sequence: TTG
aaattattaaaataattaaa

SEQ ID NO: 219705 - DNA, 20 bp, Artificial Sequence
  Description of Artificial Sequence: Synthetic oligonucleotide
  Target: LAMA2; (-) strand; PAM type: YTN; PAM sequence: TTG
cagaaaggttgaaattatta

SEQ ID NO: 219706 - DNA, 20 bp, Artificial Sequence
  Description of Artificial Sequence: Synthetic oligonucleotide
  Target: LAMA2; (-) strand; PAM type: YTN; PAM sequence: CTA
aaatggaaagttgcagaaag

SEQ ID NO: 219707 - DNA, 20 bp, Artificial Sequence
  Description of Artificial Sequence: Synthetic oligonucleotide
  Target: LAMA2; (-) strand; PAM type: YTN; PAM sequence: TTA
atgagacatatctaaaatgg

SEQ ID NO: 219708 - DNA, 20 bp, Artificial Sequence
  Description of Artificial Sequence: Synthetic oligonucleotide
  Target: LAMA2; (-) strand; PAM type: YTN; PAM sequence: CTA
tatgccattaatgagacata

SEQ ID NO: 219709 - DNA, 20 bp, Artificial Sequence
  Description of Artificial Sequence: Synthetic oligonucleotide
  Target: LAMA2; (-) strand; PAM type: YTN; PAM sequence: TTC
actatatgccattaatgaga

SEQ ID NO: 219710 - DNA, 20 bp, Artificial Sequence
  Description of Artificial Sequence: Synthetic oligonucleotide
  Target: LAMA2; (-) strand; PAM type: YTN; PAM sequence: CTT
cactatatgccattaatgag

SEQ ID NO: 219711 - DNA, 20 bp, Artificial Sequence
  Description of Artificial Sequence: Synthetic oligonucleotide
  Target: LAMA2; (-) strand; PAM type: YTN; PAM sequence: CTA
gacaaaacgtcaaaacttca

SEQ ID NO: 219712 - DNA, 20 bp, Artificial Sequence
  Description of Artificial Sequence: Synthetic oligonucleotide
  Target: LAMA2; (-) strand; PAM type: YTN; PAM sequence: CTG
ccaaactagacaaaacgtca

SEQ ID NO: 219713 - DNA, 20 bp, Artificial Sequence
  Description of Artificial Sequence: Synthetic oligonucleotide
  Target: LAMA2; (-) strand; PAM type: YTN; PAM sequence: TTA
aaagaccaacactgccaaac

SEQ ID NO: 219714 - DNA, 20 bp, Artificial Sequence
  Description of Artificial Sequence: Synthetic oligonucleotide
  Target: LAMA2; (-) strand; PAM type: YTN; PAM sequence: TTC
attaaaagaccaacactgcc

SEQ ID NO: 219715 - DNA, 20 bp, Artificial Sequence
  Description of Artificial Sequence: Synthetic oligonucleotide
  Target: LAMA2; (-) strand; PAM type: YTN; PAM sequence: TTT
cattaaaagaccaacactgc

SEQ ID NO: 219716 - DNA, 20 bp, Artificial Sequence
  Description of Artificial Sequence: Synthetic oligonucleotide
  Target: LAMA2; (-) strand; PAM type: YTN; PAM sequence: CTG
aaaatgcatgtttcattaaa

SEQ ID NO: 219717 - DNA, 20 bp, Artificial Sequence
  Description of Artificial Sequence: Synthetic oligonucleotide
  Target: LAMA2; (-) strand; PAM type: YTN; PAM sequence: TTA
gatacacacagatccactga

SEQ ID NO: 219718 - DNA, 20 bp, Artificial Sequence
  Description of Artificial Sequence: Synthetic oligonucleotide
  Target: LAMA2; (-) strand; PAM type: YTN; PAM sequence: CTT
agatacacacagatccactg

SEQ ID NO: 219719 - DNA, 20 bp, Artificial Sequence
  Description of Artificial Sequence: Synthetic oligonucleotide
  Target: LAMA2; (-) strand; PAM type: YTN; PAM sequence: TTC
acttagatacacacagatcc

SEQ ID NO: 219720 - DNA, 20 bp, Artificial Sequence
  Description of Artificial Sequence: Synthetic oligonucleotide
  Target: LAMA2; (-) strand; PAM type: YTN; PAM sequence: CTT
cacttagatacacacagatc

SEQ ID NO: 219721 - DNA, 20 bp, Artificial Sequence
  Description of Artificial Sequence: Synthetic oligonucleotide
  Target: LAMA2; (-) strand; PAM type: YTN; PAM sequence: CTG
tgtacatgcttcacttagat

SEQ ID NO: 219722 - DNA, 20 bp, Artificial Sequence
  Description of Artificial Sequence: Synthetic oligonucleotide
  Target: LAMA2; (-) strand; PAM type: YTN; PAM sequence: TTC
tgtgtacatgcttcacttag

SEQ ID NO: 219723 - DNA, 20 bp, Artificial Sequence
  Description of Artificial Sequence: Synthetic oligonucleotide
  Target: LAMA2; (-) strand; PAM type: YTN; PAM sequence: TTT
ctgtgtacatgcttcactta

SEQ ID NO: 219724 - DNA, 20 bp, Artificial Sequence
  Description of Artificial Sequence: Synthetic oligonucleotide
  Target: LAMA2; (-) strand; PAM type: YTN; PAM sequence: TTT
tctgtgtacatgcttcactt

SEQ ID NO: 219725 - DNA, 20 bp, Artificial Sequence
  Description of Artificial Sequence: Synthetic oligonucleotide
  Target: LAMA2; (-) strand; PAM type: YTN; PAM sequence: CTT
ttctgtgtacatgcttcact

SEQ ID NO: 219726 - DNA, 20 bp, Artificial Sequence
  Description of Artificial Sequence: Synthetic oligonucleotide
  Target: LAMA2; (-) strand; PAM type: YTN; PAM sequence: TTG
tcaccttttctgtgtacatg

SEQ ID NO: 219727 - DNA, 20 bp, Artificial Sequence
  Description of Artificial Sequence: Synthetic oligonucleotide
  Target: LAMA2; (-) strand; PAM type: YTN; PAM sequence: TTT
gtcaccttttctgtgtacat

SEQ ID NO: 219728 - DNA, 20 bp, Artificial Sequence
  Description of Artificial Sequence: Synthetic oligonucleotide
  Target: LAMA2; (-) strand; PAM type: YTN; PAM sequence: TTA
tttgtcaccttttctgtgta

SEQ ID NO: 219729 - DNA, 20 bp, Artificial Sequence
  Description of Artificial Sequence: Synthetic oligonucleotide
  Target: LAMA2; (-) strand; PAM type: YTN; PAM sequence: TTT
atttgtcaccttttctgtgt

SEQ ID NO: 219730 - DNA, 20 bp, Artificial Sequence
  Description of Artificial Sequence: Synthetic oligonucleotide
  Target: LAMA2; (-) strand; PAM type: YTN; PAM sequence: TTT
tatttgtcaccttttctgtg

SEQ ID NO: 219731 - DNA, 20 bp, Artificial Sequence
  Description of Artificial Sequence: Synthetic oligonucleotide
  Target: LAMA2; (-) strand; PAM type: YTN; PAM sequence: CTT
ttatttgtcaccttttctgt

SEQ ID NO: 219732 - DNA, 20 bp, Artificial Sequence
  Description of Artificial Sequence: Synthetic oligonucleotide
  Target: LAMA2; (-) strand; PAM type: YTN; PAM sequence: CTC
agacttttatttgtcacctt

SEQ ID NO: 219733 - DNA, 20 bp, Artificial Sequence
  Description of Artificial Sequence: Synthetic oligonucleotide
  Target: LAMA2; (-) strand; PAM type: YTN; PAM sequence: CTC
tcagacttttatttgtcacc

SEQ ID NO: 219734 - DNA, 20 bp, Artificial Sequence
  Description of Artificial Sequence: Synthetic oligonucleotide
  Target: LAMA2; (-) strand; PAM type: YTN; PAM sequence: TTC
tctcagacttttatttgtca

SEQ ID NO: 219735 - DNA, 20 bp, Artificial Sequence
  Description of Artificial Sequence: Synthetic oligonucleotide
  Target: LAMA2; (-) strand; PAM type: YTN; PAM sequence: TTA
gcaaaaattctctcagactt

SEQ ID NO: 219736 - DNA, 20 bp, Artificial Sequence
  Description of Artificial Sequence: Synthetic oligonucleotide
  Target: LAMA2; (-) strand; PAM type: YTN; PAM sequence: TTT
agcaaaaattctctcagact

SEQ ID NO: 219737 - DNA, 20 bp, Artificial Sequence
  Description of Artificial Sequence: Synthetic oligonucleotide
  Target: LAMA2; (-) strand; PAM type: YTN; PAM sequence: TTC
atttagcaaaaattctctca

SEQ ID NO: 219738 - DNA, 20 bp, Artificial Sequence
  Description of Artificial Sequence: Synthetic oligonucleotide
  Target: LAMA2; (-) strand; PAM type: YTN; PAM sequence: TTG
ggaaggttcatttagcaaaa

SEQ ID NO: 219739 - DNA, 20 bp, Artificial Sequence
  Description of Artificial Sequence: Synthetic oligonucleotide
  Target: LAMA2; (-) strand; PAM type: YTN; PAM sequence: CTT
gggaaggttcatttagcaaa

SEQ ID NO: 219740 - DNA, 20 bp, Artificial Sequence
  Description of Artificial Sequence: Synthetic oligonucleotide
  Target: LAMA2; (-) strand; PAM type: YTN; PAM sequence: TTA
cttgggaaggttcatttagc

SEQ ID NO: 219741 - DNA, 20 bp, Artificial Sequence
  Description of Artificial Sequence: Synthetic oligonucleotide
  Target: LAMA2; (-) strand; PAM type: YTN; PAM sequence: CTC
agtagtagttacttgggaag

SEQ ID NO: 219742 - DNA, 20 bp, Artificial Sequence
  Description of Artificial Sequence: Synthetic oligonucleotide
  Target: LAMA2; (-) strand; PAM type: YTN; PAM sequence: TTG
tctcagtagtagttacttgg

SEQ ID NO: 219743 - DNA, 20 bp, Artificial Sequence
  Description of Artificial Sequence: Synthetic oligonucleotide
  Target: LAMA2; (-) strand; PAM type: YTN; PAM sequence: TTT
gtctcagtagtagttacttg

SEQ ID NO: 219744 - DNA, 20 bp, Artificial Sequence
  Description of Artificial Sequence: Synthetic oligonucleotide
  Target: LAMA2; (-) strand; PAM type: YTN; PAM sequence: TTT
tgtctcagtagtagttactt

SEQ ID NO: 219745 - DNA, 20 bp, Artificial Sequence
  Description of Artificial Sequence: Synthetic oligonucleotide
  Target: LAMA2; (-) strand; PAM type: YTN; PAM sequence: TTT
ttgtctcagtagtagttact

SEQ ID NO: 219746 - DNA, 20 bp, Artificial Sequence
  Description of Artificial Sequence: Synthetic oligonucleotide
  Target: LAMA2; (-) strand; PAM type: YTN; PAM sequence: TTA
tttttgtctcagtagtagtt

SEQ ID NO: 219747 - DNA, 20 bp, Artificial Sequence
  Description of Artificial Sequence: Synthetic oligonucleotide
  Target: LAMA2; (-) strand; PAM type: YTN; PAM sequence: CTG
gttatttttgtctcagtagt

SEQ ID NO: 219748 - DNA, 20 bp, Artificial Sequence
  Description of Artificial Sequence: Synthetic oligonucleotide
  Target: LAMA2; (-) strand; PAM type: YTN; PAM sequence: TTG
ctggttatttttgtctcagt

SEQ ID NO: 219749 - DNA, 20 bp, Artificial Sequence
  Description of Artificial Sequence: Synthetic oligonucleotide
  Target: LAMA2; (-) strand; PAM type: YTN; PAM sequence: CTG
ggttgctggttatttttgtc

SEQ ID NO: 219750 - DNA, 20 bp, Artificial Sequence
  Description of Artificial Sequence: Synthetic oligonucleotide
  Target: LAMA2; (-) strand; PAM type: YTN; PAM sequence: TTC
tgggttgctggttatttttg

SEQ ID NO: 219751 - DNA, 20 bp, Artificial Sequence
  Description of Artificial Sequence: Synthetic oligonucleotide
  Target: LAMA2; (-) strand; PAM type: YTN; PAM sequence: TTT
ctgggttgctggttattttt

SEQ ID NO: 219752 - DNA, 20 bp, Artificial Sequence
  Description of Artificial Sequence: Synthetic oligonucleotide
  Target: LAMA2; (-) strand; PAM type: YTN; PAM sequence: TTG
gaaaaggcatgagggaagtt

SEQ ID NO: 219753 - DNA, 20 bp, Artificial Sequence
  Description of Artificial Sequence: Synthetic oligonucleotide
  Target: LAMA2; (-) strand; PAM type: YTN; PAM sequence: TTA
ggggagaaggcaagatagtg

SEQ ID NO: 219754 - DNA, 20 bp, Artificial Sequence
  Description of Artificial Sequence: Synthetic oligonucleotide
  Target: LAMA2; (-) strand; PAM type: YTN; PAM sequence: CTA
ttaggggagaaggcaagata

SEQ ID NO: 219755 - DNA, 20 bp, Artificial Sequence
  Description of Artificial Sequence: Synthetic oligonucleotide
  Target: LAMA2; (-) strand; PAM type: YTN; PAM sequence: TTA
ctattaggggagaaggcaag

SEQ ID NO: 219756 - DNA, 20 bp, Artificial Sequence
  Description of Artificial Sequence: Synthetic oligonucleotide
  Target: LAMA2; (-) strand; PAM type: YTN; PAM sequence: CTG
gttactattaggggagaagg

SEQ ID NO: 219757 - DNA, 20 bp, Artificial Sequence
  Description of Artificial Sequence: Synthetic oligonucleotide
  Target: LAMA2; (-) strand; PAM type: YTN; PAM sequence: TTA
gaatactggttactattagg

SEQ ID NO: 219758 - DNA, 20 bp, Artificial Sequence
  Description of Artificial Sequence: Synthetic oligonucleotide
  Target: LAMA2; (-) strand; PAM type: YTN; PAM sequence: CTG
gtgaatacaagttagaatac

SEQ ID NO: 219759 - DNA, 20 bp, Artificial Sequence
  Description of Artificial Sequence: Synthetic oligonucleotide
  Target: LAMA2; (-) strand; PAM type: YTN; PAM sequence: TTC
actggtgaatacaagttaga

SEQ ID NO: 219760 - DNA, 20 bp, Artificial Sequence
  Description of Artificial Sequence: Synthetic oligonucleotide
  Target: LAMA2; (-) strand; PAM type: YTN; PAM sequence: CTT
cactggtgaatacaagttag

SEQ ID NO: 219761 - DNA, 20 bp, Artificial Sequence
  Description of Artificial Sequence: Synthetic oligonucleotide
  Target: LAMA2; (-) strand; PAM type: YTN; PAM sequence: CTA
gatcaaatggcttcactggt

SEQ ID NO: 219762 - DNA, 20 bp, Artificial Sequence
  Description of Artificial Sequence: Synthetic oligonucleotide
  Target: LAMA2; (-) strand; PAM type: YTN; PAM sequence: CTC
ctagatcaaatggcttcact

SEQ ID NO: 219763 - DNA, 20 bp, Artificial Sequence
  Description of Artificial Sequence: Synthetic oligonucleotide
  Target: LAMA2; (-) strand; PAM type: YTN; PAM sequence: CTA
aaacccatgcacagagaaaa

SEQ ID NO: 219764 - DNA, 20 bp, Artificial Sequence
  Description of Artificial Sequence: Synthetic oligonucleotide
  Target: LAMA2; (-) strand; PAM type: YTN; PAM sequence: CTG
tgactaaaacccatgcacag

SEQ ID NO: 219765 - DNA, 20 bp, Artificial Sequence
  Description of Artificial Sequence: Synthetic oligonucleotide
  Target: LAMA2; (-) strand; PAM type: YTN; PAM sequence: TTA
tagatatggaatctgtgact

SEQ ID NO: 219766 - DNA, 20 bp, Artificial Sequence
  Description of Artificial Sequence: Synthetic oligonucleotide
  Target: LAMA2; (-) strand; PAM type: YTN; PAM sequence: TTA
ttatagatatggaatctgtg

SEQ ID NO: 219767 - DNA, 20 bp, Artificial Sequence
  Description of Artificial Sequence: Synthetic oligonucleotide
  Target: LAMA2; (-) strand; PAM type: YTN; PAM sequence: TTT
attatagatatggaatctgt

SEQ ID NO: 219768 - DNA, 20 bp, Artificial Sequence
  Description of Artificial Sequence: Synthetic oligonucleotide
  Target: LAMA2; (-) strand; PAM type: YTN; PAM sequence: CTC
cagtgagtcccacatttatt

SEQ ID NO: 219769 - DNA, 20 bp, Artificial Sequence
  Description of Artificial Sequence: Synthetic oligonucleotide
  Target: LAMA2; (-) strand; PAM type: YTN; PAM sequence: CTG
aaaatataagaaatgaaaac

SEQ ID NO: 219770 - DNA, 20 bp, Artificial Sequence
  Description of Artificial Sequence: Synthetic oligonucleotide
  Target: LAMA2; (-) strand; PAM type: YTN; PAM sequence: CTA
aactgaaaatataagaaatg

SEQ ID NO: 219771 - DNA, 20 bp, Artificial Sequence
  Description of Artificial Sequence: Synthetic oligonucleotide
  Target: LAMA2; (-) strand; PAM type: YTN; PAM sequence: CTC
aactaaactgaaaatataag

SEQ ID NO: 219772 - DNA, 20 bp, Artificial Sequence
  Description of Artificial Sequence: Synthetic oligonucleotide
  Target: LAMA2; (-) strand; PAM type: YTN; PAM sequence: TTG
aaaagcccaactcaactaaa

SEQ ID NO: 219773 - DNA, 20 bp, Artificial Sequence
  Description of Artificial Sequence: Synthetic oligonucleotide
  Target: LAMA2; (-) strand; PAM type: YTN; PAM sequence: CTT
gaaaagcccaactcaactaa

SEQ ID NO: 219774 - DNA, 20 bp, Artificial Sequence
  Description of Artificial Sequence: Synthetic oligonucleotide
  Target: LAMA2; (-) strand; PAM type: YTN; PAM sequence: TTC
ttgaaaagcccaactcaact

SEQ ID NO: 219775 - DNA, 20 bp, Artificial Sequence
  Description of Artificial Sequence: Synthetic oligonucleotide
  Target: LAMA2; (-) strand; PAM type: YTN; PAM sequence: TTT
cttgaaaagcccaactcaac

SEQ ID NO: 219776 - DNA, 20 bp, Artificial Sequence
  Description of Artificial Sequence: Synthetic oligonucleotide
  Target: LAMA2; (-) strand; PAM type: YTN; PAM sequence: TTA
ggtaagtggatcaatttctt

SEQ ID NO: 219777 - DNA, 20 bp, Artificial Sequence
  Description of Artificial Sequence: Synthetic oligonucleotide
  Target: LAMA2; (-) strand; PAM type: YTN; PAM sequence: TTG
aaaaattaggtaagtggatc

SEQ ID NO: 219778 - DNA, 20 bp, Artificial Sequence
  Description of Artificial Sequence: Synthetic oligonucleotide
  Target: LAMA2; (-) strand; PAM type: YTN; PAM sequence: TTT
gaaaaattaggtaagtggat

SEQ ID NO: 219779 - DNA, 20 bp, Artificial Sequence
  Description of Artificial Sequence: Synthetic oligonucleotide
  Target: LAMA2; (-) strand; PAM type: YTN; PAM sequence: CTC
atgtcgatatatttgaaaaa

SEQ ID NO: 219780 - DNA, 20 bp, Artificial Sequence
  Description of Artificial Sequence: Synthetic oligonucleotide
  Target: LAMA2; (-) strand; PAM type: YTN; PAM sequence: CTA
acaactcatgtcgatatatt

SEQ ID NO: 219781 - DNA, 20 bp, Artificial Sequence
  Description of Artificial Sequence: Synthetic oligonucleotide
  Target: LAMA2; (-) strand; PAM type: YTN; PAM sequence: TTA
aaagatgataatatcactaa

SEQ ID NO: 219782 - DNA, 20 bp, Artificial Sequence
  Description of Artificial Sequence: Synthetic oligonucleotide
  Target: LAMA2; (-) strand; PAM type: YTN; PAM sequence: TTG
taaattaaaagatgataata

SEQ ID NO: 219783 - DNA, 20 bp, Artificial Sequence
  Description of Artificial Sequence: Synthetic oligonucleotide
  Target: LAMA2; (-) strand; PAM type: YTN; PAM sequence: CTA
cagatcattgtaaattaaaa

SEQ ID NO: 219784 - DNA, 20 bp, Artificial Sequence
  Description of Artificial Sequence: Synthetic oligonucleotide
  Target: LAMA2; (-) strand; PAM type: YTN; PAM sequence: CTG
gaataaaaaaagggcatcac

SEQ ID NO: 219785 - DNA, 20 bp, Artificial Sequence
  Description of Artificial Sequence: Synthetic oligonucleotide
  Target: LAMA2; (-) strand; PAM type: YTN; PAM sequence: TTA
cacaacaatatctggaataa

SEQ ID NO: 219786 - DNA, 20 bp, Artificial Sequence
  Description of Artificial Sequence: Synthetic oligonucleotide
  Target: LAMA2; (-) strand; PAM type: YTN; PAM sequence: CTG
taaaggaaaaacaaaggtta

SEQ ID NO: 219787 - DNA, 20 bp, Artificial Sequence
  Description of Artificial Sequence: Synthetic oligonucleotide
  Target: LAMA2; (-) strand; PAM type: YTN; PAM sequence: TTA
aagctgtaaaggaaaaacaa

SEQ ID NO: 219788 - DNA, 20 bp, Artificial Sequence
  Description of Artificial Sequence: Synthetic oligonucleotide
  Target: LAMA2; (-) strand; PAM type: YTN; PAM sequence: CTA
ttaaagctgtaaaggaaaaa

SEQ ID NO: 219789 - DNA, 20 bp, Artificial Sequence
  Description of Artificial Sequence: Synthetic oligonucleotide
  Target: LAMA2; (-) strand; PAM type: YTN; PAM sequence: TTA
tgaagacctattaaagctgt

SEQ ID NO: 219790 - DNA, 20 bp, Artificial Sequence
  Description of Artificial Sequence: Synthetic oligonucleotide
  Target: LAMA2; (-) strand; PAM type: YTN; PAM sequence: CTA
atgaaattatgaagacctat

SEQ ID NO: 219791 - DNA, 20 bp, Artificial Sequence
  Description of Artificial Sequence: Synthetic oligonucleotide
  Target: LAMA2; (-) strand; PAM type: YTN; PAM sequence: TTG
aaaaagactaatgaaattat

SEQ ID NO: 219792 - DNA, 20 bp, Artificial Sequence
  Description of Artificial Sequence: Synthetic oligonucleotide
  Target: LAMA2; (-) strand; PAM type: YTN; PAM sequence: TTT
gaaaaagactaatgaaatta

SEQ ID NO: 219793 - DNA, 20 bp, Artificial Sequence
  Description of Artificial Sequence: Synthetic oligonucleotide
  Target: LAMA2; (-) strand; PAM type: YTN; PAM sequence: CTA
tttgaaaaagactaatgaaa

SEQ ID NO: 219794 - DNA, 20 bp, Artificial Sequence
  Description of Artificial Sequence: Synthetic oligonucleotide
  Target: LAMA2; (-) strand; PAM type: YTN; PAM sequence: CTG
gctatttgaaaaagactaat

SEQ ID NO: 219795 - DNA, 20 bp, Artificial Sequence
  Description of Artificial Sequence: Synthetic oligonucleotide
  Target: LAMA2; (-) strand; PAM type: YTN; PAM sequence: TTC
acgatagagaaaatcaatca

SEQ ID NO: 219796 - DNA, 20 bp, Artificial Sequence
  Description of Artificial Sequence: Synthetic oligonucleotide
  Target: LAMA2; (-) strand; PAM type: YTN; PAM sequence: TTT
cacgatagagaaaatcaatc

SEQ ID NO: 219797 - DNA, 20 bp, Artificial Sequence
  Description of Artificial Sequence: Synthetic oligonucleotide
  Target: LAMA2; (-) strand; PAM type: YTN; PAM sequence: TTC
aatacaatataacaatttca

SEQ ID NO: 219798 - DNA, 20 bp, Artificial Sequence
  Description of Artificial Sequence: Synthetic oligonucleotide
  Target: LAMA2; (-) strand; PAM type: YTN; PAM sequence: CTA
aaataaaaaataacgagaag

SEQ ID NO: 219799 - DNA, 20 bp, Artificial Sequence
  Description of Artificial Sequence: Synthetic oligonucleotide
  Target: LAMA2; (-) strand; PAM type: YTN; PAM sequence: CTA
agaaaatgtagtaaactaaa

SEQ ID NO: 219800 - DNA, 20 bp, Artificial Sequence
  Description of Artificial Sequence: Synthetic oligonucleotide
  Target: LAMA2; (-) strand; PAM type: YTN; PAM sequence: TTC
aagaagctaagaaaatgtag

SEQ ID NO: 219801 - DNA, 20 bp, Artificial Sequence
  Description of Artificial Sequence: Synthetic oligonucleotide
  Target: LAMA2; (-) strand; PAM type: YTN; PAM sequence: TTT
caagaagctaagaaaatgta

SEQ ID NO: 219802 - DNA, 20 bp, Artificial Sequence
  Description of Artificial Sequence: Synthetic oligonucleotide
  Target: LAMA2; (-) strand; PAM type: YTN; PAM sequence: TTA
ataacataggtatccatttc

SEQ ID NO: 219803 - DNA, 20 bp, Artificial Sequence
  Description of Artificial Sequence: Synthetic oligonucleotide
  Target: LAMA2; (-) strand; PAM type: YTN; PAM sequence: CTG
aaatattaataacataggta

SEQ ID NO: 219804 - DNA, 20 bp, Artificial Sequence
  Description of Artificial Sequence: Synthetic oligonucleotide
  Target: LAMA2; (-) strand; PAM type: YTN; PAM sequence: TTA
ggaaaaaagaactgaaatat

SEQ ID NO: 219805 - DNA, 20 bp, Artificial Sequence
  Description of Artificial Sequence: Synthetic oligonucleotide
  Target: LAMA2; (-) strand; PAM type: YTN; PAM sequence: TTA
ataaatatattaggaaaaaa

SEQ ID NO: 219806 - DNA, 20 bp, Artificial Sequence
  Description of Artificial Sequence: Synthetic oligonucleotide
  Target: LAMA2; (-) strand; PAM type: YTN; PAM sequence: TTG
taggcgttaataaatatatt

SEQ ID NO: 219807 - DNA, 20 bp, Artificial Sequence
  Description of Artificial Sequence: Synthetic oligonucleotide
  Target: LAMA2; (-) strand; PAM type: YTN; PAM sequence: CTA
tgtagaggcaaattgtaggc

SEQ ID NO: 219808 - DNA, 20 bp, Artificial Sequence
  Description of Artificial Sequence: Synthetic oligonucleotide
  Target: LAMA2; (-) strand; PAM type: YTN; PAM sequence: CTA
aagccctatgtagaggcaaa

SEQ ID NO: 219809 - DNA, 20 bp, Artificial Sequence
  Description of Artificial Sequence: Synthetic oligonucleotide
  Target: LAMA2; (-) strand; PAM type: YTN; PAM sequence: TTG
taggaggcaactaaagccct

SEQ ID NO: 219810 - DNA, 20 bp, Artificial Sequence
  Description of Artificial Sequence: Synthetic oligonucleotide
  Target: LAMA2; (-) strand; PAM type: YTN; PAM sequence: CTT
gtaggaggcaactaaagccc

SEQ ID NO: 219811 - DNA, 20 bp, Artificial Sequence
  Description of Artificial Sequence: Synthetic oligonucleotide
  Target: LAMA2; (-) strand; PAM type: YTN; PAM sequence: TTA
aaataaatgataatgaaaaa

SEQ ID NO: 219812 - DNA, 20 bp, Artificial Sequence
  Description of Artificial Sequence: Synthetic oligonucleotide
  Target: LAMA2; (-) strand; PAM type: YTN; PAM sequence: TTT
aaaataaatgataatgaaaa

SEQ ID NO: 219813 - DNA, 20 bp, Artificial Sequence
  Description of Artificial Sequence: Synthetic oligonucleotide
  Target: LAMA2; (-) strand; PAM type: YTN; PAM sequence: TTT
taaaataaatgataatgaaa

SEQ ID NO: 219814 - DNA, 20 bp, Artificial Sequence
  Description of Artificial Sequence: Synthetic oligonucleotide
  Target: LAMA2; (-) strand; PAM type: YTN; PAM sequence: TTA
gaatatattttaaaataaat

SEQ ID NO: 219815 - DNA, 20 bp, Artificial Sequence
  Description of Artificial Sequence: Synthetic oligonucleotide
  Target: LAMA2; (-) strand; PAM type: YTN; PAM sequence: CTA
tgaaaattagaatatatttt

SEQ ID NO: 219816 - DNA, 20 bp, Artificial Sequence
  Description of Artificial Sequence: Synthetic oligonucleotide
  Target: LAMA2; (-) strand; PAM type: YTN; PAM sequence: TTA
ctatgaaaattagaatatat

SEQ ID NO: 219817 - DNA, 20 bp, Artificial Sequence
  Description of Artificial Sequence: Synthetic oligonucleotide
  Target: LAMA2; (-) strand; PAM type: YTN; PAM sequence: TTT
actatgaaaattagaatata

SEQ ID NO: 219818 - DNA, 20 bp, Artificial Sequence
  Description of Artificial Sequence: Synthetic oligonucleotide
  Target: LAMA2; (-) strand; PAM type: YTN; PAM sequence: CTC
agaggccacagaaaaattta

SEQ ID NO: 219819 - DNA, 20 bp, Artificial Sequence
  Description of Artificial Sequence: Synthetic oligonucleotide
  Target: LAMA2; (-) strand; PAM type: YTN; PAM sequence: CTA
tataactcagaggccacaga

SEQ ID NO: 219820 - DNA, 20 bp, Artificial Sequence
  Description of Artificial Sequence: Synthetic oligonucleotide
  Target: LAMA2; (-) strand; PAM type: YTN; PAM sequence: TTC
tatataactcagaggccaca

SEQ ID NO: 219821 - DNA, 20 bp, Artificial Sequence
  Description of Artificial Sequence: Synthetic oligonucleotide
  Target: LAMA2; (-) strand; PAM type: YTN; PAM sequence: CTT
ctatataactcagaggccac

SEQ ID NO: 219822 - DNA, 20 bp, Artificial Sequence
  Description of Artificial Sequence: Synthetic oligonucleotide
  Target: LAMA2; (-) strand; PAM type: YTN; PAM sequence: TTC
acttctatataactcagagg

SEQ ID NO: 219823 - DNA, 20 bp, Artificial Sequence
  Description of Artificial Sequence: Synthetic oligonucleotide
  Target: LAMA2; (-) strand; PAM type: YTN; PAM sequence: CTT
cacttctatataactcagag

SEQ ID NO: 219824 - DNA, 20 bp, Artificial Sequence
  Description of Artificial Sequence: Synthetic oligonucleotide
  Target: LAMA2; (-) strand; PAM type: YTN; PAM sequence: TTA
agcacttcacttctatataa

SEQ ID NO: 219825 - DNA, 20 bp, Artificial Sequence
  Description of Artificial Sequence: Synthetic oligonucleotide
  Target: LAMA2; (-) strand; PAM type: YTN; PAM sequence: TTC
agaaattaagcacttcactt

SEQ ID NO: 219826 - DNA, 20 bp, Artificial Sequence
  Description of Artificial Sequence: Synthetic oligonucleotide
  Target: LAMA2; (-) strand; PAM type: YTN; PAM sequence: TTG
ttcagaaattaagcacttca

SEQ ID NO: 219827 - DNA, 20 bp, Artificial Sequence
  Description of Artificial Sequence: Synthetic oligonucleotide
  Target: LAMA2; (-) strand; PAM type: YTN; PAM sequence: CTC
aattgttcagaaattaagca

SEQ ID NO: 219828 - DNA, 20 bp, Artificial Sequence
  Description of Artificial Sequence: Synthetic oligonucleotide
  Target: LAMA2; (-) strand; PAM type: YTN; PAM sequence: TTA
gaaaaatactcaattgttca

SEQ ID NO: 219829 - DNA, 20 bp, Artificial Sequence
  Description of Artificial Sequence: Synthetic oligonucleotide
  Target: LAMA2; (-) strand; PAM type: YTN; PAM sequence: TTA
gtgaggaaaggaataacaac

SEQ ID NO: 219830 - DNA, 20 bp, Artificial Sequence
  Description of Artificial Sequence: Synthetic oligonucleotide
  Target: LAMA2; (-) strand; PAM type: YTN; PAM sequence: CTG
accatagtggaattagtgag

SEQ ID NO: 219831 - DNA, 20 bp, Artificial Sequence
  Description of Artificial Sequence: Synthetic oligonucleotide
  Target: LAMA2; (-) strand; PAM type: YTN; PAM sequence: TTG
aaaatacactgaccatagtg

SEQ ID NO: 219832 - DNA, 20 bp, Artificial Sequence
  Description of Artificial Sequence: Synthetic oligonucleotide
  Target: LAMA2; (-) strand; PAM type: YTN; PAM sequence: CTC
aaagaattgaaaatacactg

SEQ ID NO: 219833 - DNA, 20 bp, Artificial Sequence
  Description of Artificial Sequence: Synthetic oligonucleotide
  Target: LAMA2; (-) strand; PAM type: YTN; PAM sequence: TTA
gtctcaaagaattgaaaata

SEQ ID NO: 219834 - DNA, 20 bp, Artificial Sequence
  Description of Artificial Sequence: Synthetic oligonucleotide
  Target: LAMA2; (-) strand; PAM type: YTN; PAM sequence: TTT
agtctcaaagaattgaaaat

SEQ ID NO: 219835 - DNA, 20 bp, Artificial Sequence
  Description of Artificial Sequence: Synthetic oligonucleotide
  Target: LAMA2; (-) strand; PAM type: YTN; PAM sequence: CTC
aaaaagtttagtctcaaaga

SEQ ID NO: 219836 - DNA, 20 bp, Artificial Sequence
  Description of Artificial Sequence: Synthetic oligonucleotide
  Target: LAMA2; (-) strand; PAM type: YTN; PAM sequence: TTG
gataaaaacaagtctcaaaa

SEQ ID NO: 219837 - DNA, 20 bp, Artificial Sequence
  Description of Artificial Sequence: Synthetic oligonucleotide
  Target: LAMA2; (-) strand; PAM type: YTN; PAM sequence: CTG
ccatatgttggataaaaaca

SEQ ID NO: 219838 - DNA, 20 bp, Artificial Sequence
  Description of Artificial Sequence: Synthetic oligonucleotide
  Target: LAMA2; (-) strand; PAM type: YTN; PAM sequence: TTC
aagtcactgccatatgttgg

SEQ ID NO: 219839 - DNA, 20 bp, Artificial Sequence
  Description of Artificial Sequence: Synthetic oligonucleotide
  Target: LAMA2; (-) strand; PAM type: YTN; PAM sequence: TTT
caagtcactgccatatgttg

SEQ ID NO: 219840 - DNA, 20 bp, Artificial Sequence
  Description of Artificial Sequence: Synthetic oligonucleotide
  Target: LAMA2; (-) strand; PAM type: YTN; PAM sequence: TTT
tcaagtcactgccatatgtt

SEQ ID NO: 219841 - DNA, 20 bp, Artificial Sequence
  Description of Artificial Sequence: Synthetic oligonucleotide
  Target: LAMA2; (-) strand; PAM type: YTN; PAM sequence: TTG
ttttcaagtcactgccatat

SEQ ID NO: 219842 - DNA, 20 bp, Artificial Sequence
  Description of Artificial Sequence: Synthetic oligonucleotide
  Target: LAMA2; (-) strand; PAM type: YTN; PAM sequence: CTG
gtccacattgttttcaagtc

SEQ ID NO: 219843 - DNA, 20 bp, Artificial Sequence
  Description of Artificial Sequence: Synthetic oligonucleotide
  Target: LAMA2; (-) strand; PAM type: YTN; PAM sequence: TTA
caggagtgagccagggcaac

SEQ ID NO: 219844 - DNA, 20 bp, Artificial Sequence
  Description of Artificial Sequence: Synthetic oligonucleotide
  Target: LAMA2; (-) strand; PAM type: YTN; PAM sequence: CTG
ggattacaggagtgagccag

SEQ ID NO: 219845 - DNA, 20 bp, Artificial Sequence
  Description of Artificial Sequence: Synthetic oligonucleotide
  Target: LAMA2; (-) strand; PAM type: YTN; PAM sequence: CTC
ccaaagtgctgggattacag

SEQ ID NO: 219846 - DNA, 20 bp, Artificial Sequence
  Description of Artificial Sequence: Synthetic oligonucleotide
  Target: LAMA2; (-) strand; PAM type: YTN; PAM sequence: TTG
gcctcccaaagtgctgggat

SEQ ID NO: 219847 - DNA, 20 bp, Artificial Sequence
  Description of Artificial Sequence: Synthetic oligonucleotide
  Target: LAMA2; (-) strand; PAM type: YTN; PAM sequence: CTT
ggcctcccaaagtgctggga

SEQ ID NO: 219848 - DNA, 20 bp, Artificial Sequence
  Description of Artificial Sequence: Synthetic oligonucleotide
  Target: LAMA2; (-) strand; PAM type: YTN; PAM sequence: CTG
ccttggcctcccaaagtgct

SEQ ID NO: 219849 - DNA, 20 bp, Artificial Sequence
  Description of Artificial Sequence: Synthetic oligonucleotide
  Target: LAMA2; (-) strand; PAM type: YTN; PAM sequence: CTC
aagccatccgcctgccttgg

SEQ ID NO: 219850 - DNA, 20 bp, Artificial Sequence
  Description of Artificial Sequence: Synthetic oligonucleotide
  Target: LAMA2; (-) strand; PAM type: YTN; PAM sequence: CTG
ggctcaagccatccgcctgc

SEQ ID NO: 219851 - DNA, 20 bp, Artificial Sequence
  Description of Artificial Sequence: Synthetic oligonucleotide
  Target: LAMA2; (-) strand; PAM type: YTN; PAM sequence: TTC
tgggctcaagccatccgcct

SEQ ID NO: 219852 - DNA, 20 bp, Artificial Sequence
  Description of Artificial Sequence: Synthetic oligonucleotide
  Target: LAMA2; (-) strand; PAM type: YTN; PAM sequence: CTT
ctgggctcaagccatccgcc

SEQ ID NO: 219853 - DNA, 20 bp, Artificial Sequence
  Description of Artificial Sequence: Synthetic oligonucleotide
  Target: LAMA2; (-) strand; PAM type: YTN; PAM sequence: TTG
aacttctgggctcaagccat

SEQ ID NO: 219854 - DNA, 20 bp, Artificial Sequence
  Description of Artificial Sequence: Synthetic oligonucleotide
  Target: LAMA2; (-) strand; PAM type: YTN; PAM sequence: CTT
gaacttctgggctcaagcca

SEQ ID NO: 219855 - DNA, 20 bp, Artificial Sequence
  Description of Artificial Sequence: Synthetic oligonucleotide
  Target: LAMA2; (-) strand; PAM type: YTN; PAM sequence: CTG
gtcttgaacttctgggctca

SEQ ID NO: 219856 - DNA, 20 bp, Artificial Sequence
  Description of Artificial Sequence: Synthetic oligonucleotide
  Target: LAMA2; (-) strand; PAM type: YTN; PAM sequence: TTG
cccacactggtcttgaactt

SEQ ID NO: 219857 - DNA, 20 bp, Artificial Sequence
  Description of Artificial Sequence: Synthetic oligonucleotide
  Target: LAMA2; (-) strand; PAM type: YTN; PAM sequence: TTC
accacgttgcccacactggt

SEQ ID NO: 219858 - DNA, 20 bp, Artificial Sequence
  Description of Artificial Sequence: Synthetic oligonucleotide
  Target: LAMA2; (-) strand; PAM type: YTN; PAM sequence: TTT
caccacgttgcccacactgg

SEQ ID NO: 219859 - DNA, 20 bp, Artificial Sequence
  Description of Artificial Sequence: Synthetic oligonucleotide
  Target: LAMA2; (-) strand; PAM type: YTN; PAM sequence: TTG
gtagagatgaggtttcacca

SEQ ID NO: 219860 - DNA, 20 bp, Artificial Sequence
  Description of Artificial Sequence: Synthetic oligonucleotide
  Target: LAMA2; (-) strand; PAM type: YTN; PAM sequence: TTT
ggtagagatgaggtttcacc

SEQ ID NO: 219861 - DNA, 20 bp, Artificial Sequence
  Description of Artificial Sequence: Synthetic oligonucleotide
  Target: LAMA2; (-) strand; PAM type: YTN; PAM sequence: TTG
tttggtagagatgaggtttc

SEQ ID NO: 219862 - DNA, 20 bp, Artificial Sequence
  Description of Artificial Sequence: Synthetic oligonucleotide
  Target: LAMA2; (-) strand; PAM type: YTN; PAM sequence: TTT
gtttggtagagatgaggttt

SEQ ID NO: 219863 - DNA, 20 bp, Artificial Sequence
  Description of Artificial Sequence: Synthetic oligonucleotide
  Target: LAMA2; (-) strand; PAM type: YTN; PAM sequence: TTT
tgtttggtagagatgaggtt

SEQ ID NO: 219864 - DNA, 20 bp, Artificial Sequence
  Description of Artificial Sequence: Synthetic oligonucleotide
  Target: LAMA2; (-) strand; PAM type: YTN; PAM sequence: TTG
ttttgtttggtagagatgag

SEQ ID NO: 219865 - DNA, 20 bp, Artificial Sequence
  Description of Artificial Sequence: Synthetic oligonucleotide
  Target: LAMA2; (-) strand; PAM type: YTN; PAM sequence: TTT
gttttgtttggtagagatga

SEQ ID NO: 219866 - DNA, 20 bp, Artificial Sequence
  Description of Artificial Sequence: Synthetic oligonucleotide
  Target: LAMA2; (-) strand; PAM type: YTN; PAM sequence: TTT
tgttttgtttggtagagatg

SEQ ID NO: 219867 - DNA, 20 bp, Artificial Sequence
  Description of Artificial Sequence: Synthetic oligonucleotide
  Target: LAMA2; (-) strand; PAM type: YTN; PAM sequence: TTG
ttttgttttgtttggtagag

SEQ ID NO: 219868 - DNA, 20 bp, Artificial Sequence
  Description of Artificial Sequence: Synthetic oligonucleotide
  Target: LAMA2; (-) strand; PAM type: YTN; PAM sequence: TTT
gttttgttttgtttggtaga

SEQ ID NO: 219869 - DNA, 20 bp, Artificial Sequence
  Description of Artificial Sequence: Synthetic oligonucleotide
  Target: LAMA2; (-) strand; PAM type: YTN; PAM sequence: TTT
tgttttgttttgtttggtag

SEQ ID NO: 219870 - DNA, 20 bp, Artificial Sequence
  Description of Artificial Sequence: Synthetic oligonucleotide
  Target: LAMA2; (-) strand; PAM type: YTN; PAM sequence: TTG
ttttgttttgttttgtttgg

SEQ ID NO: 219871 - DNA, 20 bp, Artificial Sequence
  Description of Artificial Sequence: Synthetic oligonucleotide
  Target: LAMA2; (-) strand; PAM type: YTN; PAM sequence: TTT
gttttgttttgttttgtttg

SEQ ID NO: 219872 - DNA, 20 bp, Artificial Sequence
  Description of Artificial Sequence: Synthetic oligonucleotide
  Target: LAMA2; (-) strand; PAM type: YTN; PAM sequence: TTT
tgttttgttttgttttgttt

SEQ ID NO: 219873 - DNA, 20 bp, Artificial Sequence
  Description of Artificial Sequence: Synthetic oligonucleotide
  Target: LAMA2; (-) strand; PAM type: YTN; PAM sequence: TTG
ttttgttttgttttgttttg

SEQ ID NO: 219874 - DNA, 20 bp, Artificial Sequence
  Description of Artificial Sequence: Synthetic oligonucleotide
  Target: LAMA2; (-) strand; PAM type: YTN; PAM sequence: TTT
gttttgttttgttttgtttt

SEQ ID NO: 219875 - DNA, 20 bp, Artificial Sequence
  Description of Artificial Sequence: Synthetic oligonucleotide
  Target: LAMA2; (-) strand; PAM type: YTN; PAM sequence: TTT
tgttttgttttgttttgttt

SEQ ID NO: 219876 - DNA, 20 bp, Artificial Sequence
  Description of Artificial Sequence: Synthetic oligonucleotide
  Target: LAMA2; (-) strand; PAM type: YTN; PAM sequence: TTG
gggttttgttttgttttgtt

SEQ ID NO: 219877 - DNA, 20 bp, Artificial Sequence
  Description of Artificial Sequence: Synthetic oligonucleotide
  Target: LAMA2; (-) strand; PAM type: YTN; PAM sequence: TTT
ggggttttgttttgttttgt

SEQ ID NO: 219878 - DNA, 20 bp, Artificial Sequence
  Description of Artificial Sequence: Synthetic oligonucleotide
  Target: LAMA2; (-) strand; PAM type: YTN; PAM sequence: TTT
tggggttttgttttgttttg

SEQ ID NO: 219879 - DNA, 20 bp, Artificial Sequence
  Description of Artificial Sequence: Synthetic oligonucleotide
  Target: LAMA2; (-) strand; PAM type: YTN; PAM sequence: TTG
ttttggggttttgttttgtt

SEQ ID NO: 219880 - DNA, 20 bp, Artificial Sequence
  Description of Artificial Sequence: Synthetic oligonucleotide
  Target: LAMA2; (-) strand; PAM type: YTN; PAM sequence: TTT
gttttggggttttgttttgt

SEQ ID NO: 219881 - DNA, 20 bp, Artificial Sequence
  Description of Artificial Sequence: Synthetic oligonucleotide
  Target: LAMA2; (-) strand; PAM type: YTN; PAM sequence: CTA
atttgttttggggttttgtt

SEQ ID NO: 219882 - DNA, 20 bp, Artificial Sequence
  Description of Artificial Sequence: Synthetic oligonucleotide
  Target: LAMA2; (-) strand; PAM type: YTN; PAM sequence: CTA
caggcacacacccagctaat

SEQ ID NO: 219883 - DNA, 20 bp, Artificial Sequence
  Description of Artificial Sequence: Synthetic oligonucleotide
  Target: LAMA2; (-) strand; PAM type: YTN; PAM sequence: CTG
ggactacaggcacacaccca

SEQ ID NO: 219884 - DNA, 20 bp, Artificial Sequence
  Description of Artificial Sequence: Synthetic oligonucleotide
  Target: LAMA2; (-) strand; PAM type: YTN; PAM sequence: CTC
cagaatagctgggactacag

SEQ ID NO: 219885 - DNA, 20 bp, Artificial Sequence
  Description of Artificial Sequence: Synthetic oligonucleotide
  Target: LAMA2; (-) strand; PAM type: YTN; PAM sequence: CTC
agactccagaatagctggga

SEQ ID NO: 219886 - DNA, 20 bp, Artificial Sequence
  Description of Artificial Sequence: Synthetic oligonucleotide
  Target: LAMA2; (-) strand; PAM type: YTN; PAM sequence: CTC
ccacctcagactccagaata

SEQ ID NO: 219887 - DNA, 20 bp, Artificial Sequence
  Description of Artificial Sequence: Synthetic oligonucleotide
  Target: LAMA2; (-) strand; PAM type: YTN; PAM sequence: TTC
tcccacctcagactccagaa

SEQ ID NO: 219888 - DNA, 20 bp, Artificial Sequence
  Description of Artificial Sequence: Synthetic oligonucleotide
  Target: LAMA2; (-) strand; PAM type: YTN; PAM sequence: TTG
aagtgattctcccacctcag

SEQ ID NO: 219889 - DNA, 20 bp, Artificial Sequence
  Description of Artificial Sequence: Synthetic oligonucleotide
  Target: LAMA2; (-) strand; PAM type: YTN; PAM sequence: CTG
ggttgaagtgattctcccac

SEQ ID NO: 219890 - DNA, 20 bp, Artificial Sequence
  Description of Artificial Sequence: Synthetic oligonucleotide
  Target: LAMA2; (-) strand; PAM type: YTN; PAM sequence: CTC
ctgggttgaagtgattctcc

SEQ ID NO: 219891 - DNA, 20 bp, Artificial Sequence
  Description of Artificial Sequence: Synthetic oligonucleotide
  Target: LAMA2; (-) strand; PAM type: YTN; PAM sequence: CTA
cctcctgggttgaagtgatt

SEQ ID NO: 219892 - DNA, 20 bp, Artificial Sequence
  Description of Artificial Sequence: Synthetic oligonucleotide
  Target: LAMA2; (-) strand; PAM type: YTN; PAM sequence: CTC
tacctcctgggttgaagtga

SEQ ID NO: 219893 - DNA, 20 bp, Artificial Sequence
  Description of Artificial Sequence: Synthetic oligonucleotide
  Target: LAMA2; (-) strand; PAM type: YTN; PAM sequence: CTC
accacaacctctacctcctg

SEQ ID NO: 219894 - DNA, 20 bp, Artificial Sequence
  Description of Artificial Sequence: Synthetic oligonucleotide
  Target: LAMA2; (-) strand; PAM type: YTN; PAM sequence: CTC
ggctcaccacaacctctacc

SEQ ID NO: 219895 - DNA, 20 bp, Artificial Sequence
  Description of Artificial Sequence: Synthetic oligonucleotide
  Target: LAMA2; (-) strand; PAM type: YTN; PAM sequence: CTG
gagtgcagtggcgtaatctc

SEQ ID NO: 219896 - DNA, 20 bp, Artificial Sequence
  Description of Artificial Sequence: Synthetic oligonucleotide
  Target: LAMA2; (-) strand; PAM type: YTN; PAM sequence: CTG
tcacccaggctggagtgcag

SEQ ID NO: 219897 - DNA, 20 bp, Artificial Sequence
  Description of Artificial Sequence: Synthetic oligonucleotide
  Target: LAMA2; (-) strand; PAM type: YTN; PAM sequence: CTC
tgtcacccaggctggagtgc

SEQ ID NO: 219898 - DNA, 20 bp, Artificial Sequence
  Description of Artificial Sequence: Synthetic oligonucleotide
  Target: LAMA2; (-) strand; PAM type: YTN; PAM sequence: CTG
atgtccagctctgtcaccca

SEQ ID NO: 219899 - DNA, 20 bp, Artificial Sequence
  Description of Artificial Sequence: Synthetic oligonucleotide
  Target: LAMA2; (-) strand; PAM type: YTN; PAM sequence: TTA
gacagggtctgatgtccagc

SEQ ID NO: 219900 - DNA, 20 bp, Artificial Sequence
  Description of Artificial Sequence: Synthetic oligonucleotide
  Target: LAMA2; (-) strand; PAM type: YTN; PAM sequence: TTT
agacagggtctgatgtccag

SEQ ID NO: 219901 - DNA, 20 bp, Artificial Sequence
  Description of Artificial Sequence: Synthetic oligonucleotide
  Target: LAMA2; (-) strand; PAM type: YTN; PAM sequence: TTT
tagacagggtctgatgtcca

SEQ ID NO: 219902 - DNA, 20 bp, Artificial Sequence
  Description of Artificial Sequence: Synthetic oligonucleotide
  Target: LAMA2; (-) strand; PAM type: YTN; PAM sequence: TTT
ttagacagggtctgatgtcc

SEQ ID NO: 219903 - DNA, 20 bp, Artificial Sequence
  Description of Artificial Sequence: Synthetic oligonucleotide
  Target: LAMA2; (-) strand; PAM type: YTN; PAM sequence: TTT
tttagacagggtctgatgtc

SEQ ID NO: 219904 - DNA, 20 bp, Artificial Sequence
  Description of Artificial Sequence: Synthetic oligonucleotide
  Target: LAMA2; (-) strand; PAM type: YTN; PAM sequence: TTT
ttttagacagggtctgatgt

SEQ ID NO: 219905 - DNA, 20 bp, Artificial Sequence
  Description of Artificial Sequence: Synthetic oligonucleotide
  Target: LAMA2; (-) strand; PAM type: YTN; PAM sequence: TTT
tttttagacagggtctgatg

SEQ ID NO: 219906 - DNA, 20 bp, Artificial Sequence
  Description of Artificial Sequence: Synthetic oligonucleotide
  Target: LAMA2; (-) strand; PAM type: YTN; PAM sequence: CTT
ttttttagacagggtctgat

SEQ ID NO: 219907 - DNA, 20 bp, Artificial Sequence
  Description of Artificial Sequence: Synthetic oligonucleotide
  Target: LAMA2; (-) strand; PAM type: YTN; PAM sequence: TTG
cttttttttagacagggtct

SEQ ID NO: 219908 - DNA, 20 bp, Artificial Sequence
  Description of Artificial Sequence: Synthetic oligonucleotide
  Target: LAMA2; (-) strand; PAM type: YTN; PAM sequence: TTT
gcttttttttagacagggtc

SEQ ID NO: 219909 - DNA, 20 bp, Artificial Sequence
  Description of Artificial Sequence: Synthetic oligonucleotide
  Target: LAMA2; (-) strand; PAM type: YTN; PAM sequence: CTT
tgcttttttttagacagggt

SEQ ID NO: 219910 - DNA, 20 bp, Artificial Sequence
  Description of Artificial Sequence: Synthetic oligonucleotide
  Target: LAMA2; (-) strand; PAM type: YTN; PAM sequence: TTC
tttgcttttttttagacagg

SEQ ID NO: 219911 - DNA, 20 bp, Artificial Sequence
  Description of Artificial Sequence: Synthetic oligonucleotide
  Target: LAMA2; (-) strand; PAM type: YTN; PAM sequence: TTT
ctttgcttttttttagacag

SEQ ID NO: 219912 - DNA, 20 bp, Artificial Sequence
  Description of Artificial Sequence: Synthetic oligonucleotide
  Target: LAMA2; (-) strand; PAM type: YTN; PAM sequence: TTT
tctttgcttttttttagaca

SEQ ID NO: 219913 - DNA, 20 bp, Artificial Sequence
  Description of Artificial Sequence: Synthetic oligonucleotide
  Target: LAMA2; (-) strand; PAM type: YTN; PAM sequence: CTT
ttctttgcttttttttagac

SEQ ID NO: 219914 - DNA, 20 bp, Artificial Sequence
  Description of Artificial Sequence: Synthetic oligonucleotide
  Target: LAMA2; (-) strand; PAM type: YTN; PAM sequence: TTC
ttttctttgcttttttttag

SEQ ID NO: 219915 - DNA, 20 bp, Artificial Sequence
  Description of Artificial Sequence: Synthetic oligonucleotide
  Target: LAMA2; (-) strand; PAM type: YTN; PAM sequence: CTG
cattcttttctttgcttttt

SEQ ID NO: 219916 - DNA, 20 bp, Artificial Sequence
  Description of Artificial Sequence: Synthetic oligonucleotide
  Target: LAMA2; (-) strand; PAM type: YTN; PAM sequence: CTA
tagaatctgcattcttttct

SEQ ID NO: 219917 - DNA, 20 bp, Artificial Sequence
  Description of Artificial Sequence: Synthetic oligonucleotide
  Target: LAMA2; (-) strand; PAM type: YTN; PAM sequence: CTG
caaccaacaactatagaatc

SEQ ID NO: 219918 - DNA, 20 bp, Artificial Sequence
  Description of Artificial Sequence: Synthetic oligonucleotide
  Target: LAMA2; (-) strand; PAM type: YTN; PAM sequence: TTG
tagtactgcaaccaacaact

SEQ ID NO: 219919 - DNA, 20 bp, Artificial Sequence
  Description of Artificial Sequence: Synthetic oligonucleotide
  Target: LAMA2; (-) strand; PAM type: YTN; PAM sequence: TTT
gtagtactgcaaccaacaac

SEQ ID NO: 219920 - DNA, 20 bp, Artificial Sequence
  Description of Artificial Sequence: Synthetic oligonucleotide
  Target: LAMA2; (-) strand; PAM type: YTN; PAM sequence: CTG
atatatttgtagtactgcaa

SEQ ID NO: 219921 - DNA, 20 bp, Artificial Sequence
  Description of Artificial Sequence: Synthetic oligonucleotide
  Target: LAMA2; (-) strand; PAM type: YTN; PAM sequence: CTC
actgatatatttgtagtact

SEQ ID NO: 219922 - DNA, 20 bp, Artificial Sequence
  Description of Artificial Sequence: Synthetic oligonucleotide
  Target: LAMA2; (-) strand; PAM type: YTN; PAM sequence: TTA
aaagtatcaatatatataaa

SEQ ID NO: 219923 - DNA, 20 bp, Artificial Sequence
  Description of Artificial Sequence: Synthetic oligonucleotide
  Target: LAMA2; (-) strand; PAM type: YTN; PAM sequence: TTT
aaaagtatcaatatatataa

SEQ ID NO: 219924 - DNA, 20 bp, Artificial Sequence
  Description of Artificial Sequence: Synthetic oligonucleotide
  Target: LAMA2; (-) strand; PAM type: YTN; PAM sequence: CTA
atttaaaagtatcaatatat

SEQ ID NO: 219925 - DNA, 20 bp, Artificial Sequence
  Description of Artificial Sequence: Synthetic oligonucleotide
  Target: LAMA2; (-) strand; PAM type: YTN; PAM sequence: CTC
taatttaaaagtatcaatat

SEQ ID NO: 219926 - DNA, 20 bp, Artificial Sequence
  Description of Artificial Sequence: Synthetic oligonucleotide
  Target: LAMA2; (-) strand; PAM type: YTN; PAM sequence: TTG
tatgtctctaatttaaaagt

SEQ ID NO: 219927 - DNA, 20 bp, Artificial Sequence
  Description of Artificial Sequence: Synthetic oligonucleotide
  Target: LAMA2; (-) strand; PAM type: YTN; PAM sequence: TTT
gtatgtctctaatttaaaag

SEQ ID NO: 219928 - DNA, 20 bp, Artificial Sequence
  Description of Artificial Sequence: Synthetic oligonucleotide
  Target: LAMA2; (-) strand; PAM type: YTN; PAM sequence: CTA
aatttgtatgtctctaattt

SEQ ID NO: 219929 - DNA, 20 bp, Artificial Sequence
  Description of Artificial Sequence: Synthetic oligonucleotide
  Target: LAMA2; (-) strand; PAM type: YTN; PAM sequence: TTA
ataatcctaaatttgtatgt

SEQ ID NO: 219930 - DNA, 20 bp, Artificial Sequence
  Description of Artificial Sequence: Synthetic oligonucleotide
  Target: LAMA2; (-) strand; PAM type: YTN; PAM sequence: TTT
aataatcctaaatttgtatg

SEQ ID NO: 219931 - DNA, 20 bp, Artificial Sequence
  Description of Artificial Sequence: Synthetic oligonucleotide
  Target: LAMA2; (-) strand; PAM type: YTN; PAM sequence: TTA
aatttaataatcctaaattt

SEQ ID NO: 219932 - DNA, 20 bp, Artificial Sequence
  Description of Artificial Sequence: Synthetic oligonucleotide
  Target: LAMA2; (-) strand; PAM type: YTN; PAM sequence: TTA
ttaaatttaataatcctaaa

SEQ ID NO: 219933 - DNA, 20 bp, Artificial Sequence
  Description of Artificial Sequence: Synthetic oligonucleotide
  Target: LAMA2; (-) strand; PAM type: YTN; PAM sequence: TTA
aattattaaatttaataatc

SEQ ID NO: 219934 - DNA, 20 bp, Artificial Sequence
  Description of Artificial Sequence: Synthetic oligonucleotide
  Target: LAMA2; (-) strand; PAM type: YTN; PAM sequence: TTT
aaattattaaatttaataat

SEQ ID NO: 219935 - DNA, 20 bp, Artificial Sequence
  Description of Artificial Sequence: Synthetic oligonucleotide
  Target: LAMA2; (-) strand; PAM type: YTN; PAM sequence: TTA
atacaaaatttaaattatta

SEQ ID NO: 219936 - DNA, 20 bp, Artificial Sequence
  Description of Artificial Sequence: Synthetic oligonucleotide
  Target: LAMA2; (-) strand; PAM type: YTN; PAM sequence: TTA
atacaaaagagttaatacaa

SEQ ID NO: 219937 - DNA, 20 bp, Artificial Sequence
  Description of Artificial Sequence: Synthetic oligonucleotide
  Target: LAMA2; (-) strand; PAM type: YTN; PAM sequence: TTA
aaaaggtggttaatacaaaa

SEQ ID NO: 219938 - DNA, 20 bp, Artificial Sequence
  Description of Artificial Sequence: Synthetic oligonucleotide
  Target: LAMA2; (-) strand; PAM type: YTN; PAM sequence: CTG
gcagtagtattaaaaaggtg

SEQ ID NO: 219939 - DNA, 20 bp, Artificial Sequence
  Description of Artificial Sequence: Synthetic oligonucleotide
  Target: LAMA2; (-) strand; PAM type: YTN; PAM sequence: CTG
ctggcagtagtattaaaaag

SEQ ID NO: 219940 - DNA, 20 bp, Artificial Sequence
  Description of Artificial Sequence: Synthetic oligonucleotide
  Target: LAMA2; (-) strand; PAM type: YTN; PAM sequence: CTA
aagatagaagtactgctggc

SEQ ID NO: 219941 - DNA, 20 bp, Artificial Sequence
  Description of Artificial Sequence: Synthetic oligonucleotide
  Target: LAMA2; (-) strand; PAM type: YTN; PAM sequence: CTC
taaagatagaagtactgctg

SEQ ID NO: 219942 - DNA, 20 bp, Artificial Sequence
  Description of Artificial Sequence: Synthetic oligonucleotide
  Target: LAMA2; (-) strand; PAM type: YTN; PAM sequence: CTA
catacaaaagtacactctaa

SEQ ID NO: 219943 - DNA, 20 bp, Artificial Sequence
  Description of Artificial Sequence: Synthetic oligonucleotide
  Target: LAMA2; (-) strand; PAM type: YTN; PAM sequence: CTA
gtgaatctacatacaaaagt

SEQ ID NO: 219944 - DNA, 20 bp, Artificial Sequence
  Description of Artificial Sequence: Synthetic oligonucleotide
  Target: LAMA2; (-) strand; PAM type: YTN; PAM sequence: CTA
tatcacgcaaacacagagaa

SEQ ID NO: 219945 - DNA, 20 bp, Artificial Sequence
  Description of Artificial Sequence: Synthetic oligonucleotide
  Target: LAMA2; (-) strand; PAM type: YTN; PAM sequence: CTC
aacatatgagaaaacctata

SEQ ID NO: 219946 - DNA, 20 bp, Artificial Sequence
  Description of Artificial Sequence: Synthetic oligonucleotide
  Target: LAMA2; (-) strand; PAM type: YTN; PAM sequence: TTA
aatataagtacactcaacat

SEQ ID NO: 219947 - DNA, 20 bp, Artificial Sequence
  Description of Artificial Sequence: Synthetic oligonucleotide
  Target: LAMA2; (-) strand; PAM type: YTN; PAM sequence: CTT
aaatataagtacactcaaca

SEQ ID NO: 219948 - DNA, 20 bp, Artificial Sequence
  Description of Artificial Sequence: Synthetic oligonucleotide
  Target: LAMA2; (-) strand; PAM type: YTN; PAM sequence: CTC
acagaagatacaccttaaat

SEQ ID NO: 219949 - DNA, 20 bp, Artificial Sequence
  Description of Artificial Sequence: Synthetic oligonucleotide
  Target: LAMA2; (-) strand; PAM type: YTN; PAM sequence: CTG
ctcacagaagatacacctta

SEQ ID NO: 219950 - DNA, 20 bp, Artificial Sequence
  Description of Artificial Sequence: Synthetic oligonucleotide
  Target: LAMA2; (-) strand; PAM type: YTN; PAM sequence: TTA
tgctgctcacagaagataca

SEQ ID NO: 219951 - DNA, 20 bp, Artificial Sequence
  Description of Artificial Sequence: Synthetic oligonucleotide
  Target: LAMA2; (-) strand; PAM type: YTN; PAM sequence: TTT
atgctgctcacagaagatac

SEQ ID NO: 219952 - DNA, 20 bp, Artificial Sequence
  Description of Artificial Sequence: Synthetic oligonucleotide
  Target: LAMA2; (-) strand; PAM type: YTN; PAM sequence: TTC
aaatttatgctgctcacaga

SEQ ID NO: 219953 - DNA, 20 bp, Artificial Sequence
  Description of Artificial Sequence: Synthetic oligonucleotide
  Target: LAMA2; (-) strand; PAM type: YTN; PAM sequence: TTA
aataaacaattcaaatttat

SEQ ID NO: 219954 - DNA, 20 bp, Artificial Sequence
  Description of Artificial Sequence: Synthetic oligonucleotide
  Target: LAMA2; (-) strand; PAM type: YTN; PAM sequence: TTA
gttaaataaacaattcaaat

SEQ ID NO: 219955 - DNA, 20 bp, Artificial Sequence
  Description of Artificial Sequence: Synthetic oligonucleotide
  Target: LAMA2; (-) strand; PAM type: YTN; PAM sequence: TTA
tcagattagttaaataaaca

SEQ ID NO: 219956 - DNA, 20 bp, Artificial Sequence
  Description of Artificial Sequence: Synthetic oligonucleotide
  Target: LAMA2; (-) strand; PAM type: YTN; PAM sequence: TTA
aaggaaaagattatcagatt

SEQ ID NO: 219957 - DNA, 20 bp, Artificial Sequence
  Description of Artificial Sequence: Synthetic oligonucleotide
  Target: LAMA2; (-) strand; PAM type: YTN; PAM sequence: TTT
aaaggaaaagattatcagat

SEQ ID NO: 219958 - DNA, 20 bp, Artificial Sequence
  Description of Artificial Sequence: Synthetic oligonucleotide
  Target: LAMA2; (-) strand; PAM type: YTN; PAM sequence: TTA
agtatccaatttaaaggaaa

SEQ ID NO: 219959 - DNA, 20 bp, Artificial Sequence
  Description of Artificial Sequence: Synthetic oligonucleotide
  Target: LAMA2; (-) strand; PAM type: YTN; PAM sequence: CTA
aatgtaaatgaattaagtat

SEQ ID NO: 219960 - DNA, 20 bp, Artificial Sequence
  Description of Artificial Sequence: Synthetic oligonucleotide
  Target: LAMA2; (-) strand; PAM type: YTN; PAM sequence: TTG
aacccatatatcagtatagt

SEQ ID NO: 219961 - DNA, 20 bp, Artificial Sequence
  Description of Artificial Sequence: Synthetic oligonucleotide
  Target: LAMA2; (-) strand; PAM type: YTN; PAM sequence: TTT
gaacccatatatcagtatag

SEQ ID NO: 219962 - DNA, 20 bp, Artificial Sequence
  Description of Artificial Sequence: Synthetic oligonucleotide
  Target: LAMA2; (-) strand; PAM type: YTN; PAM sequence: TTA
gcaaaagataagacaaacag

SEQ ID NO: 219963 - DNA, 20 bp, Artificial Sequence
  Description of Artificial Sequence: Synthetic oligonucleotide
  Target: LAMA2; (-) strand; PAM type: YTN; PAM sequence: TTA
tgaggaagaaaaattagcaa

SEQ ID NO: 219964 - DNA, 20 bp, Artificial Sequence
  Description of Artificial Sequence: Synthetic oligonucleotide
  Target: LAMA2; (-) strand; PAM type: YTN; PAM sequence: TTC
caaaagtaagaaagttatga

SEQ ID NO: 219965 - DNA, 20 bp, Artificial Sequence
  Description of Artificial Sequence: Synthetic oligonucleotide
  Target: LAMA2; (-) strand; PAM type: YTN; PAM sequence: TTC
agtattccaaaagtaagaaa

SEQ ID NO: 219966 - DNA, 20 bp, Artificial Sequence
  Description of Artificial Sequence: Synthetic oligonucleotide
  Target: LAMA2; (-) strand; PAM type: YTN; PAM sequence: CTT
cagtattccaaaagtaagaa

SEQ ID NO: 219967 - DNA, 20 bp, Artificial Sequence
  Description of Artificial Sequence: Synthetic oligonucleotide
  Target: LAMA2; (-) strand; PAM type: YTN; PAM sequence: TTA
aatagggaaaaaccttcagt

SEQ ID NO: 219968 - DNA, 20 bp, Artificial Sequence
  Description of Artificial Sequence: Synthetic oligonucleotide
  Target: LAMA2; (-) strand; PAM type: YTN; PAM sequence: CTA
atgaaagaagaaatggaata

SEQ ID NO: 219969 - DNA, 20 bp, Artificial Sequence
  Description of Artificial Sequence: Synthetic oligonucleotide
  Target: LAMA2; (-) strand; PAM type: YTN; PAM sequence: TTC
acagaagacaagctaatgaa

SEQ ID NO: 219970 - DNA, 20 bp, Artificial Sequence
  Description of Artificial Sequence: Synthetic oligonucleotide
  Target: LAMA2; (-) strand; PAM type: YTN; PAM sequence: CTT
cacagaagacaagctaatga

SEQ ID NO: 219971 - DNA, 20 bp, Artificial Sequence
  Description of Artificial Sequence: Synthetic oligonucleotide
  Target: LAMA2; (-) strand; PAM type: YTN; PAM sequence: TTA
gtatgagtaataaaagactt

SEQ ID NO: 219972 - DNA, 20 bp, Artificial Sequence
  Description of Artificial Sequence: Synthetic oligonucleotide
  Target: LAMA2; (-) strand; PAM type: YTN; PAM sequence: TTA
tggtaattagtatgagtaat

SEQ ID NO: 219973 - DNA, 20 bp, Artificial Sequence
  Description of Artificial Sequence: Synthetic oligonucleotide
  Target: LAMA2; (-) strand; PAM type: YTN; PAM sequence: TTT
atggtaattagtatgagtaa

SEQ ID NO: 219974 - DNA, 20 bp, Artificial Sequence
  Description of Artificial Sequence: Synthetic oligonucleotide
  Target: LAMA2; (-) strand; PAM type: YTN; PAM sequence: TTA
ccatatttatggtaattagt

SEQ ID NO: 219975 - DNA, 20 bp, Artificial Sequence
  Description of Artificial Sequence: Synthetic oligonucleotide
  Target: LAMA2; (-) strand; PAM type: YTN; PAM sequence: CTG
ataaatgaaggacgcaagtt

SEQ ID NO: 219976 - DNA, 20 bp, Artificial Sequence
  Description of Artificial Sequence: Synthetic oligonucleotide
  Target: LAMA2; (-) strand; PAM type: YTN; PAM sequence: TTC
tgataaatgaaggacgcaag

SEQ ID NO: 219977 - DNA, 20 bp, Artificial Sequence
  Description of Artificial Sequence: Synthetic oligonucleotide
  Target: LAMA2; (-) strand; PAM type: YTN; PAM sequence: TTA
caaagttctgataaatgaag

SEQ ID NO: 219978 - DNA, 20 bp, Artificial Sequence
  Description of Artificial Sequence: Synthetic oligonucleotide
  Target: LAMA2; (-) strand; PAM type: YTN; PAM sequence: CTG
aggtaaaatattacaaagtt

SEQ ID NO: 219979 - DNA, 20 bp, Artificial Sequence
  Description of Artificial Sequence: Synthetic oligonucleotide
  Target: LAMA2; (-) strand; PAM type: YTN; PAM sequence: CTG
atggggaggtgggactgagg

SEQ ID NO: 219980 - DNA, 20 bp, Artificial Sequence
  Description of Artificial Sequence: Synthetic oligonucleotide
  Target: LAMA2; (-) strand; PAM type: YTN; PAM sequence: TTA
aatctgatggggaggtggga

SEQ ID NO: 219981 - DNA, 20 bp, Artificial Sequence
  Description of Artificial Sequence: Synthetic oligonucleotide
  Target: LAMA2; (-) strand; PAM type: YTN; PAM sequence: CTA
tagaattaaatctgatgggg

SEQ ID NO: 219982 - DNA, 20 bp, Artificial Sequence
  Description of Artificial Sequence: Synthetic oligonucleotide
  Target: LAMA2; (-) strand; PAM type: YTN; PAM sequence: TTA
aacatatgagaactatagaa

SEQ ID NO: 219983 - DNA, 20 bp, Artificial Sequence
  Description of Artificial Sequence: Synthetic oligonucleotide
  Target: LAMA2; (-) strand; PAM type: YTN; PAM sequence: TTA
atatatacatagaattaaac

SEQ ID NO: 219984 - DNA, 20 bp, Artificial Sequence
  Description of Artificial Sequence: Synthetic oligonucleotide
  Target: LAMA2; (-) strand; PAM type: YTN; PAM sequence: TTT
aatatatacatagaattaaa

SEQ ID NO: 219985 - DNA, 20 bp, Artificial Sequence
  Description of Artificial Sequence: Synthetic oligonucleotide
  Target: LAMA2; (-) strand; PAM type: YTN; PAM sequence: CTA
tggagtttaatatatacata

SEQ ID NO: 219986 - DNA, 20 bp, Artificial Sequence
  Description of Artificial Sequence: Synthetic oligonucleotide
  Target: LAMA2; (-) strand; PAM type: YTN; PAM sequence: TTC
ctatggagtttaatatatac

SEQ ID NO: 219987 - DNA, 20 bp, Artificial Sequence
  Description of Artificial Sequence: Synthetic oligonucleotide
  Target: LAMA2; (-) strand; PAM type: YTN; PAM sequence: CTT
cctatggagtttaatatata

SEQ ID NO: 219988 - DNA, 20 bp, Artificial Sequence
  Description of Artificial Sequence: Synthetic oligonucleotide
  Target: LAMA2; (-) strand; PAM type: YTN; PAM sequence: TTA
cttcctatggagtttaatat

SEQ ID NO: 219989 - DNA, 20 bp, Artificial Sequence
  Description of Artificial Sequence: Synthetic oligonucleotide
  Target: LAMA2; (-) strand; PAM type: YTN; PAM sequence: TTA
tgatggtaacaattacttcc

SEQ ID NO: 219990 - DNA, 20 bp, Artificial Sequence
  Description of Artificial Sequence: Synthetic oligonucleotide
  Target: LAMA2; (-) strand; PAM type: YTN; PAM sequence: TTT
atgatggtaacaattacttc

SEQ ID NO: 219991 - DNA, 20 bp, Artificial Sequence
  Description of Artificial Sequence: Synthetic oligonucleotide
  Target: LAMA2; (-) strand; PAM type: YTN; PAM sequence: CTG
catgtttatgatggtaacaa

SEQ ID NO: 219992 - DNA, 20 bp, Artificial Sequence
  Description of Artificial Sequence: Synthetic oligonucleotide
  Target: LAMA2; (-) strand; PAM type: YTN; PAM sequence: TTA
gatgaaaactgcatgtttat

SEQ ID NO: 219993 - DNA, 20 bp, Artificial Sequence
  Description of Artificial Sequence: Synthetic oligonucleotide
  Target: LAMA2; (-) strand; PAM type: YTN; PAM sequence: TTA
aaattagatgaaaactgcat

SEQ ID NO: 219994 - DNA, 20 bp, Artificial Sequence
  Description of Artificial Sequence: Synthetic oligonucleotide
  Target: LAMA2; (-) strand; PAM type: YTN; PAM sequence: TTT
aaaattagatgaaaactgca

SEQ ID NO: 219995 - DNA, 20 bp, Artificial Sequence
  Description of Artificial Sequence: Synthetic oligonucleotide
  Target: LAMA2; (-) strand; PAM type: YTN; PAM sequence: TTA
aaggtgtttaaaattagatg

SEQ ID NO: 219996 - DNA, 20 bp, Artificial Sequence
  Description of Artificial Sequence: Synthetic oligonucleotide
  Target: LAMA2; (-) strand; PAM type: YTN; PAM sequence: CTA
acaaaaaataaacaaaaaag

SEQ ID NO: 219997 - DNA, 20 bp, Artificial Sequence
  Description of Artificial Sequence: Synthetic oligonucleotide
  Target: LAMA2; (-) strand; PAM type: YTN; PAM sequence: CTA
acagaaataaataaataaac

SEQ ID NO: 219998 - DNA, 20 bp, Artificial Sequence
  Description of Artificial Sequence: Synthetic oligonucleotide
  Target: LAMA2; (-) strand; PAM type: YTN; PAM sequence: TTA
ctaacagaaataaataaata

SEQ ID NO: 219999 - DNA, 20 bp, Artificial Sequence
  Description of Artificial Sequence: Synthetic oligonucleotide
  Target: LAMA2; (-) strand; PAM type: YTN; PAM sequence: TTT
actaacagaaataaataaat

SEQ ID NO: 220000 - DNA, 20 bp, Artificial Sequence
  Description of Artificial Sequence: Synthetic oligonucleotide
  Target: LAMA2; (-) strand; PAM type: YTN; PAM sequence: TTG
atggaagtttactaacagaa

SEQ ID NO: 220001 - DNA, 20 bp, Artificial Sequence
  Description of Artificial Sequence: Synthetic oligonucleotide
  Target: LAMA2; (-) strand; PAM type: YTN; PAM sequence: CTT
gatggaagtttactaacaga

SEQ ID NO: 220002 - DNA, 20 bp, Artificial Sequence
  Description of Artificial Sequence: Synthetic oligonucleotide
  Target: LAMA2; (-) strand; PAM type: YTN; PAM sequence: TTC
ttgatggaagtttactaaca

SEQ ID NO: 220003 - DNA, 20 bp, Artificial Sequence
  Description of Artificial Sequence: Synthetic oligonucleotide
  Target: LAMA2; (-) strand; PAM type: YTN; PAM sequence: TTT
cttgatggaagtttactaac

SEQ ID NO: 220004 - DNA, 20 bp, Artificial Sequence
  Description of Artificial Sequence: Synthetic oligonucleotide
  Target: LAMA2; (-) strand; PAM type: YTN; PAM sequence: CTT
tcttgatggaagtttactaa

SEQ ID NO: 220005 - DNA, 20 bp, Artificial Sequence
  Description of Artificial Sequence: Synthetic oligonucleotide
  Target: LAMA2; (-) strand; PAM type: YTN; PAM sequence: TTA
aaaaaggcagaaaagaaatg

SEQ ID NO: 220006 - DNA, 20 bp, Artificial Sequence
  Description of Artificial Sequence: Synthetic oligonucleotide
  Target: LAMA2; (-) strand; PAM type: YTN; PAM sequence: TTT
aaaaaaggcagaaaagaaat

SEQ ID NO: 220007 - DNA, 20 bp, Artificial Sequence
  Description of Artificial Sequence: Synthetic oligonucleotide
  Target: LAMA2; (-) strand; PAM type: YTN; PAM sequence: TTC
atttaaaaaaggcagaaaag

SEQ ID NO: 220008 - DNA, 20 bp, Artificial Sequence
  Description of Artificial Sequence: Synthetic oligonucleotide
  Target: LAMA2; (-) strand; PAM type: YTN; PAM sequence: TTT
catttaaaaaaggcagaaaa

SEQ ID NO: 220009 - DNA, 20 bp, Artificial Sequence
  Description of Artificial Sequence: Synthetic oligonucleotide
  Target: LAMA2; (-) strand; PAM type: YTN; PAM sequence: CTT
tcatttaaaaaaggcagaaa

SEQ ID NO: 220010 - DNA, 20 bp, Artificial Sequence
  Description of Artificial Sequence: Synthetic oligonucleotide
  Target: LAMA2; (-) strand; PAM type: YTN; PAM sequence: CTA
gcaggctttcatttaaaaaa

SEQ ID NO: 220011 - DNA, 20 bp, Artificial Sequence
  Description of Artificial Sequence: Synthetic oligonucleotide
  Target: LAMA2; (-) strand; PAM type: YTN; PAM sequence: TTA
tcactagcaggctttcattt

SEQ ID NO: 220012 - DNA, 20 bp, Artificial Sequence
  Description of Artificial Sequence: Synthetic oligonucleotide
  Target: LAMA2; (-) strand; PAM type: YTN; PAM sequence: TTT
atcactagcaggctttcatt

SEQ ID NO: 220013 - DNA, 20 bp, Artificial Sequence
  Description of Artificial Sequence: Synthetic oligonucleotide
  Target: LAMA2; (-) strand; PAM type: YTN; PAM sequence: CTC
aaaagtaaagaaaagtgaaa

SEQ ID NO: 220014 - DNA, 20 bp, Artificial Sequence
  Description of Artificial Sequence: Synthetic oligonucleotide
  Target: LAMA2; (-) strand; PAM type: YTN; PAM sequence: TTG
gtggaaaataagtctcaaaa

SEQ ID NO: 220015 - DNA, 20 bp, Artificial Sequence
  Description of Artificial Sequence: Synthetic oligonucleotide
  Target: LAMA2; (-) strand; PAM type: YTN; PAM sequence: CTT
ggtggaaaataagtctcaaa

SEQ ID NO: 220016 - DNA, 20 bp, Artificial Sequence
  Description of Artificial Sequence: Synthetic oligonucleotide
  Target: LAMA2; (-) strand; PAM type: YTN; PAM sequence: TTA
tacttggtggaaaataagtc

SEQ ID NO: 220017 - DNA, 20 bp, Artificial Sequence
  Description of Artificial Sequence: Synthetic oligonucleotide
  Target: LAMA2; (-) strand; PAM type: YTN; PAM sequence: TTT
atacttggtggaaaataagt

SEQ ID NO: 220018 - DNA, 20 bp, Artificial Sequence
  Description of Artificial Sequence: Synthetic oligonucleotide
  Target: LAMA2; (-) strand; PAM type: YTN; PAM sequence: CTT
tatacttggtggaaaataag

SEQ ID NO: 220019 - DNA, 20 bp, Artificial Sequence
  Description of Artificial Sequence: Synthetic oligonucleotide
  Target: LAMA2; (-) strand; PAM type: YTN; PAM sequence: CTA
ctttatacttggtggaaaat

SEQ ID NO: 220020 - DNA, 20 bp, Artificial Sequence
  Description of Artificial Sequence: Synthetic oligonucleotide
  Target: LAMA2; (-) strand; PAM type: YTN; PAM sequence: TTC
tactttatacttggtggaaa

SEQ ID NO: 220021 - DNA, 20 bp, Artificial Sequence
  Description of Artificial Sequence: Synthetic oligonucleotide
  Target: LAMA2; (-) strand; PAM type: YTN; PAM sequence: TTC
caaccaggcaagaaattcta

SEQ ID NO: 220022 - DNA, 20 bp, Artificial Sequence
  Description of Artificial Sequence: Synthetic oligonucleotide
  Target: LAMA2; (-) strand; PAM type: YTN; PAM sequence: CTG
gaaaaaaacaaaacaaaaca

SEQ ID NO: 220023 - DNA, 20 bp, Artificial Sequence
  Description of Artificial Sequence: Synthetic oligonucleotide
  Target: LAMA2; (-) strand; PAM type: YTN; PAM sequence: TTA
gagtgctggaaaaaaacaaa

SEQ ID NO: 220024 - DNA, 20 bp, Artificial Sequence
  Description of Artificial Sequence: Synthetic oligonucleotide
  Target: LAMA2; (-) strand; PAM type: YTN; PAM sequence: TTT
agagtgctggaaaaaaacaa

SEQ ID NO: 220025 - DNA, 20 bp, Artificial Sequence
  Description of Artificial Sequence: Synthetic oligonucleotide
  Target: LAMA2; (-) strand; PAM type: YTN; PAM sequence: TTC
atgatagaaataatgaaaaa

SEQ ID NO: 220026 - DNA, 20 bp, Artificial Sequence
  Description of Artificial Sequence: Synthetic oligonucleotide
  Target: LAMA2; (-) strand; PAM type: YTN; PAM sequence: CTT
catgatagaaataatgaaaa

SEQ ID NO: 220027 - DNA, 20 bp, Artificial Sequence
  Description of Artificial Sequence: Synthetic oligonucleotide
  Target: LAMA2; (-) strand; PAM type: YTN; PAM sequence: TTA
cttcatgatagaaataatga

SEQ ID NO: 220028 - DNA, 20 bp, Artificial Sequence
  Description of Artificial Sequence: Synthetic oligonucleotide
  Target: LAMA2; (-) strand; PAM type: YTN; PAM sequence: CTT
acttcatgatagaaataatg

SEQ ID NO: 220029 - DNA, 20 bp, Artificial Sequence
  Description of Artificial Sequence: Synthetic oligonucleotide
  Target: LAMA2; (-) strand; PAM type: YTN; PAM sequence: TTC
cgcttacttcatgatagaaa

SEQ ID NO: 220030 - DNA, 20 bp, Artificial Sequence
  Description of Artificial Sequence: Synthetic oligonucleotide
  Target: LAMA2; (-) strand; PAM type: YTN; PAM sequence: TTT
ccgcttacttcatgatagaa

SEQ ID NO: 220031 - DNA, 20 bp, Artificial Sequence
  Description of Artificial Sequence: Synthetic oligonucleotide
  Target: LAMA2; (-) strand; PAM type: YTN; PAM sequence: CTT
tccgcttacttcatgataga

SEQ ID NO: 220032 - DNA, 20 bp, Artificial Sequence
  Description of Artificial Sequence: Synthetic oligonucleotide
  Target: LAMA2; (-) strand; PAM type: YTN; PAM sequence: TTC
caagaaccagcaataagact

SEQ ID NO: 220033 - DNA, 20 bp, Artificial Sequence
  Description of Artificial Sequence: Synthetic oligonucleotide
  Target: LAMA2; (-) strand; PAM type: YTN; PAM sequence: TTT
ccaagaaccagcaataagac

SEQ ID NO: 220034 - DNA, 20 bp, Artificial Sequence
  Description of Artificial Sequence: Synthetic oligonucleotide
  Target: LAMA2; (-) strand; PAM type: YTN; PAM sequence: TTG
tttccaagaaccagcaataa

SEQ ID NO: 220035 - DNA, 20 bp, Artificial Sequence
  Description of Artificial Sequence: Synthetic oligonucleotide
  Target: LAMA2; (-) strand; PAM type: YTN; PAM sequence: CTT
gtttccaagaaccagcaata

SEQ ID NO: 220036 - DNA, 20 bp, Artificial Sequence
  Description of Artificial Sequence: Synthetic oligonucleotide
  Target: LAMA2; (-) strand; PAM type: YTN; PAM sequence: TTC
aatggagtgaaaggaaaaat

SEQ ID NO: 220037 - DNA, 20 bp, Artificial Sequence
  Description of Artificial Sequence: Synthetic oligonucleotide
  Target: LAMA2; (-) strand; PAM type: YTN; PAM sequence: CTT
caatggagtgaaaggaaaaa

SEQ ID NO: 220038 - DNA, 20 bp, Artificial Sequence
  Description of Artificial Sequence: Synthetic oligonucleotide
  Target: LAMA2; (-) strand; PAM type: YTN; PAM sequence: TTA
aaaaaaatagccttcaatgg

SEQ ID NO: 220039 - DNA, 20 bp, Artificial Sequence
  Description of Artificial Sequence: Synthetic oligonucleotide
  Target: LAMA2; (-) strand; PAM type: YTN; PAM sequence: CTG
aacaccaaaagcaaaattaa

SEQ ID NO: 220040 - DNA, 20 bp, Artificial Sequence
  Description of Artificial Sequence: Synthetic oligonucleotide
  Target: LAMA2; (-) strand; PAM type: YTN; PAM sequence: TTG
tggtaaacccctgaacacca

SEQ ID NO: 220041 - DNA, 20 bp, Artificial Sequence
  Description of Artificial Sequence: Synthetic oligonucleotide
  Target: LAMA2; (-) strand; PAM type: YTN; PAM sequence: CTA
agtacattgtggtaaacccc

SEQ ID NO: 220042 - DNA, 20 bp, Artificial Sequence
  Description of Artificial Sequence: Synthetic oligonucleotide
  Target: LAMA2; (-) strand; PAM type: YTN; PAM sequence: TTC
ctaagtacattgtggtaaac

SEQ ID NO: 220043 - DNA, 20 bp, Artificial Sequence
  Description of Artificial Sequence: Synthetic oligonucleotide
  Target: LAMA2; (-) strand; PAM type: YTN; PAM sequence: TTA
ataccaataaaatcattcct

SEQ ID NO: 220044 - DNA, 20 bp, Artificial Sequence
  Description of Artificial Sequence: Synthetic oligonucleotide
  Target: LAMA2; (-) strand; PAM type: YTN; PAM sequence: TTG
aatcccaaatagtattaata

SEQ ID NO: 220045 - DNA, 20 bp, Artificial Sequence
  Description of Artificial Sequence: Synthetic oligonucleotide
  Target: LAMA2; (-) strand; PAM type: YTN; PAM sequence: TTT
gaatcccaaatagtattaat

SEQ ID NO: 220046 - DNA, 20 bp, Artificial Sequence
  Description of Artificial Sequence: Synthetic oligonucleotide
  Target: LAMA2; (-) strand; PAM type: YTN; PAM sequence: TTT
tgaatcccaaatagtattaa

SEQ ID NO: 220047 - DNA, 20 bp, Artificial Sequence
  Description of Artificial Sequence: Synthetic oligonucleotide
  Target: LAMA2; (-) strand; PAM type: YTN; PAM sequence: CTT
ttgaatcccaaatagtatta

SEQ ID NO: 220048 - DNA, 20 bp, Artificial Sequence
  Description of Artificial Sequence: Synthetic oligonucleotide
  Target: LAMA2; (-) strand; PAM type: YTN; PAM sequence: CTA
gaagcttttgaatcccaaat

SEQ ID NO: 220049 - DNA, 20 bp, Artificial Sequence
  Description of Artificial Sequence: Synthetic oligonucleotide
  Target: LAMA2; (-) strand; PAM type: YTN; PAM sequence: TTG
atccacagaatctagaagct

SEQ ID NO: 220050 - DNA, 20 bp, Artificial Sequence
  Description of Artificial Sequence: Synthetic oligonucleotide
  Target: LAMA2; (-) strand; PAM type: YTN; PAM sequence: TTG
gtgaaagacattgatccaca

SEQ ID NO: 220051 - DNA, 20 bp, Artificial Sequence
  Description of Artificial Sequence: Synthetic oligonucleotide
  Target: LAMA2; (-) strand; PAM type: YTN; PAM sequence: TTA
ccaaattggtgaaagacatt

SEQ ID NO: 220052 - DNA, 20 bp, Artificial Sequence
  Description of Artificial Sequence: Synthetic oligonucleotide
  Target: LAMA2; (-) strand; PAM type: YTN; PAM sequence: TTT
accaaattggtgaaagacat

SEQ ID NO: 220053 - DNA, 20 bp, Artificial Sequence
  Description of Artificial Sequence: Synthetic oligonucleotide
  Target: LAMA2; (-) strand; PAM type: YTN; PAM sequence: TTT
taccaaattggtgaaagaca

SEQ ID NO: 220054 - DNA, 20 bp, Artificial Sequence
  Description of Artificial Sequence: Synthetic oligonucleotide
  Target: LAMA2; (-) strand; PAM type: YTN; PAM sequence: CTA
agaattttaccaaattggtg

SEQ ID NO: 220055 - DNA, 20 bp, Artificial Sequence
  Description of Artificial Sequence: Synthetic oligonucleotide
  Target: LAMA2; (-) strand; PAM type: YTN; PAM sequence: TTC
gagaaaatatcggctaagaa

SEQ ID NO: 220056 - DNA, 20 bp, Artificial Sequence
  Description of Artificial Sequence: Synthetic oligonucleotide
  Target: LAMA2; (-) strand; PAM type: YTN; PAM sequence: CTC
agggagagtggagagaaaga

SEQ ID NO: 220057 - DNA, 20 bp, Artificial Sequence
  Description of Artificial Sequence: Synthetic oligonucleotide
  Target: LAMA2; (-) strand; PAM type: YTN; PAM sequence: CTG
aagtctcagggagagtggag

SEQ ID NO: 220058 - DNA, 20 bp, Artificial Sequence
  Description of Artificial Sequence: Synthetic oligonucleotide
  Target: LAMA2; (-) strand; PAM type: YTN; PAM sequence: CTA
gcagggatgtgactgaagtc

SEQ ID NO: 220059 - DNA, 20 bp, Artificial Sequence
  Description of Artificial Sequence: Synthetic oligonucleotide
  Target: LAMA2; (-) strand; PAM type: YTN; PAM sequence: CTC
aaaagaagagaagacaaatg

SEQ ID NO: 220060 - DNA, 20 bp, Artificial Sequence
  Description of Artificial Sequence: Synthetic oligonucleotide
  Target: LAMA2; (-) strand; PAM type: YTN; PAM sequence: CTG
agaaacctcaaaagaagaga

SEQ ID NO: 220061 - DNA, 20 bp, Artificial Sequence
  Description of Artificial Sequence: Synthetic oligonucleotide
  Target: LAMA2; (-) strand; PAM type: YTN; PAM sequence: TTA
taccaaacaacaggtcaccc

SEQ ID NO: 220062 - DNA, 20 bp, Artificial Sequence
  Description of Artificial Sequence: Synthetic oligonucleotide
  Target: LAMA2; (-) strand; PAM type: YTN; PAM sequence: TTT
ataccaaacaacaggtcacc

SEQ ID NO: 220063 - DNA, 20 bp, Artificial Sequence
  Description of Artificial Sequence: Synthetic oligonucleotide
  Target: LAMA2; (-) strand; PAM type: YTN; PAM sequence: TTA
tttataccaaacaacaggtc

SEQ ID NO: 220064 - DNA, 20 bp, Artificial Sequence
  Description of Artificial Sequence: Synthetic oligonucleotide
  Target: LAMA2; (-) strand; PAM type: YTN; PAM sequence: TTG
aatccagcagaaaaaaggga

SEQ ID NO: 220065 - DNA, 20 bp, Artificial Sequence
  Description of Artificial Sequence: Synthetic oligonucleotide
  Target: LAMA2; (-) strand; PAM type: YTN; PAM sequence: TTA
aaaatccagtaaatgtatgt

SEQ ID NO: 220066 - DNA, 20 bp, Artificial Sequence
  Description of Artificial Sequence: Synthetic oligonucleotide
  Target: LAMA2; (-) strand; PAM type: YTN; PAM sequence: CTA
aaaaataaaaatacaaaaat

SEQ ID NO: 220067 - DNA, 20 bp, Artificial Sequence
  Description of Artificial Sequence: Synthetic oligonucleotide
  Target: LAMA2; (-) strand; PAM type: YTN; PAM sequence: CTA
aaactaaaaaataaaaatac

SEQ ID NO: 220068 - DNA, 20 bp, Artificial Sequence
  Description of Artificial Sequence: Synthetic oligonucleotide
  Target: LAMA2; (-) strand; PAM type: YTN; PAM sequence: TTC
taaaactaaaaaataaaaat

SEQ ID NO: 220069 - DNA, 20 bp, Artificial Sequence
  Description of Artificial Sequence: Synthetic oligonucleotide
  Target: LAMA2; (-) strand; PAM type: YTN; PAM sequence: TTA
aagtatcaaatggatattct

SEQ ID NO: 220070 - DNA, 20 bp, Artificial Sequence
  Description of Artificial Sequence: Synthetic oligonucleotide
  Target: LAMA2; (-) strand; PAM type: YTN; PAM sequence: TTT
aaagtatcaaatggatattc

SEQ ID NO: 220071 - DNA, 20 bp, Artificial Sequence
  Description of Artificial Sequence: Synthetic oligonucleotide
  Target: LAMA2; (-) strand; PAM type: YTN; PAM sequence: TTT
taaagtatcaaatggatatt

SEQ ID NO: 220072 - DNA, 20 bp, Artificial Sequence
  Description of Artificial Sequence: Synthetic oligonucleotide
  Target: LAMA2; (-) strand; PAM type: YTN; PAM sequence: TTT
ttaaagtatcaaatggatat

SEQ ID NO: 220073 - DNA, 20 bp, Artificial Sequence
  Description of Artificial Sequence: Synthetic oligonucleotide
  Target: LAMA2; (-) strand; PAM type: YTN; PAM sequence: TTT
tttaaagtatcaaatggata

SEQ ID NO: 220074 - DNA, 20 bp, Artificial Sequence
  Description of Artificial Sequence: Synthetic oligonucleotide
  Target: LAMA2; (-) strand; PAM type: YTN; PAM sequence: TTT
ttttaaagtatcaaatggat

SEQ ID NO: 220075 - DNA, 20 bp, Artificial Sequence
  Description of Artificial Sequence: Synthetic oligonucleotide
  Target: LAMA2; (-) strand; PAM type: YTN; PAM sequence: CTA
atttttttaaagtatcaaat

SEQ ID NO: 220076 - DNA, 20 bp, Artificial Sequence
  Description of Artificial Sequence: Synthetic oligonucleotide
  Target: LAMA2; (-) strand; PAM type: YTN; PAM sequence: TTG
gagtctaatttttttaaagt

SEQ ID NO: 220077 - DNA, 20 bp, Artificial Sequence
  Description of Artificial Sequence: Synthetic oligonucleotide
  Target: LAMA2; (-) strand; PAM type: YTN; PAM sequence: TTT
ggagtctaatttttttaaag

SEQ ID NO: 220078 - DNA, 20 bp, Artificial Sequence
  Description of Artificial Sequence: Synthetic oligonucleotide
  Target: LAMA2; (-) strand; PAM type: YTN; PAM sequence: CTA
agtggagagatatttggagt

SEQ ID NO: 220079 - DNA, 20 bp, Artificial Sequence
  Description of Artificial Sequence: Synthetic oligonucleotide
  Target: LAMA2; (-) strand; PAM type: YTN; PAM sequence: TTC
cagatgactaagtggagaga

SEQ ID NO: 220080 - DNA, 20 bp, Artificial Sequence
  Description of Artificial Sequence: Synthetic oligonucleotide
  Target: LAMA2; (-) strand; PAM type: YTN; PAM sequence: TTA
atatgttccagatgactaag

SEQ ID NO: 220081 - DNA, 20 bp, Artificial Sequence
  Description of Artificial Sequence: Synthetic oligonucleotide
  Target: LAMA2; (-) strand; PAM type: YTN; PAM sequence: TTA
ttaatatgttccagatgact

SEQ ID NO: 220082 - DNA, 20 bp, Artificial Sequence
  Description of Artificial Sequence: Synthetic oligonucleotide
  Target: LAMA2; (-) strand; PAM type: YTN; PAM sequence: CTG
ttattaatatgttccagatg

SEQ ID NO: 220083 - DNA, 20 bp, Artificial Sequence
  Description of Artificial Sequence: Synthetic oligonucleotide
  Target: LAMA2; (-) strand; PAM type: YTN; PAM sequence: TTA
aaataactgttattaatatg

SEQ ID NO: 220084 - DNA, 20 bp, Artificial Sequence
  Description of Artificial Sequence: Synthetic oligonucleotide
  Target: LAMA2; (-) strand; PAM type: YTN; PAM sequence: TTT
aaaataactgttattaatat

SEQ ID NO: 220085 - DNA, 20 bp, Artificial Sequence
  Description of Artificial Sequence: Synthetic oligonucleotide
  Target: LAMA2; (-) strand; PAM type: YTN; PAM sequence: TTA
tcagacatataatttaaaat

SEQ ID NO: 220086 - DNA, 20 bp, Artificial Sequence
  Description of Artificial Sequence: Synthetic oligonucleotide
  Target: LAMA2; (-) strand; PAM type: YTN; PAM sequence: TTC
caacgtcagagttatcagac

SEQ ID NO: 220087 - DNA, 20 bp, Artificial Sequence
  Description of Artificial Sequence: Synthetic oligonucleotide
  Target: LAMA2; (-) strand; PAM type: YTN; PAM sequence: TTT
ccaacgtcagagttatcaga

SEQ ID NO: 220088 - DNA, 20 bp, Artificial Sequence
  Description of Artificial Sequence: Synthetic oligonucleotide
  Target: LAMA2; (-) strand; PAM type: YTN; PAM sequence: TTG
tttccaacgtcagagttatc

SEQ ID NO: 220089 - DNA, 20 bp, Artificial Sequence
  Description of Artificial Sequence: Synthetic oligonucleotide
  Target: LAMA2; (-) strand; PAM type: YTN; PAM sequence: CTC
ccagttgtttccaacgtcag

SEQ ID NO: 220090 - DNA, 20 bp, Artificial Sequence
  Description of Artificial Sequence: Synthetic oligonucleotide
  Target: LAMA2; (-) strand; PAM type: YTN; PAM sequence: TTG
tcataaaacaggaatgcatg

SEQ ID NO: 220091 - DNA, 20 bp, Artificial Sequence
  Description of Artificial Sequence: Synthetic oligonucleotide
  Target: LAMA2; (-) strand; PAM type: YTN; PAM sequence: CTT
gtcataaaacaggaatgcat

SEQ ID NO: 220092 - DNA, 20 bp, Artificial Sequence
  Description of Artificial Sequence: Synthetic oligonucleotide
  Target: LAMA2; (-) strand; PAM type: YTN; PAM sequence: TTA
atcaaaaacgaccaagcttg

SEQ ID NO: 220093 - DNA, 20 bp, Artificial Sequence
  Description of Artificial Sequence: Synthetic oligonucleotide
  Target: LAMA2; (-) strand; PAM type: YTN; PAM sequence: TTT
aatcaaaaacgaccaagctt

SEQ ID NO: 220094 - DNA, 20 bp, Artificial Sequence
  Description of Artificial Sequence: Synthetic oligonucleotide
  Target: LAMA2; (-) strand; PAM type: YTN; PAM sequence: TTA
tttaatcaaaaacgaccaag

SEQ ID NO: 220095 - DNA, 20 bp, Artificial Sequence
  Description of Artificial Sequence: Synthetic oligonucleotide
  Target: LAMA2; (-) strand; PAM type: YTN; PAM sequence: TTC
agacacatacattatttaat

SEQ ID NO: 220096 - DNA, 20 bp, Artificial Sequence
  Description of Artificial Sequence: Synthetic oligonucleotide
  Target: LAMA2; (-) strand; PAM type: YTN; PAM sequence: TTT
cagacacatacattatttaa

SEQ ID NO: 220097 - DNA, 20 bp, Artificial Sequence
  Description of Artificial Sequence: Synthetic oligonucleotide
  Target: LAMA2; (-) strand; PAM type: YTN; PAM sequence: TTT
tcagacacatacattattta

SEQ ID NO: 220098 - DNA, 20 bp, Artificial Sequence
  Description of Artificial Sequence: Synthetic oligonucleotide
  Target: LAMA2; (-) strand; PAM type: YTN; PAM sequence: TTA
tacattttcagacacataca

SEQ ID NO: 220099 - DNA, 20 bp, Artificial Sequence
  Description of Artificial Sequence: Synthetic oligonucleotide
  Target: LAMA2; (-) strand; PAM type: YTN; PAM sequence: TTT
atacattttcagacacatac

SEQ ID NO: 220100 - DNA, 20 bp, Artificial Sequence
  Description of Artificial Sequence: Synthetic oligonucleotide
  Target: LAMA2; (-) strand; PAM type: YTN; PAM sequence: TTT
tatacattttcagacacata

SEQ ID NO: 220101 - DNA, 20 bp, Artificial Sequence
  Description of Artificial Sequence: Synthetic oligonucleotide
  Target: LAMA2; (-) strand; PAM type: YTN; PAM sequence: TTT
ttatacattttcagacacat

SEQ ID NO: 220102 - DNA, 20 bp, Artificial Sequence
  Description of Artificial Sequence: Synthetic oligonucleotide
  Target: LAMA2; (-) strand; PAM type: YTN; PAM sequence: TTC
cagaatttttatacattttc

SEQ ID NO: 220103 - DNA, 20 bp, Artificial Sequence
  Description of Artificial Sequence: Synthetic oligonucleotide
  Target: LAMA2; (-) strand; PAM type: YTN; PAM sequence: CTT
ccagaatttttatacatttt

SEQ ID NO: 220104 - DNA, 20 bp, Artificial Sequence
  Description of Artificial Sequence: Synthetic oligonucleotide
  Target: LAMA2; (-) strand; PAM type: YTN; PAM sequence: TTA
agagaaaaataacatcttcc

SEQ ID NO: 220105 - DNA, 20 bp, Artificial Sequence
  Description of Artificial Sequence: Synthetic oligonucleotide
  Target: LAMA2; (-) strand; PAM type: YTN; PAM sequence: TTT
aagagaaaaataacatcttc

SEQ ID NO: 220106 - DNA, 20 bp, Artificial Sequence
  Description of Artificial Sequence: Synthetic oligonucleotide
  Target: LAMA2; (-) strand; PAM type: YTN; PAM sequence: TTT
taagagaaaaataacatctt

SEQ ID NO: 220107 - DNA, 20 bp, Artificial Sequence
  Description of Artificial Sequence: Synthetic oligonucleotide
  Target: LAMA2; (-) strand; PAM type: YTN; PAM sequence: TTG
acagaatgaaaataaatcat

SEQ ID NO: 220108 - DNA, 20 bp, Artificial Sequence
  Description of Artificial Sequence: Synthetic oligonucleotide
  Target: LAMA2; (-) strand; PAM type: YTN; PAM sequence: CTT
gacagaatgaaaataaatca

SEQ ID NO: 220109 - DNA, 20 bp, Artificial Sequence
  Description of Artificial Sequence: Synthetic oligonucleotide
  Target: LAMA2; (-) strand; PAM type: YTN; PAM sequence: CTC
ttgacagaatgaaaataaat

SEQ ID NO: 220110 - DNA, 20 bp, Artificial Sequence
  Description of Artificial Sequence: Synthetic oligonucleotide
  Target: LAMA2; (-) strand; PAM type: YTN; PAM sequence: CTA
actcttgacagaatgaaaat

SEQ ID NO: 220111 - DNA, 20 bp, Artificial Sequence
  Description of Artificial Sequence: Synthetic oligonucleotide
  Target: LAMA2; (-) strand; PAM type: YTN; PAM sequence: CTA
cactaactcttgacagaatg

SEQ ID NO: 220112 - DNA, 20 bp, Artificial Sequence
  Description of Artificial Sequence: Synthetic oligonucleotide
  Target: LAMA2; (-) strand; PAM type: YTN; PAM sequence: CTC
tacactaactcttgacagaa

SEQ ID NO: 220113 - DNA, 20 bp, Artificial Sequence
  Description of Artificial Sequence: Synthetic oligonucleotide
  Target: LAMA2; (-) strand; PAM type: YTN; PAM sequence: TTG
cctctacactaactcttgac

SEQ ID NO: 220114 - DNA, 20 bp, Artificial Sequence
  Description of Artificial Sequence: Synthetic oligonucleotide
  Target: LAMA2; (-) strand; PAM type: YTN; PAM sequence: CTT
gcctctacactaactcttga

SEQ ID NO: 220115 - DNA, 20 bp, Artificial Sequence
  Description of Artificial Sequence: Synthetic oligonucleotide
  Target: LAMA2; (-) strand; PAM type: YTN; PAM sequence: CTG
aagcaaagcaacttgcctct

SEQ ID NO: 220116 - DNA, 20 bp, Artificial Sequence
  Description of Artificial Sequence: Synthetic oligonucleotide
  Target: LAMA2; (-) strand; PAM type: YTN; PAM sequence: CTG
actgaagcaaagcaacttgc

SEQ ID NO: 220117 - DNA, 20 bp, Artificial Sequence
  Description of Artificial Sequence: Synthetic oligonucleotide
  Target: LAMA2; (-) strand; PAM type: YTN; PAM sequence: TTG
ctgactgaagcaaagcaact

SEQ ID NO: 220118 - DNA, 20 bp, Artificial Sequence
  Description of Artificial Sequence: Synthetic oligonucleotide
  Target: LAMA2; (-) strand; PAM type: YTN; PAM sequence: TTG
agttgctgactgaagcaaag

SEQ ID NO: 220119 - DNA, 20 bp, Artificial Sequence
  Description of Artificial Sequence: Synthetic oligonucleotide
  Target: LAMA2; (-) strand; PAM type: YTN; PAM sequence: TTT
gagttgctgactgaagcaaa

SEQ ID NO: 220120 - DNA, 20 bp, Artificial Sequence
  Description of Artificial Sequence: Synthetic oligonucleotide
  Target: LAMA2; (-) strand; PAM type: YTN; PAM sequence: CTA
caaaacatttgagttgctga

SEQ ID NO: 220121 - DNA, 20 bp, Artificial Sequence
  Description of Artificial Sequence: Synthetic oligonucleotide
  Target: LAMA2; (-) strand; PAM type: YTN; PAM sequence: CTA
agctacaaaacatttgagtt

SEQ ID NO: 220122 - DNA, 20 bp, Artificial Sequence
  Description of Artificial Sequence: Synthetic oligonucleotide
  Target: LAMA2; (-) strand; PAM type: YTN; PAM sequence: CTA
actaagctacaaaacatttg

SEQ ID NO: 220123 - DNA, 20 bp, Artificial Sequence
  Description of Artificial Sequence: Synthetic oligonucleotide
  Target: LAMA2; (-) strand; PAM type: YTN; PAM sequence: CTC
taactaagctacaaaacatt

SEQ ID NO: 220124 - DNA, 20 bp, Artificial Sequence
  Description of Artificial Sequence: Synthetic oligonucleotide
  Target: LAMA2; (-) strand; PAM type: YTN; PAM sequence: CTA
gaaacaaccatcagaatctc

SEQ ID NO: 220125 - DNA, 20 bp, Artificial Sequence
  Description of Artificial Sequence: Synthetic oligonucleotide
  Target: LAMA2; (-) strand; PAM type: YTN; PAM sequence: CTA
agagtaaactagaaacaacc

SEQ ID NO: 220126 - DNA, 20 bp, Artificial Sequence
  Description of Artificial Sequence: Synthetic oligonucleotide
  Target: LAMA2; (-) strand; PAM type: YTN; PAM sequence: CTA
gaactaagagtaaactagaa

SEQ ID NO: 220127 - DNA, 20 bp, Artificial Sequence
  Description of Artificial Sequence: Synthetic oligonucleotide
  Target: LAMA2; (-) strand; PAM type: YTN; PAM sequence: CTA
tccctagaactaagagtaaa

SEQ ID NO: 220128 - DNA, 20 bp, Artificial Sequence
  Description of Artificial Sequence: Synthetic oligonucleotide
  Target: LAMA2; (-) strand; PAM type: YTN; PAM sequence: CTG
aaagtctatccctagaacta

SEQ ID NO: 220129 - DNA, 20 bp, Artificial Sequence
  Description of Artificial Sequence: Synthetic oligonucleotide
  Target: LAMA2; (-) strand; PAM type: YTN; PAM sequence: CTG
gagtcctgaaagtctatccc

SEQ ID NO: 220130 - DNA, 20 bp, Artificial Sequence
  Description of Artificial Sequence: Synthetic oligonucleotide
  Target: LAMA2; (-) strand; PAM type: YTN; PAM sequence: TTC
cactggagtcctgaaagtct

SEQ ID NO: 220131 - DNA, 20 bp, Artificial Sequence
  Description of Artificial Sequence: Synthetic oligonucleotide
  Target: LAMA2; (-) strand; PAM type: YTN; PAM sequence: TTT
ccactggagtcctgaaagtc

SEQ ID NO: 220132 - DNA, 20 bp, Artificial Sequence
  Description of Artificial Sequence: Synthetic oligonucleotide
  Target: LAMA2; (-) strand; PAM type: YTN; PAM sequence: TTA
agagtcagccaagaaggaaa

SEQ ID NO: 220133 - DNA, 20 bp, Artificial Sequence
  Description of Artificial Sequence: Synthetic oligonucleotide
  Target: LAMA2; (-) strand; PAM type: YTN; PAM sequence: TTG
gagttaagagtcagccaaga

SEQ ID NO: 220134 - DNA, 20 bp, Artificial Sequence
  Description of Artificial Sequence: Synthetic oligonucleotide
  Target: LAMA2; (-) strand; PAM type: YTN; PAM sequence: TTT
ggagttaagagtcagccaag

SEQ ID NO: 220135 - DNA, 20 bp, Artificial Sequence
  Description of Artificial Sequence: Synthetic oligonucleotide
  Target: LAMA2; (-) strand; PAM type: YTN; PAM sequence: CTT
tggagttaagagtcagccaa

SEQ ID NO: 220136 - DNA, 20 bp, Artificial Sequence
  Description of Artificial Sequence: Synthetic oligonucleotide
  Target: LAMA2; (-) strand; PAM type: YTN; PAM sequence: TTG
ggaagacaaactttggagtt

SEQ ID NO: 220137 - DNA, 20 bp, Artificial Sequence
  Description of Artificial Sequence: Synthetic oligonucleotide
  Target: LAMA2; (-) strand; PAM type: YTN; PAM sequence: CTC
ccagagttgggaagacaaac

SEQ ID NO: 220138 - DNA, 20 bp, Artificial Sequence
  Description of Artificial Sequence: Synthetic oligonucleotide
  Target: LAMA2; (-) strand; PAM type: YTN; PAM sequence: TTG
ggaagtctcccagagttggg

SEQ ID NO: 220139 - DNA, 20 bp, Artificial Sequence
  Description of Artificial Sequence: Synthetic oligonucleotide
  Target: LAMA2; (-) strand; PAM type: YTN; PAM sequence: CTT
gggaagtctcccagagttgg

SEQ ID NO: 220140 - DNA, 20 bp, Artificial Sequence
  Description of Artificial Sequence: Synthetic oligonucleotide
  Target: LAMA2; (-) strand; PAM type: YTN; PAM sequence: CTA
agaagatccttgggaagtct

SEQ ID NO: 220141 - DNA, 20 bp, Artificial Sequence
  Description of Artificial Sequence: Synthetic oligonucleotide
  Target: LAMA2; (-) strand; PAM type: YTN; PAM sequence: CTC
atgagaagtgaaaaactaag

SEQ ID NO: 220142 - DNA, 20 bp, Artificial Sequence
  Description of Artificial Sequence: Synthetic oligonucleotide
  Target: LAMA2; (-) strand; PAM type: YTN; PAM sequence: CTA
agtggtgaaggagccagaag

SEQ ID NO: 220143 - DNA, 20 bp, Artificial Sequence
  Description of Artificial Sequence: Synthetic oligonucleotide
  Target: LAMA2; (-) strand; PAM type: YTN; PAM sequence: TTC
taagtggtgaaggagccaga

SEQ ID NO: 220144 - DNA, 20 bp, Artificial Sequence
  Description of Artificial Sequence: Synthetic oligonucleotide
  Target: LAMA2; (-) strand; PAM type: YTN; PAM sequence: TTT
ctaagtggtgaaggagccag

SEQ ID NO: 220145 - DNA, 20 bp, Artificial Sequence
  Description of Artificial Sequence: Synthetic oligonucleotide
  Target: LAMA2; (-) strand; PAM type: YTN; PAM sequence: TTG
ccaatttctaagtggtgaag

SEQ ID NO: 220146 - DNA, 20 bp, Artificial Sequence
  Description of Artificial Sequence: Synthetic oligonucleotide
  Target: LAMA2; (-) strand; PAM type: YTN; PAM sequence: TTT
gccaatttctaagtggtgaa

SEQ ID NO: 220147 - DNA, 20 bp, Artificial Sequence
  Description of Artificial Sequence: Synthetic oligonucleotide
  Target: LAMA2; (-) strand; PAM type: YTN; PAM sequence: TTC
aagagatttgccaatttcta

SEQ ID NO: 220148 - DNA, 20 bp, Artificial Sequence
  Description of Artificial Sequence: Synthetic oligonucleotide
  Target: LAMA2; (-) strand; PAM type: YTN; PAM sequence: CTT
caagagatttgccaatttct

SEQ ID NO: 220149 - DNA, 20 bp, Artificial Sequence
  Description of Artificial Sequence: Synthetic oligonucleotide
  Target: LAMA2; (-) strand; PAM type: YTN; PAM sequence: TTG
ccttcaagagatttgccaat

SEQ ID NO: 220150 - DNA, 20 bp, Artificial Sequence
  Description of Artificial Sequence: Synthetic oligonucleotide
  Target: LAMA2; (-) strand; PAM type: YTN; PAM sequence: TTT
gccttcaagagatttgccaa

SEQ ID NO: 220151 - DNA, 20 bp, Artificial Sequence
  Description of Artificial Sequence: Synthetic oligonucleotide
  Target: LAMA2; (-) strand; PAM type: YTN; PAM sequence: TTT
tgccttcaagagatttgcca

SEQ ID NO: 220152 - DNA, 20 bp, Artificial Sequence
  Description of Artificial Sequence: Synthetic oligonucleotide
  Target: LAMA2; (-) strand; PAM type: YTN; PAM sequence: CTT
ttgccttcaagagatttgcc

SEQ ID NO: 220153 - DNA, 20 bp, Artificial Sequence
  Description of Artificial Sequence: Synthetic oligonucleotide
  Target: LAMA2; (-) strand; PAM type: YTN; PAM sequence: TTC
acagcttttgccttcaagag

SEQ ID NO: 220154 - DNA, 20 bp, Artificial Sequence
  Description of Artificial Sequence: Synthetic oligonucleotide
  Target: LAMA2; (-) strand; PAM type: YTN; PAM sequence: CTT
cacagcttttgccttcaaga

SEQ ID NO: 220155 - DNA, 20 bp, Artificial Sequence
  Description of Artificial Sequence: Synthetic oligonucleotide
  Target: LAMA2; (-) strand; PAM type: YTN; PAM sequence: TTC
ttcacagcttttgccttcaa

SEQ ID NO: 220156 - DNA, 20 bp, Artificial Sequence
  Description of Artificial Sequence: Synthetic oligonucleotide
  Target: LAMA2; (-) strand; PAM type: YTN; PAM sequence: CTA
cattcttcacagcttttgcc

SEQ ID NO: 220157 - DNA, 20 bp, Artificial Sequence
  Description of Artificial Sequence: Synthetic oligonucleotide
  Target: LAMA2; (-) strand; PAM type: YTN; PAM sequence: TTC
atagagaaatgagacctaca

SEQ ID NO: 220158 - DNA, 20 bp, Artificial Sequence
  Description of Artificial Sequence: Synthetic oligonucleotide
  Target: LAMA2; (-) strand; PAM type: YTN; PAM sequence: CTA
ggatgtgagggaccataatt

SEQ ID NO: 220159 - DNA, 20 bp, Artificial Sequence
  Description of Artificial Sequence: Synthetic oligonucleotide
  Target: LAMA2; (-) strand; PAM type: YTN; PAM sequence: CTA
tgaagtcagctaggatgtga

SEQ ID NO: 220160 - DNA, 20 bp, Artificial Sequence
  Description of Artificial Sequence: Synthetic oligonucleotide
  Target: LAMA2; (-) strand; PAM type: YTN; PAM sequence: TTC
agggctatgaagtcagctag

SEQ ID NO: 220161 - DNA, 20 bp, Artificial Sequence
  Description of Artificial Sequence: Synthetic oligonucleotide
  Target: LAMA2; (-) strand; PAM type: YTN; PAM sequence: TTA
gaattcagggctatgaagtc

SEQ ID NO: 220162 - DNA, 20 bp, Artificial Sequence
  Description of Artificial Sequence: Synthetic oligonucleotide
  Target: LAMA2; (-) strand; PAM type: YTN; PAM sequence: CTC
acaggataagaagataaaca

SEQ ID NO: 220163 - DNA, 20 bp, Artificial Sequence
  Description of Artificial Sequence: Synthetic oligonucleotide
  Target: LAMA2; (-) strand; PAM type: YTN; PAM sequence: TTC
agcaatctcacaggataaga

SEQ ID NO: 220164 - DNA, 20 bp, Artificial Sequence
  Description of Artificial Sequence: Synthetic oligonucleotide
  Target: LAMA2; (-) strand; PAM type: YTN; PAM sequence: TTA
gtgtgttcagcaatctcaca

SEQ ID NO: 220165 - DNA, 20 bp, Artificial Sequence
  Description of Artificial Sequence: Synthetic oligonucleotide
  Target: LAMA2; (-) strand; PAM type: YTN; PAM sequence: CTT
agtgtgttcagcaatctcac

SEQ ID NO: 220166 - DNA, 20 bp, Artificial Sequence
  Description of Artificial Sequence: Synthetic oligonucleotide
  Target: LAMA2; (-) strand; PAM type: YTN; PAM sequence: CTA
catcttagtgtgttcagcaa

SEQ ID NO: 220167 - DNA, 20 bp, Artificial Sequence
  Description of Artificial Sequence: Synthetic oligonucleotide
  Target: LAMA2; (-) strand; PAM type: YTN; PAM sequence: TTA
tagagaaagctacatcttag

SEQ ID NO: 220168 - DNA, 20 bp, Artificial Sequence
  Description of Artificial Sequence: Synthetic oligonucleotide
  Target: LAMA2; (-) strand; PAM type: YTN; PAM sequence: TTG
aataggaggttatagagaaa

SEQ ID NO: 220169 - DNA, 20 bp, Artificial Sequence
  Description of Artificial Sequence: Synthetic oligonucleotide
  Target: LAMA2; (-) strand; PAM type: YTN; PAM sequence: CTG
acagttgaataggaggttat

SEQ ID NO: 220170 - DNA, 20 bp, Artificial Sequence
  Description of Artificial Sequence: Synthetic oligonucleotide
  Target: LAMA2; (-) strand; PAM type: YTN; PAM sequence: TTG
ctgacagttgaataggaggt

SEQ ID NO: 220171 - DNA, 20 bp, Artificial Sequence
  Description of Artificial Sequence: Synthetic oligonucleotide
  Target: LAMA2; (-) strand; PAM type: YTN; PAM sequence: TTT
gctgacagttgaataggagg

SEQ ID NO: 220172 - DNA, 20 bp, Artificial Sequence
  Description of Artificial Sequence: Synthetic oligonucleotide
  Target: LAMA2; (-) strand; PAM type: YTN; PAM sequence: TTG
atttgctgacagttgaatag

SEQ ID NO: 220173 - DNA, 20 bp, Artificial Sequence
  Description of Artificial Sequence: Synthetic oligonucleotide
  Target: LAMA2; (-) strand; PAM type: YTN; PAM sequence: TTA
ttgatttgctgacagttgaa

SEQ ID NO: 220174 - DNA, 20 bp, Artificial Sequence
  Description of Artificial Sequence: Synthetic oligonucleotide
  Target: LAMA2; (-) strand; PAM type: YTN; PAM sequence: TTT
attgatttgctgacagttga

SEQ ID NO: 220175 - DNA, 20 bp, Artificial Sequence
  Description of Artificial Sequence: Synthetic oligonucleotide
  Target: LAMA2; (-) strand; PAM type: YTN; PAM sequence: TTT
tattgatttgctgacagttg

SEQ ID NO: 220176 - DNA, 20 bp, Artificial Sequence
  Description of Artificial Sequence: Synthetic oligonucleotide
  Target: LAMA2; (-) strand; PAM type: YTN; PAM sequence: CTT
ttattgatttgctgacagtt

SEQ ID NO: 220177 - DNA, 20 bp, Artificial Sequence
  Description of Artificial Sequence: Synthetic oligonucleotide
  Target: LAMA2; (-) strand; PAM type: YTN; PAM sequence: CTC
agggtacttttattgatttg

SEQ ID NO: 220178 - DNA, 20 bp, Artificial Sequence
  Description of Artificial Sequence: Synthetic oligonucleotide
  Target: LAMA2; (-) strand; PAM type: YTN; PAM sequence: CTC
tcagggtacttttattgatt

SEQ ID NO: 220179 - DNA, 20 bp, Artificial Sequence
  Description of Artificial Sequence: Synthetic oligonucleotide
  Target: LAMA2; (-) strand; PAM type: YTN; PAM sequence: TTC
ctctcagggtacttttattg

SEQ ID NO: 220180 - DNA, 20 bp, Artificial Sequence
  Description of Artificial Sequence: Synthetic oligonucleotide
  Target: LAMA2; (-) strand; PAM type: YTN; PAM sequence: TTT
cctctcagggtacttttatt

SEQ ID NO: 220181 - DNA, 20 bp, Artificial Sequence
  Description of Artificial Sequence: Synthetic oligonucleotide
  Target: LAMA2; (-) strand; PAM type: YTN; PAM sequence: TTT
tcctctcagggtacttttat

SEQ ID NO: 220182 - DNA, 20 bp, Artificial Sequence
  Description of Artificial Sequence: Synthetic oligonucleotide
  Target: LAMA2; (-) strand; PAM type: YTN; PAM sequence: CTA
gccattttcctctcagggta

SEQ ID NO: 220183 - DNA, 20 bp, Artificial Sequence
  Description of Artificial Sequence: Synthetic oligonucleotide
  Target: LAMA2; (-) strand; PAM type: YTN; PAM sequence: TTA
aggtaagctagccattttcc

SEQ ID NO: 220184 - DNA, 20 bp, Artificial Sequence
  Description of Artificial Sequence: Synthetic oligonucleotide
  Target: LAMA2; (-) strand; PAM type: YTN; PAM sequence: TTA
agtaaagggaagcaaattaa

SEQ ID NO: 220185 - DNA, 20 bp, Artificial Sequence
  Description of Artificial Sequence: Synthetic oligonucleotide
  Target: LAMA2; (-) strand; PAM type: YTN; PAM sequence: CTT
aagtaaagggaagcaaatta

SEQ ID NO: 220186 - DNA, 20 bp, Artificial Sequence
  Description of Artificial Sequence: Synthetic oligonucleotide
  Target: LAMA2; (-) strand; PAM type: YTN; PAM sequence: TTG
aaggcatcagcaagcaacca

SEQ ID NO: 220187 - DNA, 20 bp, Artificial Sequence
  Description of Artificial Sequence: Synthetic oligonucleotide
  Target: LAMA2; (-) strand; PAM type: YTN; PAM sequence: TTT
gaaggcatcagcaagcaacc

SEQ ID NO: 220188 - DNA, 20 bp, Artificial Sequence
  Description of Artificial Sequence: Synthetic oligonucleotide
  Target: LAMA2; (-) strand; PAM type: YTN; PAM sequence: CTA
aaaacagcagtttgaaggca

SEQ ID NO: 220189 - DNA, 20 bp, Artificial Sequence
  Description of Artificial Sequence: Synthetic oligonucleotide
  Target: LAMA2; (-) strand; PAM type: YTN; PAM sequence: CTG
gataaaatactaaaaacagc

SEQ ID NO: 220190 - DNA, 20 bp, Artificial Sequence
  Description of Artificial Sequence: Synthetic oligonucleotide
  Target: LAMA2; (-) strand; PAM type: YTN; PAM sequence: CTC
aaagacaacaaccataaaag

SEQ ID NO: 220191 - DNA, 20 bp, Artificial Sequence
  Description of Artificial Sequence: Synthetic oligonucleotide
  Target: LAMA2; (-) strand; PAM type: YTN; PAM sequence: CTC
tcaaagacaacaaccataaa

SEQ ID NO: 220192 - DNA, 20 bp, Artificial Sequence
  Description of Artificial Sequence: Synthetic oligonucleotide
  Target: LAMA2; (-) strand; PAM type: YTN; PAM sequence: TTC
tctcaaagacaacaaccata

SEQ ID NO: 220193 - DNA, 20 bp, Artificial Sequence
  Description of Artificial Sequence: Synthetic oligonucleotide
  Target: LAMA2; (-) strand; PAM type: YTN; PAM sequence: TTT
ctctcaaagacaacaaccat

SEQ ID NO: 220194 - DNA, 20 bp, Artificial Sequence
  Description of Artificial Sequence: Synthetic oligonucleotide
  Target: LAMA2; (-) strand; PAM type: YTN; PAM sequence: TTT
tctctcaaagacaacaacca

SEQ ID NO: 220195 - DNA, 20 bp, Artificial Sequence
  Description of Artificial Sequence: Synthetic oligonucleotide
  Target: LAMA2; (-) strand; PAM type: YTN; PAM sequence: TTC
cattttctctcaaagacaac

SEQ ID NO: 220196 - DNA, 20 bp, Artificial Sequence
  Description of Artificial Sequence: Synthetic oligonucleotide
  Target: LAMA2; (-) strand; PAM type: YTN; PAM sequence: TTT
ccattttctctcaaagacaa

SEQ ID NO: 220197 - DNA, 20 bp, Artificial Sequence
  Description of Artificial Sequence: Synthetic oligonucleotide
  Target: LAMA2; (-) strand; PAM type: YTN; PAM sequence: CTT
tccattttctctcaaagaca

SEQ ID NO: 220198 - DNA, 20 bp, Artificial Sequence
  Description of Artificial Sequence: Synthetic oligonucleotide
  Target: LAMA2; (-) strand; PAM type: YTN; PAM sequence: TTC
cctttccattttctctcaaa

SEQ ID NO: 220199 - DNA, 20 bp, Artificial Sequence
  Description of Artificial Sequence: Synthetic oligonucleotide
  Target: LAMA2; (-) strand; PAM type: YTN; PAM sequence: TTT
ccctttccattttctctcaa

SEQ ID NO: 220200 - DNA, 20 bp, Artificial Sequence
  Description of Artificial Sequence: Synthetic oligonucleotide
  Target: LAMA2; (-) strand; PAM type: YTN; PAM sequence: TTT
tccctttccattttctctca

SEQ ID NO: 220201 - DNA, 20 bp, Artificial Sequence
  Description of Artificial Sequence: Synthetic oligonucleotide
  Target: LAMA2; (-) strand; PAM type: YTN; PAM sequence: TTT
ttccctttccattttctctc

SEQ ID NO: 220202 - DNA, 20 bp, Artificial Sequence
  Description of Artificial Sequence: Synthetic oligonucleotide
  Target: LAMA2; (-) strand; PAM type: YTN; PAM sequence: TTT
tttccctttccattttctct

SEQ ID NO: 220203 - DNA, 20 bp, Artificial Sequence
  Description of Artificial Sequence: Synthetic oligonucleotide
  Target: LAMA2; (-) strand; PAM type: YTN; PAM sequence: CTG
taaataaaataaatattttt

SEQ ID NO: 220204 - DNA, 20 bp, Artificial Sequence
  Description of Artificial Sequence: Synthetic oligonucleotide
  Target: LAMA2; (-) strand; PAM type: YTN; PAM sequence: TTA
aaactgtaaataaaataaat

SEQ ID NO: 220205 - DNA, 20 bp, Artificial Sequence
  Description of Artificial Sequence: Synthetic oligonucleotide
  Target: LAMA2; (-) strand; PAM type: YTN; PAM sequence: TTT
aaaactgtaaataaaataaa

SEQ ID NO: 220206 - DNA, 20 bp, Artificial Sequence
  Description of Artificial Sequence: Synthetic oligonucleotide
  Target: LAMA2; (-) strand; PAM type: YTN; PAM sequence: TTT
taaaactgtaaataaaataa

SEQ ID NO: 220207 - DNA, 20 bp, Artificial Sequence
  Description of Artificial Sequence: Synthetic oligonucleotide
  Target: LAMA2; (-) strand; PAM type: YTN; PAM sequence: TTT
ttaaaactgtaaataaaata

SEQ ID NO: 220208 - DNA, 20 bp, Artificial Sequence
  Description of Artificial Sequence: Synthetic oligonucleotide
  Target: LAMA2; (-) strand; PAM type: YTN; PAM sequence: TTG
tttttaaaactgtaaataaa

SEQ ID NO: 220209 - DNA, 20 bp, Artificial Sequence
  Description of Artificial Sequence: Synthetic oligonucleotide
  Target: LAMA2; (-) strand; PAM type: YTN; PAM sequence: TTT
gtttttaaaactgtaaataa

SEQ ID NO: 220210 - DNA, 20 bp, Artificial Sequence
  Description of Artificial Sequence: Synthetic oligonucleotide
  Target: LAMA2; (-) strand; PAM type: YTN; PAM sequence: TTT
tgtttttaaaactgtaaata

SEQ ID NO: 220211 - DNA, 20 bp, Artificial Sequence
  Description of Artificial Sequence: Synthetic oligonucleotide
  Target: LAMA2; (-) strand; PAM type: YTN; PAM sequence: TTT
ttgtttttaaaactgtaaat

SEQ ID NO: 220212 - DNA, 20 bp, Artificial Sequence
  Description of Artificial Sequence: Synthetic oligonucleotide
  Target: LAMA2; (-) strand; PAM type: YTN; PAM sequence: CTG
atttttgtttttaaaactgt

SEQ ID NO: 220213 - DNA, 20 bp, Artificial Sequence
  Description of Artificial Sequence: Synthetic oligonucleotide
  Target: LAMA2; (-) strand; PAM type: YTN; PAM sequence: TTA
tcagataatatgctgatttt

SEQ ID NO: 220214 - DNA, 20 bp, Artificial Sequence
  Description of Artificial Sequence: Synthetic oligonucleotide
  Target: LAMA2; (-) strand; PAM type: YTN; PAM sequence: TTT
atcagataatatgctgattt

SEQ ID NO: 220215 - DNA, 20 bp, Artificial Sequence
  Description of Artificial Sequence: Synthetic oligonucleotide
  Target: LAMA2; (-) strand; PAM type: YTN; PAM sequence: TTT
tatcagataatatgctgatt

SEQ ID NO: 220216 - DNA, 20 bp, Artificial Sequence
  Description of Artificial Sequence: Synthetic oligonucleotide
  Target: LAMA2; (-) strand; PAM type: YTN; PAM sequence: TTC
acaaaaagcaataataattt

SEQ ID NO: 220217 - DNA, 20 bp, Artificial Sequence
  Description of Artificial Sequence: Synthetic oligonucleotide
  Target: LAMA2; (-) strand; PAM type: YTN; PAM sequence: TTA
aattcacaaaaagcaataat

SEQ ID NO: 220218 - DNA, 20 bp, Artificial Sequence
  Description of Artificial Sequence: Synthetic oligonucleotide
  Target: LAMA2; (-) strand; PAM type: YTN; PAM sequence: CTT
aaattcacaaaaagcaataa

SEQ ID NO: 220219 - DNA, 20 bp, Artificial Sequence
  Description of Artificial Sequence: Synthetic oligonucleotide
  Target: LAMA2; (-) strand; PAM type: YTN; PAM sequence: TTC
cttaaattcacaaaaagcaa

SEQ ID NO: 220220 - DNA, 20 bp, Artificial Sequence
  Description of Artificial Sequence: Synthetic oligonucleotide
  Target: LAMA2; (-) strand; PAM type: YTN; PAM sequence: TTC
agaacattccttaaattcac

SEQ ID NO: 220221 - DNA, 20 bp, Artificial Sequence
  Description of Artificial Sequence: Synthetic oligonucleotide
  Target: LAMA2; (-) strand; PAM type: YTN; PAM sequence: TTG
aagcaataattcagaacatt

SEQ ID NO: 220222 - DNA, 20 bp, Artificial Sequence
  Description of Artificial Sequence: Synthetic oligonucleotide
  Target: LAMA2; (-) strand; PAM type: YTN; PAM sequence: TTA
atattgaagcaataattcag

SEQ ID NO: 220223 - DNA, 20 bp, Artificial Sequence
  Description of Artificial Sequence: Synthetic oligonucleotide
  Target: LAMA2; (-) strand; PAM type: YTN; PAM sequence: TTT
aatattgaagcaataattca

SEQ ID NO: 220224 - DNA, 20 bp, Artificial Sequence
  Description of Artificial Sequence: Synthetic oligonucleotide
  Target: LAMA2; (-) strand; PAM type: YTN; PAM sequence: TTT
taatattgaagcaataattc

SEQ ID NO: 220225 - DNA, 20 bp, Artificial Sequence
  Description of Artificial Sequence: Synthetic oligonucleotide
  Target: LAMA2; (-) strand; PAM type: YTN; PAM sequence: TTG
ttttaatattgaagcaataa

SEQ ID NO: 220226 - DNA, 20 bp, Artificial Sequence
  Description of Artificial Sequence: Synthetic oligonucleotide
  Target: LAMA2; (-) strand; PAM type: YTN; PAM sequence: TTA
ttgttttaatattgaagcaa

SEQ ID NO: 220227 - DNA, 20 bp, Artificial Sequence
  Description of Artificial Sequence: Synthetic oligonucleotide
  Target: LAMA2; (-) strand; PAM type: YTN; PAM sequence: TTC
caataattattgttttaata

SEQ ID NO: 220228 - DNA, 20 bp, Artificial Sequence
  Description of Artificial Sequence: Synthetic oligonucleotide
  Target: LAMA2; (-) strand; PAM type: YTN; PAM sequence: TTC
ataatccatcaaaatgttcc

SEQ ID NO: 220229 - DNA, 20 bp, Artificial Sequence
  Description of Artificial Sequence: Synthetic oligonucleotide
  Target: LAMA2; (-) strand; PAM type: YTN; PAM sequence: CTT
cataatccatcaaaatgttc

SEQ ID NO: 220230 - DNA, 20 bp, Artificial Sequence
  Description of Artificial Sequence: Synthetic oligonucleotide
  Target: LAMA2; (-) strand; PAM type: YTN; PAM sequence: TTC
ttcataatccatcaaaatgt

SEQ ID NO: 220231 - DNA, 20 bp, Artificial Sequence
  Description of Artificial Sequence: Synthetic oligonucleotide
  Target: LAMA2; (-) strand; PAM type: YTN; PAM sequence: TTT
cttcataatccatcaaaatg

SEQ ID NO: 220232 - DNA, 20 bp, Artificial Sequence
  Description of Artificial Sequence: Synthetic oligonucleotide
  Target: LAMA2; (-) strand; PAM type: YTN; PAM sequence: CTT
tcttcataatccatcaaaat

SEQ ID NO: 220233 - DNA, 20 bp, Artificial Sequence
  Description of Artificial Sequence: Synthetic oligonucleotide
  Target: LAMA2; (-) strand; PAM type: YTN; PAM sequence: TTC
tttcttcataatccatcaaa

SEQ ID NO: 220234 - DNA, 20 bp, Artificial Sequence
  Description of Artificial Sequence: Synthetic oligonucleotide
  Target: LAMA2; (-) strand; PAM type: YTN; PAM sequence: TTA
catattctttcttcataatc

SEQ ID NO: 220235 - DNA, 20 bp, Artificial Sequence
  Description of Artificial Sequence: Synthetic oligonucleotide
  Target: LAMA2; (-) strand; PAM type: YTN; PAM sequence: TTT
acatattctttcttcataat

SEQ ID NO: 220236 - DNA, 20 bp, Artificial Sequence
  Description of Artificial Sequence: Synthetic oligonucleotide
  Target: LAMA2; (-) strand; PAM type: YTN; PAM sequence: TTT
tacatattctttcttcataa

SEQ ID NO: 220237 - DNA, 20 bp, Artificial Sequence
  Description of Artificial Sequence: Synthetic oligonucleotide
  Target: LAMA2; (-) strand; PAM type: YTN; PAM sequence: TTC
cacacgatcccaattttaca

SEQ ID NO: 220238 - DNA, 20 bp, Artificial Sequence
  Description of Artificial Sequence: Synthetic oligonucleotide
  Target: LAMA2; (-) strand; PAM type: YTN; PAM sequence: TTT
ccacacgatcccaattttac

SEQ ID NO: 220239 - DNA, 20 bp, Artificial Sequence
  Description of Artificial Sequence: Synthetic oligonucleotide
  Target: LAMA2; (-) strand; PAM type: YTN; PAM sequence: TTT
tccacacgatcccaatttta

SEQ ID NO: 220240 - DNA, 20 bp, Artificial Sequence
  Description of Artificial Sequence: Synthetic oligonucleotide
  Target: LAMA2; (-) strand; PAM type: YTN; PAM sequence: TTC
atgcataccagattttccac

SEQ ID NO: 220241 - DNA, 20 bp, Artificial Sequence
  Description of Artificial Sequence: Synthetic oligonucleotide
  Target: LAMA2; (-) strand; PAM type: YTN; PAM sequence: TTT
catgcataccagattttcca

SEQ ID NO: 220242 - DNA, 20 bp, Artificial Sequence
  Description of Artificial Sequence: Synthetic oligonucleotide
  Target: LAMA2; (-) strand; PAM type: YTN; PAM sequence: TTA
tatgccaatttcatgcatac

SEQ ID NO: 220243 - DNA, 20 bp, Artificial Sequence
  Description of Artificial Sequence: Synthetic oligonucleotide
  Target: LAMA2; (-) strand; PAM type: YTN; PAM sequence: TTT
atatgccaatttcatgcata

SEQ ID NO: 220244 - DNA, 20 bp, Artificial Sequence
  Description of Artificial Sequence: Synthetic oligonucleotide
  Target: LAMA2; (-) strand; PAM type: YTN; PAM sequence: CTT
tatatgccaatttcatgcat

SEQ ID NO: 220245 - DNA, 20 bp, Artificial Sequence
  Description of Artificial Sequence: Synthetic oligonucleotide
  Target: LAMA2; (-) strand; PAM type: YTN; PAM sequence: CTA
ctttatatgccaatttcatg

SEQ ID NO: 220246 - DNA, 20 bp, Artificial Sequence
  Description of Artificial Sequence: Synthetic oligonucleotide
  Target: LAMA2; (-) strand; PAM type: YTN; PAM sequence: TTA
ggcctactttatatgccaat

SEQ ID NO: 220247 - DNA, 20 bp, Artificial Sequence
  Description of Artificial Sequence: Synthetic oligonucleotide
  Target: LAMA2; (-) strand; PAM type: YTN; PAM sequence: TTT
aggcctactttatatgccaa

SEQ ID NO: 220248 - DNA, 20 bp, Artificial Sequence
  Description of Artificial Sequence: Synthetic oligonucleotide
  Target: LAMA2; (-) strand; PAM type: YTN; PAM sequence: TTG
tttaggcctactttatatgc

SEQ ID NO: 220249 - DNA, 20 bp, Artificial Sequence
  Description of Artificial Sequence: Synthetic oligonucleotide
  Target: LAMA2; (-) strand; PAM type: YTN; PAM sequence: TTT
gtttaggcctactttatatg

SEQ ID NO: 220250 - DNA, 20 bp, Artificial Sequence
  Description of Artificial Sequence: Synthetic oligonucleotide
  Target: LAMA2; (-) strand; PAM type: YTN; PAM sequence: CTT
tgtttaggcctactttatat

SEQ ID NO: 220251 - DNA, 20 bp, Artificial Sequence
  Description of Artificial Sequence: Synthetic oligonucleotide
  Target: LAMA2; (-) strand; PAM type: YTN; PAM sequence: CTG
ctttgtttaggcctacttta

SEQ ID NO: 220252 - DNA, 20 bp, Artificial Sequence
  Description of Artificial Sequence: Synthetic oligonucleotide
  Target: LAMA2; (-) strand; PAM type: YTN; PAM sequence: CTA
agaatagcacctgctttgtt

SEQ ID NO: 220253 - DNA, 20 bp, Artificial Sequence
  Description of Artificial Sequence: Synthetic oligonucleotide
  Target: LAMA2; (-) strand; PAM type: YTN; PAM sequence: TTA
ctaagaatagcacctgcttt

SEQ ID NO: 220254 - DNA, 20 bp, Artificial Sequence
  Description of Artificial Sequence: Synthetic oligonucleotide
  Target: LAMA2; (-) strand; PAM type: YTN; PAM sequence: CTT
actaagaatagcacctgctt

SEQ ID NO: 220255 - DNA, 20 bp, Artificial Sequence
  Description of Artificial Sequence: Synthetic oligonucleotide
  Target: LAMA2; (-) strand; PAM type: YTN; PAM sequence: TTC
ttactaagaatagcacctgc

SEQ ID NO: 220256 - DNA, 20 bp, Artificial Sequence
  Description of Artificial Sequence: Synthetic oligonucleotide
  Target: LAMA2; (-) strand; PAM type: YTN; PAM sequence: CTT
cttactaagaatagcacctg

SEQ ID NO: 220257 - DNA, 20 bp, Artificial Sequence
  Description of Artificial Sequence: Synthetic oligonucleotide
  Target: LAMA2; (-) strand; PAM type: YTN; PAM sequence: TTC
agggcagatatgccataagg

SEQ ID NO: 220258 - DNA, 20 bp, Artificial Sequence
  Description of Artificial Sequence: Synthetic oligonucleotide
  Target: LAMA2; (-) strand; PAM type: YTN; PAM sequence: TTA
ttcagggcagatatgccata

SEQ ID NO: 220259 - DNA, 20 bp, Artificial Sequence
  Description of Artificial Sequence: Synthetic oligonucleotide
  Target: LAMA2; (-) strand; PAM type: YTN; PAM sequence: TTA
tgtattattcagggcagata

SEQ ID NO: 220260 - DNA, 20 bp, Artificial Sequence
  Description of Artificial Sequence: Synthetic oligonucleotide
  Target: LAMA2; (-) strand; PAM type: YTN; PAM sequence: TTT
atgtattattcagggcagat

SEQ ID NO: 220261 - DNA, 20 bp, Artificial Sequence
  Description of Artificial Sequence: Synthetic oligonucleotide
  Target: LAMA2; (-) strand; PAM type: YTN; PAM sequence: CTT
tatgtattattcagggcaga

SEQ ID NO: 220262 - DNA, 20 bp, Artificial Sequence
  Description of Artificial Sequence: Synthetic oligonucleotide
  Target: LAMA2; (-) strand; PAM type: YTN; PAM sequence: TTC
tttatgtattattcagggca

SEQ ID NO: 220263 - DNA, 20 bp, Artificial Sequence
  Description of Artificial Sequence: Synthetic oligonucleotide
  Target: LAMA2; (-) strand; PAM type: YTN; PAM sequence: TTT
ctttatgtattattcagggc

SEQ ID NO: 220264 - DNA, 20 bp, Artificial Sequence
  Description of Artificial Sequence: Synthetic oligonucleotide
  Target: LAMA2; (-) strand; PAM type: YTN; PAM sequence: TTT
tctttatgtattattcaggg

SEQ ID NO: 220265 - DNA, 20 bp, Artificial Sequence
  Description of Artificial Sequence: Synthetic oligonucleotide
  Target: LAMA2; (-) strand; PAM type: YTN; PAM sequence: TTA
ttttctttatgtattattca

SEQ ID NO: 220266 - DNA, 20 bp, Artificial Sequence
  Description of Artificial Sequence: Synthetic oligonucleotide
  Target: LAMA2; (-) strand; PAM type: YTN; PAM sequence: TTA
aattattttctttatgtatt

SEQ ID NO: 220267 - DNA, 20 bp, Artificial Sequence
  Description of Artificial Sequence: Synthetic oligonucleotide
  Target: LAMA2; (-) strand; PAM type: YTN; PAM sequence: TTG
ttaaattattttctttatgt

SEQ ID NO: 220268 - DNA, 20 bp, Artificial Sequence
  Description of Artificial Sequence: Synthetic oligonucleotide
  Target: LAMA2; (-) strand; PAM type: YTN; PAM sequence: TTC
aaacgcatattgttaaatta

SEQ ID NO: 220269 - DNA, 20 bp, Artificial Sequence
  Description of Artificial Sequence: Synthetic oligonucleotide
  Target: LAMA2; (-) strand; PAM type: YTN; PAM sequence: TTT
caaacgcatattgttaaatt

SEQ ID NO: 220270 - DNA, 20 bp, Artificial Sequence
  Description of Artificial Sequence: Synthetic oligonucleotide
  Target: LAMA2; (-) strand; PAM type: YTN; PAM sequence: TTT
tcaaacgcatattgttaaat

SEQ ID NO: 220271 - DNA, 20 bp, Artificial Sequence
  Description of Artificial Sequence: Synthetic oligonucleotide
  Target: LAMA2; (-) strand; PAM type: YTN; PAM sequence: TTT
ttcaaacgcatattgttaaa

SEQ ID NO: 220272 - DNA, 20 bp, Artificial Sequence
  Description of Artificial Sequence: Synthetic oligonucleotide
  Target: LAMA2; (-) strand; PAM type: YTN; PAM sequence: CTC
aacaaatatttttcaaacgc

SEQ ID NO: 220273 - DNA, 20 bp, Artificial Sequence
  Description of Artificial Sequence: Synthetic oligonucleotide
  Target: LAMA2; (-) strand; PAM type: YTN; PAM sequence: TTG
ctcaacaaatatttttcaaa

SEQ ID NO: 220274 - DNA, 20 bp, Artificial Sequence
  Description of Artificial Sequence: Synthetic oligonucleotide
  Target: LAMA2; (-) strand; PAM type: YTN; PAM sequence: TTA
aaaaacagtagttgctcaac

SEQ ID NO: 220275 - DNA, 20 bp, Artificial Sequence
  Description of Artificial Sequence: Synthetic oligonucleotide
  Target: LAMA2; (-) strand; PAM type: YTN; PAM sequence: CTT
aaaaaacagtagttgctcaa

SEQ ID NO: 220276 - DNA, 20 bp, Artificial Sequence
  Description of Artificial Sequence: Synthetic oligonucleotide
  Target: LAMA2; (-) strand; PAM type: YTN; PAM sequence: CTG
cttaaaaaacagtagttgct

SEQ ID NO: 220277 - DNA, 20 bp, Artificial Sequence
  Description of Artificial Sequence: Synthetic oligonucleotide
  Target: LAMA2; (-) strand; PAM type: YTN; PAM sequence: TTA
gaacactgcttaaaaaacag

SEQ ID NO: 220278 - DNA, 20 bp, Artificial Sequence
  Description of Artificial Sequence: Synthetic oligonucleotide
  Target: LAMA2; (-) strand; PAM type: YTN; PAM sequence: CTT
agaacactgcttaaaaaaca

SEQ ID NO: 220279 - DNA, 20 bp, Artificial Sequence
  Description of Artificial Sequence: Synthetic oligonucleotide
  Target: LAMA2; (-) strand; PAM type: YTN; PAM sequence: CTA
caggcttagaacactgctta

SEQ ID NO: 220280 - DNA, 20 bp, Artificial Sequence
  Description of Artificial Sequence: Synthetic oligonucleotide
  Target: LAMA2; (-) strand; PAM type: YTN; PAM sequence: TTC
atggacagacctacaggctt

SEQ ID NO: 220281 - DNA, 20 bp, Artificial Sequence
  Description of Artificial Sequence: Synthetic oligonucleotide
  Target: LAMA2; (-) strand; PAM type: YTN; PAM sequence: CTT
catggacagacctacaggct

SEQ ID NO: 220282 - DNA, 20 bp, Artificial Sequence
  Description of Artificial Sequence: Synthetic oligonucleotide
  Target: LAMA2; (-) strand; PAM type: YTN; PAM sequence: CTC
cttcatggacagacctacag

SEQ ID NO: 220283 - DNA, 20 bp, Artificial Sequence
  Description of Artificial Sequence: Synthetic oligonucleotide
  Target: LAMA2; (-) strand; PAM type: YTN; PAM sequence: CTG
tctccttcatggacagacct

SEQ ID NO: 220284 - DNA, 20 bp, Artificial Sequence
  Description of Artificial Sequence: Synthetic oligonucleotide
  Target: LAMA2; (-) strand; PAM type: YTN; PAM sequence: CTC
ctgtctccttcatggacaga

SEQ ID NO: 220285 - DNA, 20 bp, Artificial Sequence
  Description of Artificial Sequence: Synthetic oligonucleotide
  Target: LAMA2; (-) strand; PAM type: YTN; PAM sequence: CTG
gaatgcaaggactcctgtct

SEQ ID NO: 220286 - DNA, 20 bp, Artificial Sequence
  Description of Artificial Sequence: Synthetic oligonucleotide
  Target: LAMA2; (-) strand; PAM type: YTN; PAM sequence: TTG
aaaaccctggaatgcaagga

SEQ ID NO: 220287 - DNA, 20 bp, Artificial Sequence
  Description of Artificial Sequence: Synthetic oligonucleotide
  Target: LAMA2; (-) strand; PAM type: YTN; PAM sequence: CTT
gaaaaccctggaatgcaagg

SEQ ID NO: 220288 - DNA, 20 bp, Artificial Sequence
  Description of Artificial Sequence: Synthetic oligonucleotide
  Target: LAMA2; (-) strand; PAM type: YTN; PAM sequence: TTA
cttgaaaaccctggaatgca

SEQ ID NO: 220289 - DNA, 20 bp, Artificial Sequence
  Description of Artificial Sequence: Synthetic oligonucleotide
  Target: LAMA2; (-) strand; PAM type: YTN; PAM sequence: TTT
acttgaaaaccctggaatgc

SEQ ID NO: 220290 - DNA, 20 bp, Artificial Sequence
  Description of Artificial Sequence: Synthetic oligonucleotide
  Target: LAMA2; (-) strand; PAM type: YTN; PAM sequence: TTG
tttacttgaaaaccctggaa

SEQ ID NO: 220291 - DNA, 20 bp, Artificial Sequence
  Description of Artificial Sequence: Synthetic oligonucleotide
  Target: LAMA2; (-) strand; PAM type: YTN; PAM sequence: CTA
aattgtttacttgaaaaccc

SEQ ID NO: 220292 - DNA, 20 bp, Artificial Sequence
  Description of Artificial Sequence: Synthetic oligonucleotide
  Target: LAMA2; (-) strand; PAM type: YTN; PAM sequence: TTC
taaattgtttacttgaaaac

SEQ ID NO: 220293 - DNA, 20 bp, Artificial Sequence
  Description of Artificial Sequence: Synthetic oligonucleotide
  Target: LAMA2; (-) strand; PAM type: YTN; PAM sequence: CTA
ttctaaattgtttacttgaa

SEQ ID NO: 220294 - DNA, 20 bp, Artificial Sequence
  Description of Artificial Sequence: Synthetic oligonucleotide
  Target: LAMA2; (-) strand; PAM type: YTN; PAM sequence: TTG
cactattctaaattgtttac

SEQ ID NO: 220295 - DNA, 20 bp, Artificial Sequence
  Description of Artificial Sequence: Synthetic oligonucleotide
  Target: LAMA2; (-) strand; PAM type: YTN; PAM sequence: CTT
gcactattctaaattgttta

SEQ ID NO: 220296 - DNA, 20 bp, Artificial Sequence
  Description of Artificial Sequence: Synthetic oligonucleotide
  Target: LAMA2; (-) strand; PAM type: YTN; PAM sequence: TTC
atgaacttgcactattctaa

SEQ ID NO: 220297 - DNA, 20 bp, Artificial Sequence
  Description of Artificial Sequence: Synthetic oligonucleotide
  Target: LAMA2; (-) strand; PAM type: YTN; PAM sequence: TTT
catgaacttgcactattcta

SEQ ID NO: 220298 - DNA, 20 bp, Artificial Sequence
  Description of Artificial Sequence: Synthetic oligonucleotide
  Target: LAMA2; (-) strand; PAM type: YTN; PAM sequence: TTT
tcatgaacttgcactattct

SEQ ID NO: 220299 - DNA, 20 bp, Artificial Sequence
  Description of Artificial Sequence: Synthetic oligonucleotide
  Target: LAMA2; (-) strand; PAM type: YTN; PAM sequence: TTT
ttcatgaacttgcactattc

SEQ ID NO: 220300 - DNA, 20 bp, Artificial Sequence
  Description of Artificial Sequence: Synthetic oligonucleotide
  Target: LAMA2; (-) strand; PAM type: YTN; PAM sequence: TTT
tttcatgaacttgcactatt

SEQ ID NO: 220301 - DNA, 20 bp, Artificial Sequence
  Description of Artificial Sequence: Synthetic oligonucleotide
  Target: LAMA2; (-) strand; PAM type: YTN; PAM sequence: TTT
ttttcatgaacttgcactat

SEQ ID NO: 220302 - DNA, 20 bp, Artificial Sequence
  Description of Artificial Sequence: Synthetic oligonucleotide
  Target: LAMA2; (-) strand; PAM type: YTN; PAM sequence: TTT
tttttcatgaacttgcacta

SEQ ID NO: 220303 - DNA, 20 bp, Artificial Sequence
  Description of Artificial Sequence: Synthetic oligonucleotide
  Target: LAMA2; (-) strand; PAM type: YTN; PAM sequence: TTT
ttttttcatgaacttgcact

SEQ ID NO: 220304 - DNA, 20 bp, Artificial Sequence
  Description of Artificial Sequence: Synthetic oligonucleotide
  Target: LAMA2; (-) strand; PAM type: YTN; PAM sequence: CTT
tttttttcatgaacttgcac

SEQ ID NO: 220305 - DNA, 20 bp, Artificial Sequence
  Description of Artificial Sequence: Synthetic oligonucleotide
  Target: LAMA2; (-) strand; PAM type: YTN; PAM sequence: TTA
tgctttttttttcatgaact

SEQ ID NO: 220306 - DNA, 20 bp, Artificial Sequence
  Description of Artificial Sequence: Synthetic oligonucleotide
  Target: LAMA2; (-) strand; PAM type: YTN; PAM sequence: CTT
atgctttttttttcatgaac

SEQ ID NO: 220307 - DNA, 20 bp, Artificial Sequence
  Description of Artificial Sequence: Synthetic oligonucleotide
  Target: LAMA2; (-) strand; PAM type: YTN; PAM sequence: TTA
taatcttatgcttttttttt

SEQ ID NO: 220308 - DNA, 20 bp, Artificial Sequence
  Description of Artificial Sequence: Synthetic oligonucleotide
  Target: LAMA2; (-) strand; PAM type: YTN; PAM sequence: TTA
ttataatcttatgctttttt

SEQ ID NO: 220309 - DNA, 20 bp, Artificial Sequence
  Description of Artificial Sequence: Synthetic oligonucleotide
  Target: LAMA2; (-) strand; PAM type: YTN; PAM sequence: CTT
attataatcttatgcttttt

SEQ ID NO: 220310 - DNA, 20 bp, Artificial Sequence
  Description of Artificial Sequence: Synthetic oligonucleotide
  Target: LAMA2; (-) strand; PAM type: YTN; PAM sequence: CTA
taatcttattataatcttat

SEQ ID NO: 220311 - DNA, 20 bp, Artificial Sequence
  Description of Artificial Sequence: Synthetic oligonucleotide
  Target: LAMA2; (-) strand; PAM type: YTN; PAM sequence: TTC
atcaccgtctataatcttat

SEQ ID NO: 220312 - DNA, 20 bp, Artificial Sequence
  Description of Artificial Sequence: Synthetic oligonucleotide
  Target: LAMA2; (-) strand; PAM type: YTN; PAM sequence: TTT
catcaccgtctataatctta

SEQ ID NO: 220313 - DNA, 20 bp, Artificial Sequence
  Description of Artificial Sequence: Synthetic oligonucleotide
  Target: LAMA2; (-) strand; PAM type: YTN; PAM sequence: CTT
tcatcaccgtctataatctt

SEQ ID NO: 220314 - DNA, 20 bp, Artificial Sequence
  Description of Artificial Sequence: Synthetic oligonucleotide
  Target: LAMA2; (-) strand; PAM type: YTN; PAM sequence: CTC
tttcatcaccgtctataatc

SEQ ID NO: 220315 - DNA, 20 bp, Artificial Sequence
  Description of Artificial Sequence: Synthetic oligonucleotide
  Target: LAMA2; (-) strand; PAM type: YTN; PAM sequence: TTA
gctctttcatcaccgtctat

SEQ ID NO: 220316 - DNA, 20 bp, Artificial Sequence
  Description of Artificial Sequence: Synthetic oligonucleotide
  Target: LAMA2; (-) strand; PAM type: YTN; PAM sequence: CTG
aaaaatgcatacatagaaca

SEQ ID NO: 220317 - DNA, 20 bp, Artificial Sequence
  Description of Artificial Sequence: Synthetic oligonucleotide
  Target: LAMA2; (-) strand; PAM type: YTN; PAM sequence: TTC
ctgaaaaatgcatacataga

SEQ ID NO: 220318 - DNA, 20 bp, Artificial Sequence
  Description of Artificial Sequence: Synthetic oligonucleotide
  Target: LAMA2; (-) strand; PAM type: YTN; PAM sequence: CTT
cctgaaaaatgcatacatag

SEQ ID NO: 220319 - DNA, 20 bp, Artificial Sequence
  Description of Artificial Sequence: Synthetic oligonucleotide
  Target: LAMA2; (-) strand; PAM type: YTN; PAM sequence: CTC
aaatatcacttcctgaaaaa

SEQ ID NO: 220320 - DNA, 20 bp, Artificial Sequence
  Description of Artificial Sequence: Synthetic oligonucleotide
  Target: LAMA2; (-) strand; PAM type: YTN; PAM sequence: CTC
agctcaaatatcacttcctg

SEQ ID NO: 220321 - DNA, 20 bp, Artificial Sequence
  Description of Artificial Sequence: Synthetic oligonucleotide
  Target: LAMA2; (-) strand; PAM type: YTN; PAM sequence: TTC
tcagctcaaatatcacttcc

SEQ ID NO: 220322 - DNA, 20 bp, Artificial Sequence
  Description of Artificial Sequence: Synthetic oligonucleotide
  Target: LAMA2; (-) strand; PAM type: YTN; PAM sequence: TTA
attctcagctcaaatatcac

SEQ ID NO: 220323 - DNA, 20 bp, Artificial Sequence
  Description of Artificial Sequence: Synthetic oligonucleotide
  Target: LAMA2; (-) strand; PAM type: YTN; PAM sequence: TTT
aattctcagctcaaatatca

SEQ ID NO: 220324 - DNA, 20 bp, Artificial Sequence
  Description of Artificial Sequence: Synthetic oligonucleotide
  Target: LAMA2; (-) strand; PAM type: YTN; PAM sequence: TTT
taattctcagctcaaatatc

SEQ ID NO: 220325 - DNA, 20 bp, Artificial Sequence
  Description of Artificial Sequence: Synthetic oligonucleotide
  Target: LAMA2; (-) strand; PAM type: YTN; PAM sequence: TTT
ttaattctcagctcaaatat

SEQ ID NO: 220326 - DNA, 20 bp, Artificial Sequence
  Description of Artificial Sequence: Synthetic oligonucleotide
  Target: LAMA2; (-) strand; PAM type: YTN; PAM sequence: CTG
gtttttaattctcagctcaa

SEQ ID NO: 220327 - DNA, 20 bp, Artificial Sequence
  Description of Artificial Sequence: Synthetic oligonucleotide
  Target: LAMA2; (-) strand; PAM type: YTN; PAM sequence: TTC
tggtttttaattctcagctc

SEQ ID NO: 220328 - DNA, 20 bp, Artificial Sequence
  Description of Artificial Sequence: Synthetic oligonucleotide
  Target: LAMA2; (-) strand; PAM type: YTN; PAM sequence: TTT
ctggtttttaattctcagct

SEQ ID NO: 220329 - DNA, 20 bp, Artificial Sequence
  Description of Artificial Sequence: Synthetic oligonucleotide
  Target: LAMA2; (-) strand; PAM type: YTN; PAM sequence: TTT
tctggtttttaattctcagc

SEQ ID NO: 220330 - DNA, 20 bp, Artificial Sequence
  Description of Artificial Sequence: Synthetic oligonucleotide
  Target: LAMA2; (-) strand; PAM type: YTN; PAM sequence: CTG
gtattttctggtttttaatt

SEQ ID NO: 220331 - DNA, 20 bp, Artificial Sequence
  Description of Artificial Sequence: Synthetic oligonucleotide
  Target: LAMA2; (-) strand; PAM type: YTN; PAM sequence: CTA
tgactggtattttctggttt

SEQ ID NO: 220332 - DNA, 20 bp, Artificial Sequence
  Description of Artificial Sequence: Synthetic oligonucleotide
  Target: LAMA2; (-) strand; PAM type: YTN; PAM sequence: TTC
tatgactggtattttctggt

SEQ ID NO: 220333 - DNA, 20 bp, Artificial Sequence
  Description of Artificial Sequence: Synthetic oligonucleotide
  Target: LAMA2; (-) strand; PAM type: YTN; PAM sequence: TTT
ctatgactggtattttctgg

SEQ ID NO: 220334 - DNA, 20 bp, Artificial Sequence
  Description of Artificial Sequence: Synthetic oligonucleotide
  Target: LAMA2; (-) strand; PAM type: YTN; PAM sequence: TTT
tctatgactggtattttctg

SEQ ID NO: 220335 - DNA, 20 bp, Artificial Sequence
  Description of Artificial Sequence: Synthetic oligonucleotide
  Target: LAMA2; (-) strand; PAM type: YTN; PAM sequence: TTT
ttctatgactggtattttct

SEQ ID NO: 220336 - DNA, 20 bp, Artificial Sequence
  Description of Artificial Sequence: Synthetic oligonucleotide
  Target: LAMA2; (-) strand; PAM type: YTN; PAM sequence: CTA
cccagatttttctatgactg

SEQ ID NO: 220337 - DNA, 20 bp, Artificial Sequence
  Description of Artificial Sequence: Synthetic oligonucleotide
  Target: LAMA2; (-) strand; PAM type: YTN; PAM sequence: CTC
tacccagatttttctatgac

SEQ ID NO: 220338 - DNA, 20 bp, Artificial Sequence
  Description of Artificial Sequence: Synthetic oligonucleotide
  Target: LAMA2; (-) strand; PAM type: YTN; PAM sequence: CTG
gtaataaactctacccagat

SEQ ID NO: 220339 - DNA, 20 bp, Artificial Sequence
  Description of Artificial Sequence: Synthetic oligonucleotide
  Target: LAMA2; (-) strand; PAM type: YTN; PAM sequence: CTG
ctggtaataaactctaccca

SEQ ID NO: 220340 - DNA, 20 bp, Artificial Sequence
  Description of Artificial Sequence: Synthetic oligonucleotide
  Target: LAMA2; (-) strand; PAM type: YTN; PAM sequence: TTC
ctgctggtaataaactctac

SEQ ID NO: 220341 - DNA, 20 bp, Artificial Sequence
  Description of Artificial Sequence: Synthetic oligonucleotide
  Target: LAMA2; (-) strand; PAM type: YTN; PAM sequence: TTA
ttcctgctggtaataaactc

SEQ ID NO: 220342 - DNA, 20 bp, Artificial Sequence
  Description of Artificial Sequence: Synthetic oligonucleotide
  Target: LAMA2; (-) strand; PAM type: YTN; PAM sequence: TTT
attcctgctggtaataaact

SEQ ID NO: 220343 - DNA, 20 bp, Artificial Sequence
  Description of Artificial Sequence: Synthetic oligonucleotide
  Target: LAMA2; (-) strand; PAM type: YTN; PAM sequence: CTC
agcaccccacatttattcct

SEQ ID NO: 220344 - DNA, 20 bp, Artificial Sequence
  Description of Artificial Sequence: Synthetic oligonucleotide
  Target: LAMA2; (-) strand; PAM type: YTN; PAM sequence: TTC
ctcagcaccccacatttatt

SEQ ID NO: 220345 - DNA, 20 bp, Artificial Sequence
  Description of Artificial Sequence: Synthetic oligonucleotide
  Target: LAMA2; (-) strand; PAM type: YTN; PAM sequence: TTT
cctcagcaccccacatttat

SEQ ID NO: 220346 - DNA, 20 bp, Artificial Sequence
  Description of Artificial Sequence: Synthetic oligonucleotide
  Target: LAMA2; (-) strand; PAM type: YTN; PAM sequence: CTT
tcctcagcaccccacattta

SEQ ID NO: 220347 - DNA, 20 bp, Artificial Sequence
  Description of Artificial Sequence: Synthetic oligonucleotide
  Target: LAMA2; (-) strand; PAM type: YTN; PAM sequence: TTC
ctttcctcagcaccccacat

SEQ ID NO: 220348 - DNA, 20 bp, Artificial Sequence
  Description of Artificial Sequence: Synthetic oligonucleotide
  Target: LAMA2; (-) strand; PAM type: YTN; PAM sequence: TTT
cctttcctcagcaccccaca

SEQ ID NO: 220349 - DNA, 20 bp, Artificial Sequence
  Description of Artificial Sequence: Synthetic oligonucleotide
  Target: LAMA2; (-) strand; PAM type: YTN; PAM sequence: CTT
tcctttcctcagcaccccac

SEQ ID NO: 220350 - DNA, 20 bp, Artificial Sequence
  Description of Artificial Sequence: Synthetic oligonucleotide
  Target: LAMA2; (-) strand; PAM type: YTN; PAM sequence: TTC
tttcctttcctcagcacccc

SEQ ID NO: 220351 - DNA, 20 bp, Artificial Sequence
  Description of Artificial Sequence: Synthetic oligonucleotide
  Target: LAMA2; (-) strand; PAM type: YTN; PAM sequence: CTT
ctttcctttcctcagcaccc

SEQ ID NO: 220352 - DNA, 20 bp, Artificial Sequence
  Description of Artificial Sequence: Synthetic oligonucleotide
  Target: LAMA2; (-) strand; PAM type: YTN; PAM sequence: TTG
gccttctttcctttcctcag

SEQ ID NO: 220353 - DNA, 20 bp, Artificial Sequence
  Description of Artificial Sequence: Synthetic oligonucleotide
  Target: LAMA2; (-) strand; PAM type: YTN; PAM sequence: TTC
cagccacattggccttcttt

SEQ ID NO: 220354 - DNA, 20 bp, Artificial Sequence
  Description of Artificial Sequence: Synthetic oligonucleotide
  Target: LAMA2; (-) strand; PAM type: YTN; PAM sequence: CTA
ggttccagccacattggcct

SEQ ID NO: 220355 - DNA, 20 bp, Artificial Sequence
  Description of Artificial Sequence: Synthetic oligonucleotide
  Target: LAMA2; (-) strand; PAM type: YTN; PAM sequence: TTG
atcactaggttccagccaca

SEQ ID NO: 220356 - DNA, 20 bp, Artificial Sequence
  Description of Artificial Sequence: Synthetic oligonucleotide
  Target: LAMA2; (-) strand; PAM type: YTN; PAM sequence: CTT
gatcactaggttccagccac

SEQ ID NO: 220357 - DNA, 20 bp, Artificial Sequence
  Description of Artificial Sequence: Synthetic oligonucleotide
  Target: LAMA2; (-) strand; PAM type: YTN; PAM sequence: CTC
ttgatcactaggttccagcc

SEQ ID NO: 220358 - DNA, 20 bp, Artificial Sequence
  Description of Artificial Sequence: Synthetic oligonucleotide
  Target: LAMA2; (-) strand; PAM type: YTN; PAM sequence: TTG
ctcttgatcactaggttcca

SEQ ID NO: 220359 - DNA, 20 bp, Artificial Sequence
  Description of Artificial Sequence: Synthetic oligonucleotide
  Target: LAMA2; (-) strand; PAM type: YTN; PAM sequence: TTT
gctcttgatcactaggttcc

SEQ ID NO: 220360 - DNA, 20 bp, Artificial Sequence
  Description of Artificial Sequence: Synthetic oligonucleotide
  Target: LAMA2; (-) strand; PAM type: YTN; PAM sequence: CTT
tgctcttgatcactaggttc

SEQ ID NO: 220361 - DNA, 20 bp, Artificial Sequence
  Description of Artificial Sequence: Synthetic oligonucleotide
  Target: LAMA2; (-) strand; PAM type: YTN; PAM sequence: CTC
atgccacctttgctcttgat

SEQ ID NO: 220362 - DNA, 20 bp, Artificial Sequence
  Description of Artificial Sequence: Synthetic oligonucleotide
  Target: LAMA2; (-) strand; PAM type: YTN; PAM sequence: CTC
cgtgacagcatctcatgcca

SEQ ID NO: 220363 - DNA, 20 bp, Artificial Sequence
  Description of Artificial Sequence: Synthetic oligonucleotide
  Target: LAMA2; (-) strand; PAM type: YTN; PAM sequence: CTG
gagacctccgtgacagcatc

SEQ ID NO: 220364 - DNA, 20 bp, Artificial Sequence
  Description of Artificial Sequence: Synthetic oligonucleotide
  Target: LAMA2; (-) strand; PAM type: YTN; PAM sequence: CTA
agaagacctggagacctccg

SEQ ID NO: 220365 - DNA, 20 bp, Artificial Sequence
  Description of Artificial Sequence: Synthetic oligonucleotide
  Target: LAMA2; (-) strand; PAM type: YTN; PAM sequence: TTC
aggagctaagaagacctgga

SEQ ID NO: 220366 - DNA, 20 bp, Artificial Sequence
  Description of Artificial Sequence: Synthetic oligonucleotide
  Target: LAMA2; (-) strand; PAM type: YTN; PAM sequence: CTT
caggagctaagaagacctgg

SEQ ID NO: 220367 - DNA, 20 bp, Artificial Sequence
  Description of Artificial Sequence: Synthetic oligonucleotide
  Target: LAMA2; (-) strand; PAM type: YTN; PAM sequence: CTC
ccttcaggagctaagaagac

SEQ ID NO: 220368 - DNA, 20 bp, Artificial Sequence
  Description of Artificial Sequence: Synthetic oligonucleotide
  Target: LAMA2; (-) strand; PAM type: YTN; PAM sequence: CTA
ctcccttcaggagctaagaa

SEQ ID NO: 220369 - DNA, 20 bp, Artificial Sequence
  Description of Artificial Sequence: Synthetic oligonucleotide
  Target: LAMA2; (-) strand; PAM type: YTN; PAM sequence: CTG
actactcccttcaggagcta

SEQ ID NO: 220370 - DNA, 20 bp, Artificial Sequence
  Description of Artificial Sequence: Synthetic oligonucleotide
  Target: LAMA2; (-) strand; PAM type: YTN; PAM sequence: TTA
tcatgactgactactccctt

SEQ ID NO: 220371 - DNA, 20 bp, Artificial Sequence
  Description of Artificial Sequence: Synthetic oligonucleotide
  Target: LAMA2; (-) strand; PAM type: YTN; PAM sequence: TTT
atcatgactgactactccct

SEQ ID NO: 220372 - DNA, 20 bp, Artificial Sequence
  Description of Artificial Sequence: Synthetic oligonucleotide
  Target: LAMA2; (-) strand; PAM type: YTN; PAM sequence: CTG
tttatcatgactgactactc

SEQ ID NO: 220373 - DNA, 20 bp, Artificial Sequence
  Description of Artificial Sequence: Synthetic oligonucleotide
  Target: LAMA2; (-) strand; PAM type: YTN; PAM sequence: TTC
aatataaactgtttatcatg

SEQ ID NO: 220374 - DNA, 20 bp, Artificial Sequence
  Description of Artificial Sequence: Synthetic oligonucleotide
  Target: LAMA2; (-) strand; PAM type: YTN; PAM sequence: TTA
tacccagaattcaatataaa

SEQ ID NO: 220375 - DNA, 20 bp, Artificial Sequence
  Description of Artificial Sequence: Synthetic oligonucleotide
  Target: LAMA2; (-) strand; PAM type: YTN; PAM sequence: CTC
attatacccagaattcaata

SEQ ID NO: 220376 - DNA, 20 bp, Artificial Sequence
  Description of Artificial Sequence: Synthetic oligonucleotide
  Target: LAMA2; (-) strand; PAM type: YTN; PAM sequence: TTC
tcattatacccagaattcaa

SEQ ID NO: 220377 - DNA, 20 bp, Artificial Sequence
  Description of Artificial Sequence: Synthetic oligonucleotide
  Target: LAMA2; (-) strand; PAM type: YTN; PAM sequence: TTT
ctcattatacccagaattca

SEQ ID NO: 220378 - DNA, 20 bp, Artificial Sequence
  Description of Artificial Sequence: Synthetic oligonucleotide
  Target: LAMA2; (-) strand; PAM type: YTN; PAM sequence: CTG
cgggtttctcattataccca

SEQ ID NO: 220379 - DNA, 20 bp, Artificial Sequence
  Description of Artificial Sequence: Synthetic oligonucleotide
  Target: LAMA2; (-) strand; PAM type: YTN; PAM sequence: TTA
aataccactgcgggtttctc

SEQ ID NO: 220380 - DNA, 20 bp, Artificial Sequence
  Description of Artificial Sequence: Synthetic oligonucleotide
  Target: LAMA2; (-) strand; PAM type: YTN; PAM sequence: CTT
aaataccactgcgggtttct

SEQ ID NO: 220381 - DNA, 20 bp, Artificial Sequence
  Description of Artificial Sequence: Synthetic oligonucleotide
  Target: LAMA2; (-) strand; PAM type: YTN; PAM sequence: CTG
cttaaataccactgcgggtt

SEQ ID NO: 220382 - DNA, 20 bp, Artificial Sequence
  Description of Artificial Sequence: Synthetic oligonucleotide
  Target: LAMA2; (-) strand; PAM type: YTN; PAM sequence: TTA
cacctgcttaaataccactg

SEQ ID NO: 220383 - DNA, 20 bp, Artificial Sequence
  Description of Artificial Sequence: Synthetic oligonucleotide
  Target: LAMA2; (-) strand; PAM type: YTN; PAM sequence: CTA
atgagataaaggaaatcatg

SEQ ID NO: 220384 - DNA, 20 bp, Artificial Sequence
  Description of Artificial Sequence: Synthetic oligonucleotide
  Target: LAMA2; (-) strand; PAM type: YTN; PAM sequence: TTC
taatgagataaaggaaatca

SEQ ID NO: 220385 - DNA, 20 bp, Artificial Sequence
  Description of Artificial Sequence: Synthetic oligonucleotide
  Target: LAMA2; (-) strand; PAM type: YTN; PAM sequence: CTT
ctaatgagataaaggaaatc

SEQ ID NO: 220386 - DNA, 20 bp, Artificial Sequence
  Description of Artificial Sequence: Synthetic oligonucleotide
  Target: LAMA2; (-) strand; PAM type: YTN; PAM sequence: TTA
cttctaatgagataaaggaa

SEQ ID NO: 220387 - DNA, 20 bp, Artificial Sequence
  Description of Artificial Sequence: Synthetic oligonucleotide
  Target: LAMA2; (-) strand; PAM type: YTN; PAM sequence: TTA
gcagaatgttacttctaatg

SEQ ID NO: 220388 - DNA, 20 bp, Artificial Sequence
  Description of Artificial Sequence: Synthetic oligonucleotide
  Target: LAMA2; (-) strand; PAM type: YTN; PAM sequence: TTT
agcagaatgttacttctaat

SEQ ID NO: 220389 - DNA, 20 bp, Artificial Sequence
  Description of Artificial Sequence: Synthetic oligonucleotide
  Target: LAMA2; (-) strand; PAM type: YTN; PAM sequence: CTC
catttagcagaatgttactt

SEQ ID NO: 220390 - DNA, 20 bp, Artificial Sequence
  Description of Artificial Sequence: Synthetic oligonucleotide
  Target: LAMA2; (-) strand; PAM type: YTN; PAM sequence: TTC
tccatttagcagaatgttac

SEQ ID NO: 220391 - DNA, 20 bp, Artificial Sequence
  Description of Artificial Sequence: Synthetic oligonucleotide
  Target: LAMA2; (-) strand; PAM type: YTN; PAM sequence: CTA
taatcattctccatttagca

SEQ ID NO: 220392 - DNA, 20 bp, Artificial Sequence
  Description of Artificial Sequence: Synthetic oligonucleotide
  Target: LAMA2; (-) strand; PAM type: YTN; PAM sequence: CTC
actataatcattctccattt

SEQ ID NO: 220393 - DNA, 20 bp, Artificial Sequence
  Description of Artificial Sequence: Synthetic oligonucleotide
  Target: LAMA2; (-) strand; PAM type: YTN; PAM sequence: TTA
tctcactataatcattctcc

SEQ ID NO: 220394 - DNA, 20 bp, Artificial Sequence
  Description of Artificial Sequence: Synthetic oligonucleotide
  Target: LAMA2; (-) strand; PAM type: YTN; PAM sequence: CTT
atctcactataatcattctc

SEQ ID NO: 220395 - DNA, 20 bp, Artificial Sequence
  Description of Artificial Sequence: Synthetic oligonucleotide
  Target: LAMA2; (-) strand; PAM type: YTN; PAM sequence: TTC
acacttatctcactataatc

SEQ ID NO: 220396 - DNA, 20 bp, Artificial Sequence
  Description of Artificial Sequence: Synthetic oligonucleotide
  Target: LAMA2; (-) strand; PAM type: YTN; PAM sequence: TTT
cacacttatctcactataat

SEQ ID NO: 220397 - DNA, 20 bp, Artificial Sequence
  Description of Artificial Sequence: Synthetic oligonucleotide
  Target: LAMA2; (-) strand; PAM type: YTN; PAM sequence: TTT
tcacacttatctcactataa

SEQ ID NO: 220398 - DNA, 20 bp, Artificial Sequence
  Description of Artificial Sequence: Synthetic oligonucleotide
  Target: LAMA2; (-) strand; PAM type: YTN; PAM sequence: CTA
gttttcacacttatctcact

SEQ ID NO: 220399 - DNA, 20 bp, Artificial Sequence
  Description of Artificial Sequence: Synthetic oligonucleotide
  Target: LAMA2; (-) strand; PAM type: YTN; PAM sequence: CTG
ccacctagttttcacactta

SEQ ID NO: 220400 - DNA, 20 bp, Artificial Sequence
  Description of Artificial Sequence: Synthetic oligonucleotide
  Target: LAMA2; (-) strand; PAM type: YTN; PAM sequence: CTG
actgccacctagttttcaca

SEQ ID NO: 220401 - DNA, 20 bp, Artificial Sequence
  Description of Artificial Sequence: Synthetic oligonucleotide
  Target: LAMA2; (-) strand; PAM type: YTN; PAM sequence: TTC
ctgactgccacctagttttc

SEQ ID NO: 220402 - DNA, 20 bp, Artificial Sequence
  Description of Artificial Sequence: Synthetic oligonucleotide
  Target: LAMA2; (-) strand; PAM type: YTN; PAM sequence: TTT
cctgactgccacctagtttt

SEQ ID NO: 220403 - DNA, 20 bp, Artificial Sequence
  Description of Artificial Sequence: Synthetic oligonucleotide
  Target: LAMA2; (-) strand; PAM type: YTN; PAM sequence: CTA
tggtttcctgactgccacct

SEQ ID NO: 220404 - DNA, 20 bp, Artificial Sequence
  Description of Artificial Sequence: Synthetic oligonucleotide
  Target: LAMA2; (-) strand; PAM type: YTN; PAM sequence: CTA
aaaaagtactatggtttcct

SEQ ID NO: 220405 - DNA, 20 bp, Artificial Sequence
  Description of Artificial Sequence: Synthetic oligonucleotide
  Target: LAMA2; (-) strand; PAM type: YTN; PAM sequence: TTG
ctaaaaaagtactatggttt

SEQ ID NO: 220406 - DNA, 20 bp, Artificial Sequence
  Description of Artificial Sequence: Synthetic oligonucleotide
  Target: LAMA2; (-) strand; PAM type: YTN; PAM sequence: TTT
gctaaaaaagtactatggtt

SEQ ID NO: 220407 - DNA, 20 bp, Artificial Sequence
  Description of Artificial Sequence: Synthetic oligonucleotide
  Target: LAMA2; (-) strand; PAM type: YTN; PAM sequence: CTT
tgctaaaaaagtactatggt

SEQ ID NO: 220408 - DNA, 20 bp, Artificial Sequence
  Description of Artificial Sequence: Synthetic oligonucleotide
  Target: LAMA2; (-) strand; PAM type: YTN; PAM sequence: CTC
tttgctaaaaaagtactatg

SEQ ID NO: 220409 - DNA, 20 bp, Artificial Sequence
  Description of Artificial Sequence: Synthetic oligonucleotide
  Target: LAMA2; (-) strand; PAM type: YTN; PAM sequence: TTA
ccatcatctctttgctaaaa

SEQ ID NO: 220410 - DNA, 20 bp, Artificial Sequence
  Description of Artificial Sequence: Synthetic oligonucleotide
  Target: LAMA2; (-) strand; PAM type: YTN; PAM sequence: TTC
caagttaccatcatctcttt

SEQ ID NO: 220411 - DNA, 20 bp, Artificial Sequence
  Description of Artificial Sequence: Synthetic oligonucleotide
  Target: LAMA2; (-) strand; PAM type: YTN; PAM sequence: CTA
ttccaagttaccatcatctc

SEQ ID NO: 220412 - DNA, 20 bp, Artificial Sequence
  Description of Artificial Sequence: Synthetic oligonucleotide
  Target: LAMA2; (-) strand; PAM type: YTN; PAM sequence: CTC
tattccaagttaccatcatc

SEQ ID NO: 220413 - DNA, 20 bp, Artificial Sequence
  Description of Artificial Sequence: Synthetic oligonucleotide
  Target: LAMA2; (-) strand; PAM type: YTN; PAM sequence: CTA
ccactctattccaagttacc

SEQ ID NO: 220414 - DNA, 20 bp, Artificial Sequence
  Description of Artificial Sequence: Synthetic oligonucleotide
  Target: LAMA2; (-) strand; PAM type: YTN; PAM sequence: CTA
ctaccactctattccaagtt

SEQ ID NO: 220415 - DNA, 20 bp, Artificial Sequence
  Description of Artificial Sequence: Synthetic oligonucleotide
  Target: LAMA2; (-) strand; PAM type: YTN; PAM sequence: CTG
ctactaccactctattccaa

SEQ ID NO: 220416 - DNA, 20 bp, Artificial Sequence
  Description of Artificial Sequence: Synthetic oligonucleotide
  Target: LAMA2; (-) strand; PAM type: YTN; PAM sequence: CTC
tgctactaccactctattcc

SEQ ID NO: 220417 - DNA, 20 bp, Artificial Sequence
  Description of Artificial Sequence: Synthetic oligonucleotide
  Target: LAMA2; (-) strand; PAM type: YTN; PAM sequence: CTC
tctgctactaccactctatt

SEQ ID NO: 220418 - DNA, 20 bp, Artificial Sequence
  Description of Artificial Sequence: Synthetic oligonucleotide
  Target: LAMA2; (-) strand; PAM type: YTN; PAM sequence: TTC
tctctgctactaccactcta

SEQ ID NO: 220419 - DNA, 20 bp, Artificial Sequence
  Description of Artificial Sequence: Synthetic oligonucleotide
  Target: LAMA2; (-) strand; PAM type: YTN; PAM sequence: CTT
ctctctgctactaccactct

SEQ ID NO: 220420 - DNA, 20 bp, Artificial Sequence
  Description of Artificial Sequence: Synthetic oligonucleotide
  Target: LAMA2; (-) strand; PAM type: YTN; PAM sequence: CTG
ccacttctctctgctactac

SEQ ID NO: 220421 - DNA, 20 bp, Artificial Sequence
  Description of Artificial Sequence: Synthetic oligonucleotide
  Target: LAMA2; (-) strand; PAM type: YTN; PAM sequence: CTC
agcctgccacttctctctgc

SEQ ID NO: 220422 - DNA, 20 bp, Artificial Sequence
  Description of Artificial Sequence: Synthetic oligonucleotide
  Target: LAMA2; (-) strand; PAM type: YTN; PAM sequence: CTC
cagataaatctcagcctgcc

SEQ ID NO: 220423 - DNA, 20 bp, Artificial Sequence
  Description of Artificial Sequence: Synthetic oligonucleotide
  Target: LAMA2; (-) strand; PAM type: YTN; PAM sequence: TTC
gggtgatgccgaactccaga

SEQ ID NO: 220424 - DNA, 20 bp, Artificial Sequence
  Description of Artificial Sequence: Synthetic oligonucleotide
  Target: LAMA2; (-) strand; PAM type: YTN; PAM sequence: TTC
caccatcaattcgggtgatg

SEQ ID NO: 220425 - DNA, 20 bp, Artificial Sequence
  Description of Artificial Sequence: Synthetic oligonucleotide
  Target: LAMA2; (-) strand; PAM type: YTN; PAM sequence: TTG
ttccaccatcaattcgggtg

SEQ ID NO: 220426 - DNA, 20 bp, Artificial Sequence
  Description of Artificial Sequence: Synthetic oligonucleotide
  Target: LAMA2; (-) strand; PAM type: YTN; PAM sequence: TTT
gttccaccatcaattcgggt

SEQ ID NO: 220427 - DNA, 20 bp, Artificial Sequence
  Description of Artificial Sequence: Synthetic oligonucleotide
  Target: LAMA2; (-) strand; PAM type: YTN; PAM sequence: CTC
cacatttgttccaccatcaa

SEQ ID NO: 220428 - DNA, 20 bp, Artificial Sequence
  Description of Artificial Sequence: Synthetic oligonucleotide
  Target: LAMA2; (-) strand; PAM type: YTN; PAM sequence: CTC
tccacatttgttccaccatc

SEQ ID NO: 220429 - DNA, 20 bp, Artificial Sequence
  Description of Artificial Sequence: Synthetic oligonucleotide
  Target: LAMA2; (-) strand; PAM type: YTN; PAM sequence: TTG
gccccactctccacatttgt

SEQ ID NO: 220430 - DNA, 20 bp, Artificial Sequence
  Description of Artificial Sequence: Synthetic oligonucleotide
  Target: LAMA2; (-) strand; PAM type: YTN; PAM sequence: TTT
ggccccactctccacatttg

SEQ ID NO: 220431 - DNA, 20 bp, Artificial Sequence
  Description of Artificial Sequence: Synthetic oligonucleotide
  Target: LAMA2; (-) strand; PAM type: YTN; PAM sequence: TTT
tggccccactctccacattt

SEQ ID NO: 220432 - DNA, 20 bp, Artificial Sequence
  Description of Artificial Sequence: Synthetic oligonucleotide
  Target: LAMA2; (-) strand; PAM type: YTN; PAM sequence: CTA
ggagtcaacattttggcccc

SEQ ID NO: 220433 - DNA, 20 bp, Artificial Sequence
  Description of Artificial Sequence: Synthetic oligonucleotide
  Target: LAMA2; (-) strand; PAM type: YTN; PAM sequence: CTC
ctaggagtcaacattttggc

SEQ ID NO: 220434 - DNA, 20 bp, Artificial Sequence
  Description of Artificial Sequence: Synthetic oligonucleotide
  Target: LAMA2; (-) strand; PAM type: YTN; PAM sequence: TTC
aggccaaactcctaggagtc

SEQ ID NO: 220435 - DNA, 20 bp, Artificial Sequence
  Description of Artificial Sequence: Synthetic oligonucleotide
  Target: LAMA2; (-) strand; PAM type: YTN; PAM sequence: CTT
caggccaaactcctaggagt

SEQ ID NO: 220436 - DNA, 20 bp, Artificial Sequence
  Description of Artificial Sequence: Synthetic oligonucleotide
  Target: LAMA2; (-) strand; PAM type: YTN; PAM sequence: TTC
ttcaggccaaactcctagga

SEQ ID NO: 220437 - DNA, 20 bp, Artificial Sequence
  Description of Artificial Sequence: Synthetic oligonucleotide
  Target: LAMA2; (-) strand; PAM type: YTN; PAM sequence: TTT
cttcaggccaaactcctagg

SEQ ID NO: 220438 - DNA, 20 bp, Artificial Sequence
  Description of Artificial Sequence: Synthetic oligonucleotide
  Target: LAMA2; (-) strand; PAM type: YTN; PAM sequence: TTC
aggaaaatttcttcaggcca

SEQ ID NO: 220439 - DNA, 20 bp, Artificial Sequence
  Description of Artificial Sequence: Synthetic oligonucleotide
  Target: LAMA2; (-) strand; PAM type: YTN; PAM sequence: TTT
caggaaaatttcttcaggcc

SEQ ID NO: 220440 - DNA, 20 bp, Artificial Sequence
  Description of Artificial Sequence: Synthetic oligonucleotide
  Target: LAMA2; (-) strand; PAM type: YTN; PAM sequence: CTA
tttcaggaaaatttcttcag

SEQ ID NO: 220441 - DNA, 20 bp, Artificial Sequence
  Description of Artificial Sequence: Synthetic oligonucleotide
  Target: LAMA2; (-) strand; PAM type: YTN; PAM sequence: TTA
atccatactatttcaggaaa

SEQ ID NO: 220442 - DNA, 20 bp, Artificial Sequence
  Description of Artificial Sequence: Synthetic oligonucleotide
  Target: LAMA2; (-) strand; PAM type: YTN; PAM sequence: TTT
aatccatactatttcaggaa

SEQ ID NO: 220443 - DNA, 20 bp, Artificial Sequence
  Description of Artificial Sequence: Synthetic oligonucleotide
  Target: LAMA2; (-) strand; PAM type: YTN; PAM sequence: CTT
taatccatactatttcagga

SEQ ID NO: 220444 - DNA, 20 bp, Artificial Sequence
  Description of Artificial Sequence: Synthetic oligonucleotide
  Target: LAMA2; (-) strand; PAM type: YTN; PAM sequence: CTC
ctttaatccatactatttca

SEQ ID NO: 220445 - DNA, 20 bp, Artificial Sequence
  Description of Artificial Sequence: Synthetic oligonucleotide
  Target: LAMA2; (-) strand; PAM type: YTN; PAM sequence: CTC
ctcctttaatccatactatt

SEQ ID NO: 220446 - DNA, 20 bp, Artificial Sequence
  Description of Artificial Sequence: Synthetic oligonucleotide
  Target: LAMA2; (-) strand; PAM type: YTN; PAM sequence: CTG
ctcctcctttaatccatact

SEQ ID NO: 220447 - DNA, 20 bp, Artificial Sequence
  Description of Artificial Sequence: Synthetic oligonucleotide
  Target: LAMA2; (-) strand; PAM type: YTN; PAM sequence: TTC
tgctcctcctttaatccata

SEQ ID NO: 220448 - DNA, 20 bp, Artificial Sequence
  Description of Artificial Sequence: Synthetic oligonucleotide
  Target: LAMA2; (-) strand; PAM type: YTN; PAM sequence: CTC
cattctgctcctcctttaat

SEQ ID NO: 220449 - DNA, 20 bp, Artificial Sequence
  Description of Artificial Sequence: Synthetic oligonucleotide
  Target: LAMA2; (-) strand; PAM type: YTN; PAM sequence: TTG
ccacccagtatctccattct

SEQ ID NO: 220450 - DNA, 20 bp, Artificial Sequence
  Description of Artificial Sequence: Synthetic oligonucleotide
  Target: LAMA2; (-) strand; PAM type: YTN; PAM sequence: TTA
attgccacccagtatctcca

SEQ ID NO: 220451 - DNA, 20 bp, Artificial Sequence
  Description of Artificial Sequence: Synthetic oligonucleotide
  Target: LAMA2; (-) strand; PAM type: YTN; PAM sequence: CTT
aattgccacccagtatctcc

SEQ ID NO: 220452 - DNA, 20 bp, Artificial Sequence
  Description of Artificial Sequence: Synthetic oligonucleotide
  Target: LAMA2; (-) strand; PAM type: YTN; PAM sequence: TTA
aaacagacccttaattgcca

SEQ ID NO: 220453 - DNA, 20 bp, Artificial Sequence
  Description of Artificial Sequence: Synthetic oligonucleotide
  Target: LAMA2; (-) strand; PAM type: YTN; PAM sequence: TTC
aaagataacacgttaaaaca

SEQ ID NO: 220454 - DNA, 20 bp, Artificial Sequence
  Description of Artificial Sequence: Synthetic oligonucleotide
  Target: LAMA2; (-) strand; PAM type: YTN; PAM sequence: CTT
caaagataacacgttaaaac

SEQ ID NO: 220455 - DNA, 20 bp, Artificial Sequence
  Description of Artificial Sequence: Synthetic oligonucleotide
  Target: LAMA2; (-) strand; PAM type: YTN; PAM sequence: CTC
gaatgcttcaaagataacac

SEQ ID NO: 220456 - DNA, 20 bp, Artificial Sequence
  Description of Artificial Sequence: Synthetic oligonucleotide
  Target: LAMA2; (-) strand; PAM type: YTN; PAM sequence: CTG
gcaccactcgaatgcttcaa

SEQ ID NO: 220457 - DNA, 20 bp, Artificial Sequence
  Description of Artificial Sequence: Synthetic oligonucleotide
  Target: LAMA2; (-) strand; PAM type: YTN; PAM sequence: TTA
caggagtgagccaccatgcc

SEQ ID NO: 220458 - DNA, 20 bp, Artificial Sequence
  Description of Artificial Sequence: Synthetic oligonucleotide
  Target: LAMA2; (-) strand; PAM type: YTN; PAM sequence: CTT
acaggagtgagccaccatgc

SEQ ID NO: 220459 - DNA, 20 bp, Artificial Sequence
  Description of Artificial Sequence: Synthetic oligonucleotide
  Target: LAMA2; (-) strand; PAM type: YTN; PAM sequence: CTG
ggcttacaggagtgagccac

SEQ ID NO: 220460 - DNA, 20 bp, Artificial Sequence
  Description of Artificial Sequence: Synthetic oligonucleotide
  Target: LAMA2; (-) strand; PAM type: YTN; PAM sequence: CTC
ccaaagtgctgggcttacag

SEQ ID NO: 220461 - DNA, 20 bp, Artificial Sequence
  Description of Artificial Sequence: Synthetic oligonucleotide
  Target: LAMA2; (-) strand; PAM type: YTN; PAM sequence: CTC
aacctcccaaagtgctgggc

SEQ ID NO: 220462 - DNA, 20 bp, Artificial Sequence
  Description of Artificial Sequence: Synthetic oligonucleotide
  Target: LAMA2; (-) strand; PAM type: YTN; PAM sequence: CTC
ccacctcaacctcccaaagt

SEQ ID NO: 220463 - DNA, 20 bp, Artificial Sequence
  Description of Artificial Sequence: Synthetic oligonucleotide
  Target: LAMA2; (-) strand; PAM type: YTN; PAM sequence: TTA
agcaatcctcccacctcaac

SEQ ID NO: 220464 - DNA, 20 bp, Artificial Sequence
  Description of Artificial Sequence: Synthetic oligonucleotide
  Target: LAMA2; (-) strand; PAM type: YTN; PAM sequence: CTT
aagcaatcctcccacctcaa

SEQ ID NO: 220465 - DNA, 20 bp, Artificial Sequence
  Description of Artificial Sequence: Synthetic oligonucleotide
  Target: LAMA2; (-) strand; PAM type: YTN; PAM sequence: CTG
ggcttaagcaatcctcccac

SEQ ID NO: 220466 - DNA, 20 bp, Artificial Sequence
  Description of Artificial Sequence: Synthetic oligonucleotide
  Target: LAMA2; (-) strand; PAM type: YTN; PAM sequence: CTC
gaatacctgggcttaagcaa

SEQ ID NO: 220467 - DNA, 20 bp, Artificial Sequence
  Description of Artificial Sequence: Synthetic oligonucleotide
  Target: LAMA2; (-) strand; PAM type: YTN; PAM sequence: CTG
gtctcgaatacctgggctta

SEQ ID NO: 220468 - DNA, 20 bp, Artificial Sequence
  Description of Artificial Sequence: Synthetic oligonucleotide
  Target: LAMA2; (-) strand; PAM type: YTN; PAM sequence: TTG
ctggtctcgaatacctgggc

SEQ ID NO: 220469 - DNA, 20 bp, Artificial Sequence
  Description of Artificial Sequence: Synthetic oligonucleotide
  Target: LAMA2; (-) strand; PAM type: YTN; PAM sequence: CTG
gttgctggtctcgaatacct

SEQ ID NO: 220470 - DNA, 20 bp, Artificial Sequence
  Description of Artificial Sequence: Synthetic oligonucleotide
  Target: LAMA2; (-) strand; PAM type: YTN; PAM sequence: TTG
cccgggctggttgctggtct

SEQ ID NO: 220471 - DNA, 20 bp, Artificial Sequence
  Description of Artificial Sequence: Synthetic oligonucleotide
  Target: LAMA2; (-) strand; PAM type: YTN; PAM sequence: TTG
ttgcccgggctggttgctgg

SEQ ID NO: 220472 - DNA, 20 bp, Artificial Sequence
  Description of Artificial Sequence: Synthetic oligonucleotide
  Target: LAMA2; (-) strand; PAM type: YTN; PAM sequence: TTT
gttgcccgggctggttgctg

SEQ ID NO: 220473 - DNA, 20 bp, Artificial Sequence
  Description of Artificial Sequence: Synthetic oligonucleotide
  Target: LAMA2; (-) strand; PAM type: YTN; PAM sequence: CTT
tgttgcccgggctggttgct

SEQ ID NO: 220474 - DNA, 20 bp, Artificial Sequence
  Description of Artificial Sequence: Synthetic oligonucleotide
  Target: LAMA2; (-) strand; PAM type: YTN; PAM sequence: CTC
actttgttgcccgggctggt

SEQ ID NO: 220475 - DNA, 20 bp, Artificial Sequence
  Description of Artificial Sequence: Synthetic oligonucleotide
  Target: LAMA2; (-) strand; PAM type: YTN; PAM sequence: TTG
tagagataggggtctcactt

SEQ ID NO: 220476 - DNA, 20 bp, Artificial Sequence
  Description of Artificial Sequence: Synthetic oligonucleotide
  Target: LAMA2; (-) strand; PAM type: YTN; PAM sequence: TTT
gtagagataggggtctcact

SEQ ID NO: 220477 - DNA, 20 bp, Artificial Sequence
  Description of Artificial Sequence: Synthetic oligonucleotide
  Target: LAMA2; (-) strand; PAM type: YTN; PAM sequence: TTT
tgtagagataggggtctcac

SEQ ID NO: 220478 - DNA, 20 bp, Artificial Sequence
  Description of Artificial Sequence: Synthetic oligonucleotide
  Target: LAMA2; (-) strand; PAM type: YTN; PAM sequence: TTT
ttgtagagataggggtctca

SEQ ID NO: 220479 - DNA, 20 bp, Artificial Sequence
  Description of Artificial Sequence: Synthetic oligonucleotide
  Target: LAMA2; (-) strand; PAM type: YTN; PAM sequence: TTT
tttgtagagataggggtctc

SEQ ID NO: 220480 - DNA, 20 bp, Artificial Sequence
  Description of Artificial Sequence: Synthetic oligonucleotide
  Target: LAMA2; (-) strand; PAM type: YTN; PAM sequence: TTT
ttttgtagagataggggtct

SEQ ID NO: 220481 - DNA, 20 bp, Artificial Sequence
  Description of Artificial Sequence: Synthetic oligonucleotide
  Target: LAMA2; (-) strand; PAM type: YTN; PAM sequence: TTT
tttttgtagagataggggtc

SEQ ID NO: 220482 - DNA, 20 bp, Artificial Sequence
  Description of Artificial Sequence: Synthetic oligonucleotide
  Target: LAMA2; (-) strand; PAM type: YTN; PAM sequence: CTT
ttttttgtagagataggggt

SEQ ID NO: 220483 - DNA, 20 bp, Artificial Sequence
  Description of Artificial Sequence: Synthetic oligonucleotide
  Target: LAMA2; (-) strand; PAM type: YTN; PAM sequence: TTG
cttttttttgtagagatagg

SEQ ID NO: 220484 - DNA, 20 bp, Artificial Sequence
  Description of Artificial Sequence: Synthetic oligonucleotide
  Target: LAMA2; (-) strand; PAM type: YTN; PAM sequence: TTT
gcttttttttgtagagatag

SEQ ID NO: 220485 - DNA, 20 bp, Artificial Sequence
  Description of Artificial Sequence: Synthetic oligonucleotide
  Target: LAMA2; (-) strand; PAM type: YTN; PAM sequence: TTT
tgcttttttttgtagagata

SEQ ID NO: 220486 - DNA, 20 bp, Artificial Sequence
  Description of Artificial Sequence: Synthetic oligonucleotide
  Target: LAMA2; (-) strand; PAM type: YTN; PAM sequence: TTT
ttgcttttttttgtagagat

SEQ ID NO: 220487 - DNA, 20 bp, Artificial Sequence
  Description of Artificial Sequence: Synthetic oligonucleotide
  Target: LAMA2; (-) strand; PAM type: YTN; PAM sequence: TTT
tttgcttttttttgtagaga

SEQ ID NO: 220488 - DNA, 20 bp, Artificial Sequence
  Description of Artificial Sequence: Synthetic oligonucleotide
  Target: LAMA2; (-) strand; PAM type: YTN; PAM sequence: CTA
attttttgcttttttttgta

SEQ ID NO: 220489 - DNA, 20 bp, Artificial Sequence
  Description of Artificial Sequence: Synthetic oligonucleotide
  Target: LAMA2; (-) strand; PAM type: YTN; PAM sequence: CTG
gctaattttttgcttttttt

SEQ ID NO: 220490 - DNA, 20 bp, Artificial Sequence
  Description of Artificial Sequence: Synthetic oligonucleotide
  Target: LAMA2; (-) strand; PAM type: YTN; PAM sequence: CTA
tgcctggctaattttttgct

SEQ ID NO: 220491 - DNA, 20 bp, Artificial Sequence
  Description of Artificial Sequence: Synthetic oligonucleotide
  Target: LAMA2; (-) strand; PAM type: YTN; PAM sequence: CTA
ctatgcctggctaatttttt

SEQ ID NO: 220492 - DNA, 20 bp, Artificial Sequence
  Description of Artificial Sequence: Synthetic oligonucleotide
  Target: LAMA2; (-) strand; PAM type: YTN; PAM sequence: CTG
ggactactatgcctggctaa

SEQ ID NO: 220493 - DNA, 20 bp, Artificial Sequence
  Description of Artificial Sequence: Synthetic oligonucleotide
  Target: LAMA2; (-) strand; PAM type: YTN; PAM sequence: CTG
agtagctgggactactatgc

SEQ ID NO: 220494 - DNA, 20 bp, Artificial Sequence
  Description of Artificial Sequence: Synthetic oligonucleotide
  Target: LAMA2; (-) strand; PAM type: YTN; PAM sequence: CTC
ctgagtagctgggactacta

SEQ ID NO: 220495 - DNA, 20 bp, Artificial Sequence
  Description of Artificial Sequence: Synthetic oligonucleotide
  Target: LAMA2; (-) strand; PAM type: YTN; PAM sequence: CTC
aacctcctgagtagctggga

SEQ ID NO: 220496 - DNA, 20 bp, Artificial Sequence
  Description of Artificial Sequence: Synthetic oligonucleotide
  Target: LAMA2; (-) strand; PAM type: YTN; PAM sequence: CTG
cctcaacctcctgagtagct

SEQ ID NO: 220497 - DNA, 20 bp, Artificial Sequence
  Description of Artificial Sequence: Synthetic oligonucleotide
  Target: LAMA2; (-) strand; PAM type: YTN; PAM sequence: CTC
ctgcctcaacctcctgagta

SEQ ID NO: 220498 - DNA, 20 bp, Artificial Sequence
  Description of Artificial Sequence: Synthetic oligonucleotide
  Target: LAMA2; (-) strand; PAM type: YTN; PAM sequence: TTC
tcctgcctcaacctcctgag

SEQ ID NO: 220499 - DNA, 20 bp, Artificial Sequence
  Description of Artificial Sequence: Synthetic oligonucleotide
  Target: LAMA2; (-) strand; PAM type: YTN; PAM sequence: CTG
gacccaagtgattctcctgc

SEQ ID NO: 220500 - DNA, 20 bp, Artificial Sequence
  Description of Artificial Sequence: Synthetic oligonucleotide
  Target: LAMA2; (-) strand; PAM type: YTN; PAM sequence: CTC
ctggacccaagtgattctcc

SEQ ID NO: 220501 - DNA, 20 bp, Artificial Sequence
  Description of Artificial Sequence: Synthetic oligonucleotide
  Target: LAMA2; (-) strand; PAM type: YTN; PAM sequence: TTG
acctcctggacccaagtgat

SEQ ID NO: 220502 - DNA, 20 bp, Artificial Sequence
  Description of Artificial Sequence: Synthetic oligonucleotide
  Target: LAMA2; (-) strand; PAM type: YTN; PAM sequence: CTT
gacctcctggacccaagtga

SEQ ID NO: 220503 - DNA, 20 bp, Artificial Sequence
  Description of Artificial Sequence: Synthetic oligonucleotide
  Target: LAMA2; (-) strand; PAM type: YTN; PAM sequence: CTG
cagccttgacctcctggacc

SEQ ID NO: 220504 - DNA, 20 bp, Artificial Sequence
  Description of Artificial Sequence: Synthetic oligonucleotide
  Target: LAMA2; (-) strand; PAM type: YTN; PAM sequence: CTC
actgcagccttgacctcctg

SEQ ID NO: 220505 - DNA, 20 bp, Artificial Sequence
  Description of Artificial Sequence: Synthetic oligonucleotide
  Target: LAMA2; (-) strand; PAM type: YTN; PAM sequence: CTG
gagtgcagagacatgaatat

SEQ ID NO: 220506 - DNA, 20 bp, Artificial Sequence
  Description of Artificial Sequence: Synthetic oligonucleotide
  Target: LAMA2; (-) strand; PAM type: YTN; PAM sequence: CTC
ccaggctggagtgcagagac

SEQ ID NO: 220507 - DNA, 20 bp, Artificial Sequence
  Description of Artificial Sequence: Synthetic oligonucleotide
  Target: LAMA2; (-) strand; PAM type: YTN; PAM sequence: CTG
tctcccaggctggagtgcag

SEQ ID NO: 220508 - DNA, 20 bp, Artificial Sequence
  Description of Artificial Sequence: Synthetic oligonucleotide
  Target: LAMA2; (-) strand; PAM type: YTN; PAM sequence: CTC
tgtctcccaggctggagtgc

SEQ ID NO: 220509 - DNA, 20 bp, Artificial Sequence
  Description of Artificial Sequence: Synthetic oligonucleotide
  Target: LAMA2; (-) strand; PAM type: YTN; PAM sequence: TTG
ctctgtctcccaggctggag

SEQ ID NO: 220510 - DNA, 20 bp, Artificial Sequence
  Description of Artificial Sequence: Synthetic oligonucleotide
  Target: LAMA2; (-) strand; PAM type: YTN; PAM sequence: CTT
gctctgtctcccaggctgga

SEQ ID NO: 220511 - DNA, 20 bp, Artificial Sequence
  Description of Artificial Sequence: Synthetic oligonucleotide
  Target: LAMA2; (-) strand; PAM type: YTN; PAM sequence: TTG
agacagcgtcttgctctgtc

SEQ ID NO: 220512 - DNA, 20 bp, Artificial Sequence
  Description of Artificial Sequence: Synthetic oligonucleotide
  Target: LAMA2; (-) strand; PAM type: YTN; PAM sequence: TTT
gagacagcgtcttgctctgt

SEQ ID NO: 220513 - DNA, 20 bp, Artificial Sequence
  Description of Artificial Sequence: Synthetic oligonucleotide
  Target: LAMA2; (-) strand; PAM type: YTN; PAM sequence: TTT
tgagacagcgtcttgctctg

SEQ ID NO: 220514 - DNA, 20 bp, Artificial Sequence
  Description of Artificial Sequence: Synthetic oligonucleotide
  Target: LAMA2; (-) strand; PAM type: YTN; PAM sequence: TTG
ttttgagacagcgtcttgct

SEQ ID NO: 220515 - DNA, 20 bp, Artificial Sequence
  Description of Artificial Sequence: Synthetic oligonucleotide
  Target: LAMA2; (-) strand; PAM type: YTN; PAM sequence: TTT
gttttgagacagcgtcttgc

SEQ ID NO: 220516 - DNA, 20 bp, Artificial Sequence
  Description of Artificial Sequence: Synthetic oligonucleotide
  Target: LAMA2; (-) strand; PAM type: YTN; PAM sequence: TTT
tgttttgagacagcgtcttg

SEQ ID NO: 220517 - DNA, 20 bp, Artificial Sequence
  Description of Artificial Sequence: Synthetic oligonucleotide
  Target: LAMA2; (-) strand; PAM type: YTN; PAM sequence: TTG
ttttgttttgagacagcgtc

SEQ ID NO: 220518 - DNA, 20 bp, Artificial Sequence
  Description of Artificial Sequence: Synthetic oligonucleotide
  Target: LAMA2; (-) strand; PAM type: YTN; PAM sequence: TTT
gttttgttttgagacagcgt

SEQ ID NO: 220519 - DNA, 20 bp, Artificial Sequence
  Description of Artificial Sequence: Synthetic oligonucleotide
  Target: LAMA2; (-) strand; PAM type: YTN; PAM sequence: TTT
tgttttgttttgagacagcg

SEQ ID NO: 220520 - DNA, 20 bp, Artificial Sequence
  Description of Artificial Sequence: Synthetic oligonucleotide
  Target: LAMA2; (-) strand; PAM type: YTN; PAM sequence: TTT
ttgttttgttttgagacagc

SEQ ID NO: 220521 - DNA, 20 bp, Artificial Sequence
  Description of Artificial Sequence: Synthetic oligonucleotide
  Target: LAMA2; (-) strand; PAM type: YTN; PAM sequence: TTT
tttgttttgttttgagacag

SEQ ID NO: 220522 - DNA, 20 bp, Artificial Sequence
  Description of Artificial Sequence: Synthetic oligonucleotide
  Target: LAMA2; (-) strand; PAM type: YTN; PAM sequence: TTT
ttttgttttgttttgagaca

SEQ ID NO: 220523 - DNA, 20 bp, Artificial Sequence
  Description of Artificial Sequence: Synthetic oligonucleotide
  Target: LAMA2; (-) strand; PAM type: YTN; PAM sequence: TTG
aataatttttttgttttgtt

SEQ ID NO: 220524 - DNA, 20 bp, Artificial Sequence
  Description of Artificial Sequence: Synthetic oligonucleotide
  Target: LAMA2; (-) strand; PAM type: YTN; PAM sequence: CTT
gaataatttttttgttttgt

SEQ ID NO: 220525 - DNA, 20 bp, Artificial Sequence
  Description of Artificial Sequence: Synthetic oligonucleotide
  Target: LAMA2; (-) strand; PAM type: YTN; PAM sequence: TTC
cacttgaataatttttttgt

SEQ ID NO: 220526 - DNA, 20 bp, Artificial Sequence
  Description of Artificial Sequence: Synthetic oligonucleotide
  Target: LAMA2; (-) strand; PAM type: YTN; PAM sequence: TTT
ccacttgaataatttttttg

SEQ ID NO: 220527 - DNA, 20 bp, Artificial Sequence
  Description of Artificial Sequence: Synthetic oligonucleotide
  Target: LAMA2; (-) strand; PAM type: YTN; PAM sequence: TTA
atatttccacttgaataatt

SEQ ID NO: 220528 - DNA, 20 bp, Artificial Sequence
  Description of Artificial Sequence: Synthetic oligonucleotide
  Target: LAMA2; (-) strand; PAM type: YTN; PAM sequence: TTT
aatatttccacttgaataat

SEQ ID NO: 220529 - DNA, 20 bp, Artificial Sequence
  Description of Artificial Sequence: Synthetic oligonucleotide
  Target: LAMA2; (-) strand; PAM type: YTN; PAM sequence: CTT
taatatttccacttgaataa

SEQ ID NO: 220530 - DNA, 20 bp, Artificial Sequence
  Description of Artificial Sequence: Synthetic oligonucleotide
  Target: LAMA2; (-) strand; PAM type: YTN; PAM sequence: TTG
tccctttaatatttccactt

SEQ ID NO: 220531 - DNA, 20 bp, Artificial Sequence
  Description of Artificial Sequence: Synthetic oligonucleotide
  Target: LAMA2; (-) strand; PAM type: YTN; PAM sequence: CTC
ataaatccaattgtcccttt

SEQ ID NO: 220532 - DNA, 20 bp, Artificial Sequence
  Description of Artificial Sequence: Synthetic oligonucleotide
  Target: LAMA2; (-) strand; PAM type: YTN; PAM sequence: CTC
cagactcataaatccaattg

SEQ ID NO: 220533 - DNA, 20 bp, Artificial Sequence
  Description of Artificial Sequence: Synthetic oligonucleotide
  Target: LAMA2; (-) strand; PAM type: YTN; PAM sequence: CTC
aactccagactcataaatcc

SEQ ID NO: 220534 - DNA, 20 bp, Artificial Sequence
  Description of Artificial Sequence: Synthetic oligonucleotide
  Target: LAMA2; (-) strand; PAM type: YTN; PAM sequence: TTC
ccagtgcacatcactcaact

SEQ ID NO: 220535 - DNA, 20 bp, Artificial Sequence
  Description of Artificial Sequence: Synthetic oligonucleotide
  Target: LAMA2; (-) strand; PAM type: YTN; PAM sequence: TTT
cccagtgcacatcactcaac

SEQ ID NO: 220536 - DNA, 20 bp, Artificial Sequence
  Description of Artificial Sequence: Synthetic oligonucleotide
  Target: LAMA2; (-) strand; PAM type: YTN; PAM sequence: CTT
tcccagtgcacatcactcaa

SEQ ID NO: 220537 - DNA, 20 bp, Artificial Sequence
  Description of Artificial Sequence: Synthetic oligonucleotide
  Target: LAMA2; (-) strand; PAM type: YTN; PAM sequence: CTC
tttcccagtgcacatcactc

SEQ ID NO: 220538 - DNA, 20 bp, Artificial Sequence
  Description of Artificial Sequence: Synthetic oligonucleotide
  Target: LAMA2; (-) strand; PAM type: YTN; PAM sequence: TTA
agtacagtctctttcccagt

SEQ ID NO: 220539 - DNA, 20 bp, Artificial Sequence
  Description of Artificial Sequence: Synthetic oligonucleotide
  Target: LAMA2; (-) strand; PAM type: YTN; PAM sequence: CTG
ttaagtacagtctctttccc

SEQ ID NO: 220540 - DNA, 20 bp, Artificial Sequence
  Description of Artificial Sequence: Synthetic oligonucleotide
  Target: LAMA2; (-) strand; PAM type: YTN; PAM sequence: TTA
ctgttaagtacagtctcttt

SEQ ID NO: 220541 - DNA, 20 bp, Artificial Sequence
  Description of Artificial Sequence: Synthetic oligonucleotide
  Target: LAMA2; (-) strand; PAM type: YTN; PAM sequence: TTT
actgttaagtacagtctctt

SEQ ID NO: 220542 - DNA, 20 bp, Artificial Sequence
  Description of Artificial Sequence: Synthetic oligonucleotide
  Target: LAMA2; (-) strand; PAM type: YTN; PAM sequence: CTT
tactgttaagtacagtctct

SEQ ID NO: 220543 - DNA, 20 bp, Artificial Sequence
  Description of Artificial Sequence: Synthetic oligonucleotide
  Target: LAMA2; (-) strand; PAM type: YTN; PAM sequence: TTA
aacaggcctttactgttaag

SEQ ID NO: 220544 - DNA, 20 bp, Artificial Sequence
  Description of Artificial Sequence: Synthetic oligonucleotide
  Target: LAMA2; (-) strand; PAM type: YTN; PAM sequence: CTT
aaacaggcctttactgttaa

SEQ ID NO: 220545 - DNA, 20 bp, Artificial Sequence
  Description of Artificial Sequence: Synthetic oligonucleotide
  Target: LAMA2; (-) strand; PAM type: YTN; PAM sequence: CTA
aatgatcttaaacaggcctt

SEQ ID NO: 220546 - DNA, 20 bp, Artificial Sequence
  Description of Artificial Sequence: Synthetic oligonucleotide
  Target: LAMA2; (-) strand; PAM type: YTN; PAM sequence: TTC
taaatgatcttaaacaggcc

SEQ ID NO: 220547 - DNA, 20 bp, Artificial Sequence
  Description of Artificial Sequence: Synthetic oligonucleotide
  Target: LAMA2; (-) strand; PAM type: YTN; PAM sequence: TTT
ctaaatgatcttaaacaggc

SEQ ID NO: 220548 - DNA, 20 bp, Artificial Sequence
  Description of Artificial Sequence: Synthetic oligonucleotide
  Target: LAMA2; (-) strand; PAM type: YTN; PAM sequence: CTT
tctaaatgatcttaaacagg

SEQ ID NO: 220549 - DNA, 20 bp, Artificial Sequence
  Description of Artificial Sequence: Synthetic oligonucleotide
  Target: LAMA2; (-) strand; PAM type: YTN; PAM sequence: CTG
ctttctaaatgatcttaaac

SEQ ID NO: 220550 - DNA, 20 bp, Artificial Sequence
  Description of Artificial Sequence: Synthetic oligonucleotide
  Target: LAMA2; (-) strand; PAM type: YTN; PAM sequence: CTA
tacctgctttctaaatgatc

SEQ ID NO: 220551 - DNA, 20 bp, Artificial Sequence
  Description of Artificial Sequence: Synthetic oligonucleotide
  Target: LAMA2; (-) strand; PAM type: YTN; PAM sequence: CTC
tatacctgctttctaaatga

SEQ ID NO: 220552 - DNA, 20 bp, Artificial Sequence
  Description of Artificial Sequence: Synthetic oligonucleotide
  Target: LAMA2; (-) strand; PAM type: YTN; PAM sequence: TTA
tctctatacctgctttctaa

SEQ ID NO: 220553 - DNA, 20 bp, Artificial Sequence
  Description of Artificial Sequence: Synthetic oligonucleotide
  Target: LAMA2; (-) strand; PAM type: YTN; PAM sequence: TTT
atctctatacctgctttcta

SEQ ID NO: 220554 - DNA, 20 bp, Artificial Sequence
  Description of Artificial Sequence: Synthetic oligonucleotide
  Target: LAMA2; (-) strand; PAM type: YTN; PAM sequence: TTT
tatctctatacctgctttct

SEQ ID NO: 220555 - DNA, 20 bp, Artificial Sequence
  Description of Artificial Sequence: Synthetic oligonucleotide
  Target: LAMA2; (-) strand; PAM type: YTN; PAM sequence: TTT
ttatctctatacctgctttc

SEQ ID NO: 220556 - DNA, 20 bp, Artificial Sequence
  Description of Artificial Sequence: Synthetic oligonucleotide
  Target: LAMA2; (-) strand; PAM type: YTN; PAM sequence: CTT
tttatctctatacctgcttt

SEQ ID NO: 220557 - DNA, 20 bp, Artificial Sequence
  Description of Artificial Sequence: Synthetic oligonucleotide
  Target: LAMA2; (-) strand; PAM type: YTN; PAM sequence: CTC
tttttatctctatacctgct

SEQ ID NO: 220558 - DNA, 20 bp, Artificial Sequence
  Description of Artificial Sequence: Synthetic oligonucleotide
  Target: LAMA2; (-) strand; PAM type: YTN; PAM sequence: TTA
taggccctctttttatctct

SEQ ID NO: 220559 - DNA, 20 bp, Artificial Sequence
  Description of Artificial Sequence: Synthetic oligonucleotide
  Target: LAMA2; (-) strand; PAM type: YTN; PAM sequence: TTC
aattataggccctcttttta

SEQ ID NO: 220560 - DNA, 20 bp, Artificial Sequence
  Description of Artificial Sequence: Synthetic oligonucleotide
  Target: LAMA2; (-) strand; PAM type: YTN; PAM sequence: CTA
ggattcaattataggccctc

SEQ ID NO: 220561 - DNA, 20 bp, Artificial Sequence
  Description of Artificial Sequence: Synthetic oligonucleotide
  Target: LAMA2; (-) strand; PAM type: YTN; PAM sequence: TTG
aagtgcctaggattcaatta

SEQ ID NO: 220562 - DNA, 20 bp, Artificial Sequence
  Description of Artificial Sequence: Synthetic oligonucleotide
  Target: LAMA2; (-) strand; PAM type: YTN; PAM sequence: TTT
gaagtgcctaggattcaatt

SEQ ID NO: 220563 - DNA, 20 bp, Artificial Sequence
  Description of Artificial Sequence: Synthetic oligonucleotide
  Target: LAMA2; (-) strand; PAM type: YTN; PAM sequence: TTA
aatttgaagtgcctaggatt

SEQ ID NO: 220564 - DNA, 20 bp, Artificial Sequence
  Description of Artificial Sequence: Synthetic oligonucleotide
  Target: LAMA2; (-) strand; PAM type: YTN; PAM sequence: TTT
aaatttgaagtgcctaggat

SEQ ID NO: 220565 - DNA, 20 bp, Artificial Sequence
  Description of Artificial Sequence: Synthetic oligonucleotide
  Target: LAMA2; (-) strand; PAM type: YTN; PAM sequence: CTT
taaatttgaagtgcctagga

SEQ ID NO: 220566 - DNA, 20 bp, Artificial Sequence
  Description of Artificial Sequence: Synthetic oligonucleotide
  Target: LAMA2; (-) strand; PAM type: YTN; PAM sequence: TTA
ccacctttaaatttgaagtg

SEQ ID NO: 220567 - DNA, 20 bp, Artificial Sequence
  Description of Artificial Sequence: Synthetic oligonucleotide
  Target: LAMA2; (-) strand; PAM type: YTN; PAM sequence: CTT
accacctttaaatttgaagt

SEQ ID NO: 220568 - DNA, 20 bp, Artificial Sequence
  Description of Artificial Sequence: Synthetic oligonucleotide
  Target: LAMA2; (-) strand; PAM type: YTN; PAM sequence: TTG
atcttaccacctttaaattt

SEQ ID NO: 220569 - DNA, 20 bp, Artificial Sequence
  Description of Artificial Sequence: Synthetic oligonucleotide
  Target: LAMA2; (-) strand; PAM type: YTN; PAM sequence: TTT
gatcttaccacctttaaatt

SEQ ID NO: 220570 - DNA, 20 bp, Artificial Sequence
  Description of Artificial Sequence: Synthetic oligonucleotide
  Target: LAMA2; (-) strand; PAM type: YTN; PAM sequence: TTG
atgtatttgatcttaccacc

SEQ ID NO: 220571 - DNA, 20 bp, Artificial Sequence
  Description of Artificial Sequence: Synthetic oligonucleotide
  Target: LAMA2; (-) strand; PAM type: YTN; PAM sequence: CTT
gatgtatttgatcttaccac

SEQ ID NO: 220572 - DNA, 20 bp, Artificial Sequence
  Description of Artificial Sequence: Synthetic oligonucleotide
  Target: LAMA2; (-) strand; PAM type: YTN; PAM sequence: TTC
ttgatgtatttgatcttacc

SEQ ID NO: 220573 - DNA, 20 bp, Artificial Sequence
  Description of Artificial Sequence: Synthetic oligonucleotide
  Target: LAMA2; (-) strand; PAM type: YTN; PAM sequence: TTT
cttgatgtatttgatcttac

SEQ ID NO: 220574 - DNA, 20 bp, Artificial Sequence
  Description of Artificial Sequence: Synthetic oligonucleotide
  Target: LAMA2; (-) strand; PAM type: YTN; PAM sequence: CTT
tcttgatgtatttgatctta

SEQ ID NO: 220575 - DNA, 20 bp, Artificial Sequence
  Description of Artificial Sequence: Synthetic oligonucleotide
  Target: LAMA2; (-) strand; PAM type: YTN; PAM sequence: CTC
tttcttgatgtatttgatct

SEQ ID NO: 220576 - DNA, 20 bp, Artificial Sequence
  Description of Artificial Sequence: Synthetic oligonucleotide
  Target: LAMA2; (-) strand; PAM type: YTN; PAM sequence: TTC
cctctttcttgatgtatttg

SEQ ID NO: 220577 - DNA, 20 bp, Artificial Sequence
  Description of Artificial Sequence: Synthetic oligonucleotide
  Target: LAMA2; (-) strand; PAM type: YTN; PAM sequence: CTG
aagattccctctttcttgat

SEQ ID NO: 220578 - DNA, 20 bp, Artificial Sequence
  Description of Artificial Sequence: Synthetic oligonucleotide
  Target: LAMA2; (-) strand; PAM type: YTN; PAM sequence: TTG
ccatagctgaagattccctc

SEQ ID NO: 220579 - DNA, 20 bp, Artificial Sequence
  Description of Artificial Sequence: Synthetic oligonucleotide
  Target: LAMA2; (-) strand; PAM type: YTN; PAM sequence: CTG
cattgccatagctgaagatt

SEQ ID NO: 220580 - DNA, 20 bp, Artificial Sequence
  Description of Artificial Sequence: Synthetic oligonucleotide
  Target: LAMA2; (-) strand; PAM type: YTN; PAM sequence: CTC
acagcatctgcattgccata

SEQ ID NO: 220581 - DNA, 20 bp, Artificial Sequence
  Description of Artificial Sequence: Synthetic oligonucleotide
  Target: LAMA2; (-) strand; PAM type: YTN; PAM sequence: TTG
tacctcacagcatctgcatt

SEQ ID NO: 220582 - DNA, 20 bp, Artificial Sequence
  Description of Artificial Sequence: Synthetic oligonucleotide
  Target: LAMA2; (-) strand; PAM type: YTN; PAM sequence: TTT
gtacctcacagcatctgcat

SEQ ID NO: 220583 - DNA, 20 bp, Artificial Sequence
  Description of Artificial Sequence: Synthetic oligonucleotide
  Target: LAMA2; (-) strand; PAM type: YTN; PAM sequence: TTA
atttgtacctcacagcatct

SEQ ID NO: 220584 - DNA, 20 bp, Artificial Sequence
  Description of Artificial Sequence: Synthetic oligonucleotide
  Target: LAMA2; (-) strand; PAM type: YTN; PAM sequence: TTT
aatttgtacctcacagcatc

SEQ ID NO: 220585 - DNA, 20 bp, Artificial Sequence
  Description of Artificial Sequence: Synthetic oligonucleotide
  Target: LAMA2; (-) strand; PAM type: YTN; PAM sequence: CTG
agtggtttaatttgtacctc

SEQ ID NO: 220586 - DNA, 20 bp, Artificial Sequence
  Description of Artificial Sequence: Synthetic oligonucleotide
  Target: LAMA2; (-) strand; PAM type: YTN; PAM sequence: TTC
caagacctgagtggtttaat

SEQ ID NO: 220587 - DNA, 20 bp, Artificial Sequence
  Description of Artificial Sequence: Synthetic oligonucleotide
  Target: LAMA2; (-) strand; PAM type: YTN; PAM sequence: TTT
ccaagacctgagtggtttaa

SEQ ID NO: 220588 - DNA, 20 bp, Artificial Sequence
  Description of Artificial Sequence: Synthetic oligonucleotide
  Target: LAMA2; (-) strand; PAM type: YTN; PAM sequence: TTA
ggtatttccaagacctgagt

SEQ ID NO: 220589 - DNA, 20 bp, Artificial Sequence
  Description of Artificial Sequence: Synthetic oligonucleotide
  Target: LAMA2; (-) strand; PAM type: YTN; PAM sequence: TTT
aggtatttccaagacctgag

SEQ ID NO: 220590 - DNA, 20 bp, Artificial Sequence
  Description of Artificial Sequence: Synthetic oligonucleotide
  Target: LAMA2; (-) strand; PAM type: YTN; PAM sequence: CTA
tgtttaggtatttccaagac

SEQ ID NO: 220591 - DNA, 20 bp, Artificial Sequence
  Description of Artificial Sequence: Synthetic oligonucleotide
  Target: LAMA2; (-) strand; PAM type: YTN; PAM sequence: TTC
cccctatgtttaggtatttc

SEQ ID NO: 220592 - DNA, 20 bp, Artificial Sequence
  Description of Artificial Sequence: Synthetic oligonucleotide
  Target: LAMA2; (-) strand; PAM type: YTN; PAM sequence: TTT
ccccctatgtttaggtattt

SEQ ID NO: 220593 - DNA, 20 bp, Artificial Sequence
  Description of Artificial Sequence: Synthetic oligonucleotide
  Target: LAMA2; (-) strand; PAM type: YTN; PAM sequence: TTT
tccccctatgtttaggtatt

SEQ ID NO: 220594 - DNA, 20 bp, Artificial Sequence
  Description of Artificial Sequence: Synthetic oligonucleotide
  Target: LAMA2; (-) strand; PAM type: YTN; PAM sequence: TTT
ttccccctatgtttaggtat

SEQ ID NO: 220595 - DNA, 20 bp, Artificial Sequence
  Description of Artificial Sequence: Synthetic oligonucleotide
  Target: LAMA2; (-) strand; PAM type: YTN; PAM sequence: TTT
tttccccctatgtttaggta

SEQ ID NO: 220596 - DNA, 20 bp, Artificial Sequence
  Description of Artificial Sequence: Synthetic oligonucleotide
  Target: LAMA2; (-) strand; PAM type: YTN; PAM sequence: TTA
ggtgttttttccccctatgt

SEQ ID NO: 220597 - DNA, 20 bp, Artificial Sequence
  Description of Artificial Sequence: Synthetic oligonucleotide
  Target: LAMA2; (-) strand; PAM type: YTN; PAM sequence: TTT
aggtgttttttccccctatg

SEQ ID NO: 220598 - DNA, 20 bp, Artificial Sequence
  Description of Artificial Sequence: Synthetic oligonucleotide
  Target: LAMA2; (-) strand; PAM type: YTN; PAM sequence: TTA
caatttaggtgttttttccc

SEQ ID NO: 220599 - DNA, 20 bp, Artificial Sequence
  Description of Artificial Sequence: Synthetic oligonucleotide
  Target: LAMA2; (-) strand; PAM type: YTN; PAM sequence: CTC
attacaatttaggtgttttt

SEQ ID NO: 220600 - DNA, 20 bp, Artificial Sequence
  Description of Artificial Sequence: Synthetic oligonucleotide
  Target: LAMA2; (-) strand; PAM type: YTN; PAM sequence: TTA
tatatatatacacacatata

SEQ ID NO: 220601 - DNA, 20 bp, Artificial Sequence
  Description of Artificial Sequence: Synthetic oligonucleotide
  Target: LAMA2; (-) strand; PAM type: YTN; PAM sequence: TTT
atatatatatacacacatat

SEQ ID NO: 220602 - DNA, 20 bp, Artificial Sequence
  Description of Artificial Sequence: Synthetic oligonucleotide
  Target: LAMA2; (-) strand; PAM type: YTN; PAM sequence: TTA
tatatatttatatatatata

SEQ ID NO: 220603 - DNA, 20 bp, Artificial Sequence
  Description of Artificial Sequence: Synthetic oligonucleotide
  Target: LAMA2; (-) strand; PAM type: YTN; PAM sequence: TTA
tatataatatattatatata

SEQ ID NO: 220604 - DNA, 20 bp, Artificial Sequence
  Description of Artificial Sequence: Synthetic oligonucleotide
  Target: LAMA2; (-) strand; PAM type: YTN; PAM sequence: TTA
tatattatatataatatatt

SEQ ID NO: 220605 - DNA, 20 bp, Artificial Sequence
  Description of Artificial Sequence: Synthetic oligonucleotide
  Target: LAMA2; (-) strand; PAM type: YTN; PAM sequence: TTA
tatatgtattatatattata

SEQ ID NO: 220606 - DNA, 20 bp, Artificial Sequence
  Description of Artificial Sequence: Synthetic oligonucleotide
  Target: LAMA2; (-) strand; PAM type: YTN; PAM sequence: TTA
tatataatatataagatata

SEQ ID NO: 220607 - DNA, 20 bp, Artificial Sequence
  Description of Artificial Sequence: Synthetic oligonucleotide
  Target: LAMA2; (-) strand; PAM type: YTN; PAM sequence: TTT
atatataatatataagatat

SEQ ID NO: 220608 - DNA, 20 bp, Artificial Sequence
  Description of Artificial Sequence: Synthetic oligonucleotide
  Target: LAMA2; (-) strand; PAM type: YTN; PAM sequence: TTA
tatatatatatttatatata

SEQ ID NO: 220609 - DNA, 20 bp, Artificial Sequence
  Description of Artificial Sequence: Synthetic oligonucleotide
  Target: LAMA2; (-) strand; PAM type: YTN; PAM sequence: TTA
tatatattatatatatatat

SEQ ID NO: 220610 - DNA, 20 bp, Artificial Sequence
  Description of Artificial Sequence: Synthetic oligonucleotide
  Target: LAMA2; (-) strand; PAM type: YTN; PAM sequence: TTT
atatatattatatatatata

SEQ ID NO: 220611 - DNA, 20 bp, Artificial Sequence
  Description of Artificial Sequence: Synthetic oligonucleotide
  Target: LAMA2; (-) strand; PAM type: YTN; PAM sequence: TTT
tatatatattatatatatat

SEQ ID NO: 220612 - DNA, 20 bp, Artificial Sequence
  Description of Artificial Sequence: Synthetic oligonucleotide
  Target: LAMA2; (-) strand; PAM type: YTN; PAM sequence: CTA
attttatatatattatatat

SEQ ID NO: 220613 - DNA, 20 bp, Artificial Sequence
  Description of Artificial Sequence: Synthetic oligonucleotide
  Target: LAMA2; (-) strand; PAM type: YTN; PAM sequence: CTC
taattttatatatattatat

SEQ ID NO: 220614 - DNA, 20 bp, Artificial Sequence
  Description of Artificial Sequence: Synthetic oligonucleotide
  Target: LAMA2; (-) strand; PAM type: YTN; PAM sequence: TTC
tctaattttatatatattat

SEQ ID NO: 220615 - DNA, 20 bp, Artificial Sequence
  Description of Artificial Sequence: Synthetic oligonucleotide
  Target: LAMA2; (-) strand; PAM type: YTN; PAM sequence: TTA
aagattctctaattttatat

SEQ ID NO: 220616 - DNA, 20 bp, Artificial Sequence
  Description of Artificial Sequence: Synthetic oligonucleotide
  Target: LAMA2; (-) strand; PAM type: YTN; PAM sequence: TTA
ttaaagattctctaatttta

SEQ ID NO: 220617 - DNA, 20 bp, Artificial Sequence
  Description of Artificial Sequence: Synthetic oligonucleotide
  Target: LAMA2; (-) strand; PAM type: YTN; PAM sequence: CTT
attaaagattctctaatttt

SEQ ID NO: 220618 - DNA, 20 bp, Artificial Sequence
  Description of Artificial Sequence: Synthetic oligonucleotide
  Target: LAMA2; (-) strand; PAM type: YTN; PAM sequence: CTC
ttattaaagattctctaatt

SEQ ID NO: 220619 - DNA, 20 bp, Artificial Sequence
  Description of Artificial Sequence: Synthetic oligonucleotide
  Target: LAMA2; (-) strand; PAM type: YTN; PAM sequence: TTC
acctcttattaaagattctc

SEQ ID NO: 220620 - DNA, 20 bp, Artificial Sequence
  Description of Artificial Sequence: Synthetic oligonucleotide
  Target: LAMA2; (-) strand; PAM type: YTN; PAM sequence: TTG
gagccattcacctcttatta

SEQ ID NO: 220621 - DNA, 20 bp, Artificial Sequence
  Description of Artificial Sequence: Synthetic oligonucleotide
  Target: LAMA2; (-) strand; PAM type: YTN; PAM sequence: TTT
ggagccattcacctcttatt

SEQ ID NO: 220622 - DNA, 20 bp, Artificial Sequence
  Description of Artificial Sequence: Synthetic oligonucleotide
  Target: LAMA2; (-) strand; PAM type: YTN; PAM sequence: CTG
tgtttggagccattcacctc

SEQ ID NO: 220623 - DNA, 20 bp, Artificial Sequence
  Description of Artificial Sequence: Synthetic oligonucleotide
  Target: LAMA2; (-) strand; PAM type: YTN; PAM sequence: TTA
aatctgtgtttggagccatt

SEQ ID NO: 220624 - DNA, 20 bp, Artificial Sequence
  Description of Artificial Sequence: Synthetic oligonucleotide
  Target: LAMA2; (-) strand; PAM type: YTN; PAM sequence: TTC
caaattaaatctgtgtttgg

SEQ ID NO: 220625 - DNA, 20 bp, Artificial Sequence
  Description of Artificial Sequence: Synthetic oligonucleotide
  Target: LAMA2; (-) strand; PAM type: YTN; PAM sequence: CTT
ccaaattaaatctgtgtttg

SEQ ID NO: 220626 - DNA, 20 bp, Artificial Sequence
  Description of Artificial Sequence: Synthetic oligonucleotide
  Target: LAMA2; (-) strand; PAM type: YTN; PAM sequence: CTA
gggtgggagcttccaaatta

SEQ ID NO: 220627 - DNA, 20 bp, Artificial Sequence
  Description of Artificial Sequence: Synthetic oligonucleotide
  Target: LAMA2; (-) strand; PAM type: YTN; PAM sequence: TTG
ctagggtgggagcttccaaa

SEQ ID NO: 220628 - DNA, 20 bp, Artificial Sequence
  Description of Artificial Sequence: Synthetic oligonucleotide
  Target: LAMA2; (-) strand; PAM type: YTN; PAM sequence: TTA
cataaataaaatgaacacca

SEQ ID NO: 220629 - DNA, 20 bp, Artificial Sequence
  Description of Artificial Sequence: Synthetic oligonucleotide
  Target: LAMA2; (-) strand; PAM type: YTN; PAM sequence: TTT
acataaataaaatgaacacc

SEQ ID NO: 220630 - DNA, 20 bp, Artificial Sequence
  Description of Artificial Sequence: Synthetic oligonucleotide
  Target: LAMA2; (-) strand; PAM type: YTN; PAM sequence: TTG
tgtgtttacataaataaaat

SEQ ID NO: 220631 - DNA, 20 bp, Artificial Sequence
  Description of Artificial Sequence: Synthetic oligonucleotide
  Target: LAMA2; (-) strand; PAM type: YTN; PAM sequence: TTT
gtgtgtttacataaataaaa

SEQ ID NO: 220632 - DNA, 20 bp, Artificial Sequence
  Description of Artificial Sequence: Synthetic oligonucleotide
  Target: LAMA2; (-) strand; PAM type: YTN; PAM sequence: TTA
catagtcaacatttgtgtgt

SEQ ID NO: 220633 - DNA, 20 bp, Artificial Sequence
  Description of Artificial Sequence: Synthetic oligonucleotide
  Target: LAMA2; (-) strand; PAM type: YTN; PAM sequence: TTG
aaaaattacatagtcaacat

SEQ ID NO: 220634 - DNA, 20 bp, Artificial Sequence
  Description of Artificial Sequence: Synthetic oligonucleotide
  Target: LAMA2; (-) strand; PAM type: YTN; PAM sequence: TTA
attgaaaaattacatagtca

SEQ ID NO: 220635 - DNA, 20 bp, Artificial Sequence
  Description of Artificial Sequence: Synthetic oligonucleotide
  Target: LAMA2; (-) strand; PAM type: YTN; PAM sequence: CTT
aattgaaaaattacatagtc

SEQ ID NO: 220636 - DNA, 20 bp, Artificial Sequence
  Description of Artificial Sequence: Synthetic oligonucleotide
  Target: LAMA2; (-) strand; PAM type: YTN; PAM sequence: TTC
cttaattgaaaaattacata

SEQ ID NO: 220637 - DNA, 20 bp, Artificial Sequence
  Description of Artificial Sequence: Synthetic oligonucleotide
  Target: LAMA2; (-) strand; PAM type: YTN; PAM sequence: TTT
ccttaattgaaaaattacat

SEQ ID NO: 220638 - DNA, 20 bp, Artificial Sequence
  Description of Artificial Sequence: Synthetic oligonucleotide
  Target: LAMA2; (-) strand; PAM type: YTN; PAM sequence: CTA
tttccttaattgaaaaatta

SEQ ID NO: 220639 - DNA, 20 bp, Artificial Sequence
  Description of Artificial Sequence: Synthetic oligonucleotide
  Target: LAMA2; (-) strand; PAM type: YTN; PAM sequence: TTG
gctatttccttaattgaaaa

SEQ ID NO: 220640 - DNA, 20 bp, Artificial Sequence
  Description of Artificial Sequence: Synthetic oligonucleotide
  Target: LAMA2; (-) strand; PAM type: YTN; PAM sequence: TTA
ttggctatttccttaattga

SEQ ID NO: 220641 - DNA, 20 bp, Artificial Sequence
  Description of Artificial Sequence: Synthetic oligonucleotide
  Target: LAMA2; (-) strand; PAM type: YTN; PAM sequence: TTT
attggctatttccttaattg

SEQ ID NO: 220642 - DNA, 20 bp, Artificial Sequence
  Description of Artificial Sequence: Synthetic oligonucleotide
  Target: LAMA2; (-) strand; PAM type: YTN; PAM sequence: TTT
tattggctatttccttaatt

SEQ ID NO: 220643 - DNA, 20 bp, Artificial Sequence
  Description of Artificial Sequence: Synthetic oligonucleotide
  Target: LAMA2; (-) strand; PAM type: YTN; PAM sequence: TTC
cacacaattttattggctat

SEQ ID NO: 220644 - DNA, 20 bp, Artificial Sequence
  Description of Artificial Sequence: Synthetic oligonucleotide
  Target: LAMA2; (-) strand; PAM type: YTN; PAM sequence: TTT
ccacacaattttattggcta

SEQ ID NO: 220645 - DNA, 20 bp, Artificial Sequence
  Description of Artificial Sequence: Synthetic oligonucleotide
  Target: LAMA2; (-) strand; PAM type: YTN; PAM sequence: TTT
tccacacaattttattggct

SEQ ID NO: 220646 - DNA, 20 bp, Artificial Sequence
  Description of Artificial Sequence: Synthetic oligonucleotide
  Target: LAMA2; (-) strand; PAM type: YTN; PAM sequence: TTT
ttccacacaattttattggc

SEQ ID NO: 220647 - DNA, 20 bp, Artificial Sequence
  Description of Artificial Sequence: Synthetic oligonucleotide
  Target: LAMA2; (-) strand; PAM type: YTN; PAM sequence: TTT
tttccacacaattttattgg

SEQ ID NO: 220648 - DNA, 20 bp, Artificial Sequence
  Description of Artificial Sequence: Synthetic oligonucleotide
  Target: LAMA2; (-) strand; PAM type: YTN; PAM sequence: CTT
ttttccacacaattttattg

SEQ ID NO: 220649 - DNA, 20 bp, Artificial Sequence
  Description of Artificial Sequence: Synthetic oligonucleotide
  Target: LAMA2; (-) strand; PAM type: YTN; PAM sequence: CTA
tcttttttccacacaatttt

SEQ ID NO: 220650 - DNA, 20 bp, Artificial Sequence
  Description of Artificial Sequence: Synthetic oligonucleotide
  Target: LAMA2; (-) strand; PAM type: YTN; PAM sequence: CTA
ccgctatcttttttccacac

SEQ ID NO: 220651 - DNA, 20 bp, Artificial Sequence
  Description of Artificial Sequence: Synthetic oligonucleotide
  Target: LAMA2; (-) strand; PAM type: YTN; PAM sequence: CTG
ctaccgctatcttttttcca

SEQ ID NO: 220652 - DNA, 20 bp, Artificial Sequence
  Description of Artificial Sequence: Synthetic oligonucleotide
  Target: LAMA2; (-) strand; PAM type: YTN; PAM sequence: TTA
tctgctaccgctatcttttt

SEQ ID NO: 220653 - DNA, 20 bp, Artificial Sequence
  Description of Artificial Sequence: Synthetic oligonucleotide
  Target: LAMA2; (-) strand; PAM type: YTN; PAM sequence: TTA
ttatctgctaccgctatctt

SEQ ID NO: 220654 - DNA, 20 bp, Artificial Sequence
  Description of Artificial Sequence: Synthetic oligonucleotide
  Target: LAMA2; (-) strand; PAM type: YTN; PAM sequence: TTA
gtaagtaaaagatgttatta

SEQ ID NO: 220655 - DNA, 20 bp, Artificial Sequence
  Description of Artificial Sequence: Synthetic oligonucleotide
  Target: LAMA2; (-) strand; PAM type: YTN; PAM sequence: TTT
agtaagtaaaagatgttatt

SEQ ID NO: 220656 - DNA, 20 bp, Artificial Sequence
  Description of Artificial Sequence: Synthetic oligonucleotide
  Target: LAMA2; (-) strand; PAM type: YTN; PAM sequence: CTT
tagtaagtaaaagatgttat

SEQ ID NO: 220657 - DNA, 20 bp, Artificial Sequence
  Description of Artificial Sequence: Synthetic oligonucleotide
  Target: LAMA2; (-) strand; PAM type: YTN; PAM sequence: CTC
tttagtaagtaaaagatgtt

SEQ ID NO: 220658 - DNA, 20 bp, Artificial Sequence
  Description of Artificial Sequence: Synthetic oligonucleotide
  Target: LAMA2; (-) strand; PAM type: YTN; PAM sequence: TTA
gacacaatctctttagtaag

SEQ ID NO: 220659 - DNA, 20 bp, Artificial Sequence
  Description of Artificial Sequence: Synthetic oligonucleotide
  Target: LAMA2; (-) strand; PAM type: YTN; PAM sequence: TTT
agacacaatctctttagtaa

SEQ ID NO: 220660 - DNA, 20 bp, Artificial Sequence
  Description of Artificial Sequence: Synthetic oligonucleotide
  Target: LAMA2; (-) strand; PAM type: YTN; PAM sequence: TTA
atatttagacacaatctctt

SEQ ID NO: 220661 - DNA, 20 bp, Artificial Sequence
  Description of Artificial Sequence: Synthetic oligonucleotide
  Target: LAMA2; (-) strand; PAM type: YTN; PAM sequence: TTT
aatatttagacacaatctct

SEQ ID NO: 220662 - DNA, 20 bp, Artificial Sequence
  Description of Artificial Sequence: Synthetic oligonucleotide
  Target: LAMA2; (-) strand; PAM type: YTN; PAM sequence: TTT
taatatttagacacaatctc

SEQ ID NO: 220663 - DNA, 20 bp, Artificial Sequence
  Description of Artificial Sequence: Synthetic oligonucleotide
  Target: LAMA2; (-) strand; PAM type: YTN; PAM sequence: CTT
ttaatatttagacacaatct

SEQ ID NO: 220664 - DNA, 20 bp, Artificial Sequence
  Description of Artificial Sequence: Synthetic oligonucleotide
  Target: LAMA2; (-) strand; PAM type: YTN; PAM sequence: TTA
cttttaatatttagacacaa

SEQ ID NO: 220665 - DNA, 20 bp, Artificial Sequence
  Description of Artificial Sequence: Synthetic oligonucleotide
  Target: LAMA2; (-) strand; PAM type: YTN; PAM sequence: TTG
acaagggaatgtattacttt

SEQ ID NO: 220666 - DNA, 20 bp, Artificial Sequence
  Description of Artificial Sequence: Synthetic oligonucleotide
  Target: LAMA2; (-) strand; PAM type: YTN; PAM sequence: TTT
gacaagggaatgtattactt

SEQ ID NO: 220667 - DNA, 20 bp, Artificial Sequence
  Description of Artificial Sequence: Synthetic oligonucleotide
  Target: LAMA2; (-) strand; PAM type: YTN; PAM sequence: TTT
tgacaagggaatgtattact

SEQ ID NO: 220668 - DNA, 20 bp, Artificial Sequence
  Description of Artificial Sequence: Synthetic oligonucleotide
  Target: LAMA2; (-) strand; PAM type: YTN; PAM sequence: TTG
tgaaaacaaacaaaaatgaa

SEQ ID NO: 220669 - DNA, 20 bp, Artificial Sequence
  Description of Artificial Sequence: Synthetic oligonucleotide
  Target: LAMA2; (-) strand; PAM type: YTN; PAM sequence: TTT
gtgaaaacaaacaaaaatga

SEQ ID NO: 220670 - DNA, 20 bp, Artificial Sequence
  Description of Artificial Sequence: Synthetic oligonucleotide
  Target: LAMA2; (-) strand; PAM type: YTN; PAM sequence: TTA
aaatatttgtgaaaacaaac

SEQ ID NO: 220671 - DNA, 20 bp, Artificial Sequence
  Description of Artificial Sequence: Synthetic oligonucleotide
  Target: LAMA2; (-) strand; PAM type: YTN; PAM sequence: CTC
aaaatccacattaaaatatt

SEQ ID NO: 220672 - DNA, 20 bp, Artificial Sequence
  Description of Artificial Sequence: Synthetic oligonucleotide
  Target: LAMA2; (-) strand; PAM type: YTN; PAM sequence: TTG
actcaaaatccacattaaaa

SEQ ID NO: 220673 - DNA, 20 bp, Artificial Sequence
  Description of Artificial Sequence: Synthetic oligonucleotide
  Target: LAMA2; (-) strand; PAM type: YTN; PAM sequence: TTT
gactcaaaatccacattaaa

SEQ ID NO: 220674 - DNA, 20 bp, Artificial Sequence
  Description of Artificial Sequence: Synthetic oligonucleotide
  Target: LAMA2; (-) strand; PAM type: YTN; PAM sequence: CTA
cagaaaatttgactcaaaat

SEQ ID NO: 220675 - DNA, 20 bp, Artificial Sequence
  Description of Artificial Sequence: Synthetic oligonucleotide
  Target: LAMA2; (-) strand; PAM type: YTN; PAM sequence: TTC
ctacagaaaatttgactcaa

SEQ ID NO: 220676 - DNA, 20 bp, Artificial Sequence
  Description of Artificial Sequence: Synthetic oligonucleotide
  Target: LAMA2; (-) strand; PAM type: YTN; PAM sequence: CTT
cctacagaaaatttgactca

SEQ ID NO: 220677 - DNA, 20 bp, Artificial Sequence
  Description of Artificial Sequence: Synthetic oligonucleotide
  Target: LAMA2; (-) strand; PAM type: YTN; PAM sequence: CTA
ccatgaccttcctacagaaa

SEQ ID NO: 220678 - DNA, 20 bp, Artificial Sequence
  Description of Artificial Sequence: Synthetic oligonucleotide
  Target: LAMA2; (-) strand; PAM type: YTN; PAM sequence: TTA
atctaccatgaccttcctac

SEQ ID NO: 220679 - DNA, 20 bp, Artificial Sequence
  Description of Artificial Sequence: Synthetic oligonucleotide
  Target: LAMA2; (-) strand; PAM type: YTN; PAM sequence: TTG
acattaatctaccatgacct

SEQ ID NO: 220680 - DNA, 20 bp, Artificial Sequence
  Description of Artificial Sequence: Synthetic oligonucleotide
  Target: LAMA2; (-) strand; PAM type: YTN; PAM sequence: TTT
gacattaatctaccatgacc

SEQ ID NO: 220681 - DNA, 20 bp, Artificial Sequence
  Description of Artificial Sequence: Synthetic oligonucleotide
  Target: LAMA2; (-) strand; PAM type: YTN; PAM sequence: CTA
atttgacattaatctaccat

SEQ ID NO: 220682 - DNA, 20 bp, Artificial Sequence
  Description of Artificial Sequence: Synthetic oligonucleotide
  Target: LAMA2; (-) strand; PAM type: YTN; PAM sequence: TTC
agctaatttgacattaatct

SEQ ID NO: 220683 - DNA, 20 bp, Artificial Sequence
  Description of Artificial Sequence: Synthetic oligonucleotide
  Target: LAMA2; (-) strand; PAM type: YTN; PAM sequence: TTT
cagctaatttgacattaatc

SEQ ID NO: 220684 - DNA, 20 bp, Artificial Sequence
  Description of Artificial Sequence: Synthetic oligonucleotide
  Target: LAMA2; (-) strand; PAM type: YTN; PAM sequence: TTG
tttcagctaatttgacatta

SEQ ID NO: 220685 - DNA, 20 bp, Artificial Sequence
  Description of Artificial Sequence: Synthetic oligonucleotide
  Target: LAMA2; (-) strand; PAM type: YTN; PAM sequence: TTA
ttgtttcagctaatttgaca

SEQ ID NO: 220686 - DNA, 20 bp, Artificial Sequence
  Description of Artificial Sequence: Synthetic oligonucleotide
  Target: LAMA2; (-) strand; PAM type: YTN; PAM sequence: TTT
attgtttcagctaatttgac

SEQ ID NO: 220687 - DNA, 20 bp, Artificial Sequence
  Description of Artificial Sequence: Synthetic oligonucleotide
  Target: LAMA2; (-) strand; PAM type: YTN; PAM sequence: TTG
tgtttattgtttcagctaat

SEQ ID NO: 220688 - DNA, 20 bp, Artificial Sequence
  Description of Artificial Sequence: Synthetic oligonucleotide
  Target: LAMA2; (-) strand; PAM type: YTN; PAM sequence: TTC
attgtgtttattgtttcagc

SEQ ID NO: 220689 - DNA, 20 bp, Artificial Sequence
  Description of Artificial Sequence: Synthetic oligonucleotide
  Target: LAMA2; (-) strand; PAM type: YTN; PAM sequence: TTT
cattgtgtttattgtttcag

SEQ ID NO: 220690 - DNA, 20 bp, Artificial Sequence
  Description of Artificial Sequence: Synthetic oligonucleotide
  Target: LAMA2; (-) strand; PAM type: YTN; PAM sequence: TTT
tcattgtgtttattgtttca

SEQ ID NO: 220691 - DNA, 20 bp, Artificial Sequence
  Description of Artificial Sequence: Synthetic oligonucleotide
  Target: LAMA2; (-) strand; PAM type: YTN; PAM sequence: CTT
ttcattgtgtttattgtttc

SEQ ID NO: 220692 - DNA, 20 bp, Artificial Sequence
  Description of Artificial Sequence: Synthetic oligonucleotide
  Target: LAMA2; (-) strand; PAM type: YTN; PAM sequence: TTC
ttttcattgtgtttattgtt

SEQ ID NO: 220693 - DNA, 20 bp, Artificial Sequence
  Description of Artificial Sequence: Synthetic oligonucleotide
  Target: LAMA2; (-) strand; PAM type: YTN; PAM sequence: TTT
cttttcattgtgtttattgt

SEQ ID NO: 220694 - DNA, 20 bp, Artificial Sequence
  Description of Artificial Sequence: Synthetic oligonucleotide
  Target: LAMA2; (-) strand; PAM type: YTN; PAM sequence: TTT
tcttttcattgtgtttattg

SEQ ID NO: 220695 - DNA, 20 bp, Artificial Sequence
  Description of Artificial Sequence: Synthetic oligonucleotide
  Target: LAMA2; (-) strand; PAM type: YTN; PAM sequence: TTT
ttcttttcattgtgtttatt

SEQ ID NO: 220696 - DNA, 20 bp, Artificial Sequence
  Description of Artificial Sequence: Synthetic oligonucleotide
  Target: LAMA2; (-) strand; PAM type: YTN; PAM sequence: CTG
atttttcttttcattgtgtt

SEQ ID NO: 220697 - DNA, 20 bp, Artificial Sequence
  Description of Artificial Sequence: Synthetic oligonucleotide
  Target: LAMA2; (-) strand; PAM type: YTN; PAM sequence: TTA
caaggctgatttttcttttc

SEQ ID NO: 220698 - DNA, 20 bp, Artificial Sequence
  Description of Artificial Sequence: Synthetic oligonucleotide
  Target: LAMA2; (-) strand; PAM type: YTN; PAM sequence: CTT
acaaggctgatttttctttt

SEQ ID NO: 220699 - DNA, 20 bp, Artificial Sequence
  Description of Artificial Sequence: Synthetic oligonucleotide
  Target: LAMA2; (-) strand; PAM type: YTN; PAM sequence: CTG
tcttacaaggctgatttttc

SEQ ID NO: 220700 - DNA, 20 bp, Artificial Sequence
  Description of Artificial Sequence: Synthetic oligonucleotide
  Target: LAMA2; (-) strand; PAM type: YTN; PAM sequence: TTG
tactgtcttacaaggctgat

SEQ ID NO: 220701 - DNA, 20 bp, Artificial Sequence
  Description of Artificial Sequence: Synthetic oligonucleotide
  Target: LAMA2; (-) strand; PAM type: YTN; PAM sequence: TTA
gttgtactgtcttacaaggc

SEQ ID NO: 220702 - DNA, 20 bp, Artificial Sequence
  Description of Artificial Sequence: Synthetic oligonucleotide
  Target: LAMA2; (-) strand; PAM type: YTN; PAM sequence: CTT
agttgtactgtcttacaagg

SEQ ID NO: 220703 - DNA, 20 bp, Artificial Sequence
  Description of Artificial Sequence: Synthetic oligonucleotide
  Target: LAMA2; (-) strand; PAM type: YTN; PAM sequence: CTC
cttagttgtactgtcttaca

SEQ ID NO: 220704 - DNA, 20 bp, Artificial Sequence
  Description of Artificial Sequence: Synthetic oligonucleotide
  Target: LAMA2; (-) strand; PAM type: YTN; PAM sequence: CTG
atctccttagttgtactgtc

SEQ ID NO: 220705 - DNA, 20 bp, Artificial Sequence
  Description of Artificial Sequence: Synthetic oligonucleotide
  Target: LAMA2; (-) strand; PAM type: YTN; PAM sequence: TTA
aactgatctccttagttgta

SEQ ID NO: 220706 - DNA, 20 bp, Artificial Sequence
  Description of Artificial Sequence: Synthetic oligonucleotide
  Target: LAMA2; (-) strand; PAM type: YTN; PAM sequence: TTT
aaactgatctccttagttgt

SEQ ID NO: 220707 - DNA, 20 bp, Artificial Sequence
  Description of Artificial Sequence: Synthetic oligonucleotide
  Target: LAMA2; (-) strand; PAM type: YTN; PAM sequence: TTT
taaactgatctccttagttg

SEQ ID NO: 220708 - DNA, 20 bp, Artificial Sequence
  Description of Artificial Sequence: Synthetic oligonucleotide
  Target: LAMA2; (-) strand; PAM type: YTN; PAM sequence: TTA
gtgttttaaactgatctcct

SEQ ID NO: 220709 - DNA, 20 bp, Artificial Sequence
  Description of Artificial Sequence: Synthetic oligonucleotide
  Target: LAMA2; (-) strand; PAM type: YTN; PAM sequence: CTC
attagtgttttaaactgatc

SEQ ID NO: 220710 - DNA, 20 bp, Artificial Sequence
  Description of Artificial Sequence: Synthetic oligonucleotide
  Target: LAMA2; (-) strand; PAM type: YTN; PAM sequence: CTC
ctcattagtgttttaaactg

SEQ ID NO: 220711 - DNA, 20 bp, Artificial Sequence
  Description of Artificial Sequence: Synthetic oligonucleotide
  Target: LAMA2; (-) strand; PAM type: YTN; PAM sequence: CTG
agaggcaactcctcattagt

SEQ ID NO: 220712 - DNA, 20 bp, Artificial Sequence
  Description of Artificial Sequence: Synthetic oligonucleotide
  Target: LAMA2; (-) strand; PAM type: YTN; PAM sequence: TTA
gtataatcataatgacccag

SEQ ID NO: 220713 - DNA, 20 bp, Artificial Sequence
  Description of Artificial Sequence: Synthetic oligonucleotide
  Target: LAMA2; (-) strand; PAM type: YTN; PAM sequence: TTA
tattagtataatcataatga

SEQ ID NO: 220714 - DNA, 20 bp, Artificial Sequence
  Description of Artificial Sequence: Synthetic oligonucleotide
  Target: LAMA2; (-) strand; PAM type: YTN; PAM sequence: TTA
ttatattagtataatcataa

SEQ ID NO: 220715 - DNA, 20 bp, Artificial Sequence
  Description of Artificial Sequence: Synthetic oligonucleotide
  Target: LAMA2; (-) strand; PAM type: YTN; PAM sequence: CTT
attatattagtataatcata

SEQ ID NO: 220716 - DNA, 20 bp, Artificial Sequence
  Description of Artificial Sequence: Synthetic oligonucleotide
  Target: LAMA2; (-) strand; PAM type: YTN; PAM sequence: CTA
acttattatattagtataat

SEQ ID NO: 220717 - DNA, 20 bp, Artificial Sequence
  Description of Artificial Sequence: Synthetic oligonucleotide
  Target: LAMA2; (-) strand; PAM type: YTN; PAM sequence: CTG
aacctaacttattatattag

SEQ ID NO: 220718 - DNA, 20 bp, Artificial Sequence
  Description of Artificial Sequence: Synthetic oligonucleotide
  Target: LAMA2; (-) strand; PAM type: YTN; PAM sequence: CTA
acctgaacctaacttattat

SEQ ID NO: 220719 - DNA, 20 bp, Artificial Sequence
  Description of Artificial Sequence: Synthetic oligonucleotide
  Target: LAMA2; (-) strand; PAM type: YTN; PAM sequence: TTC
taacctgaacctaacttatt

SEQ ID NO: 220720 - DNA, 20 bp, Artificial Sequence
  Description of Artificial Sequence: Synthetic oligonucleotide
  Target: LAMA2; (-) strand; PAM type: YTN; PAM sequence: TTT
ctaacctgaacctaacttat

SEQ ID NO: 220721 - DNA, 20 bp, Artificial Sequence
  Description of Artificial Sequence: Synthetic oligonucleotide
  Target: LAMA2; (-) strand; PAM type: YTN; PAM sequence: CTT
tctaacctgaacctaactta

SEQ ID NO: 220722 - DNA, 20 bp, Artificial Sequence
  Description of Artificial Sequence: Synthetic oligonucleotide
  Target: LAMA2; (-) strand; PAM type: YTN; PAM sequence: TTG
ctttctaacctgaacctaac

SEQ ID NO: 220723 - DNA, 20 bp, Artificial Sequence
  Description of Artificial Sequence: Synthetic oligonucleotide
  Target: LAMA2; (-) strand; PAM type: YTN; PAM sequence: TTT
gctttctaacctgaacctaa

SEQ ID NO: 220724 - DNA, 20 bp, Artificial Sequence
  Description of Artificial Sequence: Synthetic oligonucleotide
  Target: LAMA2; (-) strand; PAM type: YTN; PAM sequence: CTT
tgctttctaacctgaaccta

SEQ ID NO: 220725 - DNA, 20 bp, Artificial Sequence
  Description of Artificial Sequence: Synthetic oligonucleotide
  Target: LAMA2; (-) strand; PAM type: YTN; PAM sequence: TTC
atctttgctttctaacctga

SEQ ID NO: 220726 - DNA, 20 bp, Artificial Sequence
  Description of Artificial Sequence: Synthetic oligonucleotide
  Target: LAMA2; (-) strand; PAM type: YTN; PAM sequence: TTA
ttcatctttgctttctaacc

SEQ ID NO: 220727 - DNA, 20 bp, Artificial Sequence
  Description of Artificial Sequence: Synthetic oligonucleotide
  Target: LAMA2; (-) strand; PAM type: YTN; PAM sequence: TTG
aagattattcatctttgctt

SEQ ID NO: 220728 - DNA, 20 bp, Artificial Sequence
  Description of Artificial Sequence: Synthetic oligonucleotide
  Target: LAMA2; (-) strand; PAM type: YTN; PAM sequence: TTT
gaagattattcatctttgct

SEQ ID NO: 220729 - DNA, 20 bp, Artificial Sequence
  Description of Artificial Sequence: Synthetic oligonucleotide
  Target: LAMA2; (-) strand; PAM type: YTN; PAM sequence: TTT
tgaagattattcatctttgc

SEQ ID NO: 220730 - DNA, 20 bp, Artificial Sequence
  Description of Artificial Sequence: Synthetic oligonucleotide
  Target: LAMA2; (-) strand; PAM type: YTN; PAM sequence: CTT
ttgaagattattcatctttg

SEQ ID NO: 220731 - DNA, 20 bp, Artificial Sequence
  Description of Artificial Sequence: Synthetic oligonucleotide
  Target: LAMA2; (-) strand; PAM type: YTN; PAM sequence: CTG
tgccttttgaagattattca

SEQ ID NO: 220732 - DNA, 20 bp, Artificial Sequence
  Description of Artificial Sequence: Synthetic oligonucleotide
  Target: LAMA2; (-) strand; PAM type: YTN; PAM sequence: TTA
ctgtgccttttgaagattat

SEQ ID NO: 220733 - DNA, 20 bp, Artificial Sequence
  Description of Artificial Sequence: Synthetic oligonucleotide
  Target: LAMA2; (-) strand; PAM type: YTN; PAM sequence: TTT
actgtgccttttgaagatta

SEQ ID NO: 220734 - DNA, 20 bp, Artificial Sequence
  Description of Artificial Sequence: Synthetic oligonucleotide
  Target: LAMA2; (-) strand; PAM type: YTN; PAM sequence: CTA
tttactgtgccttttgaaga

SEQ ID NO: 220735 - DNA, 20 bp, Artificial Sequence
  Description of Artificial Sequence: Synthetic oligonucleotide
  Target: LAMA2; (-) strand; PAM type: YTN; PAM sequence: TTG
actatttactgtgccttttg

SEQ ID NO: 220736 - DNA, 20 bp, Artificial Sequence
  Description of Artificial Sequence: Synthetic oligonucleotide
  Target: LAMA2; (-) strand; PAM type: YTN; PAM sequence: CTA
aattgactatttactgtgcc

SEQ ID NO: 220737 - DNA, 20 bp, Artificial Sequence
  Description of Artificial Sequence: Synthetic oligonucleotide
  Target: LAMA2; (-) strand; PAM type: YTN; PAM sequence: TTA
tgaaggtagacaactaaatt

SEQ ID NO: 220738 - DNA, 20 bp, Artificial Sequence
  Description of Artificial Sequence: Synthetic oligonucleotide
  Target: LAMA2; (-) strand; PAM type: YTN; PAM sequence: TTA
gtatggaaatagtaaatatt

SEQ ID NO: 220739 - DNA, 20 bp, Artificial Sequence
  Description of Artificial Sequence: Synthetic oligonucleotide
  Target: LAMA2; (-) strand; PAM type: YTN; PAM sequence: TTT
agtatggaaatagtaaatat

SEQ ID NO: 220740 - DNA, 20 bp, Artificial Sequence
  Description of Artificial Sequence: Synthetic oligonucleotide
  Target: LAMA2; (-) strand; PAM type: YTN; PAM sequence: TTT
tagtatggaaatagtaaata

SEQ ID NO: 220741 - DNA, 20 bp, Artificial Sequence
  Description of Artificial Sequence: Synthetic oligonucleotide
  Target: LAMA2; (-) strand; PAM type: YTN; PAM sequence: CTT
ttagtatggaaatagtaaat

SEQ ID NO: 220742 - DNA, 20 bp, Artificial Sequence
  Description of Artificial Sequence: Synthetic oligonucleotide
  Target: LAMA2; (-) strand; PAM type: YTN; PAM sequence: CTG
taagcttttagtatggaaat

SEQ ID NO: 220743 - DNA, 20 bp, Artificial Sequence
  Description of Artificial Sequence: Synthetic oligonucleotide
  Target: LAMA2; (-) strand; PAM type: YTN; PAM sequence: CTA
gcccacaactgtaagctttt

SEQ ID NO: 220744 - DNA, 20 bp, Artificial Sequence
  Description of Artificial Sequence: Synthetic oligonucleotide
  Target: LAMA2; (-) strand; PAM type: YTN; PAM sequence: TTC
tagcccacaactgtaagctt

SEQ ID NO: 220745 - DNA, 20 bp, Artificial Sequence
  Description of Artificial Sequence: Synthetic oligonucleotide
  Target: LAMA2; (-) strand; PAM type: YTN; PAM sequence: TTA
cgtgaatatcatatattcta

SEQ ID NO: 220746 - DNA, 20 bp, Artificial Sequence
  Description of Artificial Sequence: Synthetic oligonucleotide
  Target: LAMA2; (-) strand; PAM type: YTN; PAM sequence: TTA
ttacgtgaatatcatatatt

SEQ ID NO: 220747 - DNA, 20 bp, Artificial Sequence
  Description of Artificial Sequence: Synthetic oligonucleotide
  Target: LAMA2; (-) strand; PAM type: YTN; PAM sequence: TTA
aatattattacgtgaatatc

SEQ ID NO: 220748 - DNA, 20 bp, Artificial Sequence
  Description of Artificial Sequence: Synthetic oligonucleotide
  Target: LAMA2; (-) strand; PAM type: YTN; PAM sequence: TTT
aaatattattacgtgaatat

SEQ ID NO: 220749 - DNA, 20 bp, Artificial Sequence
  Description of Artificial Sequence: Synthetic oligonucleotide
  Target: LAMA2; (-) strand; PAM type: YTN; PAM sequence: TTC
aatttaaatattattacgtg

SEQ ID NO: 220750 - DNA, 20 bp, Artificial Sequence
  Description of Artificial Sequence: Synthetic oligonucleotide
  Target: LAMA2; (-) strand; PAM type: YTN; PAM sequence: TTG
aggagggtagaggtaaggat

SEQ ID NO: 220751 - DNA, 20 bp, Artificial Sequence
  Description of Artificial Sequence: Synthetic oligonucleotide
  Target: LAMA2; (-) strand; PAM type: YTN; PAM sequence: TTA
ttgaggagggtagaggtaag

SEQ ID NO: 220752 - DNA, 20 bp, Artificial Sequence
  Description of Artificial Sequence: Synthetic oligonucleotide
  Target: LAMA2; (-) strand; PAM type: YTN; PAM sequence: TTT
attgaggagggtagaggtaa

SEQ ID NO: 220753 - DNA, 20 bp, Artificial Sequence
  Description of Artificial Sequence: Synthetic oligonucleotide
  Target: LAMA2; (-) strand; PAM type: YTN; PAM sequence: TTG
agatgaatttattgaggagg

SEQ ID NO: 220754 - DNA, 20 bp, Artificial Sequence
  Description of Artificial Sequence: Synthetic oligonucleotide
  Target: LAMA2; (-) strand; PAM type: YTN; PAM sequence: TTT
gagatgaatttattgaggag

SEQ ID NO: 220755 - DNA, 20 bp, Artificial Sequence
  Description of Artificial Sequence: Synthetic oligonucleotide
  Target: LAMA2; (-) strand; PAM type: YTN; PAM sequence: TTA
tcatttgagatgaatttatt

SEQ ID NO: 220756 - DNA, 20 bp, Artificial Sequence
  Description of Artificial Sequence: Synthetic oligonucleotide
  Target: LAMA2; (-) strand; PAM type: YTN; PAM sequence: CTT
atcatttgagatgaatttat

SEQ ID NO: 220757 - DNA, 20 bp, Artificial Sequence
  Description of Artificial Sequence: Synthetic oligonucleotide
  Target: LAMA2; (-) strand; PAM type: YTN; PAM sequence: TTC
acaatgatggatggaaaatc

SEQ ID NO: 220758 - DNA, 20 bp, Artificial Sequence
  Description of Artificial Sequence: Synthetic oligonucleotide
  Target: LAMA2; (-) strand; PAM type: YTN; PAM sequence: CTT
cacaatgatggatggaaaat

SEQ ID NO: 220759 - DNA, 20 bp, Artificial Sequence
  Description of Artificial Sequence: Synthetic oligonucleotide
  Target: LAMA2; (-) strand; PAM type: YTN; PAM sequence: TTC
ttcacaatgatggatggaaa

SEQ ID NO: 220760 - DNA, 20 bp, Artificial Sequence
  Description of Artificial Sequence: Synthetic oligonucleotide
  Target: LAMA2; (-) strand; PAM type: YTN; PAM sequence: TTA
ttcttcacaatgatggatgg

SEQ ID NO: 220761 - DNA, 20 bp, Artificial Sequence
  Description of Artificial Sequence: Synthetic oligonucleotide
  Target: LAMA2; (-) strand; PAM type: YTN; PAM sequence: TTA
agtaaataaattattcttca

SEQ ID NO: 220762 - DNA, 20 bp, Artificial Sequence
  Description of Artificial Sequence: Synthetic oligonucleotide
  Target: LAMA2; (-) strand; PAM type: YTN; PAM sequence: TTC
cagaatcattaagtaaataa

SEQ ID NO: 220763 - DNA, 20 bp, Artificial Sequence
  Description of Artificial Sequence: Synthetic oligonucleotide
  Target: LAMA2; (-) strand; PAM type: YTN; PAM sequence: TTT
ccagaatcattaagtaaata

SEQ ID NO: 220764 - DNA, 20 bp, Artificial Sequence
  Description of Artificial Sequence: Synthetic oligonucleotide
  Target: LAMA2; (-) strand; PAM type: YTN; PAM sequence: TTC
ccatatttccagaatcatta

SEQ ID NO: 220765 - DNA, 20 bp, Artificial Sequence
  Description of Artificial Sequence: Synthetic oligonucleotide
  Target: LAMA2; (-) strand; PAM type: YTN; PAM sequence: TTA
taaacattcccatatttcca

SEQ ID NO: 220766 - DNA, 20 bp, Artificial Sequence
  Description of Artificial Sequence: Synthetic oligonucleotide
  Target: LAMA2; (-) strand; PAM type: YTN; PAM sequence: TTT
ataaacattcccatatttcc

SEQ ID NO: 220767 - DNA, 20 bp, Artificial Sequence
  Description of Artificial Sequence: Synthetic oligonucleotide
  Target: LAMA2; (-) strand; PAM type: YTN; PAM sequence: TTT
tataaacattcccatatttc

SEQ ID NO: 220768 - DNA, 20 bp, Artificial Sequence
  Description of Artificial Sequence: Synthetic oligonucleotide
  Target: LAMA2; (-) strand; PAM type: YTN; PAM sequence: TTC
gttttataaacattcccata

SEQ ID NO: 220769 - DNA, 20 bp, Artificial Sequence
  Description of Artificial Sequence: Synthetic oligonucleotide
  Target: LAMA2; (-) strand; PAM type: YTN; PAM sequence: TTT
cgttttataaacattcccat

SEQ ID NO: 220770 - DNA, 20 bp, Artificial Sequence
  Description of Artificial Sequence: Synthetic oligonucleotide
  Target: LAMA2; (-) strand; PAM type: YTN; PAM sequence: TTG
tatttcgttttataaacatt

SEQ ID NO: 220771 - DNA, 20 bp, Artificial Sequence
  Description of Artificial Sequence: Synthetic oligonucleotide
  Target: LAMA2; (-) strand; PAM type: YTN; PAM sequence: TTT
gtatttcgttttataaacat

SEQ ID NO: 220772 - DNA, 20 bp, Artificial Sequence
  Description of Artificial Sequence: Synthetic oligonucleotide
  Target: LAMA2; (-) strand; PAM type: YTN; PAM sequence: TTT
tgtatttcgttttataaaca

SEQ ID NO: 220773 - DNA, 20 bp, Artificial Sequence
  Description of Artificial Sequence: Synthetic oligonucleotide
  Target: LAMA2; (-) strand; PAM type: YTN; PAM sequence: TTT
ttgtatttcgttttataaac

SEQ ID NO: 220774 - DNA, 20 bp, Artificial Sequence
  Description of Artificial Sequence: Synthetic oligonucleotide
  Target: LAMA2; (-) strand; PAM type: YTN; PAM sequence: TTA
atttttgtatttcgttttat

SEQ ID NO: 220775 - DNA, 20 bp, Artificial Sequence
  Description of Artificial Sequence: Synthetic oligonucleotide
  Target: LAMA2; (-) strand; PAM type: YTN; PAM sequence: CTT
aatttttgtatttcgtttta

SEQ ID NO: 220776 - DNA, 20 bp, Artificial Sequence
  Description of Artificial Sequence: Synthetic oligonucleotide
  Target: LAMA2; (-) strand; PAM type: YTN; PAM sequence: TTC
ttaatttttgtatttcgttt

SEQ ID NO: 220777 - DNA, 20 bp, Artificial Sequence
  Description of Artificial Sequence: Synthetic oligonucleotide
  Target: LAMA2; (-) strand; PAM type: YTN; PAM sequence: TTT
cttaatttttgtatttcgtt

SEQ ID NO: 220778 - DNA, 20 bp, Artificial Sequence
  Description of Artificial Sequence: Synthetic oligonucleotide
  Target: LAMA2; (-) strand; PAM type: YTN; PAM sequence: CTC
catttcttaatttttgtatt

SEQ ID NO: 220779 - DNA, 20 bp, Artificial Sequence
  Description of Artificial Sequence: Synthetic oligonucleotide
  Target: LAMA2; (-) strand; PAM type: YTN; PAM sequence: TTG
cccactccatttcttaattt

SEQ ID NO: 220780 - DNA, 20 bp, Artificial Sequence
  Description of Artificial Sequence: Synthetic oligonucleotide
  Target: LAMA2; (-) strand; PAM type: YTN; PAM sequence: CTT
gcccactccatttcttaatt

SEQ ID NO: 220781 - DNA, 20 bp, Artificial Sequence
  Description of Artificial Sequence: Synthetic oligonucleotide
  Target: LAMA2; (-) strand; PAM type: YTN; PAM sequence: TTA
cttgcccactccatttctta

SEQ ID NO: 220782 - DNA, 20 bp, Artificial Sequence
  Description of Artificial Sequence: Synthetic oligonucleotide
  Target: LAMA2; (-) strand; PAM type: YTN; PAM sequence: TTT
acttgcccactccatttctt

SEQ ID NO: 220783 - DNA, 20 bp, Artificial Sequence
  Description of Artificial Sequence: Synthetic oligonucleotide
  Target: LAMA2; (-) strand; PAM type: YTN; PAM sequence: TTT
tacttgcccactccatttct

SEQ ID NO: 220784 - DNA, 20 bp, Artificial Sequence
  Description of Artificial Sequence: Synthetic oligonucleotide
  Target: LAMA2; (-) strand; PAM type: YTN; PAM sequence: TTT
ttacttgcccactccatttc

SEQ ID NO: 220785 - DNA, 20 bp, Artificial Sequence
  Description of Artificial Sequence: Synthetic oligonucleotide
  Target: LAMA2; (-) strand; PAM type: YTN; PAM sequence: CTT
tttacttgcccactccattt

SEQ ID NO: 220786 - DNA, 20 bp, Artificial Sequence
  Description of Artificial Sequence: Synthetic oligonucleotide
  Target: LAMA2; (-) strand; PAM type: YTN; PAM sequence: CTA
aaatcagtgggaaaatgtct

SEQ ID NO: 220787 - DNA, 20 bp, Artificial Sequence
  Description of Artificial Sequence: Synthetic oligonucleotide
  Target: LAMA2; (-) strand; PAM type: YTN; PAM sequence: TTC
taaaatcagtgggaaaatgt

SEQ ID NO: 220788 - DNA, 20 bp, Artificial Sequence
  Description of Artificial Sequence: Synthetic oligonucleotide
  Target: LAMA2; (-) strand; PAM type: YTN; PAM sequence: TTG
agtatattctaaaatcagtg

SEQ ID NO: 220789 - DNA, 20 bp, Artificial Sequence
  Description of Artificial Sequence: Synthetic oligonucleotide
  Target: LAMA2; (-) strand; PAM type: YTN; PAM sequence: CTT
gagtatattctaaaatcagt

SEQ ID NO: 220790 - DNA, 20 bp, Artificial Sequence
  Description of Artificial Sequence: Synthetic oligonucleotide
  Target: LAMA2; (-) strand; PAM type: YTN; PAM sequence: TTC
ttgagtatattctaaaatca

SEQ ID NO: 220791 - DNA, 20 bp, Artificial Sequence
  Description of Artificial Sequence: Synthetic oligonucleotide
  Target: LAMA2; (-) strand; PAM type: YTN; PAM sequence: TTT
cttgagtatattctaaaatc

SEQ ID NO: 220792 - DNA, 20 bp, Artificial Sequence
  Description of Artificial Sequence: Synthetic oligonucleotide
  Target: LAMA2; (-) strand; PAM type: YTN; PAM sequence: TTT
tcttgagtatattctaaaat

SEQ ID NO: 220793 - DNA, 20 bp, Artificial Sequence
  Description of Artificial Sequence: Synthetic oligonucleotide
  Target: LAMA2; (-) strand; PAM type: YTN; PAM sequence: TTA
attttcttgagtatattcta

SEQ ID NO: 220794 - DNA, 20 bp, Artificial Sequence
  Description of Artificial Sequence: Synthetic oligonucleotide
  Target: LAMA2; (-) strand; PAM type: YTN; PAM sequence: TTT
aattttcttgagtatattct

SEQ ID NO: 220795 - DNA, 20 bp, Artificial Sequence
  Description of Artificial Sequence: Synthetic oligonucleotide
  Target: LAMA2; (-) strand; PAM type: YTN; PAM sequence: CTA
gtttaattttcttgagtata

SEQ ID NO: 220796 - DNA, 20 bp, Artificial Sequence
  Description of Artificial Sequence: Synthetic oligonucleotide
  Target: LAMA2; (-) strand; PAM type: YTN; PAM sequence: TTG
tcactagtttaattttcttg

SEQ ID NO: 220797 - DNA, 20 bp, Artificial Sequence
  Description of Artificial Sequence: Synthetic oligonucleotide
  Target: LAMA2; (-) strand; PAM type: YTN; PAM sequence: TTT
gtcactagtttaattttctt

SEQ ID NO: 220798 - DNA, 20 bp, Artificial Sequence
  Description of Artificial Sequence: Synthetic oligonucleotide
  Target: LAMA2; (-) strand; PAM type: YTN; PAM sequence: TTT
tgtcactagtttaattttct

SEQ ID NO: 220799 - DNA, 20 bp, Artificial Sequence
  Description of Artificial Sequence: Synthetic oligonucleotide
  Target: LAMA2; (-) strand; PAM type: YTN; PAM sequence: CTA
ttttgtcactagtttaattt

SEQ ID NO: 220800 - DNA, 20 bp, Artificial Sequence
  Description of Artificial Sequence: Synthetic oligonucleotide
  Target: LAMA2; (-) strand; PAM type: YTN; PAM sequence: TTA
aataaatctattttgtcact

SEQ ID NO: 220801 - DNA, 20 bp, Artificial Sequence
  Description of Artificial Sequence: Synthetic oligonucleotide
  Target: LAMA2; (-) strand; PAM type: YTN; PAM sequence: TTA
taagttaaataaatctattt

SEQ ID NO: 220802 - DNA, 20 bp, Artificial Sequence
  Description of Artificial Sequence: Synthetic oligonucleotide
  Target: LAMA2; (-) strand; PAM type: YTN; PAM sequence: CTT
ataagttaaataaatctatt

SEQ ID NO: 220803 - DNA, 20 bp, Artificial Sequence
  Description of Artificial Sequence: Synthetic oligonucleotide
  Target: LAMA2; (-) strand; PAM type: YTN; PAM sequence: TTA
gcttataagttaaataaatc

SEQ ID NO: 220804 - DNA, 20 bp, Artificial Sequence
  Description of Artificial Sequence: Synthetic oligonucleotide
  Target: LAMA2; (-) strand; PAM type: YTN; PAM sequence: TTA
tgaattagcttataagttaa

SEQ ID NO: 220805 - DNA, 20 bp, Artificial Sequence
  Description of Artificial Sequence: Synthetic oligonucleotide
  Target: LAMA2; (-) strand; PAM type: YTN; PAM sequence: TTT
atgaattagcttataagtta

SEQ ID NO: 220806 - DNA, 20 bp, Artificial Sequence
  Description of Artificial Sequence: Synthetic oligonucleotide
  Target: LAMA2; (-) strand; PAM type: YTN; PAM sequence: TTA
atttatgaattagcttataa

SEQ ID NO: 220807 - DNA, 20 bp, Artificial Sequence
  Description of Artificial Sequence: Synthetic oligonucleotide
  Target: LAMA2; (-) strand; PAM type: YTN; PAM sequence: TTG
ccattaatttatgaattagc

SEQ ID NO: 220808 - DNA, 20 bp, Artificial Sequence
  Description of Artificial Sequence: Synthetic oligonucleotide
  Target: LAMA2; (-) strand; PAM type: YTN; PAM sequence: TTT
gccattaatttatgaattag

SEQ ID NO: 220809 - DNA, 20 bp, Artificial Sequence
  Description of Artificial Sequence: Synthetic oligonucleotide
  Target: LAMA2; (-) strand; PAM type: YTN; PAM sequence: TTT
tgccattaatttatgaatta

SEQ ID NO: 220810 - DNA, 20 bp, Artificial Sequence
  Description of Artificial Sequence: Synthetic oligonucleotide
  Target: LAMA2; (-) strand; PAM type: YTN; PAM sequence: CTG
tgataaattttgccattaat

SEQ ID NO: 220811 - DNA, 20 bp, Artificial Sequence
  Description of Artificial Sequence: Synthetic oligonucleotide
  Target: LAMA2; (-) strand; PAM type: YTN; PAM sequence: TTA
tgtatactgtgataaatttt

SEQ ID NO: 220812 - DNA, 20 bp, Artificial Sequence
  Description of Artificial Sequence: Synthetic oligonucleotide
  Target: LAMA2; (-) strand; PAM type: YTN; PAM sequence: CTC
agttatgtatactgtgataa

SEQ ID NO: 220813 - DNA, 20 bp, Artificial Sequence
  Description of Artificial Sequence: Synthetic oligonucleotide
  Target: LAMA2; (-) strand; PAM type: YTN; PAM sequence: CTG
caaagtctcagttatgtata

SEQ ID NO: 220814 - DNA, 20 bp, Artificial Sequence
  Description of Artificial Sequence: Synthetic oligonucleotide
  Target: LAMA2; (-) strand; PAM type: YTN; PAM sequence: TTA
caaaaaaatctgcaaagtct

SEQ ID NO: 220815 - DNA, 20 bp, Artificial Sequence
  Description of Artificial Sequence: Synthetic oligonucleotide
  Target: LAMA2; (-) strand; PAM type: YTN; PAM sequence: TTT
acaaaaaaatctgcaaagtc

SEQ ID NO: 220816 - DNA, 20 bp, Artificial Sequence
  Description of Artificial Sequence: Synthetic oligonucleotide
  Target: LAMA2; (-) strand; PAM type: YTN; PAM sequence: CTA
tttacaaaaaaatctgcaaa

SEQ ID NO: 220817 - DNA, 20 bp, Artificial Sequence
  Description of Artificial Sequence: Synthetic oligonucleotide
  Target: LAMA2; (-) strand; PAM type: YTN; PAM sequence: TTA
tctatttacaaaaaaatctg

SEQ ID NO: 220818 - DNA, 20 bp, Artificial Sequence
  Description of Artificial Sequence: Synthetic oligonucleotide
  Target: LAMA2; (-) strand; PAM type: YTN; PAM sequence: TTG
tatcagaatgttatctattt

SEQ ID NO: 220819 - DNA, 20 bp, Artificial Sequence
  Description of Artificial Sequence: Synthetic oligonucleotide
  Target: LAMA2; (-) strand; PAM type: YTN; PAM sequence: TTA
attgtatcagaatgttatct

SEQ ID NO: 220820 - DNA, 20 bp, Artificial Sequence
  Description of Artificial Sequence: Synthetic oligonucleotide
  Target: LAMA2; (-) strand; PAM type: YTN; PAM sequence: CTG
ttaattgtatcagaatgtta

SEQ ID NO: 220821 - DNA, 20 bp, Artificial Sequence
  Description of Artificial Sequence: Synthetic oligonucleotide
  Target: LAMA2; (-) strand; PAM type: YTN; PAM sequence: CTG
atggagatctgttaattgta

SEQ ID NO: 220822 - DNA, 20 bp, Artificial Sequence
  Description of Artificial Sequence: Synthetic oligonucleotide
  Target: LAMA2; (-) strand; PAM type: YTN; PAM sequence: CTA
atgcagctgatggagatctg

SEQ ID NO: 220823 - DNA, 20 bp, Artificial Sequence
  Description of Artificial Sequence: Synthetic oligonucleotide
  Target: LAMA2; (-) strand; PAM type: YTN; PAM sequence: TTG
aaatctaatgcagctgatgg

SEQ ID NO: 220824 - DNA, 20 bp, Artificial Sequence
  Description of Artificial Sequence: Synthetic oligonucleotide
  Target: LAMA2; (-) strand; PAM type: YTN; PAM sequence: CTT
gaaatctaatgcagctgatg

SEQ ID NO: 220825 - DNA, 20 bp, Artificial Sequence
  Description of Artificial Sequence: Synthetic oligonucleotide
  Target: LAMA2; (-) strand; PAM type: YTN; PAM sequence: CTA
tgtgcatatatacagtggta

SEQ ID NO: 220826 - DNA, 20 bp, Artificial Sequence
  Description of Artificial Sequence: Synthetic oligonucleotide
  Target: LAMA2; (-) strand; PAM type: YTN; PAM sequence: TTA
tctatgtgcatatatacagt

SEQ ID NO: 220827 - DNA, 20 bp, Artificial Sequence
  Description of Artificial Sequence: Synthetic oligonucleotide
  Target: LAMA2; (-) strand; PAM type: YTN; PAM sequence: TTT
atctatgtgcatatatacag

SEQ ID NO: 220828 - DNA, 20 bp, Artificial Sequence
  Description of Artificial Sequence: Synthetic oligonucleotide
  Target: LAMA2; (-) strand; PAM type: YTN; PAM sequence: CTA
catatacatatttatctatg

SEQ ID NO: 220829 - DNA, 20 bp, Artificial Sequence
  Description of Artificial Sequence: Synthetic oligonucleotide
  Target: LAMA2; (-) strand; PAM type: YTN; PAM sequence: TTG
cactacatatacatatttat

SEQ ID NO: 220830 - DNA, 20 bp, Artificial Sequence
  Description of Artificial Sequence: Synthetic oligonucleotide
  Target: LAMA2; (-) strand; PAM type: YTN; PAM sequence: CTG
tgttgcactacatatacata

SEQ ID NO: 220831 - DNA, 20 bp, Artificial Sequence
  Description of Artificial Sequence: Synthetic oligonucleotide
  Target: LAMA2; (-) strand; PAM type: YTN; PAM sequence: CTC
atctgtgttgcactacatat

SEQ ID NO: 220832 - DNA, 20 bp, Artificial Sequence
  Description of Artificial Sequence: Synthetic oligonucleotide
  Target: LAMA2; (-) strand; PAM type: YTN; PAM sequence: TTC
tcatctgtgttgcactacat

SEQ ID NO: 220833 - DNA, 20 bp, Artificial Sequence
  Description of Artificial Sequence: Synthetic oligonucleotide
  Target: LAMA2; (-) strand; PAM type: YTN; PAM sequence: CTT
ctcatctgtgttgcactaca

SEQ ID NO: 220834 - DNA, 20 bp, Artificial Sequence
  Description of Artificial Sequence: Synthetic oligonucleotide
  Target: LAMA2; (-) strand; PAM type: YTN; PAM sequence: TTA
tatcttctcatctgtgttgc

SEQ ID NO: 220835 - DNA, 20 bp, Artificial Sequence
  Description of Artificial Sequence: Synthetic oligonucleotide
  Target: LAMA2; (-) strand; PAM type: YTN; PAM sequence: TTT
atatcttctcatctgtgttg

SEQ ID NO: 220836 - DNA, 20 bp, Artificial Sequence
  Description of Artificial Sequence: Synthetic oligonucleotide
  Target: LAMA2; (-) strand; PAM type: YTN; PAM sequence: CTT
tatatcttctcatctgtgtt

SEQ ID NO: 220837 - DNA, 20 bp, Artificial Sequence
  Description of Artificial Sequence: Synthetic oligonucleotide
  Target: LAMA2; (-) strand; PAM type: YTN; PAM sequence: TTC
gaacaaaataaaacaacttt

SEQ ID NO: 220838 - DNA, 20 bp, Artificial Sequence
  Description of Artificial Sequence: Synthetic oligonucleotide
  Target: LAMA2; (-) strand; PAM type: YTN; PAM sequence: CTG
taatacatattcgaacaaaa

SEQ ID NO: 220839 - DNA, 20 bp, Artificial Sequence
  Description of Artificial Sequence: Synthetic oligonucleotide
  Target: LAMA2; (-) strand; PAM type: YTN; PAM sequence: CTC
tgtaatacatattcgaacaa

SEQ ID NO: 220840 - DNA, 20 bp, Artificial Sequence
  Description of Artificial Sequence: Synthetic oligonucleotide
  Target: LAMA2; (-) strand; PAM type: YTN; PAM sequence: TTC
tctgtaatacatattcgaac

SEQ ID NO: 220841 - DNA, 20 bp, Artificial Sequence
  Description of Artificial Sequence: Synthetic oligonucleotide
  Target: LAMA2; (-) strand; PAM type: YTN; PAM sequence: CTA
tacagcacatagggttctct

SEQ ID NO: 220842 - DNA, 20 bp, Artificial Sequence
  Description of Artificial Sequence: Synthetic oligonucleotide
  Target: LAMA2; (-) strand; PAM type: YTN; PAM sequence: TTA
aaagaaagatatataaggtg

SEQ ID NO: 220843 - DNA, 20 bp, Artificial Sequence
  Description of Artificial Sequence: Synthetic oligonucleotide
  Target: LAMA2; (-) strand; PAM type: YTN; PAM sequence: CTT
aaaagaaagatatataaggt

SEQ ID NO: 220844 - DNA, 20 bp, Artificial Sequence
  Description of Artificial Sequence: Synthetic oligonucleotide
  Target: LAMA2; (-) strand; PAM type: YTN; PAM sequence: CTC
ttaaaagaaagatatataag

SEQ ID NO: 220845 - DNA, 20 bp, Artificial Sequence
  Description of Artificial Sequence: Synthetic oligonucleotide
  Target: LAMA2; (-) strand; PAM type: YTN; PAM sequence: TTC
tcttaaaagaaagatatata

SEQ ID NO: 220846 - DNA, 20 bp, Artificial Sequence
  Description of Artificial Sequence: Synthetic oligonucleotide
  Target: LAMA2; (-) strand; PAM type: YTN; PAM sequence: CTA
tgaggttctcttaaaagaaa

SEQ ID NO: 220847 - DNA, 20 bp, Artificial Sequence
  Description of Artificial Sequence: Synthetic oligonucleotide
  Target: LAMA2; (-) strand; PAM type: YTN; PAM sequence: TTG
gaagtcctatgaggttctct

SEQ ID NO: 220848 - DNA, 20 bp, Artificial Sequence
  Description of Artificial Sequence: Synthetic oligonucleotide
  Target: LAMA2; (-) strand; PAM type: YTN; PAM sequence: TTT
ggaagtcctatgaggttctc

SEQ ID NO: 220849 - DNA, 20 bp, Artificial Sequence
  Description of Artificial Sequence: Synthetic oligonucleotide
  Target: LAMA2; (-) strand; PAM type: YTN; PAM sequence: TTC
agtgaagaatttggaagtcc

SEQ ID NO: 220850 - DNA, 20 bp, Artificial Sequence
  Description of Artificial Sequence: Synthetic oligonucleotide
  Target: LAMA2; (-) strand; PAM type: YTN; PAM sequence: TTT
cagtgaagaatttggaagtc

SEQ ID NO: 220851 - DNA, 20 bp, Artificial Sequence
  Description of Artificial Sequence: Synthetic oligonucleotide
  Target: LAMA2; (-) strand; PAM type: YTN; PAM sequence: CTA
tttcagtgaagaatttggaa

SEQ ID NO: 220852 - DNA, 20 bp, Artificial Sequence
  Description of Artificial Sequence: Synthetic oligonucleotide
  Target: LAMA2; (-) strand; PAM type: YTN; PAM sequence: CTG
acatatcgaaaggtaatata

SEQ ID NO: 220853 - DNA, 20 bp, Artificial Sequence
  Description of Artificial Sequence: Synthetic oligonucleotide
  Target: LAMA2; (-) strand; PAM type: YTN; PAM sequence: TTC
tgacatatcgaaaggtaata

SEQ ID NO: 220854 - DNA, 20 bp, Artificial Sequence
  Description of Artificial Sequence: Synthetic oligonucleotide
  Target: LAMA2; (-) strand; PAM type: YTN; PAM sequence: TTT
ctgacatatcgaaaggtaat

SEQ ID NO: 220855 - DNA, 20 bp, Artificial Sequence
  Description of Artificial Sequence: Synthetic oligonucleotide
  Target: LAMA2; (-) strand; PAM type: YTN; PAM sequence: CTT
tctgacatatcgaaaggtaa

SEQ ID NO: 220856 - DNA, 20 bp, Artificial Sequence
  Description of Artificial Sequence: Synthetic oligonucleotide
  Target: LAMA2; (-) strand; PAM type: YTN; PAM sequence: TTC
cagaaaaagaatctttctga

SEQ ID NO: 220857 - DNA, 20 bp, Artificial Sequence
  Description of Artificial Sequence: Synthetic oligonucleotide
  Target: LAMA2; (-) strand; PAM type: YTN; PAM sequence: CTT
ccagaaaaagaatctttctg

SEQ ID NO: 220858 - DNA, 20 bp, Artificial Sequence
  Description of Artificial Sequence: Synthetic oligonucleotide
  Target: LAMA2; (-) strand; PAM type: YTN; PAM sequence: CTG
tgcaatgatgtggatgagaa

SEQ ID NO: 220859 - DNA, 20 bp, Artificial Sequence
  Description of Artificial Sequence: Synthetic oligonucleotide
  Target: LAMA2; (-) strand; PAM type: YTN; PAM sequence: TTG
tcagcctgtgcaatgatgtg

SEQ ID NO: 220860 - DNA, 20 bp, Artificial Sequence
  Description of Artificial Sequence: Synthetic oligonucleotide
  Target: LAMA2; (-) strand; PAM type: YTN; PAM sequence: TTG
attgtcagcctgtgcaatga

SEQ ID NO: 220861 - DNA, 20 bp, Artificial Sequence
  Description of Artificial Sequence: Synthetic oligonucleotide
  Target: LAMA2; (-) strand; PAM type: YTN; PAM sequence: CTT
gattgtcagcctgtgcaatg

SEQ ID NO: 220862 - DNA, 20 bp, Artificial Sequence
  Description of Artificial Sequence: Synthetic oligonucleotide
  Target: LAMA2; (-) strand; PAM type: YTN; PAM sequence: TTA
aagaaagtgagaaatagtgt

SEQ ID NO: 220863 - DNA, 20 bp, Artificial Sequence
  Description of Artificial Sequence: Synthetic oligonucleotide
  Target: LAMA2; (-) strand; PAM type: YTN; PAM sequence: TTT
aaagaaagtgagaaatagtg

SEQ ID NO: 220864 - DNA, 20 bp, Artificial Sequence
  Description of Artificial Sequence: Synthetic oligonucleotide
  Target: LAMA2; (-) strand; PAM type: YTN; PAM sequence: TTT
taaagaaagtgagaaatagt

SEQ ID NO: 220865 - DNA, 20 bp, Artificial Sequence
  Description of Artificial Sequence: Synthetic oligonucleotide
  Target: LAMA2; (-) strand; PAM type: YTN; PAM sequence: TTA
gttttaaagaaagtgagaaa

SEQ ID NO: 220866 - DNA, 20 bp, Artificial Sequence
  Description of Artificial Sequence: Synthetic oligonucleotide
  Target: LAMA2; (-) strand; PAM type: YTN; PAM sequence: TTT
agttttaaagaaagtgagaa

SEQ ID NO: 220867 - DNA, 20 bp, Artificial Sequence
  Description of Artificial Sequence: Synthetic oligonucleotide
  Target: LAMA2; (-) strand; PAM type: YTN; PAM sequence: CTG
atttagttttaaagaaagtg

SEQ ID NO: 220868 - DNA, 20 bp, Artificial Sequence
  Description of Artificial Sequence: Synthetic oligonucleotide
  Target: LAMA2; (-) strand; PAM type: YTN; PAM sequence: CTC
aaatcctgatttagttttaa

SEQ ID NO: 220869 - DNA, 20 bp, Artificial Sequence
  Description of Artificial Sequence: Synthetic oligonucleotide
  Target: LAMA2; (-) strand; PAM type: YTN; PAM sequence: CTC
cctcaaatcctgatttagtt

SEQ ID NO: 220870 - DNA, 20 bp, Artificial Sequence
  Description of Artificial Sequence: Synthetic oligonucleotide
  Target: LAMA2; (-) strand; PAM type: YTN; PAM sequence: CTC
cactccctcaaatcctgatt

SEQ ID NO: 220871 - DNA, 20 bp, Artificial Sequence
  Description of Artificial Sequence: Synthetic oligonucleotide
  Target: LAMA2; (-) strand; PAM type: YTN; PAM sequence: CTA
gtcatccctccactccctca

SEQ ID NO: 220872 - DNA, 20 bp, Artificial Sequence
  Description of Artificial Sequence: Synthetic oligonucleotide
  Target: LAMA2; (-) strand; PAM type: YTN; PAM sequence: CTG
cctagtcatccctccactcc

SEQ ID NO: 220873 - DNA, 20 bp, Artificial Sequence
  Description of Artificial Sequence: Synthetic oligonucleotide
  Target: LAMA2; (-) strand; PAM type: YTN; PAM sequence: CTC
tgcctagtcatccctccact

SEQ ID NO: 220874 - DNA, 20 bp, Artificial Sequence
  Description of Artificial Sequence: Synthetic oligonucleotide
  Target: LAMA2; (-) strand; PAM type: YTN; PAM sequence: TTG
ctctgcctagtcatccctcc

SEQ ID NO: 220875 - DNA, 20 bp, Artificial Sequence
  Description of Artificial Sequence: Synthetic oligonucleotide
  Target: LAMA2; (-) strand; PAM type: YTN; PAM sequence: TTT
gctctgcctagtcatccctc

SEQ ID NO: 220876 - DNA, 20 bp, Artificial Sequence
  Description of Artificial Sequence: Synthetic oligonucleotide
  Target: LAMA2; (-) strand; PAM type: YTN; PAM sequence: TTT
tgctctgcctagtcatccct

SEQ ID NO: 220877 - DNA, 20 bp, Artificial Sequence
  Description of Artificial Sequence: Synthetic oligonucleotide
  Target: LAMA2; (-) strand; PAM type: YTN; PAM sequence: CTT
ttgctctgcctagtcatccc

SEQ ID NO: 220878 - DNA, 20 bp, Artificial Sequence
  Description of Artificial Sequence: Synthetic oligonucleotide
  Target: LAMA2; (-) strand; PAM type: YTN; PAM sequence: TTA
aaaatccttttgctctgcct

SEQ ID NO: 220879 - DNA, 20 bp, Artificial Sequence
  Description of Artificial Sequence: Synthetic oligonucleotide
  Target: LAMA2; (-) strand; PAM type: YTN; PAM sequence: CTT
aaaaatccttttgctctgcc

SEQ ID NO: 220880 - DNA, 20 bp, Artificial Sequence
  Description of Artificial Sequence: Synthetic oligonucleotide
  Target: LAMA2; (-) strand; PAM type: YTN; PAM sequence: CTG
ccttaaaaatccttttgctc

SEQ ID NO: 220881 - DNA, 20 bp, Artificial Sequence
  Description of Artificial Sequence: Synthetic oligonucleotide
  Target: LAMA2; (-) strand; PAM type: YTN; PAM sequence: TTC
actgccttaaaaatcctttt

SEQ ID NO: 220882 - DNA, 20 bp, Artificial Sequence
  Description of Artificial Sequence: Synthetic oligonucleotide
  Target: LAMA2; (-) strand; PAM type: YTN; PAM sequence: TTT
cactgccttaaaaatccttt

SEQ ID NO: 220883 - DNA, 20 bp, Artificial Sequence
  Description of Artificial Sequence: Synthetic oligonucleotide
  Target: LAMA2; (-) strand; PAM type: YTN; PAM sequence: TTT
tcactgccttaaaaatcctt

SEQ ID NO: 220884 - DNA, 20 bp, Artificial Sequence
  Description of Artificial Sequence: Synthetic oligonucleotide
  Target: LAMA2; (-) strand; PAM type: YTN; PAM sequence: CTA
cagagtattttcactgcctt

SEQ ID NO: 220885 - DNA, 20 bp, Artificial Sequence
  Description of Artificial Sequence: Synthetic oligonucleotide
  Target: LAMA2; (-) strand; PAM type: YTN; PAM sequence: CTA
tcctacagagtattttcact

SEQ ID NO: 220886 - DNA, 20 bp, Artificial Sequence
  Description of Artificial Sequence: Synthetic oligonucleotide
  Target: LAMA2; (-) strand; PAM type: YTN; PAM sequence: TTA
tactatcctacagagtattt

SEQ ID NO: 220887 - DNA, 20 bp, Artificial Sequence
  Description of Artificial Sequence: Synthetic oligonucleotide
  Target: LAMA2; (-) strand; PAM type: YTN; PAM sequence: TTG
gacatgtacccatcattata

SEQ ID NO: 220888 - DNA, 20 bp, Artificial Sequence
  Description of Artificial Sequence: Synthetic oligonucleotide
  Target: LAMA2; (-) strand; PAM type: YTN; PAM sequence: TTT
ggacatgtacccatcattat

SEQ ID NO: 220889 - DNA, 20 bp, Artificial Sequence
  Description of Artificial Sequence: Synthetic oligonucleotide
  Target: LAMA2; (-) strand; PAM type: YTN; PAM sequence: CTG
cgggtttggacatgtaccca

SEQ ID NO: 220890 - DNA, 20 bp, Artificial Sequence
  Description of Artificial Sequence: Synthetic oligonucleotide
  Target: LAMA2; (-) strand; PAM type: YTN; PAM sequence: TTG
cacgtcctgcgggtttggac

SEQ ID NO: 220891 - DNA, 20 bp, Artificial Sequence
  Description of Artificial Sequence: Synthetic oligonucleotide
  Target: LAMA2; (-) strand; PAM type: YTN; PAM sequence: CTT
gcacgtcctgcgggtttgga

SEQ ID NO: 220892 - DNA, 20 bp, Artificial Sequence
  Description of Artificial Sequence: Synthetic oligonucleotide
  Target: LAMA2; (-) strand; PAM type: YTN; PAM sequence: TTG
gccttgcacgtcctgcgggt

SEQ ID NO: 220893 - DNA, 20 bp, Artificial Sequence
  Description of Artificial Sequence: Synthetic oligonucleotide
  Target: LAMA2; (-) strand; PAM type: YTN; PAM sequence: CTT
ggccttgcacgtcctgcggg

SEQ ID NO: 220894 - DNA, 20 bp, Artificial Sequence
  Description of Artificial Sequence: Synthetic oligonucleotide
  Target: LAMA2; (-) strand; PAM type: YTN; PAM sequence: CTC
ttggccttgcacgtcctgcg

SEQ ID NO: 220895 - DNA, 20 bp, Artificial Sequence
  Description of Artificial Sequence: Synthetic oligonucleotide
  Target: LAMA2; (-) strand; PAM type: YTN; PAM sequence: TTC
actcttggccttgcacgtcc

SEQ ID NO: 220896 - DNA, 20 bp, Artificial Sequence
  Description of Artificial Sequence: Synthetic oligonucleotide
  Target: LAMA2; (-) strand; PAM type: YTN; PAM sequence: CTT
cactcttggccttgcacgtc

SEQ ID NO: 220897 - DNA, 20 bp, Artificial Sequence
  Description of Artificial Sequence: Synthetic oligonucleotide
  Target: LAMA2; (-) strand; PAM type: YTN; PAM sequence: TTC
ggcttcactcttggccttgc

SEQ ID NO: 220898 - DNA, 20 bp, Artificial Sequence
  Description of Artificial Sequence: Synthetic oligonucleotide
  Target: LAMA2; (-) strand; PAM type: YTN; PAM sequence: TTA
cattcggcttcactcttggc

SEQ ID NO: 220899 - DNA, 20 bp, Artificial Sequence
  Description of Artificial Sequence: Synthetic oligonucleotide
  Target: LAMA2; (-) strand; PAM type: YTN; PAM sequence: TTT
acattcggcttcactcttgg

SEQ ID NO: 220900 - DNA, 20 bp, Artificial Sequence
  Description of Artificial Sequence: Synthetic oligonucleotide
  Target: LAMA2; (-) strand; PAM type: YTN; PAM sequence: CTA
tagtttacattcggcttcac

SEQ ID NO: 220901 - DNA, 20 bp, Artificial Sequence
  Description of Artificial Sequence: Synthetic oligonucleotide
  Target: LAMA2; (-) strand; PAM type: YTN; PAM sequence: TTA
cccaaagcctatagtttaca

SEQ ID NO: 220902 - DNA, 20 bp, Artificial Sequence
  Description of Artificial Sequence: Synthetic oligonucleotide
  Target: LAMA2; (-) strand; PAM type: YTN; PAM sequence: TTG
acacgtcaaaattacccaaa

SEQ ID NO: 220903 - DNA, 20 bp, Artificial Sequence
  Description of Artificial Sequence: Synthetic oligonucleotide
  Target: LAMA2; (-) strand; PAM type: YTN; PAM sequence: CTG
atgaaatgacattgacacgt

SEQ ID NO: 220904 - DNA, 20 bp, Artificial Sequence
  Description of Artificial Sequence: Synthetic oligonucleotide
  Target: LAMA2; (-) strand; PAM type: YTN; PAM sequence: TTG
taatgactgatgaaatgaca

SEQ ID NO: 220905 - DNA, 20 bp, Artificial Sequence
  Description of Artificial Sequence: Synthetic oligonucleotide
  Target: LAMA2; (-) strand; PAM type: YTN; PAM sequence: TTT
gtaatgactgatgaaatgac

SEQ ID NO: 220906 - DNA, 20 bp, Artificial Sequence
  Description of Artificial Sequence: Synthetic oligonucleotide
  Target: LAMA2; (-) strand; PAM type: YTN; PAM sequence: CTA
tcccccagtagagtagtaca

SEQ ID NO: 220907 - DNA, 20 bp, Artificial Sequence
  Description of Artificial Sequence: Synthetic oligonucleotide
  Target: LAMA2; (-) strand; PAM type: YTN; PAM sequence: TTA
tcactatcccccagtagagt

SEQ ID NO: 220908 - DNA, 20 bp, Artificial Sequence
  Description of Artificial Sequence: Synthetic oligonucleotide
  Target: LAMA2; (-) strand; PAM type: YTN; PAM sequence: CTA
ttatcactatcccccagtag

SEQ ID NO: 220909 - DNA, 20 bp, Artificial Sequence
  Description of Artificial Sequence: Synthetic oligonucleotide
  Target: LAMA2; (-) strand; PAM type: YTN; PAM sequence: CTC
ccctattatcactatccccc

SEQ ID NO: 220910 - DNA, 20 bp, Artificial Sequence
  Description of Artificial Sequence: Synthetic oligonucleotide
  Target: LAMA2; (-) strand; PAM type: YTN; PAM sequence: CTG
cccccataaacatataacct

SEQ ID NO: 220911 - DNA, 20 bp, Artificial Sequence
  Description of Artificial Sequence: Synthetic oligonucleotide
  Target: LAMA2; (-) strand; PAM type: YTN; PAM sequence: CTC
actgcccccataaacatata

SEQ ID NO: 220912 - DNA, 20 bp, Artificial Sequence
  Description of Artificial Sequence: Synthetic oligonucleotide
  Target: LAMA2; (-) strand; PAM type: YTN; PAM sequence: TTC
ccatacgctcactgccccca

SEQ ID NO: 220913 - DNA, 20 bp, Artificial Sequence
  Description of Artificial Sequence: Synthetic oligonucleotide
  Target: LAMA2; (-) strand; PAM type: YTN; PAM sequence: TTT
cccatacgctcactgccccc

SEQ ID NO: 220914 - DNA, 20 bp, Artificial Sequence
  Description of Artificial Sequence: Synthetic oligonucleotide
  Target: LAMA2; (-) strand; PAM type: YTN; PAM sequence: CTC
aaaaaagaaaaaaaaaaaaa

SEQ ID NO: 220915 - DNA, 20 bp, Artificial Sequence
  Description of Artificial Sequence: Synthetic oligonucleotide
  Target: LAMA2; (-) strand; PAM type: YTN; PAM sequence: TTG
tctcaaaaaagaaaaaaaaa

SEQ ID NO: 220916 - DNA, 20 bp, Artificial Sequence
  Description of Artificial Sequence: Synthetic oligonucleotide
  Target: LAMA2; (-) strand; PAM type: YTN; PAM sequence: TTT
gtctcaaaaaagaaaaaaaa

SEQ ID NO: 220917 - DNA, 20 bp, Artificial Sequence
  Description of Artificial Sequence: Synthetic oligonucleotide
  Target: LAMA2; (-) strand; PAM type: YTN; PAM sequence: CTT
tgtctcaaaaaagaaaaaaa

SEQ ID NO: 220918 - DNA, 20 bp, Artificial Sequence
  Description of Artificial Sequence: Synthetic oligonucleotide
  Target: LAMA2; (-) strand; PAM type: YTN; PAM sequence: CTG
agcgacacagcaagactttg

SEQ ID NO: 220919 - DNA, 20 bp, Artificial Sequence
  Description of Artificial Sequence: Synthetic oligonucleotide
  Target: LAMA2; (-) strand; PAM type: YTN; PAM sequence: CTC
cagtctgagcgacacagcaa

SEQ ID NO: 220920 - DNA, 20 bp, Artificial Sequence
  Description of Artificial Sequence: Synthetic oligonucleotide
  Target: LAMA2; (-) strand; PAM type: YTN; PAM sequence: CTG
cactccagtctgagcgacac

SEQ ID NO: 220921 - DNA, 20 bp, Artificial Sequence
  Description of Artificial Sequence: Synthetic oligonucleotide
  Target: LAMA2; (-) strand; PAM type: YTN; PAM sequence: TTG
tgccactgcactccagtctg

SEQ ID NO: 220922 - DNA, 20 bp, Artificial Sequence
  Description of Artificial Sequence: Synthetic oligonucleotide
  Target: LAMA2; (-) strand; PAM type: YTN; PAM sequence: CTG
cagtgagccgacattgtgcc

SEQ ID NO: 220923 - DNA, 20 bp, Artificial Sequence
  Description of Artificial Sequence: Synthetic oligonucleotide
  Target: LAMA2; (-) strand; PAM type: YTN; PAM sequence: CTA
gaggcggaggctgcagtgag

SEQ ID NO: 220924 - DNA, 20 bp, Artificial Sequence
  Description of Artificial Sequence: Synthetic oligonucleotide
  Target: LAMA2; (-) strand; PAM type: YTN; PAM sequence: TTG
aatgctagaggcggaggctg

SEQ ID NO: 220925 - DNA, 20 bp, Artificial Sequence
  Description of Artificial Sequence: Synthetic oligonucleotide
  Target: LAMA2; (-) strand; PAM type: YTN; PAM sequence: CTT
gaatgctagaggcggaggct

SEQ ID NO: 220926 - DNA, 20 bp, Artificial Sequence
  Description of Artificial Sequence: Synthetic oligonucleotide
  Target: LAMA2; (-) strand; PAM type: YTN; PAM sequence: CTC
aggaagccgaggcaggagaa

SEQ ID NO: 220927 - DNA, 20 bp, Artificial Sequence
  Description of Artificial Sequence: Synthetic oligonucleotide
  Target: LAMA2; (-) strand; PAM type: YTN; PAM sequence: TTC
caggtactcaggaagccgag

SEQ ID NO: 220928 - DNA, 20 bp, Artificial Sequence
  Description of Artificial Sequence: Synthetic oligonucleotide
  Target: LAMA2; (-) strand; PAM type: YTN; PAM sequence: CTG
tagttccaggtactcaggaa

SEQ ID NO: 220929 - DNA, 20 bp, Artificial Sequence
  Description of Artificial Sequence: Synthetic oligonucleotide
  Target: LAMA2; (-) strand; PAM type: YTN; PAM sequence: TTA
gcggggtatagtggcgcgca

SEQ ID NO: 220930 - DNA, 20 bp, Artificial Sequence
  Description of Artificial Sequence: Synthetic oligonucleotide
  Target: LAMA2; (-) strand; PAM type: YTN; PAM sequence: CTA
aaaacacaaaaattagcggg

SEQ ID NO: 220931 - DNA, 20 bp, Artificial Sequence
  Description of Artificial Sequence: Synthetic oligonucleotide
  Target: LAMA2; (-) strand; PAM type: YTN; PAM sequence: CTA
ctaaaaacacaaaaattagc

SEQ ID NO: 220932 - DNA, 20 bp, Artificial Sequence
  Description of Artificial Sequence: Synthetic oligonucleotide
  Target: LAMA2; (-) strand; PAM type: YTN; PAM sequence: CTC
tactaaaaacacaaaaatta

SEQ ID NO: 220933 - DNA, 20 bp, Artificial Sequence
  Description of Artificial Sequence: Synthetic oligonucleotide
  Target: LAMA2; (-) strand; PAM type: YTN; PAM sequence: TTG
tctctactaaaaacacaaaa

SEQ ID NO: 220934 - DNA, 20 bp, Artificial Sequence
  Description of Artificial Sequence: Synthetic oligonucleotide
  Target: LAMA2; (-) strand; PAM type: YTN; PAM sequence: CTT
gtctctactaaaaacacaaa

SEQ ID NO: 220935 - DNA, 20 bp, Artificial Sequence
  Description of Artificial Sequence: Synthetic oligonucleotide
  Target: LAMA2; (-) strand; PAM type: YTN; PAM sequence: CTG
ggcaacatggtgaaaccttg

SEQ ID NO: 220936 - DNA, 20 bp, Artificial Sequence
  Description of Artificial Sequence: Synthetic oligonucleotide
  Target: LAMA2; (-) strand; PAM type: YTN; PAM sequence: TTC
aagaccagcctgggcaacat

SEQ ID NO: 220937 - DNA, 20 bp, Artificial Sequence
  Description of Artificial Sequence: Synthetic oligonucleotide
  Target: LAMA2; (-) strand; PAM type: YTN; PAM sequence: TTA
aggtcaggagttcaagacca

SEQ ID NO: 220938 - DNA, 20 bp, Artificial Sequence
  Description of Artificial Sequence: Synthetic oligonucleotide
  Target: LAMA2; (-) strand; PAM type: YTN; PAM sequence: CTT
aaggtcaggagttcaagacc

SEQ ID NO: 220939 - DNA, 20 bp, Artificial Sequence
  Description of Artificial Sequence: Synthetic oligonucleotide
  Target: LAMA2; (-) strand; PAM type: YTN; PAM sequence: CTG
acatgggcagaccacttaag

SEQ ID NO: 220940 - DNA, 20 bp, Artificial Sequence
  Description of Artificial Sequence: Synthetic oligonucleotide
  Target: LAMA2; (-) strand; PAM type: YTN; PAM sequence: TTG
ggaggctgacatgggcagac

SEQ ID NO: 220941 - DNA, 20 bp, Artificial Sequence
  Description of Artificial Sequence: Synthetic oligonucleotide
  Target: LAMA2; (-) strand; PAM type: YTN; PAM sequence: TTT
gggaggctgacatgggcaga

SEQ ID NO: 220942 - DNA, 20 bp, Artificial Sequence
  Description of Artificial Sequence: Synthetic oligonucleotide
  Target: LAMA2; (-) strand; PAM type: YTN; PAM sequence: CTT
tgggaggctgacatgggcag

SEQ ID NO: 220943 - DNA, 20 bp, Artificial Sequence
  Description of Artificial Sequence: Synthetic oligonucleotide
  Target: LAMA2; (-) strand; PAM type: YTN; PAM sequence: CTA
gcactttgggaggctgacat

SEQ ID NO: 220944 - DNA, 20 bp, Artificial Sequence
  Description of Artificial Sequence: Synthetic oligonucleotide
  Target: LAMA2; (-) strand; PAM type: YTN; PAM sequence: CTG
taatcctagcactttgggag

SEQ ID NO: 220945 - DNA, 20 bp, Artificial Sequence
  Description of Artificial Sequence: Synthetic oligonucleotide
  Target: LAMA2; (-) strand; PAM type: YTN; PAM sequence: CTC
atacctgtaatcctagcact

SEQ ID NO: 220946 - DNA, 20 bp, Artificial Sequence
  Description of Artificial Sequence: Synthetic oligonucleotide
  Target: LAMA2; (-) strand; PAM type: YTN; PAM sequence: TTG
gccaggtgcagtggctcata

SEQ ID NO: 220947 - DNA, 20 bp, Artificial Sequence
  Description of Artificial Sequence: Synthetic oligonucleotide
  Target: LAMA2; (-) strand; PAM type: YTN; PAM sequence: TTT
ggccaggtgcagtggctcat

SEQ ID NO: 220948 - DNA, 20 bp, Artificial Sequence
  Description of Artificial Sequence: Synthetic oligonucleotide
  Target: LAMA2; (-) strand; PAM type: YTN; PAM sequence: TTT
tggccaggtgcagtggctca

SEQ ID NO: 220949 - DNA, 20 bp, Artificial Sequence
  Description of Artificial Sequence: Synthetic oligonucleotide
  Target: LAMA2; (-) strand; PAM type: YTN; PAM sequence: TTG
aaaggaagatacagagattt

SEQ ID NO: 220950 - DNA, 20 bp, Artificial Sequence
  Description of Artificial Sequence: Synthetic oligonucleotide
  Target: LAMA2; (-) strand; PAM type: YTN; PAM sequence: TTC
aaagcaaaattgaaaggaag

SEQ ID NO: 220951 - DNA, 20 bp, Artificial Sequence
  Description of Artificial Sequence: Synthetic oligonucleotide
  Target: LAMA2; (-) strand; PAM type: YTN; PAM sequence: TTA
ggttcaaagcaaaattgaaa

SEQ ID NO: 220952 - DNA, 20 bp, Artificial Sequence
  Description of Artificial Sequence: Synthetic oligonucleotide
  Target: LAMA2; (-) strand; PAM type: YTN; PAM sequence: TTT
aggttcaaagcaaaattgaa

SEQ ID NO: 220953 - DNA, 20 bp, Artificial Sequence
  Description of Artificial Sequence: Synthetic oligonucleotide
  Target: LAMA2; (-) strand; PAM type: YTN; PAM sequence: TTT
taggttcaaagcaaaattga

SEQ ID NO: 220954 - DNA, 20 bp, Artificial Sequence
  Description of Artificial Sequence: Synthetic oligonucleotide
  Target: LAMA2; (-) strand; PAM type: YTN; PAM sequence: TTA
gggagaattttaggttcaaa

SEQ ID NO: 220955 - DNA, 20 bp, Artificial Sequence
  Description of Artificial Sequence: Synthetic oligonucleotide
  Target: LAMA2; (-) strand; PAM type: YTN; PAM sequence: TTT
agggagaattttaggttcaa

SEQ ID NO: 220956 - DNA, 20 bp, Artificial Sequence
  Description of Artificial Sequence: Synthetic oligonucleotide
  Target: LAMA2; (-) strand; PAM type: YTN; PAM sequence: TTT
tagggagaattttaggttca

SEQ ID NO: 220957 - DNA, 20 bp, Artificial Sequence
  Description of Artificial Sequence: Synthetic oligonucleotide
  Target: LAMA2; (-) strand; PAM type: YTN; PAM sequence: TTT
ttagggagaattttaggttc

SEQ ID NO: 220958 - DNA, 20 bp, Artificial Sequence
  Description of Artificial Sequence: Synthetic oligonucleotide
  Target: LAMA2; (-) strand; PAM type: YTN; PAM sequence: TTT
tttagggagaattttaggtt

SEQ ID NO: 220959 - DNA, 20 bp, Artificial Sequence
  Description of Artificial Sequence: Synthetic oligonucleotide
  Target: LAMA2; (-) strand; PAM type: YTN; PAM sequence: TTA
ttttttagggagaattttag

SEQ ID NO: 220960 - DNA, 20 bp, Artificial Sequence
  Description of Artificial Sequence: Synthetic oligonucleotide
  Target: LAMA2; (-) strand; PAM type: YTN; PAM sequence: TTT
attttttagggagaatttta

SEQ ID NO: 220961 - DNA, 20 bp, Artificial Sequence
  Description of Artificial Sequence: Synthetic oligonucleotide
  Target: LAMA2; (-) strand; PAM type: YTN; PAM sequence: TTT
tattttttagggagaatttt

SEQ ID NO: 220962 - DNA, 20 bp, Artificial Sequence
  Description of Artificial Sequence: Synthetic oligonucleotide
  Target: LAMA2; (-) strand; PAM type: YTN; PAM sequence: TTA
atattttattttttagggag

SEQ ID NO: 220963 - DNA, 20 bp, Artificial Sequence
  Description of Artificial Sequence: Synthetic oligonucleotide
  Target: LAMA2; (-) strand; PAM type: YTN; PAM sequence: TTT
aatattttattttttaggga

SEQ ID NO: 220964 - DNA, 20 bp, Artificial Sequence
  Description of Artificial Sequence: Synthetic oligonucleotide
  Target: LAMA2; (-) strand; PAM type: YTN; PAM sequence: TTT
taatattttattttttaggg

SEQ ID NO: 220965 - DNA, 20 bp, Artificial Sequence
  Description of Artificial Sequence: Synthetic oligonucleotide
  Target: LAMA2; (-) strand; PAM type: YTN; PAM sequence: TTT
ttaatattttattttttagg

SEQ ID NO: 220966 - DNA, 20 bp, Artificial Sequence
  Description of Artificial Sequence: Synthetic oligonucleotide
  Target: LAMA2; (-) strand; PAM type: YTN; PAM sequence: TTT
tttaatattttattttttag

SEQ ID NO: 220967 - DNA, 20 bp, Artificial Sequence
  Description of Artificial Sequence: Synthetic oligonucleotide
  Target: LAMA2; (-) strand; PAM type: YTN; PAM sequence: TTA
ttttttaatattttattttt

SEQ ID NO: 220968 - DNA, 20 bp, Artificial Sequence
  Description of Artificial Sequence: Synthetic oligonucleotide
  Target: LAMA2; (-) strand; PAM type: YTN; PAM sequence: TTT
attttttaatattttatttt

SEQ ID NO: 220969 - DNA, 20 bp, Artificial Sequence
  Description of Artificial Sequence: Synthetic oligonucleotide
  Target: LAMA2; (-) strand; PAM type: YTN; PAM sequence: TTT
tattttttaatattttattt

SEQ ID NO: 220970 - DNA, 20 bp, Artificial Sequence
  Description of Artificial Sequence: Synthetic oligonucleotide
  Target: LAMA2; (-) strand; PAM type: YTN; PAM sequence: CTT
ttattttttaatattttatt

SEQ ID NO: 220971 - DNA, 20 bp, Artificial Sequence
  Description of Artificial Sequence: Synthetic oligonucleotide
  Target: LAMA2; (-) strand; PAM type: YTN; PAM sequence: TTC
ttttattttttaatatttta

SEQ ID NO: 220972 - DNA, 20 bp, Artificial Sequence
  Description of Artificial Sequence: Synthetic oligonucleotide
  Target: LAMA2; (-) strand; PAM type: YTN; PAM sequence: TTT
cttttattttttaatatttt

SEQ ID NO: 220973 - DNA, 20 bp, Artificial Sequence
  Description of Artificial Sequence: Synthetic oligonucleotide
  Target: LAMA2; (-) strand; PAM type: YTN; PAM sequence: TTG
acaaagagtcagtagggtac

SEQ ID NO: 220974 - DNA, 20 bp, Artificial Sequence
  Description of Artificial Sequence: Synthetic oligonucleotide
  Target: LAMA2; (-) strand; PAM type: YTN; PAM sequence: TTT
gacaaagagtcagtagggta

SEQ ID NO: 220975 - DNA, 20 bp, Artificial Sequence
  Description of Artificial Sequence: Synthetic oligonucleotide
  Target: LAMA2; (-) strand; PAM type: YTN; PAM sequence: CTT
tgacaaagagtcagtagggt

SEQ ID NO: 220976 - DNA, 20 bp, Artificial Sequence
  Description of Artificial Sequence: Synthetic oligonucleotide
  Target: LAMA2; (-) strand; PAM type: YTN; PAM sequence: TTG
agaaaaaaaatagataatct

SEQ ID NO: 220977 - DNA, 20 bp, Artificial Sequence
  Description of Artificial Sequence: Synthetic oligonucleotide
  Target: LAMA2; (-) strand; PAM type: YTN; PAM sequence: TTG
catgagttgagaaaaaaaat

SEQ ID NO: 220978 - DNA, 20 bp, Artificial Sequence
  Description of Artificial Sequence: Synthetic oligonucleotide
  Target: LAMA2; (-) strand; PAM type: YTN; PAM sequence: TTA
aacattgcatgagttgagaa

SEQ ID NO: 220979 - DNA, 20 bp, Artificial Sequence
  Description of Artificial Sequence: Synthetic oligonucleotide
  Target: LAMA2; (-) strand; PAM type: YTN; PAM sequence: CTA
accataagtgataatatggt

SEQ ID NO: 220980 - DNA, 20 bp, Artificial Sequence
  Description of Artificial Sequence: Synthetic oligonucleotide
  Target: LAMA2; (-) strand; PAM type: YTN; PAM sequence: TTA
taagaggctaaccataagtg

SEQ ID NO: 220981 - DNA, 20 bp, Artificial Sequence
  Description of Artificial Sequence: Synthetic oligonucleotide
  Target: LAMA2; (-) strand; PAM type: YTN; PAM sequence: TTA
aaaaaatagccataccatat

SEQ ID NO: 220982 - DNA, 20 bp, Artificial Sequence
  Description of Artificial Sequence: Synthetic oligonucleotide
  Target: LAMA2; (-) strand; PAM type: YTN; PAM sequence: TTT
aaaaaaatagccataccata

SEQ ID NO: 220983 - DNA, 20 bp, Artificial Sequence
  Description of Artificial Sequence: Synthetic oligonucleotide
  Target: LAMA2; (-) strand; PAM type: YTN; PAM sequence: TTT
taaaaaaatagccataccat

SEQ ID NO: 220984 - DNA, 20 bp, Artificial Sequence
  Description of Artificial Sequence: Synthetic oligonucleotide
  Target: LAMA2; (-) strand; PAM type: YTN; PAM sequence: TTT
ttaaaaaaatagccatacca

SEQ ID NO: 220985 - DNA, 20 bp, Artificial Sequence
  Description of Artificial Sequence: Synthetic oligonucleotide
  Target: LAMA2; (-) strand; PAM type: YTN; PAM sequence: CTT
tttaaaaaaatagccatacc

SEQ ID NO: 220986 - DNA, 20 bp, Artificial Sequence
  Description of Artificial Sequence: Synthetic oligonucleotide
  Target: LAMA2; (-) strand; PAM type: YTN; PAM sequence: TTA
ccatgactttttaaaaaaat

SEQ ID NO: 220987 - DNA, 20 bp, Artificial Sequence
  Description of Artificial Sequence: Synthetic oligonucleotide
  Target: LAMA2; (-) strand; PAM type: YTN; PAM sequence: TTT
accatgactttttaaaaaaa

SEQ ID NO: 220988 - DNA, 20 bp, Artificial Sequence
  Description of Artificial Sequence: Synthetic oligonucleotide
  Target: LAMA2; (-) strand; PAM type: YTN; PAM sequence: TTT
taccatgactttttaaaaaa

SEQ ID NO: 220989 - DNA, 20 bp, Artificial Sequence
  Description of Artificial Sequence: Synthetic oligonucleotide
  Target: LAMA2; (-) strand; PAM type: YTN; PAM sequence: TTA
tgtcattttaccatgacttt

SEQ ID NO: 220990 - DNA, 20 bp, Artificial Sequence
  Description of Artificial Sequence: Synthetic oligonucleotide
  Target: LAMA2; (-) strand; PAM type: YTN; PAM sequence: TTG
ttatgtcattttaccatgac

SEQ ID NO: 220991 - DNA, 20 bp, Artificial Sequence
  Description of Artificial Sequence: Synthetic oligonucleotide
  Target: LAMA2; (-) strand; PAM type: YTN; PAM sequence: TTT
gttatgtcattttaccatga

SEQ ID NO: 220992 - DNA, 20 bp, Artificial Sequence
  Description of Artificial Sequence: Synthetic oligonucleotide
  Target: LAMA2; (-) strand; PAM type: YTN; PAM sequence: TTG
tttgttatgtcattttacca

SEQ ID NO: 220993 - DNA, 20 bp, Artificial Sequence
  Description of Artificial Sequence: Synthetic oligonucleotide
  Target: LAMA2; (-) strand; PAM type: YTN; PAM sequence: CTA
agataaaaaattgtttgtta

SEQ ID NO: 220994 - DNA, 20 bp, Artificial Sequence
  Description of Artificial Sequence: Synthetic oligonucleotide
  Target: LAMA2; (-) strand; PAM type: YTN; PAM sequence: TTA
aaagtggctaagataaaaaa

SEQ ID NO: 220995 - DNA, 20 bp, Artificial Sequence
  Description of Artificial Sequence: Synthetic oligonucleotide
  Target: LAMA2; (-) strand; PAM type: YTN; PAM sequence: CTT
aaaagtggctaagataaaaa

SEQ ID NO: 220996 - DNA, 20 bp, Artificial Sequence
  Description of Artificial Sequence: Synthetic oligonucleotide
  Target: LAMA2; (-) strand; PAM type: YTN; PAM sequence: TTG
cacaacaatgtacacttaaa

SEQ ID NO: 220997 - DNA, 20 bp, Artificial Sequence
  Description of Artificial Sequence: Synthetic oligonucleotide
  Target: LAMA2; (-) strand; PAM type: YTN; PAM sequence: CTG
aatggtgatgatggttgcac

SEQ ID NO: 220998 - DNA, 20 bp, Artificial Sequence
  Description of Artificial Sequence: Synthetic oligonucleotide
  Target: LAMA2; (-) strand; PAM type: YTN; PAM sequence: TTG
tagagctgaatggtgatgat

SEQ ID NO: 220999 - DNA, 20 bp, Artificial Sequence
  Description of Artificial Sequence: Synthetic oligonucleotide
  Target: LAMA2; (-) strand; PAM type: YTN; PAM sequence: TTA
caagatgaaaagcattgtag

SEQ ID NO: 221000 - DNA, 20 bp, Artificial Sequence
  Description of Artificial Sequence: Synthetic oligonucleotide
  Target: LAMA2; (-) strand; PAM type: YTN; PAM sequence: TTT
acaagatgaaaagcattgta

SEQ ID NO: 221001 - DNA, 20 bp, Artificial Sequence
  Description of Artificial Sequence: Synthetic oligonucleotide
  Target: LAMA2; (-) strand; PAM type: YTN; PAM sequence: TTT
tacaagatgaaaagcattgt

SEQ ID NO: 221002 - DNA, 20 bp, Artificial Sequence
  Description of Artificial Sequence: Synthetic oligonucleotide
  Target: LAMA2; (-) strand; PAM type: YTN; PAM sequence: TTC
aaattttacaagatgaaaag

SEQ ID NO: 221003 - DNA, 20 bp, Artificial Sequence
  Description of Artificial Sequence: Synthetic oligonucleotide
  Target: LAMA2; (-) strand; PAM type: YTN; PAM sequence: TTT
caaattttacaagatgaaaa

SEQ ID NO: 221004 - DNA, 20 bp, Artificial Sequence
  Description of Artificial Sequence: Synthetic oligonucleotide
  Target: LAMA2; (-) strand; PAM type: YTN; PAM sequence: TTA
atgggtgcagtatttcaaat

SEQ ID NO: 221005 - DNA, 20 bp, Artificial Sequence
  Description of Artificial Sequence: Synthetic oligonucleotide
  Target: LAMA2; (-) strand; PAM type: YTN; PAM sequence: TTT
aatgggtgcagtatttcaaa

SEQ ID NO: 221006 - DNA, 20 bp, Artificial Sequence
  Description of Artificial Sequence: Synthetic oligonucleotide
  Target: LAMA2; (-) strand; PAM type: YTN; PAM sequence: TTA
tttaatgggtgcagtatttc

SEQ ID NO: 221007 - DNA, 20 bp, Artificial Sequence
  Description of Artificial Sequence: Synthetic oligonucleotide
  Target: LAMA2; (-) strand; PAM type: YTN; PAM sequence: TTA
ttatttaatgggtgcagtat

SEQ ID NO: 221008 - DNA, 20 bp, Artificial Sequence
  Description of Artificial Sequence: Synthetic oligonucleotide
  Target: LAMA2; (-) strand; PAM type: YTN; PAM sequence: CTG
ggggagagagaatggggagt

SEQ ID NO: 221009 - DNA, 20 bp, Artificial Sequence
  Description of Artificial Sequence: Synthetic oligonucleotide
  Target: LAMA2; (-) strand; PAM type: YTN; PAM sequence: TTG
ccagggactgggggagagag

SEQ ID NO: 221010 - DNA, 20 bp, Artificial Sequence
  Description of Artificial Sequence: Synthetic oligonucleotide
  Target: LAMA2; (-) strand; PAM type: YTN; PAM sequence: TTT
gccagggactgggggagaga

SEQ ID NO: 221011 - DNA, 20 bp, Artificial Sequence
  Description of Artificial Sequence: Synthetic oligonucleotide
  Target: LAMA2; (-) strand; PAM type: YTN; PAM sequence: TTA
tagagacagaaggtagaata

SEQ ID NO: 221012 - DNA, 20 bp, Artificial Sequence
  Description of Artificial Sequence: Synthetic oligonucleotide
  Target: LAMA2; (-) strand; PAM type: YTN; PAM sequence: TTT
atagagacagaaggtagaat

SEQ ID NO: 221013 - DNA, 20 bp, Artificial Sequence
  Description of Artificial Sequence: Synthetic oligonucleotide
  Target: LAMA2; (-) strand; PAM type: YTN; PAM sequence: TTA
tatgacgtgcccagaatgat

SEQ ID NO: 221014 - DNA, 20 bp, Artificial Sequence
  Description of Artificial Sequence: Synthetic oligonucleotide
  Target: LAMA2; (-) strand; PAM type: YTN; PAM sequence: CTT
atatgacgtgcccagaatga

SEQ ID NO: 221015 - DNA, 20 bp, Artificial Sequence
  Description of Artificial Sequence: Synthetic oligonucleotide
  Target: LAMA2; (-) strand; PAM type: YTN; PAM sequence: TTC
cacttatatgacgtgcccag

SEQ ID NO: 221016 - DNA, 20 bp, Artificial Sequence
  Description of Artificial Sequence: Synthetic oligonucleotide
  Target: LAMA2; (-) strand; PAM type: YTN; PAM sequence: CTG
tgtggttccacttatatgac

SEQ ID NO: 221017 - DNA, 20 bp, Artificial Sequence
  Description of Artificial Sequence: Synthetic oligonucleotide
  Target: LAMA2; (-) strand; PAM type: YTN; PAM sequence: TTA
caaaaggacaaatactgtgt

SEQ ID NO: 221018 - DNA, 20 bp, Artificial Sequence
  Description of Artificial Sequence: Synthetic oligonucleotide
  Target: LAMA2; (-) strand; PAM type: YTN; PAM sequence: TTG
aatgaaataagccagttaca

SEQ ID NO: 221019 - DNA, 20 bp, Artificial Sequence
  Description of Artificial Sequence: Synthetic oligonucleotide
  Target: LAMA2; (-) strand; PAM type: YTN; PAM sequence: CTA
tgttgaatgaaataagccag

SEQ ID NO: 221020 - DNA, 20 bp, Artificial Sequence
  Description of Artificial Sequence: Synthetic oligonucleotide
  Target: LAMA2; (-) strand; PAM type: YTN; PAM sequence: CTC
gaagacactatgttgaatga

SEQ ID NO: 221021 - DNA, 20 bp, Artificial Sequence
  Description of Artificial Sequence: Synthetic oligonucleotide
  Target: LAMA2; (-) strand; PAM type: YTN; PAM sequence: CTA
caacgtggaagaatctcgaa

SEQ ID NO: 221022 - DNA, 20 bp, Artificial Sequence
  Description of Artificial Sequence: Synthetic oligonucleotide
  Target: LAMA2; (-) strand; PAM type: YTN; PAM sequence: CTG
atatatgctacaacgtggaa

SEQ ID NO: 221023 - DNA, 20 bp, Artificial Sequence
  Description of Artificial Sequence: Synthetic oligonucleotide
  Target: LAMA2; (-) strand; PAM type: YTN; PAM sequence: CTC
tgatatatgctacaacgtgg

SEQ ID NO: 221024 - DNA, 20 bp, Artificial Sequence
  Description of Artificial Sequence: Synthetic oligonucleotide
  Target: LAMA2; (-) strand; PAM type: YTN; PAM sequence: TTA
aaaatgaaggaaactctgat

SEQ ID NO: 221025 - DNA, 20 bp, Artificial Sequence
  Description of Artificial Sequence: Synthetic oligonucleotide
  Target: LAMA2; (-) strand; PAM type: YTN; PAM sequence: CTT
aaaaatgaaggaaactctga

SEQ ID NO: 221026 - DNA, 20 bp, Artificial Sequence
  Description of Artificial Sequence: Synthetic oligonucleotide
  Target: LAMA2; (-) strand; PAM type: YTN; PAM sequence: TTC
agccttaaaaatgaaggaaa

SEQ ID NO: 221027 - DNA, 20 bp, Artificial Sequence
  Description of Artificial Sequence: Synthetic oligonucleotide
  Target: LAMA2; (-) strand; PAM type: YTN; PAM sequence: TTA
ttcagccttaaaaatgaagg

SEQ ID NO: 221028 - DNA, 20 bp, Artificial Sequence
  Description of Artificial Sequence: Synthetic oligonucleotide
  Target: LAMA2; (-) strand; PAM type: YTN; PAM sequence: TTG
gaatattattcagccttaaa

SEQ ID NO: 221029 - DNA, 20 bp, Artificial Sequence
  Description of Artificial Sequence: Synthetic oligonucleotide
  Target: LAMA2; (-) strand; PAM type: YTN; PAM sequence: TTA
tacatagacattggaatatt

SEQ ID NO: 221030 - DNA, 20 bp, Artificial Sequence
  Description of Artificial Sequence: Synthetic oligonucleotide
  Target: LAMA2; (-) strand; PAM type: YTN; PAM sequence: CTT
atacatagacattggaatat

SEQ ID NO: 221031 - DNA, 20 bp, Artificial Sequence
  Description of Artificial Sequence: Synthetic oligonucleotide
  Target: LAMA2; (-) strand; PAM type: YTN; PAM sequence: CTA
cttatacatagacattggaa

SEQ ID NO: 221032 - DNA, 20 bp, Artificial Sequence
  Description of Artificial Sequence: Synthetic oligonucleotide
  Target: LAMA2; (-) strand; PAM type: YTN; PAM sequence: TTA
atggacaaaaaatgtgccat

SEQ ID NO: 221033 - DNA, 20 bp, Artificial Sequence
  Description of Artificial Sequence: Synthetic oligonucleotide
  Target: LAMA2; (-) strand; PAM type: YTN; PAM sequence: TTC
atcaatggattaatggacaa

SEQ ID NO: 221034 - DNA, 20 bp, Artificial Sequence
  Description of Artificial Sequence: Synthetic oligonucleotide
  Target: LAMA2; (-) strand; PAM type: YTN; PAM sequence: CTG
tgttcatcaatggattaatg

SEQ ID NO: 221035 - DNA, 20 bp, Artificial Sequence
  Description of Artificial Sequence: Synthetic oligonucleotide
  Target: LAMA2; (-) strand; PAM type: YTN; PAM sequence: TTA
acctgtgttcatcaatggat

SEQ ID NO: 221036 - DNA, 20 bp, Artificial Sequence
  Description of Artificial Sequence: Synthetic oligonucleotide
  Target: LAMA2; (-) strand; PAM type: YTN; PAM sequence: TTA
agaacaatagccagaaggtg

SEQ ID NO: 221037 - DNA, 20 bp, Artificial Sequence
  Description of Artificial Sequence: Synthetic oligonucleotide
  Target: LAMA2; (-) strand; PAM type: YTN; PAM sequence: TTC
atagcattaagaacaatagc

SEQ ID NO: 221038 - DNA, 20 bp, Artificial Sequence
  Description of Artificial Sequence: Synthetic oligonucleotide
  Target: LAMA2; (-) strand; PAM type: YTN; PAM sequence: TTG
aagcccatatgcccatgttc

SEQ ID NO: 221039 - DNA, 20 bp, Artificial Sequence
  Description of Artificial Sequence: Synthetic oligonucleotide
  Target: LAMA2; (-) strand; PAM type: YTN; PAM sequence: TTA
aagattgaagcccatatgcc

SEQ ID NO: 221040 - DNA, 20 bp, Artificial Sequence
  Description of Artificial Sequence: Synthetic oligonucleotide
  Target: LAMA2; (-) strand; PAM type: YTN; PAM sequence: CTT
aaagattgaagcccatatgc

SEQ ID NO: 221041 - DNA, 20 bp, Artificial Sequence
  Description of Artificial Sequence: Synthetic oligonucleotide
  Target: LAMA2; (-) strand; PAM type: YTN; PAM sequence: CTG
aaaccttaaagattgaagcc

SEQ ID NO: 221042 - DNA, 20 bp, Artificial Sequence
  Description of Artificial Sequence: Synthetic oligonucleotide
  Target: LAMA2; (-) strand; PAM type: YTN; PAM sequence: TTA
ccatgagtaactgaaacctt

SEQ ID NO: 221043 - DNA, 20 bp, Artificial Sequence
  Description of Artificial Sequence: Synthetic oligonucleotide
  Target: LAMA2; (-) strand; PAM type: YTN; PAM sequence: TTT
accatgagtaactgaaacct

SEQ ID NO: 221044 - DNA, 20 bp, Artificial Sequence
  Description of Artificial Sequence: Synthetic oligonucleotide
  Target: LAMA2; (-) strand; PAM type: YTN; PAM sequence: TTC
agtttaccatgagtaactga

SEQ ID NO: 221045 - DNA, 20 bp, Artificial Sequence
  Description of Artificial Sequence: Synthetic oligonucleotide
  Target: LAMA2; (-) strand; PAM type: YTN; PAM sequence: CTT
cagtttaccatgagtaactg

SEQ ID NO: 221046 - DNA, 20 bp, Artificial Sequence
  Description of Artificial Sequence: Synthetic oligonucleotide
  Target: LAMA2; (-) strand; PAM type: YTN; PAM sequence: TTC
agacttcagtttaccatgag

SEQ ID NO: 221047 - DNA, 20 bp, Artificial Sequence
  Description of Artificial Sequence: Synthetic oligonucleotide
  Target: LAMA2; (-) strand; PAM type: YTN; PAM sequence: TTT
cagacttcagtttaccatga

SEQ ID NO: 221048 - DNA, 20 bp, Artificial Sequence
  Description of Artificial Sequence: Synthetic oligonucleotide
  Target: LAMA2; (-) strand; PAM type: YTN; PAM sequence: TTT
tcagacttcagtttaccatg

SEQ ID NO: 221049 - DNA, 20 bp, Artificial Sequence
  Description of Artificial Sequence: Synthetic oligonucleotide
  Target: LAMA2; (-) strand; PAM type: YTN; PAM sequence: TTG
tatgtaatattttcagactt

SEQ ID NO: 221050 - DNA, 20 bp, Artificial Sequence
  Description of Artificial Sequence: Synthetic oligonucleotide
  Target: LAMA2; (-) strand; PAM type: YTN; PAM sequence: TTT
gtatgtaatattttcagact

SEQ ID NO: 221051 - DNA, 20 bp, Artificial Sequence
  Description of Artificial Sequence: Synthetic oligonucleotide
  Target: LAMA2; (-) strand; PAM type: YTN; PAM sequence: TTT
tgtatgtaatattttcagac

SEQ ID NO: 221052 - DNA, 20 bp, Artificial Sequence
  Description of Artificial Sequence: Synthetic oligonucleotide
  Target: LAMA2; (-) strand; PAM type: YTN; PAM sequence: TTT
ttgtatgtaatattttcaga

SEQ ID NO: 221053 - DNA, 20 bp, Artificial Sequence
  Description of Artificial Sequence: Synthetic oligonucleotide
  Target: LAMA2; (-) strand; PAM type: YTN; PAM sequence: TTA
aaatgtttttgtatgtaata

SEQ ID NO: 221054 - DNA, 20 bp, Artificial Sequence
  Description of Artificial Sequence: Synthetic oligonucleotide
  Target: LAMA2; (-) strand; PAM type: YTN; PAM sequence: CTT
aaaatgtttttgtatgtaat

SEQ ID NO: 221055 - DNA, 20 bp, Artificial Sequence
  Description of Artificial Sequence: Synthetic oligonucleotide
  Target: LAMA2; (-) strand; PAM type: YTN; PAM sequence: CTC
ttaaaatgtttttgtatgta

SEQ ID NO: 221056 - DNA, 20 bp, Artificial Sequence
  Description of Artificial Sequence: Synthetic oligonucleotide
  Target: LAMA2; (-) strand; PAM type: YTN; PAM sequence: CTC
tcttaaaatgtttttgtatg

SEQ ID NO: 221057 - DNA, 20 bp, Artificial Sequence
  Description of Artificial Sequence: Synthetic oligonucleotide
  Target: LAMA2; (-) strand; PAM type: YTN; PAM sequence: CTC
tctcttaaaatgtttttgta

SEQ ID NO: 221058 - DNA, 20 bp, Artificial Sequence
  Description of Artificial Sequence: Synthetic oligonucleotide
  Target: LAMA2; (-) strand; PAM type: YTN; PAM sequence: CTC
tctctcttaaaatgtttttg

SEQ ID NO: 221059 - DNA, 20 bp, Artificial Sequence
  Description of Artificial Sequence: Synthetic oligonucleotide
  Target: LAMA2; (-) strand; PAM type: YTN; PAM sequence: CTC
tctctctcttaaaatgtttt

SEQ ID NO: 221060 - DNA, 20 bp, Artificial Sequence
  Description of Artificial Sequence: Synthetic oligonucleotide
  Target: LAMA2; (-) strand; PAM type: YTN; PAM sequence: CTC
cctctctctctcttaaaatg

SEQ ID NO: 221061 - DNA, 20 bp, Artificial Sequence
  Description of Artificial Sequence: Synthetic oligonucleotide
  Target: LAMA2; (-) strand; PAM type: YTN; PAM sequence: TTC
tccctctctctctcttaaaa

SEQ ID NO: 221062 - DNA, 20 bp, Artificial Sequence
  Description of Artificial Sequence: Synthetic oligonucleotide
  Target: LAMA2; (-) strand; PAM type: YTN; PAM sequence: CTT
ctccctctctctctcttaaa

SEQ ID NO: 221063 - DNA, 20 bp, Artificial Sequence
  Description of Artificial Sequence: Synthetic oligonucleotide
  Target: LAMA2; (-) strand; PAM type: YTN; PAM sequence: TTA
tgtgaatgtagcttctccct

SEQ ID NO: 221064 - DNA, 20 bp, Artificial Sequence
  Description of Artificial Sequence: Synthetic oligonucleotide
  Target: LAMA2; (-) strand; PAM type: YTN; PAM sequence: CTA
ataaaaaatacaacaatata

SEQ ID NO: 221065 - DNA, 20 bp, Artificial Sequence
  Description of Artificial Sequence: Synthetic oligonucleotide
  Target: LAMA2; (-) strand; PAM type: YTN; PAM sequence: TTA
acaacaataactaataaaaa

SEQ ID NO: 221066 - DNA, 20 bp, Artificial Sequence
  Description of Artificial Sequence: Synthetic oligonucleotide
  Target: LAMA2; (-) strand; PAM type: YTN; PAM sequence: TTT
aacaacaataactaataaaa

SEQ ID NO: 221067 - DNA, 20 bp, Artificial Sequence
  Description of Artificial Sequence: Synthetic oligonucleotide
  Target: LAMA2; (-) strand; PAM type: YTN; PAM sequence: TTA
taaaataggcacagtaagag

SEQ ID NO: 221068 - DNA, 20 bp, Artificial Sequence
  Description of Artificial Sequence: Synthetic oligonucleotide
  Target: LAMA2; (-) strand; PAM type: YTN; PAM sequence: TTT
ataaaataggcacagtaaga

SEQ ID NO: 221069 - DNA, 20 bp, Artificial Sequence
  Description of Artificial Sequence: Synthetic oligonucleotide
  Target: LAMA2; (-) strand; PAM type: YTN; PAM sequence: TTA
atttataaaataggcacagt

SEQ ID NO: 221070 - DNA, 20 bp, Artificial Sequence
  Description of Artificial Sequence: Synthetic oligonucleotide
  Target: LAMA2; (-) strand; PAM type: YTN; PAM sequence: TTT
aatttataaaataggcacag

SEQ ID NO: 221071 - DNA, 20 bp, Artificial Sequence
  Description of Artificial Sequence: Synthetic oligonucleotide
  Target: LAMA2; (-) strand; PAM type: YTN; PAM sequence: TTG
atgaagtttaatttataaaa

SEQ ID NO: 221072 - DNA, 20 bp, Artificial Sequence
  Description of Artificial Sequence: Synthetic oligonucleotide
  Target: LAMA2; (-) strand; PAM type: YTN; PAM sequence: TTT
gatgaagtttaatttataaa

SEQ ID NO: 221073 - DNA, 20 bp, Artificial Sequence
  Description of Artificial Sequence: Synthetic oligonucleotide
  Target: LAMA2; (-) strand; PAM type: YTN; PAM sequence: CTT
tgatgaagtttaatttataa

SEQ ID NO: 221074 - DNA, 20 bp, Artificial Sequence
  Description of Artificial Sequence: Synthetic oligonucleotide
  Target: LAMA2; (-) strand; PAM type: YTN; PAM sequence: CTA
tacacacacatctttgatga

SEQ ID NO: 221075 - DNA, 20 bp, Artificial Sequence
  Description of Artificial Sequence: Synthetic oligonucleotide
  Target: LAMA2; (-) strand; PAM type: YTN; PAM sequence: TTC
tatacacacacatctttgat

SEQ ID NO: 221076 - DNA, 20 bp, Artificial Sequence
  Description of Artificial Sequence: Synthetic oligonucleotide
  Target: LAMA2; (-) strand; PAM type: YTN; PAM sequence: TTT
ctatacacacacatctttga

SEQ ID NO: 221077 - DNA, 20 bp, Artificial Sequence
  Description of Artificial Sequence: Synthetic oligonucleotide
  Target: LAMA2; (-) strand; PAM type: YTN; PAM sequence: TTT
tctatacacacacatctttg

SEQ ID NO: 221078 - DNA, 20 bp, Artificial Sequence
  Description of Artificial Sequence: Synthetic oligonucleotide
  Target: LAMA2; (-) strand; PAM type: YTN; PAM sequence: TTT
ttctatacacacacatcttt

SEQ ID NO: 221079 - DNA, 20 bp, Artificial Sequence
  Description of Artificial Sequence: Synthetic oligonucleotide
  Target: LAMA2; (-) strand; PAM type: YTN; PAM sequence: TTC
aatgcgtgaagcccatatat

SEQ ID NO: 221080 - DNA, 20 bp, Artificial Sequence
  Description of Artificial Sequence: Synthetic oligonucleotide
  Target: LAMA2; (-) strand; PAM type: YTN; PAM sequence: CTC
attcaatgcgtgaagcccat

SEQ ID NO: 221081 - DNA, 20 bp, Artificial Sequence
  Description of Artificial Sequence: Synthetic oligonucleotide
  Target: LAMA2; (-) strand; PAM type: YTN; PAM sequence: CTA
agaccctcattcaatgcgtg

SEQ ID NO: 221082 - DNA, 20 bp, Artificial Sequence
  Description of Artificial Sequence: Synthetic oligonucleotide
  Target: LAMA2; (-) strand; PAM type: YTN; PAM sequence: CTC
aggggatacatcctaagacc

SEQ ID NO: 221083 - DNA, 20 bp, Artificial Sequence
  Description of Artificial Sequence: Synthetic oligonucleotide
  Target: LAMA2; (-) strand; PAM type: YTN; PAM sequence: TTA
tcctcaggggatacatccta

SEQ ID NO: 221084 - DNA, 20 bp, Artificial Sequence
  Description of Artificial Sequence: Synthetic oligonucleotide
  Target: LAMA2; (-) strand; PAM type: YTN; PAM sequence: CTT
atcctcaggggatacatcct

SEQ ID NO: 221085 - DNA, 20 bp, Artificial Sequence
  Description of Artificial Sequence: Synthetic oligonucleotide
  Target: LAMA2; (-) strand; PAM type: YTN; PAM sequence: CTC
cttatcctcaggggatacat

SEQ ID NO: 221086 - DNA, 20 bp, Artificial Sequence
  Description of Artificial Sequence: Synthetic oligonucleotide
  Target: LAMA2; (-) strand; PAM type: YTN; PAM sequence: TTA
tagtagtccctccttatcct

SEQ ID NO: 221087 - DNA, 20 bp, Artificial Sequence
  Description of Artificial Sequence: Synthetic oligonucleotide
  Target: LAMA2; (-) strand; PAM type: YTN; PAM sequence: TTA
acagtagaattatagtagtc

SEQ ID NO: 221088 - DNA, 20 bp, Artificial Sequence
  Description of Artificial Sequence: Synthetic oligonucleotide
  Target: LAMA2; (-) strand; PAM type: YTN; PAM sequence: CTC
aaagaattaacagtagaatt

SEQ ID NO: 221089 - DNA, 20 bp, Artificial Sequence
  Description of Artificial Sequence: Synthetic oligonucleotide
  Target: LAMA2; (-) strand; PAM type: YTN; PAM sequence: TTC
ctcaaagaattaacagtaga

SEQ ID NO: 221090 - DNA, 20 bp, Artificial Sequence
  Description of Artificial Sequence: Synthetic oligonucleotide
  Target: LAMA2; (-) strand; PAM type: YTN; PAM sequence: CTA
tggaaaacaatatagtggtt

SEQ ID NO: 221091 - DNA, 20 bp, Artificial Sequence
  Description of Artificial Sequence: Synthetic oligonucleotide
  Target: LAMA2; (-) strand; PAM type: YTN; PAM sequence: TTG
tgtatggccgatgggaatgt

SEQ ID NO: 221092 - DNA, 20 bp, Artificial Sequence
  Description of Artificial Sequence: Synthetic oligonucleotide
  Target: LAMA2; (-) strand; PAM type: YTN; PAM sequence: CTT
gtgtatggccgatgggaatg

SEQ ID NO: 221093 - DNA, 20 bp, Artificial Sequence
  Description of Artificial Sequence: Synthetic oligonucleotide
  Target: LAMA2; (-) strand; PAM type: YTN; PAM sequence: TTA
gaatccttgtgtatggccga

SEQ ID NO: 221094 - DNA, 20 bp, Artificial Sequence
  Description of Artificial Sequence: Synthetic oligonucleotide
  Target: LAMA2; (-) strand; PAM type: YTN; PAM sequence: TTG
gcaagggtgtggagaaatta

SEQ ID NO: 221095 - DNA, 20 bp, Artificial Sequence
  Description of Artificial Sequence: Synthetic oligonucleotide
  Target: LAMA2; (-) strand; PAM type: YTN; PAM sequence: TTA
aaaagaaaaaaaaaaaaaca

SEQ ID NO: 221096 - DNA, 20 bp, Artificial Sequence
  Description of Artificial Sequence: Synthetic oligonucleotide
  Target: LAMA2; (-) strand; PAM type: YTN; PAM sequence: TTT
aaaaagaaaaaaaaaaaaac

SEQ ID NO: 221097 - DNA, 20 bp, Artificial Sequence
  Description of Artificial Sequence: Synthetic oligonucleotide
  Target: LAMA2; (-) strand; PAM type: YTN; PAM sequence: CTA
tttaaaaagaaaaaaaaaaa

SEQ ID NO: 221098 - DNA, 20 bp, Artificial Sequence
  Description of Artificial Sequence: Synthetic oligonucleotide
  Target: LAMA2; (-) strand; PAM type: YTN; PAM sequence: CTA
actatttaaaaagaaaaaaa

SEQ ID NO: 221099 - DNA, 20 bp, Artificial Sequence
  Description of Artificial Sequence: Synthetic oligonucleotide
  Target: LAMA2; (-) strand; PAM type: YTN; PAM sequence: TTG
atgctaactatttaaaaaga

SEQ ID NO: 221100 - DNA, 20 bp, Artificial Sequence
  Description of Artificial Sequence: Synthetic oligonucleotide
  Target: LAMA2; (-) strand; PAM type: YTN; PAM sequence: TTT
gatgctaactatttaaaaag

SEQ ID NO: 221101 - DNA, 20 bp, Artificial Sequence
  Description of Artificial Sequence: Synthetic oligonucleotide
  Target: LAMA2; (-) strand; PAM type: YTN; PAM sequence: TTC
atacgcatttgatgctaact

SEQ ID NO: 221102 - DNA, 20 bp, Artificial Sequence
  Description of Artificial Sequence: Synthetic oligonucleotide
  Target: LAMA2; (-) strand; PAM type: YTN; PAM sequence: CTT
catacgcatttgatgctaac

SEQ ID NO: 221103 - DNA, 20 bp, Artificial Sequence
  Description of Artificial Sequence: Synthetic oligonucleotide
  Target: LAMA2; (-) strand; PAM type: YTN; PAM sequence: CTG
aaaatatgaaccaccaccac

SEQ ID NO: 221104 - DNA, 20 bp, Artificial Sequence
  Description of Artificial Sequence: Synthetic oligonucleotide
  Target: LAMA2; (-) strand; PAM type: YTN; PAM sequence: CTG
ggaaacgatgactgaaaata

SEQ ID NO: 221105 - DNA, 20 bp, Artificial Sequence
  Description of Artificial Sequence: Synthetic oligonucleotide
  Target: LAMA2; (-) strand; PAM type: YTN; PAM sequence: CTC
aagaaatactgggaaacgat

SEQ ID NO: 221106 - DNA, 20 bp, Artificial Sequence
  Description of Artificial Sequence: Synthetic oligonucleotide
  Target: LAMA2; (-) strand; PAM type: YTN; PAM sequence: TTG
tctcaagaaatactgggaaa

SEQ ID NO: 221107 - DNA, 20 bp, Artificial Sequence
  Description of Artificial Sequence: Synthetic oligonucleotide
  Target: LAMA2; (-) strand; PAM type: YTN; PAM sequence: TTC
aaaattgtctcaagaaatac

SEQ ID NO: 221108 - DNA, 20 bp, Artificial Sequence
  Description of Artificial Sequence: Synthetic oligonucleotide
  Target: LAMA2; (-) strand; PAM type: YTN; PAM sequence: TTT
caaaattgtctcaagaaata

SEQ ID NO: 221109 - DNA, 20 bp, Artificial Sequence
  Description of Artificial Sequence: Synthetic oligonucleotide
  Target: LAMA2; (-) strand; PAM type: YTN; PAM sequence: TTA
caatatttcaaaattgtctc

SEQ ID NO: 221110 - DNA, 20 bp, Artificial Sequence
  Description of Artificial Sequence: Synthetic oligonucleotide
  Target: LAMA2; (-) strand; PAM type: YTN; PAM sequence: CTT
acaatatttcaaaattgtct

SEQ ID NO: 221111 - DNA, 20 bp, Artificial Sequence
  Description of Artificial Sequence: Synthetic oligonucleotide
  Target: LAMA2; (-) strand; PAM type: YTN; PAM sequence: CTC
ttacaatatttcaaaattgt

SEQ ID NO: 221112 - DNA, 20 bp, Artificial Sequence
  Description of Artificial Sequence: Synthetic oligonucleotide
  Target: LAMA2; (-) strand; PAM type: YTN; PAM sequence: TTA
tatctcttacaatatttcaa

SEQ ID NO: 221113 - DNA, 20 bp, Artificial Sequence
  Description of Artificial Sequence: Synthetic oligonucleotide
  Target: LAMA2; (-) strand; PAM type: YTN; PAM sequence: TTT
atatctcttacaatatttca

SEQ ID NO: 221114 - DNA, 20 bp, Artificial Sequence
  Description of Artificial Sequence: Synthetic oligonucleotide
  Target: LAMA2; (-) strand; PAM type: YTN; PAM sequence: TTT
tatatctcttacaatatttc

SEQ ID NO: 221115 - DNA, 20 bp, Artificial Sequence
  Description of Artificial Sequence: Synthetic oligonucleotide
  Target: LAMA2; (-) strand; PAM type: YTN; PAM sequence: TTA
ttttatatctcttacaatat

SEQ ID NO: 221116 - DNA, 20 bp, Artificial Sequence
  Description of Artificial Sequence: Synthetic oligonucleotide
  Target: LAMA2; (-) strand; PAM type: YTN; PAM sequence: TTC
caacatcaaagttattttat

SEQ ID NO: 221117 - DNA, 20 bp, Artificial Sequence
  Description of Artificial Sequence: Synthetic oligonucleotide
  Target: LAMA2; (-) strand; PAM type: YTN; PAM sequence: TTT
ccaacatcaaagttatttta

SEQ ID NO: 221118 - DNA, 20 bp, Artificial Sequence
  Description of Artificial Sequence: Synthetic oligonucleotide
  Target: LAMA2; (-) strand; PAM type: YTN; PAM sequence: CTT
tccaacatcaaagttatttt

SEQ ID NO: 221119 - DNA, 20 bp, Artificial Sequence
  Description of Artificial Sequence: Synthetic oligonucleotide
  Target: LAMA2; (-) strand; PAM type: YTN; PAM sequence: TTC
tttccaacatcaaagttatt

SEQ ID NO: 221120 - DNA, 20 bp, Artificial Sequence
  Description of Artificial Sequence: Synthetic oligonucleotide
  Target: LAMA2; (-) strand; PAM type: YTN; PAM sequence: CTA
ttctttccaacatcaaagtt

SEQ ID NO: 221121 - DNA, 20 bp, Artificial Sequence
  Description of Artificial Sequence: Synthetic oligonucleotide
  Target: LAMA2; (-) strand; PAM type: YTN; PAM sequence: CTG
ctattctttccaacatcaaa

SEQ ID NO: 221122 - DNA, 20 bp, Artificial Sequence
  Description of Artificial Sequence: Synthetic oligonucleotide
  Target: LAMA2; (-) strand; PAM type: YTN; PAM sequence: TTC
actgctattctttccaacat

SEQ ID NO: 221123 - DNA, 20 bp, Artificial Sequence
  Description of Artificial Sequence: Synthetic oligonucleotide
  Target: LAMA2; (-) strand; PAM type: YTN; PAM sequence: CTT
cactgctattctttccaaca

SEQ ID NO: 221124 - DNA, 20 bp, Artificial Sequence
  Description of Artificial Sequence: Synthetic oligonucleotide
  Target: LAMA2; (-) strand; PAM type: YTN; PAM sequence: TTC
ttcactgctattctttccaa

SEQ ID NO: 221125 - DNA, 20 bp, Artificial Sequence
  Description of Artificial Sequence: Synthetic oligonucleotide
  Target: LAMA2; (-) strand; PAM type: YTN; PAM sequence: TTA
catgggcattcttcactgct

SEQ ID NO: 221126 - DNA, 20 bp, Artificial Sequence
  Description of Artificial Sequence: Synthetic oligonucleotide
  Target: LAMA2; (-) strand; PAM type: YTN; PAM sequence: TTT
acatgggcattcttcactgc

SEQ ID NO: 221127 - DNA, 20 bp, Artificial Sequence
  Description of Artificial Sequence: Synthetic oligonucleotide
  Target: LAMA2; (-) strand; PAM type: YTN; PAM sequence: TTT
tacatgggcattcttcactg

SEQ ID NO: 221128 - DNA, 20 bp, Artificial Sequence
  Description of Artificial Sequence: Synthetic oligonucleotide
  Target: LAMA2; (-) strand; PAM type: YTN; PAM sequence: CTC
aaattttacatgggcattct

SEQ ID NO: 221129 - DNA, 20 bp, Artificial Sequence
  Description of Artificial Sequence: Synthetic oligonucleotide
  Target: LAMA2; (-) strand; PAM type: YTN; PAM sequence: TTC
tcaaattttacatgggcatt

SEQ ID NO: 221130 - DNA, 20 bp, Artificial Sequence
  Description of Artificial Sequence: Synthetic oligonucleotide
  Target: LAMA2; (-) strand; PAM type: YTN; PAM sequence: TTC
aagattctcaaattttacat

SEQ ID NO: 221131 - DNA, 20 bp, Artificial Sequence
  Description of Artificial Sequence: Synthetic oligonucleotide
  Target: LAMA2; (-) strand; PAM type: YTN; PAM sequence: TTT
caagattctcaaattttaca

SEQ ID NO: 221132 - DNA, 20 bp, Artificial Sequence
  Description of Artificial Sequence: Synthetic oligonucleotide
  Target: LAMA2; (-) strand; PAM type: YTN; PAM sequence: CTG
tcatgtttcaagattctcaa

SEQ ID NO: 221133 - DNA, 20 bp, Artificial Sequence
  Description of Artificial Sequence: Synthetic oligonucleotide
  Target: LAMA2; (-) strand; PAM type: YTN; PAM sequence: TTG
tatctgtcatgtttcaagat

SEQ ID NO: 221134 - DNA, 20 bp, Artificial Sequence
  Description of Artificial Sequence: Synthetic oligonucleotide
  Target: LAMA2; (-) strand; PAM type: YTN; PAM sequence: TTA
atgcaatgttgtatctgtca

SEQ ID NO: 221135 - DNA, 20 bp, Artificial Sequence
  Description of Artificial Sequence: Synthetic oligonucleotide
  Target: LAMA2; (-) strand; PAM type: YTN; PAM sequence: TTT
aatgcaatgttgtatctgtc

SEQ ID NO: 221136 - DNA, 20 bp, Artificial Sequence
  Description of Artificial Sequence: Synthetic oligonucleotide
  Target: LAMA2; (-) strand; PAM type: YTN; PAM sequence: CTT
taatgcaatgttgtatctgt

SEQ ID NO: 221137 - DNA, 20 bp, Artificial Sequence
  Description of Artificial Sequence: Synthetic oligonucleotide
  Target: LAMA2; (-) strand; PAM type: YTN; PAM sequence: TTC
ctttaatgcaatgttgtatc

SEQ ID NO: 221138 - DNA, 20 bp, Artificial Sequence
  Description of Artificial Sequence: Synthetic oligonucleotide
  Target: LAMA2; (-) strand; PAM type: YTN; PAM sequence: TTT
cctttaatgcaatgttgtat

SEQ ID NO: 221139 - DNA, 20 bp, Artificial Sequence
  Description of Artificial Sequence: Synthetic oligonucleotide
  Target: LAMA2; (-) strand; PAM type: YTN; PAM sequence: TTA
atttcctttaatgcaatgtt

SEQ ID NO: 221140 - DNA, 20 bp, Artificial Sequence
  Description of Artificial Sequence: Synthetic oligonucleotide
  Target: LAMA2; (-) strand; PAM type: YTN; PAM sequence: TTT
aatttcctttaatgcaatgt

SEQ ID NO: 221141 - DNA, 20 bp, Artificial Sequence
  Description of Artificial Sequence: Synthetic oligonucleotide
  Target: LAMA2; (-) strand; PAM type: YTN; PAM sequence: TTG
tccaggatttaatttccttt

SEQ ID NO: 221142 - DNA, 20 bp, Artificial Sequence
  Description of Artificial Sequence: Synthetic oligonucleotide
  Target: LAMA2; (-) strand; PAM type: YTN; PAM sequence: CTA
agcaaaattgtccaggattt

SEQ ID NO: 221143 - DNA, 20 bp, Artificial Sequence
  Description of Artificial Sequence: Synthetic oligonucleotide
  Target: LAMA2; (-) strand; PAM type: YTN; PAM sequence: TTA
caagctaagcaaaattgtcc

SEQ ID NO: 221144 - DNA, 20 bp, Artificial Sequence
  Description of Artificial Sequence: Synthetic oligonucleotide
  Target: LAMA2; (-) strand; PAM type: YTN; PAM sequence: CTT
acaagctaagcaaaattgtc

SEQ ID NO: 221145 - DNA, 20 bp, Artificial Sequence
  Description of Artificial Sequence: Synthetic oligonucleotide
  Target: LAMA2; (-) strand; PAM type: YTN; PAM sequence: TTG
tatatgtacttacaagctaa

SEQ ID NO: 221146 - DNA, 20 bp, Artificial Sequence
  Description of Artificial Sequence: Synthetic oligonucleotide
  Target: LAMA2; (-) strand; PAM type: YTN; PAM sequence: TTG
tatatgtgttgtatatgtac

SEQ ID NO: 221147 - DNA, 20 bp, Artificial Sequence
  Description of Artificial Sequence: Synthetic oligonucleotide
  Target: LAMA2; (-) strand; PAM type: YTN; PAM sequence: TTT
gtatatgtgttgtatatgta

SEQ ID NO: 221148 - DNA, 20 bp, Artificial Sequence
  Description of Artificial Sequence: Synthetic oligonucleotide
  Target: LAMA2; (-) strand; PAM type: YTN; PAM sequence: TTA
taggtacatgtatttgtata

SEQ ID NO: 221149 - DNA, 20 bp, Artificial Sequence
  Description of Artificial Sequence: Synthetic oligonucleotide
  Target: LAMA2; (-) strand; PAM type: YTN; PAM sequence: CTT
ataggtacatgtatttgtat

SEQ ID NO: 221150 - DNA, 20 bp, Artificial Sequence
  Description of Artificial Sequence: Synthetic oligonucleotide
  Target: LAMA2; (-) strand; PAM type: YTN; PAM sequence: TTA
tatgtacttataggtacatg

SEQ ID NO: 221151 - DNA, 20 bp, Artificial Sequence
  Description of Artificial Sequence: Synthetic oligonucleotide
  Target: LAMA2; (-) strand; PAM type: YTN; PAM sequence: TTT
atatgtacttataggtacat

SEQ ID NO: 221152 - DNA, 20 bp, Artificial Sequence
  Description of Artificial Sequence: Synthetic oligonucleotide
  Target: LAMA2; (-) strand; PAM type: YTN; PAM sequence: TTT
tatatgtacttataggtaca

SEQ ID NO: 221153 - DNA, 20 bp, Artificial Sequence
  Description of Artificial Sequence: Synthetic oligonucleotide
  Target: LAMA2; (-) strand; PAM type: YTN; PAM sequence: TTA
gaaaggatatattttatatg

SEQ ID NO: 221154 - DNA, 20 bp, Artificial Sequence
  Description of Artificial Sequence: Synthetic oligonucleotide
  Target: LAMA2; (-) strand; PAM type: YTN; PAM sequence: TTT
agaaaggatatattttatat

SEQ ID NO: 221155 - DNA, 20 bp, Artificial Sequence
  Description of Artificial Sequence: Synthetic oligonucleotide
  Target: LAMA2; (-) strand; PAM type: YTN; PAM sequence: CTG
acaatatagccaaatttaga

SEQ ID NO: 221156 - DNA, 20 bp, Artificial Sequence
  Description of Artificial Sequence: Synthetic oligonucleotide
  Target: LAMA2; (-) strand; PAM type: YTN; PAM sequence: CTC
aggtatctgacaatatagcc

SEQ ID NO: 221157 - DNA, 20 bp, Artificial Sequence
  Description of Artificial Sequence: Synthetic oligonucleotide
  Target: LAMA2; (-) strand; PAM type: YTN; PAM sequence: TTC
tcaggtatctgacaatatag

SEQ ID NO: 221158 - DNA, 20 bp, Artificial Sequence
  Description of Artificial Sequence: Synthetic oligonucleotide
  Target: LAMA2; (-) strand; PAM type: YTN; PAM sequence: TTT
ctcaggtatctgacaatata

SEQ ID NO: 221159 - DNA, 20 bp, Artificial Sequence
  Description of Artificial Sequence: Synthetic oligonucleotide
  Target: LAMA2; (-) strand; PAM type: YTN; PAM sequence: TTT
tctcaggtatctgacaatat

SEQ ID NO: 221160 - DNA, 20 bp, Artificial Sequence
  Description of Artificial Sequence: Synthetic oligonucleotide
  Target: LAMA2; (-) strand; PAM type: YTN; PAM sequence: CTA
taaagataataattttctca

SEQ ID NO: 221161 - DNA, 20 bp, Artificial Sequence
  Description of Artificial Sequence: Synthetic oligonucleotide
  Target: LAMA2; (-) strand; PAM type: YTN; PAM sequence: TTG
gcgacatatcacagaggcta

SEQ ID NO: 221162 - DNA, 20 bp, Artificial Sequence
  Description of Artificial Sequence: Synthetic oligonucleotide
  Target: LAMA2; (-) strand; PAM type: YTN; PAM sequence: TTG
cattggcgacatatcacaga

SEQ ID NO: 221163 - DNA, 20 bp, Artificial Sequence
  Description of Artificial Sequence: Synthetic oligonucleotide
  Target: LAMA2; (-) strand; PAM type: YTN; PAM sequence: CTT
gcattggcgacatatcacag

SEQ ID NO: 221164 - DNA, 20 bp, Artificial Sequence
  Description of Artificial Sequence: Synthetic oligonucleotide
  Target: LAMA2; (-) strand; PAM type: YTN; PAM sequence: TTC
atgggccttgcattggcgac

SEQ ID NO: 221165 - DNA, 20 bp, Artificial Sequence
  Description of Artificial Sequence: Synthetic oligonucleotide
  Target: LAMA2; (-) strand; PAM type: YTN; PAM sequence: TTT
catgggccttgcattggcga

SEQ ID NO: 221166 - DNA, 20 bp, Artificial Sequence
  Description of Artificial Sequence: Synthetic oligonucleotide
  Target: LAMA2; (-) strand; PAM type: YTN; PAM sequence: TTT
tcatgggccttgcattggcg

SEQ ID NO: 221167 - DNA, 20 bp, Artificial Sequence
  Description of Artificial Sequence: Synthetic oligonucleotide
  Target: LAMA2; (-) strand; PAM type: YTN; PAM sequence: TTG
agttttcatgggccttgcat

SEQ ID NO: 221168 - DNA, 20 bp, Artificial Sequence
  Description of Artificial Sequence: Synthetic oligonucleotide
  Target: LAMA2; (-) strand; PAM type: YTN; PAM sequence: TTT
gagttttcatgggccttgca

SEQ ID NO: 221169 - DNA, 20 bp, Artificial Sequence
  Description of Artificial Sequence: Synthetic oligonucleotide
  Target: LAMA2; (-) strand; PAM type: YTN; PAM sequence: TTT
tgagttttcatgggccttgc

SEQ ID NO: 221170 - DNA, 20 bp, Artificial Sequence
  Description of Artificial Sequence: Synthetic oligonucleotide
  Target: LAMA2; (-) strand; PAM type: YTN; PAM sequence: TTT
ttgagttttcatgggccttg

SEQ ID NO: 221171 - DNA, 20 bp, Artificial Sequence
  Description of Artificial Sequence: Synthetic oligonucleotide
  Target: LAMA2; (-) strand; PAM type: YTN; PAM sequence: CTT
tttgagttttcatgggcctt

SEQ ID NO: 221172 - DNA, 20 bp, Artificial Sequence
  Description of Artificial Sequence: Synthetic oligonucleotide
  Target: LAMA2; (-) strand; PAM type: YTN; PAM sequence: CTC
tttttgagttttcatgggcc

SEQ ID NO: 221173 - DNA, 20 bp, Artificial Sequence
  Description of Artificial Sequence: Synthetic oligonucleotide
  Target: LAMA2; (-) strand; PAM type: YTN; PAM sequence: CTG
actctttttgagttttcatg

SEQ ID NO: 221174 - DNA, 20 bp, Artificial Sequence
  Description of Artificial Sequence: Synthetic oligonucleotide
  Target: LAMA2; (-) strand; PAM type: YTN; PAM sequence: CTA
actgactctttttgagtttt

SEQ ID NO: 221175 - DNA, 20 bp, Artificial Sequence
  Description of Artificial Sequence: Synthetic oligonucleotide
  Target: LAMA2; (-) strand; PAM type: YTN; PAM sequence: TTA
ctaactgactctttttgagt

SEQ ID NO: 221176 - DNA, 20 bp, Artificial Sequence
  Description of Artificial Sequence: Synthetic oligonucleotide
  Target: LAMA2; (-) strand; PAM type: YTN; PAM sequence: TTT
actaactgactctttttgag

SEQ ID NO: 221177 - DNA, 20 bp, Artificial Sequence
  Description of Artificial Sequence: Synthetic oligonucleotide
  Target: LAMA2; (-) strand; PAM type: YTN; PAM sequence: TTC
atttactaactgactctttt

SEQ ID NO: 221178 - DNA, 20 bp, Artificial Sequence
  Description of Artificial Sequence: Synthetic oligonucleotide
  Target: LAMA2; (-) strand; PAM type: YTN; PAM sequence: TTA
tacaaataataaaagagttc

SEQ ID NO: 221179 - DNA, 20 bp, Artificial Sequence
  Description of Artificial Sequence: Synthetic oligonucleotide
  Target: LAMA2; (-) strand; PAM type: YTN; PAM sequence: TTT
atacaaataataaaagagtt

SEQ ID NO: 221180 - DNA, 20 bp, Artificial Sequence
  Description of Artificial Sequence: Synthetic oligonucleotide
  Target: LAMA2; (-) strand; PAM type: YTN; PAM sequence: CTA
taatttatacaaataataaa

SEQ ID NO: 221181 - DNA, 20 bp, Artificial Sequence
  Description of Artificial Sequence: Synthetic oligonucleotide
  Target: LAMA2; (-) strand; PAM type: YTN; PAM sequence: TTA
taaaaactataatttataca

SEQ ID NO: 221182 - DNA, 20 bp, Artificial Sequence
  Description of Artificial Sequence: Synthetic oligonucleotide
  Target: LAMA2; (-) strand; PAM type: YTN; PAM sequence: TTA
aattataaaaactataattt

SEQ ID NO: 221183 - DNA, 20 bp, Artificial Sequence
  Description of Artificial Sequence: Synthetic oligonucleotide
  Target: LAMA2; (-) strand; PAM type: YTN; PAM sequence: TTT
aaattataaaaactataatt

SEQ ID NO: 221184 - DNA, 20 bp, Artificial Sequence
  Description of Artificial Sequence: Synthetic oligonucleotide
  Target: LAMA2; (-) strand; PAM type: YTN; PAM sequence: TTA
catttaaattataaaaacta

SEQ ID NO: 221185 - DNA, 20 bp, Artificial Sequence
  Description of Artificial Sequence: Synthetic oligonucleotide
  Target: LAMA2; (-) strand; PAM type: YTN; PAM sequence: TTC
atatgttacatttaaattat

SEQ ID NO: 221186 - DNA, 20 bp, Artificial Sequence
  Description of Artificial Sequence: Synthetic oligonucleotide
  Target: LAMA2; (-) strand; PAM type: YTN; PAM sequence: TTC
cagacacaagtattcatatg

SEQ ID NO: 221187 - DNA, 20 bp, Artificial Sequence
  Description of Artificial Sequence: Synthetic oligonucleotide
  Target: LAMA2; (-) strand; PAM type: YTN; PAM sequence: TTG
taattccagacacaagtatt

SEQ ID NO: 221188 - DNA, 20 bp, Artificial Sequence
  Description of Artificial Sequence: Synthetic oligonucleotide
  Target: LAMA2; (-) strand; PAM type: YTN; PAM sequence: CTA
ttgtaattccagacacaagt

SEQ ID NO: 221189 - DNA, 20 bp, Artificial Sequence
  Description of Artificial Sequence: Synthetic oligonucleotide
  Target: LAMA2; (-) strand; PAM type: YTN; PAM sequence: CTG
gagataaaaatgtgtctatt

SEQ ID NO: 221190 - DNA, 20 bp, Artificial Sequence
  Description of Artificial Sequence: Synthetic oligonucleotide
  Target: LAMA2; (-) strand; PAM type: YTN; PAM sequence: CTC
tggagataaaaatgtgtcta

SEQ ID NO: 221191 - DNA, 20 bp, Artificial Sequence
  Description of Artificial Sequence: Synthetic oligonucleotide
  Target: LAMA2; (-) strand; PAM type: YTN; PAM sequence: CTC
tctggagataaaaatgtgtc

SEQ ID NO: 221192 - DNA, 20 bp, Artificial Sequence
  Description of Artificial Sequence: Synthetic oligonucleotide
  Target: LAMA2; (-) strand; PAM type: YTN; PAM sequence: TTC
aaaaagtgccagtagtaact

SEQ ID NO: 221193 - DNA, 20 bp, Artificial Sequence
  Description of Artificial Sequence: Synthetic oligonucleotide
  Target: LAMA2; (-) strand; PAM type: YTN; PAM sequence: TTT
caaaaagtgccagtagtaac

SEQ ID NO: 221194 - DNA, 20 bp, Artificial Sequence
  Description of Artificial Sequence: Synthetic oligonucleotide
  Target: LAMA2; (-) strand; PAM type: YTN; PAM sequence: CTA
ggacaaaacaggatttcaaa

SEQ ID NO: 221195 - DNA, 20 bp, Artificial Sequence
  Description of Artificial Sequence: Synthetic oligonucleotide
  Target: LAMA2; (-) strand; PAM type: YTN; PAM sequence: TTG
tccagtgtctaggacaaaac

SEQ ID NO: 221196 - DNA, 20 bp, Artificial Sequence
  Description of Artificial Sequence: Synthetic oligonucleotide
  Target: LAMA2; (-) strand; PAM type: YTN; PAM sequence: TTT
gtccagtgtctaggacaaaa

SEQ ID NO: 221197 - DNA, 20 bp, Artificial Sequence
  Description of Artificial Sequence: Synthetic oligonucleotide
  Target: LAMA2; (-) strand; PAM type: YTN; PAM sequence: TTT
tgtccagtgtctaggacaaa

SEQ ID NO: 221198 - DNA, 20 bp, Artificial Sequence
  Description of Artificial Sequence: Synthetic oligonucleotide
  Target: LAMA2; (-) strand; PAM type: YTN; PAM sequence: TTA
tgtaaaatattttgtccagt

SEQ ID NO: 221199 - DNA, 20 bp, Artificial Sequence
  Description of Artificial Sequence: Synthetic oligonucleotide
  Target: LAMA2; (-) strand; PAM type: YTN; PAM sequence: TTT
atgtaaaatattttgtccag

SEQ ID NO: 221200 - DNA, 20 bp, Artificial Sequence
  Description of Artificial Sequence: Synthetic oligonucleotide
  Target: LAMA2; (-) strand; PAM type: YTN; PAM sequence: CTA
taagataatttatgtaaaat

SEQ ID NO: 221201 - DNA, 20 bp, Artificial Sequence
  Description of Artificial Sequence: Synthetic oligonucleotide
  Target: LAMA2; (-) strand; PAM type: YTN; PAM sequence: TTC
tataagataatttatgtaaa

SEQ ID NO: 221202 - DNA, 20 bp, Artificial Sequence
  Description of Artificial Sequence: Synthetic oligonucleotide
  Target: LAMA2; (-) strand; PAM type: YTN; PAM sequence: TTG
aaaagttctataagataatt

SEQ ID NO: 221203 - DNA, 20 bp, Artificial Sequence
  Description of Artificial Sequence: Synthetic oligonucleotide
  Target: LAMA2; (-) strand; PAM type: YTN; PAM sequence: TTA
cggagttgaaaagttctata

SEQ ID NO: 221204 - DNA, 20 bp, Artificial Sequence
  Description of Artificial Sequence: Synthetic oligonucleotide
  Target: LAMA2; (-) strand; PAM type: YTN; PAM sequence: CTT
acggagttgaaaagttctat

SEQ ID NO: 221205 - DNA, 20 bp, Artificial Sequence
  Description of Artificial Sequence: Synthetic oligonucleotide
  Target: LAMA2; (-) strand; PAM type: YTN; PAM sequence: TTC
ttacggagttgaaaagttct

SEQ ID NO: 221206 - DNA, 20 bp, Artificial Sequence
  Description of Artificial Sequence: Synthetic oligonucleotide
  Target: LAMA2; (-) strand; PAM type: YTN; PAM sequence: TTT
cttacggagttgaaaagttc

SEQ ID NO: 221207 - DNA, 20 bp, Artificial Sequence
  Description of Artificial Sequence: Synthetic oligonucleotide
  Target: LAMA2; (-) strand; PAM type: YTN; PAM sequence: CTT
tcttacggagttgaaaagtt

SEQ ID NO: 221208 - DNA, 20 bp, Artificial Sequence
  Description of Artificial Sequence: Synthetic oligonucleotide
  Target: LAMA2; (-) strand; PAM type: YTN; PAM sequence: TTA
taatagtatctttcttacgg

SEQ ID NO: 221209 - DNA, 20 bp, Artificial Sequence
  Description of Artificial Sequence: Synthetic oligonucleotide
  Target: LAMA2; (-) strand; PAM type: YTN; PAM sequence: CTA
attataatagtatctttctt

SEQ ID NO: 221210 - DNA, 20 bp, Artificial Sequence
  Description of Artificial Sequence: Synthetic oligonucleotide
  Target: LAMA2; (-) strand; PAM type: YTN; PAM sequence: CTG
tgatacaaaatgtactaatt

SEQ ID NO: 221211 - DNA, 20 bp, Artificial Sequence
  Description of Artificial Sequence: Synthetic oligonucleotide
  Target: LAMA2; (-) strand; PAM type: YTN; PAM sequence: TTC
tgtgatacaaaatgtactaa

SEQ ID NO: 221212 - DNA, 20 bp, Artificial Sequence
  Description of Artificial Sequence: Synthetic oligonucleotide
  Target: LAMA2; (-) strand; PAM type: YTN; PAM sequence: TTT
ctgtgatacaaaatgtacta

SEQ ID NO: 221213 - DNA, 20 bp, Artificial Sequence
  Description of Artificial Sequence: Synthetic oligonucleotide
  Target: LAMA2; (-) strand; PAM type: YTN; PAM sequence: TTA
atttctgtgatacaaaatgt

SEQ ID NO: 221214 - DNA, 20 bp, Artificial Sequence
  Description of Artificial Sequence: Synthetic oligonucleotide
  Target: LAMA2; (-) strand; PAM type: YTN; PAM sequence: TTT
aatttctgtgatacaaaatg

SEQ ID NO: 221215 - DNA, 20 bp, Artificial Sequence
  Description of Artificial Sequence: Synthetic oligonucleotide
  Target: LAMA2; (-) strand; PAM type: YTN; PAM sequence: TTG
tttaatttctgtgatacaaa

SEQ ID NO: 221216 - DNA, 20 bp, Artificial Sequence
  Description of Artificial Sequence: Synthetic oligonucleotide
  Target: LAMA2; (-) strand; PAM type: YTN; PAM sequence: TTG
aggaagttgtttaatttctg

SEQ ID NO: 221217 - DNA, 20 bp, Artificial Sequence
  Description of Artificial Sequence: Synthetic oligonucleotide
  Target: LAMA2; (-) strand; PAM type: YTN; PAM sequence: TTT
gaggaagttgtttaatttct

SEQ ID NO: 221218 - DNA, 20 bp, Artificial Sequence
  Description of Artificial Sequence: Synthetic oligonucleotide
  Target: LAMA2; (-) strand; PAM type: YTN; PAM sequence: TTT
tgaggaagttgtttaatttc

SEQ ID NO: 221219 - DNA, 20 bp, Artificial Sequence
  Description of Artificial Sequence: Synthetic oligonucleotide
  Target: LAMA2; (-) strand; PAM type: YTN; PAM sequence: CTG
tgtcattttgaggaagttgt

SEQ ID NO: 221220 - DNA, 20 bp, Artificial Sequence
  Description of Artificial Sequence: Synthetic oligonucleotide
  Target: LAMA2; (-) strand; PAM type: YTN; PAM sequence: CTA
actgtgtcattttgaggaag

SEQ ID NO: 221221 - DNA, 20 bp, Artificial Sequence
  Description of Artificial Sequence: Synthetic oligonucleotide
  Target: LAMA2; (-) strand; PAM type: YTN; PAM sequence: TTC
taactgtgtcattttgagga

SEQ ID NO: 221222 - DNA, 20 bp, Artificial Sequence
  Description of Artificial Sequence: Synthetic oligonucleotide
  Target: LAMA2; (-) strand; PAM type: YTN; PAM sequence: TTT
ctaactgtgtcattttgagg

SEQ ID NO: 221223 - DNA, 20 bp, Artificial Sequence
  Description of Artificial Sequence: Synthetic oligonucleotide
  Target: LAMA2; (-) strand; PAM type: YTN; PAM sequence: TTT
tctaactgtgtcattttgag

SEQ ID NO: 221224 - DNA, 20 bp, Artificial Sequence
  Description of Artificial Sequence: Synthetic oligonucleotide
  Target: LAMA2; (-) strand; PAM type: YTN; PAM sequence: TTG
ttttctaactgtgtcatttt

SEQ ID NO: 221225 - DNA, 20 bp, Artificial Sequence
  Description of Artificial Sequence: Synthetic oligonucleotide
  Target: LAMA2; (-) strand; PAM type: YTN; PAM sequence: CTA
ttgttttctaactgtgtcat

SEQ ID NO: 221226 - DNA, 20 bp, Artificial Sequence
  Description of Artificial Sequence: Synthetic oligonucleotide
  Target: LAMA2; (-) strand; PAM type: YTN; PAM sequence: CTC
tattgttttctaactgtgtc

SEQ ID NO: 221227 - DNA, 20 bp, Artificial Sequence
  Description of Artificial Sequence: Synthetic oligonucleotide
  Target: LAMA2; (-) strand; PAM type: YTN; PAM sequence: TTG
tgctctattgttttctaact

SEQ ID NO: 221228 - DNA, 20 bp, Artificial Sequence
  Description of Artificial Sequence: Synthetic oligonucleotide
  Target: LAMA2; (-) strand; PAM type: YTN; PAM sequence: CTT
gtgctctattgttttctaac

SEQ ID NO: 221229 - DNA, 20 bp, Artificial Sequence
  Description of Artificial Sequence: Synthetic oligonucleotide
  Target: LAMA2; (-) strand; PAM type: YTN; PAM sequence: TTC
atcttgtgctctattgtttt

SEQ ID NO: 221230 - DNA, 20 bp, Artificial Sequence
  Description of Artificial Sequence: Synthetic oligonucleotide
  Target: LAMA2; (-) strand; PAM type: YTN; PAM sequence: CTG
gattcatcttgtgctctatt

SEQ ID NO: 221231 - DNA, 20 bp, Artificial Sequence
  Description of Artificial Sequence: Synthetic oligonucleotide
  Target: LAMA2; (-) strand; PAM type: YTN; PAM sequence: TTG
acatcagaaagaactggatt

SEQ ID NO: 221232 - DNA, 20 bp, Artificial Sequence
  Description of Artificial Sequence: Synthetic oligonucleotide
  Target: LAMA2; (-) strand; PAM type: YTN; PAM sequence: TTT
gacatcagaaagaactggat

SEQ ID NO: 221233 - DNA, 20 bp, Artificial Sequence
  Description of Artificial Sequence: Synthetic oligonucleotide
  Target: LAMA2; (-) strand; PAM type: YTN; PAM sequence: CTT
tgacatcagaaagaactgga

SEQ ID NO: 221234 - DNA, 20 bp, Artificial Sequence
  Description of Artificial Sequence: Synthetic oligonucleotide
  Target: LAMA2; (-) strand; PAM type: YTN; PAM sequence: CTG
gagtatacacggcaggcttt

SEQ ID NO: 221235 - DNA, 20 bp, Artificial Sequence
  Description of Artificial Sequence: Synthetic oligonucleotide
  Target: LAMA2; (-) strand; PAM type: YTN; PAM sequence: TTC
aggtcatctggagtatacac

SEQ ID NO: 221236 - DNA, 20 bp, Artificial Sequence
  Description of Artificial Sequence: Synthetic oligonucleotide
  Target: LAMA2; (-) strand; PAM type: YTN; PAM sequence: CTA
aggttcaggtcatctggagt

SEQ ID NO: 221237 - DNA, 20 bp, Artificial Sequence
  Description of Artificial Sequence: Synthetic oligonucleotide
  Target: LAMA2; (-) strand; PAM type: YTN; PAM sequence: CTC
taaggttcaggtcatctgga

SEQ ID NO: 221238 - DNA, 20 bp, Artificial Sequence
  Description of Artificial Sequence: Synthetic oligonucleotide
  Target: LAMA2; (-) strand; PAM type: YTN; PAM sequence: TTA
ctctaaggttcaggtcatct

SEQ ID NO: 221239 - DNA, 20 bp, Artificial Sequence
  Description of Artificial Sequence: Synthetic oligonucleotide
  Target: LAMA2; (-) strand; PAM type: YTN; PAM sequence: TTA
gttactctaaggttcaggtc

SEQ ID NO: 221240 - DNA, 20 bp, Artificial Sequence
  Description of Artificial Sequence: Synthetic oligonucleotide
  Target: LAMA2; (-) strand; PAM type: YTN; PAM sequence: TTT
agttactctaaggttcaggt

SEQ ID NO: 221241 - DNA, 20 bp, Artificial Sequence
  Description of Artificial Sequence: Synthetic oligonucleotide
  Target: LAMA2; (-) strand; PAM type: YTN; PAM sequence: TTT
tagttactctaaggttcagg

SEQ ID NO: 221242 - DNA, 20 bp, Artificial Sequence
  Description of Artificial Sequence: Synthetic oligonucleotide
  Target: LAMA2; (-) strand; PAM type: YTN; PAM sequence: CTT
ttagttactctaaggttcag

SEQ ID NO: 221243 - DNA, 20 bp, Artificial Sequence
  Description of Artificial Sequence: Synthetic oligonucleotide
  Target: LAMA2; (-) strand; PAM type: YTN; PAM sequence: CTG
atgcttttagttactctaag

SEQ ID NO: 221244 - DNA, 20 bp, Artificial Sequence
  Description of Artificial Sequence: Synthetic oligonucleotide
  Target: LAMA2; (-) strand; PAM type: YTN; PAM sequence: TTA
tatatcagagaagccctgat

SEQ ID NO: 221245 - DNA, 20 bp, Artificial Sequence
  Description of Artificial Sequence: Synthetic oligonucleotide
  Target: LAMA2; (-) strand; PAM type: YTN; PAM sequence: CTC
acaattatatatcagagaag

SEQ ID NO: 221246 - DNA, 20 bp, Artificial Sequence
  Description of Artificial Sequence: Synthetic oligonucleotide
  Target: LAMA2; (-) strand; PAM type: YTN; PAM sequence: TTC
tcacaattatatatcagaga

SEQ ID NO: 221247 - DNA, 20 bp, Artificial Sequence
  Description of Artificial Sequence: Synthetic oligonucleotide
  Target: LAMA2; (-) strand; PAM type: YTN; PAM sequence: TTA
gtgagattctcacaattata

SEQ ID NO: 221248 - DNA, 20 bp, Artificial Sequence
  Description of Artificial Sequence: Synthetic oligonucleotide
  Target: LAMA2; (-) strand; PAM type: YTN; PAM sequence: TTT
agtgagattctcacaattat

SEQ ID NO: 221249 - DNA, 20 bp, Artificial Sequence
  Description of Artificial Sequence: Synthetic oligonucleotide
  Target: LAMA2; (-) strand; PAM type: YTN; PAM sequence: TTT
tagtgagattctcacaatta

SEQ ID NO: 221250 - DNA, 20 bp, Artificial Sequence
  Description of Artificial Sequence: Synthetic oligonucleotide
  Target: LAMA2; (-) strand; PAM type: YTN; PAM sequence: TTT
ttagtgagattctcacaatt

SEQ ID NO: 221251 - DNA, 20 bp, Artificial Sequence
  Description of Artificial Sequence: Synthetic oligonucleotide
  Target: LAMA2; (-) strand; PAM type: YTN; PAM sequence: TTG
tttttagtgagattctcaca

SEQ ID NO: 221252 - DNA, 20 bp, Artificial Sequence
  Description of Artificial Sequence: Synthetic oligonucleotide
  Target: LAMA2; (-) strand; PAM type: YTN; PAM sequence: CTT
gtttttagtgagattctcac

SEQ ID NO: 221253 - DNA, 20 bp, Artificial Sequence
  Description of Artificial Sequence: Synthetic oligonucleotide
  Target: LAMA2; (-) strand; PAM type: YTN; PAM sequence: TTA
atcttgtttttagtgagatt

SEQ ID NO: 221254 - DNA, 20 bp, Artificial Sequence
  Description of Artificial Sequence: Synthetic oligonucleotide
  Target: LAMA2; (-) strand; PAM type: YTN; PAM sequence: TTT
aatcttgtttttagtgagat

SEQ ID NO: 221255 - DNA, 20 bp, Artificial Sequence
  Description of Artificial Sequence: Synthetic oligonucleotide
  Target: LAMA2; (-) strand; PAM type: YTN; PAM sequence: CTG
tagtaatttaatcttgtttt

SEQ ID NO: 221256 - DNA, 20 bp, Artificial Sequence
  Description of Artificial Sequence: Synthetic oligonucleotide
  Target: LAMA2; (-) strand; PAM type: YTN; PAM sequence: CTC
tgtagtaatttaatcttgtt

SEQ ID NO: 221257 - DNA, 20 bp, Artificial Sequence
  Description of Artificial Sequence: Synthetic oligonucleotide
  Target: LAMA2; (-) strand; PAM type: YTN; PAM sequence: CTC
ctctgtagtaatttaatctt

SEQ ID NO: 221258 - DNA, 20 bp, Artificial Sequence
  Description of Artificial Sequence: Synthetic oligonucleotide
  Target: LAMA2; (-) strand; PAM type: YTN; PAM sequence: CTA
agactcctctgtagtaattt

SEQ ID NO: 221259 - DNA, 20 bp, Artificial Sequence
  Description of Artificial Sequence: Synthetic oligonucleotide
  Target: LAMA2; (-) strand; PAM type: YTN; PAM sequence: TTC
taagactcctctgtagtaat

SEQ ID NO: 221260 - DNA, 20 bp, Artificial Sequence
  Description of Artificial Sequence: Synthetic oligonucleotide
  Target: LAMA2; (-) strand; PAM type: YTN; PAM sequence: TTA
aattctaagactcctctgta

SEQ ID NO: 221261 - DNA, 20 bp, Artificial Sequence
  Description of Artificial Sequence: Synthetic oligonucleotide
  Target: LAMA2; (-) strand; PAM type: YTN; PAM sequence: TTT
aaattctaagactcctctgt

SEQ ID NO: 221262 - DNA, 20 bp, Artificial Sequence
  Description of Artificial Sequence: Synthetic oligonucleotide
  Target: LAMA2; (-) strand; PAM type: YTN; PAM sequence: TTT
taaattctaagactcctctg

SEQ ID NO: 221263 - DNA, 20 bp, Artificial Sequence
  Description of Artificial Sequence: Synthetic oligonucleotide
  Target: LAMA2; (-) strand; PAM type: YTN; PAM sequence: TTA
gagttttaaattctaagact

SEQ ID NO: 221264 - DNA, 20 bp, Artificial Sequence
  Description of Artificial Sequence: Synthetic oligonucleotide
  Target: LAMA2; (-) strand; PAM type: YTN; PAM sequence: TTT
agagttttaaattctaagac

SEQ ID NO: 221265 - DNA, 20 bp, Artificial Sequence
  Description of Artificial Sequence: Synthetic oligonucleotide
  Target: LAMA2; (-) strand; PAM type: YTN; PAM sequence: TTT
tagagttttaaattctaaga

SEQ ID NO: 221266 - DNA, 20 bp, Artificial Sequence
  Description of Artificial Sequence: Synthetic oligonucleotide
  Target: LAMA2; (-) strand; PAM type: YTN; PAM sequence: TTT
ttagagttttaaattctaag

SEQ ID NO: 221267 - DNA, 20 bp, Artificial Sequence
  Description of Artificial Sequence: Synthetic oligonucleotide
  Target: LAMA2; (-) strand; PAM type: YTN; PAM sequence: CTT
tttagagttttaaattctaa

SEQ ID NO: 221268 - DNA, 20 bp, Artificial Sequence
  Description of Artificial Sequence: Synthetic oligonucleotide
  Target: LAMA2; (-) strand; PAM type: YTN; PAM sequence: TTC
actttttagagttttaaatt

SEQ ID NO: 221269 - DNA, 20 bp, Artificial Sequence
  Description of Artificial Sequence: Synthetic oligonucleotide
  Target: LAMA2; (-) strand; PAM type: YTN; PAM sequence: TTT
cactttttagagttttaaat

SEQ ID NO: 221270 - DNA, 20 bp, Artificial Sequence
  Description of Artificial Sequence: Synthetic oligonucleotide
  Target: LAMA2; (-) strand; PAM type: YTN; PAM sequence: CTA
agtttcactttttagagttt

SEQ ID NO: 221271 - DNA, 20 bp, Artificial Sequence
  Description of Artificial Sequence: Synthetic oligonucleotide
  Target: LAMA2; (-) strand; PAM type: YTN; PAM sequence: TTG
gtaaatcctaagtttcactt

SEQ ID NO: 221272 - DNA, 20 bp, Artificial Sequence
  Description of Artificial Sequence: Synthetic oligonucleotide
  Target: LAMA2; (-) strand; PAM type: YTN; PAM sequence: TTT
ggtaaatcctaagtttcact

SEQ ID NO: 221273 - DNA, 20 bp, Artificial Sequence
  Description of Artificial Sequence: Synthetic oligonucleotide
  Target: LAMA2; (-) strand; PAM type: YTN; PAM sequence: TTT
tggtaaatcctaagtttcac

SEQ ID NO: 221274 - DNA, 20 bp, Artificial Sequence
  Description of Artificial Sequence: Synthetic oligonucleotide
  Target: LAMA2; (-) strand; PAM type: YTN; PAM sequence: TTT
ttggtaaatcctaagtttca

SEQ ID NO: 221275 - DNA, 20 bp, Artificial Sequence
  Description of Artificial Sequence: Synthetic oligonucleotide
  Target: LAMA2; (-) strand; PAM type: YTN; PAM sequence: TTA
gaaacatttttggtaaatcc

SEQ ID NO: 221276 - DNA, 20 bp, Artificial Sequence
  Description of Artificial Sequence: Synthetic oligonucleotide
  Target: LAMA2; (-) strand; PAM type: YTN; PAM sequence: TTA
catccatacatgtatatgag

SEQ ID NO: 221277 - DNA, 20 bp, Artificial Sequence
  Description of Artificial Sequence: Synthetic oligonucleotide
  Target: LAMA2; (-) strand; PAM type: YTN; PAM sequence: TTC
aggttacatccatacatgta

SEQ ID NO: 221278 - DNA, 20 bp, Artificial Sequence
  Description of Artificial Sequence: Synthetic oligonucleotide
  Target: LAMA2; (-) strand; PAM type: YTN; PAM sequence: TTT
caggttacatccatacatgt

SEQ ID NO: 221279 - DNA, 20 bp, Artificial Sequence
  Description of Artificial Sequence: Synthetic oligonucleotide
  Target: LAMA2; (-) strand; PAM type: YTN; PAM sequence: TTC
aataatcaacccagcatttc

SEQ ID NO: 221280 - DNA, 20 bp, Artificial Sequence
  Description of Artificial Sequence: Synthetic oligonucleotide
  Target: LAMA2; (-) strand; PAM type: YTN; PAM sequence: TTT
caataatcaacccagcattt

SEQ ID NO: 221281 - DNA, 20 bp, Artificial Sequence
  Description of Artificial Sequence: Synthetic oligonucleotide
  Target: LAMA2; (-) strand; PAM type: YTN; PAM sequence: TTC
atatggacatttcaataatc

SEQ ID NO: 221282 - DNA, 20 bp, Artificial Sequence
  Description of Artificial Sequence: Synthetic oligonucleotide
  Target: LAMA2; (-) strand; PAM type: YTN; PAM sequence: TTG
taagttcatatggacatttc

SEQ ID NO: 221283 - DNA, 20 bp, Artificial Sequence
  Description of Artificial Sequence: Synthetic oligonucleotide
  Target: LAMA2; (-) strand; PAM type: YTN; PAM sequence: TTT
gtaagttcatatggacattt

SEQ ID NO: 221284 - DNA, 20 bp, Artificial Sequence
  Description of Artificial Sequence: Synthetic oligonucleotide
  Target: LAMA2; (-) strand; PAM type: YTN; PAM sequence: CTG
gtaaatttgtaagttcatat

SEQ ID NO: 221285 - DNA, 20 bp, Artificial Sequence
  Description of Artificial Sequence: Synthetic oligonucleotide
  Target: LAMA2; (-) strand; PAM type: YTN; PAM sequence: TTC
tggtaaatttgtaagttcat

SEQ ID NO: 221286 - DNA, 20 bp, Artificial Sequence
  Description of Artificial Sequence: Synthetic oligonucleotide
  Target: LAMA2; (-) strand; PAM type: YTN; PAM sequence: TTT
ctggtaaatttgtaagttca

SEQ ID NO: 221287 - DNA, 20 bp, Artificial Sequence
  Description of Artificial Sequence: Synthetic oligonucleotide
  Target: LAMA2; (-) strand; PAM type: YTN; PAM sequence: TTT
tctggtaaatttgtaagttc

SEQ ID NO: 221288 - DNA, 20 bp, Artificial Sequence
  Description of Artificial Sequence: Synthetic oligonucleotide
  Target: LAMA2; (-) strand; PAM type: YTN; PAM sequence: TTT
ttctggtaaatttgtaagtt

SEQ ID NO: 221289 - DNA, 20 bp, Artificial Sequence
  Description of Artificial Sequence: Synthetic oligonucleotide
  Target: LAMA2; (-) strand; PAM type: YTN; PAM sequence: TTT
tttctggtaaatttgtaagt

SEQ ID NO: 221290 - DNA, 20 bp, Artificial Sequence
  Description of Artificial Sequence: Synthetic oligonucleotide
  Target: LAMA2; (-) strand; PAM type: YTN; PAM sequence: TTT
ttttctggtaaatttgtaag

SEQ ID NO: 221291 - DNA, 20 bp, Artificial Sequence
  Description of Artificial Sequence: Synthetic oligonucleotide
  Target: LAMA2; (-) strand; PAM type: YTN; PAM sequence: TTG
atttttttctggtaaatttg

SEQ ID NO: 221292 - DNA, 20 bp, Artificial Sequence
  Description of Artificial Sequence: Synthetic oligonucleotide
  Target: LAMA2; (-) strand; PAM type: YTN; PAM sequence: TTT
gatttttttctggtaaattt

SEQ ID NO: 221293 - DNA, 20 bp, Artificial Sequence
  Description of Artificial Sequence: Synthetic oligonucleotide
  Target: LAMA2; (-) strand; PAM type: YTN; PAM sequence: TTG
atggggtagtttgatttttt

SEQ ID NO: 221294 - DNA, 20 bp, Artificial Sequence
  Description of Artificial Sequence: Synthetic oligonucleotide
  Target: LAMA2; (-) strand; PAM type: YTN; PAM sequence: TTT
gatggggtagtttgattttt

SEQ ID NO: 221295 - DNA, 20 bp, Artificial Sequence
  Description of Artificial Sequence: Synthetic oligonucleotide
  Target: LAMA2; (-) strand; PAM type: YTN; PAM sequence: TTT
tgatggggtagtttgatttt

SEQ ID NO: 221296 - DNA, 20 bp, Artificial Sequence
  Description of Artificial Sequence: Synthetic oligonucleotide
  Target: LAMA2; (-) strand; PAM type: YTN; PAM sequence: TTT
ttgatggggtagtttgattt

SEQ ID NO: 221297 - DNA, 20 bp, Artificial Sequence
  Description of Artificial Sequence: Synthetic oligonucleotide
  Target: LAMA2; (-) strand; PAM type: YTN; PAM sequence: CTT
tttgatggggtagtttgatt

SEQ ID NO: 221298 - DNA, 20 bp, Artificial Sequence
  Description of Artificial Sequence: Synthetic oligonucleotide
  Target: LAMA2; (-) strand; PAM type: YTN; PAM sequence: TTG
cccactttttgatggggtag

SEQ ID NO: 221299 - DNA, 20 bp, Artificial Sequence
  Description of Artificial Sequence: Synthetic oligonucleotide
  Target: LAMA2; (-) strand; PAM type: YTN; PAM sequence: TTT
gcccactttttgatggggta

SEQ ID NO: 221300 - DNA, 20 bp, Artificial Sequence
  Description of Artificial Sequence: Synthetic oligonucleotide
  Target: LAMA2; (-) strand; PAM type: YTN; PAM sequence: CTT
tgcccactttttgatggggt

SEQ ID NO: 221301 - DNA, 20 bp, Artificial Sequence
  Description of Artificial Sequence: Synthetic oligonucleotide
  Target: LAMA2; (-) strand; PAM type: YTN; PAM sequence: TTC
atatcctttgcccacttttt

SEQ ID NO: 221302 - DNA, 20 bp, Artificial Sequence
  Description of Artificial Sequence: Synthetic oligonucleotide
  Target: LAMA2; (-) strand; PAM type: YTN; PAM sequence: CTT
catatcctttgcccactttt

SEQ ID NO: 221303 - DNA, 20 bp, Artificial Sequence
  Description of Artificial Sequence: Synthetic oligonucleotide
  Target: LAMA2; (-) strand; PAM type: YTN; PAM sequence: CTC
ttcatatcctttgcccactt

SEQ ID NO: 221304 - DNA, 20 bp, Artificial Sequence
  Description of Artificial Sequence: Synthetic oligonucleotide
  Target: LAMA2; (-) strand; PAM type: YTN; PAM sequence: TTG
agaagtgtctcttcatatcc

SEQ ID NO: 221305 - DNA, 20 bp, Artificial Sequence
  Description of Artificial Sequence: Synthetic oligonucleotide
  Target: LAMA2; (-) strand; PAM type: YTN; PAM sequence: TTT
gagaagtgtctcttcatatc

SEQ ID NO: 221306 - DNA, 20 bp, Artificial Sequence
  Description of Artificial Sequence: Synthetic oligonucleotide
  Target: LAMA2; (-) strand; PAM type: YTN; PAM sequence: TTT
tgagaagtgtctcttcatat

SEQ ID NO: 221307 - DNA, 20 bp, Artificial Sequence
  Description of Artificial Sequence: Synthetic oligonucleotide
  Target: LAMA2; (-) strand; PAM type: YTN; PAM sequence: CTT
ttgagaagtgtctcttcata

SEQ ID NO: 221308 - DNA, 20 bp, Artificial Sequence
  Description of Artificial Sequence: Synthetic oligonucleotide
  Target: LAMA2; (-) strand; PAM type: YTN; PAM sequence: TTC
ttttgagaagtgtctcttca

SEQ ID NO: 221309 - DNA, 20 bp, Artificial Sequence
  Description of Artificial Sequence: Synthetic oligonucleotide
  Target: LAMA2; (-) strand; PAM type: YTN; PAM sequence: CTT
cttttgagaagtgtctcttc

SEQ ID NO: 221310 - DNA, 20 bp, Artificial Sequence
  Description of Artificial Sequence: Synthetic oligonucleotide
  Target: LAMA2; (-) strand; PAM type: YTN; PAM sequence: CTG
cataaatgtcttcttttgag

SEQ ID NO: 221311 - DNA, 20 bp, Artificial Sequence
  Description of Artificial Sequence: Synthetic oligonucleotide
  Target: LAMA2; (-) strand; PAM type: YTN; PAM sequence: TTG
gctgcataaatgtcttcttt

SEQ ID NO: 221312 - DNA, 20 bp, Artificial Sequence
  Description of Artificial Sequence: Synthetic oligonucleotide
  Target: LAMA2; (-) strand; PAM type: YTN; PAM sequence: CTG
ttggctgcataaatgtcttc

SEQ ID NO: 221313 - DNA, 20 bp, Artificial Sequence
  Description of Artificial Sequence: Synthetic oligonucleotide
  Target: LAMA2; (-) strand; PAM type: YTN; PAM sequence: TTC
atgtgtctgttggctgcata

SEQ ID NO: 221314 - DNA, 20 bp, Artificial Sequence
  Description of Artificial Sequence: Synthetic oligonucleotide
  Target: LAMA2; (-) strand; PAM type: YTN; PAM sequence: TTT
catgtgtctgttggctgcat

SEQ ID NO: 221315 - DNA, 20 bp, Artificial Sequence
  Description of Artificial Sequence: Synthetic oligonucleotide
  Target: LAMA2; (-) strand; PAM type: YTN; PAM sequence: TTT
tcatgtgtctgttggctgca

SEQ ID NO: 221316 - DNA, 20 bp, Artificial Sequence
  Description of Artificial Sequence: Synthetic oligonucleotide
  Target: LAMA2; (-) strand; PAM type: YTN; PAM sequence: TTT
ttcatgtgtctgttggctgc

SEQ ID NO: 221317 - DNA, 20 bp, Artificial Sequence
  Description of Artificial Sequence: Synthetic oligonucleotide
  Target: LAMA2; (-) strand; PAM type: YTN; PAM sequence: TTT
tttcatgtgtctgttggctg

SEQ ID NO: 221318 - DNA, 20 bp, Artificial Sequence
  Description of Artificial Sequence: Synthetic oligonucleotide
  Target: LAMA2; (-) strand; PAM type: YTN; PAM sequence: CTG
aaggccagtgatgacgagca

SEQ ID NO: 221319 - DNA, 20 bp, Artificial Sequence
  Description of Artificial Sequence: Synthetic oligonucleotide
  Target: LAMA2; (-) strand; PAM type: YTN; PAM sequence: CTC
tgaaggccagtgatgacgag

SEQ ID NO: 221320 - DNA, 20 bp, Artificial Sequence
  Description of Artificial Sequence: Synthetic oligonucleotide
  Target: LAMA2; (-) strand; PAM type: YTN; PAM sequence: TTC
tctgaaggccagtgatgacg

SEQ ID NO: 221321 - DNA, 20 bp, Artificial Sequence
  Description of Artificial Sequence: Synthetic oligonucleotide
  Target: LAMA2; (-) strand; PAM type: YTN; PAM sequence: TTT
ctctgaaggccagtgatgac

SEQ ID NO: 221322 - DNA, 20 bp, Artificial Sequence
  Description of Artificial Sequence: Synthetic oligonucleotide
  Target: LAMA2; (-) strand; PAM type: YTN; PAM sequence: TTG
catttctctgaaggccagtg

SEQ ID NO: 221323 - DNA, 20 bp, Artificial Sequence
  Description of Artificial Sequence: Synthetic oligonucleotide
  Target: LAMA2; (-) strand; PAM type: YTN; PAM sequence: TTT
gcatttctctgaaggccagt

SEQ ID NO: 221324 - DNA, 20 bp, Artificial Sequence
  Description of Artificial Sequence: Synthetic oligonucleotide
  Target: LAMA2; (-) strand; PAM type: YTN; PAM sequence: TTG
atttgcatttctctgaaggc

SEQ ID NO: 221325 - DNA, 20 bp, Artificial Sequence
  Description of Artificial Sequence: Synthetic oligonucleotide
  Target: LAMA2; (-) strand; PAM type: YTN; PAM sequence: TTT
gatttgcatttctctgaagg

SEQ ID NO: 221326 - DNA, 20 bp, Artificial Sequence
  Description of Artificial Sequence: Synthetic oligonucleotide
  Target: LAMA2; (-) strand; PAM type: YTN; PAM sequence: TTT
tgatttgcatttctctgaag

SEQ ID NO: 221327 - DNA, 20 bp, Artificial Sequence
  Description of Artificial Sequence: Synthetic oligonucleotide
  Target: LAMA2; (-) strand; PAM type: YTN; PAM sequence: TTG
tggttttgatttgcatttct

SEQ ID NO: 221328 - DNA, 20 bp, Artificial Sequence
  Description of Artificial Sequence: Synthetic oligonucleotide
  Target: LAMA2; (-) strand; PAM type: YTN; PAM sequence: TTT
gtggttttgatttgcatttc

SEQ ID NO: 221329 - DNA, 20 bp, Artificial Sequence
  Description of Artificial Sequence: Synthetic oligonucleotide
  Target: LAMA2; (-) strand; PAM type: YTN; PAM sequence: CTT
tgtggttttgatttgcattt

SEQ ID NO: 221330 - DNA, 20 bp, Artificial Sequence
  Description of Artificial Sequence: Synthetic oligonucleotide
  Target: LAMA2; (-) strand; PAM type: YTN; PAM sequence: CTC
tttgtggttttgatttgcat

SEQ ID NO: 221331 - DNA, 20 bp, Artificial Sequence
  Description of Artificial Sequence: Synthetic oligonucleotide
  Target: LAMA2; (-) strand; PAM type: YTN; PAM sequence: CTG
gtgtgggatggtatctcttt

SEQ ID NO: 221332 - DNA, 20 bp, Artificial Sequence
  Description of Artificial Sequence: Synthetic oligonucleotide
  Target: LAMA2; (-) strand; PAM type: YTN; PAM sequence: CTA
actggtgtgggatggtatct

SEQ ID NO: 221333 - DNA, 20 bp, Artificial Sequence
  Description of Artificial Sequence: Synthetic oligonucleotide
  Target: LAMA2; (-) strand; PAM type: YTN; PAM sequence: TTC
taactggtgtgggatggtat

SEQ ID NO: 221334 - DNA, 20 bp, Artificial Sequence
  Description of Artificial Sequence: Synthetic oligonucleotide
  Target: LAMA2; (-) strand; PAM type: YTN; PAM sequence: TTA
atgatcgccattctaactgg

SEQ ID NO: 221335 - DNA, 20 bp, Artificial Sequence
  Description of Artificial Sequence: Synthetic oligonucleotide
  Target: LAMA2; (-) strand; PAM type: YTN; PAM sequence: TTT
aatgatcgccattctaactg

SEQ ID NO: 221336 - DNA, 20 bp, Artificial Sequence
  Description of Artificial Sequence: Synthetic oligonucleotide
  Target: LAMA2; (-) strand; PAM type: YTN; PAM sequence: TTT
taatgatcgccattctaact

SEQ ID NO: 221337 - DNA, 20 bp, Artificial Sequence
  Description of Artificial Sequence: Synthetic oligonucleotide
  Target: LAMA2; (-) strand; PAM type: YTN; PAM sequence: TTT
ttaatgatcgccattctaac

SEQ ID NO: 221338 - DNA, 20 bp, Artificial Sequence
  Description of Artificial Sequence: Synthetic oligonucleotide
  Target: LAMA2; (-) strand; PAM type: YTN; PAM sequence: CTT
tttaatgatcgccattctaa

SEQ ID NO: 221339 - DNA, 20 bp, Artificial Sequence
  Description of Artificial Sequence: Synthetic oligonucleotide
  Target: LAMA2; (-) strand; PAM type: YTN; PAM sequence: CTG
actttttaatgatcgccatt

SEQ ID NO: 221340 - DNA, 20 bp, Artificial Sequence
  Description of Artificial Sequence: Synthetic oligonucleotide
  Target: LAMA2; (-) strand; PAM type: YTN; PAM sequence: TTC
ctgactttttaatgatcgcc

SEQ ID NO: 221341 - DNA, 20 bp, Artificial Sequence
  Description of Artificial Sequence: Synthetic oligonucleotide
  Target: LAMA2; (-) strand; PAM type: YTN; PAM sequence: TTT
cctgactttttaatgatcgc

SEQ ID NO: 221342 - DNA, 20 bp, Artificial Sequence
  Description of Artificial Sequence: Synthetic oligonucleotide
  Target: LAMA2; (-) strand; PAM type: YTN; PAM sequence: TTG
tttcctgactttttaatgat

SEQ ID NO: 221343 - DNA, 20 bp, Artificial Sequence
  Description of Artificial Sequence: Synthetic oligonucleotide
  Target: LAMA2; (-) strand; PAM type: YTN; PAM sequence: CTG
ttgtttcctgactttttaat

SEQ ID NO: 221344 - DNA, 20 bp, Artificial Sequence
  Description of Artificial Sequence: Synthetic oligonucleotide
  Target: LAMA2; (-) strand; PAM type: YTN; PAM sequence: CTC
cagcacctgttgtttcctga

SEQ ID NO: 221345 - DNA, 20 bp, Artificial Sequence
  Description of Artificial Sequence: Synthetic oligonucleotide
  Target: LAMA2; (-) strand; PAM type: YTN; PAM sequence: CTC
tccagcacctgttgtttcct

SEQ ID NO: 221346 - DNA, 20 bp, Artificial Sequence
  Description of Artificial Sequence: Synthetic oligonucleotide
  Target: LAMA2; (-) strand; PAM type: YTN; PAM sequence: CTC
cacatcctctccagcacctg

SEQ ID NO: 221347 - DNA, 20 bp, Artificial Sequence
  Description of Artificial Sequence: Synthetic oligonucleotide
  Target: LAMA2; (-) strand; PAM type: YTN; PAM sequence: TTC
tccacatcctctccagcacc

SEQ ID NO: 221348 - DNA, 20 bp, Artificial Sequence
  Description of Artificial Sequence: Synthetic oligonucleotide
  Target: LAMA2; (-) strand; PAM type: YTN; PAM sequence: TTT
ctccacatcctctccagcac

SEQ ID NO: 221349 - DNA, 20 bp, Artificial Sequence
  Description of Artificial Sequence: Synthetic oligonucleotide
  Target: LAMA2; (-) strand; PAM type: YTN; PAM sequence: CTA
tttctccacatcctctccag

SEQ ID NO: 221350 - DNA, 20 bp, Artificial Sequence
  Description of Artificial Sequence: Synthetic oligonucleotide
  Target: LAMA2; (-) strand; PAM type: YTN; PAM sequence: TTC
ctatttctccacatcctctc

SEQ ID NO: 221351 - DNA, 20 bp, Artificial Sequence
  Description of Artificial Sequence: Synthetic oligonucleotide
  Target: LAMA2; (-) strand; PAM type: YTN; PAM sequence: TTA
cagtcccgccaacggtgtaa

SEQ ID NO: 221352 - DNA, 20 bp, Artificial Sequence
  Description of Artificial Sequence: Synthetic oligonucleotide
  Target: LAMA2; (-) strand; PAM type: YTN; PAM sequence: TTT
acagtcccgccaacggtgta

SEQ ID NO: 221353 - DNA, 20 bp, Artificial Sequence
  Description of Artificial Sequence: Synthetic oligonucleotide
  Target: LAMA2; (-) strand; PAM type: YTN; PAM sequence: CTA
gtttacagtcccgccaacgg

SEQ ID NO: 221354 - DNA, 20 bp, Artificial Sequence
  Description of Artificial Sequence: Synthetic oligonucleotide
  Target: LAMA2; (-) strand; PAM type: YTN; PAM sequence: TTA
actagtttacagtcccgcca

SEQ ID NO: 221355 - DNA, 20 bp, Artificial Sequence
  Description of Artificial Sequence: Synthetic oligonucleotide
  Target: LAMA2; (-) strand; PAM type: YTN; PAM sequence: TTT
aactagtttacagtcccgcc

SEQ ID NO: 221356 - DNA, 20 bp, Artificial Sequence
  Description of Artificial Sequence: Synthetic oligonucleotide
  Target: LAMA2; (-) strand; PAM type: YTN; PAM sequence: TTC
cacaatggtttaactagttt

SEQ ID NO: 221357 - DNA, 20 bp, Artificial Sequence
  Description of Artificial Sequence: Synthetic oligonucleotide
  Target: LAMA2; (-) strand; PAM type: YTN; PAM sequence: CTT
ccacaatggtttaactagtt

SEQ ID NO: 221358 - DNA, 20 bp, Artificial Sequence
  Description of Artificial Sequence: Synthetic oligonucleotide
  Target: LAMA2; (-) strand; PAM type: YTN; PAM sequence: CTG
tcttccacaatggtttaact

SEQ ID NO: 221359 - DNA, 20 bp, Artificial Sequence
  Description of Artificial Sequence: Synthetic oligonucleotide
  Target: LAMA2; (-) strand; PAM type: YTN; PAM sequence: TTG
aggaatcgccacactgtctt

SEQ ID NO: 221360 - DNA, 20 bp, Artificial Sequence
  Description of Artificial Sequence: Synthetic oligonucleotide
  Target: LAMA2; (-) strand; PAM type: YTN; PAM sequence: CTT
gaggaatcgccacactgtct

SEQ ID NO: 221361 - DNA, 20 bp, Artificial Sequence
  Description of Artificial Sequence: Synthetic oligonucleotide
  Target: LAMA2; (-) strand; PAM type: YTN; PAM sequence: CTA
gatccttgaggaatcgccac

SEQ ID NO: 221362 - DNA, 20 bp, Artificial Sequence
  Description of Artificial Sequence: Synthetic oligonucleotide
  Target: LAMA2; (-) strand; PAM type: YTN; PAM sequence: TTC
tagatccttgaggaatcgcc

SEQ ID NO: 221363 - DNA, 20 bp, Artificial Sequence
  Description of Artificial Sequence: Synthetic oligonucleotide
  Target: LAMA2; (-) strand; PAM type: YTN; PAM sequence: CTA
gttctagatccttgaggaat

SEQ ID NO: 221364 - DNA, 20 bp, Artificial Sequence
  Description of Artificial Sequence: Synthetic oligonucleotide
  Target: LAMA2; (-) strand; PAM type: YTN; PAM sequence: TTC
tagttctagatccttgagga

SEQ ID NO: 221365 - DNA, 20 bp, Artificial Sequence
  Description of Artificial Sequence: Synthetic oligonucleotide
  Target: LAMA2; (-) strand; PAM type: YTN; PAM sequence: TTT
ctagttctagatccttgagg

SEQ ID NO: 221366 - DNA, 20 bp, Artificial Sequence
  Description of Artificial Sequence: Synthetic oligonucleotide
  Target: LAMA2; (-) strand; PAM type: YTN; PAM sequence: CTG
ggtcaaatggtatttctagt

SEQ ID NO: 221367 - DNA, 20 bp, Artificial Sequence
  Description of Artificial Sequence: Synthetic oligonucleotide
  Target: LAMA2; (-) strand; PAM type: YTN; PAM sequence: TTG
ggtatatacccagtaatggg

SEQ ID NO: 221368 - DNA, 20 bp, Artificial Sequence
  Description of Artificial Sequence: Synthetic oligonucleotide
  Target: LAMA2; (-) strand; PAM type: YTN; PAM sequence: TTT
gggtatatacccagtaatgg

SEQ ID NO: 221369 - DNA, 20 bp, Artificial Sequence
  Description of Artificial Sequence: Synthetic oligonucleotide
  Target: LAMA2; (-) strand; PAM type: YTN; PAM sequence: CTT
tgggtatatacccagtaatg

SEQ ID NO: 221370 - DNA, 20 bp, Artificial Sequence
  Description of Artificial Sequence: Synthetic oligonucleotide
  Target: LAMA2; (-) strand; PAM type: YTN; PAM sequence: TTA
taatcctttgggtatatacc

SEQ ID NO: 221371 - DNA, 20 bp, Artificial Sequence
  Description of Artificial Sequence: Synthetic oligonucleotide
  Target: LAMA2; (-) strand; PAM type: YTN; PAM sequence: TTT
ataatcctttgggtatatac

SEQ ID NO: 221372 - DNA, 20 bp, Artificial Sequence
  Description of Artificial Sequence: Synthetic oligonucleotide
  Target: LAMA2; (-) strand; PAM type: YTN; PAM sequence: TTA
tagcagcatgatttataatc

SEQ ID NO: 221373 - DNA, 20 bp, Artificial Sequence
  Description of Artificial Sequence: Synthetic oligonucleotide
  Target: LAMA2; (-) strand; PAM type: YTN; PAM sequence: TTT
atagcagcatgatttataat

SEQ ID NO: 221374 - DNA, 20 bp, Artificial Sequence
  Description of Artificial Sequence: Synthetic oligonucleotide
  Target: LAMA2; (-) strand; PAM type: YTN; PAM sequence: CTT
tatagcagcatgatttataa

SEQ ID NO: 221375 - DNA, 20 bp, Artificial Sequence
  Description of Artificial Sequence: Synthetic oligonucleotide
  Target: LAMA2; (-) strand; PAM type: YTN; PAM sequence: TTG
tgaatagtgccacaataaac

SEQ ID NO: 221376 - DNA, 20 bp, Artificial Sequence
  Description of Artificial Sequence: Synthetic oligonucleotide
  Target: LAMA2; (-) strand; PAM type: YTN; PAM sequence: CTA
ttgtgaatagtgccacaata

SEQ ID NO: 221377 - DNA, 20 bp, Artificial Sequence
  Description of Artificial Sequence: Synthetic oligonucleotide
  Target: LAMA2; (-) strand; PAM type: YTN; PAM sequence: TTG
ctattgtgaatagtgccaca

SEQ ID NO: 221378 - DNA, 20 bp, Artificial Sequence
  Description of Artificial Sequence: Synthetic oligonucleotide
  Target: LAMA2; (-) strand; PAM type: YTN; PAM sequence: TTT
gctattgtgaatagtgccac

SEQ ID NO: 221379 - DNA, 20 bp, Artificial Sequence
  Description of Artificial Sequence: Synthetic oligonucleotide
  Target: LAMA2; (-) strand; PAM type: YTN; PAM sequence: CTT
tgctattgtgaatagtgcca

SEQ ID NO: 221380 - DNA, 20 bp, Artificial Sequence
  Description of Artificial Sequence: Synthetic oligonucleotide
  Target: LAMA2; (-) strand; PAM type: YTN; PAM sequence: TTC
caagtctttgctattgtgaa

SEQ ID NO: 221381 - DNA, 20 bp, Artificial Sequence
  Description of Artificial Sequence: Synthetic oligonucleotide
  Target: LAMA2; (-) strand; PAM type: YTN; PAM sequence: TTG
gttccaagtctttgctattg

SEQ ID NO: 221382 - DNA, 20 bp, Artificial Sequence
  Description of Artificial Sequence: Synthetic oligonucleotide
  Target: LAMA2; (-) strand; PAM type: YTN; PAM sequence: TTG
ggttggttccaagtctttgc

SEQ ID NO: 221383 - DNA, 20 bp, Artificial Sequence
  Description of Artificial Sequence: Synthetic oligonucleotide
  Target: LAMA2; (-) strand; PAM type: YTN; PAM sequence: TTT
gggttggttccaagtctttg

SEQ ID NO: 221384 - DNA, 20 bp, Artificial Sequence
  Description of Artificial Sequence: Synthetic oligonucleotide
  Target: LAMA2; (-) strand; PAM type: YTN; PAM sequence: TTG
atggacatttgggttggttc

SEQ ID NO: 221385 - DNA, 20 bp, Artificial Sequence
  Description of Artificial Sequence: Synthetic oligonucleotide
  Target: LAMA2; (-) strand; PAM type: YTN; PAM sequence: CTA
tcattgatggacatttgggt

SEQ ID NO: 221386 - DNA, 20 bp, Artificial Sequence
  Description of Artificial Sequence: Synthetic oligonucleotide
  Target: LAMA2; (-) strand; PAM type: YTN; PAM sequence: TTA
aaccagtctatcattgatgg

SEQ ID NO: 221387 - DNA, 20 bp, Artificial Sequence
  Description of Artificial Sequence: Synthetic oligonucleotide
  Target: LAMA2; (-) strand; PAM type: YTN; PAM sequence: CTT
aaaccagtctatcattgatg

SEQ ID NO: 221388 - DNA, 20 bp, Artificial Sequence
  Description of Artificial Sequence: Synthetic oligonucleotide
  Target: LAMA2; (-) strand; PAM type: YTN; PAM sequence: TTC
ttaaaccagtctatcattga

SEQ ID NO: 221389 - DNA, 20 bp, Artificial Sequence
  Description of Artificial Sequence: Synthetic oligonucleotide
  Target: LAMA2; (-) strand; PAM type: YTN; PAM sequence: TTT
cttaaaccagtctatcattg

SEQ ID NO: 221390 - DNA, 20 bp, Artificial Sequence
  Description of Artificial Sequence: Synthetic oligonucleotide
  Target: LAMA2; (-) strand; PAM type: YTN; PAM sequence: TTT
tcttaaaccagtctatcatt

SEQ ID NO: 221391 - DNA, 20 bp, Artificial Sequence
  Description of Artificial Sequence: Synthetic oligonucleotide
  Target: LAMA2; (-) strand; PAM type: YTN; PAM sequence: TTC
catggtatatatgtgccaca

SEQ ID NO: 221392 - DNA, 20 bp, Artificial Sequence
  Description of Artificial Sequence: Synthetic oligonucleotide
  Target: LAMA2; (-) strand; PAM type: YTN; PAM sequence: CTA
catagtattccatggtatat

SEQ ID NO: 221393 - DNA, 20 bp, Artificial Sequence
  Description of Artificial Sequence: Synthetic oligonucleotide
  Target: LAMA2; (-) strand; PAM type: YTN; PAM sequence: TTA
tggctacatagtattccatg

SEQ ID NO: 221394 - DNA, 20 bp, Artificial Sequence
  Description of Artificial Sequence: Synthetic oligonucleotide
  Target: LAMA2; (-) strand; PAM type: YTN; PAM sequence: TTT
atggctacatagtattccat

SEQ ID NO: 221395 - DNA, 20 bp, Artificial Sequence
  Description of Artificial Sequence: Synthetic oligonucleotide
  Target: LAMA2; (-) strand; PAM type: YTN; PAM sequence: TTT
tatggctacatagtattcca

SEQ ID NO: 221396 - DNA, 20 bp, Artificial Sequence
  Description of Artificial Sequence: Synthetic oligonucleotide
  Target: LAMA2; (-) strand; PAM type: YTN; PAM sequence: TTT
ttatggctacatagtattcc

SEQ ID NO: 221397 - DNA, 20 bp, Artificial Sequence
  Description of Artificial Sequence: Synthetic oligonucleotide
  Target: LAMA2; (-) strand; PAM type: YTN; PAM sequence: TTT
tttatggctacatagtattc

SEQ ID NO: 221398 - DNA, 20 bp, Artificial Sequence
  Description of Artificial Sequence: Synthetic oligonucleotide
  Target: LAMA2; (-) strand; PAM type: YTN; PAM sequence: TTC
attttttatggctacatagt

SEQ ID NO: 221399 - DNA, 20 bp, Artificial Sequence
  Description of Artificial Sequence: Synthetic oligonucleotide
  Target: LAMA2; (-) strand; PAM type: YTN; PAM sequence: CTT
cattttttatggctacatag

SEQ ID NO: 221400 - DNA, 20 bp, Artificial Sequence
  Description of Artificial Sequence: Synthetic oligonucleotide
  Target: LAMA2; (-) strand; PAM type: YTN; PAM sequence: CTC
ttcattttttatggctacat

SEQ ID NO: 221401 - DNA, 20 bp, Artificial Sequence
  Description of Artificial Sequence: Synthetic oligonucleotide
  Target: LAMA2; (-) strand; PAM type: YTN; PAM sequence: CTA
caaaggacatgaactcttca

SEQ ID NO: 221402 - DNA, 20 bp, Artificial Sequence
  Description of Artificial Sequence: Synthetic oligonucleotide
  Target: LAMA2; (-) strand; PAM type: YTN; PAM sequence: TTC
atccatatccctacaaagga

SEQ ID NO: 221403 - DNA, 20 bp, Artificial Sequence
  Description of Artificial Sequence: Synthetic oligonucleotide
  Target: LAMA2; (-) strand; PAM type: YTN; PAM sequence: CTT
catccatatccctacaaagg

SEQ ID NO: 221404 - DNA, 20 bp, Artificial Sequence
  Description of Artificial Sequence: Synthetic oligonucleotide
  Target: LAMA2; (-) strand; PAM type: YTN; PAM sequence: TTC
cagcttcatccatatcccta

SEQ ID NO: 221405 - DNA, 20 bp, Artificial Sequence
  Description of Artificial Sequence: Synthetic oligonucleotide
  Target: LAMA2; (-) strand; PAM type: YTN; PAM sequence: TTT
ccagcttcatccatatccct

SEQ ID NO: 221406 - DNA, 20 bp, Artificial Sequence
  Description of Artificial Sequence: Synthetic oligonucleotide
  Target: LAMA2; (-) strand; PAM type: YTN; PAM sequence: CTG
agaatgatggtttccagctt

SEQ ID NO: 221407 - DNA, 20 bp, Artificial Sequence
  Description of Artificial Sequence: Synthetic oligonucleotide
  Target: LAMA2; (-) strand; PAM type: YTN; PAM sequence: TTG
ctgagaatgatggtttccag

SEQ ID NO: 221408 - DNA, 20 bp, Artificial Sequence
  Description of Artificial Sequence: Synthetic oligonucleotide
  Target: LAMA2; (-) strand; PAM type: YTN; PAM sequence: TTT
gctgagaatgatggtttcca

SEQ ID NO: 221409 - DNA, 20 bp, Artificial Sequence
  Description of Artificial Sequence: Synthetic oligonucleotide
  Target: LAMA2; (-) strand; PAM type: YTN; PAM sequence: CTA
tagtttgctgagaatgatgg

SEQ ID NO: 221410 - DNA, 20 bp, Artificial Sequence
  Description of Artificial Sequence: Synthetic oligonucleotide
  Target: LAMA2; (-) strand; PAM type: YTN; PAM sequence: TTG
ctatagtttgctgagaatga

SEQ ID NO: 221411 - DNA, 20 bp, Artificial Sequence
  Description of Artificial Sequence: Synthetic oligonucleotide
  Target: LAMA2; (-) strand; PAM type: YTN; PAM sequence: CTT
gctatagtttgctgagaatg

SEQ ID NO: 221412 - DNA, 20 bp, Artificial Sequence
  Description of Artificial Sequence: Synthetic oligonucleotide
  Target: LAMA2; (-) strand; PAM type: YTN; PAM sequence: CTG
tccttgctatagtttgctga

SEQ ID NO: 221413 - DNA, 20 bp, Artificial Sequence
  Description of Artificial Sequence: Synthetic oligonucleotide
  Target: LAMA2; (-) strand; PAM type: YTN; PAM sequence: TTC
ctgtccttgctatagtttgc

SEQ ID NO: 221414 - DNA, 20 bp, Artificial Sequence
  Description of Artificial Sequence: Synthetic oligonucleotide
  Target: LAMA2; (-) strand; PAM type: YTN; PAM sequence: TTT
cctgtccttgctatagtttg

SEQ ID NO: 221415 - DNA, 20 bp, Artificial Sequence
  Description of Artificial Sequence: Synthetic oligonucleotide
  Target: LAMA2; (-) strand; PAM type: YTN; PAM sequence: TTG
gtttcctgtccttgctatag

SEQ ID NO: 221416 - DNA, 20 bp, Artificial Sequence
  Description of Artificial Sequence: Synthetic oligonucleotide
  Target: LAMA2; (-) strand; PAM type: YTN; PAM sequence: TTT
ggtttcctgtccttgctata

SEQ ID NO: 221417 - DNA, 20 bp, Artificial Sequence
  Description of Artificial Sequence: Synthetic oligonucleotide
  Target: LAMA2; (-) strand; PAM type: YTN; PAM sequence: CTA
tgagtgagaacatgcggtgt

SEQ ID NO: 221418 - DNA, 20 bp, Artificial Sequence
  Description of Artificial Sequence: Synthetic oligonucleotide
  Target: LAMA2; (-) strand; PAM type: YTN; PAM sequence: TTC
ccacctatgagtgagaacat

SEQ ID NO: 221419 - DNA, 20 bp, Artificial Sequence
  Description of Artificial Sequence: Synthetic oligonucleotide
  Target: LAMA2; (-) strand; PAM type: YTN; PAM sequence: TTT
cccacctatgagtgagaaca

SEQ ID NO: 221420 - DNA, 20 bp, Artificial Sequence
  Description of Artificial Sequence: Synthetic oligonucleotide
  Target: LAMA2; (-) strand; PAM type: YTN; PAM sequence: TTC
gtttcccacctatgagtgag

SEQ ID NO: 221421 - DNA, 20 bp, Artificial Sequence
  Description of Artificial Sequence: Synthetic oligonucleotide
  Target: LAMA2; (-) strand; PAM type: YTN; PAM sequence: TTG
ttcgtttcccacctatgagt

SEQ ID NO: 221422 - DNA, 20 bp, Artificial Sequence
  Description of Artificial Sequence: Synthetic oligonucleotide
  Target: LAMA2; (-) strand; PAM type: YTN; PAM sequence: CTC
attgttcgtttcccacctat

SEQ ID NO: 221423 - DNA, 20 bp, Artificial Sequence
  Description of Artificial Sequence: Synthetic oligonucleotide
  Target: LAMA2; (-) strand; PAM type: YTN; PAM sequence: TTC
tcattgttcgtttcccacct

SEQ ID NO: 221424 - DNA, 20 bp, Artificial Sequence
  Description of Artificial Sequence: Synthetic oligonucleotide
  Target: LAMA2; (-) strand; PAM type: YTN; PAM sequence: CTG
tgtccaagtgttctcattgt

SEQ ID NO: 221425 - DNA, 20 bp, Artificial Sequence
  Description of Artificial Sequence: Synthetic oligonucleotide
  Target: LAMA2; (-) strand; PAM type: YTN; PAM sequence: TTA
cccaccctgtgtccaagtgt

SEQ ID NO: 221426 - DNA, 20 bp, Artificial Sequence
  Description of Artificial Sequence: Synthetic oligonucleotide
  Target: LAMA2; (-) strand; PAM type: YTN; PAM sequence: CTC
accccaccccacaacaggcc

SEQ ID NO: 221427 - DNA, 20 bp, Artificial Sequence
  Description of Artificial Sequence: Synthetic oligonucleotide
  Target: LAMA2; (-) strand; PAM type: YTN; PAM sequence: CTC
ccccctcaccccaccccaca

SEQ ID NO: 221428 - DNA, 20 bp, Artificial Sequence
  Description of Artificial Sequence: Synthetic oligonucleotide
  Target: LAMA2; (-) strand; PAM type: YTN; PAM sequence: CTA
tccctcccccctcaccccac

SEQ ID NO: 221429 - DNA, 20 bp, Artificial Sequence
  Description of Artificial Sequence: Synthetic oligonucleotide
  Target: LAMA2; (-) strand; PAM type: YTN; PAM sequence: CTA
atgctatccctcccccctca

SEQ ID NO: 221430 - DNA, 20 bp, Artificial Sequence
  Description of Artificial Sequence: Synthetic oligonucleotide
  Target: LAMA2; (-) strand; PAM type: YTN; PAM sequence: CTC
ctaatgctatccctcccccc

SEQ ID NO: 221431 - DNA, 20 bp, Artificial Sequence
  Description of Artificial Sequence: Synthetic oligonucleotide
  Target: LAMA2; (-) strand; PAM type: YTN; PAM sequence: TTA
ggtgtatctcctaatgctat

SEQ ID NO: 221432 - DNA, 20 bp, Artificial Sequence
  Description of Artificial Sequence: Synthetic oligonucleotide
  Target: LAMA2; (-) strand; PAM type: YTN; PAM sequence: TTA
cattaggtgtatctcctaat

SEQ ID NO: 221433 - DNA, 20 bp, Artificial Sequence
  Description of Artificial Sequence: Synthetic oligonucleotide
  Target: LAMA2; (-) strand; PAM type: YTN; PAM sequence: TTT
acattaggtgtatctcctaa

SEQ ID NO: 221434 - DNA, 20 bp, Artificial Sequence
  Description of Artificial Sequence: Synthetic oligonucleotide
  Target: LAMA2; (-) strand; PAM type: YTN; PAM sequence: CTC
gtcatttacattaggtgtat

SEQ ID NO: 221435 - DNA, 20 bp, Artificial Sequence
  Description of Artificial Sequence: Synthetic oligonucleotide
  Target: LAMA2; (-) strand; PAM type: YTN; PAM sequence: TTA
actcgtcatttacattaggt

SEQ ID NO: 221436 - DNA, 20 bp, Artificial Sequence
  Description of Artificial Sequence: Synthetic oligonucleotide
  Target: LAMA2; (-) strand; PAM type: YTN; PAM sequence: CTG
catccattaactcgtcattt

SEQ ID NO: 221437 - DNA, 20 bp, Artificial Sequence
  Description of Artificial Sequence: Synthetic oligonucleotide
  Target: LAMA2; (-) strand; PAM type: YTN; PAM sequence: TTG
gtgtgctgcatccattaact

SEQ ID NO: 221438 - DNA, 20 bp, Artificial Sequence
  Description of Artificial Sequence: Synthetic oligonucleotide
  Target: LAMA2; (-) strand; PAM type: YTN; PAM sequence: TTA
catatgtatacatgtgccat

SEQ ID NO: 221439 - DNA, 20 bp, Artificial Sequence
  Description of Artificial Sequence: Synthetic oligonucleotide
  Target: LAMA2; (-) strand; PAM type: YTN; PAM sequence: TTG
ttacatatgtatacatgtgc

SEQ ID NO: 221440 - DNA, 20 bp, Artificial Sequence
  Description of Artificial Sequence: Synthetic oligonucleotide
  Target: LAMA2; (-) strand; PAM type: YTN; PAM sequence: TTT
gttacatatgtatacatgtg

SEQ ID NO: 221441 - DNA, 20 bp, Artificial Sequence
  Description of Artificial Sequence: Synthetic oligonucleotide
  Target: LAMA2; (-) strand; PAM type: YTN; PAM sequence: TTA
taggatacatgtgcacaatg

SEQ ID NO: 221442 - DNA, 20 bp, Artificial Sequence
  Description of Artificial Sequence: Synthetic oligonucleotide
  Target: LAMA2; (-) strand; PAM type: YTN; PAM sequence: TTA
agttataggatacatgtgca

SEQ ID NO: 221443 - DNA, 20 bp, Artificial Sequence
  Description of Artificial Sequence: Synthetic oligonucleotide
  Target: LAMA2; (-) strand; PAM type: YTN; PAM sequence: TTT
aagttataggatacatgtgc

SEQ ID NO: 221444 - DNA, 20 bp, Artificial Sequence
  Description of Artificial Sequence: Synthetic oligonucleotide
  Target: LAMA2; (-) strand; PAM type: YTN; PAM sequence: CTT
taagttataggatacatgtg

SEQ ID NO: 221445 - DNA, 20 bp, Artificial Sequence
  Description of Artificial Sequence: Synthetic oligonucleotide
  Target: LAMA2; (-) strand; PAM type: YTN; PAM sequence: TTA
tgctttaagttataggatac

SEQ ID NO: 221446 - DNA, 20 bp, Artificial Sequence
  Description of Artificial Sequence: Synthetic oligonucleotide
  Target: LAMA2; (-) strand; PAM type: YTN; PAM sequence: TTA
ttatgctttaagttatagga

SEQ ID NO: 221447 - DNA, 20 bp, Artificial Sequence
  Description of Artificial Sequence: Synthetic oligonucleotide
  Target: LAMA2; (-) strand; PAM type: YTN; PAM sequence: TTA
ttattatgctttaagttata

SEQ ID NO: 221448 - DNA, 20 bp, Artificial Sequence
  Description of Artificial Sequence: Synthetic oligonucleotide
  Target: LAMA2; (-) strand; PAM type: YTN; PAM sequence: TTT
attattatgctttaagttat

SEQ ID NO: 221449 - DNA, 20 bp, Artificial Sequence
  Description of Artificial Sequence: Synthetic oligonucleotide
  Target: LAMA2; (-) strand; PAM type: YTN; PAM sequence: TTT
tattattatgctttaagtta

SEQ ID NO: 221450 - DNA, 20 bp, Artificial Sequence
  Description of Artificial Sequence: Synthetic oligonucleotide
  Target: LAMA2; (-) strand; PAM type: YTN; PAM sequence: TTT
ttattattatgctttaagtt

SEQ ID NO: 221451 - DNA, 20 bp, Artificial Sequence
  Description of Artificial Sequence: Synthetic oligonucleotide
  Target: LAMA2; (-) strand; PAM type: YTN; PAM sequence: TTT
tttattattatgctttaagt

SEQ ID NO: 221452 - DNA, 20 bp, Artificial Sequence
  Description of Artificial Sequence: Synthetic oligonucleotide
  Target: LAMA2; (-) strand; PAM type: YTN; PAM sequence: TTT
ttttattattatgctttaag

SEQ ID NO: 221453 - DNA, 20 bp, Artificial Sequence
  Description of Artificial Sequence: Synthetic oligonucleotide
  Target: LAMA2; (-) strand; PAM type: YTN; PAM sequence: CTT
tttttattattatgctttaa

SEQ ID NO: 221454 - DNA, 20 bp, Artificial Sequence
  Description of Artificial Sequence: Synthetic oligonucleotide
  Target: LAMA2; (-) strand; PAM type: YTN; PAM sequence: TTC
tttttttattattatgcttt

SEQ ID NO: 221455 - DNA, 20 bp, Artificial Sequence
  Description of Artificial Sequence: Synthetic oligonucleotide
  Target: LAMA2; (-) strand; PAM type: YTN; PAM sequence: TTT
ctttttttattattatgctt

SEQ ID NO: 221456 - DNA, 20 bp, Artificial Sequence
  Description of Artificial Sequence: Synthetic oligonucleotide
  Target: LAMA2; (-) strand; PAM type: YTN; PAM sequence: TTA
agtttctttttttattatta

SEQ ID NO: 221457 - DNA, 20 bp, Artificial Sequence
  Description of Artificial Sequence: Synthetic oligonucleotide
  Target: LAMA2; (-) strand; PAM type: YTN; PAM sequence: TTT
aagtttctttttttattatt

SEQ ID NO: 221458 - DNA, 20 bp, Artificial Sequence
  Description of Artificial Sequence: Synthetic oligonucleotide
  Target: LAMA2; (-) strand; PAM type: YTN; PAM sequence: TTT
taagtttctttttttattat

SEQ ID NO: 221459 - DNA, 20 bp, Artificial Sequence
  Description of Artificial Sequence: Synthetic oligonucleotide
  Target: LAMA2; (-) strand; PAM type: YTN; PAM sequence: TTT
ttaagtttctttttttatta

SEQ ID NO: 221460 - DNA, 20 bp, Artificial Sequence
  Description of Artificial Sequence: Synthetic oligonucleotide
  Target: LAMA2; (-) strand; PAM type: YTN; PAM sequence: TTT
tttaagtttctttttttatt

SEQ ID NO: 221461 - DNA, 20 bp, Artificial Sequence
  Description of Artificial Sequence: Synthetic oligonucleotide
  Target: LAMA2; (-) strand; PAM type: YTN; PAM sequence: TTT
ttttaagtttctttttttat

SEQ ID NO: 221462 - DNA, 20 bp, Artificial Sequence
  Description of Artificial Sequence: Synthetic oligonucleotide
  Target: LAMA2; (-) strand; PAM type: YTN; PAM sequence: TTT
tttttaagtttcttttttta

SEQ ID NO: 221463 - DNA, 20 bp, Artificial Sequence
  Description of Artificial Sequence: Synthetic oligonucleotide
  Target: LAMA2; (-) strand; PAM type: YTN; PAM sequence: TTC
attttttttaagtttctttt

SEQ ID NO: 221464 - DNA, 20 bp, Artificial Sequence
  Description of Artificial Sequence: Synthetic oligonucleotide
  Target: LAMA2; (-) strand; PAM type: YTN; PAM sequence: TTT
cattttttttaagtttcttt

SEQ ID NO: 221465 - DNA, 20 bp, Artificial Sequence
  Description of Artificial Sequence: Synthetic oligonucleotide
  Target: LAMA2; (-) strand; PAM type: YTN; PAM sequence: TTG
gaaaaaatcaagaaaatata

SEQ ID NO: 221466 - DNA, 20 bp, Artificial Sequence
  Description of Artificial Sequence: Synthetic oligonucleotide
  Target: LAMA2; (-) strand; PAM type: YTN; PAM sequence: TTT
ggaaaaaatcaagaaaatat

SEQ ID NO: 221467 - DNA, 20 bp, Artificial Sequence
  Description of Artificial Sequence: Synthetic oligonucleotide
  Target: LAMA2; (-) strand; PAM type: YTN; PAM sequence: TTC
aaaacatttggaaaaaatca

SEQ ID NO: 221468 - DNA, 20 bp, Artificial Sequence
  Description of Artificial Sequence: Synthetic oligonucleotide
  Target: LAMA2; (-) strand; PAM type: YTN; PAM sequence: CTT
caaaacatttggaaaaaatc

SEQ ID NO: 221469 - DNA, 20 bp, Artificial Sequence
  Description of Artificial Sequence: Synthetic oligonucleotide
  Target: LAMA2; (-) strand; PAM type: YTN; PAM sequence: TTC
ttcaaaacatttggaaaaaa

SEQ ID NO: 221470 - DNA, 20 bp, Artificial Sequence
  Description of Artificial Sequence: Synthetic oligonucleotide
  Target: LAMA2; (-) strand; PAM type: YTN; PAM sequence: TTT
cttcaaaacatttggaaaaa

SEQ ID NO: 221471 - DNA, 20 bp, Artificial Sequence
  Description of Artificial Sequence: Synthetic oligonucleotide
  Target: LAMA2; (-) strand; PAM type: YTN; PAM sequence: CTT
tcttcaaaacatttggaaaa

SEQ ID NO: 221472 - DNA, 20 bp, Artificial Sequence
  Description of Artificial Sequence: Synthetic oligonucleotide
  Target: LAMA2; (-) strand; PAM type: YTN; PAM sequence: TTA
ataatacaaaaactttcttc

SEQ ID NO: 221473 - DNA, 20 bp, Artificial Sequence
  Description of Artificial Sequence: Synthetic oligonucleotide
  Target: LAMA2; (-) strand; PAM type: YTN; PAM sequence: TTT
aataatacaaaaactttctt

SEQ ID NO: 221474 - DNA, 20 bp, Artificial Sequence
  Description of Artificial Sequence: Synthetic oligonucleotide
  Target: LAMA2; (-) strand; PAM type: YTN; PAM sequence: TTG
accaatgaatagcatttaat

SEQ ID NO: 221475 - DNA, 20 bp, Artificial Sequence
  Description of Artificial Sequence: Synthetic oligonucleotide
  Target: LAMA2; (-) strand; PAM type: YTN; PAM sequence: TTA
aattgaccaatgaatagcat

SEQ ID NO: 221476 - DNA, 20 bp, Artificial Sequence
  Description of Artificial Sequence: Synthetic oligonucleotide
  Target: LAMA2; (-) strand; PAM type: YTN; PAM sequence: CTT
aaattgaccaatgaatagca

SEQ ID NO: 221477 - DNA, 20 bp, Artificial Sequence
  Description of Artificial Sequence: Synthetic oligonucleotide
  Target: LAMA2; (-) strand; PAM type: YTN; PAM sequence: TTA
cttaaattgaccaatgaata

SEQ ID NO: 221478 - DNA, 20 bp, Artificial Sequence
  Description of Artificial Sequence: Synthetic oligonucleotide
  Target: LAMA2; (-) strand; PAM type: YTN; PAM sequence: TTA
aaagaagattacttaaattg

SEQ ID NO: 221479 - DNA, 20 bp, Artificial Sequence
  Description of Artificial Sequence: Synthetic oligonucleotide
  Target: LAMA2; (-) strand; PAM type: YTN; PAM sequence: CTT
aaaagaagattacttaaatt

SEQ ID NO: 221480 - DNA, 20 bp, Artificial Sequence
  Description of Artificial Sequence: Synthetic oligonucleotide
  Target: LAMA2; (-) strand; PAM type: YTN; PAM sequence: TTC
ttaaaagaagattacttaaa

SEQ ID NO: 221481 - DNA, 20 bp, Artificial Sequence
  Description of Artificial Sequence: Synthetic oligonucleotide
  Target: LAMA2; (-) strand; PAM type: YTN; PAM sequence: TTT
cttaaaagaagattacttaa

SEQ ID NO: 221482 - DNA, 20 bp, Artificial Sequence
  Description of Artificial Sequence: Synthetic oligonucleotide
  Target: LAMA2; (-) strand; PAM type: YTN; PAM sequence: CTG
aatgatttcttaaaagaaga

SEQ ID NO: 221483 - DNA, 20 bp, Artificial Sequence
  Description of Artificial Sequence: Synthetic oligonucleotide
  Target: LAMA2; (-) strand; PAM type: YTN; PAM sequence: TTC
tgaatgatttcttaaaagaa

SEQ ID NO: 221484 - DNA, 20 bp, Artificial Sequence
  Description of Artificial Sequence: Synthetic oligonucleotide
  Target: LAMA2; (-) strand; PAM type: YTN; PAM sequence: TTT
ctgaatgatttcttaaaaga

SEQ ID NO: 221485 - DNA, 20 bp, Artificial Sequence
  Description of Artificial Sequence: Synthetic oligonucleotide
  Target: LAMA2; (-) strand; PAM type: YTN; PAM sequence: CTA
caatttctgaatgatttctt

SEQ ID NO: 221486 - DNA, 20 bp, Artificial Sequence
  Description of Artificial Sequence: Synthetic oligonucleotide
  Target: LAMA2; (-) strand; PAM type: YTN; PAM sequence: TTA
cgatcaaggacctacaattt

SEQ ID NO: 221487 - DNA, 20 bp, Artificial Sequence
  Description of Artificial Sequence: Synthetic oligonucleotide
  Target: LAMA2; (-) strand; PAM type: YTN; PAM sequence: TTA
cccaaaaagaattacgatca

SEQ ID NO: 221488 - DNA, 20 bp, Artificial Sequence
  Description of Artificial Sequence: Synthetic oligonucleotide
  Target: LAMA2; (-) strand; PAM type: YTN; PAM sequence: TTG
aaattacccaaaaagaatta

SEQ ID NO: 221489 - DNA, 20 bp, Artificial Sequence
  Description of Artificial Sequence: Synthetic oligonucleotide
  Target: LAMA2; (-) strand; PAM type: YTN; PAM sequence: TTG
caattgaaattacccaaaaa

SEQ ID NO: 221490 - DNA, 20 bp, Artificial Sequence
  Description of Artificial Sequence: Synthetic oligonucleotide
  Target: LAMA2; (-) strand; PAM type: YTN; PAM sequence: CTA
ttgcaattgaaattacccaa

SEQ ID NO: 221491 - DNA, 20 bp, Artificial Sequence
  Description of Artificial Sequence: Synthetic oligonucleotide
  Target: LAMA2; (-) strand; PAM type: YTN; PAM sequence: TTA
acctattgcaattgaaatta

SEQ ID NO: 221492 - DNA, 20 bp, Artificial Sequence
  Description of Artificial Sequence: Synthetic oligonucleotide
  Target: LAMA2; (-) strand; PAM type: YTN; PAM sequence: TTT
aacctattgcaattgaaatt

SEQ ID NO: 221493 - DNA, 20 bp, Artificial Sequence
  Description of Artificial Sequence: Synthetic oligonucleotide
  Target: LAMA2; (-) strand; PAM type: YTN; PAM sequence: TTC
cagcacagtgtttaacctat

SEQ ID NO: 221494 - DNA, 20 bp, Artificial Sequence
  Description of Artificial Sequence: Synthetic oligonucleotide
  Target: LAMA2; (-) strand; PAM type: YTN; PAM sequence: CTT
ccagcacagtgtttaaccta

SEQ ID NO: 221495 - DNA, 20 bp, Artificial Sequence
  Description of Artificial Sequence: Synthetic oligonucleotide
  Target: LAMA2; (-) strand; PAM type: YTN; PAM sequence: CTC
aaatcttccagcacagtgtt

SEQ ID NO: 221496 - DNA, 20 bp, Artificial Sequence
  Description of Artificial Sequence: Synthetic oligonucleotide
  Target: LAMA2; (-) strand; PAM type: YTN; PAM sequence: TTC
tcaaatcttccagcacagtg

SEQ ID NO: 221497 - DNA, 20 bp, Artificial Sequence
  Description of Artificial Sequence: Synthetic oligonucleotide
  Target: LAMA2; (-) strand; PAM type: YTN; PAM sequence: TTT
ctcaaatcttccagcacagt

SEQ ID NO: 221498 - DNA, 20 bp, Artificial Sequence
  Description of Artificial Sequence: Synthetic oligonucleotide
  Target: LAMA2; (-) strand; PAM type: YTN; PAM sequence: CTT
tctcaaatcttccagcacag

SEQ ID NO: 221499 - DNA, 20 bp, Artificial Sequence
  Description of Artificial Sequence: Synthetic oligonucleotide
  Target: LAMA2; (-) strand; PAM type: YTN; PAM sequence: TTG
acaaaatggaccaatgataa

SEQ ID NO: 221500 - DNA, 20 bp, Artificial Sequence
  Description of Artificial Sequence: Synthetic oligonucleotide
  Target: LAMA2; (-) strand; PAM type: YTN; PAM sequence: TTT
gacaaaatggaccaatgata

SEQ ID NO: 221501 - DNA, 20 bp, Artificial Sequence
  Description of Artificial Sequence: Synthetic oligonucleotide
  Target: LAMA2; (-) strand; PAM type: YTN; PAM sequence: TTT
tgacaaaatggaccaatgat

SEQ ID NO: 221502 - DNA, 20 bp, Artificial Sequence
  Description of Artificial Sequence: Synthetic oligonucleotide
  Target: LAMA2; (-) strand; PAM type: YTN; PAM sequence: CTG
gaaatgattttgacaaaatg

SEQ ID NO: 221503 - DNA, 20 bp, Artificial Sequence
  Description of Artificial Sequence: Synthetic oligonucleotide
  Target: LAMA2; (-) strand; PAM type: YTN; PAM sequence: TTC
tggaaatgattttgacaaaa

SEQ ID NO: 221504 - DNA, 20 bp, Artificial Sequence
  Description of Artificial Sequence: Synthetic oligonucleotide
  Target: LAMA2; (-) strand; PAM type: YTN; PAM sequence: CTT
ctggaaatgattttgacaaa

SEQ ID NO: 221505 - DNA, 20 bp, Artificial Sequence
  Description of Artificial Sequence: Synthetic oligonucleotide
  Target: LAMA2; (-) strand; PAM type: YTN; PAM sequence: TTA
aacttctggaaatgattttg

SEQ ID NO: 221506 - DNA, 20 bp, Artificial Sequence
  Description of Artificial Sequence: Synthetic oligonucleotide
  Target: LAMA2; (-) strand; PAM type: YTN; PAM sequence: CTT
aaacttctggaaatgatttt

SEQ ID NO: 221507 - DNA, 20 bp, Artificial Sequence
  Description of Artificial Sequence: Synthetic oligonucleotide
  Target: LAMA2; (-) strand; PAM type: YTN; PAM sequence: CTA
aaaatgaagaaaaaaggact

SEQ ID NO: 221508 - DNA, 20 bp, Artificial Sequence
  Description of Artificial Sequence: Synthetic oligonucleotide
  Target: LAMA2; (-) strand; PAM type: YTN; PAM sequence: TTA
ggaaaatcaatgaatcacac

SEQ ID NO: 221509 - DNA, 20 bp, Artificial Sequence
  Description of Artificial Sequence: Synthetic oligonucleotide
  Target: LAMA2; (-) strand; PAM type: YTN; PAM sequence: CTT
aggaaaatcaatgaatcaca

SEQ ID NO: 221510 - DNA, 20 bp, Artificial Sequence
  Description of Artificial Sequence: Synthetic oligonucleotide
  Target: LAMA2; (-) strand; PAM type: YTN; PAM sequence: TTC
cttaggaaaatcaatgaatc

SEQ ID NO: 221511 - DNA, 20 bp, Artificial Sequence
  Description of Artificial Sequence: Synthetic oligonucleotide
  Target: LAMA2; (-) strand; PAM type: YTN; PAM sequence: CTT
ccttaggaaaatcaatgaat

SEQ ID NO: 221512 - DNA, 20 bp, Artificial Sequence
  Description of Artificial Sequence: Synthetic oligonucleotide
  Target: LAMA2; (-) strand; PAM type: YTN; PAM sequence: TTC
ttccttaggaaaatcaatga

SEQ ID NO: 221513 - DNA, 20 bp, Artificial Sequence
  Description of Artificial Sequence: Synthetic oligonucleotide
  Target: LAMA2; (-) strand; PAM type: YTN; PAM sequence: TTA
aatgttcttccttaggaaaa

SEQ ID NO: 221514 - DNA, 20 bp, Artificial Sequence
  Description of Artificial Sequence: Synthetic oligonucleotide
  Target: LAMA2; (-) strand; PAM type: YTN; PAM sequence: CTG
agagaagttaaatgttcttc

SEQ ID NO: 221515 - DNA, 20 bp, Artificial Sequence
  Description of Artificial Sequence: Synthetic oligonucleotide
  Target: LAMA2; (-) strand; PAM type: YTN; PAM sequence: TTG
tgaatactgagagaagttaa

SEQ ID NO: 221516 - DNA, 20 bp, Artificial Sequence
  Description of Artificial Sequence: Synthetic oligonucleotide
  Target: LAMA2; (-) strand; PAM type: YTN; PAM sequence: CTT
gtgaatactgagagaagtta

SEQ ID NO: 221517 - DNA, 20 bp, Artificial Sequence
  Description of Artificial Sequence: Synthetic oligonucleotide
  Target: LAMA2; (-) strand; PAM type: YTN; PAM sequence: TTC
cttgtgaatactgagagaag

SEQ ID NO: 221518 - DNA, 20 bp, Artificial Sequence
  Description of Artificial Sequence: Synthetic oligonucleotide
  Target: LAMA2; (-) strand; PAM type: YTN; PAM sequence: TTC
aagcaggtattccttgtgaa

SEQ ID NO: 221519 - DNA, 20 bp, Artificial Sequence
  Description of Artificial Sequence: Synthetic oligonucleotide
  Target: LAMA2; (-) strand; PAM type: YTN; PAM sequence: TTA
aacattcaagcaggtattcc

SEQ ID NO: 221520 - DNA, 20 bp, Artificial Sequence
  Description of Artificial Sequence: Synthetic oligonucleotide
  Target: LAMA2; (-) strand; PAM type: YTN; PAM sequence: CTT
aaacattcaagcaggtattc

SEQ ID NO: 221521 - DNA, 20 bp, Artificial Sequence
  Description of Artificial Sequence: Synthetic oligonucleotide
  Target: LAMA2; (-) strand; PAM type: YTN; PAM sequence: TTG
gtacttaaacattcaagcag

SEQ ID NO: 221522 - DNA, 20 bp, Artificial Sequence
  Description of Artificial Sequence: Synthetic oligonucleotide
  Target: LAMA2; (-) strand; PAM type: YTN; PAM sequence: CTG
ttggtacttaaacattcaag

SEQ ID NO: 221523 - DNA, 20 bp, Artificial Sequence
  Description of Artificial Sequence: Synthetic oligonucleotide
  Target: LAMA2; (-) strand; PAM type: YTN; PAM sequence: CTC
tgttggtacttaaacattca

SEQ ID NO: 221524 - DNA, 20 bp, Artificial Sequence
  Description of Artificial Sequence: Synthetic oligonucleotide
  Target: LAMA2; (-) strand; PAM type: YTN; PAM sequence: TTA
aatcctctgttggtacttaa

SEQ ID NO: 221525 - DNA, 20 bp, Artificial Sequence
  Description of Artificial Sequence: Synthetic oligonucleotide
  Target: LAMA2; (-) strand; PAM type: YTN; PAM sequence: TTT
aaatcctctgttggtactta

SEQ ID NO: 221526 - DNA, 20 bp, Artificial Sequence
  Description of Artificial Sequence: Synthetic oligonucleotide
  Target: LAMA2; (-) strand; PAM type: YTN; PAM sequence: CTT
taaatcctctgttggtactt

SEQ ID NO: 221527 - DNA, 20 bp, Artificial Sequence
  Description of Artificial Sequence: Synthetic oligonucleotide
  Target: LAMA2; (-) strand; PAM type: YTN; PAM sequence: CTC
ataagtaataagaactttaa

SEQ ID NO: 221528 - DNA, 20 bp, Artificial Sequence
  Description of Artificial Sequence: Synthetic oligonucleotide
  Target: LAMA2; (-) strand; PAM type: YTN; PAM sequence: TTA
atgctcataagtaataagaa

SEQ ID NO: 221529 - DNA, 20 bp, Artificial Sequence
  Description of Artificial Sequence: Synthetic oligonucleotide
  Target: LAMA2; (-) strand; PAM type: YTN; PAM sequence: TTT
aatgctcataagtaataaga

SEQ ID NO: 221530 - DNA, 20 bp, Artificial Sequence
  Description of Artificial Sequence: Synthetic oligonucleotide
  Target: LAMA2; (-) strand; PAM type: YTN; PAM sequence: TTC
atttaatgctcataagtaat

SEQ ID NO: 221531 - DNA, 20 bp, Artificial Sequence
  Description of Artificial Sequence: Synthetic oligonucleotide
  Target: LAMA2; (-) strand; PAM type: YTN; PAM sequence: TTG
aattcatttaatgctcataa

SEQ ID NO: 221532 - DNA, 20 bp, Artificial Sequence
  Description of Artificial Sequence: Synthetic oligonucleotide
  Target: LAMA2; (-) strand; PAM type: YTN; PAM sequence: TTG
gagtattgaattcatttaat

SEQ ID NO: 221533 - DNA, 20 bp, Artificial Sequence
  Description of Artificial Sequence: Synthetic oligonucleotide
  Target: LAMA2; (-) strand; PAM type: YTN; PAM sequence: TTT
ggagtattgaattcatttaa

SEQ ID NO: 221534 - DNA, 20 bp, Artificial Sequence
  Description of Artificial Sequence: Synthetic oligonucleotide
  Target: LAMA2; (-) strand; PAM type: YTN; PAM sequence: CTA
taaaatttggagtattgaat

SEQ ID NO: 221535 - DNA, 20 bp, Artificial Sequence
  Description of Artificial Sequence: Synthetic oligonucleotide
  Target: LAMA2; (-) strand; PAM type: YTN; PAM sequence: TTC
tataaaatttggagtattga

SEQ ID NO: 221536 - DNA, 20 bp, Artificial Sequence
  Description of Artificial Sequence: Synthetic oligonucleotide
  Target: LAMA2; (-) strand; PAM type: YTN; PAM sequence: CTT
ctataaaatttggagtattg

SEQ ID NO: 221537 - DNA, 20 bp, Artificial Sequence
  Description of Artificial Sequence: Synthetic oligonucleotide
  Target: LAMA2; (-) strand; PAM type: YTN; PAM sequence: TTC
ttctataaaatttggagtat

SEQ ID NO: 221538 - DNA, 20 bp, Artificial Sequence
  Description of Artificial Sequence: Synthetic oligonucleotide
  Target: LAMA2; (-) strand; PAM type: YTN; PAM sequence: CTT
cttctataaaatttggagta

SEQ ID NO: 221539 - DNA, 20 bp, Artificial Sequence
  Description of Artificial Sequence: Synthetic oligonucleotide
  Target: LAMA2; (-) strand; PAM type: YTN; PAM sequence: TTC
agaaatgcttcttctataaa

SEQ ID NO: 221540 - DNA, 20 bp, Artificial Sequence
  Description of Artificial Sequence: Synthetic oligonucleotide
  Target: LAMA2; (-) strand; PAM type: YTN; PAM sequence: CTT
cagaaatgcttcttctataa

SEQ ID NO: 221541 - DNA, 20 bp, Artificial Sequence
  Description of Artificial Sequence: Synthetic oligonucleotide
  Target: LAMA2; (-) strand; PAM type: YTN; PAM sequence: CTA
tcttcagaaatgcttcttct

SEQ ID NO: 221542 - DNA, 20 bp, Artificial Sequence
  Description of Artificial Sequence: Synthetic oligonucleotide
  Target: LAMA2; (-) strand; PAM type: YTN; PAM sequence: TTC
tatcttcagaaatgcttctt

SEQ ID NO: 221543 - DNA, 20 bp, Artificial Sequence
  Description of Artificial Sequence: Synthetic oligonucleotide
  Target: LAMA2; (-) strand; PAM type: YTN; PAM sequence: TTT
ctatcttcagaaatgcttct

SEQ ID NO: 221544 - DNA, 20 bp, Artificial Sequence
  Description of Artificial Sequence: Synthetic oligonucleotide
  Target: LAMA2; (-) strand; PAM type: YTN; PAM sequence: TTT
tctatcttcagaaatgcttc

SEQ ID NO: 221545 - DNA, 20 bp, Artificial Sequence
  Description of Artificial Sequence: Synthetic oligonucleotide
  Target: LAMA2; (-) strand; PAM type: YTN; PAM sequence: TTA
ttttctatcttcagaaatgc

SEQ ID NO: 221546 - DNA, 20 bp, Artificial Sequence
  Description of Artificial Sequence: Synthetic oligonucleotide
  Target: LAMA2; (-) strand; PAM type: YTN; PAM sequence: CTT
attttctatcttcagaaatg

SEQ ID NO: 221547 - DNA, 20 bp, Artificial Sequence
  Description of Artificial Sequence: Synthetic oligonucleotide
  Target: LAMA2; (-) strand; PAM type: YTN; PAM sequence: TTA
tccttattttctatcttcag

SEQ ID NO: 221548 - DNA, 20 bp, Artificial Sequence
  Description of Artificial Sequence: Synthetic oligonucleotide
  Target: LAMA2; (-) strand; PAM type: YTN; PAM sequence: TTA
aaaattatccttattttcta

SEQ ID NO: 221549 - DNA, 20 bp, Artificial Sequence
  Description of Artificial Sequence: Synthetic oligonucleotide
  Target: LAMA2; (-) strand; PAM type: YTN; PAM sequence: TTT
aaaaattatccttattttct

SEQ ID NO: 221550 - DNA, 20 bp, Artificial Sequence
  Description of Artificial Sequence: Synthetic oligonucleotide
  Target: LAMA2; (-) strand; PAM type: YTN; PAM sequence: TTG
tgtttaaaaattatccttat

SEQ ID NO: 221551 - DNA, 20 bp, Artificial Sequence
  Description of Artificial Sequence: Synthetic oligonucleotide
  Target: LAMA2; (-) strand; PAM type: YTN; PAM sequence: CTT
gtgtttaaaaattatcctta

SEQ ID NO: 221552 - DNA, 20 bp, Artificial Sequence
  Description of Artificial Sequence: Synthetic oligonucleotide
  Target: LAMA2; (-) strand; PAM type: YTN; PAM sequence: TTC
ttgtgtttaaaaattatcct

SEQ ID NO: 221553 - DNA, 20 bp, Artificial Sequence
  Description of Artificial Sequence: Synthetic oligonucleotide
  Target: LAMA2; (-) strand; PAM type: YTN; PAM sequence: TTT
cttgtgtttaaaaattatcc

SEQ ID NO: 221554 - DNA, 20 bp, Artificial Sequence
  Description of Artificial Sequence: Synthetic oligonucleotide
  Target: LAMA2; (-) strand; PAM type: YTN; PAM sequence: TTG
ataatgatatgaaaagcatg

SEQ ID NO: 221555 - DNA, 20 bp, Artificial Sequence
  Description of Artificial Sequence: Synthetic oligonucleotide
  Target: LAMA2; (-) strand; PAM type: YTN; PAM sequence: TTC
cacattgataatgatatgaa

SEQ ID NO: 221556 - DNA, 20 bp, Artificial Sequence
  Description of Artificial Sequence: Synthetic oligonucleotide
  Target: LAMA2; (-) strand; PAM type: YTN; PAM sequence: TTT
ccacattgataatgatatga

SEQ ID NO: 221557 - DNA, 20 bp, Artificial Sequence
  Description of Artificial Sequence: Synthetic oligonucleotide
  Target: LAMA2; (-) strand; PAM type: YTN; PAM sequence: TTT
tccacattgataatgatatg

SEQ ID NO: 221558 - DNA, 20 bp, Artificial Sequence
  Description of Artificial Sequence: Synthetic oligonucleotide
  Target: LAMA2; (-) strand; PAM type: YTN; PAM sequence: TTA
gcattttccacattgataat

SEQ ID NO: 221559 - DNA, 20 bp, Artificial Sequence
  Description of Artificial Sequence: Synthetic oligonucleotide
  Target: LAMA2; (-) strand; PAM type: YTN; PAM sequence: TTT
agcattttccacattgataa

SEQ ID NO: 221560 - DNA, 20 bp, Artificial Sequence
  Description of Artificial Sequence: Synthetic oligonucleotide
  Target: LAMA2; (-) strand; PAM type: YTN; PAM sequence: TTT
tagcattttccacattgata

SEQ ID NO: 221561 - DNA, 20 bp, Artificial Sequence
  Description of Artificial Sequence: Synthetic oligonucleotide
  Target: LAMA2; (-) strand; PAM type: YTN; PAM sequence: TTG
ttttagcattttccacattg

SEQ ID NO: 221562 - DNA, 20 bp, Artificial Sequence
  Description of Artificial Sequence: Synthetic oligonucleotide
  Target: LAMA2; (-) strand; PAM type: YTN; PAM sequence: TTA
atagcaagttgttttagcat

SEQ ID NO: 221563 - DNA, 20 bp, Artificial Sequence
  Description of Artificial Sequence: Synthetic oligonucleotide
  Target: LAMA2; (-) strand; PAM type: YTN; PAM sequence: TTT
aatagcaagttgttttagca

SEQ ID NO: 221564 - DNA, 20 bp, Artificial Sequence
  Description of Artificial Sequence: Synthetic oligonucleotide
  Target: LAMA2; (-) strand; PAM type: YTN; PAM sequence: TTT
taatagcaagttgttttagc

SEQ ID NO: 221565 - DNA, 20 bp, Artificial Sequence
  Description of Artificial Sequence: Synthetic oligonucleotide
  Target: LAMA2; (-) strand; PAM type: YTN; PAM sequence: TTT
ttaatagcaagttgttttag

SEQ ID NO: 221566 - DNA, 20 bp, Artificial Sequence
  Description of Artificial Sequence: Synthetic oligonucleotide
  Target: LAMA2; (-) strand; PAM type: YTN; PAM sequence: CTG
ataaatggtttttaatagca

SEQ ID NO: 221567 - DNA, 20 bp, Artificial Sequence
  Description of Artificial Sequence: Synthetic oligonucleotide
  Target: LAMA2; (-) strand; PAM type: YTN; PAM sequence: TTC
tgataaatggtttttaatag

SEQ ID NO: 221568 - DNA, 20 bp, Artificial Sequence
  Description of Artificial Sequence: Synthetic oligonucleotide
  Target: LAMA2; (-) strand; PAM type: YTN; PAM sequence: TTT
ctgataaatggtttttaata

SEQ ID NO: 221569 - DNA, 20 bp, Artificial Sequence
  Description of Artificial Sequence: Synthetic oligonucleotide
  Target: LAMA2; (-) strand; PAM type: YTN; PAM sequence: TTA
aacaagtttctgataaatgg

SEQ ID NO: 221570 - DNA, 20 bp, Artificial Sequence
  Description of Artificial Sequence: Synthetic oligonucleotide
  Target: LAMA2; (-) strand; PAM type: YTN; PAM sequence: TTA
attaaacaagtttctgataa

SEQ ID NO: 221571 - DNA, 20 bp, Artificial Sequence
  Description of Artificial Sequence: Synthetic oligonucleotide
  Target: LAMA2; (-) strand; PAM type: YTN; PAM sequence: TTG
acatattaattaaacaagtt

SEQ ID NO: 221572 - DNA, 20 bp, Artificial Sequence
  Description of Artificial Sequence: Synthetic oligonucleotide
  Target: LAMA2; (-) strand; PAM type: YTN; PAM sequence: TTT
gacatattaattaaacaagt

SEQ ID NO: 221573 - DNA, 20 bp, Artificial Sequence
  Description of Artificial Sequence: Synthetic oligonucleotide
  Target: LAMA2; (-) strand; PAM type: YTN; PAM sequence: TTA
aaaacccagatatttgacat

SEQ ID NO: 221574 - DNA, 20 bp, Artificial Sequence
  Description of Artificial Sequence: Synthetic oligonucleotide
  Target: LAMA2; (-) strand; PAM type: YTN; PAM sequence: TTT
aaaaacccagatatttgaca

SEQ ID NO: 221575 - DNA, 20 bp, Artificial Sequence
  Description of Artificial Sequence: Synthetic oligonucleotide
  Target: LAMA2; (-) strand; PAM type: YTN; PAM sequence: TTA
tacatgatttaaaaacccag

SEQ ID NO: 221576 - DNA, 20 bp, Artificial Sequence
  Description of Artificial Sequence: Synthetic oligonucleotide
  Target: LAMA2; (-) strand; PAM type: YTN; PAM sequence: TTG
ttatacatgatttaaaaacc

SEQ ID NO: 221577 - DNA, 20 bp, Artificial Sequence
  Description of Artificial Sequence: Synthetic oligonucleotide
  Target: LAMA2; (-) strand; PAM type: YTN; PAM sequence: TTG
attgttatacatgatttaaa

SEQ ID NO: 221578 - DNA, 20 bp, Artificial Sequence
  Description of Artificial Sequence: Synthetic oligonucleotide
  Target: LAMA2; (-) strand; PAM type: YTN; PAM sequence: TTT
gattgttatacatgatttaa

SEQ ID NO: 221579 - DNA, 20 bp, Artificial Sequence
  Description of Artificial Sequence: Synthetic oligonucleotide
  Target: LAMA2; (-) strand; PAM type: YTN; PAM sequence: TTT
tgattgttatacatgattta

SEQ ID NO: 221580 - DNA, 20 bp, Artificial Sequence
  Description of Artificial Sequence: Synthetic oligonucleotide
  Target: LAMA2; (-) strand; PAM type: YTN; PAM sequence: TTA
ggaatattttgattgttata

SEQ ID NO: 221581 - DNA, 20 bp, Artificial Sequence
  Description of Artificial Sequence: Synthetic oligonucleotide
  Target: LAMA2; (-) strand; PAM type: YTN; PAM sequence: TTT
aggaatattttgattgttat

SEQ ID NO: 221582 - DNA, 20 bp, Artificial Sequence
  Description of Artificial Sequence: Synthetic oligonucleotide
  Target: LAMA2; (-) strand; PAM type: YTN; PAM sequence: TTT
taggaatattttgattgtta

SEQ ID NO: 221583 - DNA, 20 bp, Artificial Sequence
  Description of Artificial Sequence: Synthetic oligonucleotide
  Target: LAMA2; (-) strand; PAM type: YTN; PAM sequence: TTT
ttaggaatattttgattgtt

SEQ ID NO: 221584 - DNA, 20 bp, Artificial Sequence
  Description of Artificial Sequence: Synthetic oligonucleotide
  Target: LAMA2; (-) strand; PAM type: YTN; PAM sequence: CTC
aatatgtttttaggaatatt

SEQ ID NO: 221585 - DNA, 20 bp, Artificial Sequence
  Description of Artificial Sequence: Synthetic oligonucleotide
  Target: LAMA2; (-) strand; PAM type: YTN; PAM sequence: TTC
tcaatatgtttttaggaata

SEQ ID NO: 221586 - DNA, 20 bp, Artificial Sequence
  Description of Artificial Sequence: Synthetic oligonucleotide
  Target: LAMA2; (-) strand; PAM type: YTN; PAM sequence: TTA
aagttctcaatatgttttta

SEQ ID NO: 221587 - DNA, 20 bp, Artificial Sequence
  Description of Artificial Sequence: Synthetic oligonucleotide
  Target: LAMA2; (-) strand; PAM type: YTN; PAM sequence: TTG
ttaaagttctcaatatgttt

SEQ ID NO: 221588 - DNA, 20 bp, Artificial Sequence
  Description of Artificial Sequence: Synthetic oligonucleotide
  Target: LAMA2; (-) strand; PAM type: YTN; PAM sequence: TTT
gttaaagttctcaatatgtt

SEQ ID NO: 221589 - DNA, 20 bp, Artificial Sequence
  Description of Artificial Sequence: Synthetic oligonucleotide
  Target: LAMA2; (-) strand; PAM type: YTN; PAM sequence: TTT
tgttaaagttctcaatatgt

SEQ ID NO: 221590 - DNA, 20 bp, Artificial Sequence
  Description of Artificial Sequence: Synthetic oligonucleotide
  Target: LAMA2; (-) strand; PAM type: YTN; PAM sequence: CTG
taaaatgttttgttaaagtt

SEQ ID NO: 221591 - DNA, 20 bp, Artificial Sequence
  Description of Artificial Sequence: Synthetic oligonucleotide
  Target: LAMA2; (-) strand; PAM type: YTN; PAM sequence: TTC
caactgtaaaatgttttgtt

SEQ ID NO: 221592 - DNA, 20 bp, Artificial Sequence
  Description of Artificial Sequence: Synthetic oligonucleotide
  Target: LAMA2; (-) strand; PAM type: YTN; PAM sequence: TTC
attccaactgtaaaatgttt

SEQ ID NO: 221593 - DNA, 20 bp, Artificial Sequence
  Description of Artificial Sequence: Synthetic oligonucleotide
  Target: LAMA2; (-) strand; PAM type: YTN; PAM sequence: TTT
cattccaactgtaaaatgtt

SEQ ID NO: 221594 - DNA, 20 bp, Artificial Sequence
  Description of Artificial Sequence: Synthetic oligonucleotide
  Target: LAMA2; (-) strand; PAM type: YTN; PAM sequence: CTA
atttcattccaactgtaaaa

SEQ ID NO: 221595 - DNA, 20 bp, Artificial Sequence
  Description of Artificial Sequence: Synthetic oligonucleotide
  Target: LAMA2; (-) strand; PAM type: YTN; PAM sequence: TTA
atccaatcatccagtactaa

SEQ ID NO: 221596 - DNA, 20 bp, Artificial Sequence
  Description of Artificial Sequence: Synthetic oligonucleotide
  Target: LAMA2; (-) strand; PAM type: YTN; PAM sequence: TTT
aatccaatcatccagtacta

SEQ ID NO: 221597 - DNA, 20 bp, Artificial Sequence
  Description of Artificial Sequence: Synthetic oligonucleotide
  Target: LAMA2; (-) strand; PAM type: YTN; PAM sequence: TTT
taatccaatcatccagtact

SEQ ID NO: 221598 - DNA, 20 bp, Artificial Sequence
  Description of Artificial Sequence: Synthetic oligonucleotide
  Target: LAMA2; (-) strand; PAM type: YTN; PAM sequence: CTT
ttaatccaatcatccagtac

SEQ ID NO: 221599 - DNA, 20 bp, Artificial Sequence
  Description of Artificial Sequence: Synthetic oligonucleotide
  Target: LAMA2; (-) strand; PAM type: YTN; PAM sequence: CTG
gcttttaatccaatcatcca

SEQ ID NO: 221600 - DNA, 20 bp, Artificial Sequence
  Description of Artificial Sequence: Synthetic oligonucleotide
  Target: LAMA2; (-) strand; PAM type: YTN; PAM sequence: CTA
ctggcttttaatccaatcat

SEQ ID NO: 221601 - DNA, 20 bp, Artificial Sequence
  Description of Artificial Sequence: Synthetic oligonucleotide
  Target: LAMA2; (-) strand; PAM type: YTN; PAM sequence: TTC
tactggcttttaatccaatc

SEQ ID NO: 221602 - DNA, 20 bp, Artificial Sequence
  Description of Artificial Sequence: Synthetic oligonucleotide
  Target: LAMA2; (-) strand; PAM type: YTN; PAM sequence: TTT
ctactggcttttaatccaat

SEQ ID NO: 221603 - DNA, 20 bp, Artificial Sequence
  Description of Artificial Sequence: Synthetic oligonucleotide
  Target: LAMA2; (-) strand; PAM type: YTN; PAM sequence: TTA
aataggataatatataattt

SEQ ID NO: 221604 - DNA, 20 bp, Artificial Sequence
  Description of Artificial Sequence: Synthetic oligonucleotide
  Target: LAMA2; (-) strand; PAM type: YTN; PAM sequence: TTT
aaataggataatatataatt

SEQ ID NO: 221605 - DNA, 20 bp, Artificial Sequence
  Description of Artificial Sequence: Synthetic oligonucleotide
  Target: LAMA2; (-) strand; PAM type: YTN; PAM sequence: CTA
catttaaataggataatata

SEQ ID NO: 221606 - DNA, 20 bp, Artificial Sequence
  Description of Artificial Sequence: Synthetic oligonucleotide
  Target: LAMA2; (-) strand; PAM type: YTN; PAM sequence: TTA
tatagtcctacatttaaata

SEQ ID NO: 221607 - DNA, 20 bp, Artificial Sequence
  Description of Artificial Sequence: Synthetic oligonucleotide
  Target: LAMA2; (-) strand; PAM type: YTN; PAM sequence: CTT
atatagtcctacatttaaat

SEQ ID NO: 221608 - DNA, 20 bp, Artificial Sequence
  Description of Artificial Sequence: Synthetic oligonucleotide
  Target: LAMA2; (-) strand; PAM type: YTN; PAM sequence: TTA
ccaataacttatatagtcct

SEQ ID NO: 221609 - DNA, 20 bp, Artificial Sequence
  Description of Artificial Sequence: Synthetic oligonucleotide
  Target: LAMA2; (-) strand; PAM type: YTN; PAM sequence: TTA
cgaaaaaggattaccaataa

SEQ ID NO: 221610 - DNA, 20 bp, Artificial Sequence
  Description of Artificial Sequence: Synthetic oligonucleotide
  Target: LAMA2; (-) strand; PAM type: YTN; PAM sequence: CTG
gaaaaagtaataaaattacg

SEQ ID NO: 221611 - DNA, 20 bp, Artificial Sequence
  Description of Artificial Sequence: Synthetic oligonucleotide
  Target: LAMA2; (-) strand; PAM type: YTN; PAM sequence: TTA
ggtactggaaaaagtaataa

SEQ ID NO: 221612 - DNA, 20 bp, Artificial Sequence
  Description of Artificial Sequence: Synthetic oligonucleotide
  Target: LAMA2; (-) strand; PAM type: YTN; PAM sequence: CTT
aggtactggaaaaagtaata

SEQ ID NO: 221613 - DNA, 20 bp, Artificial Sequence
  Description of Artificial Sequence: Synthetic oligonucleotide
  Target: LAMA2; (-) strand; PAM type: YTN; PAM sequence: TTA
tataccagtcaccagtatcc

SEQ ID NO: 221614 - DNA, 20 bp, Artificial Sequence
  Description of Artificial Sequence: Synthetic oligonucleotide
  Target: LAMA2; (-) strand; PAM type: YTN; PAM sequence: TTA
ttatataccagtcaccagta

SEQ ID NO: 221615 - DNA, 20 bp, Artificial Sequence
  Description of Artificial Sequence: Synthetic oligonucleotide
  Target: LAMA2; (-) strand; PAM type: YTN; PAM sequence: CTT
attatataccagtcaccagt

SEQ ID NO: 221616 - DNA, 20 bp, Artificial Sequence
  Description of Artificial Sequence: Synthetic oligonucleotide
  Target: LAMA2; (-) strand; PAM type: YTN; PAM sequence: TTA
cttattatataccagtcacc

SEQ ID NO: 221617 - DNA, 20 bp, Artificial Sequence
  Description of Artificial Sequence: Synthetic oligonucleotide
  Target: LAMA2; (-) strand; PAM type: YTN; PAM sequence: TTG
gttacttattatataccagt

SEQ ID NO: 221618 - DNA, 20 bp, Artificial Sequence
  Description of Artificial Sequence: Synthetic oligonucleotide
  Target: LAMA2; (-) strand; PAM type: YTN; PAM sequence: TTC
attggttacttattatatac

SEQ ID NO: 221619 - DNA, 20 bp, Artificial Sequence
  Description of Artificial Sequence: Synthetic oligonucleotide
  Target: LAMA2; (-) strand; PAM type: YTN; PAM sequence: CTA
ttcattggttacttattata

SEQ ID NO: 221620 - DNA, 20 bp, Artificial Sequence
  Description of Artificial Sequence: Synthetic oligonucleotide
  Target: LAMA2; (-) strand; PAM type: YTN; PAM sequence: TTC
aatatctattcattggttac

SEQ ID NO: 221621 - DNA, 20 bp, Artificial Sequence
  Description of Artificial Sequence: Synthetic oligonucleotide
  Target: LAMA2; (-) strand; PAM type: YTN; PAM sequence: TTA
ttcaatatctattcattggt

SEQ ID NO: 221622 - DNA, 20 bp, Artificial Sequence
  Description of Artificial Sequence: Synthetic oligonucleotide
  Target: LAMA2; (-) strand; PAM type: YTN; PAM sequence: TTG
agcaaagcaatgcattattc

SEQ ID NO: 221623 - DNA, 20 bp, Artificial Sequence
  Description of Artificial Sequence: Synthetic oligonucleotide
  Target: LAMA2; (-) strand; PAM type: YTN; PAM sequence: CTC
agagatgagaaaattgagca

SEQ ID NO: 221624 - DNA, 20 bp, Artificial Sequence
  Description of Artificial Sequence: Synthetic oligonucleotide
  Target: LAMA2; (-) strand; PAM type: YTN; PAM sequence: TTG
cagtagcacagacaggaaag

SEQ ID NO: 221625 - DNA, 20 bp, Artificial Sequence
  Description of Artificial Sequence: Synthetic oligonucleotide
  Target: LAMA2; (-) strand; PAM type: YTN; PAM sequence: TTA
agaaagtaatgttgcagtag

SEQ ID NO: 221626 - DNA, 20 bp, Artificial Sequence
  Description of Artificial Sequence: Synthetic oligonucleotide
  Target: LAMA2; (-) strand; PAM type: YTN; PAM sequence: TTG
cagtggagtgagagaatata

SEQ ID NO: 221627 - DNA, 20 bp, Artificial Sequence
  Description of Artificial Sequence: Synthetic oligonucleotide
  Target: LAMA2; (-) strand; PAM type: YTN; PAM sequence: TTA
ttgcagtggagtgagagaat

SEQ ID NO: 221628 - DNA, 20 bp, Artificial Sequence
  Description of Artificial Sequence: Synthetic oligonucleotide
  Target: LAMA2; (-) strand; PAM type: YTN; PAM sequence: CTG
taatattattgcagtggagt

SEQ ID NO: 221629 - DNA, 20 bp, Artificial Sequence
  Description of Artificial Sequence: Synthetic oligonucleotide
  Target: LAMA2; (-) strand; PAM type: YTN; PAM sequence: TTA
atcagggaataacatctgta

SEQ ID NO: 221630 - DNA, 20 bp, Artificial Sequence
  Description of Artificial Sequence: Synthetic oligonucleotide
  Target: LAMA2; (-) strand; PAM type: YTN; PAM sequence: CTT
aatcagggaataacatctgt

SEQ ID NO: 221631 - DNA, 20 bp, Artificial Sequence
  Description of Artificial Sequence: Synthetic oligonucleotide
  Target: LAMA2; (-) strand; PAM type: YTN; PAM sequence: TTC
ttaatcagggaataacatct

SEQ ID NO: 221632 - DNA, 20 bp, Artificial Sequence
  Description of Artificial Sequence: Synthetic oligonucleotide
  Target: LAMA2; (-) strand; PAM type: YTN; PAM sequence: CTA
ttcttaatcagggaataaca

SEQ ID NO: 221633 - DNA, 20 bp, Artificial Sequence
  Description of Artificial Sequence: Synthetic oligonucleotide
  Target: LAMA2; (-) strand; PAM type: YTN; PAM sequence: TTA
tactattcttaatcagggaa

SEQ ID NO: 221634 - DNA, 20 bp, Artificial Sequence
  Description of Artificial Sequence: Synthetic oligonucleotide
  Target: LAMA2; (-) strand; PAM type: YTN; PAM sequence: TTT
atactattcttaatcaggga

SEQ ID NO: 221635 - DNA, 20 bp, Artificial Sequence
  Description of Artificial Sequence: Synthetic oligonucleotide
  Target: LAMA2; (-) strand; PAM type: YTN; PAM sequence: TTG
tcaatttatactattcttaa

SEQ ID NO: 221636 - DNA, 20 bp, Artificial Sequence
  Description of Artificial Sequence: Synthetic oligonucleotide
  Target: LAMA2; (-) strand; PAM type: YTN; PAM sequence: TTG
gattgtcaatttatactatt

SEQ ID NO: 221637 - DNA, 20 bp, Artificial Sequence
  Description of Artificial Sequence: Synthetic oligonucleotide
  Target: LAMA2; (-) strand; PAM type: YTN; PAM sequence: TTG
aggggttggattgtcaattt

SEQ ID NO: 221638 - DNA, 20 bp, Artificial Sequence
  Description of Artificial Sequence: Synthetic oligonucleotide
  Target: LAMA2; (-) strand; PAM type: YTN; PAM sequence: TTT
gaggggttggattgtcaatt

SEQ ID NO: 221639 - DNA, 20 bp, Artificial Sequence
  Description of Artificial Sequence: Synthetic oligonucleotide
  Target: LAMA2; (-) strand; PAM type: YTN; PAM sequence: TTC
atttgaggggttggattgtc

SEQ ID NO: 221640 - DNA, 20 bp, Artificial Sequence
  Description of Artificial Sequence: Synthetic oligonucleotide
  Target: LAMA2; (-) strand; PAM type: YTN; PAM sequence: TTT
catttgaggggttggattgt

SEQ ID NO: 221641 - DNA, 20 bp, Artificial Sequence
  Description of Artificial Sequence: Synthetic oligonucleotide
  Target: LAMA2; (-) strand; PAM type: YTN; PAM sequence: TTG
gatcaccaaaaaatttcatt

SEQ ID NO: 221642 - DNA, 20 bp, Artificial Sequence
  Description of Artificial Sequence: Synthetic oligonucleotide
  Target: LAMA2; (-) strand; PAM type: YTN; PAM sequence: TTT
ggatcaccaaaaaatttcat

SEQ ID NO: 221643 - DNA, 20 bp, Artificial Sequence
  Description of Artificial Sequence: Synthetic oligonucleotide
  Target: LAMA2; (-) strand; PAM type: YTN; PAM sequence: TTA
aaacgtttggatcaccaaaa

SEQ ID NO: 221644 - DNA, 20 bp, Artificial Sequence
  Description of Artificial Sequence: Synthetic oligonucleotide
  Target: LAMA2; (-) strand; PAM type: YTN; PAM sequence: TTT
aaaacgtttggatcaccaaa

SEQ ID NO: 221645 - DNA, 20 bp, Artificial Sequence
  Description of Artificial Sequence: Synthetic oligonucleotide
  Target: LAMA2; (-) strand; PAM type: YTN; PAM sequence: TTG
gatgtttaaaacgtttggat

SEQ ID NO: 221646 - DNA, 20 bp, Artificial Sequence
  Description of Artificial Sequence: Synthetic oligonucleotide
  Target: LAMA2; (-) strand; PAM type: YTN; PAM sequence: TTA
ttggatgtttaaaacgtttg

SEQ ID NO: 221647 - DNA, 20 bp, Artificial Sequence
  Description of Artificial Sequence: Synthetic oligonucleotide
  Target: LAMA2; (-) strand; PAM type: YTN; PAM sequence: TTT
attggatgtttaaaacgttt

SEQ ID NO: 221648 - DNA, 20 bp, Artificial Sequence
  Description of Artificial Sequence: Synthetic oligonucleotide
  Target: LAMA2; (-) strand; PAM type: YTN; PAM sequence: CTT
tattggatgtttaaaacgtt

SEQ ID NO: 221649 - DNA, 20 bp, Artificial Sequence
  Description of Artificial Sequence: Synthetic oligonucleotide
  Target: LAMA2; (-) strand; PAM type: YTN; PAM sequence: TTA
tatctttattggatgtttaa

SEQ ID NO: 221650 - DNA, 20 bp, Artificial Sequence
  Description of Artificial Sequence: Synthetic oligonucleotide
  Target: LAMA2; (-) strand; PAM type: YTN; PAM sequence: CTA
gcatgttatatctttattgg

SEQ ID NO: 221651 - DNA, 20 bp, Artificial Sequence
  Description of Artificial Sequence: Synthetic oligonucleotide
  Target: LAMA2; (-) strand; PAM type: YTN; PAM sequence: CTA
gagaactagcatgttatatc

SEQ ID NO: 221652 - DNA, 20 bp, Artificial Sequence
  Description of Artificial Sequence: Synthetic oligonucleotide
  Target: LAMA2; (-) strand; PAM type: YTN; PAM sequence: CTA
ctagagaactagcatgttat

SEQ ID NO: 221653 - DNA, 20 bp, Artificial Sequence
  Description of Artificial Sequence: Synthetic oligonucleotide
  Target: LAMA2; (-) strand; PAM type: YTN; PAM sequence: CTG
gaaatgggtgcctactagag

SEQ ID NO: 221654 - DNA, 20 bp, Artificial Sequence
  Description of Artificial Sequence: Synthetic oligonucleotide
  Target: LAMA2; (-) strand; PAM type: YTN; PAM sequence: TTG
gaaacctggaaatgggtgcc

SEQ ID NO: 221655 - DNA, 20 bp, Artificial Sequence
  Description of Artificial Sequence: Synthetic oligonucleotide
  Target: LAMA2; (-) strand; PAM type: YTN; PAM sequence: TTT
ggaaacctggaaatgggtgc

SEQ ID NO: 221656 - DNA, 20 bp, Artificial Sequence
  Description of Artificial Sequence: Synthetic oligonucleotide
  Target: LAMA2; (-) strand; PAM type: YTN; PAM sequence: TTG
aaacgtttggaaacctggaa

SEQ ID NO: 221657 - DNA, 20 bp, Artificial Sequence
  Description of Artificial Sequence: Synthetic oligonucleotide
  Target: LAMA2; (-) strand; PAM type: YTN; PAM sequence: TTG
ttgaaacgtttggaaacctg

SEQ ID NO: 221658 - DNA, 20 bp, Artificial Sequence
  Description of Artificial Sequence: Synthetic oligonucleotide
  Target: LAMA2; (-) strand; PAM type: YTN; PAM sequence: TTT
gttgaaacgtttggaaacct

SEQ ID NO: 221659 - DNA, 20 bp, Artificial Sequence
  Description of Artificial Sequence: Synthetic oligonucleotide
  Target: LAMA2; (-) strand; PAM type: YTN; PAM sequence: TTT
tgttgaaacgtttggaaacc

SEQ ID NO: 221660 - DNA, 20 bp, Artificial Sequence
  Description of Artificial Sequence: Synthetic oligonucleotide
  Target: LAMA2; (-) strand; PAM type: YTN; PAM sequence: TTT
ttgttgaaacgtttggaaac

SEQ ID NO: 221661 - DNA, 20 bp, Artificial Sequence
  Description of Artificial Sequence: Synthetic oligonucleotide
  Target: LAMA2; (-) strand; PAM type: YTN; PAM sequence: TTA
tgcaatcaatagagaaatat

SEQ ID NO: 221662 - DNA, 20 bp, Artificial Sequence
  Description of Artificial Sequence: Synthetic oligonucleotide
  Target: LAMA2; (-) strand; PAM type: YTN; PAM sequence: CTC
cacattatgcaatcaataga

SEQ ID NO: 221663 - DNA, 20 bp, Artificial Sequence
  Description of Artificial Sequence: Synthetic oligonucleotide
  Target: LAMA2; (-) strand; PAM type: YTN; PAM sequence: CTC
aaaacagaatctccacatta

SEQ ID NO: 221664 - DNA, 20 bp, Artificial Sequence
  Description of Artificial Sequence: Synthetic oligonucleotide
  Target: LAMA2; (-) strand; PAM type: YTN; PAM sequence: TTC
tcaaaacagaatctccacat

SEQ ID NO: 221665 - DNA, 20 bp, Artificial Sequence
  Description of Artificial Sequence: Synthetic oligonucleotide
  Target: LAMA2; (-) strand; PAM type: YTN; PAM sequence: TTA
tgtgcattctcaaaacagaa

SEQ ID NO: 221666 - DNA, 20 bp, Artificial Sequence
  Description of Artificial Sequence: Synthetic oligonucleotide
  Target: LAMA2; (-) strand; PAM type: YTN; PAM sequence: TTT
atgtgcattctcaaaacaga

SEQ ID NO: 221667 - DNA, 20 bp, Artificial Sequence
  Description of Artificial Sequence: Synthetic oligonucleotide
  Target: LAMA2; (-) strand; PAM type: YTN; PAM sequence: CTT
tatgtgcattctcaaaacag

SEQ ID NO: 221668 - DNA, 20 bp, Artificial Sequence
  Description of Artificial Sequence: Synthetic oligonucleotide
  Target: LAMA2; (-) strand; PAM type: YTN; PAM sequence: TTC
agaatataatatactttatg

SEQ ID NO: 221669 - DNA, 20 bp, Artificial Sequence
  Description of Artificial Sequence: Synthetic oligonucleotide
  Target: LAMA2; (-) strand; PAM type: YTN; PAM sequence: TTA
cagttcagaatataatatac

SEQ ID NO: 221670 - DNA, 20 bp, Artificial Sequence
  Description of Artificial Sequence: Synthetic oligonucleotide
  Target: LAMA2; (-) strand; PAM type: YTN; PAM sequence: TTG
ttacagttcagaatataata

SEQ ID NO: 221671 - DNA, 20 bp, Artificial Sequence
  Description of Artificial Sequence: Synthetic oligonucleotide
  Target: LAMA2; (-) strand; PAM type: YTN; PAM sequence: TTT
gttacagttcagaatataat

SEQ ID NO: 221672 - DNA, 20 bp, Artificial Sequence
  Description of Artificial Sequence: Synthetic oligonucleotide
  Target: LAMA2; (-) strand; PAM type: YTN; PAM sequence: TTT
tgttacagttcagaatataa

SEQ ID NO: 221673 - DNA, 20 bp, Artificial Sequence
  Description of Artificial Sequence: Synthetic oligonucleotide
  Target: LAMA2; (-) strand; PAM type: YTN; PAM sequence: CTC
attttgttacagttcagaat

SEQ ID NO: 221674 - DNA, 20 bp, Artificial Sequence
  Description of Artificial Sequence: Synthetic oligonucleotide
  Target: LAMA2; (-) strand; PAM type: YTN; PAM sequence: TTA
gagtctcattttgttacagt

SEQ ID NO: 221675 - DNA, 20 bp, Artificial Sequence
  Description of Artificial Sequence: Synthetic oligonucleotide
  Target: LAMA2; (-) strand; PAM type: YTN; PAM sequence: CTG
tgaataaattagagtctcat

SEQ ID NO: 221676 - DNA, 20 bp, Artificial Sequence
  Description of Artificial Sequence: Synthetic oligonucleotide
  Target: LAMA2; (-) strand; PAM type: YTN; PAM sequence: TTA
aaaaggactgtgaataaatt

SEQ ID NO: 221677 - DNA, 20 bp, Artificial Sequence
  Description of Artificial Sequence: Synthetic oligonucleotide
  Target: LAMA2; (-) strand; PAM type: YTN; PAM sequence: TTT
aaaaaggactgtgaataaat

SEQ ID NO: 221678 - DNA, 20 bp, Artificial Sequence
  Description of Artificial Sequence: Synthetic oligonucleotide
  Target: LAMA2; (-) strand; PAM type: YTN; PAM sequence: CTC
aggaaaacaaaaatacagac

SEQ ID NO: 221679 - DNA, 20 bp, Artificial Sequence
  Description of Artificial Sequence: Synthetic oligonucleotide
  Target: LAMA2; (-) strand; PAM type: YTN; PAM sequence: TTC
tcaggaaaacaaaaatacag

SEQ ID NO: 221680 - DNA, 20 bp, Artificial Sequence
  Description of Artificial Sequence: Synthetic oligonucleotide
  Target: LAMA2; (-) strand; PAM type: YTN; PAM sequence: TTT
ctcaggaaaacaaaaataca

SEQ ID NO: 221681 - DNA, 20 bp, Artificial Sequence
  Description of Artificial Sequence: Synthetic oligonucleotide
  Target: LAMA2; (-) strand; PAM type: YTN; PAM sequence: TTT
tctcaggaaaacaaaaatac

SEQ ID NO: 221682 - DNA, 20 bp, Artificial Sequence
  Description of Artificial Sequence: Synthetic oligonucleotide
  Target: LAMA2; (-) strand; PAM type: YTN; PAM sequence: TTT
ttctcaggaaaacaaaaata

SEQ ID NO: 221683 - DNA, 20 bp, Artificial Sequence
  Description of Artificial Sequence: Synthetic oligonucleotide
  Target: LAMA2; (-) strand; PAM type: YTN; PAM sequence: CTA
taaagataagatttttctca

SEQ ID NO: 221684 - DNA, 20 bp, Artificial Sequence
  Description of Artificial Sequence: Synthetic oligonucleotide
  Target: LAMA2; (-) strand; PAM type: YTN; PAM sequence: TTC
aatatccagagaggctataa

SEQ ID NO: 221685 - DNA, 20 bp, Artificial Sequence
  Description of Artificial Sequence: Synthetic oligonucleotide
  Target: LAMA2; (-) strand; PAM type: YTN; PAM sequence: CTC
aagatattcaatatccagag

SEQ ID NO: 221686 - DNA, 20 bp, Artificial Sequence
  Description of Artificial Sequence: Synthetic oligonucleotide
  Target: LAMA2; (-) strand; PAM type: YTN; PAM sequence: CTA
gtctcaagatattcaatatc

SEQ ID NO: 221687 - DNA, 20 bp, Artificial Sequence
  Description of Artificial Sequence: Synthetic oligonucleotide
  Target: LAMA2; (-) strand; PAM type: YTN; PAM sequence: TTA
aagctagtctcaagatattc

SEQ ID NO: 221688 - DNA, 20 bp, Artificial Sequence
  Description of Artificial Sequence: Synthetic oligonucleotide
  Target: LAMA2; (-) strand; PAM type: YTN; PAM sequence: TTA
ataaaaatcaagagaattaa

SEQ ID NO: 221689 - DNA, 20 bp, Artificial Sequence
  Description of Artificial Sequence: Synthetic oligonucleotide
  Target: LAMA2; (-) strand; PAM type: YTN; PAM sequence: TTT
aataaaaatcaagagaatta

SEQ ID NO: 221690 - DNA, 20 bp, Artificial Sequence
  Description of Artificial Sequence: Synthetic oligonucleotide
  Target: LAMA2; (-) strand; PAM type: YTN; PAM sequence: TTT
taataaaaatcaagagaatt

SEQ ID NO: 221691 - DNA, 20 bp, Artificial Sequence
  Description of Artificial Sequence: Synthetic oligonucleotide
  Target: LAMA2; (-) strand; PAM type: YTN; PAM sequence: TTA
gaagttttaataaaaatcaa

SEQ ID NO: 221692 - DNA, 20 bp, Artificial Sequence
  Description of Artificial Sequence: Synthetic oligonucleotide
  Target: LAMA2; (-) strand; PAM type: YTN; PAM sequence: TTG
gaattagaagttttaataaa

SEQ ID NO: 221693 - DNA, 20 bp, Artificial Sequence
  Description of Artificial Sequence: Synthetic oligonucleotide
  Target: LAMA2; (-) strand; PAM type: YTN; PAM sequence: TTC
acgaataaagttggaattag

SEQ ID NO: 221694 - DNA, 20 bp, Artificial Sequence
  Description of Artificial Sequence: Synthetic oligonucleotide
  Target: LAMA2; (-) strand; PAM type: YTN; PAM sequence: TTA
tataagcatgtagttcacga

SEQ ID NO: 221695 - DNA, 20 bp, Artificial Sequence
  Description of Artificial Sequence: Synthetic oligonucleotide
  Target: LAMA2; (-) strand; PAM type: YTN; PAM sequence: TTT
atataagcatgtagttcacg

SEQ ID NO: 221696 - DNA, 20 bp, Artificial Sequence
  Description of Artificial Sequence: Synthetic oligonucleotide
  Target: LAMA2; (-) strand; PAM type: YTN; PAM sequence: TTT
tatataagcatgtagttcac

SEQ ID NO: 221697 - DNA, 20 bp, Artificial Sequence
  Description of Artificial Sequence: Synthetic oligonucleotide
  Target: LAMA2; (-) strand; PAM type: YTN; PAM sequence: CTT
ttatataagcatgtagttca

SEQ ID NO: 221698 - DNA, 20 bp, Artificial Sequence
  Description of Artificial Sequence: Synthetic oligonucleotide
  Target: LAMA2; (-) strand; PAM type: YTN; PAM sequence: TTG
atgaaacgtacttttatata

SEQ ID NO: 221699 - DNA, 20 bp, Artificial Sequence
  Description of Artificial Sequence: Synthetic oligonucleotide
  Target: LAMA2; (-) strand; PAM type: YTN; PAM sequence: TTT
gatgaaacgtacttttatat

SEQ ID NO: 221700 - DNA, 20 bp, Artificial Sequence
  Description of Artificial Sequence: Synthetic oligonucleotide
  Target: LAMA2; (-) strand; PAM type: YTN; PAM sequence: CTG
tttgatgaaacgtactttta

SEQ ID NO: 221701 - DNA, 20 bp, Artificial Sequence
  Description of Artificial Sequence: Synthetic oligonucleotide
  Target: LAMA2; (-) strand; PAM type: YTN; PAM sequence: TTA
aagagataaagagaaagctg

SEQ ID NO: 221702 - DNA, 20 bp, Artificial Sequence
  Description of Artificial Sequence: Synthetic oligonucleotide
  Target: LAMA2; (-) strand; PAM type: YTN; PAM sequence: TTT
aaagagataaagagaaagct

SEQ ID NO: 221703 - DNA, 20 bp, Artificial Sequence
  Description of Artificial Sequence: Synthetic oligonucleotide
  Target: LAMA2; (-) strand; PAM type: YTN; PAM sequence: TTT
taaagagataaagagaaagc

SEQ ID NO: 221704 - DNA, 20 bp, Artificial Sequence
  Description of Artificial Sequence: Synthetic oligonucleotide
  Target: LAMA2; (-) strand; PAM type: YTN; PAM sequence: CTG
aaaataataaaaggtaatga

SEQ ID NO: 221705 - DNA, 20 bp, Artificial Sequence
  Description of Artificial Sequence: Synthetic oligonucleotide
  Target: LAMA2; (-) strand; PAM type: YTN; PAM sequence: TTA
aagcatactgaaaataataa

SEQ ID NO: 221706 - DNA, 20 bp, Artificial Sequence
  Description of Artificial Sequence: Synthetic oligonucleotide
  Target: LAMA2; (-) strand; PAM type: YTN; PAM sequence: TTA
aagcattaaagcatactgaa

SEQ ID NO: 221707 - DNA, 20 bp, Artificial Sequence
  Description of Artificial Sequence: Synthetic oligonucleotide
  Target: LAMA2; (-) strand; PAM type: YTN; PAM sequence: TTT
aaagcattaaagcatactga

SEQ ID NO: 221708 - DNA, 20 bp, Artificial Sequence
  Description of Artificial Sequence: Synthetic oligonucleotide
  Target: LAMA2; (-) strand; PAM type: YTN; PAM sequence: TTT
taaagcattaaagcatactg

SEQ ID NO: 221709 - DNA, 20 bp, Artificial Sequence
  Description of Artificial Sequence: Synthetic oligonucleotide
  Target: LAMA2; (-) strand; PAM type: YTN; PAM sequence: TTC
aagaataaaattttaaagca

SEQ ID NO: 221710 - DNA, 20 bp, Artificial Sequence
  Description of Artificial Sequence: Synthetic oligonucleotide
  Target: LAMA2; (-) strand; PAM type: YTN; PAM sequence: TTT
caagaataaaattttaaagc

SEQ ID NO: 221711 - DNA, 20 bp, Artificial Sequence
  Description of Artificial Sequence: Synthetic oligonucleotide
  Target: LAMA2; (-) strand; PAM type: YTN; PAM sequence: CTC
aagatacatatgaggaaaac

SEQ ID NO: 221712 - DNA, 20 bp, Artificial Sequence
  Description of Artificial Sequence: Synthetic oligonucleotide
  Target: LAMA2; (-) strand; PAM type: YTN; PAM sequence: CTA
aaatctcaagatacatatga

SEQ ID NO: 221713 - DNA, 20 bp, Artificial Sequence
  Description of Artificial Sequence: Synthetic oligonucleotide
  Target: LAMA2; (-) strand; PAM type: YTN; PAM sequence: CTA
gactaaaatctcaagataca

SEQ ID NO: 221714 - DNA, 20 bp, Artificial Sequence
  Description of Artificial Sequence: Synthetic oligonucleotide
  Target: LAMA2; (-) strand; PAM type: YTN; PAM sequence: TTA
taaaacctagactaaaatct

SEQ ID NO: 221715 - DNA, 20 bp, Artificial Sequence
  Description of Artificial Sequence: Synthetic oligonucleotide
  Target: LAMA2; (-) strand; PAM type: YTN; PAM sequence: TTG
ttataaaacctagactaaaa

SEQ ID NO: 221716 - DNA, 20 bp, Artificial Sequence
  Description of Artificial Sequence: Synthetic oligonucleotide
  Target: LAMA2; (-) strand; PAM type: YTN; PAM sequence: CTT
gttataaaacctagactaaa

SEQ ID NO: 221717 - DNA, 20 bp, Artificial Sequence
  Description of Artificial Sequence: Synthetic oligonucleotide
  Target: LAMA2; (-) strand; PAM type: YTN; PAM sequence: CTA
tgcttgttataaaacctaga

SEQ ID NO: 221718 - DNA, 20 bp, Artificial Sequence
  Description of Artificial Sequence: Synthetic oligonucleotide
  Target: LAMA2; (-) strand; PAM type: YTN; PAM sequence: CTG
taaatatagctatgcttgtt

SEQ ID NO: 221719 - DNA, 20 bp, Artificial Sequence
  Description of Artificial Sequence: Synthetic oligonucleotide
  Target: LAMA2; (-) strand; PAM type: YTN; PAM sequence: TTA
tagaaaaaatatctgtaaat

SEQ ID NO: 221720 - DNA, 20 bp, Artificial Sequence
  Description of Artificial Sequence: Synthetic oligonucleotide
  Target: LAMA2; (-) strand; PAM type: YTN; PAM sequence: TTT
atagaaaaaatatctgtaaa

SEQ ID NO: 221721 - DNA, 20 bp, Artificial Sequence
  Description of Artificial Sequence: Synthetic oligonucleotide
  Target: LAMA2; (-) strand; PAM type: YTN; PAM sequence: CTT
tatagaaaaaatatctgtaa

SEQ ID NO: 221722 - DNA, 20 bp, Artificial Sequence
  Description of Artificial Sequence: Synthetic oligonucleotide
  Target: LAMA2; (-) strand; PAM type: YTN; PAM sequence: TTG
aaaactttatagaaaaaata

SEQ ID NO: 221723 - DNA, 20 bp, Artificial Sequence
  Description of Artificial Sequence: Synthetic oligonucleotide
  Target: LAMA2; (-) strand; PAM type: YTN; PAM sequence: CTA
tattgaaaactttatagaaa

SEQ ID NO: 221724 - DNA, 20 bp, Artificial Sequence
  Description of Artificial Sequence: Synthetic oligonucleotide
  Target: LAMA2; (-) strand; PAM type: YTN; PAM sequence: TTA
taagataaaaaaatcagaat

SEQ ID NO: 221725 - DNA, 20 bp, Artificial Sequence
  Description of Artificial Sequence: Synthetic oligonucleotide
  Target: LAMA2; (-) strand; PAM type: YTN; PAM sequence: TTT
ataagataaaaaaatcagaa

SEQ ID NO: 221726 - DNA, 20 bp, Artificial Sequence
  Description of Artificial Sequence: Synthetic oligonucleotide
  Target: LAMA2; (-) strand; PAM type: YTN; PAM sequence: TTT
tataagataaaaaaatcaga

SEQ ID NO: 221727 - DNA, 20 bp, Artificial Sequence
  Description of Artificial Sequence: Synthetic oligonucleotide
  Target: LAMA2; (-) strand; PAM type: YTN; PAM sequence: TTT
ttataagataaaaaaatcag

SEQ ID NO: 221728 - DNA, 20 bp, Artificial Sequence
  Description of Artificial Sequence: Synthetic oligonucleotide
  Target: LAMA2; (-) strand; PAM type: YTN; PAM sequence: TTT
tttataagataaaaaaatca

SEQ ID NO: 221729 - DNA, 20 bp, Artificial Sequence
  Description of Artificial Sequence: Synthetic oligonucleotide
  Target: LAMA2; (-) strand; PAM type: YTN; PAM sequence: CTA
ttttttataagataaaaaaa

SEQ ID NO: 221730 - DNA, 20 bp, Artificial Sequence
  Description of Artificial Sequence: Synthetic oligonucleotide
  Target: LAMA2; (-) strand; PAM type: YTN; PAM sequence: TTA
actattttttataagataaa

SEQ ID NO: 221731 - DNA, 20 bp, Artificial Sequence
  Description of Artificial Sequence: Synthetic oligonucleotide
  Target: LAMA2; (-) strand; PAM type: YTN; PAM sequence: TTA
atggtgttaactatttttta

SEQ ID NO: 221732 - DNA, 20 bp, Artificial Sequence
  Description of Artificial Sequence: Synthetic oligonucleotide
  Target: LAMA2; (-) strand; PAM type: YTN; PAM sequence: CTA
gacagaaataaatccaaacg

SEQ ID NO: 221733 - DNA, 20 bp, Artificial Sequence
  Description of Artificial Sequence: Synthetic oligonucleotide
  Target: LAMA2; (-) strand; PAM type: YTN; PAM sequence: TTG
tgtgtacacgtgtgtgtgtg

SEQ ID NO: 221734 - DNA, 20 bp, Artificial Sequence
  Description of Artificial Sequence: Synthetic oligonucleotide
  Target: LAMA2; (-) strand; PAM type: YTN; PAM sequence: TTT
gtgtgtacacgtgtgtgtgt

SEQ ID NO: 221735 - DNA, 20 bp, Artificial Sequence
  Description of Artificial Sequence: Synthetic oligonucleotide
  Target: LAMA2; (-) strand; PAM type: YTN; PAM sequence: TTA
tatatatgtatttgtgtgta

SEQ ID NO: 221736 - DNA, 20 bp, Artificial Sequence
  Description of Artificial Sequence: Synthetic oligonucleotide
  Target: LAMA2; (-) strand; PAM type: YTN; PAM sequence: TTT
atatatatgtatttgtgtgt

SEQ ID NO: 221737 - DNA, 20 bp, Artificial Sequence
  Description of Artificial Sequence: Synthetic oligonucleotide
  Target: LAMA2; (-) strand; PAM type: YTN; PAM sequence: TTT
tatatatatgtatttgtgtg

SEQ ID NO: 221738 - DNA, 20 bp, Artificial Sequence
  Description of Artificial Sequence: Synthetic oligonucleotide
  Target: LAMA2; (-) strand; PAM type: YTN; PAM sequence: CTG
cccattttatatatatgtat

SEQ ID NO: 221739 - DNA, 20 bp, Artificial Sequence
  Description of Artificial Sequence: Synthetic oligonucleotide
  Target: LAMA2; (-) strand; PAM type: YTN; PAM sequence: TTA
gtgtgctgcccattttatat

SEQ ID NO: 221740 - DNA, 20 bp, Artificial Sequence
  Description of Artificial Sequence: Synthetic oligonucleotide
  Target: LAMA2; (-) strand; PAM type: YTN; PAM sequence: TTA
ttagtgtgctgcccatttta

SEQ ID NO: 221741 - DNA, 20 bp, Artificial Sequence
  Description of Artificial Sequence: Synthetic oligonucleotide
  Target: LAMA2; (-) strand; PAM type: YTN; PAM sequence: TTT
attagtgtgctgcccatttt

SEQ ID NO: 221742 - DNA, 20 bp, Artificial Sequence
  Description of Artificial Sequence: Synthetic oligonucleotide
  Target: LAMA2; (-) strand; PAM type: YTN; PAM sequence: CTT
tattagtgtgctgcccattt

SEQ ID NO: 221743 - DNA, 20 bp, Artificial Sequence
  Description of Artificial Sequence: Synthetic oligonucleotide
  Target: LAMA2; (-) strand; PAM type: YTN; PAM sequence: TTA
tctttattagtgtgctgccc

SEQ ID NO: 221744 - DNA, 20 bp, Artificial Sequence
  Description of Artificial Sequence: Synthetic oligonucleotide
  Target: LAMA2; (-) strand; PAM type: YTN; PAM sequence: TTT
atctttattagtgtgctgcc

SEQ ID NO: 221745 - DNA, 20 bp, Artificial Sequence
  Description of Artificial Sequence: Synthetic oligonucleotide
  Target: LAMA2; (-) strand; PAM type: YTN; PAM sequence: TTT
tatctttattagtgtgctgc

SEQ ID NO: 221746 - DNA, 20 bp, Artificial Sequence
  Description of Artificial Sequence: Synthetic oligonucleotide
  Target: LAMA2; (-) strand; PAM type: YTN; PAM sequence: TTT
ttatctttattagtgtgctg

SEQ ID NO: 221747 - DNA, 20 bp, Artificial Sequence
  Description of Artificial Sequence: Synthetic oligonucleotide
  Target: LAMA2; (-) strand; PAM type: YTN; PAM sequence: TTA
tttttatctttattagtgtg

SEQ ID NO: 221748 - DNA, 20 bp, Artificial Sequence
  Description of Artificial Sequence: Synthetic oligonucleotide
  Target: LAMA2; (-) strand; PAM type: YTN; PAM sequence: TTT
atttttatctttattagtgt

SEQ ID NO: 221749 - DNA, 20 bp, Artificial Sequence
  Description of Artificial Sequence: Synthetic oligonucleotide
  Target: LAMA2; (-) strand; PAM type: YTN; PAM sequence: TTA
taaagtttatttttatcttt

SEQ ID NO: 221750 - DNA, 20 bp, Artificial Sequence
  Description of Artificial Sequence: Synthetic oligonucleotide
  Target: LAMA2; (-) strand; PAM type: YTN; PAM sequence: TTT
ataaagtttatttttatctt

SEQ ID NO: 221751 - DNA, 20 bp, Artificial Sequence
  Description of Artificial Sequence: Synthetic oligonucleotide
  Target: LAMA2; (-) strand; PAM type: YTN; PAM sequence: CTT
tataaagtttatttttatct

SEQ ID NO: 221752 - DNA, 20 bp, Artificial Sequence
  Description of Artificial Sequence: Synthetic oligonucleotide
  Target: LAMA2; (-) strand; PAM type: YTN; PAM sequence: TTA
caaaatgtaaaactttataa

SEQ ID NO: 221753 - DNA, 20 bp, Artificial Sequence
  Description of Artificial Sequence: Synthetic oligonucleotide
  Target: LAMA2; (-) strand; PAM type: YTN; PAM sequence: TTC
acaatataatatccagttac

SEQ ID NO: 221754 - DNA, 20 bp, Artificial Sequence
  Description of Artificial Sequence: Synthetic oligonucleotide
  Target: LAMA2; (-) strand; PAM type: YTN; PAM sequence: TTA
catggggatgttcacaatat

SEQ ID NO: 221755 - DNA, 20 bp, Artificial Sequence
  Description of Artificial Sequence: Synthetic oligonucleotide
  Target: LAMA2; (-) strand; PAM type: YTN; PAM sequence: CTA
cacagttacatggggatgtt

SEQ ID NO: 221756 - DNA, 20 bp, Artificial Sequence
  Description of Artificial Sequence: Synthetic oligonucleotide
  Target: LAMA2; (-) strand; PAM type: YTN; PAM sequence: TTC
aaatactacacagttacatg

SEQ ID NO: 221757 - DNA, 20 bp, Artificial Sequence
  Description of Artificial Sequence: Synthetic oligonucleotide
  Target: LAMA2; (-) strand; PAM type: YTN; PAM sequence: TTT
caaatactacacagttacat

SEQ ID NO: 221758 - DNA, 20 bp, Artificial Sequence
  Description of Artificial Sequence: Synthetic oligonucleotide
  Target: LAMA2; (-) strand; PAM type: YTN; PAM sequence: CTA
agtttcaaatactacacagt

SEQ ID NO: 221759 - DNA, 20 bp, Artificial Sequence
  Description of Artificial Sequence: Synthetic oligonucleotide
  Target: LAMA2; (-) strand; PAM type: YTN; PAM sequence: TTA
aataactaagtttcaaatac

SEQ ID NO: 221760 - DNA, 20 bp, Artificial Sequence
  Description of Artificial Sequence: Synthetic oligonucleotide
  Target: LAMA2; (-) strand; PAM type: YTN; PAM sequence: TTT
aaataactaagtttcaaata

SEQ ID NO: 221761 - DNA, 20 bp, Artificial Sequence
  Description of Artificial Sequence: Synthetic oligonucleotide
  Target: LAMA2; (-) strand; PAM type: YTN; PAM sequence: TTT
taaataactaagtttcaaat

SEQ ID NO: 221762 - DNA, 20 bp, Artificial Sequence
  Description of Artificial Sequence: Synthetic oligonucleotide
  Target: LAMA2; (-) strand; PAM type: YTN; PAM sequence: TTT
ttaaataactaagtttcaaa

SEQ ID NO: 221763 - DNA, 20 bp, Artificial Sequence
  Description of Artificial Sequence: Synthetic oligonucleotide
  Target: LAMA2; (-) strand; PAM type: YTN; PAM sequence: TTA
atttttaaataactaagttt

SEQ ID NO: 221764 - DNA, 20 bp, Artificial Sequence
  Description of Artificial Sequence: Synthetic oligonucleotide
  Target: LAMA2; (-) strand; PAM type: YTN; PAM sequence: TTT
aatttttaaataactaagtt

SEQ ID NO: 221765 - DNA, 20 bp, Artificial Sequence
  Description of Artificial Sequence: Synthetic oligonucleotide
  Target: LAMA2; (-) strand; PAM type: YTN; PAM sequence: TTG
caatttaatttttaaataac

SEQ ID NO: 221766 - DNA, 20 bp, Artificial Sequence
  Description of Artificial Sequence: Synthetic oligonucleotide
  Target: LAMA2; (-) strand; PAM type: YTN; PAM sequence: TTT
gcaatttaatttttaaataa

SEQ ID NO: 221767 - DNA, 20 bp, Artificial Sequence
  Description of Artificial Sequence: Synthetic oligonucleotide
  Target: LAMA2; (-) strand; PAM type: YTN; PAM sequence: CTA
taagatcatacatttgcaat

SEQ ID NO: 221768 - DNA, 20 bp, Artificial Sequence
  Description of Artificial Sequence: Synthetic oligonucleotide
  Target: LAMA2; (-) strand; PAM type: YTN; PAM sequence: TTG
gaagcaggaaaatagtctat

SEQ ID NO: 221769 - DNA, 20 bp, Artificial Sequence
  Description of Artificial Sequence: Synthetic oligonucleotide
  Target: LAMA2; (-) strand; PAM type: YTN; PAM sequence: CTT
ggaagcaggaaaatagtcta

SEQ ID NO: 221770 - DNA, 20 bp, Artificial Sequence
  Description of Artificial Sequence: Synthetic oligonucleotide
  Target: LAMA2; (-) strand; PAM type: YTN; PAM sequence: TTC
caaagaagtcttggaagcag

SEQ ID NO: 221771 - DNA, 20 bp, Artificial Sequence
  Description of Artificial Sequence: Synthetic oligonucleotide
  Target: LAMA2; (-) strand; PAM type: YTN; PAM sequence: TTC
agggagtccacagttccaaa

SEQ ID NO: 221772 - DNA, 20 bp, Artificial Sequence
  Description of Artificial Sequence: Synthetic oligonucleotide
  Target: LAMA2; (-) strand; PAM type: YTN; PAM sequence: TTT
cagggagtccacagttccaa

SEQ ID NO: 221773 - DNA, 20 bp, Artificial Sequence
  Description of Artificial Sequence: Synthetic oligonucleotide
  Target: LAMA2; (-) strand; PAM type: YTN; PAM sequence: CTG
gcatttcagggagtccacag

SEQ ID NO: 221774 - DNA, 20 bp, Artificial Sequence
  Description of Artificial Sequence: Synthetic oligonucleotide
  Target: LAMA2; (-) strand; PAM type: YTN; PAM sequence: TTA
ccctggcatttcagggagtc

SEQ ID NO: 221775 - DNA, 20 bp, Artificial Sequence
  Description of Artificial Sequence: Synthetic oligonucleotide
  Target: LAMA2; (-) strand; PAM type: YTN; PAM sequence: TTA
tgttaccctggcatttcagg

SEQ ID NO: 221776 - DNA, 20 bp, Artificial Sequence
  Description of Artificial Sequence: Synthetic oligonucleotide
  Target: LAMA2; (-) strand; PAM type: YTN; PAM sequence: CTT
atgttaccctggcatttcag

SEQ ID NO: 221777 - DNA, 20 bp, Artificial Sequence
  Description of Artificial Sequence: Synthetic oligonucleotide
  Target: LAMA2; (-) strand; PAM type: YTN; PAM sequence: CTC
gcttatgttaccctggcatt

SEQ ID NO: 221778 - DNA, 20 bp, Artificial Sequence
  Description of Artificial Sequence: Synthetic oligonucleotide
  Target: LAMA2; (-) strand; PAM type: YTN; PAM sequence: CTG
tctcgcttatgttaccctgg

SEQ ID NO: 221779 - DNA, 20 bp, Artificial Sequence
  Description of Artificial Sequence: Synthetic oligonucleotide
  Target: LAMA2; (-) strand; PAM type: YTN; PAM sequence: TTC
tgtctcgcttatgttaccct

SEQ ID NO: 221780 - DNA, 20 bp, Artificial Sequence
  Description of Artificial Sequence: Synthetic oligonucleotide
  Target: LAMA2; (-) strand; PAM type: YTN; PAM sequence: CTG
ttctgtctcgcttatgttac

SEQ ID NO: 221781 - DNA, 20 bp, Artificial Sequence
  Description of Artificial Sequence: Synthetic oligonucleotide
  Target: LAMA2; (-) strand; PAM type: YTN; PAM sequence: CTA
gctgttctgtctcgcttatg

SEQ ID NO: 221782 - DNA, 20 bp, Artificial Sequence
  Description of Artificial Sequence: Synthetic oligonucleotide
  Target: LAMA2; (-) strand; PAM type: YTN; PAM sequence: CTG
ctagctgttctgtctcgctt

SEQ ID NO: 221783 - DNA, 20 bp, Artificial Sequence
  Description of Artificial Sequence: Synthetic oligonucleotide
  Target: LAMA2; (-) strand; PAM type: YTN; PAM sequence: TTC
tgctagctgttctgtctcgc

SEQ ID NO: 221784 - DNA, 20 bp, Artificial Sequence
  Description of Artificial Sequence: Synthetic oligonucleotide
  Target: LAMA2; (-) strand; PAM type: YTN; PAM sequence: CTG
aggttctgctagctgttctg

SEQ ID NO: 221785 - DNA, 20 bp, Artificial Sequence
  Description of Artificial Sequence: Synthetic oligonucleotide
  Target: LAMA2; (-) strand; PAM type: YTN; PAM sequence: TTC
cctgaggttctgctagctgt

SEQ ID NO: 221786 - DNA, 20 bp, Artificial Sequence
  Description of Artificial Sequence: Synthetic oligonucleotide
  Target: LAMA2; (-) strand; PAM type: YTN; PAM sequence: CTG
acaccataaagtcagtggta

SEQ ID NO: 221787 - DNA, 20 bp, Artificial Sequence
  Description of Artificial Sequence: Synthetic oligonucleotide
  Target: LAMA2; (-) strand; PAM type: YTN; PAM sequence: CTG
gctgacaccataaagtcagt

SEQ ID NO: 221788 - DNA, 20 bp, Artificial Sequence
  Description of Artificial Sequence: Synthetic oligonucleotide
  Target: LAMA2; (-) strand; PAM type: YTN; PAM sequence: CTC
atgatactggctgacaccat

SEQ ID NO: 221789 - DNA, 20 bp, Artificial Sequence
  Description of Artificial Sequence: Synthetic oligonucleotide
  Target: LAMA2; (-) strand; PAM type: YTN; PAM sequence: CTC
tcatgatactggctgacacc

SEQ ID NO: 221790 - DNA, 20 bp, Artificial Sequence
  Description of Artificial Sequence: Synthetic oligonucleotide
  Target: LAMA2; (-) strand; PAM type: YTN; PAM sequence: TTG
tgggctctcatgatactggc

SEQ ID NO: 221791 - DNA, 20 bp, Artificial Sequence
  Description of Artificial Sequence: Synthetic oligonucleotide
  Target: LAMA2; (-) strand; PAM type: YTN; PAM sequence: TTG
aaaggcaacattgtgggctc

SEQ ID NO: 221792 - DNA, 20 bp, Artificial Sequence
  Description of Artificial Sequence: Synthetic oligonucleotide
  Target: LAMA2; (-) strand; PAM type: YTN; PAM sequence: TTT
gaaaggcaacattgtgggct

SEQ ID NO: 221793 - DNA, 20 bp, Artificial Sequence
  Description of Artificial Sequence: Synthetic oligonucleotide
  Target: LAMA2; (-) strand; PAM type: YTN; PAM sequence: TTG
gtttgaaaggcaacattgtg

SEQ ID NO: 221794 - DNA, 20 bp, Artificial Sequence
  Description of Artificial Sequence: Synthetic oligonucleotide
  Target: LAMA2; (-) strand; PAM type: YTN; PAM sequence: CTT
ggtttgaaaggcaacattgt

SEQ ID NO: 221795 - DNA, 20 bp, Artificial Sequence
  Description of Artificial Sequence: Synthetic oligonucleotide
  Target: LAMA2; (-) strand; PAM type: YTN; PAM sequence: TTG
atagaaatgtatcacttggt

SEQ ID NO: 221796 - DNA, 20 bp, Artificial Sequence
  Description of Artificial Sequence: Synthetic oligonucleotide
  Target: LAMA2; (-) strand; PAM type: YTN; PAM sequence: TTA
ttgatagaaatgtatcactt

SEQ ID NO: 221797 - DNA, 20 bp, Artificial Sequence
  Description of Artificial Sequence: Synthetic oligonucleotide
  Target: LAMA2; (-) strand; PAM type: YTN; PAM sequence: TTA
attattgatagaaatgtatc

SEQ ID NO: 221798 - DNA, 20 bp, Artificial Sequence
  Description of Artificial Sequence: Synthetic oligonucleotide
  Target: LAMA2; (-) strand; PAM type: YTN; PAM sequence: TTT
aattattgatagaaatgtat

SEQ ID NO: 221799 - DNA, 20 bp, Artificial Sequence
  Description of Artificial Sequence: Synthetic oligonucleotide
  Target: LAMA2; (-) strand; PAM type: YTN; PAM sequence: TTA
tttaattattgatagaaatg

SEQ ID NO: 221800 - DNA, 20 bp, Artificial Sequence
  Description of Artificial Sequence: Synthetic oligonucleotide
  Target: LAMA2; (-) strand; PAM type: YTN; PAM sequence: TTT
atttaattattgatagaaat

SEQ ID NO: 221801 - DNA, 20 bp, Artificial Sequence
  Description of Artificial Sequence: Synthetic oligonucleotide
  Target: LAMA2; (-) strand; PAM type: YTN; PAM sequence: TTC
aaatttatttaattattgat

SEQ ID NO: 221802 - DNA, 20 bp, Artificial Sequence
  Description of Artificial Sequence: Synthetic oligonucleotide
  Target: LAMA2; (-) strand; PAM type: YTN; PAM sequence: TTT
caaatttatttaattattga

SEQ ID NO: 221803 - DNA, 20 bp, Artificial Sequence
  Description of Artificial Sequence: Synthetic oligonucleotide
  Target: LAMA2; (-) strand; PAM type: YTN; PAM sequence: CTT
tcaaatttatttaattattg

SEQ ID NO: 221804 - DNA, 20 bp, Artificial Sequence
  Description of Artificial Sequence: Synthetic oligonucleotide
  Target: LAMA2; (-) strand; PAM type: YTN; PAM sequence: TTG
caaatgcaatggcagtgtac

SEQ ID NO: 221805 - DNA, 20 bp, Artificial Sequence
  Description of Artificial Sequence: Synthetic oligonucleotide
  Target: LAMA2; (-) strand; PAM type: YTN; PAM sequence: TTG
caatgaataaagaacaaaga

SEQ ID NO: 221806 - DNA, 20 bp, Artificial Sequence
  Description of Artificial Sequence: Synthetic oligonucleotide
  Target: LAMA2; (-) strand; PAM type: YTN; PAM sequence: TTA
ttgcaatgaataaagaacaa

SEQ ID NO: 221807 - DNA, 20 bp, Artificial Sequence
  Description of Artificial Sequence: Synthetic oligonucleotide
  Target: LAMA2; (-) strand; PAM type: YTN; PAM sequence: TTA
ttattgcaatgaataaagaa

SEQ ID NO: 221808 - DNA, 20 bp, Artificial Sequence
  Description of Artificial Sequence: Synthetic oligonucleotide
  Target: LAMA2; (-) strand; PAM type: YTN; PAM sequence: TTT
attattgcaatgaataaaga

SEQ ID NO: 221809 - DNA, 20 bp, Artificial Sequence
  Description of Artificial Sequence: Synthetic oligonucleotide
  Target: LAMA2; (-) strand; PAM type: YTN; PAM sequence: TTT
tattattgcaatgaataaag

SEQ ID NO: 221810 - DNA, 20 bp, Artificial Sequence
  Description of Artificial Sequence: Synthetic oligonucleotide
  Target: LAMA2; (-) strand; PAM type: YTN; PAM sequence: TTT
ttattattgcaatgaataaa

SEQ ID NO: 221811 - DNA, 20 bp, Artificial Sequence
  Description of Artificial Sequence: Synthetic oligonucleotide
  Target: LAMA2; (-) strand; PAM type: YTN; PAM sequence: TTG
tttttattattgcaatgaat

SEQ ID NO: 221812 - DNA, 20 bp, Artificial Sequence
  Description of Artificial Sequence: Synthetic oligonucleotide
  Target: LAMA2; (-) strand; PAM type: YTN; PAM sequence: TTT
gtttttattattgcaatgaa

SEQ ID NO: 221813 - DNA, 20 bp, Artificial Sequence
  Description of Artificial Sequence: Synthetic oligonucleotide
  Target: LAMA2; (-) strand; PAM type: YTN; PAM sequence: TTG
tttgtttttattattgcaat

SEQ ID NO: 221814 - DNA, 20 bp, Artificial Sequence
  Description of Artificial Sequence: Synthetic oligonucleotide
  Target: LAMA2; (-) strand; PAM type: YTN; PAM sequence: TTT
gtttgtttttattattgcaa

SEQ ID NO: 221815 - DNA, 20 bp, Artificial Sequence
  Description of Artificial Sequence: Synthetic oligonucleotide
  Target: LAMA2; (-) strand; PAM type: YTN; PAM sequence: TTG
tttgtttgtttttattattg

SEQ ID NO: 221816 - DNA, 20 bp, Artificial Sequence
  Description of Artificial Sequence: Synthetic oligonucleotide
  Target: LAMA2; (-) strand; PAM type: YTN; PAM sequence: TTT
gtttgtttgtttttattatt

SEQ ID NO: 221817 - DNA, 20 bp, Artificial Sequence
  Description of Artificial Sequence: Synthetic oligonucleotide
  Target: LAMA2; (-) strand; PAM type: YTN; PAM sequence: TTT
tgtttgtttgtttttattat

SEQ ID NO: 221818 - DNA, 20 bp, Artificial Sequence
  Description of Artificial Sequence: Synthetic oligonucleotide
  Target: LAMA2; (-) strand; PAM type: YTN; PAM sequence: TTT
ttgtttgtttgtttttatta

SEQ ID NO: 221819 - DNA, 20 bp, Artificial Sequence
  Description of Artificial Sequence: Synthetic oligonucleotide
  Target: LAMA2; (-) strand; PAM type: YTN; PAM sequence: TTT
tttgtttgtttgtttttatt

SEQ ID NO: 221820 - DNA, 20 bp, Artificial Sequence
  Description of Artificial Sequence: Synthetic oligonucleotide
  Target: LAMA2; (-) strand; PAM type: YTN; PAM sequence: TTG
ttttttgtttgtttgttttt

SEQ ID NO: 221821 - DNA, 20 bp, Artificial Sequence
  Description of Artificial Sequence: Synthetic oligonucleotide
  Target: LAMA2; (-) strand; PAM type: YTN; PAM sequence: TTG
gtgttgttttttgtttgttt

SEQ ID NO: 221822 - DNA, 20 bp, Artificial Sequence
  Description of Artificial Sequence: Synthetic oligonucleotide
  Target: LAMA2; (-) strand; PAM type: YTN; PAM sequence: TTT
ggtgttgttttttgtttgtt

SEQ ID NO: 221823 - DNA, 20 bp, Artificial Sequence
  Description of Artificial Sequence: Synthetic oligonucleotide
  Target: LAMA2; (-) strand; PAM type: YTN; PAM sequence: TTG
atttggtgttgttttttgtt

SEQ ID NO: 221824 - DNA, 20 bp, Artificial Sequence
  Description of Artificial Sequence: Synthetic oligonucleotide
  Target: LAMA2; (-) strand; PAM type: YTN; PAM sequence: TTT
gatttggtgttgttttttgt

SEQ ID NO: 221825 - DNA, 20 bp, Artificial Sequence
  Description of Artificial Sequence: Synthetic oligonucleotide
  Target: LAMA2; (-) strand; PAM type: YTN; PAM sequence: TTC
ccccatcaacagtcatttga

SEQ ID NO: 221826 - DNA, 20 bp, Artificial Sequence
  Description of Artificial Sequence: Synthetic oligonucleotide
  Target: LAMA2; (-) strand; PAM type: YTN; PAM sequence: TTA
taattcccccatcaacagtc

SEQ ID NO: 221827 - DNA, 20 bp, Artificial Sequence
  Description of Artificial Sequence: Synthetic oligonucleotide
  Target: LAMA2; (-) strand; PAM type: YTN; PAM sequence: CTT
ataattcccccatcaacagt

SEQ ID NO: 221828 - DNA, 20 bp, Artificial Sequence
  Description of Artificial Sequence: Synthetic oligonucleotide
  Target: LAMA2; (-) strand; PAM type: YTN; PAM sequence: TTC
ttataattcccccatcaaca

SEQ ID NO: 221829 - DNA, 20 bp, Artificial Sequence
  Description of Artificial Sequence: Synthetic oligonucleotide
  Target: LAMA2; (-) strand; PAM type: YTN; PAM sequence: CTA
ttcttataattcccccatca

SEQ ID NO: 221830 - DNA, 20 bp, Artificial Sequence
  Description of Artificial Sequence: Synthetic oligonucleotide
  Target: LAMA2; (-) strand; PAM type: YTN; PAM sequence: CTC
ccatctattcttataattcc

SEQ ID NO: 221831 - DNA, 20 bp, Artificial Sequence
  Description of Artificial Sequence: Synthetic oligonucleotide
  Target: LAMA2; (-) strand; PAM type: YTN; PAM sequence: TTC
actcccatctattcttataa

SEQ ID NO: 221832 - DNA, 20 bp, Artificial Sequence
  Description of Artificial Sequence: Synthetic oligonucleotide
  Target: LAMA2; (-) strand; PAM type: YTN; PAM sequence: CTT
cactcccatctattcttata

SEQ ID NO: 221833 - DNA, 20 bp, Artificial Sequence
  Description of Artificial Sequence: Synthetic oligonucleotide
  Target: LAMA2; (-) strand; PAM type: YTN; PAM sequence: TTG
ggtcttcactcccatctatt

SEQ ID NO: 221834 - DNA, 20 bp, Artificial Sequence
  Description of Artificial Sequence: Synthetic oligonucleotide
  Target: LAMA2; (-) strand; PAM type: YTN; PAM sequence: CTT
gggtcttcactcccatctat

SEQ ID NO: 221835 - DNA, 20 bp, Artificial Sequence
  Description of Artificial Sequence: Synthetic oligonucleotide
  Target: LAMA2; (-) strand; PAM type: YTN; PAM sequence: TTG
gaggtaaagtcagcttgggt

SEQ ID NO: 221836 - DNA, 20 bp, Artificial Sequence
  Description of Artificial Sequence: Synthetic oligonucleotide
  Target: LAMA2; (-) strand; PAM type: YTN; PAM sequence: TTG
agttggaggtaaagtcagct

SEQ ID NO: 221837 - DNA, 20 bp, Artificial Sequence
  Description of Artificial Sequence: Synthetic oligonucleotide
  Target: LAMA2; (-) strand; PAM type: YTN; PAM sequence: TTT
gagttggaggtaaagtcagc

SEQ ID NO: 221838 - DNA, 20 bp, Artificial Sequence
  Description of Artificial Sequence: Synthetic oligonucleotide
  Target: LAMA2; (-) strand; PAM type: YTN; PAM sequence: CTT
tgagttggaggtaaagtcag

SEQ ID NO: 221839 - DNA, 20 bp, Artificial Sequence
  Description of Artificial Sequence: Synthetic oligonucleotide
  Target: LAMA2; (-) strand; PAM type: YTN; PAM sequence: TTA
gtggacaaaaatctttgagt

SEQ ID NO: 221840 - DNA, 20 bp, Artificial Sequence
  Description of Artificial Sequence: Synthetic oligonucleotide
  Target: LAMA2; (-) strand; PAM type: YTN; PAM sequence: TTA
gattagtggacaaaaatctt

SEQ ID NO: 221841 - DNA, 20 bp, Artificial Sequence
  Description of Artificial Sequence: Synthetic oligonucleotide
  Target: LAMA2; (-) strand; PAM type: YTN; PAM sequence: TTA
acaaacacagagagaaagag

SEQ ID NO: 221842 - DNA, 20 bp, Artificial Sequence
  Description of Artificial Sequence: Synthetic oligonucleotide
  Target: LAMA2; (-) strand; PAM type: YTN; PAM sequence: TTT
aacaaacacagagagaaaga

SEQ ID NO: 221843 - DNA, 20 bp, Artificial Sequence
  Description of Artificial Sequence: Synthetic oligonucleotide
  Target: LAMA2; (-) strand; PAM type: YTN; PAM sequence: TTT
taacaaacacagagagaaag

SEQ ID NO: 221844 - DNA, 20 bp, Artificial Sequence
  Description of Artificial Sequence: Synthetic oligonucleotide
  Target: LAMA2; (-) strand; PAM type: YTN; PAM sequence: CTT
ttaacaaacacagagagaaa

SEQ ID NO: 221845 - DNA, 20 bp, Artificial Sequence
  Description of Artificial Sequence: Synthetic oligonucleotide
  Target: LAMA2; (-) strand; PAM type: YTN; PAM sequence: TTG
aaacttttaacaaacacaga

SEQ ID NO: 221846 - DNA, 20 bp, Artificial Sequence
  Description of Artificial Sequence: Synthetic oligonucleotide
  Target: LAMA2; (-) strand; PAM type: YTN; PAM sequence: TTT
gaaacttttaacaaacacag

SEQ ID NO: 221847 - DNA, 20 bp, Artificial Sequence
  Description of Artificial Sequence: Synthetic oligonucleotide
  Target: LAMA2; (-) strand; PAM type: YTN; PAM sequence: CTT
tgaaacttttaacaaacaca

SEQ ID NO: 221848 - DNA, 20 bp, Artificial Sequence
  Description of Artificial Sequence: Synthetic oligonucleotide
  Target: LAMA2; (-) strand; PAM type: YTN; PAM sequence: CTA
ctttgaaacttttaacaaac

SEQ ID NO: 221849 - DNA, 20 bp, Artificial Sequence
  Description of Artificial Sequence: Synthetic oligonucleotide
  Target: LAMA2; (-) strand; PAM type: YTN; PAM sequence: CTA
catctactttgaaactttta

SEQ ID NO: 221850 - DNA, 20 bp, Artificial Sequence
  Description of Artificial Sequence: Synthetic oligonucleotide
  Target: LAMA2; (-) strand; PAM type: YTN; PAM sequence: TTG
gcaagagaacctacatctac

SEQ ID NO: 221851 - DNA, 20 bp, Artificial Sequence
  Description of Artificial Sequence: Synthetic oligonucleotide
  Target: LAMA2; (-) strand; PAM type: YTN; PAM sequence: CTT
ggcaagagaacctacatcta

SEQ ID NO: 221852 - DNA, 20 bp, Artificial Sequence
  Description of Artificial Sequence: Synthetic oligonucleotide
  Target: LAMA2; (-) strand; PAM type: YTN; PAM sequence: TTG
aaaaggaaagaacacgagta

SEQ ID NO: 221853 - DNA, 20 bp, Artificial Sequence
  Description of Artificial Sequence: Synthetic oligonucleotide
  Target: LAMA2; (-) strand; PAM type: YTN; PAM sequence: CTT
gaaaaggaaagaacacgagt

SEQ ID NO: 221854 - DNA, 20 bp, Artificial Sequence
  Description of Artificial Sequence: Synthetic oligonucleotide
  Target: LAMA2; (-) strand; PAM type: YTN; PAM sequence: TTA
tgtaatcttgaaaaggaaag

SEQ ID NO: 221855 - DNA, 20 bp, Artificial Sequence
  Description of Artificial Sequence: Synthetic oligonucleotide
  Target: LAMA2; (-) strand; PAM type: YTN; PAM sequence: TTT
atgtaatcttgaaaaggaaa

SEQ ID NO: 221856 - DNA, 20 bp, Artificial Sequence
  Description of Artificial Sequence: Synthetic oligonucleotide
  Target: LAMA2; (-) strand; PAM type: YTN; PAM sequence: TTT
tatgtaatcttgaaaaggaa

SEQ ID NO: 221857 - DNA, 20 bp, Artificial Sequence
  Description of Artificial Sequence: Synthetic oligonucleotide
  Target: LAMA2; (-) strand; PAM type: YTN; PAM sequence: TTT
ttatgtaatcttgaaaagga

SEQ ID NO: 221858 - DNA, 20 bp, Artificial Sequence
  Description of Artificial Sequence: Synthetic oligonucleotide
  Target: LAMA2; (-) strand; PAM type: YTN; PAM sequence: CTT
tttatgtaatcttgaaaagg

SEQ ID NO: 221859 - DNA, 20 bp, Artificial Sequence
  Description of Artificial Sequence: Synthetic oligonucleotide
  Target: LAMA2; (-) strand; PAM type: YTN; PAM sequence: CTA
tactttttatgtaatcttga

SEQ ID NO: 221860 - DNA, 20 bp, Artificial Sequence
  Description of Artificial Sequence: Synthetic oligonucleotide
  Target: LAMA2; (-) strand; PAM type: YTN; PAM sequence: CTA
agctatactttttatgtaat

SEQ ID NO: 221861 - DNA, 20 bp, Artificial Sequence
  Description of Artificial Sequence: Synthetic oligonucleotide
  Target: LAMA2; (-) strand; PAM type: YTN; PAM sequence: TTG
gatctaagctatacttttta

SEQ ID NO: 221862 - DNA, 20 bp, Artificial Sequence
  Description of Artificial Sequence: Synthetic oligonucleotide
  Target: LAMA2; (-) strand; PAM type: YTN; PAM sequence: TTG
atacgttggatctaagctat

SEQ ID NO: 221863 - DNA, 20 bp, Artificial Sequence
  Description of Artificial Sequence: Synthetic oligonucleotide
  Target: LAMA2; (-) strand; PAM type: YTN; PAM sequence: TTC
caggttgatacgttggatct

SEQ ID NO: 221864 - DNA, 20 bp, Artificial Sequence
  Description of Artificial Sequence: Synthetic oligonucleotide
  Target: LAMA2; (-) strand; PAM type: YTN; PAM sequence: CTA
ttccaggttgatacgttgga

SEQ ID NO: 221865 - DNA, 20 bp, Artificial Sequence
  Description of Artificial Sequence: Synthetic oligonucleotide
  Target: LAMA2; (-) strand; PAM type: YTN; PAM sequence: TTC
acctattccaggttgatacg

SEQ ID NO: 221866 - DNA, 20 bp, Artificial Sequence
  Description of Artificial Sequence: Synthetic oligonucleotide
  Target: LAMA2; (-) strand; PAM type: YTN; PAM sequence: TTT
cacctattccaggttgatac

SEQ ID NO: 221867 - DNA, 20 bp, Artificial Sequence
  Description of Artificial Sequence: Synthetic oligonucleotide
  Target: LAMA2; (-) strand; PAM type: YTN; PAM sequence: TTT
tcacctattccaggttgata

SEQ ID NO: 221868 - DNA, 20 bp, Artificial Sequence
  Description of Artificial Sequence: Synthetic oligonucleotide
  Target: LAMA2; (-) strand; PAM type: YTN; PAM sequence: TTA
taatcaatagtgatattttc

SEQ ID NO: 221869 - DNA, 20 bp, Artificial Sequence
  Description of Artificial Sequence: Synthetic oligonucleotide
  Target: LAMA2; (-) strand; PAM type: YTN; PAM sequence: CTA
gttataatcaatagtgatat

SEQ ID NO: 221870 - DNA, 20 bp, Artificial Sequence
  Description of Artificial Sequence: Synthetic oligonucleotide
  Target: LAMA2; (-) strand; PAM type: YTN; PAM sequence: TTA
aatactagttataatcaata

SEQ ID NO: 221871 - DNA, 20 bp, Artificial Sequence
  Description of Artificial Sequence: Synthetic oligonucleotide
  Target: LAMA2; (-) strand; PAM type: YTN; PAM sequence: CTC
gttaaatactagttataatc

SEQ ID NO: 221872 - DNA, 20 bp, Artificial Sequence
  Description of Artificial Sequence: Synthetic oligonucleotide
  Target: LAMA2; (-) strand; PAM type: YTN; PAM sequence: TTA
agcctcgttaaatactagtt

SEQ ID NO: 221873 - DNA, 20 bp, Artificial Sequence
  Description of Artificial Sequence: Synthetic oligonucleotide
  Target: LAMA2; (-) strand; PAM type: YTN; PAM sequence: TTG
gtccatattaagcctcgtta

SEQ ID NO: 221874 - DNA, 20 bp, Artificial Sequence
  Description of Artificial Sequence: Synthetic oligonucleotide
  Target: LAMA2; (-) strand; PAM type: YTN; PAM sequence: TTT
ggtccatattaagcctcgtt

SEQ ID NO: 221875 - DNA, 20 bp, Artificial Sequence
  Description of Artificial Sequence: Synthetic oligonucleotide
  Target: LAMA2; (-) strand; PAM type: YTN; PAM sequence: CTA
gatcagtgtttggtccatat

SEQ ID NO: 221876 - DNA, 20 bp, Artificial Sequence
  Description of Artificial Sequence: Synthetic oligonucleotide
  Target: LAMA2; (-) strand; PAM type: YTN; PAM sequence: TTA
caaaacataatacatgtgaa

SEQ ID NO: 221877 - DNA, 20 bp, Artificial Sequence
  Description of Artificial Sequence: Synthetic oligonucleotide
  Target: LAMA2; (-) strand; PAM type: YTN; PAM sequence: TTG
tgaggattacaaaacataat

SEQ ID NO: 221878 - DNA, 20 bp, Artificial Sequence
  Description of Artificial Sequence: Synthetic oligonucleotide
  Target: LAMA2; (-) strand; PAM type: YTN; PAM sequence: TTC
ataaagttgtgaggattaca

SEQ ID NO: 221879 - DNA, 20 bp, Artificial Sequence
  Description of Artificial Sequence: Synthetic oligonucleotide
  Target: LAMA2; (-) strand; PAM type: YTN; PAM sequence: CTT
cataaagttgtgaggattac

SEQ ID NO: 221880 - DNA, 20 bp, Artificial Sequence
  Description of Artificial Sequence: Synthetic oligonucleotide
  Target: LAMA2; (-) strand; PAM type: YTN; PAM sequence: TTC
cttcataaagttgtgaggat

SEQ ID NO: 221881 - DNA, 20 bp, Artificial Sequence
  Description of Artificial Sequence: Synthetic oligonucleotide
  Target: LAMA2; (-) strand; PAM type: YTN; PAM sequence: CTT
ccttcataaagttgtgagga

SEQ ID NO: 221882 - DNA, 20 bp, Artificial Sequence
  Description of Artificial Sequence: Synthetic oligonucleotide
  Target: LAMA2; (-) strand; PAM type: YTN; PAM sequence: CTC
acacatatacttccttcata

SEQ ID NO: 221883 - DNA, 20 bp, Artificial Sequence
  Description of Artificial Sequence: Synthetic oligonucleotide
  Target: LAMA2; (-) strand; PAM type: YTN; PAM sequence: TTC
tcacacatatacttccttca

SEQ ID NO: 221884 - DNA, 20 bp, Artificial Sequence
  Description of Artificial Sequence: Synthetic oligonucleotide
  Target: LAMA2; (-) strand; PAM type: YTN; PAM sequence: TTT
ctcacacatatacttccttc

SEQ ID NO: 221885 - DNA, 20 bp, Artificial Sequence
  Description of Artificial Sequence: Synthetic oligonucleotide
  Target: LAMA2; (-) strand; PAM type: YTN; PAM sequence: TTT
tctcacacatatacttcctt

SEQ ID NO: 221886 - DNA, 20 bp, Artificial Sequence
  Description of Artificial Sequence: Synthetic oligonucleotide
  Target: LAMA2; (-) strand; PAM type: YTN; PAM sequence: CTT
ttctcacacatatacttcct

SEQ ID NO: 221887 - DNA, 20 bp, Artificial Sequence
  Description of Artificial Sequence: Synthetic oligonucleotide
  Target: LAMA2; (-) strand; PAM type: YTN; PAM sequence: CTA
atcgtgtgtatcttttctca

SEQ ID NO: 221888 - DNA, 20 bp, Artificial Sequence
  Description of Artificial Sequence: Synthetic oligonucleotide
  Target: LAMA2; (-) strand; PAM type: YTN; PAM sequence: CTC
aaaatctaatcgtgtgtatc

SEQ ID NO: 221889 - DNA, 20 bp, Artificial Sequence
  Description of Artificial Sequence: Synthetic oligonucleotide
  Target: LAMA2; (-) strand; PAM type: YTN; PAM sequence: CTC
tcaaaatctaatcgtgtgta

SEQ ID NO: 221890 - DNA, 20 bp, Artificial Sequence
  Description of Artificial Sequence: Synthetic oligonucleotide
  Target: LAMA2; (-) strand; PAM type: YTN; PAM sequence: CTG
gctctcaaaatctaatcgtg

SEQ ID NO: 221891 - DNA, 20 bp, Artificial Sequence
  Description of Artificial Sequence: Synthetic oligonucleotide
  Target: LAMA2; (-) strand; PAM type: YTN; PAM sequence: TTG
cactggctctcaaaatctaa

SEQ ID NO: 221892 - DNA, 20 bp, Artificial Sequence
  Description of Artificial Sequence: Synthetic oligonucleotide
  Target: LAMA2; (-) strand; PAM type: YTN; PAM sequence: TTT
gcactggctctcaaaatcta

SEQ ID NO: 221893 - DNA, 20 bp, Artificial Sequence
  Description of Artificial Sequence: Synthetic oligonucleotide
  Target: LAMA2; (-) strand; PAM type: YTN; PAM sequence: CTG
cggtgcagtttgcactggct

SEQ ID NO: 221894 - DNA, 20 bp, Artificial Sequence
  Description of Artificial Sequence: Synthetic oligonucleotide
  Target: LAMA2; (-) strand; PAM type: YTN; PAM sequence: TTG
aacaggcaatacacctgcgg

SEQ ID NO: 221895 - DNA, 20 bp, Artificial Sequence
  Description of Artificial Sequence: Synthetic oligonucleotide
  Target: LAMA2; (-) strand; PAM type: YTN; PAM sequence: TTT
gaacaggcaatacacctgcg

SEQ ID NO: 221896 - DNA, 20 bp, Artificial Sequence
  Description of Artificial Sequence: Synthetic oligonucleotide
  Target: LAMA2; (-) strand; PAM type: YTN; PAM sequence: TTA
atatagagtggtaaagaaaa

SEQ ID NO: 221897 - DNA, 20 bp, Artificial Sequence
  Description of Artificial Sequence: Synthetic oligonucleotide
  Target: LAMA2; (-) strand; PAM type: YTN; PAM sequence: TTA
ggtgttaatatagagtggta

SEQ ID NO: 221898 - DNA, 20 bp, Artificial Sequence
  Description of Artificial Sequence: Synthetic oligonucleotide
  Target: LAMA2; (-) strand; PAM type: YTN; PAM sequence: CTT
aggtgttaatatagagtggt

SEQ ID NO: 221899 - DNA, 20 bp, Artificial Sequence
  Description of Artificial Sequence: Synthetic oligonucleotide
  Target: LAMA2; (-) strand; PAM type: YTN; PAM sequence: TTA
acttaggtgttaatatagag

SEQ ID NO: 221900 - DNA, 20 bp, Artificial Sequence
  Description of Artificial Sequence: Synthetic oligonucleotide
  Target: LAMA2; (-) strand; PAM type: YTN; PAM sequence: TTT
aacttaggtgttaatataga

SEQ ID NO: 221901 - DNA, 20 bp, Artificial Sequence
  Description of Artificial Sequence: Synthetic oligonucleotide
  Target: LAMA2; (-) strand; PAM type: YTN; PAM sequence: CTT
taacttaggtgttaatatag

SEQ ID NO: 221902 - DNA, 20 bp, Artificial Sequence
  Description of Artificial Sequence: Synthetic oligonucleotide
  Target: LAMA2; (-) strand; PAM type: YTN; PAM sequence: TTG
tgccggcctttaacttaggt

SEQ ID NO: 221903 - DNA, 20 bp, Artificial Sequence
  Description of Artificial Sequence: Synthetic oligonucleotide
  Target: LAMA2; (-) strand; PAM type: YTN; PAM sequence: TTA
ttgtgccggcctttaactta

SEQ ID NO: 221904 - DNA, 20 bp, Artificial Sequence
  Description of Artificial Sequence: Synthetic oligonucleotide
  Target: LAMA2; (-) strand; PAM type: YTN; PAM sequence: CTT
attgtgccggcctttaactt

SEQ ID NO: 221905 - DNA, 20 bp, Artificial Sequence
  Description of Artificial Sequence: Synthetic oligonucleotide
  Target: LAMA2; (-) strand; PAM type: YTN; PAM sequence: TTG
cttattgtgccggcctttaa

SEQ ID NO: 221906 - DNA, 20 bp, Artificial Sequence
  Description of Artificial Sequence: Synthetic oligonucleotide
  Target: LAMA2; (-) strand; PAM type: YTN; PAM sequence: TTA
tcaagcaacacattgcttat

SEQ ID NO: 221907 - DNA, 20 bp, Artificial Sequence
  Description of Artificial Sequence: Synthetic oligonucleotide
  Target: LAMA2; (-) strand; PAM type: YTN; PAM sequence: TTA
caaatattatcaagcaacac

SEQ ID NO: 221908 - DNA, 20 bp, Artificial Sequence
  Description of Artificial Sequence: Synthetic oligonucleotide
  Target: LAMA2; (-) strand; PAM type: YTN; PAM sequence: TTT
acaaatattatcaagcaaca

SEQ ID NO: 221909 - DNA, 20 bp, Artificial Sequence
  Description of Artificial Sequence: Synthetic oligonucleotide
  Target: LAMA2; (-) strand; PAM type: YTN; PAM sequence: TTT
tacaaatattatcaagcaac

SEQ ID NO: 221910 - DNA, 20 bp, Artificial Sequence
  Description of Artificial Sequence: Synthetic oligonucleotide
  Target: LAMA2; (-) strand; PAM type: YTN; PAM sequence: TTG
ttttacaaatattatcaagc

SEQ ID NO: 221911 - DNA, 20 bp, Artificial Sequence
  Description of Artificial Sequence: Synthetic oligonucleotide
  Target: LAMA2; (-) strand; PAM type: YTN; PAM sequence: TTT
gttttacaaatattatcaag

SEQ ID NO: 221912 - DNA, 20 bp, Artificial Sequence
  Description of Artificial Sequence: Synthetic oligonucleotide
  Target: LAMA2; (-) strand; PAM type: YTN; PAM sequence: CTA
atccatttgttttacaaata

SEQ ID NO: 221913 - DNA, 20 bp, Artificial Sequence
  Description of Artificial Sequence: Synthetic oligonucleotide
  Target: LAMA2; (-) strand; PAM type: YTN; PAM sequence: TTC
actaatccatttgttttaca

SEQ ID NO: 221914 - DNA, 20 bp, Artificial Sequence
  Description of Artificial Sequence: Synthetic oligonucleotide
  Target: LAMA2; (-) strand; PAM type: YTN; PAM sequence: TTG
ttcactaatccatttgtttt

SEQ ID NO: 221915 - DNA, 20 bp, Artificial Sequence
  Description of Artificial Sequence: Synthetic oligonucleotide
  Target: LAMA2; (-) strand; PAM type: YTN; PAM sequence: CTT
gttcactaatccatttgttt

SEQ ID NO: 221916 - DNA, 20 bp, Artificial Sequence
  Description of Artificial Sequence: Synthetic oligonucleotide
  Target: LAMA2; (-) strand; PAM type: YTN; PAM sequence: TTA
acttgttcactaatccattt

SEQ ID NO: 221917 - DNA, 20 bp, Artificial Sequence
  Description of Artificial Sequence: Synthetic oligonucleotide
  Target: LAMA2; (-) strand; PAM type: YTN; PAM sequence: TTA
aagaccacagagtgacatat

SEQ ID NO: 221918 - DNA, 20 bp, Artificial Sequence
  Description of Artificial Sequence: Synthetic oligonucleotide
  Target: LAMA2; (-) strand; PAM type: YTN; PAM sequence: TTT
aaagaccacagagtgacata

SEQ ID NO: 221919 - DNA, 20 bp, Artificial Sequence
  Description of Artificial Sequence: Synthetic oligonucleotide
  Target: LAMA2; (-) strand; PAM type: YTN; PAM sequence: TTT
taaagaccacagagtgacat

SEQ ID NO: 221920 - DNA, 20 bp, Artificial Sequence
  Description of Artificial Sequence: Synthetic oligonucleotide
  Target: LAMA2; (-) strand; PAM type: YTN; PAM sequence: TTC
catatatattttaaagacca

SEQ ID NO: 221921 - DNA, 20 bp, Artificial Sequence
  Description of Artificial Sequence: Synthetic oligonucleotide
  Target: LAMA2; (-) strand; PAM type: YTN; PAM sequence: TTT
ccatatatattttaaagacc

SEQ ID NO: 221922 - DNA, 20 bp, Artificial Sequence
  Description of Artificial Sequence: Synthetic oligonucleotide
  Target: LAMA2; (-) strand; PAM type: YTN; PAM sequence: CTG
catttccatatatattttaa

SEQ ID NO: 221923 - DNA, 20 bp, Artificial Sequence
  Description of Artificial Sequence: Synthetic oligonucleotide
  Target: LAMA2; (-) strand; PAM type: YTN; PAM sequence: TTC
tgcatttccatatatatttt

SEQ ID NO: 221924 - DNA, 20 bp, Artificial Sequence
  Description of Artificial Sequence: Synthetic oligonucleotide
  Target: LAMA2; (-) strand; PAM type: YTN; PAM sequence: TTA
atattctgcatttccatata

SEQ ID NO: 221925 - DNA, 20 bp, Artificial Sequence
  Description of Artificial Sequence: Synthetic oligonucleotide
  Target: LAMA2; (-) strand; PAM type: YTN; PAM sequence: TTT
aatattctgcatttccatat

SEQ ID NO: 221926 - DNA, 20 bp, Artificial Sequence
  Description of Artificial Sequence: Synthetic oligonucleotide
  Target: LAMA2; (-) strand; PAM type: YTN; PAM sequence: TTT
taatattctgcatttccata

SEQ ID NO: 221927 - DNA, 20 bp, Artificial Sequence
  Description of Artificial Sequence: Synthetic oligonucleotide
  Target: LAMA2; (-) strand; PAM type: YTN; PAM sequence: TTG
cagattttaatattctgcat

SEQ ID NO: 221928 - DNA, 20 bp, Artificial Sequence
  Description of Artificial Sequence: Synthetic oligonucleotide
  Target: LAMA2; (-) strand; PAM type: YTN; PAM sequence: TTC
aaaatatgtattgcagattt

SEQ ID NO: 221929 - DNA, 20 bp, Artificial Sequence
  Description of Artificial Sequence: Synthetic oligonucleotide
  Target: LAMA2; (-) strand; PAM type: YTN; PAM sequence: TTT
caaaatatgtattgcagatt

SEQ ID NO: 221930 - DNA, 20 bp, Artificial Sequence
  Description of Artificial Sequence: Synthetic oligonucleotide
  Target: LAMA2; (-) strand; PAM type: YTN; PAM sequence: TTT
tcaaaatatgtattgcagat

SEQ ID NO: 221931 - DNA, 20 bp, Artificial Sequence
  Description of Artificial Sequence: Synthetic oligonucleotide
  Target: LAMA2; (-) strand; PAM type: YTN; PAM sequence: TTT
ttcaaaatatgtattgcaga

SEQ ID NO: 221932 - DNA, 20 bp, Artificial Sequence
  Description of Artificial Sequence: Synthetic oligonucleotide
  Target: LAMA2; (-) strand; PAM type: YTN; PAM sequence: TTG
tttttcaaaatatgtattgc

SEQ ID NO: 221933 - DNA, 20 bp, Artificial Sequence
  Description of Artificial Sequence: Synthetic oligonucleotide
  Target: LAMA2; (-) strand; PAM type: YTN; PAM sequence: TTT
gtttttcaaaatatgtattg

SEQ ID NO: 221934 - DNA, 20 bp, Artificial Sequence
  Description of Artificial Sequence: Synthetic oligonucleotide
  Target: LAMA2; (-) strand; PAM type: YTN; PAM sequence: CTT
tgtttttcaaaatatgtatt

SEQ ID NO: 221935 - DNA, 20 bp, Artificial Sequence
  Description of Artificial Sequence: Synthetic oligonucleotide
  Target: LAMA2; (-) strand; PAM type: YTN; PAM sequence: CTC
acctttgtttttcaaaatat

SEQ ID NO: 221936 - DNA, 20 bp, Artificial Sequence
  Description of Artificial Sequence: Synthetic oligonucleotide
  Target: LAMA2; (-) strand; PAM type: YTN; PAM sequence: CTC
tcacctttgtttttcaaaat

SEQ ID NO: 221937 - DNA, 20 bp, Artificial Sequence
  Description of Artificial Sequence: Synthetic oligonucleotide
  Target: LAMA2; (-) strand; PAM type: YTN; PAM sequence: TTA
ctctcacctttgtttttcaa

SEQ ID NO: 221938 - DNA, 20 bp, Artificial Sequence
  Description of Artificial Sequence: Synthetic oligonucleotide
  Target: LAMA2; (-) strand; PAM type: YTN; PAM sequence: CTA
gcattactctcacctttgtt

SEQ ID NO: 221939 - DNA, 20 bp, Artificial Sequence
  Description of Artificial Sequence: Synthetic oligonucleotide
  Target: LAMA2; (-) strand; PAM type: YTN; PAM sequence: TTG
gctagcattactctcacctt

SEQ ID NO: 221940 - DNA, 20 bp, Artificial Sequence
  Description of Artificial Sequence: Synthetic oligonucleotide
  Target: LAMA2; (-) strand; PAM type: YTN; PAM sequence: TTT
ggctagcattactctcacct

SEQ ID NO: 221941 - DNA, 20 bp, Artificial Sequence
  Description of Artificial Sequence: Synthetic oligonucleotide
  Target: LAMA2; (-) strand; PAM type: YTN; PAM sequence: CTT
tggctagcattactctcacc

SEQ ID NO: 221942 - DNA, 20 bp, Artificial Sequence
  Description of Artificial Sequence: Synthetic oligonucleotide
  Target: LAMA2; (-) strand; PAM type: YTN; PAM sequence: CTG
ctttggctagcattactctc

SEQ ID NO: 221943 - DNA, 20 bp, Artificial Sequence
  Description of Artificial Sequence: Synthetic oligonucleotide
  Target: LAMA2; (-) strand; PAM type: YTN; PAM sequence: CTG
cagtcaaacctgctttggct

SEQ ID NO: 221944 - DNA, 20 bp, Artificial Sequence
  Description of Artificial Sequence: Synthetic oligonucleotide
  Target: LAMA2; (-) strand; PAM type: YTN; PAM sequence: TTG
tgcctgcagtcaaacctgct

SEQ ID NO: 221945 - DNA, 20 bp, Artificial Sequence
  Description of Artificial Sequence: Synthetic oligonucleotide
  Target: LAMA2; (-) strand; PAM type: YTN; PAM sequence: TTA
agaagagtgggaaggacagt

SEQ ID NO: 221946 - DNA, 20 bp, Artificial Sequence
  Description of Artificial Sequence: Synthetic oligonucleotide
  Target: LAMA2; (-) strand; PAM type: YTN; PAM sequence: TTC
aattaagaagagtgggaagg

SEQ ID NO: 221947 - DNA, 20 bp, Artificial Sequence
  Description of Artificial Sequence: Synthetic oligonucleotide
  Target: LAMA2; (-) strand; PAM type: YTN; PAM sequence: CTT
caattaagaagagtgggaag

SEQ ID NO: 221948 - DNA, 20 bp, Artificial Sequence
  Description of Artificial Sequence: Synthetic oligonucleotide
  Target: LAMA2; (-) strand; PAM type: YTN; PAM sequence: CTC
ttcaattaagaagagtggga

SEQ ID NO: 221949 - DNA, 20 bp, Artificial Sequence
  Description of Artificial Sequence: Synthetic oligonucleotide
  Target: LAMA2; (-) strand; PAM type: YTN; PAM sequence: TTG
aggtgactcttcaattaaga

SEQ ID NO: 221950 - DNA, 20 bp, Artificial Sequence
  Description of Artificial Sequence: Synthetic oligonucleotide
  Target: LAMA2; (-) strand; PAM type: YTN; PAM sequence: TTC
aaatggggattgaggtgact

SEQ ID NO: 221951 - DNA, 20 bp, Artificial Sequence
  Description of Artificial Sequence: Synthetic oligonucleotide
  Target: LAMA2; (-) strand; PAM type: YTN; PAM sequence: TTG
aaaagagaacattcaaatgg

SEQ ID NO: 221952 - DNA, 20 bp, Artificial Sequence
  Description of Artificial Sequence: Synthetic oligonucleotide
  Target: LAMA2; (-) strand; PAM type: YTN; PAM sequence: TTA
ggaggttgaaaagagaacat

SEQ ID NO: 221953 - DNA, 20 bp, Artificial Sequence
  Description of Artificial Sequence: Synthetic oligonucleotide
  Target: LAMA2; (-) strand; PAM type: YTN; PAM sequence: TTT
aggaggttgaaaagagaaca

SEQ ID NO: 221954 - DNA, 20 bp, Artificial Sequence
  Description of Artificial Sequence: Synthetic oligonucleotide
  Target: LAMA2; (-) strand; PAM type: YTN; PAM sequence: TTT
taggaggttgaaaagagaac

SEQ ID NO: 221955 - DNA, 20 bp, Artificial Sequence
  Description of Artificial Sequence: Synthetic oligonucleotide
  Target: LAMA2; (-) strand; PAM type: YTN; PAM sequence: TTT
ttaggaggttgaaaagagaa

SEQ ID NO: 221956 - DNA, 20 bp, Artificial Sequence
  Description of Artificial Sequence: Synthetic oligonucleotide
  Target: LAMA2; (-) strand; PAM type: YTN; PAM sequence: CTT
tttaggaggttgaaaagaga

SEQ ID NO: 221957 - DNA, 20 bp, Artificial Sequence
  Description of Artificial Sequence: Synthetic oligonucleotide
  Target: LAMA2; (-) strand; PAM type: YTN; PAM sequence: CTC
agtaatctttttaggaggtt

SEQ ID NO: 221958 - DNA, 20 bp, Artificial Sequence
  Description of Artificial Sequence: Synthetic oligonucleotide
  Target: LAMA2; (-) strand; PAM type: YTN; PAM sequence: TTC
tcagtaatctttttaggagg

SEQ ID NO: 221959 - DNA, 20 bp, Artificial Sequence
  Description of Artificial Sequence: Synthetic oligonucleotide
  Target: LAMA2; (-) strand; PAM type: YTN; PAM sequence: CTA
cattctcagtaatcttttta

SEQ ID NO: 221960 - DNA, 20 bp, Artificial Sequence
  Description of Artificial Sequence: Synthetic oligonucleotide
  Target: LAMA2; (-) strand; PAM type: YTN; PAM sequence: TTA
aatatctacattctcagtaa

SEQ ID NO: 221961 - DNA, 20 bp, Artificial Sequence
  Description of Artificial Sequence: Synthetic oligonucleotide
  Target: LAMA2; (-) strand; PAM type: YTN; PAM sequence: TTT
aaatatctacattctcagta

SEQ ID NO: 221962 - DNA, 20 bp, Artificial Sequence
  Description of Artificial Sequence: Synthetic oligonucleotide
  Target: LAMA2; (-) strand; PAM type: YTN; PAM sequence: TTA
aagatgaacagaatacattt

SEQ ID NO: 221963 - DNA, 20 bp, Artificial Sequence
  Description of Artificial Sequence: Synthetic oligonucleotide
  Target: LAMA2; (-) strand; PAM type: YTN; PAM sequence: TTT
aaagatgaacagaatacatt

SEQ ID NO: 221964 - DNA, 20 bp, Artificial Sequence
  Description of Artificial Sequence: Synthetic oligonucleotide
  Target: LAMA2; (-) strand; PAM type: YTN; PAM sequence: TTA
tttaaagatgaacagaatac

SEQ ID NO: 221965 - DNA, 20 bp, Artificial Sequence
  Description of Artificial Sequence: Synthetic oligonucleotide
  Target: LAMA2; (-) strand; PAM type: YTN; PAM sequence: TTA
aacataaatgaaattattta

SEQ ID NO: 221966 - DNA, 20 bp, Artificial Sequence
  Description of Artificial Sequence: Synthetic oligonucleotide
  Target: LAMA2; (-) strand; PAM type: YTN; PAM sequence: CTT
aaacataaatgaaattattt

SEQ ID NO: 221967 - DNA, 20 bp, Artificial Sequence
  Description of Artificial Sequence: Synthetic oligonucleotide
  Target: LAMA2; (-) strand; PAM type: YTN; PAM sequence: TTG
cagcttaaacataaatgaaa

SEQ ID NO: 221968 - DNA, 20 bp, Artificial Sequence
  Description of Artificial Sequence: Synthetic oligonucleotide
  Target: LAMA2; (-) strand; PAM type: YTN; PAM sequence: TTT
gcagcttaaacataaatgaa

SEQ ID NO: 221969 - DNA, 20 bp, Artificial Sequence
  Description of Artificial Sequence: Synthetic oligonucleotide
  Target: LAMA2; (-) strand; PAM type: YTN; PAM sequence: TTT
tgcagcttaaacataaatga

SEQ ID NO: 221970 - DNA, 20 bp, Artificial Sequence
  Description of Artificial Sequence: Synthetic oligonucleotide
  Target: LAMA2; (-) strand; PAM type: YTN; PAM sequence: TTT
ttgcagcttaaacataaatg

SEQ ID NO: 221971 - DNA, 20 bp, Artificial Sequence
  Description of Artificial Sequence: Synthetic oligonucleotide
  Target: LAMA2; (-) strand; PAM type: YTN; PAM sequence: TTC
agatcaatttttgcagctta

SEQ ID NO: 221972 - DNA, 20 bp, Artificial Sequence
  Description of Artificial Sequence: Synthetic oligonucleotide
  Target: LAMA2; (-) strand; PAM type: YTN; PAM sequence: CTT
cagatcaatttttgcagctt

SEQ ID NO: 221973 - DNA, 20 bp, Artificial Sequence
  Description of Artificial Sequence: Synthetic oligonucleotide
  Target: LAMA2; (-) strand; PAM type: YTN; PAM sequence: CTA
acttcagatcaatttttgca

SEQ ID NO: 221974 - DNA, 20 bp, Artificial Sequence
  Description of Artificial Sequence: Synthetic oligonucleotide
  Target: LAMA2; (-) strand; PAM type: YTN; PAM sequence: TTA
aagtacacaatataccagac

SEQ ID NO: 221975 - DNA, 20 bp, Artificial Sequence
  Description of Artificial Sequence: Synthetic oligonucleotide
  Target: LAMA2; (-) strand; PAM type: YTN; PAM sequence: CTT
aaagtacacaatataccaga

SEQ ID NO: 221976 - DNA, 20 bp, Artificial Sequence
  Description of Artificial Sequence: Synthetic oligonucleotide
  Target: LAMA2; (-) strand; PAM type: YTN; PAM sequence: TTA
gaaatgtatcacatgcttaa

SEQ ID NO: 221977 - DNA, 20 bp, Artificial Sequence
  Description of Artificial Sequence: Synthetic oligonucleotide
  Target: LAMA2; (-) strand; PAM type: YTN; PAM sequence: TTT
agaaatgtatcacatgctta

SEQ ID NO: 221978 - DNA, 20 bp, Artificial Sequence
  Description of Artificial Sequence: Synthetic oligonucleotide
  Target: LAMA2; (-) strand; PAM type: YTN; PAM sequence: TTT
tagaaatgtatcacatgctt

SEQ ID NO: 221979 - DNA, 20 bp, Artificial Sequence
  Description of Artificial Sequence: Synthetic oligonucleotide
  Target: LAMA2; (-) strand; PAM type: YTN; PAM sequence: TTG
acatgaacaacattttagaa

SEQ ID NO: 221980 - DNA, 20 bp, Artificial Sequence
  Description of Artificial Sequence: Synthetic oligonucleotide
  Target: LAMA2; (-) strand; PAM type: YTN; PAM sequence: CTT
gacatgaacaacattttaga

SEQ ID NO: 221981 - DNA, 20 bp, Artificial Sequence
  Description of Artificial Sequence: Synthetic oligonucleotide
  Target: LAMA2; (-) strand; PAM type: YTN; PAM sequence: TTC
ttgacatgaacaacatttta

SEQ ID NO: 221982 - DNA, 20 bp, Artificial Sequence
  Description of Artificial Sequence: Synthetic oligonucleotide
  Target: LAMA2; (-) strand; PAM type: YTN; PAM sequence: TTG
tagatattcttgacatgaac

SEQ ID NO: 221983 - DNA, 20 bp, Artificial Sequence
  Description of Artificial Sequence: Synthetic oligonucleotide
  Target: LAMA2; (-) strand; PAM type: YTN; PAM sequence: TTG
aattgtagatattcttgaca

SEQ ID NO: 221984 - DNA, 20 bp, Artificial Sequence
  Description of Artificial Sequence: Synthetic oligonucleotide
  Target: LAMA2; (-) strand; PAM type: YTN; PAM sequence: TTT
gaattgtagatattcttgac

SEQ ID NO: 221985 - DNA, 20 bp, Artificial Sequence
  Description of Artificial Sequence: Synthetic oligonucleotide
  Target: LAMA2; (-) strand; PAM type: YTN; PAM sequence: TTA
gaatacaagccaaaagaagg

SEQ ID NO: 221986 - DNA, 20 bp, Artificial Sequence
  Description of Artificial Sequence: Synthetic oligonucleotide
  Target: LAMA2; (-) strand; PAM type: YTN; PAM sequence: TTC
aaaattagaatacaagccaa

SEQ ID NO: 221987 - DNA, 20 bp, Artificial Sequence
  Description of Artificial Sequence: Synthetic oligonucleotide
  Target: LAMA2; (-) strand; PAM type: YTN; PAM sequence: CTT
caaaattagaatacaagcca

SEQ ID NO: 221988 - DNA, 20 bp, Artificial Sequence
  Description of Artificial Sequence: Synthetic oligonucleotide
  Target: LAMA2; (-) strand; PAM type: YTN; PAM sequence: CTA
ggtcagaaacttcaaaatta

SEQ ID NO: 221989 - DNA, 20 bp, Artificial Sequence
  Description of Artificial Sequence: Synthetic oligonucleotide
  Target: LAMA2; (-) strand; PAM type: YTN; PAM sequence: TTG
tgtctaggtcagaaacttca

SEQ ID NO: 221990 - DNA, 20 bp, Artificial Sequence
  Description of Artificial Sequence: Synthetic oligonucleotide
  Target: LAMA2; (-) strand; PAM type: YTN; PAM sequence: TTT
gtgtctaggtcagaaacttc

SEQ ID NO: 221991 - DNA, 20 bp, Artificial Sequence
  Description of Artificial Sequence: Synthetic oligonucleotide
  Target: LAMA2; (-) strand; PAM type: YTN; PAM sequence: TTT
tgtgtctaggtcagaaactt

SEQ ID NO: 221992 - DNA, 20 bp, Artificial Sequence
  Description of Artificial Sequence: Synthetic oligonucleotide
  Target: LAMA2; (-) strand; PAM type: YTN; PAM sequence: TTT
ttgtgtctaggtcagaaact

SEQ ID NO: 221993 - DNA, 20 bp, Artificial Sequence
  Description of Artificial Sequence: Synthetic oligonucleotide
  Target: LAMA2; (-) strand; PAM type: YTN; PAM sequence: TTA
atcatttttgtgtctaggtc

SEQ ID NO: 221994 - DNA, 20 bp, Artificial Sequence
  Description of Artificial Sequence: Synthetic oligonucleotide
  Target: LAMA2; (-) strand; PAM type: YTN; PAM sequence: TTC
agttaatcatttttgtgtct

SEQ ID NO: 221995 - DNA, 20 bp, Artificial Sequence
  Description of Artificial Sequence: Synthetic oligonucleotide
  Target: LAMA2; (-) strand; PAM type: YTN; PAM sequence: CTT
cagttaatcatttttgtgtc

SEQ ID NO: 221996 - DNA, 20 bp, Artificial Sequence
  Description of Artificial Sequence: Synthetic oligonucleotide
  Target: LAMA2; (-) strand; PAM type: YTN; PAM sequence: TTC
ttcagttaatcatttttgtg

SEQ ID NO: 221997 - DNA, 20 bp, Artificial Sequence
  Description of Artificial Sequence: Synthetic oligonucleotide
  Target: LAMA2; (-) strand; PAM type: YTN; PAM sequence: TTA
aaattcttcagttaatcatt

SEQ ID NO: 221998 - DNA, 20 bp, Artificial Sequence
  Description of Artificial Sequence: Synthetic oligonucleotide
  Target: LAMA2; (-) strand; PAM type: YTN; PAM sequence: CTA
ttaaaattcttcagttaatc

SEQ ID NO: 221999 - DNA, 20 bp, Artificial Sequence
  Description of Artificial Sequence: Synthetic oligonucleotide
  Target: LAMA2; (-) strand; PAM type: YTN; PAM sequence: CTG
atagaagtgaagaacaacag

SEQ ID NO: 222000 - DNA, 20 bp, Artificial Sequence
  Description of Artificial Sequence: Synthetic oligonucleotide
  Target: LAMA2; (-) strand; PAM type: YTN; PAM sequence: CTA
tcaaatatcatcactgatag

SEQ ID NO: 222001 - DNA, 20 bp, Artificial Sequence
  Description of Artificial Sequence: Synthetic oligonucleotide
  Target: LAMA2; (-) strand; PAM type: YTN; PAM sequence: TTA
cactatcaaatatcatcact

SEQ ID NO: 222002 - DNA, 20 bp, Artificial Sequence
  Description of Artificial Sequence: Synthetic oligonucleotide
  Target: LAMA2; (-) strand; PAM type: YTN; PAM sequence: CTC
agcatattacactatcaaat

SEQ ID NO: 222003 - DNA, 20 bp, Artificial Sequence
  Description of Artificial Sequence: Synthetic oligonucleotide
  Target: LAMA2; (-) strand; PAM type: YTN; PAM sequence: CTG
ctcagcatattacactatca

SEQ ID NO: 222004 - DNA, 20 bp, Artificial Sequence
  Description of Artificial Sequence: Synthetic oligonucleotide
  Target: LAMA2; (-) strand; PAM type: YTN; PAM sequence: TTG
cctgctcagcatattacact

SEQ ID NO: 222005 - DNA, 20 bp, Artificial Sequence
  Description of Artificial Sequence: Synthetic oligonucleotide
  Target: LAMA2; (-) strand; PAM type: YTN; PAM sequence: TTT
gcctgctcagcatattacac

SEQ ID NO: 222006 - DNA, 20 bp, Artificial Sequence
  Description of Artificial Sequence: Synthetic oligonucleotide
  Target: LAMA2; (-) strand; PAM type: YTN; PAM sequence: TTG
tttgcctgctcagcatatta

SEQ ID NO: 222007 - DNA, 20 bp, Artificial Sequence
  Description of Artificial Sequence: Synthetic oligonucleotide
  Target: LAMA2; (-) strand; PAM type: YTN; PAM sequence: TTC
attgtttgcctgctcagcat

SEQ ID NO: 222008 - DNA, 20 bp, Artificial Sequence
  Description of Artificial Sequence: Synthetic oligonucleotide
  Target: LAMA2; (-) strand; PAM type: YTN; PAM sequence: TTT
cattgtttgcctgctcagca

SEQ ID NO: 222009 - DNA, 20 bp, Artificial Sequence
  Description of Artificial Sequence: Synthetic oligonucleotide
  Target: LAMA2; (-) strand; PAM type: YTN; PAM sequence: TTT
tcattgtttgcctgctcagc

SEQ ID NO: 222010 - DNA, 20 bp, Artificial Sequence
  Description of Artificial Sequence: Synthetic oligonucleotide
  Target: LAMA2; (-) strand; PAM type: YTN; PAM sequence: TTT
ttcattgtttgcctgctcag

SEQ ID NO: 222011 - DNA, 20 bp, Artificial Sequence
  Description of Artificial Sequence: Synthetic oligonucleotide
  Target: LAMA2; (-) strand; PAM type: YTN; PAM sequence: CTT
tttcattgtttgcctgctca

SEQ ID NO: 222012 - DNA, 20 bp, Artificial Sequence
  Description of Artificial Sequence: Synthetic oligonucleotide
  Target: LAMA2; (-) strand; PAM type: YTN; PAM sequence: TTG
catggaggggactttttcat

SEQ ID NO: 222013 - DNA, 20 bp, Artificial Sequence
  Description of Artificial Sequence: Synthetic oligonucleotide
  Target: LAMA2; (-) strand; PAM type: YTN; PAM sequence: TTT
gcatggaggggactttttca

SEQ ID NO: 222014 - DNA, 20 bp, Artificial Sequence
  Description of Artificial Sequence: Synthetic oligonucleotide
  Target: LAMA2; (-) strand; PAM type: YTN; PAM sequence: TTT
tgcatggaggggactttttc

SEQ ID NO: 222015 - DNA, 20 bp, Artificial Sequence
  Description of Artificial Sequence: Synthetic oligonucleotide
  Target: LAMA2; (-) strand; PAM type: YTN; PAM sequence: TTA
catacattttgcatggaggg

SEQ ID NO: 222016 - DNA, 20 bp, Artificial Sequence
  Description of Artificial Sequence: Synthetic oligonucleotide
  Target: LAMA2; (-) strand; PAM type: YTN; PAM sequence: TTT
acatacattttgcatggagg

SEQ ID NO: 222017 - DNA, 20 bp, Artificial Sequence
  Description of Artificial Sequence: Synthetic oligonucleotide
  Target: LAMA2; (-) strand; PAM type: YTN; PAM sequence: TTT
tacatacattttgcatggag

SEQ ID NO: 222018 - DNA, 20 bp, Artificial Sequence
  Description of Artificial Sequence: Synthetic oligonucleotide
  Target: LAMA2; (-) strand; PAM type: YTN; PAM sequence: CTG
attttacatacattttgcat

SEQ ID NO: 222019 - DNA, 20 bp, Artificial Sequence
  Description of Artificial Sequence: Synthetic oligonucleotide
  Target: LAMA2; (-) strand; PAM type: YTN; PAM sequence: TTG
aaagctgattttacatacat

SEQ ID NO: 222020 - DNA, 20 bp, Artificial Sequence
  Description of Artificial Sequence: Synthetic oligonucleotide
  Target: LAMA2; (-) strand; PAM type: YTN; PAM sequence: TTA
ttgaaagctgattttacata

SEQ ID NO: 222021 - DNA, 20 bp, Artificial Sequence
  Description of Artificial Sequence: Synthetic oligonucleotide
  Target: LAMA2; (-) strand; PAM type: YTN; PAM sequence: CTT
attgaaagctgattttacat

SEQ ID NO: 222022 - DNA, 20 bp, Artificial Sequence
  Description of Artificial Sequence: Synthetic oligonucleotide
  Target: LAMA2; (-) strand; PAM type: YTN; PAM sequence: TTC
acttattgaaagctgatttt

SEQ ID NO: 222023 - DNA, 20 bp, Artificial Sequence
  Description of Artificial Sequence: Synthetic oligonucleotide
  Target: LAMA2; (-) strand; PAM type: YTN; PAM sequence: CTG
ttcacttattgaaagctgat

SEQ ID NO: 222024 - DNA, 20 bp, Artificial Sequence
  Description of Artificial Sequence: Synthetic oligonucleotide
  Target: LAMA2; (-) strand; PAM type: YTN; PAM sequence: CTG
caaatggtgaaaaggaacag

SEQ ID NO: 222025 - DNA, 20 bp, Artificial Sequence
  Description of Artificial Sequence: Synthetic oligonucleotide
  Target: LAMA2; (-) strand; PAM type: YTN; PAM sequence: CTA
agaatggtactgcaaatggt

SEQ ID NO: 222026 - DNA, 20 bp, Artificial Sequence
  Description of Artificial Sequence: Synthetic oligonucleotide
  Target: LAMA2; (-) strand; PAM type: YTN; PAM sequence: CTG
cagtgagtctaagaatggta

SEQ ID NO: 222027 - DNA, 20 bp, Artificial Sequence
  Description of Artificial Sequence: Synthetic oligonucleotide
  Target: LAMA2; (-) strand; PAM type: YTN; PAM sequence: TTA
tgcctgcagtgagtctaaga

SEQ ID NO: 222028 - DNA, 20 bp, Artificial Sequence
  Description of Artificial Sequence: Synthetic oligonucleotide
  Target: LAMA2; (-) strand; PAM type: YTN; PAM sequence: TTT
atgcctgcagtgagtctaag

SEQ ID NO: 222029 - DNA, 20 bp, Artificial Sequence
  Description of Artificial Sequence: Synthetic oligonucleotide
  Target: LAMA2; (-) strand; PAM type: YTN; PAM sequence: TTA
tcccagggtttatgcctgca

SEQ ID NO: 222030 - DNA, 20 bp, Artificial Sequence
  Description of Artificial Sequence: Synthetic oligonucleotide
  Target: LAMA2; (-) strand; PAM type: YTN; PAM sequence: CTT
atcccagggtttatgcctgc

SEQ ID NO: 222031 - DNA, 20 bp, Artificial Sequence
  Description of Artificial Sequence: Synthetic oligonucleotide
  Target: LAMA2; (-) strand; PAM type: YTN; PAM sequence: TTC
cttatcccagggtttatgcc

SEQ ID NO: 222032 - DNA, 20 bp, Artificial Sequence
  Description of Artificial Sequence: Synthetic oligonucleotide
  Target: LAMA2; (-) strand; PAM type: YTN; PAM sequence: TTT
ccttatcccagggtttatgc

SEQ ID NO: 222033 - DNA, 20 bp, Artificial Sequence
  Description of Artificial Sequence: Synthetic oligonucleotide
  Target: LAMA2; (-) strand; PAM type: YTN; PAM sequence: TTT
tccttatcccagggtttatg

SEQ ID NO: 222034 - DNA, 20 bp, Artificial Sequence
  Description of Artificial Sequence: Synthetic oligonucleotide
  Target: LAMA2; (-) strand; PAM type: YTN; PAM sequence: CTT
ttccttatcccagggtttat

SEQ ID NO: 222035 - DNA, 20 bp, Artificial Sequence
  Description of Artificial Sequence: Synthetic oligonucleotide
  Target: LAMA2; (-) strand; PAM type: YTN; PAM sequence: TTA
acttttccttatcccagggt

SEQ ID NO: 222036 - DNA, 20 bp, Artificial Sequence
  Description of Artificial Sequence: Synthetic oligonucleotide
  Target: LAMA2; (-) strand; PAM type: YTN; PAM sequence: CTT
aacttttccttatcccaggg

SEQ ID NO: 222037 - DNA, 20 bp, Artificial Sequence
  Description of Artificial Sequence: Synthetic oligonucleotide
  Target: LAMA2; (-) strand; PAM type: YTN; PAM sequence: TTA
gaggtatgaagaatggaggc

SEQ ID NO: 222038 - DNA, 20 bp, Artificial Sequence
  Description of Artificial Sequence: Synthetic oligonucleotide
  Target: LAMA2; (-) strand; PAM type: YTN; PAM sequence: TTA
ttagaggtatgaagaatgga

SEQ ID NO: 222039 - DNA, 20 bp, Artificial Sequence
  Description of Artificial Sequence: Synthetic oligonucleotide
  Target: LAMA2; (-) strand; PAM type: YTN; PAM sequence: CTT
attagaggtatgaagaatgg

SEQ ID NO: 222040 - DNA, 20 bp, Artificial Sequence
  Description of Artificial Sequence: Synthetic oligonucleotide
  Target: LAMA2; (-) strand; PAM type: YTN; PAM sequence: TTG
gcaaagccttattagaggta

SEQ ID NO: 222041 - DNA, 20 bp, Artificial Sequence
  Description of Artificial Sequence: Synthetic oligonucleotide
  Target: LAMA2; (-) strand; PAM type: YTN; PAM sequence: TTG
cagccattggcaaagcctta

SEQ ID NO: 222042 - DNA, 20 bp, Artificial Sequence
  Description of Artificial Sequence: Synthetic oligonucleotide
  Target: LAMA2; (-) strand; PAM type: YTN; PAM sequence: TTG
taaaatgattgcagccattg

SEQ ID NO: 222043 - DNA, 20 bp, Artificial Sequence
  Description of Artificial Sequence: Synthetic oligonucleotide
  Target: LAMA2; (-) strand; PAM type: YTN; PAM sequence: CTA
aacataagtggatggttgta

SEQ ID NO: 222044 - DNA, 20 bp, Artificial Sequence
  Description of Artificial Sequence: Synthetic oligonucleotide
  Target: LAMA2; (-) strand; PAM type: YTN; PAM sequence: TTA
aacctaaacataagtggatg

SEQ ID NO: 222045 - DNA, 20 bp, Artificial Sequence
  Description of Artificial Sequence: Synthetic oligonucleotide
  Target: LAMA2; (-) strand; PAM type: YTN; PAM sequence: CTG
ttaaacctaaacataagtgg

SEQ ID NO: 222046 - DNA, 20 bp, Artificial Sequence
  Description of Artificial Sequence: Synthetic oligonucleotide
  Target: LAMA2; (-) strand; PAM type: YTN; PAM sequence: CTC
tgttaaacctaaacataagt

SEQ ID NO: 222047 - DNA, 20 bp, Artificial Sequence
  Description of Artificial Sequence: Synthetic oligonucleotide
  Target: LAMA2; (-) strand; PAM type: YTN; PAM sequence: TTA
tgaagccaagactctgttaa

SEQ ID NO: 222048 - DNA, 20 bp, Artificial Sequence
  Description of Artificial Sequence: Synthetic oligonucleotide
  Target: LAMA2; (-) strand; PAM type: YTN; PAM sequence: TTC
attatgaagccaagactctg

SEQ ID NO: 222049 - DNA, 20 bp, Artificial Sequence
  Description of Artificial Sequence: Synthetic oligonucleotide
  Target: LAMA2; (-) strand; PAM type: YTN; PAM sequence: TTT
cattatgaagccaagactct

SEQ ID NO: 222050 - DNA, 20 bp, Artificial Sequence
  Description of Artificial Sequence: Synthetic oligonucleotide
  Target: LAMA2; (-) strand; PAM type: YTN; PAM sequence: TTA
atgaagtatttcattatgaa

SEQ ID NO: 222051 - DNA, 20 bp, Artificial Sequence
  Description of Artificial Sequence: Synthetic oligonucleotide
  Target: LAMA2; (-) strand; PAM type: YTN; PAM sequence: TTT
aatgaagtatttcattatga

SEQ ID NO: 222052 - DNA, 20 bp, Artificial Sequence
  Description of Artificial Sequence: Synthetic oligonucleotide
  Target: LAMA2; (-) strand; PAM type: YTN; PAM sequence: CTT
taatgaagtatttcattatg

SEQ ID NO: 222053 - DNA, 20 bp, Artificial Sequence
  Description of Artificial Sequence: Synthetic oligonucleotide
  Target: LAMA2; (-) strand; PAM type: YTN; PAM sequence: CTA
tgaacatatgtgtaaacaga

SEQ ID NO: 222054 - DNA, 20 bp, Artificial Sequence
  Description of Artificial Sequence: Synthetic oligonucleotide
  Target: LAMA2; (-) strand; PAM type: YTN; PAM sequence: CTA
ctatgaacatatgtgtaaac

SEQ ID NO: 222055 - DNA, 20 bp, Artificial Sequence
  Description of Artificial Sequence: Synthetic oligonucleotide
  Target: LAMA2; (-) strand; PAM type: YTN; PAM sequence: TTC
tactatgaacatatgtgtaa

SEQ ID NO: 222056 - DNA, 20 bp, Artificial Sequence
  Description of Artificial Sequence: Synthetic oligonucleotide
  Target: LAMA2; (-) strand; PAM type: YTN; PAM sequence: CTG
gataacagaacaccatgtaa

SEQ ID NO: 222057 - DNA, 20 bp, Artificial Sequence
  Description of Artificial Sequence: Synthetic oligonucleotide
  Target: LAMA2; (-) strand; PAM type: YTN; PAM sequence: CTG
agtccatgtgaatggcaaag

SEQ ID NO: 222058 - DNA, 20 bp, Artificial Sequence
  Description of Artificial Sequence: Synthetic oligonucleotide
  Target: LAMA2; (-) strand; PAM type: YTN; PAM sequence: CTA
taaactgagtccatgtgaat

SEQ ID NO: 222059 - DNA, 20 bp, Artificial Sequence
  Description of Artificial Sequence: Synthetic oligonucleotide
  Target: LAMA2; (-) strand; PAM type: YTN; PAM sequence: TTC
agtagcataaccagacacta

SEQ ID NO: 222060 - DNA, 20 bp, Artificial Sequence
  Description of Artificial Sequence: Synthetic oligonucleotide
  Target: LAMA2; (-) strand; PAM type: YTN; PAM sequence: CTT
cagtagcataaccagacact

SEQ ID NO: 222061 - DNA, 20 bp, Artificial Sequence
  Description of Artificial Sequence: Synthetic oligonucleotide
  Target: LAMA2; (-) strand; PAM type: YTN; PAM sequence: TTA
acagcaaatggtaaagcagg

SEQ ID NO: 222062 - DNA, 20 bp, Artificial Sequence
  Description of Artificial Sequence: Synthetic oligonucleotide
  Target: LAMA2; (-) strand; PAM type: YTN; PAM sequence: CTT
aacagcaaatggtaaagcag

SEQ ID NO: 222063 - DNA, 20 bp, Artificial Sequence
  Description of Artificial Sequence: Synthetic oligonucleotide
  Target: LAMA2; (-) strand; PAM type: YTN; PAM sequence: TTA
cttaacagcaaatggtaaag

SEQ ID NO: 222064 - DNA, 20 bp, Artificial Sequence
  Description of Artificial Sequence: Synthetic oligonucleotide
  Target: LAMA2; (-) strand; PAM type: YTN; PAM sequence: CTA
caattacttaacagcaaatg

SEQ ID NO: 222065 - DNA, 20 bp, Artificial Sequence
  Description of Artificial Sequence: Synthetic oligonucleotide
  Target: LAMA2; (-) strand; PAM type: YTN; PAM sequence: CTG
actacaattacttaacagca

SEQ ID NO: 222066 - DNA, 20 bp, Artificial Sequence
  Description of Artificial Sequence: Synthetic oligonucleotide
  Target: LAMA2; (-) strand; PAM type: YTN; PAM sequence: CTG
tctgactacaattacttaac

SEQ ID NO: 222067 - DNA, 20 bp, Artificial Sequence
  Description of Artificial Sequence: Synthetic oligonucleotide
  Target: LAMA2; (-) strand; PAM type: YTN; PAM sequence: CTG
ggcagtctgtctgactacaa

SEQ ID NO: 222068 - DNA, 20 bp, Artificial Sequence
  Description of Artificial Sequence: Synthetic oligonucleotide
  Target: LAMA2; (-) strand; PAM type: YTN; PAM sequence: TTC
ctgggcagtctgtctgacta

SEQ ID NO: 222069 - DNA, 20 bp, Artificial Sequence
  Description of Artificial Sequence: Synthetic oligonucleotide
  Target: LAMA2; (-) strand; PAM type: YTN; PAM sequence: CTT
cctgggcagtctgtctgact

SEQ ID NO: 222070 - DNA, 20 bp, Artificial Sequence
  Description of Artificial Sequence: Synthetic oligonucleotide
  Target: LAMA2; (-) strand; PAM type: YTN; PAM sequence: CTG
agtccatggggcttcctggg

SEQ ID NO: 222071 - DNA, 20 bp, Artificial Sequence
  Description of Artificial Sequence: Synthetic oligonucleotide
  Target: LAMA2; (-) strand; PAM type: YTN; PAM sequence: TTG
tgatacccaagggataaaac

SEQ ID NO: 222072 - DNA, 20 bp, Artificial Sequence
  Description of Artificial Sequence: Synthetic oligonucleotide
  Target: LAMA2; (-) strand; PAM type: YTN; PAM sequence: TTT
gtgatacccaagggataaaa

SEQ ID NO: 222073 - DNA, 20 bp, Artificial Sequence
  Description of Artificial Sequence: Synthetic oligonucleotide
  Target: LAMA2; (-) strand; PAM type: YTN; PAM sequence: CTC
atttgtgatacccaagggat

SEQ ID NO: 222074 - DNA, 20 bp, Artificial Sequence
  Description of Artificial Sequence: Synthetic oligonucleotide
  Target: LAMA2; (-) strand; PAM type: YTN; PAM sequence: TTC
ctcatttgtgatacccaagg

SEQ ID NO: 222075 - DNA, 20 bp, Artificial Sequence
  Description of Artificial Sequence: Synthetic oligonucleotide
  Target: LAMA2; (-) strand; PAM type: YTN; PAM sequence: CTT
cctcatttgtgatacccaag

SEQ ID NO: 222076 - DNA, 20 bp, Artificial Sequence
  Description of Artificial Sequence: Synthetic oligonucleotide
  Target: LAMA2; (-) strand; PAM type: YTN; PAM sequence: CTC
ttcctcatttgtgataccca

SEQ ID NO: 222077 - DNA, 20 bp, Artificial Sequence
  Description of Artificial Sequence: Synthetic oligonucleotide
  Target: LAMA2; (-) strand; PAM type: YTN; PAM sequence: TTC
accaatatggaatcaaactc

SEQ ID NO: 222078 - DNA, 20 bp, Artificial Sequence
  Description of Artificial Sequence: Synthetic oligonucleotide
  Target: LAMA2; (-) strand; PAM type: YTN; PAM sequence: TTT
caccaatatggaatcaaact

SEQ ID NO: 222079 - DNA, 20 bp, Artificial Sequence
  Description of Artificial Sequence: Synthetic oligonucleotide
  Target: LAMA2; (-) strand; PAM type: YTN; PAM sequence: TTA
ggaaacagaagtagtatttc

SEQ ID NO: 222080 - DNA, 20 bp, Artificial Sequence
  Description of Artificial Sequence: Synthetic oligonucleotide
  Target: LAMA2; (-) strand; PAM type: YTN; PAM sequence: TTT
aggaaacagaagtagtattt

SEQ ID NO: 222081 - DNA, 20 bp, Artificial Sequence
  Description of Artificial Sequence: Synthetic oligonucleotide
  Target: LAMA2; (-) strand; PAM type: YTN; PAM sequence: CTT
taggaaacagaagtagtatt

SEQ ID NO: 222082 - DNA, 20 bp, Artificial Sequence
  Description of Artificial Sequence: Synthetic oligonucleotide
  Target: LAMA2; (-) strand; PAM type: YTN; PAM sequence: TTA
gaaaacaacatatctttagg

SEQ ID NO: 222083 - DNA, 20 bp, Artificial Sequence
  Description of Artificial Sequence: Synthetic oligonucleotide
  Target: LAMA2; (-) strand; PAM type: YTN; PAM sequence: CTT
agaaaacaacatatctttag

SEQ ID NO: 222084 - DNA, 20 bp, Artificial Sequence
  Description of Artificial Sequence: Synthetic oligonucleotide
  Target: LAMA2; (-) strand; PAM type: YTN; PAM sequence: CTA
gaagcaaatcttagaaaaca

SEQ ID NO: 222085 - DNA, 20 bp, Artificial Sequence
  Description of Artificial Sequence: Synthetic oligonucleotide
  Target: LAMA2; (-) strand; PAM type: YTN; PAM sequence: TTA
atcacaaaatctagaagcaa

SEQ ID NO: 222086 - DNA, 20 bp, Artificial Sequence
  Description of Artificial Sequence: Synthetic oligonucleotide
  Target: LAMA2; (-) strand; PAM type: YTN; PAM sequence: TTT
aatcacaaaatctagaagca

SEQ ID NO: 222087 - DNA, 20 bp, Artificial Sequence
  Description of Artificial Sequence: Synthetic oligonucleotide
  Target: LAMA2; (-) strand; PAM type: YTN; PAM sequence: CTG
tccaataaaacatttaatca

SEQ ID NO: 222088 - DNA, 20 bp, Artificial Sequence
  Description of Artificial Sequence: Synthetic oligonucleotide
  Target: LAMA2; (-) strand; PAM type: YTN; PAM sequence: TTA
aatccctgtccaataaaaca

SEQ ID NO: 222089 - DNA, 20 bp, Artificial Sequence
  Description of Artificial Sequence: Synthetic oligonucleotide
  Target: LAMA2; (-) strand; PAM type: YTN; PAM sequence: CTT
aaatccctgtccaataaaac

SEQ ID NO: 222090 - DNA, 20 bp, Artificial Sequence
  Description of Artificial Sequence: Synthetic oligonucleotide
  Target: LAMA2; (-) strand; PAM type: YTN; PAM sequence: TTC
ttaaatccctgtccaataaa

SEQ ID NO: 222091 - DNA, 20 bp, Artificial Sequence
  Description of Artificial Sequence: Synthetic oligonucleotide
  Target: LAMA2; (-) strand; PAM type: YTN; PAM sequence: CTG
attcttaaatccctgtccaa

SEQ ID NO: 222092 - DNA, 20 bp, Artificial Sequence
  Description of Artificial Sequence: Synthetic oligonucleotide
  Target: LAMA2; (-) strand; PAM type: YTN; PAM sequence: TTC
tgattcttaaatccctgtcc

SEQ ID NO: 222093 - DNA, 20 bp, Artificial Sequence
  Description of Artificial Sequence: Synthetic oligonucleotide
  Target: LAMA2; (-) strand; PAM type: YTN; PAM sequence: TTA
aagtaggacaaaatgtcatg

SEQ ID NO: 222094 - DNA, 20 bp, Artificial Sequence
  Description of Artificial Sequence: Synthetic oligonucleotide
  Target: LAMA2; (-) strand; PAM type: YTN; PAM sequence: TTT
aaagtaggacaaaatgtcat

SEQ ID NO: 222095 - DNA, 20 bp, Artificial Sequence
  Description of Artificial Sequence: Synthetic oligonucleotide
  Target: LAMA2; (-) strand; PAM type: YTN; PAM sequence: TTC
catttaaagtaggacaaaat

SEQ ID NO: 222096 - DNA, 20 bp, Artificial Sequence
  Description of Artificial Sequence: Synthetic oligonucleotide
  Target: LAMA2; (-) strand; PAM type: YTN; PAM sequence: TTT
ccatttaaagtaggacaaaa

SEQ ID NO: 222097 - DNA, 20 bp, Artificial Sequence
  Description of Artificial Sequence: Synthetic oligonucleotide
  Target: LAMA2; (-) strand; PAM type: YTN; PAM sequence: CTA
tagacatttccatttaaagt

SEQ ID NO: 222098 - DNA, 20 bp, Artificial Sequence
  Description of Artificial Sequence: Synthetic oligonucleotide
  Target: LAMA2; (-) strand; PAM type: YTN; PAM sequence: CTA
gaaaagtctatagacatttc

SEQ ID NO: 222099 - DNA, 20 bp, Artificial Sequence
  Description of Artificial Sequence: Synthetic oligonucleotide
  Target: LAMA2; (-) strand; PAM type: YTN; PAM sequence: TTC
actagaaaagtctatagaca

SEQ ID NO: 222100 - DNA, 20 bp, Artificial Sequence
  Description of Artificial Sequence: Synthetic oligonucleotide
  Target: LAMA2; (-) strand; PAM type: YTN; PAM sequence: CTT
cactagaaaagtctatagac

SEQ ID NO: 222101 - DNA, 20 bp, Artificial Sequence
  Description of Artificial Sequence: Synthetic oligonucleotide
  Target: LAMA2; (-) strand; PAM type: YTN; PAM sequence: TTG
taaaagccttcactagaaaa

SEQ ID NO: 222102 - DNA, 20 bp, Artificial Sequence
  Description of Artificial Sequence: Synthetic oligonucleotide
  Target: LAMA2; (-) strand; PAM type: YTN; PAM sequence: TTT
gtaaaagccttcactagaaa

SEQ ID NO: 222103 - DNA, 20 bp, Artificial Sequence
  Description of Artificial Sequence: Synthetic oligonucleotide
  Target: LAMA2; (-) strand; PAM type: YTN; PAM sequence: TTA
acatttgtaaaagccttcac

SEQ ID NO: 222104 - DNA, 20 bp, Artificial Sequence
  Description of Artificial Sequence: Synthetic oligonucleotide
  Target: LAMA2; (-) strand; PAM type: YTN; PAM sequence: CTT
aacatttgtaaaagccttca

SEQ ID NO: 222105 - DNA, 20 bp, Artificial Sequence
  Description of Artificial Sequence: Synthetic oligonucleotide
  Target: LAMA2; (-) strand; PAM type: YTN; PAM sequence: TTC
aatcatcccttaacatttgt

SEQ ID NO: 222106 - DNA, 20 bp, Artificial Sequence
  Description of Artificial Sequence: Synthetic oligonucleotide
  Target: LAMA2; (-) strand; PAM type: YTN; PAM sequence: CTG
tgagcattcaatcatccctt

SEQ ID NO: 222107 - DNA, 20 bp, Artificial Sequence
  Description of Artificial Sequence: Synthetic oligonucleotide
  Target: LAMA2; (-) strand; PAM type: YTN; PAM sequence: CTG
ctgtgagcattcaatcatcc

SEQ ID NO: 222108 - DNA, 20 bp, Artificial Sequence
  Description of Artificial Sequence: Synthetic oligonucleotide
  Target: LAMA2; (-) strand; PAM type: YTN; PAM sequence: CTG
taatgccatgtgtcctgctg

SEQ ID NO: 222109 - DNA, 20 bp, Artificial Sequence
  Description of Artificial Sequence: Synthetic oligonucleotide
  Target: LAMA2; (-) strand; PAM type: YTN; PAM sequence: TTC
tgtaatgccatgtgtcctgc

SEQ ID NO: 222110 - DNA, 20 bp, Artificial Sequence
  Description of Artificial Sequence: Synthetic oligonucleotide
  Target: LAMA2; (-) strand; PAM type: YTN; PAM sequence: TTT
ctgtaatgccatgtgtcctg

SEQ ID NO: 222111 - DNA, 20 bp, Artificial Sequence
  Description of Artificial Sequence: Synthetic oligonucleotide
  Target: LAMA2; (-) strand; PAM type: YTN; PAM sequence: CTT
tctgtaatgccatgtgtcct

SEQ ID NO: 222112 - DNA, 20 bp, Artificial Sequence
  Description of Artificial Sequence: Synthetic oligonucleotide
  Target: LAMA2; (-) strand; PAM type: YTN; PAM sequence: TTG
gagactttctgtaatgccat

SEQ ID NO: 222113 - DNA, 20 bp, Artificial Sequence
  Description of Artificial Sequence: Synthetic oligonucleotide
  Target: LAMA2; (-) strand; PAM type: YTN; PAM sequence: TTT
ggagactttctgtaatgcca

SEQ ID NO: 222114 - DNA, 20 bp, Artificial Sequence
  Description of Artificial Sequence: Synthetic oligonucleotide
  Target: LAMA2; (-) strand; PAM type: YTN; PAM sequence: TTT
tggagactttctgtaatgcc

SEQ ID NO: 222115 - DNA, 20 bp, Artificial Sequence
  Description of Artificial Sequence: Synthetic oligonucleotide
  Target: LAMA2; (-) strand; PAM type: YTN; PAM sequence: TTG
tccccaaaaggatgaataat

SEQ ID NO: 222116 - DNA, 20 bp, Artificial Sequence
  Description of Artificial Sequence: Synthetic oligonucleotide
  Target: LAMA2; (-) strand; PAM type: YTN; PAM sequence: TTA
tagttgtccccaaaaggatg

SEQ ID NO: 222117 - DNA, 20 bp, Artificial Sequence
  Description of Artificial Sequence: Synthetic oligonucleotide
  Target: LAMA2; (-) strand; PAM type: YTN; PAM sequence: TTA
tgagtgtcacaaaaaatcat

SEQ ID NO: 222118 - DNA, 20 bp, Artificial Sequence
  Description of Artificial Sequence: Synthetic oligonucleotide
  Target: LAMA2; (-) strand; PAM type: YTN; PAM sequence: TTC
aacaggttatgagtgtcaca

SEQ ID NO: 222119 - DNA, 20 bp, Artificial Sequence
  Description of Artificial Sequence: Synthetic oligonucleotide
  Target: LAMA2; (-) strand; PAM type: YTN; PAM sequence: TTC
caattcaacaggttatgagt

SEQ ID NO: 222120 - DNA, 20 bp, Artificial Sequence
  Description of Artificial Sequence: Synthetic oligonucleotide
  Target: LAMA2; (-) strand; PAM type: YTN; PAM sequence: TTT
ccaattcaacaggttatgag

SEQ ID NO: 222121 - DNA, 20 bp, Artificial Sequence
  Description of Artificial Sequence: Synthetic oligonucleotide
  Target: LAMA2; (-) strand; PAM type: YTN; PAM sequence: TTT
tccaattcaacaggttatga

SEQ ID NO: 222122 - DNA, 20 bp, Artificial Sequence
  Description of Artificial Sequence: Synthetic oligonucleotide
  Target: LAMA2; (-) strand; PAM type: YTN; PAM sequence: TTT
ttccaattcaacaggttatg

SEQ ID NO: 222123 - DNA, 20 bp, Artificial Sequence
  Description of Artificial Sequence: Synthetic oligonucleotide
  Target: LAMA2; (-) strand; PAM type: YTN; PAM sequence: TTA
atatttttccaattcaacag

SEQ ID NO: 222124 - DNA, 20 bp, Artificial Sequence
  Description of Artificial Sequence: Synthetic oligonucleotide
  Target: LAMA2; (-) strand; PAM type: YTN; PAM sequence: CTA
acattaatatttttccaatt

SEQ ID NO: 222125 - DNA, 20 bp, Artificial Sequence
  Description of Artificial Sequence: Synthetic oligonucleotide
  Target: LAMA2; (-) strand; PAM type: YTN; PAM sequence: TTC
taacattaatatttttccaa

SEQ ID NO: 222126 - DNA, 20 bp, Artificial Sequence
  Description of Artificial Sequence: Synthetic oligonucleotide
  Target: LAMA2; (-) strand; PAM type: YTN; PAM sequence: TTT
ctaacattaatatttttcca

SEQ ID NO: 222127 - DNA, 20 bp, Artificial Sequence
  Description of Artificial Sequence: Synthetic oligonucleotide
  Target: LAMA2; (-) strand; PAM type: YTN; PAM sequence: TTA
aaagtgacatgagaacagat

SEQ ID NO: 222128 - DNA, 20 bp, Artificial Sequence
  Description of Artificial Sequence: Synthetic oligonucleotide
  Target: LAMA2; (-) strand; PAM type: YTN; PAM sequence: TTT
aaaagtgacatgagaacaga

SEQ ID NO: 222129 - DNA, 20 bp, Artificial Sequence
  Description of Artificial Sequence: Synthetic oligonucleotide
  Target: LAMA2; (-) strand; PAM type: YTN; PAM sequence: TTT
taaaagtgacatgagaacag

SEQ ID NO: 222130 - DNA, 20 bp, Artificial Sequence
  Description of Artificial Sequence: Synthetic oligonucleotide
  Target: LAMA2; (-) strand; PAM type: YTN; PAM sequence: CTA
caggaggcaaaaaaggagaa

SEQ ID NO: 222131 - DNA, 20 bp, Artificial Sequence
  Description of Artificial Sequence: Synthetic oligonucleotide
  Target: LAMA2; (-) strand; PAM type: YTN; PAM sequence: CTC
atgctacaggaggcaaaaaa

SEQ ID NO: 222132 - DNA, 20 bp, Artificial Sequence
  Description of Artificial Sequence: Synthetic oligonucleotide
  Target: LAMA2; (-) strand; PAM type: YTN; PAM sequence: CTA
ggactcatgctacaggaggc

SEQ ID NO: 222133 - DNA, 20 bp, Artificial Sequence
  Description of Artificial Sequence: Synthetic oligonucleotide
  Target: LAMA2; (-) strand; PAM type: YTN; PAM sequence: TTA
atcaaactaggactcatgct

SEQ ID NO: 222134 - DNA, 20 bp, Artificial Sequence
  Description of Artificial Sequence: Synthetic oligonucleotide
  Target: LAMA2; (-) strand; PAM type: YTN; PAM sequence: TTT
aatcaaactaggactcatgc

SEQ ID NO: 222135 - DNA, 20 bp, Artificial Sequence
  Description of Artificial Sequence: Synthetic oligonucleotide
  Target: LAMA2; (-) strand; PAM type: YTN; PAM sequence: CTA
gtttaatcaaactaggactc

SEQ ID NO: 222136 - DNA, 20 bp, Artificial Sequence
  Description of Artificial Sequence: Synthetic oligonucleotide
  Target: LAMA2; (-) strand; PAM type: YTN; PAM sequence: TTG
gagaaaatcaagtgtctagt

SEQ ID NO: 222137 - DNA, 20 bp, Artificial Sequence
  Description of Artificial Sequence: Synthetic oligonucleotide
  Target: LAMA2; (-) strand; PAM type: YTN; PAM sequence: TTA
ccattggagaaaatcaagtg

SEQ ID NO: 222138 - DNA, 20 bp, Artificial Sequence
  Description of Artificial Sequence: Synthetic oligonucleotide
  Target: LAMA2; (-) strand; PAM type: YTN; PAM sequence: TTA
aaaacatgttaccattggag

SEQ ID NO: 222139 - DNA, 20 bp, Artificial Sequence
  Description of Artificial Sequence: Synthetic oligonucleotide
  Target: LAMA2; (-) strand; PAM type: YTN; PAM sequence: TTT
aaaaacatgttaccattgga

SEQ ID NO: 222140 - DNA, 20 bp, Artificial Sequence
  Description of Artificial Sequence: Synthetic oligonucleotide
  Target: LAMA2; (-) strand; PAM type: YTN; PAM sequence: TTT
taaaaacatgttaccattgg

SEQ ID NO: 222141 - DNA, 20 bp, Artificial Sequence
  Description of Artificial Sequence: Synthetic oligonucleotide
  Target: LAMA2; (-) strand; PAM type: YTN; PAM sequence: TTT
ttaaaaacatgttaccattg

SEQ ID NO: 222142 - DNA, 20 bp, Artificial Sequence
  Description of Artificial Sequence: Synthetic oligonucleotide
  Target: LAMA2; (-) strand; PAM type: YTN; PAM sequence: TTT
tttaaaaacatgttaccatt

SEQ ID NO: 222143 - DNA, 20 bp, Artificial Sequence
  Description of Artificial Sequence: Synthetic oligonucleotide
  Target: LAMA2; (-) strand; PAM type: YTN; PAM sequence: CTT
ttttaaaaacatgttaccat

SEQ ID NO: 222144 - DNA, 20 bp, Artificial Sequence
  Description of Artificial Sequence: Synthetic oligonucleotide
  Target: LAMA2; (-) strand; PAM type: YTN; PAM sequence: TTC
caacagagtaaaagtccttt

SEQ ID NO: 222145 - DNA, 20 bp, Artificial Sequence
  Description of Artificial Sequence: Synthetic oligonucleotide
  Target: LAMA2; (-) strand; PAM type: YTN; PAM sequence: TTG
gttccaacagagtaaaagtc

SEQ ID NO: 222146 - DNA, 20 bp, Artificial Sequence
  Description of Artificial Sequence: Synthetic oligonucleotide
  Target: LAMA2; (-) strand; PAM type: YTN; PAM sequence: CTA
attggttccaacagagtaaa

SEQ ID NO: 222147 - DNA, 20 bp, Artificial Sequence
  Description of Artificial Sequence: Synthetic oligonucleotide
  Target: LAMA2; (-) strand; PAM type: YTN; PAM sequence: TTG
gcctaattggttccaacaga

SEQ ID NO: 222148 - DNA, 20 bp, Artificial Sequence
  Description of Artificial Sequence: Synthetic oligonucleotide
  Target: LAMA2; (-) strand; PAM type: YTN; PAM sequence: CTC
acattggcctaattggttcc

SEQ ID NO: 222149 - DNA, 20 bp, Artificial Sequence
  Description of Artificial Sequence: Synthetic oligonucleotide
  Target: LAMA2; (-) strand; PAM type: YTN; PAM sequence: TTC
ctcacattggcctaattggt

SEQ ID NO: 222150 - DNA, 20 bp, Artificial Sequence
  Description of Artificial Sequence: Synthetic oligonucleotide
  Target: LAMA2; (-) strand; PAM type: YTN; PAM sequence: TTC
caaagttcctcacattggcc

SEQ ID NO: 222151 - DNA, 20 bp, Artificial Sequence
  Description of Artificial Sequence: Synthetic oligonucleotide
  Target: LAMA2; (-) strand; PAM type: YTN; PAM sequence: CTT
ccaaagttcctcacattggc

SEQ ID NO: 222152 - DNA, 20 bp, Artificial Sequence
  Description of Artificial Sequence: Synthetic oligonucleotide
  Target: LAMA2; (-) strand; PAM type: YTN; PAM sequence: TTC
cttccaaagttcctcacatt

SEQ ID NO: 222153 - DNA, 20 bp, Artificial Sequence
  Description of Artificial Sequence: Synthetic oligonucleotide
  Target: LAMA2; (-) strand; PAM type: YTN; PAM sequence: CTC
atgttccttccaaagttcct

SEQ ID NO: 222154 - DNA, 20 bp, Artificial Sequence
  Description of Artificial Sequence: Synthetic oligonucleotide
  Target: LAMA2; (-) strand; PAM type: YTN; PAM sequence: CTG
ctcatgttccttccaaagtt

SEQ ID NO: 222155 - DNA, 20 bp, Artificial Sequence
  Description of Artificial Sequence: Synthetic oligonucleotide
  Target: LAMA2; (-) strand; PAM type: YTN; PAM sequence: TTG
gctgctcatgttccttccaa

SEQ ID NO: 222156 - DNA, 20 bp, Artificial Sequence
  Description of Artificial Sequence: Synthetic oligonucleotide
  Target: LAMA2; (-) strand; PAM type: YTN; PAM sequence: TTT
ggctgctcatgttccttcca

SEQ ID NO: 222157 - DNA, 20 bp, Artificial Sequence
  Description of Artificial Sequence: Synthetic oligonucleotide
  Target: LAMA2; (-) strand; PAM type: YTN; PAM sequence: TTA
gcaagtttggctgctcatgt

SEQ ID NO: 222158 - DNA, 20 bp, Artificial Sequence
  Description of Artificial Sequence: Synthetic oligonucleotide
  Target: LAMA2; (-) strand; PAM type: YTN; PAM sequence: CTG
ttagcaagtttggctgctca

SEQ ID NO: 222159 - DNA, 20 bp, Artificial Sequence
  Description of Artificial Sequence: Synthetic oligonucleotide
  Target: LAMA2; (-) strand; PAM type: YTN; PAM sequence: TTG
ctgttagcaagtttggctgc

SEQ ID NO: 222160 - DNA, 20 bp, Artificial Sequence
  Description of Artificial Sequence: Synthetic oligonucleotide
  Target: LAMA2; (-) strand; PAM type: YTN; PAM sequence: TTT
gctgttagcaagtttggctg

SEQ ID NO: 222161 - DNA, 20 bp, Artificial Sequence
  Description of Artificial Sequence: Synthetic oligonucleotide
  Target: LAMA2; (-) strand; PAM type: YTN; PAM sequence: TTT
tgctgttagcaagtttggct

SEQ ID NO: 222162 - DNA, 20 bp, Artificial Sequence
  Description of Artificial Sequence: Synthetic oligonucleotide
  Target: LAMA2; (-) strand; PAM type: YTN; PAM sequence: TTC
agaaaaatacgttttgctgt

SEQ ID NO: 222163 - DNA, 20 bp, Artificial Sequence
  Description of Artificial Sequence: Synthetic oligonucleotide
  Target: LAMA2; (-) strand; PAM type: YTN; PAM sequence: CTT
cagaaaaatacgttttgctg

SEQ ID NO: 222164 - DNA, 20 bp, Artificial Sequence
  Description of Artificial Sequence: Synthetic oligonucleotide
  Target: LAMA2; (-) strand; PAM type: YTN; PAM sequence: CTG
ccttcagaaaaatacgtttt

SEQ ID NO: 222165 - DNA, 20 bp, Artificial Sequence
  Description of Artificial Sequence: Synthetic oligonucleotide
  Target: LAMA2; (-) strand; PAM type: YTN; PAM sequence: TTC
atgctgccttcagaaaaata

SEQ ID NO: 222166 - DNA, 20 bp, Artificial Sequence
  Description of Artificial Sequence: Synthetic oligonucleotide
  Target: LAMA2; (-) strand; PAM type: YTN; PAM sequence: TTT
catgctgccttcagaaaaat

SEQ ID NO: 222167 - DNA, 20 bp, Artificial Sequence
  Description of Artificial Sequence: Synthetic oligonucleotide
  Target: LAMA2; (-) strand; PAM type: YTN; PAM sequence: TTT
tcatgctgccttcagaaaaa

SEQ ID NO: 222168 - DNA, 20 bp, Artificial Sequence
  Description of Artificial Sequence: Synthetic oligonucleotide
  Target: LAMA2; (-) strand; PAM type: YTN; PAM sequence: CTT
ttcatgctgccttcagaaaa

SEQ ID NO: 222169 - DNA, 20 bp, Artificial Sequence
  Description of Artificial Sequence: Synthetic oligonucleotide
  Target: LAMA2; (-) strand; PAM type: YTN; PAM sequence: CTC
cgtccttttcatgctgcctt

SEQ ID NO: 222170 - DNA, 20 bp, Artificial Sequence
  Description of Artificial Sequence: Synthetic oligonucleotide
  Target: LAMA2; (-) strand; PAM type: YTN; PAM sequence: CTC
ctccgtccttttcatgctgc

SEQ ID NO: 222171 - DNA, 20 bp, Artificial Sequence
  Description of Artificial Sequence: Synthetic oligonucleotide
  Target: LAMA2; (-) strand; PAM type: YTN; PAM sequence: TTA
gagaactcctccgtcctttt

SEQ ID NO: 222172 - DNA, 20 bp, Artificial Sequence
  Description of Artificial Sequence: Synthetic oligonucleotide
  Target: LAMA2; (-) strand; PAM type: YTN; PAM sequence: CTT
agagaactcctccgtccttt

SEQ ID NO: 222173 - DNA, 20 bp, Artificial Sequence
  Description of Artificial Sequence: Synthetic oligonucleotide
  Target: LAMA2; (-) strand; PAM type: YTN; PAM sequence: CTC
acagtccttagagaactcct

SEQ ID NO: 222174 - DNA, 20 bp, Artificial Sequence
  Description of Artificial Sequence: Synthetic oligonucleotide
  Target: LAMA2; (-) strand; PAM type: YTN; PAM sequence: CTC
aaaaggacccgtggaactca

SEQ ID NO: 222175 - DNA, 20 bp, Artificial Sequence
  Description of Artificial Sequence: Synthetic oligonucleotide
  Target: LAMA2; (-) strand; PAM type: YTN; PAM sequence: CTG
aagctcaaaaggacccgtgg

SEQ ID NO: 222176 - DNA, 20 bp, Artificial Sequence
  Description of Artificial Sequence: Synthetic oligonucleotide
  Target: LAMA2; (-) strand; PAM type: YTN; PAM sequence: TTC
tgaagctcaaaaggacccgt

SEQ ID NO: 222177 - DNA, 20 bp, Artificial Sequence
  Description of Artificial Sequence: Synthetic oligonucleotide
  Target: LAMA2; (-) strand; PAM type: YTN; PAM sequence: TTT
ctgaagctcaaaaggacccg

SEQ ID NO: 222178 - DNA, 20 bp, Artificial Sequence
  Description of Artificial Sequence: Synthetic oligonucleotide
  Target: LAMA2; (-) strand; PAM type: YTN; PAM sequence: CTG
gatttctgaagctcaaaagg

SEQ ID NO: 222179 - DNA, 20 bp, Artificial Sequence
  Description of Artificial Sequence: Synthetic oligonucleotide
  Target: LAMA2; (-) strand; PAM type: YTN; PAM sequence: CTG
agagctggatttctgaagct

SEQ ID NO: 222180 - DNA, 20 bp, Artificial Sequence
  Description of Artificial Sequence: Synthetic oligonucleotide
  Target: LAMA2; (-) strand; PAM type: YTN; PAM sequence: TTA
tgaagtgctgagagctggat

SEQ ID NO: 222181 - DNA, 20 bp, Artificial Sequence
  Description of Artificial Sequence: Synthetic oligonucleotide
  Target: LAMA2; (-) strand; PAM type: YTN; PAM sequence: TTT
atgaagtgctgagagctgga

SEQ ID NO: 222182 - DNA, 20 bp, Artificial Sequence
  Description of Artificial Sequence: Synthetic oligonucleotide
  Target: LAMA2; (-) strand; PAM type: YTN; PAM sequence: TTC
agtgacatcaggtcagaaat

SEQ ID NO: 222183 - DNA, 20 bp, Artificial Sequence
  Description of Artificial Sequence: Synthetic oligonucleotide
  Target: LAMA2; (-) strand; PAM type: YTN; PAM sequence: CTT
cagtgacatcaggtcagaaa

SEQ ID NO: 222184 - DNA, 20 bp, Artificial Sequence
  Description of Artificial Sequence: Synthetic oligonucleotide
  Target: LAMA2; (-) strand; PAM type: YTN; PAM sequence: CTA
accacataataatacaactt

SEQ ID NO: 222185 - DNA, 20 bp, Artificial Sequence
  Description of Artificial Sequence: Synthetic oligonucleotide
  Target: LAMA2; (-) strand; PAM type: YTN; PAM sequence: TTA
tactaaccacataataatac

SEQ ID NO: 222186 - DNA, 20 bp, Artificial Sequence
  Description of Artificial Sequence: Synthetic oligonucleotide
  Target: LAMA2; (-) strand; PAM type: YTN; PAM sequence: TTT
atactaaccacataataata

SEQ ID NO: 222187 - DNA, 20 bp, Artificial Sequence
  Description of Artificial Sequence: Synthetic oligonucleotide
  Target: LAMA2; (-) strand; PAM type: YTN; PAM sequence: TTT
tatactaaccacataataat

SEQ ID NO: 222188 - DNA, 20 bp, Artificial Sequence
  Description of Artificial Sequence: Synthetic oligonucleotide
  Target: LAMA2; (-) strand; PAM type: YTN; PAM sequence: CTG
aattttatactaaccacata

SEQ ID NO: 222189 - DNA, 20 bp, Artificial Sequence
  Description of Artificial Sequence: Synthetic oligonucleotide
  Target: LAMA2; (-) strand; PAM type: YTN; PAM sequence: TTC
tgaattttatactaaccaca

SEQ ID NO: 222190 - DNA, 20 bp, Artificial Sequence
  Description of Artificial Sequence: Synthetic oligonucleotide
  Target: LAMA2; (-) strand; PAM type: YTN; PAM sequence: TTT
ctgaattttatactaaccac

SEQ ID NO: 222191 - DNA, 20 bp, Artificial Sequence
  Description of Artificial Sequence: Synthetic oligonucleotide
  Target: LAMA2; (-) strand; PAM type: YTN; PAM sequence: TTT
tctgaattttatactaacca

SEQ ID NO: 222192 - DNA, 20 bp, Artificial Sequence
  Description of Artificial Sequence: Synthetic oligonucleotide
  Target: LAMA2; (-) strand; PAM type: YTN; PAM sequence: TTT
ttctgaattttatactaacc

SEQ ID NO: 222193 - DNA, 20 bp, Artificial Sequence
  Description of Artificial Sequence: Synthetic oligonucleotide
  Target: LAMA2; (-) strand; PAM type: YTN; PAM sequence: CTC
ccaatttttctgaattttat

SEQ ID NO: 222194 - DNA, 20 bp, Artificial Sequence
  Description of Artificial Sequence: Synthetic oligonucleotide
  Target: LAMA2; (-) strand; PAM type: YTN; PAM sequence: TTC
tcccaatttttctgaatttt

SEQ ID NO: 222195 - DNA, 20 bp, Artificial Sequence
  Description of Artificial Sequence: Synthetic oligonucleotide
  Target: LAMA2; (-) strand; PAM type: YTN; PAM sequence: TTT
ctcccaatttttctgaattt

SEQ ID NO: 222196 - DNA, 20 bp, Artificial Sequence
  Description of Artificial Sequence: Synthetic oligonucleotide
  Target: LAMA2; (-) strand; PAM type: YTN; PAM sequence: TTT
tctcccaatttttctgaatt

SEQ ID NO: 222197 - DNA, 20 bp, Artificial Sequence
  Description of Artificial Sequence: Synthetic oligonucleotide
  Target: LAMA2; (-) strand; PAM type: YTN; PAM sequence: TTG
tattttctcccaatttttct

SEQ ID NO: 222198 - DNA, 20 bp, Artificial Sequence
  Description of Artificial Sequence: Synthetic oligonucleotide
  Target: LAMA2; (-) strand; PAM type: YTN; PAM sequence: CTT
gtattttctcccaatttttc

SEQ ID NO: 222199 - DNA, 20 bp, Artificial Sequence
  Description of Artificial Sequence: Synthetic oligonucleotide
  Target: LAMA2; (-) strand; PAM type: YTN; PAM sequence: CTC
cttgtattttctcccaattt

SEQ ID NO: 222200 - DNA, 20 bp, Artificial Sequence
  Description of Artificial Sequence: Synthetic oligonucleotide
  Target: LAMA2; (-) strand; PAM type: YTN; PAM sequence: TTC
tccttgtattttctcccaat

SEQ ID NO: 222201 - DNA, 20 bp, Artificial Sequence
  Description of Artificial Sequence: Synthetic oligonucleotide
  Target: LAMA2; (-) strand; PAM type: YTN; PAM sequence: CTT
ctccttgtattttctcccaa

SEQ ID NO: 222202 - DNA, 20 bp, Artificial Sequence
  Description of Artificial Sequence: Synthetic oligonucleotide
  Target: LAMA2; (-) strand; PAM type: YTN; PAM sequence: TTC
ttctccttgtattttctccc

SEQ ID NO: 222203 - DNA, 20 bp, Artificial Sequence
  Description of Artificial Sequence: Synthetic oligonucleotide
  Target: LAMA2; (-) strand; PAM type: YTN; PAM sequence: CTG
caaattcttctccttgtatt

SEQ ID NO: 222204 - DNA, 20 bp, Artificial Sequence
  Description of Artificial Sequence: Synthetic oligonucleotide
  Target: LAMA2; (-) strand; PAM type: YTN; PAM sequence: TTA
caacaatcaccctgcaaatt

SEQ ID NO: 222205 - DNA, 20 bp, Artificial Sequence
  Description of Artificial Sequence: Synthetic oligonucleotide
  Target: LAMA2; (-) strand; PAM type: YTN; PAM sequence: CTT
acaacaatcaccctgcaaat

SEQ ID NO: 222206 - DNA, 20 bp, Artificial Sequence
  Description of Artificial Sequence: Synthetic oligonucleotide
  Target: LAMA2; (-) strand; PAM type: YTN; PAM sequence: TTA
agaggacatgataaaaatct

SEQ ID NO: 222207 - DNA, 20 bp, Artificial Sequence
  Description of Artificial Sequence: Synthetic oligonucleotide
  Target: LAMA2; (-) strand; PAM type: YTN; PAM sequence: TTT
aagaggacatgataaaaatc

SEQ ID NO: 222208 - DNA, 20 bp, Artificial Sequence
  Description of Artificial Sequence: Synthetic oligonucleotide
  Target: LAMA2; (-) strand; PAM type: YTN; PAM sequence: TTT
taagaggacatgataaaaat

SEQ ID NO: 222209 - DNA, 20 bp, Artificial Sequence
  Description of Artificial Sequence: Synthetic oligonucleotide
  Target: LAMA2; (-) strand; PAM type: YTN; PAM sequence: TTT
ttaagaggacatgataaaaa

SEQ ID NO: 222210 - DNA, 20 bp, Artificial Sequence
  Description of Artificial Sequence: Synthetic oligonucleotide
  Target: LAMA2; (-) strand; PAM type: YTN; PAM sequence: CTA
ccatttttaagaggacatga

SEQ ID NO: 222211 - DNA, 20 bp, Artificial Sequence
  Description of Artificial Sequence: Synthetic oligonucleotide
  Target: LAMA2; (-) strand; PAM type: YTN; PAM sequence: CTG
aaaagctaccatttttaaga

SEQ ID NO: 222212 - DNA, 20 bp, Artificial Sequence
  Description of Artificial Sequence: Synthetic oligonucleotide
  Target: LAMA2; (-) strand; PAM type: YTN; PAM sequence: TTC
tgaaaagctaccatttttaa

SEQ ID NO: 222213 - DNA, 20 bp, Artificial Sequence
  Description of Artificial Sequence: Synthetic oligonucleotide
  Target: LAMA2; (-) strand; PAM type: YTN; PAM sequence: TTT
ctgaaaagctaccattttta

SEQ ID NO: 222214 - DNA, 20 bp, Artificial Sequence
  Description of Artificial Sequence: Synthetic oligonucleotide
  Target: LAMA2; (-) strand; PAM type: YTN; PAM sequence: TTA
acaaaagtttctgaaaagct

SEQ ID NO: 222215 - DNA, 20 bp, Artificial Sequence
  Description of Artificial Sequence: Synthetic oligonucleotide
  Target: LAMA2; (-) strand; PAM type: YTN; PAM sequence: CTC
aagatggaatgcaaagcagt

SEQ ID NO: 222216 - DNA, 20 bp, Artificial Sequence
  Description of Artificial Sequence: Synthetic oligonucleotide
  Target: LAMA2; (-) strand; PAM type: YTN; PAM sequence: TTC
tcaagatggaatgcaaagca

SEQ ID NO: 222217 - DNA, 20 bp, Artificial Sequence
  Description of Artificial Sequence: Synthetic oligonucleotide
  Target: LAMA2; (-) strand; PAM type: YTN; PAM sequence: TTT
ctcaagatggaatgcaaagc

SEQ ID NO: 222218 - DNA, 20 bp, Artificial Sequence
  Description of Artificial Sequence: Synthetic oligonucleotide
  Target: LAMA2; (-) strand; PAM type: YTN; PAM sequence: TTT
tctcaagatggaatgcaaag

SEQ ID NO: 222219 - DNA, 20 bp, Artificial Sequence
  Description of Artificial Sequence: Synthetic oligonucleotide
  Target: LAMA2; (-) strand; PAM type: YTN; PAM sequence: CTA
tacagacattttctcaagat

SEQ ID NO: 222220 - DNA, 20 bp, Artificial Sequence
  Description of Artificial Sequence: Synthetic oligonucleotide
  Target: LAMA2; (-) strand; PAM type: YTN; PAM sequence: CTA
actatacagacattttctca

SEQ ID NO: 222221 - DNA, 20 bp, Artificial Sequence
  Description of Artificial Sequence: Synthetic oligonucleotide
  Target: LAMA2; (-) strand; PAM type: YTN; PAM sequence: CTC
atctaactatacagacattt

SEQ ID NO: 222222 - DNA, 20 bp, Artificial Sequence
  Description of Artificial Sequence: Synthetic oligonucleotide
  Target: LAMA2; (-) strand; PAM type: YTN; PAM sequence: TTA
aaaacaaggagaggagatga

SEQ ID NO: 222223 - DNA, 20 bp, Artificial Sequence
  Description of Artificial Sequence: Synthetic oligonucleotide
  Target: LAMA2; (-) strand; PAM type: YTN; PAM sequence: TTT
aaaaacaaggagaggagatg

SEQ ID NO: 222224 - DNA, 20 bp, Artificial Sequence
  Description of Artificial Sequence: Synthetic oligonucleotide
  Target: LAMA2; (-) strand; PAM type: YTN; PAM sequence: TTG
gatgtgatttaaaaacaagg

SEQ ID NO: 222225 - DNA, 20 bp, Artificial Sequence
  Description of Artificial Sequence: Synthetic oligonucleotide
  Target: LAMA2; (-) strand; PAM type: YTN; PAM sequence: TTT
ggatgtgatttaaaaacaag

SEQ ID NO: 222226 - DNA, 20 bp, Artificial Sequence
  Description of Artificial Sequence: Synthetic oligonucleotide
  Target: LAMA2; (-) strand; PAM type: YTN; PAM sequence: TTT
tggatgtgatttaaaaacaa

SEQ ID NO: 222227 - DNA, 20 bp, Artificial Sequence
  Description of Artificial Sequence: Synthetic oligonucleotide
  Target: LAMA2; (-) strand; PAM type: YTN; PAM sequence: CTG
atgtcattttggatgtgatt

SEQ ID NO: 222228 - DNA, 20 bp, Artificial Sequence
  Description of Artificial Sequence: Synthetic oligonucleotide
  Target: LAMA2; (-) strand; PAM type: YTN; PAM sequence: CTG
caagcctgatgtcattttgg

SEQ ID NO: 222229 - DNA, 20 bp, Artificial Sequence
  Description of Artificial Sequence: Synthetic oligonucleotide
  Target: LAMA2; (-) strand; PAM type: YTN; PAM sequence: TTG
ccaatgaagtgtgaagagtg

SEQ ID NO: 222230 - DNA, 20 bp, Artificial Sequence
  Description of Artificial Sequence: Synthetic oligonucleotide
  Target: LAMA2; (-) strand; PAM type: YTN; PAM sequence: CTC
aattgccaatgaagtgtgaa

SEQ ID NO: 222231 - DNA, 20 bp, Artificial Sequence
  Description of Artificial Sequence: Synthetic oligonucleotide
  Target: LAMA2; (-) strand; PAM type: YTN; PAM sequence: TTA
aagtggtgacctcaattgcc

SEQ ID NO: 222232 - DNA, 20 bp, Artificial Sequence
  Description of Artificial Sequence: Synthetic oligonucleotide
  Target: LAMA2; (-) strand; PAM type: YTN; PAM sequence: TTT
aaagtggtgacctcaattgc

SEQ ID NO: 222233 - DNA, 20 bp, Artificial Sequence
  Description of Artificial Sequence: Synthetic oligonucleotide
  Target: LAMA2; (-) strand; PAM type: YTN; PAM sequence: TTT
taaagtggtgacctcaattg

SEQ ID NO: 222234 - DNA, 20 bp, Artificial Sequence
  Description of Artificial Sequence: Synthetic oligonucleotide
  Target: LAMA2; (-) strand; PAM type: YTN; PAM sequence: CTA
aattttaaagtggtgacctc

SEQ ID NO: 222235 - DNA, 20 bp, Artificial Sequence
  Description of Artificial Sequence: Synthetic oligonucleotide
  Target: LAMA2; (-) strand; PAM type: YTN; PAM sequence: TTC
accctaaattttaaagtggt

SEQ ID NO: 222236 - DNA, 20 bp, Artificial Sequence
  Description of Artificial Sequence: Synthetic oligonucleotide
  Target: LAMA2; (-) strand; PAM type: YTN; PAM sequence: CTT
caccctaaattttaaagtgg

SEQ ID NO: 222237 - DNA, 20 bp, Artificial Sequence
  Description of Artificial Sequence: Synthetic oligonucleotide
  Target: LAMA2; (-) strand; PAM type: YTN; PAM sequence: TTA
gccttcaccctaaattttaa

SEQ ID NO: 222238 - DNA, 20 bp, Artificial Sequence
  Description of Artificial Sequence: Synthetic oligonucleotide
  Target: LAMA2; (-) strand; PAM type: YTN; PAM sequence: TTT
agccttcaccctaaatttta

SEQ ID NO: 222239 - DNA, 20 bp, Artificial Sequence
  Description of Artificial Sequence: Synthetic oligonucleotide
  Target: LAMA2; (-) strand; PAM type: YTN; PAM sequence: CTT
tagccttcaccctaaatttt

SEQ ID NO: 222240 - DNA, 20 bp, Artificial Sequence
  Description of Artificial Sequence: Synthetic oligonucleotide
  Target: LAMA2; (-) strand; PAM type: YTN; PAM sequence: CTG
gtctttagccttcaccctaa

SEQ ID NO: 222241 - DNA, 20 bp, Artificial Sequence
  Description of Artificial Sequence: Synthetic oligonucleotide
  Target: LAMA2; (-) strand; PAM type: YTN; PAM sequence: TTG
tcaagctggtctttagcctt

SEQ ID NO: 222242 - DNA, 20 bp, Artificial Sequence
  Description of Artificial Sequence: Synthetic oligonucleotide
  Target: LAMA2; (-) strand; PAM type: YTN; PAM sequence: TTT
gtcaagctggtctttagcct

SEQ ID NO: 222243 - DNA, 20 bp, Artificial Sequence
  Description of Artificial Sequence: Synthetic oligonucleotide
  Target: LAMA2; (-) strand; PAM type: YTN; PAM sequence: TTC
cgccaacagtttgtcaagct

SEQ ID NO: 222244 - DNA, 20 bp, Artificial Sequence
  Description of Artificial Sequence: Synthetic oligonucleotide
  Target: LAMA2; (-) strand; PAM type: YTN; PAM sequence: TTG
caaaagagagcattccgcca

SEQ ID NO: 222245 - DNA, 20 bp, Artificial Sequence
  Description of Artificial Sequence: Synthetic oligonucleotide
  Target: LAMA2; (-) strand; PAM type: YTN; PAM sequence: CTT
gcaaaagagagcattccgcc

SEQ ID NO: 222246 - DNA, 20 bp, Artificial Sequence
  Description of Artificial Sequence: Synthetic oligonucleotide
  Target: LAMA2; (-) strand; PAM type: YTN; PAM sequence: TTC
aaaacgaagacttgcaaaag

SEQ ID NO: 222247 - DNA, 20 bp, Artificial Sequence
  Description of Artificial Sequence: Synthetic oligonucleotide
  Target: LAMA2; (-) strand; PAM type: YTN; PAM sequence: CTT
caaaacgaagacttgcaaaa

SEQ ID NO: 222248 - DNA, 20 bp, Artificial Sequence
  Description of Artificial Sequence: Synthetic oligonucleotide
  Target: LAMA2; (-) strand; PAM type: YTN; PAM sequence: TTC
ttcaaaacgaagacttgcaa

SEQ ID NO: 222249 - DNA, 20 bp, Artificial Sequence
  Description of Artificial Sequence: Synthetic oligonucleotide
  Target: LAMA2; (-) strand; PAM type: YTN; PAM sequence: TTT
cttcaaaacgaagacttgca

SEQ ID NO: 222250 - DNA, 20 bp, Artificial Sequence
  Description of Artificial Sequence: Synthetic oligonucleotide
  Target: LAMA2; (-) strand; PAM type: YTN; PAM sequence: CTT
tcttcaaaacgaagacttgc

SEQ ID NO: 222251 - DNA, 20 bp, Artificial Sequence
  Description of Artificial Sequence: Synthetic oligonucleotide
  Target: LAMA2; (-) strand; PAM type: YTN; PAM sequence: TTC
tttcttcaaaacgaagactt

SEQ ID NO: 222252 - DNA, 20 bp, Artificial Sequence
  Description of Artificial Sequence: Synthetic oligonucleotide
  Target: LAMA2; (-) strand; PAM type: YTN; PAM sequence: CTA
aatcacacattctttcttca

SEQ ID NO: 222253 - DNA, 20 bp, Artificial Sequence
  Description of Artificial Sequence: Synthetic oligonucleotide
  Target: LAMA2; (-) strand; PAM type: YTN; PAM sequence: TTC
taaatcacacattctttctt

SEQ ID NO: 222254 - DNA, 20 bp, Artificial Sequence
  Description of Artificial Sequence: Synthetic oligonucleotide
  Target: LAMA2; (-) strand; PAM type: YTN; PAM sequence: TTT
ctaaatcacacattctttct

SEQ ID NO: 222255 - DNA, 20 bp, Artificial Sequence
  Description of Artificial Sequence: Synthetic oligonucleotide
  Target: LAMA2; (-) strand; PAM type: YTN; PAM sequence: TTA
aatatttctaaatcacacat

SEQ ID NO: 222256 - DNA, 20 bp, Artificial Sequence
  Description of Artificial Sequence: Synthetic oligonucleotide
  Target: LAMA2; (-) strand; PAM type: YTN; PAM sequence: CTT
aaatatttctaaatcacaca

SEQ ID NO: 222257 - DNA, 20 bp, Artificial Sequence
  Description of Artificial Sequence: Synthetic oligonucleotide
  Target: LAMA2; (-) strand; PAM type: YTN; PAM sequence: CTA
ccaaaatgacaatcttaaat

SEQ ID NO: 222258 - DNA, 20 bp, Artificial Sequence
  Description of Artificial Sequence: Synthetic oligonucleotide
  Target: LAMA2; (-) strand; PAM type: YTN; PAM sequence: TTC
taccaaaatgacaatcttaa

SEQ ID NO: 222259 - DNA, 20 bp, Artificial Sequence
  Description of Artificial Sequence: Synthetic oligonucleotide
  Target: LAMA2; (-) strand; PAM type: YTN; PAM sequence: TTG
atagatgagaagttctacca

SEQ ID NO: 222260 - DNA, 20 bp, Artificial Sequence
  Description of Artificial Sequence: Synthetic oligonucleotide
  Target: LAMA2; (-) strand; PAM type: YTN; PAM sequence: CTG
cattgatagatgagaagttc

SEQ ID NO: 222261 - DNA, 20 bp, Artificial Sequence
  Description of Artificial Sequence: Synthetic oligonucleotide
  Target: LAMA2; (-) strand; PAM type: YTN; PAM sequence: CTG
caccctgcattgatagatga

SEQ ID NO: 222262 - DNA, 20 bp, Artificial Sequence
  Description of Artificial Sequence: Synthetic oligonucleotide
  Target: LAMA2; (-) strand; PAM type: YTN; PAM sequence: TTA
ataaatagggatgctgcacc

SEQ ID NO: 222263 - DNA, 20 bp, Artificial Sequence
  Description of Artificial Sequence: Synthetic oligonucleotide
  Target: LAMA2; (-) strand; PAM type: YTN; PAM sequence: CTA
accaacacaacattaataaa

SEQ ID NO: 222264 - DNA, 20 bp, Artificial Sequence
  Description of Artificial Sequence: Synthetic oligonucleotide
  Target: LAMA2; (-) strand; PAM type: YTN; PAM sequence: CTA
atgggtgaacatatctaacc

SEQ ID NO: 222265 - DNA, 20 bp, Artificial Sequence
  Description of Artificial Sequence: Synthetic oligonucleotide
  Target: LAMA2; (-) strand; PAM type: YTN; PAM sequence: CTG
cacgtacctaatgggtgaac

SEQ ID NO: 222266 - DNA, 20 bp, Artificial Sequence
  Description of Artificial Sequence: Synthetic oligonucleotide
  Target: LAMA2; (-) strand; PAM type: YTN; PAM sequence: CTC
tgcacgtacctaatgggtga

SEQ ID NO: 222267 - DNA, 20 bp, Artificial Sequence
  Description of Artificial Sequence: Synthetic oligonucleotide
  Target: LAMA2; (-) strand; PAM type: YTN; PAM sequence: TTC
aggtacctctgcacgtacct

SEQ ID NO: 222268 - DNA, 20 bp, Artificial Sequence
  Description of Artificial Sequence: Synthetic oligonucleotide
  Target: LAMA2; (-) strand; PAM type: YTN; PAM sequence: TTT
caggtacctctgcacgtacc

SEQ ID NO: 222269 - DNA, 20 bp, Artificial Sequence
  Description of Artificial Sequence: Synthetic oligonucleotide
  Target: LAMA2; (-) strand; PAM type: YTN; PAM sequence: CTC
agatggtttcaggtacctct

SEQ ID NO: 222270 - DNA, 20 bp, Artificial Sequence
  Description of Artificial Sequence: Synthetic oligonucleotide
  Target: LAMA2; (-) strand; PAM type: YTN; PAM sequence: CTC
tcagatggtttcaggtacct

SEQ ID NO: 222271 - DNA, 20 bp, Artificial Sequence
  Description of Artificial Sequence: Synthetic oligonucleotide
  Target: LAMA2; (-) strand; PAM type: YTN; PAM sequence: TTA
tgaaaaatgggataccacct

SEQ ID NO: 222272 - DNA, 20 bp, Artificial Sequence
  Description of Artificial Sequence: Synthetic oligonucleotide
  Target: LAMA2; (-) strand; PAM type: YTN; PAM sequence: TTG
aatagattatgaaaaatggg

SEQ ID NO: 222273 - DNA, 20 bp, Artificial Sequence
  Description of Artificial Sequence: Synthetic oligonucleotide
  Target: LAMA2; (-) strand; PAM type: YTN; PAM sequence: TTC
aattgaatagattatgaaaa

SEQ ID NO: 222274 - DNA, 20 bp, Artificial Sequence
  Description of Artificial Sequence: Synthetic oligonucleotide
  Target: LAMA2; (-) strand; PAM type: YTN; PAM sequence: TTA
aagttcaattgaatagatta

SEQ ID NO: 222275 - DNA, 20 bp, Artificial Sequence
  Description of Artificial Sequence: Synthetic oligonucleotide
  Target: LAMA2; (-) strand; PAM type: YTN; PAM sequence: TTT
aaagttcaattgaatagatt

SEQ ID NO: 222276 - DNA, 20 bp, Artificial Sequence
  Description of Artificial Sequence: Synthetic oligonucleotide
  Target: LAMA2; (-) strand; PAM type: YTN; PAM sequence: TTT
taaagttcaattgaatagat

SEQ ID NO: 222277 - DNA, 20 bp, Artificial Sequence
  Description of Artificial Sequence: Synthetic oligonucleotide
  Target: LAMA2; (-) strand; PAM type: YTN; PAM sequence: TTT
ttaaagttcaattgaataga

SEQ ID NO: 222278 - DNA, 20 bp, Artificial Sequence
  Description of Artificial Sequence: Synthetic oligonucleotide
  Target: LAMA2; (-) strand; PAM type: YTN; PAM sequence: TTA
tttttaaagttcaattgaat

SEQ ID NO: 222279 - DNA, 20 bp, Artificial Sequence
  Description of Artificial Sequence: Synthetic oligonucleotide
  Target: LAMA2; (-) strand; PAM type: YTN; PAM sequence: CTC
agttatttttaaagttcaat

SEQ ID NO: 222280 - DNA, 20 bp, Artificial Sequence
  Description of Artificial Sequence: Synthetic oligonucleotide
  Target: LAMA2; (-) strand; PAM type: YTN; PAM sequence: TTG
tatataaaagatgctcagtt

SEQ ID NO: 222281 - DNA, 20 bp, Artificial Sequence
  Description of Artificial Sequence: Synthetic oligonucleotide
  Target: LAMA2; (-) strand; PAM type: YTN; PAM sequence: CTT
gtatataaaagatgctcagt

SEQ ID NO: 222282 - DNA, 20 bp, Artificial Sequence
  Description of Artificial Sequence: Synthetic oligonucleotide
  Target: LAMA2; (-) strand; PAM type: YTN; PAM sequence: TTA
atgtcttgtatataaaagat

SEQ ID NO: 222283 - DNA, 20 bp, Artificial Sequence
  Description of Artificial Sequence: Synthetic oligonucleotide
  Target: LAMA2; (-) strand; PAM type: YTN; PAM sequence: CTG
ttaatgtcttgtatataaaa

SEQ ID NO: 222284 - DNA, 20 bp, Artificial Sequence
  Description of Artificial Sequence: Synthetic oligonucleotide
  Target: LAMA2; (-) strand; PAM type: YTN; PAM sequence: CTA
gcagtagataccatagaata

SEQ ID NO: 222285 - DNA, 20 bp, Artificial Sequence
  Description of Artificial Sequence: Synthetic oligonucleotide
  Target: LAMA2; (-) strand; PAM type: YTN; PAM sequence: TTG
ctagcagtagataccataga

SEQ ID NO: 222286 - DNA, 20 bp, Artificial Sequence
  Description of Artificial Sequence: Synthetic oligonucleotide
  Target: LAMA2; (-) strand; PAM type: YTN; PAM sequence: TTA
taagttgctagcagtagata

SEQ ID NO: 222287 - DNA, 20 bp, Artificial Sequence
  Description of Artificial Sequence: Synthetic oligonucleotide
  Target: LAMA2; (-) strand; PAM type: YTN; PAM sequence: CTG
ttataagttgctagcagtag

SEQ ID NO: 222288 - DNA, 20 bp, Artificial Sequence
  Description of Artificial Sequence: Synthetic oligonucleotide
  Target: LAMA2; (-) strand; PAM type: YTN; PAM sequence: TTA
ccaccaaaactgttataagt

SEQ ID NO: 222289 - DNA, 20 bp, Artificial Sequence
  Description of Artificial Sequence: Synthetic oligonucleotide
  Target: LAMA2; (-) strand; PAM type: YTN; PAM sequence: TTT
accaccaaaactgttataag

SEQ ID NO: 222290 - DNA, 20 bp, Artificial Sequence
  Description of Artificial Sequence: Synthetic oligonucleotide
  Target: LAMA2; (-) strand; PAM type: YTN; PAM sequence: TTT
taccaccaaaactgttataa

SEQ ID NO: 222291 - DNA, 20 bp, Artificial Sequence
  Description of Artificial Sequence: Synthetic oligonucleotide
  Target: LAMA2; (-) strand; PAM type: YTN; PAM sequence: TTA
ttttaccaccaaaactgtta

SEQ ID NO: 222292 - DNA, 20 bp, Artificial Sequence
  Description of Artificial Sequence: Synthetic oligonucleotide
  Target: LAMA2; (-) strand; PAM type: YTN; PAM sequence: TTT
attttaccaccaaaactgtt

SEQ ID NO: 222293 - DNA, 20 bp, Artificial Sequence
  Description of Artificial Sequence: Synthetic oligonucleotide
  Target: LAMA2; (-) strand; PAM type: YTN; PAM sequence: CTT
tattttaccaccaaaactgt

SEQ ID NO: 222294 - DNA, 20 bp, Artificial Sequence
  Description of Artificial Sequence: Synthetic oligonucleotide
  Target: LAMA2; (-) strand; PAM type: YTN; PAM sequence: TTG
cctttattttaccaccaaaa

SEQ ID NO: 222295 - DNA, 20 bp, Artificial Sequence
  Description of Artificial Sequence: Synthetic oligonucleotide
  Target: LAMA2; (-) strand; PAM type: YTN; PAM sequence: TTT
gcctttattttaccaccaaa

SEQ ID NO: 222296 - DNA, 20 bp, Artificial Sequence
  Description of Artificial Sequence: Synthetic oligonucleotide
  Target: LAMA2; (-) strand; PAM type: YTN; PAM sequence: TTA
tgaagcaagtttgcctttat

SEQ ID NO: 222297 - DNA, 20 bp, Artificial Sequence
  Description of Artificial Sequence: Synthetic oligonucleotide
  Target: LAMA2; (-) strand; PAM type: YTN; PAM sequence: TTG
ttatgaagcaagtttgcctt

SEQ ID NO: 222298 - DNA, 20 bp, Artificial Sequence
  Description of Artificial Sequence: Synthetic oligonucleotide
  Target: LAMA2; (-) strand; PAM type: YTN; PAM sequence: TTT
gttatgaagcaagtttgcct

SEQ ID NO: 222299 - DNA, 20 bp, Artificial Sequence
  Description of Artificial Sequence: Synthetic oligonucleotide
  Target: LAMA2; (-) strand; PAM type: YTN; PAM sequence: TTT
tgttatgaagcaagtttgcc

SEQ ID NO: 222300 - DNA, 20 bp, Artificial Sequence
  Description of Artificial Sequence: Synthetic oligonucleotide
  Target: LAMA2; (-) strand; PAM type: YTN; PAM sequence: TTG
ttttgttatgaagcaagttt

SEQ ID NO: 222301 - DNA, 20 bp, Artificial Sequence
  Description of Artificial Sequence: Synthetic oligonucleotide
  Target: LAMA2; (-) strand; PAM type: YTN; PAM sequence: TTT
gttttgttatgaagcaagtt

SEQ ID NO: 222302 - DNA, 20 bp, Artificial Sequence
  Description of Artificial Sequence: Synthetic oligonucleotide
  Target: LAMA2; (-) strand; PAM type: YTN; PAM sequence: TTT
tgttttgttatgaagcaagt

SEQ ID NO: 222303 - DNA, 20 bp, Artificial Sequence
  Description of Artificial Sequence: Synthetic oligonucleotide
  Target: LAMA2; (-) strand; PAM type: YTN; PAM sequence: TTA
attttgttttgttatgaagc

SEQ ID NO: 222304 - DNA, 20 bp, Artificial Sequence
  Description of Artificial Sequence: Synthetic oligonucleotide
  Target: LAMA2; (-) strand; PAM type: YTN; PAM sequence: TTT
aattttgttttgttatgaag

SEQ ID NO: 222305 - DNA, 20 bp, Artificial Sequence
  Description of Artificial Sequence: Synthetic oligonucleotide
  Target: LAMA2; (-) strand; PAM type: YTN; PAM sequence: TTG
ataatttaattttgttttgt

SEQ ID NO: 222306 - DNA, 20 bp, Artificial Sequence
  Description of Artificial Sequence: Synthetic oligonucleotide
  Target: LAMA2; (-) strand; PAM type: YTN; PAM sequence: TTT
gataatttaattttgttttg

SEQ ID NO: 222307 - DNA, 20 bp, Artificial Sequence
  Description of Artificial Sequence: Synthetic oligonucleotide
  Target: LAMA2; (-) strand; PAM type: YTN; PAM sequence: TTT
tgataatttaattttgtttt

SEQ ID NO: 222308 - DNA, 20 bp, Artificial Sequence
  Description of Artificial Sequence: Synthetic oligonucleotide
  Target: LAMA2; (-) strand; PAM type: YTN; PAM sequence: TTT
ttgataatttaattttgttt

SEQ ID NO: 222309 - DNA, 20 bp, Artificial Sequence
  Description of Artificial Sequence: Synthetic oligonucleotide
  Target: LAMA2; (-) strand; PAM type: YTN; PAM sequence: CTT
tttgataatttaattttgtt

SEQ ID NO: 222310 - DNA, 20 bp, Artificial Sequence
  Description of Artificial Sequence: Synthetic oligonucleotide
  Target: LAMA2; (-) strand; PAM type: YTN; PAM sequence: TTC
tttttgataatttaattttg

SEQ ID NO: 222311 - DNA, 20 bp, Artificial Sequence
  Description of Artificial Sequence: Synthetic oligonucleotide
  Target: LAMA2; (-) strand; PAM type: YTN; PAM sequence: TTT
ctttttgataatttaatttt

SEQ ID NO: 222312 - DNA, 20 bp, Artificial Sequence
  Description of Artificial Sequence: Synthetic oligonucleotide
  Target: LAMA2; (-) strand; PAM type: YTN; PAM sequence: CTG
agcatttctttttgataatt

SEQ ID NO: 222313 - DNA, 20 bp, Artificial Sequence
  Description of Artificial Sequence: Synthetic oligonucleotide
  Target: LAMA2; (-) strand; PAM type: YTN; PAM sequence: TTA
acaactgagcatttcttttt

SEQ ID NO: 222314 - DNA, 20 bp, Artificial Sequence
  Description of Artificial Sequence: Synthetic oligonucleotide
  Target: LAMA2; (-) strand; PAM type: YTN; PAM sequence: TTA
aattaacaactgagcatttc

SEQ ID NO: 222315 - DNA, 20 bp, Artificial Sequence
  Description of Artificial Sequence: Synthetic oligonucleotide
  Target: LAMA2; (-) strand; PAM type: YTN; PAM sequence: TTT
aaattaacaactgagcattt

SEQ ID NO: 222316 - DNA, 20 bp, Artificial Sequence
  Description of Artificial Sequence: Synthetic oligonucleotide
  Target: LAMA2; (-) strand; PAM type: YTN; PAM sequence: TTT
taaattaacaactgagcatt

SEQ ID NO: 222317 - DNA, 20 bp, Artificial Sequence
  Description of Artificial Sequence: Synthetic oligonucleotide
  Target: LAMA2; (-) strand; PAM type: YTN; PAM sequence: TTA
tattttaaattaacaactga

SEQ ID NO: 222318 - DNA, 20 bp, Artificial Sequence
  Description of Artificial Sequence: Synthetic oligonucleotide
  Target: LAMA2; (-) strand; PAM type: YTN; PAM sequence: TTT
atattttaaattaacaactg

SEQ ID NO: 222319 - DNA, 20 bp, Artificial Sequence
  Description of Artificial Sequence: Synthetic oligonucleotide
  Target: LAMA2; (-) strand; PAM type: YTN; PAM sequence: TTT
tatattttaaattaacaact

SEQ ID NO: 222320 - DNA, 20 bp, Artificial Sequence
  Description of Artificial Sequence: Synthetic oligonucleotide
  Target: LAMA2; (-) strand; PAM type: YTN; PAM sequence: CTC
attttatattttaaattaac

SEQ ID NO: 222321 - DNA, 20 bp, Artificial Sequence
  Description of Artificial Sequence: Synthetic oligonucleotide
  Target: LAMA2; (-) strand; PAM type: YTN; PAM sequence: CTC
atgtctcattttatatttta

SEQ ID NO: 222322 - DNA, 20 bp, Artificial Sequence
  Description of Artificial Sequence: Synthetic oligonucleotide
  Target: LAMA2; (-) strand; PAM type: YTN; PAM sequence: TTC
tcatgtctcattttatattt

SEQ ID NO: 222323 - DNA, 20 bp, Artificial Sequence
  Description of Artificial Sequence: Synthetic oligonucleotide
  Target: LAMA2; (-) strand; PAM type: YTN; PAM sequence: TTA
ttctcatgtctcattttata

SEQ ID NO: 222324 - DNA, 20 bp, Artificial Sequence
  Description of Artificial Sequence: Synthetic oligonucleotide
  Target: LAMA2; (-) strand; PAM type: YTN; PAM sequence: CTA
aggttattctcatgtctcat

SEQ ID NO: 222325 - DNA, 20 bp, Artificial Sequence
  Description of Artificial Sequence: Synthetic oligonucleotide
  Target: LAMA2; (-) strand; PAM type: YTN; PAM sequence: CTA
acctaaggttattctcatgt

SEQ ID NO: 222326 - DNA, 20 bp, Artificial Sequence
  Description of Artificial Sequence: Synthetic oligonucleotide
  Target: LAMA2; (-) strand; PAM type: YTN; PAM sequence: TTC
taacctaaggttattctcat

SEQ ID NO: 222327 - DNA, 20 bp, Artificial Sequence
  Description of Artificial Sequence: Synthetic oligonucleotide
  Target: LAMA2; (-) strand; PAM type: YTN; PAM sequence: TTT
ctaacctaaggttattctca

SEQ ID NO: 222328 - DNA, 20 bp, Artificial Sequence
  Description of Artificial Sequence: Synthetic oligonucleotide
  Target: LAMA2; (-) strand; PAM type: YTN; PAM sequence: CTG
aatttctaacctaaggttat

SEQ ID NO: 222329 - DNA, 20 bp, Artificial Sequence
  Description of Artificial Sequence: Synthetic oligonucleotide
  Target: LAMA2; (-) strand; PAM type: YTN; PAM sequence: CTA
catctgaatttctaacctaa

SEQ ID NO: 222330 - DNA, 20 bp, Artificial Sequence
  Description of Artificial Sequence: Synthetic oligonucleotide
  Target: LAMA2; (-) strand; PAM type: YTN; PAM sequence: TTC
tacatctgaatttctaacct

SEQ ID NO: 222331 - DNA, 20 bp, Artificial Sequence
  Description of Artificial Sequence: Synthetic oligonucleotide
  Target: LAMA2; (-) strand; PAM type: YTN; PAM sequence: TTT
ctacatctgaatttctaacc

SEQ ID NO: 222332 - DNA, 20 bp, Artificial Sequence
  Description of Artificial Sequence: Synthetic oligonucleotide
  Target: LAMA2; (-) strand; PAM type: YTN; PAM sequence: TTT
tctacatctgaatttctaac

SEQ ID NO: 222333 - DNA, 20 bp, Artificial Sequence
  Description of Artificial Sequence: Synthetic oligonucleotide
  Target: LAMA2; (-) strand; PAM type: YTN; PAM sequence: TTA
tacagatattttctacatct

SEQ ID NO: 222334 - DNA, 20 bp, Artificial Sequence
  Description of Artificial Sequence: Synthetic oligonucleotide
  Target: LAMA2; (-) strand; PAM type: YTN; PAM sequence: TTT
atacagatattttctacatc

SEQ ID NO: 222335 - DNA, 20 bp, Artificial Sequence
  Description of Artificial Sequence: Synthetic oligonucleotide
  Target: LAMA2; (-) strand; PAM type: YTN; PAM sequence: CTT
tatacagatattttctacat

SEQ ID NO: 222336 - DNA, 20 bp, Artificial Sequence
  Description of Artificial Sequence: Synthetic oligonucleotide
  Target: LAMA2; (-) strand; PAM type: YTN; PAM sequence: TTC
tttatacagatattttctac

SEQ ID NO: 222337 - DNA, 20 bp, Artificial Sequence
  Description of Artificial Sequence: Synthetic oligonucleotide
  Target: LAMA2; (-) strand; PAM type: YTN; PAM sequence: CTT
ctttatacagatattttcta

SEQ ID NO: 222338 - DNA, 20 bp, Artificial Sequence
  Description of Artificial Sequence: Synthetic oligonucleotide
  Target: LAMA2; (-) strand; PAM type: YTN; PAM sequence: CTA
acttctttatacagatattt

SEQ ID NO: 222339 - DNA, 20 bp, Artificial Sequence
  Description of Artificial Sequence: Synthetic oligonucleotide
  Target: LAMA2; (-) strand; PAM type: YTN; PAM sequence: TTC
aactaacttctttatacaga

SEQ ID NO: 222340 - DNA, 20 bp, Artificial Sequence
  Description of Artificial Sequence: Synthetic oligonucleotide
  Target: LAMA2; (-) strand; PAM type: YTN; PAM sequence: TTT
caactaacttctttatacag

SEQ ID NO: 222341 - DNA, 20 bp, Artificial Sequence
  Description of Artificial Sequence: Synthetic oligonucleotide
  Target: LAMA2; (-) strand; PAM type: YTN; PAM sequence: CTA
tgagtatttcaactaacttc

SEQ ID NO: 222342 - DNA, 20 bp, Artificial Sequence
  Description of Artificial Sequence: Synthetic oligonucleotide
  Target: LAMA2; (-) strand; PAM type: YTN; PAM sequence: TTC
atgcctatgagtatttcaac

SEQ ID NO: 222343 - DNA, 20 bp, Artificial Sequence
  Description of Artificial Sequence: Synthetic oligonucleotide
  Target: LAMA2; (-) strand; PAM type: YTN; PAM sequence: TTT
catgcctatgagtatttcaa

SEQ ID NO: 222344 - DNA, 20 bp, Artificial Sequence
  Description of Artificial Sequence: Synthetic oligonucleotide
  Target: LAMA2; (-) strand; PAM type: YTN; PAM sequence: CTT
tcatgcctatgagtatttca

SEQ ID NO: 222345 - DNA, 20 bp, Artificial Sequence
  Description of Artificial Sequence: Synthetic oligonucleotide
  Target: LAMA2; (-) strand; PAM type: YTN; PAM sequence: TTG
caaaatacctttcatgccta

SEQ ID NO: 222346 - DNA, 20 bp, Artificial Sequence
  Description of Artificial Sequence: Synthetic oligonucleotide
  Target: LAMA2; (-) strand; PAM type: YTN; PAM sequence: TTT
gcaaaatacctttcatgcct

SEQ ID NO: 222347 - DNA, 20 bp, Artificial Sequence
  Description of Artificial Sequence: Synthetic oligonucleotide
  Target: LAMA2; (-) strand; PAM type: YTN; PAM sequence: TTT
tgcaaaatacctttcatgcc

SEQ ID NO: 222348 - DNA, 20 bp, Artificial Sequence
  Description of Artificial Sequence: Synthetic oligonucleotide
  Target: LAMA2; (-) strand; PAM type: YTN; PAM sequence: TTT
ttgcaaaatacctttcatgc

SEQ ID NO: 222349 - DNA, 20 bp, Artificial Sequence
  Description of Artificial Sequence: Synthetic oligonucleotide
  Target: LAMA2; (-) strand; PAM type: YTN; PAM sequence: CTT
tttgcaaaatacctttcatg

SEQ ID NO: 222350 - DNA, 20 bp, Artificial Sequence
  Description of Artificial Sequence: Synthetic oligonucleotide
  Target: LAMA2; (-) strand; PAM type: YTN; PAM sequence: TTG
ctttttgcaaaatacctttc

SEQ ID NO: 222351 - DNA, 20 bp, Artificial Sequence
  Description of Artificial Sequence: Synthetic oligonucleotide
  Target: LAMA2; (-) strand; PAM type: YTN; PAM sequence: TTT
gctttttgcaaaataccttt

SEQ ID NO: 222352 - DNA, 20 bp, Artificial Sequence
  Description of Artificial Sequence: Synthetic oligonucleotide
  Target: LAMA2; (-) strand; PAM type: YTN; PAM sequence: TTT
tgctttttgcaaaatacctt

SEQ ID NO: 222353 - DNA, 20 bp, Artificial Sequence
  Description of Artificial Sequence: Synthetic oligonucleotide
  Target: LAMA2; (-) strand; PAM type: YTN; PAM sequence: CTT
ttgctttttgcaaaatacct

SEQ ID NO: 222354 - DNA, 20 bp, Artificial Sequence
  Description of Artificial Sequence: Synthetic oligonucleotide
  Target: LAMA2; (-) strand; PAM type: YTN; PAM sequence: CTA
cttttgctttttgcaaaata

SEQ ID NO: 222355 - DNA, 20 bp, Artificial Sequence
  Description of Artificial Sequence: Synthetic oligonucleotide
  Target: LAMA2; (-) strand; PAM type: YTN; PAM sequence: TTG
cctacttttgctttttgcaa

SEQ ID NO: 222356 - DNA, 20 bp, Artificial Sequence
  Description of Artificial Sequence: Synthetic oligonucleotide
  Target: LAMA2; (-) strand; PAM type: YTN; PAM sequence: TTT
gcctacttttgctttttgca

SEQ ID NO: 222357 - DNA, 20 bp, Artificial Sequence
  Description of Artificial Sequence: Synthetic oligonucleotide
  Target: LAMA2; (-) strand; PAM type: YTN; PAM sequence: TTT
tgcctacttttgctttttgc

SEQ ID NO: 222358 - DNA, 20 bp, Artificial Sequence
  Description of Artificial Sequence: Synthetic oligonucleotide
  Target: LAMA2; (-) strand; PAM type: YTN; PAM sequence: TTC
atagatccagttttgcctac

SEQ ID NO: 222359 - DNA, 20 bp, Artificial Sequence
  Description of Artificial Sequence: Synthetic oligonucleotide
  Target: LAMA2; (-) strand; PAM type: YTN; PAM sequence: CTT
catagatccagttttgccta

SEQ ID NO: 222360 - DNA, 20 bp, Artificial Sequence
  Description of Artificial Sequence: Synthetic oligonucleotide
  Target: LAMA2; (-) strand; PAM type: YTN; PAM sequence: TTA
tggagcaacttcatagatcc

SEQ ID NO: 222361 - DNA, 20 bp, Artificial Sequence
  Description of Artificial Sequence: Synthetic oligonucleotide
  Target: LAMA2; (-) strand; PAM type: YTN; PAM sequence: CTA
gtacattatggagcaacttc

SEQ ID NO: 222362 - DNA, 20 bp, Artificial Sequence
  Description of Artificial Sequence: Synthetic oligonucleotide
  Target: LAMA2; (-) strand; PAM type: YTN; PAM sequence: CTG
actagtacattatggagcaa

SEQ ID NO: 222363 - DNA, 20 bp, Artificial Sequence
  Description of Artificial Sequence: Synthetic oligonucleotide
  Target: LAMA2; (-) strand; PAM type: YTN; PAM sequence: TTC
acctgactagtacattatgg

SEQ ID NO: 222364 - DNA, 20 bp, Artificial Sequence
  Description of Artificial Sequence: Synthetic oligonucleotide
  Target: LAMA2; (-) strand; PAM type: YTN; PAM sequence: CTT
cacctgactagtacattatg

SEQ ID NO: 222365 - DNA, 20 bp, Artificial Sequence
  Description of Artificial Sequence: Synthetic oligonucleotide
  Target: LAMA2; (-) strand; PAM type: YTN; PAM sequence: CTA
cttcacctgactagtacatt

SEQ ID NO: 222366 - DNA, 20 bp, Artificial Sequence
  Description of Artificial Sequence: Synthetic oligonucleotide
  Target: LAMA2; (-) strand; PAM type: YTN; PAM sequence: TTG
tgctacttcacctgactagt

SEQ ID NO: 222367 - DNA, 20 bp, Artificial Sequence
  Description of Artificial Sequence: Synthetic oligonucleotide
  Target: LAMA2; (-) strand; PAM type: YTN; PAM sequence: TTT
gtgctacttcacctgactag

SEQ ID NO: 222368 - DNA, 20 bp, Artificial Sequence
  Description of Artificial Sequence: Synthetic oligonucleotide
  Target: LAMA2; (-) strand; PAM type: YTN; PAM sequence: CTA
ggtaatttgtgctacttcac

SEQ ID NO: 222369 - DNA, 20 bp, Artificial Sequence
  Description of Artificial Sequence: Synthetic oligonucleotide
  Target: LAMA2; (-) strand; PAM type: YTN; PAM sequence: CTG
atacactaggtaatttgtgc

SEQ ID NO: 222370 - DNA, 20 bp, Artificial Sequence
  Description of Artificial Sequence: Synthetic oligonucleotide
  Target: LAMA2; (-) strand; PAM type: YTN; PAM sequence: TTA
acaaaagaaaactgatacac

SEQ ID NO: 222371 - DNA, 20 bp, Artificial Sequence
  Description of Artificial Sequence: Synthetic oligonucleotide
  Target: LAMA2; (-) strand; PAM type: YTN; PAM sequence: TTG
tgttaacaaaagaaaactga

SEQ ID NO: 222372 - DNA, 20 bp, Artificial Sequence
  Description of Artificial Sequence: Synthetic oligonucleotide
  Target: LAMA2; (-) strand; PAM type: YTN; PAM sequence: TTG
tggtaatatgttgtgttaac

SEQ ID NO: 222373 - DNA, 20 bp, Artificial Sequence
  Description of Artificial Sequence: Synthetic oligonucleotide
  Target: LAMA2; (-) strand; PAM type: YTN; PAM sequence: TTT
gtggtaatatgttgtgttaa

SEQ ID NO: 222374 - DNA, 20 bp, Artificial Sequence
  Description of Artificial Sequence: Synthetic oligonucleotide
  Target: LAMA2; (-) strand; PAM type: YTN; PAM sequence: TTA
agtttgtggtaatatgttgt

SEQ ID NO: 222375 - DNA, 20 bp, Artificial Sequence
  Description of Artificial Sequence: Synthetic oligonucleotide
  Target: LAMA2; (-) strand; PAM type: YTN; PAM sequence: TTA
agccattaagtttgtggtaa

SEQ ID NO: 222376 - DNA, 20 bp, Artificial Sequence
  Description of Artificial Sequence: Synthetic oligonucleotide
  Target: LAMA2; (-) strand; PAM type: YTN; PAM sequence: TTT
aagccattaagtttgtggta

SEQ ID NO: 222377 - DNA, 20 bp, Artificial Sequence
  Description of Artificial Sequence: Synthetic oligonucleotide
  Target: LAMA2; (-) strand; PAM type: YTN; PAM sequence: TTT
taagccattaagtttgtggt

SEQ ID NO: 222378 - DNA, 20 bp, Artificial Sequence
  Description of Artificial Sequence: Synthetic oligonucleotide
  Target: LAMA2; (-) strand; PAM type: YTN; PAM sequence: TTG
tgaggttttaagccattaag

SEQ ID NO: 222379 - DNA, 20 bp, Artificial Sequence
  Description of Artificial Sequence: Synthetic oligonucleotide
  Target: LAMA2; (-) strand; PAM type: YTN; PAM sequence: TTT
gtgaggttttaagccattaa

SEQ ID NO: 222380 - DNA, 20 bp, Artificial Sequence
  Description of Artificial Sequence: Synthetic oligonucleotide
  Target: LAMA2; (-) strand; PAM type: YTN; PAM sequence: CTG
tgagataaatttgtgaggtt

SEQ ID NO: 222381 - DNA, 20 bp, Artificial Sequence
  Description of Artificial Sequence: Synthetic oligonucleotide
  Target: LAMA2; (-) strand; PAM type: YTN; PAM sequence: TTA
aactgtgagataaatttgtg

SEQ ID NO: 222382 - DNA, 20 bp, Artificial Sequence
  Description of Artificial Sequence: Synthetic oligonucleotide
  Target: LAMA2; (-) strand; PAM type: YTN; PAM sequence: CTA
ttaaactgtgagataaattt

SEQ ID NO: 222383 - DNA, 20 bp, Artificial Sequence
  Description of Artificial Sequence: Synthetic oligonucleotide
  Target: LAMA2; (-) strand; PAM type: YTN; PAM sequence: CTA
acctattaaactgtgagata

SEQ ID NO: 222384 - DNA, 20 bp, Artificial Sequence
  Description of Artificial Sequence: Synthetic oligonucleotide
  Target: LAMA2; (-) strand; PAM type: YTN; PAM sequence: CTA
ctaacctattaaactgtgag

SEQ ID NO: 222385 - DNA, 20 bp, Artificial Sequence
  Description of Artificial Sequence: Synthetic oligonucleotide
  Target: LAMA2; (-) strand; PAM type: YTN; PAM sequence: TTG
tgtcagactactaacctatt

SEQ ID NO: 222386 - DNA, 20 bp, Artificial Sequence
  Description of Artificial Sequence: Synthetic oligonucleotide
  Target: LAMA2; (-) strand; PAM type: YTN; PAM sequence: CTT
gtgtcagactactaacctat

SEQ ID NO: 222387 - DNA, 20 bp, Artificial Sequence
  Description of Artificial Sequence: Synthetic oligonucleotide
  Target: LAMA2; (-) strand; PAM type: YTN; PAM sequence: CTC
agtgagacttgtgtcagact

SEQ ID NO: 222388 - DNA, 20 bp, Artificial Sequence
  Description of Artificial Sequence: Synthetic oligonucleotide
  Target: LAMA2; (-) strand; PAM type: YTN; PAM sequence: TTA
gctcagtgagacttgtgtca

SEQ ID NO: 222389 - DNA, 20 bp, Artificial Sequence
  Description of Artificial Sequence: Synthetic oligonucleotide
  Target: LAMA2; (-) strand; PAM type: YTN; PAM sequence: TTT
agctcagtgagacttgtgtc

SEQ ID NO: 222390 - DNA, 20 bp, Artificial Sequence
  Description of Artificial Sequence: Synthetic oligonucleotide
  Target: LAMA2; (-) strand; PAM type: YTN; PAM sequence: CTT
tagctcagtgagacttgtgt

SEQ ID NO: 222391 - DNA, 20 bp, Artificial Sequence
  Description of Artificial Sequence: Synthetic oligonucleotide
  Target: LAMA2; (-) strand; PAM type: YTN; PAM sequence: CTG
gactttagctcagtgagact

SEQ ID NO: 222392 - DNA, 20 bp, Artificial Sequence
  Description of Artificial Sequence: Synthetic oligonucleotide
  Target: LAMA2; (-) strand; PAM type: YTN; PAM sequence: CTA
cccacacctggactttagct

SEQ ID NO: 222393 - DNA, 20 bp, Artificial Sequence
  Description of Artificial Sequence: Synthetic oligonucleotide
  Target: LAMA2; (-) strand; PAM type: YTN; PAM sequence: CTC
cagaaagaaatgcaatacta

SEQ ID NO: 222394 - DNA, 20 bp, Artificial Sequence
  Description of Artificial Sequence: Synthetic oligonucleotide
  Target: LAMA2; (-) strand; PAM type: YTN; PAM sequence: TTA
gagcctccagaaagaaatgc

SEQ ID NO: 222395 - DNA, 20 bp, Artificial Sequence
  Description of Artificial Sequence: Synthetic oligonucleotide
  Target: LAMA2; (-) strand; PAM type: YTN; PAM sequence: CTT
agagcctccagaaagaaatg

SEQ ID NO: 222396 - DNA, 20 bp, Artificial Sequence
  Description of Artificial Sequence: Synthetic oligonucleotide
  Target: LAMA2; (-) strand; PAM type: YTN; PAM sequence: CTA
ccttagagcctccagaaaga

SEQ ID NO: 222397 - DNA, 20 bp, Artificial Sequence
  Description of Artificial Sequence: Synthetic oligonucleotide
  Target: LAMA2; (-) strand; PAM type: YTN; PAM sequence: TTC
taccttagagcctccagaaa

SEQ ID NO: 222398 - DNA, 20 bp, Artificial Sequence
  Description of Artificial Sequence: Synthetic oligonucleotide
  Target: LAMA2; (-) strand; PAM type: YTN; PAM sequence: TTA
gaaaatgaattctaccttag

SEQ ID NO: 222399 - DNA, 20 bp, Artificial Sequence
  Description of Artificial Sequence: Synthetic oligonucleotide
  Target: LAMA2; (-) strand; PAM type: YTN; PAM sequence: TTT
agaaaatgaattctacctta

SEQ ID NO: 222400 - DNA, 20 bp, Artificial Sequence
  Description of Artificial Sequence: Synthetic oligonucleotide
  Target: LAMA2; (-) strand; PAM type: YTN; PAM sequence: TTT
tagaaaatgaattctacctt

SEQ ID NO: 222401 - DNA, 20 bp, Artificial Sequence
  Description of Artificial Sequence: Synthetic oligonucleotide
  Target: LAMA2; (-) strand; PAM type: YTN; PAM sequence: CTA
aatgaatgaattttagaaaa

SEQ ID NO: 222402 - DNA, 20 bp, Artificial Sequence
  Description of Artificial Sequence: Synthetic oligonucleotide
  Target: LAMA2; (-) strand; PAM type: YTN; PAM sequence: CTA
tcctaaatgaatgaatttta

SEQ ID NO: 222403 - DNA, 20 bp, Artificial Sequence
  Description of Artificial Sequence: Synthetic oligonucleotide
  Target: LAMA2; (-) strand; PAM type: YTN; PAM sequence: TTC
tatcctaaatgaatgaattt

SEQ ID NO: 222404 - DNA, 20 bp, Artificial Sequence
  Description of Artificial Sequence: Synthetic oligonucleotide
  Target: LAMA2; (-) strand; PAM type: YTN; PAM sequence: CTT
ctatcctaaatgaatgaatt

SEQ ID NO: 222405 - DNA, 20 bp, Artificial Sequence
  Description of Artificial Sequence: Synthetic oligonucleotide
  Target: LAMA2; (-) strand; PAM type: YTN; PAM sequence: TTC
agcttctatcctaaatgaat

SEQ ID NO: 222406 - DNA, 20 bp, Artificial Sequence
  Description of Artificial Sequence: Synthetic oligonucleotide
  Target: LAMA2; (-) strand; PAM type: YTN; PAM sequence: TTT
cagcttctatcctaaatgaa

SEQ ID NO: 222407 - DNA, 20 bp, Artificial Sequence
  Description of Artificial Sequence: Synthetic oligonucleotide
  Target: LAMA2; (-) strand; PAM type: YTN; PAM sequence: CTT
tcagcttctatcctaaatga

SEQ ID NO: 222408 - DNA, 20 bp, Artificial Sequence
  Description of Artificial Sequence: Synthetic oligonucleotide
  Target: LAMA2; (-) strand; PAM type: YTN; PAM sequence: TTC
tttcagcttctatcctaaat

SEQ ID NO: 222409 - DNA, 20 bp, Artificial Sequence
  Description of Artificial Sequence: Synthetic oligonucleotide
  Target: LAMA2; (-) strand; PAM type: YTN; PAM sequence: CTG
attctttcagcttctatcct

SEQ ID NO: 222410 - DNA, 20 bp, Artificial Sequence
  Description of Artificial Sequence: Synthetic oligonucleotide
  Target: LAMA2; (-) strand; PAM type: YTN; PAM sequence: CTG
tagaaactgattctttcagc

SEQ ID NO: 222411 - DNA, 20 bp, Artificial Sequence
  Description of Artificial Sequence: Synthetic oligonucleotide
  Target: LAMA2; (-) strand; PAM type: YTN; PAM sequence: TTG
aagatggaggaaggggtcat

SEQ ID NO: 222412 - DNA, 20 bp, Artificial Sequence
  Description of Artificial Sequence: Synthetic oligonucleotide
  Target: LAMA2; (-) strand; PAM type: YTN; PAM sequence: TTT
gaagatggaggaaggggtca

SEQ ID NO: 222413 - DNA, 20 bp, Artificial Sequence
  Description of Artificial Sequence: Synthetic oligonucleotide
  Target: LAMA2; (-) strand; PAM type: YTN; PAM sequence: CTT
tgaagatggaggaaggggtc

SEQ ID NO: 222414 - DNA, 20 bp, Artificial Sequence
  Description of Artificial Sequence: Synthetic oligonucleotide
  Target: LAMA2; (-) strand; PAM type: YTN; PAM sequence: CTG
gctttgaagatggaggaagg

SEQ ID NO: 222415 - DNA, 20 bp, Artificial Sequence
  Description of Artificial Sequence: Synthetic oligonucleotide
  Target: LAMA2; (-) strand; PAM type: YTN; PAM sequence: TTC
ctggctttgaagatggagga

SEQ ID NO: 222416 - DNA, 20 bp, Artificial Sequence
  Description of Artificial Sequence: Synthetic oligonucleotide
  Target: LAMA2; (-) strand; PAM type: YTN; PAM sequence: CTG
ttcctggctttgaagatgga

SEQ ID NO: 222417 - DNA, 20 bp, Artificial Sequence
  Description of Artificial Sequence: Synthetic oligonucleotide
  Target: LAMA2; (-) strand; PAM type: YTN; PAM sequence: TTC
aacctgttcctggctttgaa

SEQ ID NO: 222418 - DNA, 20 bp, Artificial Sequence
  Description of Artificial Sequence: Synthetic oligonucleotide
  Target: LAMA2; (-) strand; PAM type: YTN; PAM sequence: TTA
gggtggtacaacgaaggatt

SEQ ID NO: 222419 - DNA, 20 bp, Artificial Sequence
  Description of Artificial Sequence: Synthetic oligonucleotide
  Target: LAMA2; (-) strand; PAM type: YTN; PAM sequence: CTG
aaaagtataagagggaggca

SEQ ID NO: 222420 - DNA, 20 bp, Artificial Sequence
  Description of Artificial Sequence: Synthetic oligonucleotide
  Target: LAMA2; (-) strand; PAM type: YTN; PAM sequence: CTC
aatgtaatcataagggtcct

SEQ ID NO: 222421 - DNA, 20 bp, Artificial Sequence
  Description of Artificial Sequence: Synthetic oligonucleotide
  Target: LAMA2; (-) strand; PAM type: YTN; PAM sequence: CTG
ggctcaatgtaatcataagg

SEQ ID NO: 222422 - DNA, 20 bp, Artificial Sequence
  Description of Artificial Sequence: Synthetic oligonucleotide
  Target: LAMA2; (-) strand; PAM type: YTN; PAM sequence: CTG
gataatccactgggctcaat

SEQ ID NO: 222423 - DNA, 20 bp, Artificial Sequence
  Description of Artificial Sequence: Synthetic oligonucleotide
  Target: LAMA2; (-) strand; PAM type: YTN; PAM sequence: TTG
agatgaaaggatcaccctgg

SEQ ID NO: 222424 - DNA, 20 bp, Artificial Sequence
  Description of Artificial Sequence: Synthetic oligonucleotide
  Target: LAMA2; (-) strand; PAM type: YTN; PAM sequence: CTT
gagatgaaaggatcaccctg

SEQ ID NO: 222425 - DNA, 20 bp, Artificial Sequence
  Description of Artificial Sequence: Synthetic oligonucleotide
  Target: LAMA2; (-) strand; PAM type: YTN; PAM sequence: TTA
aagaccttgagatgaaagga

SEQ ID NO: 222426 - DNA, 20 bp, Artificial Sequence
  Description of Artificial Sequence: Synthetic oligonucleotide
  Target: LAMA2; (-) strand; PAM type: YTN; PAM sequence: TTC
agttaaagaccttgagatga

SEQ ID NO: 222427 - DNA, 20 bp, Artificial Sequence
  Description of Artificial Sequence: Synthetic oligonucleotide
  Target: LAMA2; (-) strand; PAM type: YTN; PAM sequence: TTG
tagatatgattcagttaaag

SEQ ID NO: 222428 - DNA, 20 bp, Artificial Sequence
  Description of Artificial Sequence: Synthetic oligonucleotide
  Target: LAMA2; (-) strand; PAM type: YTN; PAM sequence: TTT
gtagatatgattcagttaaa

SEQ ID NO: 222429 - DNA, 20 bp, Artificial Sequence
  Description of Artificial Sequence: Synthetic oligonucleotide
  Target: LAMA2; (-) strand; PAM type: YTN; PAM sequence: CTT
tgtagatatgattcagttaa

SEQ ID NO: 222430 - DNA, 20 bp, Artificial Sequence
  Description of Artificial Sequence: Synthetic oligonucleotide
  Target: LAMA2; (-) strand; PAM type: YTN; PAM sequence: TTA
tggcaaagggaactttgtag

SEQ ID NO: 222431 - DNA, 20 bp, Artificial Sequence
  Description of Artificial Sequence: Synthetic oligonucleotide
  Target: LAMA2; (-) strand; PAM type: YTN; PAM sequence: TTT
atggcaaagggaactttgta

SEQ ID NO: 222432 - DNA, 20 bp, Artificial Sequence
  Description of Artificial Sequence: Synthetic oligonucleotide
  Target: LAMA2; (-) strand; PAM type: YTN; PAM sequence: TTT
tatggcaaagggaactttgt

SEQ ID NO: 222433 - DNA, 20 bp, Artificial Sequence
  Description of Artificial Sequence: Synthetic oligonucleotide
  Target: LAMA2; (-) strand; PAM type: YTN; PAM sequence: TTT
ttatggcaaagggaactttg

SEQ ID NO: 222434 - DNA, 20 bp, Artificial Sequence
  Description of Artificial Sequence: Synthetic oligonucleotide
  Target: LAMA2; (-) strand; PAM type: YTN; PAM sequence: CTT
tttatggcaaagggaacttt

SEQ ID NO: 222435 - DNA, 20 bp, Artificial Sequence
  Description of Artificial Sequence: Synthetic oligonucleotide
  Target: LAMA2; (-) strand; PAM type: YTN; PAM sequence: CTG
tgaatatgaccctttttatg

SEQ ID NO: 222436 - DNA, 20 bp, Artificial Sequence
  Description of Artificial Sequence: Synthetic oligonucleotide
  Target: LAMA2; (-) strand; PAM type: YTN; PAM sequence: TTG
gaacctgtgaatatgaccct

SEQ ID NO: 222437 - DNA, 20 bp, Artificial Sequence
  Description of Artificial Sequence: Synthetic oligonucleotide
  Target: LAMA2; (-) strand; PAM type: YTN; PAM sequence: CTT
ggaacctgtgaatatgaccc

SEQ ID NO: 222438 - DNA, 20 bp, Artificial Sequence
  Description of Artificial Sequence: Synthetic oligonucleotide
  Target: LAMA2; (-) strand; PAM type: YTN; PAM sequence: TTC
ttggaacctgtgaatatgac

SEQ ID NO: 222439 - DNA, 20 bp, Artificial Sequence
  Description of Artificial Sequence: Synthetic oligonucleotide
  Target: LAMA2; (-) strand; PAM type: YTN; PAM sequence: TTA
attcttggaacctgtgaata

SEQ ID NO: 222440 - DNA, 20 bp, Artificial Sequence
  Description of Artificial Sequence: Synthetic oligonucleotide
  Target: LAMA2; (-) strand; PAM type: YTN; PAM sequence: TTT
aattcttggaacctgtgaat

SEQ ID NO: 222441 - DNA, 20 bp, Artificial Sequence
  Description of Artificial Sequence: Synthetic oligonucleotide
  Target: LAMA2; (-) strand; PAM type: YTN; PAM sequence: CTA
tatttaattcttggaacctg

SEQ ID NO: 222442 - DNA, 20 bp, Artificial Sequence
  Description of Artificial Sequence: Synthetic oligonucleotide
  Target: LAMA2; (-) strand; PAM type: YTN; PAM sequence: CTC
aaagacgtctatatttaatt

SEQ ID NO: 222443 - DNA, 20 bp, Artificial Sequence
  Description of Artificial Sequence: Synthetic oligonucleotide
  Target: LAMA2; (-) strand; PAM type: YTN; PAM sequence: TTA
tggtagagtaaacagtggtc

SEQ ID NO: 222444 - DNA, 20 bp, Artificial Sequence
  Description of Artificial Sequence: Synthetic oligonucleotide
  Target: LAMA2; (-) strand; PAM type: YTN; PAM sequence: CTA
gttatggtagagtaaacagt

SEQ ID NO: 222445 - DNA, 20 bp, Artificial Sequence
  Description of Artificial Sequence: Synthetic oligonucleotide
  Target: LAMA2; (-) strand; PAM type: YTN; PAM sequence: TTG
aaatgagataggctagttat

SEQ ID NO: 222446 - DNA, 20 bp, Artificial Sequence
  Description of Artificial Sequence: Synthetic oligonucleotide
  Target: LAMA2; (-) strand; PAM type: YTN; PAM sequence: TTA
gaaaattgaaatgagatagg

SEQ ID NO: 222447 - DNA, 20 bp, Artificial Sequence
  Description of Artificial Sequence: Synthetic oligonucleotide
  Target: LAMA2; (-) strand; PAM type: YTN; PAM sequence: CTG
attagaaaattgaaatgaga

SEQ ID NO: 222448 - DNA, 20 bp, Artificial Sequence
  Description of Artificial Sequence: Synthetic oligonucleotide
  Target: LAMA2; (-) strand; PAM type: YTN; PAM sequence: CTA
agagacaggtagtaactgat

SEQ ID NO: 222449 - DNA, 20 bp, Artificial Sequence
  Description of Artificial Sequence: Synthetic oligonucleotide
  Target: LAMA2; (-) strand; PAM type: YTN; PAM sequence: CTC
taagagacaggtagtaactg

SEQ ID NO: 222450 - DNA, 20 bp, Artificial Sequence
  Description of Artificial Sequence: Synthetic oligonucleotide
  Target: LAMA2; (-) strand; PAM type: YTN; PAM sequence: CTA
acaagaactctaagagacag

SEQ ID NO: 222451 - DNA, 20 bp, Artificial Sequence
  Description of Artificial Sequence: Synthetic oligonucleotide
  Target: LAMA2; (-) strand; PAM type: YTN; PAM sequence: CTG
ctaacaagaactctaagaga

SEQ ID NO: 222452 - DNA, 20 bp, Artificial Sequence
  Description of Artificial Sequence: Synthetic oligonucleotide
  Target: LAMA2; (-) strand; PAM type: YTN; PAM sequence: TTC
tgctaacaagaactctaaga

SEQ ID NO: 222453 - DNA, 20 bp, Artificial Sequence
  Description of Artificial Sequence: Synthetic oligonucleotide
  Target: LAMA2; (-) strand; PAM type: YTN; PAM sequence: TTT
ctgctaacaagaactctaag

SEQ ID NO: 222454 - DNA, 20 bp, Artificial Sequence
  Description of Artificial Sequence: Synthetic oligonucleotide
  Target: LAMA2; (-) strand; PAM type: YTN; PAM sequence: TTG
tttctgctaacaagaactct

SEQ ID NO: 222455 - DNA, 20 bp, Artificial Sequence
  Description of Artificial Sequence: Synthetic oligonucleotide
  Target: LAMA2; (-) strand; PAM type: YTN; PAM sequence: TTT
gtttctgctaacaagaactc

SEQ ID NO: 222456 - DNA, 20 bp, Artificial Sequence
  Description of Artificial Sequence: Synthetic oligonucleotide
  Target: LAMA2; (-) strand; PAM type: YTN; PAM sequence: TTA
cacagaaatttgtttctgct

SEQ ID NO: 222457 - DNA, 20 bp, Artificial Sequence
  Description of Artificial Sequence: Synthetic oligonucleotide
  Target: LAMA2; (-) strand; PAM type: YTN; PAM sequence: TTA
ttacacagaaatttgtttct

SEQ ID NO: 222458 - DNA, 20 bp, Artificial Sequence
  Description of Artificial Sequence: Synthetic oligonucleotide
  Target: LAMA2; (-) strand; PAM type: YTN; PAM sequence: TTT
attacacagaaatttgtttc

SEQ ID NO: 222459 - DNA, 20 bp, Artificial Sequence
  Description of Artificial Sequence: Synthetic oligonucleotide
  Target: LAMA2; (-) strand; PAM type: YTN; PAM sequence: CTT
tattacacagaaatttgttt

SEQ ID NO: 222460 - DNA, 20 bp, Artificial Sequence
  Description of Artificial Sequence: Synthetic oligonucleotide
  Target: LAMA2; (-) strand; PAM type: YTN; PAM sequence: TTG
ccaggcactttattacacag

SEQ ID NO: 222461 - DNA, 20 bp, Artificial Sequence
  Description of Artificial Sequence: Synthetic oligonucleotide
  Target: LAMA2; (-) strand; PAM type: YTN; PAM sequence: TTT
gccaggcactttattacaca

SEQ ID NO: 222462 - DNA, 20 bp, Artificial Sequence
  Description of Artificial Sequence: Synthetic oligonucleotide
  Target: LAMA2; (-) strand; PAM type: YTN; PAM sequence: TTT
tgccaggcactttattacac

SEQ ID NO: 222463 - DNA, 20 bp, Artificial Sequence
  Description of Artificial Sequence: Synthetic oligonucleotide
  Target: LAMA2; (-) strand; PAM type: YTN; PAM sequence: TTT
ttgccaggcactttattaca

SEQ ID NO: 222464 - DNA, 20 bp, Artificial Sequence
  Description of Artificial Sequence: Synthetic oligonucleotide
  Target: LAMA2; (-) strand; PAM type: YTN; PAM sequence: CTT
tttgccaggcactttattac

SEQ ID NO: 222465 - DNA, 20 bp, Artificial Sequence
  Description of Artificial Sequence: Synthetic oligonucleotide
  Target: LAMA2; (-) strand; PAM type: YTN; PAM sequence: CTA
ctttttgccaggcactttat

SEQ ID NO: 222466 - DNA, 20 bp, Artificial Sequence
  Description of Artificial Sequence: Synthetic oligonucleotide
  Target: LAMA2; (-) strand; PAM type: YTN; PAM sequence: TTA
ggacctactttttgccaggc

SEQ ID NO: 222467 - DNA, 20 bp, Artificial Sequence
  Description of Artificial Sequence: Synthetic oligonucleotide
  Target: LAMA2; (-) strand; PAM type: YTN; PAM sequence: TTT
aggacctactttttgccagg

SEQ ID NO: 222468 - DNA, 20 bp, Artificial Sequence
  Description of Artificial Sequence: Synthetic oligonucleotide
  Target: LAMA2; (-) strand; PAM type: YTN; PAM sequence: TTA
tttaggacctactttttgcc

SEQ ID NO: 222469 - DNA, 20 bp, Artificial Sequence
  Description of Artificial Sequence: Synthetic oligonucleotide
  Target: LAMA2; (-) strand; PAM type: YTN; PAM sequence: TTT
atttaggacctactttttgc

SEQ ID NO: 222470 - DNA, 20 bp, Artificial Sequence
  Description of Artificial Sequence: Synthetic oligonucleotide
  Target: LAMA2; (-) strand; PAM type: YTN; PAM sequence: TTT
tatttaggacctactttttg

SEQ ID NO: 222471 - DNA, 20 bp, Artificial Sequence
  Description of Artificial Sequence: Synthetic oligonucleotide
  Target: LAMA2; (-) strand; PAM type: YTN; PAM sequence: TTG
gggaaaataacattttattt

SEQ ID NO: 222472 - DNA, 20 bp, Artificial Sequence
  Description of Artificial Sequence: Synthetic oligonucleotide
  Target: LAMA2; (-) strand; PAM type: YTN; PAM sequence: CTT
ggggaaaataacattttatt

SEQ ID NO: 222473 - DNA, 20 bp, Artificial Sequence
  Description of Artificial Sequence: Synthetic oligonucleotide
  Target: LAMA2; (-) strand; PAM type: YTN; PAM sequence: TTC
ccttggggaaaataacattt

SEQ ID NO: 222474 - DNA, 20 bp, Artificial Sequence
  Description of Artificial Sequence: Synthetic oligonucleotide
  Target: LAMA2; (-) strand; PAM type: YTN; PAM sequence: TTT
cccttggggaaaataacatt

SEQ ID NO: 222475 - DNA, 20 bp, Artificial Sequence
  Description of Artificial Sequence: Synthetic oligonucleotide
  Target: LAMA2; (-) strand; PAM type: YTN; PAM sequence: CTT
tcccttggggaaaataacat

SEQ ID NO: 222476 - DNA, 20 bp, Artificial Sequence
  Description of Artificial Sequence: Synthetic oligonucleotide
  Target: LAMA2; (-) strand; PAM type: YTN; PAM sequence: CTA
ataatctttcccttggggaa

SEQ ID NO: 222477 - DNA, 20 bp, Artificial Sequence
  Description of Artificial Sequence: Synthetic oligonucleotide
  Target: LAMA2; (-) strand; PAM type: YTN; PAM sequence: TTC
ctaataatctttcccttggg

SEQ ID NO: 222478 - DNA, 20 bp, Artificial Sequence
  Description of Artificial Sequence: Synthetic oligonucleotide
  Target: LAMA2; (-) strand; PAM type: YTN; PAM sequence: TTA
taattcctaataatctttcc

SEQ ID NO: 222479 - DNA, 20 bp, Artificial Sequence
  Description of Artificial Sequence: Synthetic oligonucleotide
  Target: LAMA2; (-) strand; PAM type: YTN; PAM sequence: TTA
aacaaaggtgtgtcccaatg

SEQ ID NO: 222480 - DNA, 20 bp, Artificial Sequence
  Description of Artificial Sequence: Synthetic oligonucleotide
  Target: LAMA2; (-) strand; PAM type: YTN; PAM sequence: TTT
aaacaaaggtgtgtcccaat

SEQ ID NO: 222481 - DNA, 20 bp, Artificial Sequence
  Description of Artificial Sequence: Synthetic oligonucleotide
  Target: LAMA2; (-) strand; PAM type: YTN; PAM sequence: TTT
taaacaaaggtgtgtcccaa

SEQ ID NO: 222482 - DNA, 20 bp, Artificial Sequence
  Description of Artificial Sequence: Synthetic oligonucleotide
  Target: LAMA2; (-) strand; PAM type: YTN; PAM sequence: TTT
ttaaacaaaggtgtgtccca

SEQ ID NO: 222483 - DNA, 20 bp, Artificial Sequence
  Description of Artificial Sequence: Synthetic oligonucleotide
  Target: LAMA2; (-) strand; PAM type: YTN; PAM sequence: CTT
tttaaacaaaggtgtgtccc

SEQ ID NO: 222484 - DNA, 20 bp, Artificial Sequence
  Description of Artificial Sequence: Synthetic oligonucleotide
  Target: LAMA2; (-) strand; PAM type: YTN; PAM sequence: TTA
gagctttttaaacaaaggtg

SEQ ID NO: 222485 - DNA, 20 bp, Artificial Sequence
  Description of Artificial Sequence: Synthetic oligonucleotide
  Target: LAMA2; (-) strand; PAM type: YTN; PAM sequence: TTA
attagagctttttaaacaaa

SEQ ID NO: 222486 - DNA, 20 bp, Artificial Sequence
  Description of Artificial Sequence: Synthetic oligonucleotide
  Target: LAMA2; (-) strand; PAM type: YTN; PAM sequence: TTG
ttaattagagctttttaaac

SEQ ID NO: 222487 - DNA, 20 bp, Artificial Sequence
  Description of Artificial Sequence: Synthetic oligonucleotide
  Target: LAMA2; (-) strand; PAM type: YTN; PAM sequence: CTT
gttaattagagctttttaaa

SEQ ID NO: 222488 - DNA, 20 bp, Artificial Sequence
  Description of Artificial Sequence: Synthetic oligonucleotide
  Target: LAMA2; (-) strand; PAM type: YTN; PAM sequence: TTC
ttgttaattagagcttttta

SEQ ID NO: 222489 - DNA, 20 bp, Artificial Sequence
  Description of Artificial Sequence: Synthetic oligonucleotide
  Target: LAMA2; (-) strand; PAM type: YTN; PAM sequence: CTG
tggttcttgttaattagagc

SEQ ID NO: 222490 - DNA, 20 bp, Artificial Sequence
  Description of Artificial Sequence: Synthetic oligonucleotide
  Target: LAMA2; (-) strand; PAM type: YTN; PAM sequence: CTG
ctgtggttcttgttaattag

SEQ ID NO: 222491 - DNA, 20 bp, Artificial Sequence
  Description of Artificial Sequence: Synthetic oligonucleotide
  Target: LAMA2; (-) strand; PAM type: YTN; PAM sequence: CTG
tatgtgcgcccctgctgtgg

SEQ ID NO: 222492 - DNA, 20 bp, Artificial Sequence
  Description of Artificial Sequence: Synthetic oligonucleotide
  Target: LAMA2; (-) strand; PAM type: YTN; PAM sequence: CTC
caacccctgtatgtgcgccc

SEQ ID NO: 222493 - DNA, 20 bp, Artificial Sequence
  Description of Artificial Sequence: Synthetic oligonucleotide
  Target: LAMA2; (-) strand; PAM type: YTN; PAM sequence: CTC
tccaacccctgtatgtgcgc

SEQ ID NO: 222494 - DNA, 20 bp, Artificial Sequence
  Description of Artificial Sequence: Synthetic oligonucleotide
  Target: LAMA2; (-) strand; PAM type: YTN; PAM sequence: TTC
tctccaacccctgtatgtgc

SEQ ID NO: 222495 - DNA, 20 bp, Artificial Sequence
  Description of Artificial Sequence: Synthetic oligonucleotide
  Target: LAMA2; (-) strand; PAM type: YTN; PAM sequence: TTT
ctctccaacccctgtatgtg

SEQ ID NO: 222496 - DNA, 20 bp, Artificial Sequence
  Description of Artificial Sequence: Synthetic oligonucleotide
  Target: LAMA2; (-) strand; PAM type: YTN; PAM sequence: CTG
aatttctctccaacccctgt

SEQ ID NO: 222497 - DNA, 20 bp, Artificial Sequence
  Description of Artificial Sequence: Synthetic oligonucleotide
  Target: LAMA2; (-) strand; PAM type: YTN; PAM sequence: CTA
actgaatttctctccaaccc

SEQ ID NO: 222498 - DNA, 20 bp, Artificial Sequence
  Description of Artificial Sequence: Synthetic oligonucleotide
  Target: LAMA2; (-) strand; PAM type: YTN; PAM sequence: TTA
acaatggcagaggagagaat

SEQ ID NO: 222499 - DNA, 20 bp, Artificial Sequence
  Description of Artificial Sequence: Synthetic oligonucleotide
  Target: LAMA2; (-) strand; PAM type: YTN; PAM sequence: CTA
aaatggaaggttaacaatgg

SEQ ID NO: 222500 - DNA, 20 bp, Artificial Sequence
  Description of Artificial Sequence: Synthetic oligonucleotide
  Target: LAMA2; (-) strand; PAM type: YTN; PAM sequence: TTG
cctaaaatggaaggttaaca

SEQ ID NO: 222501 - DNA, 20 bp, Artificial Sequence
  Description of Artificial Sequence: Synthetic oligonucleotide
  Target: LAMA2; (-) strand; PAM type: YTN; PAM sequence: CTT
gcctaaaatggaaggttaac

SEQ ID NO: 222502 - DNA, 20 bp, Artificial Sequence
  Description of Artificial Sequence: Synthetic oligonucleotide
  Target: LAMA2; (-) strand; PAM type: YTN; PAM sequence: CTC
cttgcctaaaatggaaggtt

SEQ ID NO: 222503 - DNA, 20 bp, Artificial Sequence
  Description of Artificial Sequence: Synthetic oligonucleotide
  Target: LAMA2; (-) strand; PAM type: YTN; PAM sequence: CTA
atacagctccttgcctaaaa

SEQ ID NO: 222504 - DNA, 20 bp, Artificial Sequence
  Description of Artificial Sequence: Synthetic oligonucleotide
  Target: LAMA2; (-) strand; PAM type: YTN; PAM sequence: TTC
ctaatacagctccttgccta

SEQ ID NO: 222505 - DNA, 20 bp, Artificial Sequence
  Description of Artificial Sequence: Synthetic oligonucleotide
  Target: LAMA2; (-) strand; PAM type: YTN; PAM sequence: TTT
cctaatacagctccttgcct

SEQ ID NO: 222506 - DNA, 20 bp, Artificial Sequence
  Description of Artificial Sequence: Synthetic oligonucleotide
  Target: LAMA2; (-) strand; PAM type: YTN; PAM sequence: TTT
tcctaatacagctccttgcc

SEQ ID NO: 222507 - DNA, 20 bp, Artificial Sequence
  Description of Artificial Sequence: Synthetic oligonucleotide
  Target: LAMA2; (-) strand; PAM type: YTN; PAM sequence: TTA
ataaaaggaaaccacatttt

SEQ ID NO: 222508 - DNA, 20 bp, Artificial Sequence
  Description of Artificial Sequence: Synthetic oligonucleotide
  Target: LAMA2; (-) strand; PAM type: YTN; PAM sequence: TTT
aataaaaggaaaccacattt

SEQ ID NO: 222509 - DNA, 20 bp, Artificial Sequence
  Description of Artificial Sequence: Synthetic oligonucleotide
  Target: LAMA2; (-) strand; PAM type: YTN; PAM sequence: TTT
taataaaaggaaaccacatt

SEQ ID NO: 222510 - DNA, 20 bp, Artificial Sequence
  Description of Artificial Sequence: Synthetic oligonucleotide
  Target: LAMA2; (-) strand; PAM type: YTN; PAM sequence: CTT
ttaataaaaggaaaccacat

SEQ ID NO: 222511 - DNA, 20 bp, Artificial Sequence
  Description of Artificial Sequence: Synthetic oligonucleotide
  Target: LAMA2; (-) strand; PAM type: YTN; PAM sequence: TTC
ttttaataaaaggaaaccac

SEQ ID NO: 222512 - DNA, 20 bp, Artificial Sequence
  Description of Artificial Sequence: Synthetic oligonucleotide
  Target: LAMA2; (-) strand; PAM type: YTN; PAM sequence: TTT
cttttaataaaaggaaacca

SEQ ID NO: 222513 - DNA, 20 bp, Artificial Sequence
  Description of Artificial Sequence: Synthetic oligonucleotide
  Target: LAMA2; (-) strand; PAM type: YTN; PAM sequence: TTT
tcttttaataaaaggaaacc

SEQ ID NO: 222514 - DNA, 20 bp, Artificial Sequence
  Description of Artificial Sequence: Synthetic oligonucleotide
  Target: LAMA2; (-) strand; PAM type: YTN; PAM sequence: TTA
gagattttcttttaataaaa

SEQ ID NO: 222515 - DNA, 20 bp, Artificial Sequence
  Description of Artificial Sequence: Synthetic oligonucleotide
  Target: LAMA2; (-) strand; PAM type: YTN; PAM sequence: TTT
agagattttcttttaataaa

SEQ ID NO: 222516 - DNA, 20 bp, Artificial Sequence
  Description of Artificial Sequence: Synthetic oligonucleotide
  Target: LAMA2; (-) strand; PAM type: YTN; PAM sequence: TTA
ataatttagagattttcttt

SEQ ID NO: 222517 - DNA, 20 bp, Artificial Sequence
  Description of Artificial Sequence: Synthetic oligonucleotide
  Target: LAMA2; (-) strand; PAM type: YTN; PAM sequence: CTA
ttaataatttagagattttc

SEQ ID NO: 222518 - DNA, 20 bp, Artificial Sequence
  Description of Artificial Sequence: Synthetic oligonucleotide
  Target: LAMA2; (-) strand; PAM type: YTN; PAM sequence: TTG
gaaaagtaatatctattaat

SEQ ID NO: 222519 - DNA, 20 bp, Artificial Sequence
  Description of Artificial Sequence: Synthetic oligonucleotide
  Target: LAMA2; (-) strand; PAM type: YTN; PAM sequence: TTT
ggaaaagtaatatctattaa

SEQ ID NO: 222520 - DNA, 20 bp, Artificial Sequence
  Description of Artificial Sequence: Synthetic oligonucleotide
  Target: LAMA2; (-) strand; PAM type: YTN; PAM sequence: CTT
tggaaaagtaatatctatta

SEQ ID NO: 222521 - DNA, 20 bp, Artificial Sequence
  Description of Artificial Sequence: Synthetic oligonucleotide
  Target: LAMA2; (-) strand; PAM type: YTN; PAM sequence: TTC
tttggaaaagtaatatctat

SEQ ID NO: 222522 - DNA, 20 bp, Artificial Sequence
  Description of Artificial Sequence: Synthetic oligonucleotide
  Target: LAMA2; (-) strand; PAM type: YTN; PAM sequence: TTT
ctttggaaaagtaatatcta

SEQ ID NO: 222523 - DNA, 20 bp, Artificial Sequence
  Description of Artificial Sequence: Synthetic oligonucleotide
  Target: LAMA2; (-) strand; PAM type: YTN; PAM sequence: TTT
tctttggaaaagtaatatct

SEQ ID NO: 222524 - DNA, 20 bp, Artificial Sequence
  Description of Artificial Sequence: Synthetic oligonucleotide
  Target: LAMA2; (-) strand; PAM type: YTN; PAM sequence: CTG
aaattttctttggaaaagta

SEQ ID NO: 222525 - DNA, 20 bp, Artificial Sequence
  Description of Artificial Sequence: Synthetic oligonucleotide
  Target: LAMA2; (-) strand; PAM type: YTN; PAM sequence: TTC
tgaaattttctttggaaaag

SEQ ID NO: 222526 - DNA, 20 bp, Artificial Sequence
  Description of Artificial Sequence: Synthetic oligonucleotide
  Target: LAMA2; (-) strand; PAM type: YTN; PAM sequence: TTT
ctgaaattttctttggaaaa

SEQ ID NO: 222527 - DNA, 20 bp, Artificial Sequence
  Description of Artificial Sequence: Synthetic oligonucleotide
  Target: LAMA2; (-) strand; PAM type: YTN; PAM sequence: CTT
tctgaaattttctttggaaa

SEQ ID NO: 222528 - DNA, 20 bp, Artificial Sequence
  Description of Artificial Sequence: Synthetic oligonucleotide
  Target: LAMA2; (-) strand; PAM type: YTN; PAM sequence: CTC
ctttctgaaattttctttgg

SEQ ID NO: 222529 - DNA, 20 bp, Artificial Sequence
  Description of Artificial Sequence: Synthetic oligonucleotide
  Target: LAMA2; (-) strand; PAM type: YTN; PAM sequence: TTC
tcctttctgaaattttcttt

SEQ ID NO: 222530 - DNA, 20 bp, Artificial Sequence
  Description of Artificial Sequence: Synthetic oligonucleotide
  Target: LAMA2; (-) strand; PAM type: YTN; PAM sequence: CTT
ctcctttctgaaattttctt

SEQ ID NO: 222531 - DNA, 20 bp, Artificial Sequence
  Description of Artificial Sequence: Synthetic oligonucleotide
  Target: LAMA2; (-) strand; PAM type: YTN; PAM sequence: TTC
ttctcctttctgaaattttc

SEQ ID NO: 222532 - DNA, 20 bp, Artificial Sequence
  Description of Artificial Sequence: Synthetic oligonucleotide
  Target: LAMA2; (-) strand; PAM type: YTN; PAM sequence: TTG
ttcttctcctttctgaaatt

SEQ ID NO: 222533 - DNA, 20 bp, Artificial Sequence
  Description of Artificial Sequence: Synthetic oligonucleotide
  Target: LAMA2; (-) strand; PAM type: YTN; PAM sequence: TTA
tgttgttcttctcctttctg

SEQ ID NO: 222534 - DNA, 20 bp, Artificial Sequence
  Description of Artificial Sequence: Synthetic oligonucleotide
  Target: LAMA2; (-) strand; PAM type: YTN; PAM sequence: TTG
attatgttgttcttctcctt

SEQ ID NO: 222535 - DNA, 20 bp, Artificial Sequence
  Description of Artificial Sequence: Synthetic oligonucleotide
  Target: LAMA2; (-) strand; PAM type: YTN; PAM sequence: TTT
gattatgttgttcttctcct

SEQ ID NO: 222536 - DNA, 20 bp, Artificial Sequence
  Description of Artificial Sequence: Synthetic oligonucleotide
  Target: LAMA2; (-) strand; PAM type: YTN; PAM sequence: TTT
tgattatgttgttcttctcc

SEQ ID NO: 222537 - DNA, 20 bp, Artificial Sequence
  Description of Artificial Sequence: Synthetic oligonucleotide
  Target: LAMA2; (-) strand; PAM type: YTN; PAM sequence: TTA
aagtgtccacagattttgat

SEQ ID NO: 222538 - DNA, 20 bp, Artificial Sequence
  Description of Artificial Sequence: Synthetic oligonucleotide
  Target: LAMA2; (-) strand; PAM type: YTN; PAM sequence: TTT
aaagtgtccacagattttga

SEQ ID NO: 222539 - DNA, 20 bp, Artificial Sequence
  Description of Artificial Sequence: Synthetic oligonucleotide
  Target: LAMA2; (-) strand; PAM type: YTN; PAM sequence: CTT
taaagtgtccacagattttg

SEQ ID NO: 222540 - DNA, 20 bp, Artificial Sequence
  Description of Artificial Sequence: Synthetic oligonucleotide
  Target: LAMA2; (-) strand; PAM type: YTN; PAM sequence: TTA
tctttaaagtgtccacagat

SEQ ID NO: 222541 - DNA, 20 bp, Artificial Sequence
  Description of Artificial Sequence: Synthetic oligonucleotide
  Target: LAMA2; (-) strand; PAM type: YTN; PAM sequence: CTT
atctttaaagtgtccacaga

SEQ ID NO: 222542 - DNA, 20 bp, Artificial Sequence
  Description of Artificial Sequence: Synthetic oligonucleotide
  Target: LAMA2; (-) strand; PAM type: YTN; PAM sequence: CTC
catcatccttatctttaaag

SEQ ID NO: 222543 - DNA, 20 bp, Artificial Sequence
  Description of Artificial Sequence: Synthetic oligonucleotide
  Target: LAMA2; (-) strand; PAM type: YTN; PAM sequence: TTC
tccatcatccttatctttaa

SEQ ID NO: 222544 - DNA, 20 bp, Artificial Sequence
  Description of Artificial Sequence: Synthetic oligonucleotide
  Target: LAMA2; (-) strand; PAM type: YTN; PAM sequence: TTT
ctccatcatccttatcttta

SEQ ID NO: 222545 - DNA, 20 bp, Artificial Sequence
  Description of Artificial Sequence: Synthetic oligonucleotide
  Target: LAMA2; (-) strand; PAM type: YTN; PAM sequence: CTT
tctccatcatccttatcttt

SEQ ID NO: 222546 - DNA, 20 bp, Artificial Sequence
  Description of Artificial Sequence: Synthetic oligonucleotide
  Target: LAMA2; (-) strand; PAM type: YTN; PAM sequence: TTC
agtctttctccatcatcctt

SEQ ID NO: 222547 - DNA, 20 bp, Artificial Sequence
  Description of Artificial Sequence: Synthetic oligonucleotide
  Target: LAMA2; (-) strand; PAM type: YTN; PAM sequence: TTG
caaaattcagtctttctcca

SEQ ID NO: 222548 - DNA, 20 bp, Artificial Sequence
  Description of Artificial Sequence: Synthetic oligonucleotide
  Target: LAMA2; (-) strand; PAM type: YTN; PAM sequence: CTT
gcaaaattcagtctttctcc

SEQ ID NO: 222549 - DNA, 20 bp, Artificial Sequence
  Description of Artificial Sequence: Synthetic oligonucleotide
  Target: LAMA2; (-) strand; PAM type: YTN; PAM sequence: CTG
cttgcaaaattcagtctttc

SEQ ID NO: 222550 - DNA, 20 bp, Artificial Sequence
  Description of Artificial Sequence: Synthetic oligonucleotide
  Target: LAMA2; (-) strand; PAM type: YTN; PAM sequence: TTA
taacctgcttgcaaaattca

SEQ ID NO: 222551 - DNA, 20 bp, Artificial Sequence
  Description of Artificial Sequence: Synthetic oligonucleotide
  Target: LAMA2; (-) strand; PAM type: YTN; PAM sequence: TTA
ttataacctgcttgcaaaat

SEQ ID NO: 222552 - DNA, 20 bp, Artificial Sequence
  Description of Artificial Sequence: Synthetic oligonucleotide
  Target: LAMA2; (-) strand; PAM type: YTN; PAM sequence: CTC
aggagttattataacctgct

SEQ ID NO: 222553 - DNA, 20 bp, Artificial Sequence
  Description of Artificial Sequence: Synthetic oligonucleotide
  Target: LAMA2; (-) strand; PAM type: YTN; PAM sequence: CTC
tcaggagttattataacctg

SEQ ID NO: 222554 - DNA, 20 bp, Artificial Sequence
  Description of Artificial Sequence: Synthetic oligonucleotide
  Target: LAMA2; (-) strand; PAM type: YTN; PAM sequence: TTA
caatcactctcaggagttat

SEQ ID NO: 222555 - DNA, 20 bp, Artificial Sequence
  Description of Artificial Sequence: Synthetic oligonucleotide
  Target: LAMA2; (-) strand; PAM type: YTN; PAM sequence: CTA
ttacaatcactctcaggagt

SEQ ID NO: 222556 - DNA, 20 bp, Artificial Sequence
  Description of Artificial Sequence: Synthetic oligonucleotide
  Target: LAMA2; (-) strand; PAM type: YTN; PAM sequence: CTA
atcaccctattacaatcact

SEQ ID NO: 222557 - DNA, 20 bp, Artificial Sequence
  Description of Artificial Sequence: Synthetic oligonucleotide
  Target: LAMA2; (-) strand; PAM type: YTN; PAM sequence: TTG
tagtccatgcatgacctaat

SEQ ID NO: 222558 - DNA, 20 bp, Artificial Sequence
  Description of Artificial Sequence: Synthetic oligonucleotide
  Target: LAMA2; (-) strand; PAM type: YTN; PAM sequence: CTT
gtagtccatgcatgacctaa

SEQ ID NO: 222559 - DNA, 20 bp, Artificial Sequence
  Description of Artificial Sequence: Synthetic oligonucleotide
  Target: LAMA2; (-) strand; PAM type: YTN; PAM sequence: TTG
atcccttgtagtccatgcat

SEQ ID NO: 222560 - DNA, 20 bp, Artificial Sequence
  Description of Artificial Sequence: Synthetic oligonucleotide
  Target: LAMA2; (-) strand; PAM type: YTN; PAM sequence: CTT
gatcccttgtagtccatgca

SEQ ID NO: 222561 - DNA, 20 bp, Artificial Sequence
  Description of Artificial Sequence: Synthetic oligonucleotide
  Target: LAMA2; (-) strand; PAM type: YTN; PAM sequence: CTA
cttgatcccttgtagtccat

SEQ ID NO: 222562 - DNA, 20 bp, Artificial Sequence
  Description of Artificial Sequence: Synthetic oligonucleotide
  Target: LAMA2; (-) strand; PAM type: YTN; PAM sequence: TTC
tacttgatcccttgtagtcc

SEQ ID NO: 222563 - DNA, 20 bp, Artificial Sequence
  Description of Artificial Sequence: Synthetic oligonucleotide
  Target: LAMA2; (-) strand; PAM type: YTN; PAM sequence: TTT
ctacttgatcccttgtagtc

SEQ ID NO: 222564 - DNA, 20 bp, Artificial Sequence
  Description of Artificial Sequence: Synthetic oligonucleotide
  Target: LAMA2; (-) strand; PAM type: YTN; PAM sequence: TTT
tctacttgatcccttgtagt

SEQ ID NO: 222565 - DNA, 20 bp, Artificial Sequence
  Description of Artificial Sequence: Synthetic oligonucleotide
  Target: LAMA2; (-) strand; PAM type: YTN; PAM sequence: CTT
ttctacttgatcccttgtag

SEQ ID NO: 222566 - DNA, 20 bp, Artificial Sequence
  Description of Artificial Sequence: Synthetic oligonucleotide
  Target: LAMA2; (-) strand; PAM type: YTN; PAM sequence: CTC
cttttctacttgatcccttg

SEQ ID NO: 222567 - DNA, 20 bp, Artificial Sequence
  Description of Artificial Sequence: Synthetic oligonucleotide
  Target: LAMA2; (-) strand; PAM type: YTN; PAM sequence: TTA
ccactccttttctacttgat

SEQ ID NO: 222568 - DNA, 20 bp, Artificial Sequence
  Description of Artificial Sequence: Synthetic oligonucleotide
  Target: LAMA2; (-) strand; PAM type: YTN; PAM sequence: TTT
accactccttttctacttga

SEQ ID NO: 222569 - DNA, 20 bp, Artificial Sequence
  Description of Artificial Sequence: Synthetic oligonucleotide
  Target: LAMA2; (-) strand; PAM type: YTN; PAM sequence: CTT
taccactccttttctacttg

SEQ ID NO: 222570 - DNA, 20 bp, Artificial Sequence
  Description of Artificial Sequence: Synthetic oligonucleotide
  Target: LAMA2; (-) strand; PAM type: YTN; PAM sequence: CTA
ctttaccactccttttctac

SEQ ID NO: 222571 - DNA, 20 bp, Artificial Sequence
  Description of Artificial Sequence: Synthetic oligonucleotide
  Target: LAMA2; (-) strand; PAM type: YTN; PAM sequence: TTA
ctactttaccactccttttc

SEQ ID NO: 222572 - DNA, 20 bp, Artificial Sequence
  Description of Artificial Sequence: Synthetic oligonucleotide
  Target: LAMA2; (-) strand; PAM type: YTN; PAM sequence: TTT
actactttaccactcctttt

SEQ ID NO: 222573 - DNA, 20 bp, Artificial Sequence
  Description of Artificial Sequence: Synthetic oligonucleotide
  Target: LAMA2; (-) strand; PAM type: YTN; PAM sequence: CTG
tttactactttaccactcct

SEQ ID NO: 222574 - DNA, 20 bp, Artificial Sequence
  Description of Artificial Sequence: Synthetic oligonucleotide
  Target: LAMA2; (-) strand; PAM type: YTN; PAM sequence: CTG
ctgtttactactttaccact

SEQ ID NO: 222575 - DNA, 20 bp, Artificial Sequence
  Description of Artificial Sequence: Synthetic oligonucleotide
  Target: LAMA2; (-) strand; PAM type: YTN; PAM sequence: CTC
tgctgtttactactttacca

SEQ ID NO: 222576 - DNA, 20 bp, Artificial Sequence
  Description of Artificial Sequence: Synthetic oligonucleotide
  Target: LAMA2; (-) strand; PAM type: YTN; PAM sequence: CTG
taccctctgctgtttactac

SEQ ID NO: 222577 - DNA, 20 bp, Artificial Sequence
  Description of Artificial Sequence: Synthetic oligonucleotide
  Target: LAMA2; (-) strand; PAM type: YTN; PAM sequence: TTA
agagtagcctgtaccctctg

SEQ ID NO: 222578 - DNA, 20 bp, Artificial Sequence
  Description of Artificial Sequence: Synthetic oligonucleotide
  Target: LAMA2; (-) strand; PAM type: YTN; PAM sequence: CTT
aagagtagcctgtaccctct

SEQ ID NO: 222579 - DNA, 20 bp, Artificial Sequence
  Description of Artificial Sequence: Synthetic oligonucleotide
  Target: LAMA2; (-) strand; PAM type: YTN; PAM sequence: TTC
ttaagagtagcctgtaccct

SEQ ID NO: 222580 - DNA, 20 bp, Artificial Sequence
  Description of Artificial Sequence: Synthetic oligonucleotide
  Target: LAMA2; (-) strand; PAM type: YTN; PAM sequence: TTT
cttaagagtagcctgtaccc

SEQ ID NO: 222581 - DNA, 20 bp, Artificial Sequence
  Description of Artificial Sequence: Synthetic oligonucleotide
  Target: LAMA2; (-) strand; PAM type: YTN; PAM sequence: CTT
tcttaagagtagcctgtacc

SEQ ID NO: 222582 - DNA, 20 bp, Artificial Sequence
  Description of Artificial Sequence: Synthetic oligonucleotide
  Target: LAMA2; (-) strand; PAM type: YTN; PAM sequence: CTA
gggactttcttaagagtagc

SEQ ID NO: 222583 - DNA, 20 bp, Artificial Sequence
  Description of Artificial Sequence: Synthetic oligonucleotide
  Target: LAMA2; (-) strand; PAM type: YTN; PAM sequence: CTC
tagggactttcttaagagta

SEQ ID NO: 222584 - DNA, 20 bp, Artificial Sequence
  Description of Artificial Sequence: Synthetic oligonucleotide
  Target: LAMA2; (-) strand; PAM type: YTN; PAM sequence: TTC
tctagggactttcttaagag

SEQ ID NO: 222585 - DNA, 20 bp, Artificial Sequence
  Description of Artificial Sequence: Synthetic oligonucleotide
  Target: LAMA2; (-) strand; PAM type: YTN; PAM sequence: CTT
ctctagggactttcttaaga

SEQ ID NO: 222586 - DNA, 20 bp, Artificial Sequence
  Description of Artificial Sequence: Synthetic oligonucleotide
  Target: LAMA2; (-) strand; PAM type: YTN; PAM sequence: TTA
tccttctctagggactttct

SEQ ID NO: 222587 - DNA, 20 bp, Artificial Sequence
  Description of Artificial Sequence: Synthetic oligonucleotide
  Target: LAMA2; (-) strand; PAM type: YTN; PAM sequence: CTT
atccttctctagggactttc

SEQ ID NO: 222588 - DNA, 20 bp, Artificial Sequence
  Description of Artificial Sequence: Synthetic oligonucleotide
  Target: LAMA2; (-) strand; PAM type: YTN; PAM sequence: TTC
ttatccttctctagggactt

SEQ ID NO: 222589 - DNA, 20 bp, Artificial Sequence
  Description of Artificial Sequence: Synthetic oligonucleotide
  Target: LAMA2; (-) strand; PAM type: YTN; PAM sequence: TTT
cttatccttctctagggact

SEQ ID NO: 222590 - DNA, 20 bp, Artificial Sequence
  Description of Artificial Sequence: Synthetic oligonucleotide
  Target: LAMA2; (-) strand; PAM type: YTN; PAM sequence: TTT
tcttatccttctctagggac

SEQ ID NO: 222591 - DNA, 20 bp, Artificial Sequence
  Description of Artificial Sequence: Synthetic oligonucleotide
  Target: LAMA2; (-) strand; PAM type: YTN; PAM sequence: TTG
ccccattttcttatccttct

SEQ ID NO: 222592 - DNA, 20 bp, Artificial Sequence
  Description of Artificial Sequence: Synthetic oligonucleotide
  Target: LAMA2; (-) strand; PAM type: YTN; PAM sequence: TTA
tgtattgccccattttctta

SEQ ID NO: 222593 - DNA, 20 bp, Artificial Sequence
  Description of Artificial Sequence: Synthetic oligonucleotide
  Target: LAMA2; (-) strand; PAM type: YTN; PAM sequence: CTT
atgtattgccccattttctt

SEQ ID NO: 222594 - DNA, 20 bp, Artificial Sequence
  Description of Artificial Sequence: Synthetic oligonucleotide
  Target: LAMA2; (-) strand; PAM type: YTN; PAM sequence: TTC
caagcttatgtattgcccca

SEQ ID NO: 222595 - DNA, 20 bp, Artificial Sequence
  Description of Artificial Sequence: Synthetic oligonucleotide
  Target: LAMA2; (-) strand; PAM type: YTN; PAM sequence: TTT
ccaagcttatgtattgcccc

SEQ ID NO: 222596 - DNA, 20 bp, Artificial Sequence
  Description of Artificial Sequence: Synthetic oligonucleotide
  Target: LAMA2; (-) strand; PAM type: YTN; PAM sequence: CTA
tttccaagcttatgtattgc

SEQ ID NO: 222597 - DNA, 20 bp, Artificial Sequence
  Description of Artificial Sequence: Synthetic oligonucleotide
  Target: LAMA2; (-) strand; PAM type: YTN; PAM sequence: TTA
aaaaaaaaagaaatatcatc

SEQ ID NO: 222598 - DNA, 20 bp, Artificial Sequence
  Description of Artificial Sequence: Synthetic oligonucleotide
  Target: LAMA2; (-) strand; PAM type: YTN; PAM sequence: TTA
aattaaaaaaaaaagaaata

SEQ ID NO: 222599 - DNA, 20 bp, Artificial Sequence
  Description of Artificial Sequence: Synthetic oligonucleotide
  Target: LAMA2; (-) strand; PAM type: YTN; PAM sequence: TTA
ataaaaaaaataaataaata

SEQ ID NO: 222600 - DNA, 20 bp, Artificial Sequence
  Description of Artificial Sequence: Synthetic oligonucleotide
  Target: LAMA2; (-) strand; PAM type: YTN; PAM sequence: CTG
tgagaaacacccaagaatga

SEQ ID NO: 222601 - DNA, 20 bp, Artificial Sequence
  Description of Artificial Sequence: Synthetic oligonucleotide
  Target: LAMA2; (-) strand; PAM type: YTN; PAM sequence: CTC
tgtgagaaacacccaagaat

SEQ ID NO: 222602 - DNA, 20 bp, Artificial Sequence
  Description of Artificial Sequence: Synthetic oligonucleotide
  Target: LAMA2; (-) strand; PAM type: YTN; PAM sequence: CTG
ccaaatccccctctgtgaga

SEQ ID NO: 222603 - DNA, 20 bp, Artificial Sequence
  Description of Artificial Sequence: Synthetic oligonucleotide
  Target: LAMA2; (-) strand; PAM type: YTN; PAM sequence: TTG
tcccgtgaccctgccaaatc

SEQ ID NO: 222604 - DNA, 20 bp, Artificial Sequence
  Description of Artificial Sequence: Synthetic oligonucleotide
  Target: LAMA2; (-) strand; PAM type: YTN; PAM sequence: CTA
ttgtcccgtgaccctgccaa

SEQ ID NO: 222605 - DNA, 20 bp, Artificial Sequence
  Description of Artificial Sequence: Synthetic oligonucleotide
  Target: LAMA2; (-) strand; PAM type: YTN; PAM sequence: CTC
cactattgtcccgtgaccct

SEQ ID NO: 222606 - DNA, 20 bp, Artificial Sequence
  Description of Artificial Sequence: Synthetic oligonucleotide
  Target: LAMA2; (-) strand; PAM type: YTN; PAM sequence: TTC
cctccactattgtcccgtga

SEQ ID NO: 222607 - DNA, 20 bp, Artificial Sequence
  Description of Artificial Sequence: Synthetic oligonucleotide
  Target: LAMA2; (-) strand; PAM type: YTN; PAM sequence: CTT
ccctccactattgtcccgtg

SEQ ID NO: 222608 - DNA, 20 bp, Artificial Sequence
  Description of Artificial Sequence: Synthetic oligonucleotide
  Target: LAMA2; (-) strand; PAM type: YTN; PAM sequence: CTG
accttccctccactattgtc

SEQ ID NO: 222609 - DNA, 20 bp, Artificial Sequence
  Description of Artificial Sequence: Synthetic oligonucleotide
  Target: LAMA2; (-) strand; PAM type: YTN; PAM sequence: CTG
ctgaccttccctccactatt

SEQ ID NO: 222610 - DNA, 20 bp, Artificial Sequence
  Description of Artificial Sequence: Synthetic oligonucleotide
  Target: LAMA2; (-) strand; PAM type: YTN; PAM sequence: TTA
tctgctgaccttccctccac

SEQ ID NO: 222611 - DNA, 20 bp, Artificial Sequence
  Description of Artificial Sequence: Synthetic oligonucleotide
  Target: LAMA2; (-) strand; PAM type: YTN; PAM sequence: TTT
atctgctgaccttccctcca

SEQ ID NO: 222612 - DNA, 20 bp, Artificial Sequence
  Description of Artificial Sequence: Synthetic oligonucleotide
  Target: LAMA2; (-) strand; PAM type: YTN; PAM sequence: TTG
tttatctgctgaccttccct

SEQ ID NO: 222613 - DNA, 20 bp, Artificial Sequence
  Description of Artificial Sequence: Synthetic oligonucleotide
  Target: LAMA2; (-) strand; PAM type: YTN; PAM sequence: CTT
gtttatctgctgaccttccc

SEQ ID NO: 222614 - DNA, 20 bp, Artificial Sequence
  Description of Artificial Sequence: Synthetic oligonucleotide
  Target: LAMA2; (-) strand; PAM type: YTN; PAM sequence: TTC
acttgtttatctgctgacct

SEQ ID NO: 222615 - DNA, 20 bp, Artificial Sequence
  Description of Artificial Sequence: Synthetic oligonucleotide
  Target: LAMA2; (-) strand; PAM type: YTN; PAM sequence: TTG
ttcacttgtttatctgctga

SEQ ID NO: 222616 - DNA, 20 bp, Artificial Sequence
  Description of Artificial Sequence: Synthetic oligonucleotide
  Target: LAMA2; (-) strand; PAM type: YTN; PAM sequence: TTT
gttcacttgtttatctgctg

SEQ ID NO: 222617 - DNA, 20 bp, Artificial Sequence
  Description of Artificial Sequence: Synthetic oligonucleotide
  Target: LAMA2; (-) strand; PAM type: YTN; PAM sequence: CTT
tgttcacttgtttatctgct

SEQ ID NO: 222618 - DNA, 20 bp, Artificial Sequence
  Description of Artificial Sequence: Synthetic oligonucleotide
  Target: LAMA2; (-) strand; PAM type: YTN; PAM sequence: CTA
ggaaaaccagagacctttgt

SEQ ID NO: 222619 - DNA, 20 bp, Artificial Sequence
  Description of Artificial Sequence: Synthetic oligonucleotide
  Target: LAMA2; (-) strand; PAM type: YTN; PAM sequence: CTG
cctaggaaaaccagagacct

SEQ ID NO: 222620 - DNA, 20 bp, Artificial Sequence
  Description of Artificial Sequence: Synthetic oligonucleotide
  Target: LAMA2; (-) strand; PAM type: YTN; PAM sequence: CTC
tgcctaggaaaaccagagac

SEQ ID NO: 222621 - DNA, 20 bp, Artificial Sequence
  Description of Artificial Sequence: Synthetic oligonucleotide
  Target: LAMA2; (-) strand; PAM type: YTN; PAM sequence: CTC
aagtacccagggacacaaac

SEQ ID NO: 222622 - DNA, 20 bp, Artificial Sequence
  Description of Artificial Sequence: Synthetic oligonucleotide
  Target: LAMA2; (-) strand; PAM type: YTN; PAM sequence: CTG
atctcaagtacccagggaca

SEQ ID NO: 222623 - DNA, 20 bp, Artificial Sequence
  Description of Artificial Sequence: Synthetic oligonucleotide
  Target: LAMA2; (-) strand; PAM type: YTN; PAM sequence: CTC
cctgatctcaagtacccagg

SEQ ID NO: 222624 - DNA, 20 bp, Artificial Sequence
  Description of Artificial Sequence: Synthetic oligonucleotide
  Target: LAMA2; (-) strand; PAM type: YTN; PAM sequence: TTA
agagtcatcaggactccctg

SEQ ID NO: 222625 - DNA, 20 bp, Artificial Sequence
  Description of Artificial Sequence: Synthetic oligonucleotide
  Target: LAMA2; (-) strand; PAM type: YTN; PAM sequence: TTA
aggcagcatgcgcgttaaga

SEQ ID NO: 222626 - DNA, 20 bp, Artificial Sequence
  Description of Artificial Sequence: Synthetic oligonucleotide
  Target: LAMA2; (-) strand; PAM type: YTN; PAM sequence: TTT
aaggcagcatgcgcgttaag

SEQ ID NO: 222627 - DNA, 20 bp, Artificial Sequence
  Description of Artificial Sequence: Synthetic oligonucleotide
  Target: LAMA2; (-) strand; PAM type: YTN; PAM sequence: CTT
taaggcagcatgcgcgttaa

SEQ ID NO: 222628 - DNA, 20 bp, Artificial Sequence
  Description of Artificial Sequence: Synthetic oligonucleotide
  Target: LAMA2; (-) strand; PAM type: YTN; PAM sequence: TTA
aacagatgctttaaggcagc

SEQ ID NO: 222629 - DNA, 20 bp, Artificial Sequence
  Description of Artificial Sequence: Synthetic oligonucleotide
  Target: LAMA2; (-) strand; PAM type: YTN; PAM sequence: TTG
ttaaacagatgctttaaggc

SEQ ID NO: 222630 - DNA, 20 bp, Artificial Sequence
  Description of Artificial Sequence: Synthetic oligonucleotide
  Target: LAMA2; (-) strand; PAM type: YTN; PAM sequence: TTT
gttaaacagatgctttaagg

SEQ ID NO: 222631 - DNA, 20 bp, Artificial Sequence
  Description of Artificial Sequence: Synthetic oligonucleotide
  Target: LAMA2; (-) strand; PAM type: YTN; PAM sequence: CTT
tgttaaacagatgctttaag

SEQ ID NO: 222632 - DNA, 20 bp, Artificial Sequence
  Description of Artificial Sequence: Synthetic oligonucleotide
  Target: LAMA2; (-) strand; PAM type: YTN; PAM sequence: TTA
agggcggtacaagatgtgct

SEQ ID NO: 222633 - DNA, 20 bp, Artificial Sequence
  Description of Artificial Sequence: Synthetic oligonucleotide
  Target: LAMA2; (-) strand; PAM type: YTN; PAM sequence: TTG
aatggattaagggcggtaca

SEQ ID NO: 222634 - DNA, 20 bp, Artificial Sequence
  Description of Artificial Sequence: Synthetic oligonucleotide
  Target: LAMA2; (-) strand; PAM type: YTN; PAM sequence: CTC
agggttgaatggattaaggg

SEQ ID NO: 222635 - DNA, 20 bp, Artificial Sequence
  Description of Artificial Sequence: Synthetic oligonucleotide
  Target: LAMA2; (-) strand; PAM type: YTN; PAM sequence: CTG
tgtccactcagggttgaatg

SEQ ID NO: 222636 - DNA, 20 bp, Artificial Sequence
  Description of Artificial Sequence: Synthetic oligonucleotide
  Target: LAMA2; (-) strand; PAM type: YTN; PAM sequence: CTG
aaacatgtgctgtgtccact

SEQ ID NO: 222637 - DNA, 20 bp, Artificial Sequence
  Description of Artificial Sequence: Synthetic oligonucleotide
  Target: LAMA2; (-) strand; PAM type: YTN; PAM sequence: CTC
tgaaacatgtgctgtgtcca

SEQ ID NO: 222638 - DNA, 20 bp, Artificial Sequence
  Description of Artificial Sequence: Synthetic oligonucleotide
  Target: LAMA2; (-) strand; PAM type: YTN; PAM sequence: CTC
tctgaaacatgtgctgtgtc

SEQ ID NO: 222639 - DNA, 20 bp, Artificial Sequence
  Description of Artificial Sequence: Synthetic oligonucleotide
  Target: LAMA2; (-) strand; PAM type: YTN; PAM sequence: CTC
ccaaccccgtgctctctgaa

SEQ ID NO: 222640 - DNA, 20 bp, Artificial Sequence
  Description of Artificial Sequence: Synthetic oligonucleotide
  Target: LAMA2; (-) strand; PAM type: YTN; PAM sequence: TTA
ctcccaaccccgtgctctct

SEQ ID NO: 222641 - DNA, 20 bp, Artificial Sequence
  Description of Artificial Sequence: Synthetic oligonucleotide
  Target: LAMA2; (-) strand; PAM type: YTN; PAM sequence: CTT
actcccaaccccgtgctctc

SEQ ID NO: 222642 - DNA, 20 bp, Artificial Sequence
  Description of Artificial Sequence: Synthetic oligonucleotide
  Target: LAMA2; (-) strand; PAM type: YTN; PAM sequence: CTA
tgaccttactcccaaccccg

SEQ ID NO: 222643 - DNA, 20 bp, Artificial Sequence
  Description of Artificial Sequence: Synthetic oligonucleotide
  Target: LAMA2; (-) strand; PAM type: YTN; PAM sequence: TTG
atctatgaccttactcccaa

SEQ ID NO: 222644 - DNA, 20 bp, Artificial Sequence
  Description of Artificial Sequence: Synthetic oligonucleotide
  Target: LAMA2; (-) strand; PAM type: YTN; PAM sequence: CTG
ttgatctatgaccttactcc

SEQ ID NO: 222645 - DNA, 20 bp, Artificial Sequence
  Description of Artificial Sequence: Synthetic oligonucleotide
  Target: LAMA2; (-) strand; PAM type: YTN; PAM sequence: TTG
ggatgctgttgatctatgac

SEQ ID NO: 222646 - DNA, 20 bp, Artificial Sequence
  Description of Artificial Sequence: Synthetic oligonucleotide
  Target: LAMA2; (-) strand; PAM type: YTN; PAM sequence: CTT
gggatgctgttgatctatga

SEQ ID NO: 222647 - DNA, 20 bp, Artificial Sequence
  Description of Artificial Sequence: Synthetic oligonucleotide
  Target: LAMA2; (-) strand; PAM type: YTN; PAM sequence: CTG
ccttgggatgctgttgatct

SEQ ID NO: 222648 - DNA, 20 bp, Artificial Sequence
  Description of Artificial Sequence: Synthetic oligonucleotide
  Target: LAMA2; (-) strand; PAM type: YTN; PAM sequence: TTC
tgccttgggatgctgttgat

SEQ ID NO: 222649 - DNA, 20 bp, Artificial Sequence
  Description of Artificial Sequence: Synthetic oligonucleotide
  Target: LAMA2; (-) strand; PAM type: YTN; PAM sequence: CTT
ctgccttgggatgctgttga

SEQ ID NO: 222650 - DNA, 20 bp, Artificial Sequence
  Description of Artificial Sequence: Synthetic oligonucleotide
  Target: LAMA2; (-) strand; PAM type: YTN; PAM sequence: TTC
ttctgccttgggatgctgtt

SEQ ID NO: 222651 - DNA, 20 bp, Artificial Sequence
  Description of Artificial Sequence: Synthetic oligonucleotide
  Target: LAMA2; (-) strand; PAM type: YTN; PAM sequence: CTA
agaaagattcttctgccttg

SEQ ID NO: 222652 - DNA, 20 bp, Artificial Sequence
  Description of Artificial Sequence: Synthetic oligonucleotide
  Target: LAMA2; (-) strand; PAM type: YTN; PAM sequence: CTG
tactaagaaagattcttctg

SEQ ID NO: 222653 - DNA, 20 bp, Artificial Sequence
  Description of Artificial Sequence: Synthetic oligonucleotide
  Target: LAMA2; (-) strand; PAM type: YTN; PAM sequence: TTC
tgtactaagaaagattcttc

SEQ ID NO: 222654 - DNA, 20 bp, Artificial Sequence
  Description of Artificial Sequence: Synthetic oligonucleotide
  Target: LAMA2; (-) strand; PAM type: YTN; PAM sequence: TTG
ttctgtactaagaaagattc

SEQ ID NO: 222655 - DNA, 20 bp, Artificial Sequence
  Description of Artificial Sequence: Synthetic oligonucleotide
  Target: LAMA2; (-) strand; PAM type: YTN; PAM sequence: TTT
gttctgtactaagaaagatt

SEQ ID NO: 222656 - DNA, 20 bp, Artificial Sequence
  Description of Artificial Sequence: Synthetic oligonucleotide
  Target: LAMA2; (-) strand; PAM type: YTN; PAM sequence: TTT
tgttctgtactaagaaagat

SEQ ID NO: 222657 - DNA, 20 bp, Artificial Sequence
  Description of Artificial Sequence: Synthetic oligonucleotide
  Target: LAMA2; (-) strand; PAM type: YTN; PAM sequence: CTC
cattttgttctgtactaaga

SEQ ID NO: 222658 - DNA, 20 bp, Artificial Sequence
  Description of Artificial Sequence: Synthetic oligonucleotide
  Target: LAMA2; (-) strand; PAM type: YTN; PAM sequence: CTG
tgtagaaagaagtagacata

SEQ ID NO: 222659 - DNA, 20 bp, Artificial Sequence
  Description of Artificial Sequence: Synthetic oligonucleotide
  Target: LAMA2; (-) strand; PAM type: YTN; PAM sequence: CTG
tgtctgtgtagaaagaagta

SEQ ID NO: 222660 - DNA, 20 bp, Artificial Sequence
  Description of Artificial Sequence: Synthetic oligonucleotide
  Target: LAMA2; (-) strand; PAM type: YTN; PAM sequence: TTG
ctgtgtctgtgtagaaagaa

SEQ ID NO: 222661 - DNA, 20 bp, Artificial Sequence
  Description of Artificial Sequence: Synthetic oligonucleotide
  Target: LAMA2; (-) strand; PAM type: YTN; PAM sequence: TTG
ttgctgtgtctgtgtagaaa

SEQ ID NO: 222662 - DNA, 20 bp, Artificial Sequence
  Description of Artificial Sequence: Synthetic oligonucleotide
  Target: LAMA2; (-) strand; PAM type: YTN; PAM sequence: TTG
tggaatagaaaagggggaaa

SEQ ID NO: 222663 - DNA, 20 bp, Artificial Sequence
  Description of Artificial Sequence: Synthetic oligonucleotide
  Target: LAMA2; (-) strand; PAM type: YTN; PAM sequence: TTT
gtggaatagaaaagggggaa

SEQ ID NO: 222664 - DNA, 20 bp, Artificial Sequence
  Description of Artificial Sequence: Synthetic oligonucleotide
  Target: LAMA2; (-) strand; PAM type: YTN; PAM sequence: TTT
tgtggaatagaaaaggggga

SEQ ID NO: 222665 - DNA, 20 bp, Artificial Sequence
  Description of Artificial Sequence: Synthetic oligonucleotide
  Target: LAMA2; (-) strand; PAM type: YTN; PAM sequence: TTG
agaacgggccatgatgatga

SEQ ID NO: 222666 - DNA, 20 bp, Artificial Sequence
  Description of Artificial Sequence: Synthetic oligonucleotide
  Target: LAMA2; (-) strand; PAM type: YTN; PAM sequence: CTC
attgagaacgggccatgatg

SEQ ID NO: 222667 - DNA, 20 bp, Artificial Sequence
  Description of Artificial Sequence: Synthetic oligonucleotide
  Target: LAMA2; (-) strand; PAM type: YTN; PAM sequence: CTG
ggaggtgtacccagcagctc

SEQ ID NO: 222668 - DNA, 20 bp, Artificial Sequence
  Description of Artificial Sequence: Synthetic oligonucleotide
  Target: LAMA2; (-) strand; PAM type: YTN; PAM sequence: CTG
cccagccgccaccccatctg

SEQ ID NO: 222669 - DNA, 20 bp, Artificial Sequence
  Description of Artificial Sequence: Synthetic oligonucleotide
  Target: LAMA2; (-) strand; PAM type: YTN; PAM sequence: CTC
tgcccagccgccaccccatc

SEQ ID NO: 222670 - DNA, 20 bp, Artificial Sequence
  Description of Artificial Sequence: Synthetic oligonucleotide
  Target: LAMA2; (-) strand; PAM type: YTN; PAM sequence: CTG
ggaagtgaggagcccctctg

SEQ ID NO: 222671 - DNA, 20 bp, Artificial Sequence
  Description of Artificial Sequence: Synthetic oligonucleotide
  Target: LAMA2; (-) strand; PAM type: YTN; PAM sequence: TTC
tgggaagtgaggagcccctc

SEQ ID NO: 222672 - DNA, 20 bp, Artificial Sequence
  Description of Artificial Sequence: Synthetic oligonucleotide
  Target: LAMA2; (-) strand; PAM type: YTN; PAM sequence: CTT
ctgggaagtgaggagcccct

SEQ ID NO: 222673 - DNA, 20 bp, Artificial Sequence
  Description of Artificial Sequence: Synthetic oligonucleotide
  Target: LAMA2; (-) strand; PAM type: YTN; PAM sequence: CTA
ccggccaccccttctgggaa

SEQ ID NO: 222674 - DNA, 20 bp, Artificial Sequence
  Description of Artificial Sequence: Synthetic oligonucleotide
  Target: LAMA2; (-) strand; PAM type: YTN; PAM sequence: CTC
taccggccaccccttctggg

SEQ ID NO: 222675 - DNA, 20 bp, Artificial Sequence
  Description of Artificial Sequence: Synthetic oligonucleotide
  Target: LAMA2; (-) strand; PAM type: YTN; PAM sequence: CTG
ggagggaggtggggggcgcc

SEQ ID NO: 222676 - DNA, 20 bp, Artificial Sequence
  Description of Artificial Sequence: Synthetic oligonucleotide
  Target: LAMA2; (-) strand; PAM type: YTN; PAM sequence: CTG
gccagccaccccgtctggga

SEQ ID NO: 222677 - DNA, 20 bp, Artificial Sequence
  Description of Artificial Sequence: Synthetic oligonucleotide
  Target: LAMA2; (-) strand; PAM type: YTN; PAM sequence: CTG
ccagccgccccgtccaggag

SEQ ID NO: 222678 - DNA, 20 bp, Artificial Sequence
  Description of Artificial Sequence: Synthetic oligonucleotide
  Target: LAMA2; (-) strand; PAM type: YTN; PAM sequence: CTC
cgcccggcagccaccccgtc

SEQ ID NO: 222679 - DNA, 20 bp, Artificial Sequence
  Description of Artificial Sequence: Synthetic oligonucleotide
  Target: LAMA2; (-) strand; PAM type: YTN; PAM sequence: CTG
ggaagtgaggagcgtctccg

SEQ ID NO: 222680 - DNA, 20 bp, Artificial Sequence
  Description of Artificial Sequence: Synthetic oligonucleotide
  Target: LAMA2; (-) strand; PAM type: YTN; PAM sequence: CTA
ccccatctgggaagtgagga

SEQ ID NO: 222681 - DNA, 20 bp, Artificial Sequence
  Description of Artificial Sequence: Synthetic oligonucleotide
  Target: LAMA2; (-) strand; PAM type: YTN; PAM sequence: CTC
cgcccggcagctaccccatc

SEQ ID NO: 222682 - DNA, 20 bp, Artificial Sequence
  Description of Artificial Sequence: Synthetic oligonucleotide
  Target: LAMA2; (-) strand; PAM type: YTN; PAM sequence: CTG
agaagtgaggagcccctccg

SEQ ID NO: 222683 - DNA, 20 bp, Artificial Sequence
  Description of Artificial Sequence: Synthetic oligonucleotide
  Target: LAMA2; (-) strand; PAM type: YTN; PAM sequence: CTC
cgcccggcagccgccccgtc

SEQ ID NO: 222684 - DNA, 20 bp, Artificial Sequence
  Description of Artificial Sequence: Synthetic oligonucleotide
  Target: LAMA2; (-) strand; PAM type: YTN; PAM sequence: CTG
agaagtgaggaacccctccg

SEQ ID NO: 222685 - DNA, 20 bp, Artificial Sequence
  Description of Artificial Sequence: Synthetic oligonucleotide
  Target: LAMA2; (-) strand; PAM type: YTN; PAM sequence: CTG
cccggcagccgccccatctg

SEQ ID NO: 222686 - DNA, 20 bp, Artificial Sequence
  Description of Artificial Sequence: Synthetic oligonucleotide
  Target: LAMA2; (-) strand; PAM type: YTN; PAM sequence: CTC
tgcccggcagccgccccatc

SEQ ID NO: 222687 - DNA, 20 bp, Artificial Sequence
  Description of Artificial Sequence: Synthetic oligonucleotide
  Target: LAMA2; (-) strand; PAM type: YTN; PAM sequence: CTG
agaagtgaggagcccctctg

SEQ ID NO: 222688 - DNA, 20 bp, Artificial Sequence
  Description of Artificial Sequence: Synthetic oligonucleotide
  Target: LAMA2; (-) strand; PAM type: YTN; PAM sequence: CTG
cgtctgagaagtgaggagcc

SEQ ID NO: 222689 - DNA, 20 bp, Artificial Sequence
  Description of Artificial Sequence: Synthetic oligonucleotide
  Target: LAMA2; (-) strand; PAM type: YTN; PAM sequence: CTG
cccggccgctgcgtctgaga

SEQ ID NO: 222690 - DNA, 20 bp, Artificial Sequence
  Description of Artificial Sequence: Synthetic oligonucleotide
  Target: LAMA2; (-) strand; PAM type: YTN; PAM sequence: CTC
tgcccggccgctgcgtctga

SEQ ID NO: 222691 - DNA, 20 bp, Artificial Sequence
  Description of Artificial Sequence: Synthetic oligonucleotide
  Target: LAMA2; (-) strand; PAM type: YTN; PAM sequence: CTA
ggaagtgaggagcgtctctg

SEQ ID NO: 222692 - DNA, 20 bp, Artificial Sequence
  Description of Artificial Sequence: Synthetic oligonucleotide
  Target: LAMA2; (-) strand; PAM type: YTN; PAM sequence: TTC
cggaccgccatcccgtctag

SEQ ID NO: 222693 - DNA, 20 bp, Artificial Sequence
  Description of Artificial Sequence: Synthetic oligonucleotide
  Target: LAMA2; (-) strand; PAM type: YTN; PAM sequence: CTT
ccggaccgccatcccgtcta

SEQ ID NO: 222694 - DNA, 20 bp, Artificial Sequence
  Description of Artificial Sequence: Synthetic oligonucleotide
  Target: LAMA2; (-) strand; PAM type: YTN; PAM sequence: CTC
ttccggaccgccatcccgtc

SEQ ID NO: 222695 - DNA, 20 bp, Artificial Sequence
  Description of Artificial Sequence: Synthetic oligonucleotide
  Target: LAMA2; (-) strand; PAM type: YTN; PAM sequence: CTG
ggaagtgaggagtgcctctt

SEQ ID NO: 222696 - DNA, 20 bp, Artificial Sequence
  Description of Artificial Sequence: Synthetic oligonucleotide
  Target: LAMA2; (-) strand; PAM type: YTN; PAM sequence: CTA
cccagtctgggaagtgagga

SEQ ID NO: 222697 - DNA, 20 bp, Artificial Sequence
  Description of Artificial Sequence: Synthetic oligonucleotide
  Target: LAMA2; (-) strand; PAM type: YTN; PAM sequence: CTG
gctacccagtctgggaagtg

SEQ ID NO: 222698 - DNA, 20 bp, Artificial Sequence
  Description of Artificial Sequence: Synthetic oligonucleotide
  Target: LAMA2; (-) strand; PAM type: YTN; PAM sequence: CTG
cctggctacccagtctggga

SEQ ID NO: 222699 - DNA, 20 bp, Artificial Sequence
  Description of Artificial Sequence: Synthetic oligonucleotide
  Target: LAMA2; (-) strand; PAM type: YTN; PAM sequence: CTC
tgcctggctacccagtctgg

SEQ ID NO: 222700 - DNA, 20 bp, Artificial Sequence
  Description of Artificial Sequence: Synthetic oligonucleotide
  Target: LAMA2; (-) strand; PAM type: YTN; PAM sequence: CTG
ggatgtaaggagcccctctg

SEQ ID NO: 222701 - DNA, 20 bp, Artificial Sequence
  Description of Artificial Sequence: Synthetic oligonucleotide
  Target: LAMA2; (-) strand; PAM type: YTN; PAM sequence: CTG
gccgcccatcgtctgggatg

SEQ ID NO: 222702 - DNA, 20 bp, Artificial Sequence
  Description of Artificial Sequence: Synthetic oligonucleotide
  Target: LAMA2; (-) strand; PAM type: YTN; PAM sequence: CTG
cctggccgcccatcgtctgg

SEQ ID NO: 222703 - DNA, 20 bp, Artificial Sequence
  Description of Artificial Sequence: Synthetic oligonucleotide
  Target: LAMA2; (-) strand; PAM type: YTN; PAM sequence: CTC
tgcctggccgcccatcgtct

SEQ ID NO: 222704 - DNA, 20 bp, Artificial Sequence
  Description of Artificial Sequence: Synthetic oligonucleotide
  Target: LAMA2; (-) strand; PAM type: YTN; PAM sequence: CTG
ggaagtgaggagcgtctctg

SEQ ID NO: 222705 - DNA, 20 bp, Artificial Sequence
  Description of Artificial Sequence: Synthetic oligonucleotide
  Target: LAMA2; (-) strand; PAM type: YTN; PAM sequence: CTG
cccggccgccaccccgtctg

SEQ ID NO: 222706 - DNA, 20 bp, Artificial Sequence
  Description of Artificial Sequence: Synthetic oligonucleotide
  Target: LAMA2; (-) strand; PAM type: YTN; PAM sequence: CTC
tgcccggccgccaccccgtc

SEQ ID NO: 222707 - DNA, 20 bp, Artificial Sequence
  Description of Artificial Sequence: Synthetic oligonucleotide
  Target: LAMA2; (-) strand; PAM type: YTN; PAM sequence: TTG
cagcctctgcccggccgcca

SEQ ID NO: 222708 - DNA, 20 bp, Artificial Sequence
  Description of Artificial Sequence: Synthetic oligonucleotide
  Target: LAMA2; (-) strand; PAM type: YTN; PAM sequence: TTT
gcagcctctgcccggccgcc

SEQ ID NO: 222709 - DNA, 20 bp, Artificial Sequence
  Description of Artificial Sequence: Synthetic oligonucleotide
  Target: LAMA2; (-) strand; PAM type: YTN; PAM sequence: CTC
ccaaagtgccgagtttgcag

SEQ ID NO: 222710 - DNA, 20 bp, Artificial Sequence
  Description of Artificial Sequence: Synthetic oligonucleotide
  Target: LAMA2; (-) strand; PAM type: YTN; PAM sequence: TTG
gcctcccaaagtgccgagtt

SEQ ID NO: 222711 - DNA, 20 bp, Artificial Sequence
  Description of Artificial Sequence: Synthetic oligonucleotide
  Target: LAMA2; (-) strand; PAM type: YTN; PAM sequence: CTT
ggcctcccaaagtgccgagt

SEQ ID NO: 222712 - DNA, 20 bp, Artificial Sequence
  Description of Artificial Sequence: Synthetic oligonucleotide
  Target: LAMA2; (-) strand; PAM type: YTN; PAM sequence: CTG
ccttggcctcccaaagtgcc

SEQ ID NO: 222713 - DNA, 20 bp, Artificial Sequence
  Description of Artificial Sequence: Synthetic oligonucleotide
  Target: LAMA2; (-) strand; PAM type: YTN; PAM sequence: CTC
ccagccgcctgccttggcct

SEQ ID NO: 222714 - DNA, 20 bp, Artificial Sequence
  Description of Artificial Sequence: Synthetic oligonucleotide
  Target: LAMA2; (-) strand; PAM type: YTN; PAM sequence: CTC
cacctcccagccgcctgcct

SEQ ID NO: 222715 - DNA, 20 bp, Artificial Sequence
  Description of Artificial Sequence: Synthetic oligonucleotide
  Target: LAMA2; (-) strand; PAM type: YTN; PAM sequence: CTA
caacctccacctcccagccg

SEQ ID NO: 222716 - DNA, 20 bp, Artificial Sequence
  Description of Artificial Sequence: Synthetic oligonucleotide
  Target: LAMA2; (-) strand; PAM type: YTN; PAM sequence: CTA
gctacaacctccacctccca

SEQ ID NO: 222717 - DNA, 20 bp, Artificial Sequence
  Description of Artificial Sequence: Synthetic oligonucleotide
  Target: LAMA2; (-) strand; PAM type: YTN; PAM sequence: CTC
ggctagctacaacctccacc

SEQ ID NO: 222718 - DNA, 20 bp, Artificial Sequence
  Description of Artificial Sequence: Synthetic oligonucleotide
  Target: LAMA2; (-) strand; PAM type: YTN; PAM sequence: CTG
gagtgcagtggtgtgatctc

SEQ ID NO: 222719 - DNA, 20 bp, Artificial Sequence
  Description of Artificial Sequence: Synthetic oligonucleotide
  Target: LAMA2; (-) strand; PAM type: YTN; PAM sequence: TTG
cccaggctggagtgcagtgg

SEQ ID NO: 222720 - DNA, 20 bp, Artificial Sequence
  Description of Artificial Sequence: Synthetic oligonucleotide
  Target: LAMA2; (-) strand; PAM type: YTN; PAM sequence: CTC
aatgttgcccaggctggagt

SEQ ID NO: 222721 - DNA, 20 bp, Artificial Sequence
  Description of Artificial Sequence: Synthetic oligonucleotide
  Target: LAMA2; (-) strand; PAM type: YTN; PAM sequence: CTC
agtgctcaatgttgcccagg

SEQ ID NO: 222722 - DNA, 20 bp, Artificial Sequence
  Description of Artificial Sequence: Synthetic oligonucleotide
  Target: LAMA2; (-) strand; PAM type: YTN; PAM sequence: TTC
actcagtgctcaatgttgcc

SEQ ID NO: 222723 - DNA, 20 bp, Artificial Sequence
  Description of Artificial Sequence: Synthetic oligonucleotide
  Target: LAMA2; (-) strand; PAM type: YTN; PAM sequence: CTC
gttcactcagtgctcaatgt

SEQ ID NO: 222724 - DNA, 20 bp, Artificial Sequence
  Description of Artificial Sequence: Synthetic oligonucleotide
  Target: LAMA2; (-) strand; PAM type: YTN; PAM sequence: TTG
cagacggagtctcgttcact

SEQ ID NO: 222725 - DNA, 20 bp, Artificial Sequence
  Description of Artificial Sequence: Synthetic oligonucleotide
  Target: LAMA2; (-) strand; PAM type: YTN; PAM sequence: CTC
ccgaggtgccgagattgcag

SEQ ID NO: 222726 - DNA, 20 bp, Artificial Sequence
  Description of Artificial Sequence: Synthetic oligonucleotide
  Target: LAMA2; (-) strand; PAM type: YTN; PAM sequence: CTC
ggcctcccgaggtgccgaga

SEQ ID NO: 222727 - DNA, 20 bp, Artificial Sequence
  Description of Artificial Sequence: Synthetic oligonucleotide
  Target: LAMA2; (-) strand; PAM type: YTN; PAM sequence: CTG
ccagcctcggcctcccgagg

SEQ ID NO: 222728 - DNA, 20 bp, Artificial Sequence
  Description of Artificial Sequence: Synthetic oligonucleotide
  Target: LAMA2; (-) strand; PAM type: YTN; PAM sequence: CTA
accgcgagtgatctgccagc

SEQ ID NO: 222729 - DNA, 20 bp, Artificial Sequence
  Description of Artificial Sequence: Synthetic oligonucleotide
  Target: LAMA2; (-) strand; PAM type: YTN; PAM sequence: CTC
ctaaccgcgagtgatctgcc

SEQ ID NO: 222730 - DNA, 20 bp, Artificial Sequence
  Description of Artificial Sequence: Synthetic oligonucleotide
  Target: LAMA2; (-) strand; PAM type: YTN; PAM sequence: CTC
cagctcctaaccgcgagtga

SEQ ID NO: 222731 - DNA, 20 bp, Artificial Sequence
  Description of Artificial Sequence: Synthetic oligonucleotide
  Target: LAMA2; (-) strand; PAM type: YTN; PAM sequence: CTG
gtctccagctcctaaccgcg

SEQ ID NO: 222732 - DNA, 20 bp, Artificial Sequence
  Description of Artificial Sequence: Synthetic oligonucleotide
  Target: LAMA2; (-) strand; PAM type: YTN; PAM sequence: CTA
ccgggctggtctccagctcc

SEQ ID NO: 222733 - DNA, 20 bp, Artificial Sequence
  Description of Artificial Sequence: Synthetic oligonucleotide
  Target: LAMA2; (-) strand; PAM type: YTN; PAM sequence: TTG
caaatgaaatatcatcatct

SEQ ID NO: 222734 - DNA, 20 bp, Artificial Sequence
  Description of Artificial Sequence: Synthetic oligonucleotide
  Target: LAMA2; (-) strand; PAM type: YTN; PAM sequence: CTA
ttgcaaatgaaatatcatca

SEQ ID NO: 222735 - DNA, 20 bp, Artificial Sequence
  Description of Artificial Sequence: Synthetic oligonucleotide
  Target: LAMA2; (-) strand; PAM type: YTN; PAM sequence: TTA
gctattgcaaatgaaatatc

SEQ ID NO: 222736 - DNA, 20 bp, Artificial Sequence
  Description of Artificial Sequence: Synthetic oligonucleotide
  Target: LAMA2; (-) strand; PAM type: YTN; PAM sequence: TTT
agctattgcaaatgaaatat

SEQ ID NO: 222737 - DNA, 20 bp, Artificial Sequence
  Description of Artificial Sequence: Synthetic oligonucleotide
  Target: LAMA2; (-) strand; PAM type: YTN; PAM sequence: TTT
tagctattgcaaatgaaata

SEQ ID NO: 222738 - DNA, 20 bp, Artificial Sequence
  Description of Artificial Sequence: Synthetic oligonucleotide
  Target: LAMA2; (-) strand; PAM type: YTN; PAM sequence: TTA
gtcaattttagctattgcaa

SEQ ID NO: 222739 - DNA, 20 bp, Artificial Sequence
  Description of Artificial Sequence: Synthetic oligonucleotide
  Target: LAMA2; (-) strand; PAM type: YTN; PAM sequence: CTT
agtcaattttagctattgca

SEQ ID NO: 222740 - DNA, 20 bp, Artificial Sequence
  Description of Artificial Sequence: Synthetic oligonucleotide
  Target: LAMA2; (-) strand; PAM type: YTN; PAM sequence: TTA
acacttagtcaattttagct

SEQ ID NO: 222741 - DNA, 20 bp, Artificial Sequence
  Description of Artificial Sequence: Synthetic oligonucleotide
  Target: LAMA2; (-) strand; PAM type: YTN; PAM sequence: CTT
aacacttagtcaattttagc

SEQ ID NO: 222742 - DNA, 20 bp, Artificial Sequence
  Description of Artificial Sequence: Synthetic oligonucleotide
  Target: LAMA2; (-) strand; PAM type: YTN; PAM sequence: TTC
aacagatcagagtcacttaa

SEQ ID NO: 222743 - DNA, 20 bp, Artificial Sequence
  Description of Artificial Sequence: Synthetic oligonucleotide
  Target: LAMA2; (-) strand; PAM type: YTN; PAM sequence: TTT
caacagatcagagtcactta

SEQ ID NO: 222744 - DNA, 20 bp, Artificial Sequence
  Description of Artificial Sequence: Synthetic oligonucleotide
  Target: LAMA2; (-) strand; PAM type: YTN; PAM sequence: CTT
tcaacagatcagagtcactt

SEQ ID NO: 222745 - DNA, 20 bp, Artificial Sequence
  Description of Artificial Sequence: Synthetic oligonucleotide
  Target: LAMA2; (-) strand; PAM type: YTN; PAM sequence: TTC
tttcaacagatcagagtcac

SEQ ID NO: 222746 - DNA, 20 bp, Artificial Sequence
  Description of Artificial Sequence: Synthetic oligonucleotide
  Target: LAMA2; (-) strand; PAM type: YTN; PAM sequence: TTC
atgaattctttcaacagatc

SEQ ID NO: 222747 - DNA, 20 bp, Artificial Sequence
  Description of Artificial Sequence: Synthetic oligonucleotide
  Target: LAMA2; (-) strand; PAM type: YTN; PAM sequence: TTG
gttcatgaattctttcaaca

SEQ ID NO: 222748 - DNA, 20 bp, Artificial Sequence
  Description of Artificial Sequence: Synthetic oligonucleotide
  Target: LAMA2; (-) strand; PAM type: YTN; PAM sequence: CTT
ggttcatgaattctttcaac

SEQ ID NO: 222749 - DNA, 20 bp, Artificial Sequence
  Description of Artificial Sequence: Synthetic oligonucleotide
  Target: LAMA2; (-) strand; PAM type: YTN; PAM sequence: CTG
atcttggttcatgaattctt

SEQ ID NO: 222750 - DNA, 20 bp, Artificial Sequence
  Description of Artificial Sequence: Synthetic oligonucleotide
  Target: LAMA2; (-) strand; PAM type: YTN; PAM sequence: TTC
tgatcttggttcatgaattc

SEQ ID NO: 222751 - DNA, 20 bp, Artificial Sequence
  Description of Artificial Sequence: Synthetic oligonucleotide
  Target: LAMA2; (-) strand; PAM type: YTN; PAM sequence: TTT
ctgatcttggttcatgaatt

SEQ ID NO: 222752 - DNA, 20 bp, Artificial Sequence
  Description of Artificial Sequence: Synthetic oligonucleotide
  Target: LAMA2; (-) strand; PAM type: YTN; PAM sequence: TTA
acagagtagaataacaaatc

SEQ ID NO: 222753 - DNA, 20 bp, Artificial Sequence
  Description of Artificial Sequence: Synthetic oligonucleotide
  Target: LAMA2; (-) strand; PAM type: YTN; PAM sequence: TTA
gaagtataatgttaacagag

SEQ ID NO: 222754 - DNA, 20 bp, Artificial Sequence
  Description of Artificial Sequence: Synthetic oligonucleotide
  Target: LAMA2; (-) strand; PAM type: YTN; PAM sequence: TTG
tagtgatgggaagtgttaga

SEQ ID NO: 222755 - DNA, 20 bp, Artificial Sequence
  Description of Artificial Sequence: Synthetic oligonucleotide
  Target: LAMA2; (-) strand; PAM type: YTN; PAM sequence: TTT
gtagtgatgggaagtgttag

SEQ ID NO: 222756 - DNA, 20 bp, Artificial Sequence
  Description of Artificial Sequence: Synthetic oligonucleotide
  Target: LAMA2; (-) strand; PAM type: YTN; PAM sequence: CTA
atagcaaagatttgtagtga

SEQ ID NO: 222757 - DNA, 20 bp, Artificial Sequence
  Description of Artificial Sequence: Synthetic oligonucleotide
  Target: LAMA2; (-) strand; PAM type: YTN; PAM sequence: TTG
gggactaatagcaaagattt

SEQ ID NO: 222758 - DNA, 20 bp, Artificial Sequence
  Description of Artificial Sequence: Synthetic oligonucleotide
  Target: LAMA2; (-) strand; PAM type: YTN; PAM sequence: TTT
ggggactaatagcaaagatt

SEQ ID NO: 222759 - DNA, 20 bp, Artificial Sequence
  Description of Artificial Sequence: Synthetic oligonucleotide
  Target: LAMA2; (-) strand; PAM type: YTN; PAM sequence: TTC
aaagcatttggggactaata

SEQ ID NO: 222760 - DNA, 20 bp, Artificial Sequence
  Description of Artificial Sequence: Synthetic oligonucleotide
  Target: LAMA2; (-) strand; PAM type: YTN; PAM sequence: CTA
gttcaaagcatttggggact

SEQ ID NO: 222761 - DNA, 20 bp, Artificial Sequence
  Description of Artificial Sequence: Synthetic oligonucleotide
  Target: LAMA2; (-) strand; PAM type: YTN; PAM sequence: CTC
tagttcaaagcatttgggga

SEQ ID NO: 222762 - DNA, 20 bp, Artificial Sequence
  Description of Artificial Sequence: Synthetic oligonucleotide
  Target: LAMA2; (-) strand; PAM type: YTN; PAM sequence: TTA
cacacataaatgaatcactc

SEQ ID NO: 222763 - DNA, 20 bp, Artificial Sequence
  Description of Artificial Sequence: Synthetic oligonucleotide
  Target: LAMA2; (-) strand; PAM type: YTN; PAM sequence: TTA
tgacattacacacataaatg

SEQ ID NO: 222764 - DNA, 20 bp, Artificial Sequence
  Description of Artificial Sequence: Synthetic oligonucleotide
  Target: LAMA2; (-) strand; PAM type: YTN; PAM sequence: TTT
atgacattacacacataaat

SEQ ID NO: 222765 - DNA, 20 bp, Artificial Sequence
  Description of Artificial Sequence: Synthetic oligonucleotide
  Target: LAMA2; (-) strand; PAM type: YTN; PAM sequence: CTC
caatttatgacattacacac

SEQ ID NO: 222766 - DNA, 20 bp, Artificial Sequence
  Description of Artificial Sequence: Synthetic oligonucleotide
  Target: LAMA2; (-) strand; PAM type: YTN; PAM sequence: TTC
tccaatttatgacattacac

SEQ ID NO: 222767 - DNA, 20 bp, Artificial Sequence
  Description of Artificial Sequence: Synthetic oligonucleotide
  Target: LAMA2; (-) strand; PAM type: YTN; PAM sequence: CTA
cacattctccaatttatgac

SEQ ID NO: 222768 - DNA, 20 bp, Artificial Sequence
  Description of Artificial Sequence: Synthetic oligonucleotide
  Target: LAMA2; (-) strand; PAM type: YTN; PAM sequence: TTA
ccaaggtaagatgaacctac

SEQ ID NO: 222769 - DNA, 20 bp, Artificial Sequence
  Description of Artificial Sequence: Synthetic oligonucleotide
  Target: LAMA2; (-) strand; PAM type: YTN; PAM sequence: TTT
accaaggtaagatgaaccta

SEQ ID NO: 222770 - DNA, 20 bp, Artificial Sequence
  Description of Artificial Sequence: Synthetic oligonucleotide
  Target: LAMA2; (-) strand; PAM type: YTN; PAM sequence: CTG
tatttaccaaggtaagatga

SEQ ID NO: 222771 - DNA, 20 bp, Artificial Sequence
  Description of Artificial Sequence: Synthetic oligonucleotide
  Target: LAMA2; (-) strand; PAM type: YTN; PAM sequence: TTC
tgtatttaccaaggtaagat

SEQ ID NO: 222772 - DNA, 20 bp, Artificial Sequence
  Description of Artificial Sequence: Synthetic oligonucleotide
  Target: LAMA2; (-) strand; PAM type: YTN; PAM sequence: CTT
ctgtatttaccaaggtaaga

SEQ ID NO: 222773 - DNA, 20 bp, Artificial Sequence
  Description of Artificial Sequence: Synthetic oligonucleotide
  Target: LAMA2; (-) strand; PAM type: YTN; PAM sequence: TTG
tgcttctgtatttaccaagg

SEQ ID NO: 222774 - DNA, 20 bp, Artificial Sequence
  Description of Artificial Sequence: Synthetic oligonucleotide
  Target: LAMA2; (-) strand; PAM type: YTN; PAM sequence: TTT
gtgcttctgtatttaccaag

SEQ ID NO: 222775 - DNA, 20 bp, Artificial Sequence
  Description of Artificial Sequence: Synthetic oligonucleotide
  Target: LAMA2; (-) strand; PAM type: YTN; PAM sequence: TTT
tgtgcttctgtatttaccaa

SEQ ID NO: 222776 - DNA, 20 bp, Artificial Sequence
  Description of Artificial Sequence: Synthetic oligonucleotide
  Target: LAMA2; (-) strand; PAM type: YTN; PAM sequence: TTT
ttgtgcttctgtatttacca

SEQ ID NO: 222777 - DNA, 20 bp, Artificial Sequence
  Description of Artificial Sequence: Synthetic oligonucleotide
  Target: LAMA2; (-) strand; PAM type: YTN; PAM sequence: TTT
tttgtgcttctgtatttacc

SEQ ID NO: 222778 - DNA, 20 bp, Artificial Sequence
  Description of Artificial Sequence: Synthetic oligonucleotide
  Target: LAMA2; (-) strand; PAM type: YTN; PAM sequence: TTG
ttttttgtgcttctgtattt

SEQ ID NO: 222779 - DNA, 20 bp, Artificial Sequence
  Description of Artificial Sequence: Synthetic oligonucleotide
  Target: LAMA2; (-) strand; PAM type: YTN; PAM sequence: TTT
gttttttgtgcttctgtatt

SEQ ID NO: 222780 - DNA, 20 bp, Artificial Sequence
  Description of Artificial Sequence: Synthetic oligonucleotide
  Target: LAMA2; (-) strand; PAM type: YTN; PAM sequence: CTT
tgttttttgtgcttctgtat

SEQ ID NO: 222781 - DNA, 20 bp, Artificial Sequence
  Description of Artificial Sequence: Synthetic oligonucleotide
  Target: LAMA2; (-) strand; PAM type: YTN; PAM sequence: TTG
cctttgttttttgtgcttct

SEQ ID NO: 222782 - DNA, 20 bp, Artificial Sequence
  Description of Artificial Sequence: Synthetic oligonucleotide
  Target: LAMA2; (-) strand; PAM type: YTN; PAM sequence: CTG
gcattgcctttgttttttgt

SEQ ID NO: 222783 - DNA, 20 bp, Artificial Sequence
  Description of Artificial Sequence: Synthetic oligonucleotide
  Target: LAMA2; (-) strand; PAM type: YTN; PAM sequence: CTG
gagaaatacctggcattgcc

SEQ ID NO: 222784 - DNA, 20 bp, Artificial Sequence
  Description of Artificial Sequence: Synthetic oligonucleotide
  Target: LAMA2; (-) strand; PAM type: YTN; PAM sequence: TTC
accctggagaaatacctggc

SEQ ID NO: 222785 - DNA, 20 bp, Artificial Sequence
  Description of Artificial Sequence: Synthetic oligonucleotide
  Target: LAMA2; (-) strand; PAM type: YTN; PAM sequence: TTA
ttcaccctggagaaatacct

SEQ ID NO: 222786 - DNA, 20 bp, Artificial Sequence
  Description of Artificial Sequence: Synthetic oligonucleotide
  Target: LAMA2; (-) strand; PAM type: YTN; PAM sequence: TTT
attcaccctggagaaatacc

SEQ ID NO: 222787 - DNA, 20 bp, Artificial Sequence
  Description of Artificial Sequence: Synthetic oligonucleotide
  Target: LAMA2; (-) strand; PAM type: YTN; PAM sequence: CTA
aaatttattcaccctggaga

SEQ ID NO: 222788 - DNA, 20 bp, Artificial Sequence
  Description of Artificial Sequence: Synthetic oligonucleotide
  Target: LAMA2; (-) strand; PAM type: YTN; PAM sequence: TTC
taaaatttattcaccctgga

SEQ ID NO: 222789 - DNA, 20 bp, Artificial Sequence
  Description of Artificial Sequence: Synthetic oligonucleotide
  Target: LAMA2; (-) strand; PAM type: YTN; PAM sequence: CTT
ctaaaatttattcaccctgg

SEQ ID NO: 222790 - DNA, 20 bp, Artificial Sequence
  Description of Artificial Sequence: Synthetic oligonucleotide
  Target: LAMA2; (-) strand; PAM type: YTN; PAM sequence: TTG
ccttctaaaatttattcacc

SEQ ID NO: 222791 - DNA, 20 bp, Artificial Sequence
  Description of Artificial Sequence: Synthetic oligonucleotide
  Target: LAMA2; (-) strand; PAM type: YTN; PAM sequence: TTT
gccttctaaaatttattcac

SEQ ID NO: 222792 - DNA, 20 bp, Artificial Sequence
  Description of Artificial Sequence: Synthetic oligonucleotide
  Target: LAMA2; (-) strand; PAM type: YTN; PAM sequence: TTA
aatttgccttctaaaattta

SEQ ID NO: 222793 - DNA, 20 bp, Artificial Sequence
  Description of Artificial Sequence: Synthetic oligonucleotide
  Target: LAMA2; (-) strand; PAM type: YTN; PAM sequence: TTT
aaatttgccttctaaaattt

SEQ ID NO: 222794 - DNA, 20 bp, Artificial Sequence
  Description of Artificial Sequence: Synthetic oligonucleotide
  Target: LAMA2; (-) strand; PAM type: YTN; PAM sequence: CTG
tcacagagtacaacaatggt

SEQ ID NO: 222795 - DNA, 20 bp, Artificial Sequence
  Description of Artificial Sequence: Synthetic oligonucleotide
  Target: LAMA2; (-) strand; PAM type: YTN; PAM sequence: TTC
aatgaaactgtcacagagta

SEQ ID NO: 222796 - DNA, 20 bp, Artificial Sequence
  Description of Artificial Sequence: Synthetic oligonucleotide
  Target: LAMA2; (-) strand; PAM type: YTN; PAM sequence: TTT
caatgaaactgtcacagagt

SEQ ID NO: 222797 - DNA, 20 bp, Artificial Sequence
  Description of Artificial Sequence: Synthetic oligonucleotide
  Target: LAMA2; (-) strand; PAM type: YTN; PAM sequence: CTT
tcaatgaaactgtcacagag

SEQ ID NO: 222798 - DNA, 20 bp, Artificial Sequence
  Description of Artificial Sequence: Synthetic oligonucleotide
  Target: LAMA2; (-) strand; PAM type: YTN; PAM sequence: CTC
atggaacatgacagtccttt

SEQ ID NO: 222799 - DNA, 20 bp, Artificial Sequence
  Description of Artificial Sequence: Synthetic oligonucleotide
  Target: LAMA2; (-) strand; PAM type: YTN; PAM sequence: TTC
ctcatggaacatgacagtcc

SEQ ID NO: 222800 - DNA, 20 bp, Artificial Sequence
  Description of Artificial Sequence: Synthetic oligonucleotide
  Target: LAMA2; (-) strand; PAM type: YTN; PAM sequence: CTG
agttcctcatggaacatgac

SEQ ID NO: 222801 - DNA, 20 bp, Artificial Sequence
  Description of Artificial Sequence: Synthetic oligonucleotide
  Target: LAMA2; (-) strand; PAM type: YTN; PAM sequence: CTG
gtaaaagagcaggtaggctg

SEQ ID NO: 222802 - DNA, 20 bp, Artificial Sequence
  Description of Artificial Sequence: Synthetic oligonucleotide
  Target: LAMA2; (-) strand; PAM type: YTN; PAM sequence: CTA
ctggtaaaagagcaggtagg

SEQ ID NO: 222803 - DNA, 20 bp, Artificial Sequence
  Description of Artificial Sequence: Synthetic oligonucleotide
  Target: LAMA2; (-) strand; PAM type: YTN; PAM sequence: TTC
ccaccagctactggtaaaag

SEQ ID NO: 222804 - DNA, 20 bp, Artificial Sequence
  Description of Artificial Sequence: Synthetic oligonucleotide
  Target: LAMA2; (-) strand; PAM type: YTN; PAM sequence: TTT
cccaccagctactggtaaaa

SEQ ID NO: 222805 - DNA, 20 bp, Artificial Sequence
  Description of Artificial Sequence: Synthetic oligonucleotide
  Target: LAMA2; (-) strand; PAM type: YTN; PAM sequence: CTT
tcccaccagctactggtaaa

SEQ ID NO: 222806 - DNA, 20 bp, Artificial Sequence
  Description of Artificial Sequence: Synthetic oligonucleotide
  Target: LAMA2; (-) strand; PAM type: YTN; PAM sequence: TTG
gcacagcatggctttcccac

SEQ ID NO: 222807 - DNA, 20 bp, Artificial Sequence
  Description of Artificial Sequence: Synthetic oligonucleotide
  Target: LAMA2; (-) strand; PAM type: YTN; PAM sequence: CTG
tgaataagtcattggcacag

SEQ ID NO: 222808 - DNA, 20 bp, Artificial Sequence
  Description of Artificial Sequence: Synthetic oligonucleotide
  Target: LAMA2; (-) strand; PAM type: YTN; PAM sequence: CTC
ctgtgaataagtcattggca

SEQ ID NO: 222809 - DNA, 20 bp, Artificial Sequence
  Description of Artificial Sequence: Synthetic oligonucleotide
  Target: LAMA2; (-) strand; PAM type: YTN; PAM sequence: CTG
cctcctgtgaataagtcatt

SEQ ID NO: 222810 - DNA, 20 bp, Artificial Sequence
  Description of Artificial Sequence: Synthetic oligonucleotide
  Target: LAMA2; (-) strand; PAM type: YTN; PAM sequence: TTG
acctgcctcctgtgaataag

SEQ ID NO: 222811 - DNA, 20 bp, Artificial Sequence
  Description of Artificial Sequence: Synthetic oligonucleotide
  Target: LAMA2; (-) strand; PAM type: YTN; PAM sequence: TTC
aaaagattgacctgcctcct

SEQ ID NO: 222812 - DNA, 20 bp, Artificial Sequence
  Description of Artificial Sequence: Synthetic oligonucleotide
  Target: LAMA2; (-) strand; PAM type: YTN; PAM sequence: TTT
caaaagattgacctgcctcc

SEQ ID NO: 222813 - DNA, 20 bp, Artificial Sequence
  Description of Artificial Sequence: Synthetic oligonucleotide
  Target: LAMA2; (-) strand; PAM type: YTN; PAM sequence: CTG
tggtttcaaaagattgacct

SEQ ID NO: 222814 - DNA, 20 bp, Artificial Sequence
  Description of Artificial Sequence: Synthetic oligonucleotide
  Target: LAMA2; (-) strand; PAM type: YTN; PAM sequence: TTG
aaacaatctgtggtttcaaa

SEQ ID NO: 222815 - DNA, 20 bp, Artificial Sequence
  Description of Artificial Sequence: Synthetic oligonucleotide
  Target: LAMA2; (-) strand; PAM type: YTN; PAM sequence: TTT
gaaacaatctgtggtttcaa

SEQ ID NO: 222816 - DNA, 20 bp, Artificial Sequence
  Description of Artificial Sequence: Synthetic oligonucleotide
  Target: LAMA2; (-) strand; PAM type: YTN; PAM sequence: CTC
atttgaaacaatctgtggtt

SEQ ID NO: 222817 - DNA, 20 bp, Artificial Sequence
  Description of Artificial Sequence: Synthetic oligonucleotide
  Target: LAMA2; (-) strand; PAM type: YTN; PAM sequence: CTC
tcatttgaaacaatctgtgg

SEQ ID NO: 222818 - DNA, 20 bp, Artificial Sequence
  Description of Artificial Sequence: Synthetic oligonucleotide
  Target: LAMA2; (-) strand; PAM type: YTN; PAM sequence: TTC
tctcatttgaaacaatctgt

SEQ ID NO: 222819 - DNA, 20 bp, Artificial Sequence
  Description of Artificial Sequence: Synthetic oligonucleotide
  Target: LAMA2; (-) strand; PAM type: YTN; PAM sequence: TTT
ctctcatttgaaacaatctg

SEQ ID NO: 222820 - DNA, 20 bp, Artificial Sequence
  Description of Artificial Sequence: Synthetic oligonucleotide
  Target: LAMA2; (-) strand; PAM type: YTN; PAM sequence: TTT
tctctcatttgaaacaatct

SEQ ID NO: 222821 - DNA, 20 bp, Artificial Sequence
  Description of Artificial Sequence: Synthetic oligonucleotide
  Target: LAMA2; (-) strand; PAM type: YTN; PAM sequence: TTT
ttctctcatttgaaacaatc

SEQ ID NO: 222822 - DNA, 20 bp, Artificial Sequence
  Description of Artificial Sequence: Synthetic oligonucleotide
  Target: LAMA2; (-) strand; PAM type: YTN; PAM sequence: CTC
acatatttttctctcatttg

SEQ ID NO: 222823 - DNA, 20 bp, Artificial Sequence
  Description of Artificial Sequence: Synthetic oligonucleotide
  Target: LAMA2; (-) strand; PAM type: YTN; PAM sequence: TTC
tcacatatttttctctcatt

SEQ ID NO: 222824 - DNA, 20 bp, Artificial Sequence
  Description of Artificial Sequence: Synthetic oligonucleotide
  Target: LAMA2; (-) strand; PAM type: YTN; PAM sequence: CTT
ctcacatatttttctctcat

SEQ ID NO: 222825 - DNA, 20 bp, Artificial Sequence
  Description of Artificial Sequence: Synthetic oligonucleotide
  Target: LAMA2; (-) strand; PAM type: YTN; PAM sequence: CTC
ttctcacatatttttctctc

SEQ ID NO: 222826 - DNA, 20 bp, Artificial Sequence
  Description of Artificial Sequence: Synthetic oligonucleotide
  Target: LAMA2; (-) strand; PAM type: YTN; PAM sequence: TTC
tcttctcacatatttttctc

SEQ ID NO: 222827 - DNA, 20 bp, Artificial Sequence
  Description of Artificial Sequence: Synthetic oligonucleotide
  Target: LAMA2; (-) strand; PAM type: YTN; PAM sequence: CTA
ttctcttctcacatattttt

SEQ ID NO: 222828 - DNA, 20 bp, Artificial Sequence
  Description of Artificial Sequence: Synthetic oligonucleotide
  Target: LAMA2; (-) strand; PAM type: YTN; PAM sequence: TTG
acatctattctcttctcaca

SEQ ID NO: 222829 - DNA, 20 bp, Artificial Sequence
  Description of Artificial Sequence: Synthetic oligonucleotide
  Target: LAMA2; (-) strand; PAM type: YTN; PAM sequence: CTT
gacatctattctcttctcac

SEQ ID NO: 222830 - DNA, 20 bp, Artificial Sequence
  Description of Artificial Sequence: Synthetic oligonucleotide
  Target: LAMA2; (-) strand; PAM type: YTN; PAM sequence: CTA
cccttgacatctattctctt

SEQ ID NO: 222831 - DNA, 20 bp, Artificial Sequence
  Description of Artificial Sequence: Synthetic oligonucleotide
  Target: LAMA2; (-) strand; PAM type: YTN; PAM sequence: TTA
gcactacccttgacatctat

SEQ ID NO: 222832 - DNA, 20 bp, Artificial Sequence
  Description of Artificial Sequence: Synthetic oligonucleotide
  Target: LAMA2; (-) strand; PAM type: YTN; PAM sequence: TTT
agcactacccttgacatcta

SEQ ID NO: 222833 - DNA, 20 bp, Artificial Sequence
  Description of Artificial Sequence: Synthetic oligonucleotide
  Target: LAMA2; (-) strand; PAM type: YTN; PAM sequence: CTT
tagcactacccttgacatct

SEQ ID NO: 222834 - DNA, 20 bp, Artificial Sequence
  Description of Artificial Sequence: Synthetic oligonucleotide
  Target: LAMA2; (-) strand; PAM type: YTN; PAM sequence: TTG
tctttagcactacccttgac

SEQ ID NO: 222835 - DNA, 20 bp, Artificial Sequence
  Description of Artificial Sequence: Synthetic oligonucleotide
  Target: LAMA2; (-) strand; PAM type: YTN; PAM sequence: CTT
gtctttagcactacccttga

SEQ ID NO: 222836 - DNA, 20 bp, Artificial Sequence
  Description of Artificial Sequence: Synthetic oligonucleotide
  Target: LAMA2; (-) strand; PAM type: YTN; PAM sequence: TTC
cttgtctttagcactaccct

SEQ ID NO: 222837 - DNA, 20 bp, Artificial Sequence
  Description of Artificial Sequence: Synthetic oligonucleotide
  Target: LAMA2; (-) strand; PAM type: YTN; PAM sequence: TTT
ccttgtctttagcactaccc

SEQ ID NO: 222838 - DNA, 20 bp, Artificial Sequence
  Description of Artificial Sequence: Synthetic oligonucleotide
  Target: LAMA2; (-) strand; PAM type: YTN; PAM sequence: TTT
tccttgtctttagcactacc

SEQ ID NO: 222839 - DNA, 20 bp, Artificial Sequence
  Description of Artificial Sequence: Synthetic oligonucleotide
  Target: LAMA2; (-) strand; PAM type: YTN; PAM sequence: CTG
cagggaaaacccaggcaagc

SEQ ID NO: 222840 - DNA, 20 bp, Artificial Sequence
  Description of Artificial Sequence: Synthetic oligonucleotide
  Target: LAMA2; (-) strand; PAM type: YTN; PAM sequence: TTA
acaacgtcagctgcagggaa

SEQ ID NO: 222841 - DNA, 20 bp, Artificial Sequence
  Description of Artificial Sequence: Synthetic oligonucleotide
  Target: LAMA2; (-) strand; PAM type: YTN; PAM sequence: TTT
aacaacgtcagctgcaggga

SEQ ID NO: 222842 - DNA, 20 bp, Artificial Sequence
  Description of Artificial Sequence: Synthetic oligonucleotide
  Target: LAMA2; (-) strand; PAM type: YTN; PAM sequence: TTT
taacaacgtcagctgcaggg

SEQ ID NO: 222843 - DNA, 20 bp, Artificial Sequence
  Description of Artificial Sequence: Synthetic oligonucleotide
  Target: LAMA2; (-) strand; PAM type: YTN; PAM sequence: TTT
ttaacaacgtcagctgcagg

SEQ ID NO: 222844 - DNA, 20 bp, Artificial Sequence
  Description of Artificial Sequence: Synthetic oligonucleotide
  Target: LAMA2; (-) strand; PAM type: YTN; PAM sequence: CTA
tcatttttaacaacgtcagc

SEQ ID NO: 222845 - DNA, 20 bp, Artificial Sequence
  Description of Artificial Sequence: Synthetic oligonucleotide
  Target: LAMA2; (-) strand; PAM type: YTN; PAM sequence: TTG
ctatcatttttaacaacgtc

SEQ ID NO: 222846 - DNA, 20 bp, Artificial Sequence
  Description of Artificial Sequence: Synthetic oligonucleotide
  Target: LAMA2; (-) strand; PAM type: YTN; PAM sequence: TTA
agttgctatcatttttaaca

SEQ ID NO: 222847 - DNA, 20 bp, Artificial Sequence
  Description of Artificial Sequence: Synthetic oligonucleotide
  Target: LAMA2; (-) strand; PAM type: YTN; PAM sequence: TTC
attaagttgctatcattttt

SEQ ID NO: 222848 - DNA, 20 bp, Artificial Sequence
  Description of Artificial Sequence: Synthetic oligonucleotide
  Target: LAMA2; (-) strand; PAM type: YTN; PAM sequence: CTT
cattaagttgctatcatttt

SEQ ID NO: 222849 - DNA, 20 bp, Artificial Sequence
  Description of Artificial Sequence: Synthetic oligonucleotide
  Target: LAMA2; (-) strand; PAM type: YTN; PAM sequence: TTA
gtacgccatgcttcattaag

SEQ ID NO: 222850 - DNA, 20 bp, Artificial Sequence
  Description of Artificial Sequence: Synthetic oligonucleotide
  Target: LAMA2; (-) strand; PAM type: YTN; PAM sequence: TTT
agtacgccatgcttcattaa

SEQ ID NO: 222851 - DNA, 20 bp, Artificial Sequence
  Description of Artificial Sequence: Synthetic oligonucleotide
  Target: LAMA2; (-) strand; PAM type: YTN; PAM sequence: TTA
atgcatttagtacgccatgc

SEQ ID NO: 222852 - DNA, 20 bp, Artificial Sequence
  Description of Artificial Sequence: Synthetic oligonucleotide
  Target: LAMA2; (-) strand; PAM type: YTN; PAM sequence: TTA
ttaatgcatttagtacgcca

SEQ ID NO: 222853 - DNA, 20 bp, Artificial Sequence
  Description of Artificial Sequence: Synthetic oligonucleotide
  Target: LAMA2; (-) strand; PAM type: YTN; PAM sequence: CTT
attaatgcatttagtacgcc

SEQ ID NO: 222854 - DNA, 20 bp, Artificial Sequence
  Description of Artificial Sequence: Synthetic oligonucleotide
  Target: LAMA2; (-) strand; PAM type: YTN; PAM sequence: CTC
agcttattaatgcatttagt

SEQ ID NO: 222855 - DNA, 20 bp, Artificial Sequence
  Description of Artificial Sequence: Synthetic oligonucleotide
  Target: LAMA2; (-) strand; PAM type: YTN; PAM sequence: CTC
cctcagcttattaatgcatt

SEQ ID NO: 222856 - DNA, 20 bp, Artificial Sequence
  Description of Artificial Sequence: Synthetic oligonucleotide
  Target: LAMA2; (-) strand; PAM type: YTN; PAM sequence: TTG
gaatgaataaggtcctccct

SEQ ID NO: 222857 - DNA, 20 bp, Artificial Sequence
  Description of Artificial Sequence: Synthetic oligonucleotide
  Target: LAMA2; (-) strand; PAM type: YTN; PAM sequence: TTA
agaaaacgagtaacacgagt

SEQ ID NO: 222858 - DNA, 20 bp, Artificial Sequence
  Description of Artificial Sequence: Synthetic oligonucleotide
  Target: LAMA2; (-) strand; PAM type: YTN; PAM sequence: CTT
aagaaaacgagtaacacgag

SEQ ID NO: 222859 - DNA, 20 bp, Artificial Sequence
  Description of Artificial Sequence: Synthetic oligonucleotide
  Target: LAMA2; (-) strand; PAM type: YTN; PAM sequence: TTA
gtccagtcttaagaaaacga

SEQ ID NO: 222860 - DNA, 20 bp, Artificial Sequence
  Description of Artificial Sequence: Synthetic oligonucleotide
  Target: LAMA2; (-) strand; PAM type: YTN; PAM sequence: TTT
agtccagtcttaagaaaacg

SEQ ID NO: 222861 - DNA, 20 bp, Artificial Sequence
  Description of Artificial Sequence: Synthetic oligonucleotide
  Target: LAMA2; (-) strand; PAM type: YTN; PAM sequence: TTT
tagtccagtcttaagaaaac

SEQ ID NO: 222862 - DNA, 20 bp, Artificial Sequence
  Description of Artificial Sequence: Synthetic oligonucleotide
  Target: LAMA2; (-) strand; PAM type: YTN; PAM sequence: CTC
acaattttagtccagtctta

SEQ ID NO: 222863 - DNA, 20 bp, Artificial Sequence
  Description of Artificial Sequence: Synthetic oligonucleotide
  Target: LAMA2; (-) strand; PAM type: YTN; PAM sequence: TTG
gcccataaggtctcacaatt

SEQ ID NO: 222864 - DNA, 20 bp, Artificial Sequence
  Description of Artificial Sequence: Synthetic oligonucleotide
  Target: LAMA2; (-) strand; PAM type: YTN; PAM sequence: CTA
aagggtatcgttggcccata

SEQ ID NO: 222865 - DNA, 20 bp, Artificial Sequence
  Description of Artificial Sequence: Synthetic oligonucleotide
  Target: LAMA2; (-) strand; PAM type: YTN; PAM sequence: CTC
taaagggtatcgttggccca

SEQ ID NO: 222866 - DNA, 20 bp, Artificial Sequence
  Description of Artificial Sequence: Synthetic oligonucleotide
  Target: LAMA2; (-) strand; PAM type: YTN; PAM sequence: TTA
tcagctctaaagggtatcgt

SEQ ID NO: 222867 - DNA, 20 bp, Artificial Sequence
  Description of Artificial Sequence: Synthetic oligonucleotide
  Target: LAMA2; (-) strand; PAM type: YTN; PAM sequence: TTA
attatcagctctaaagggta

SEQ ID NO: 222868 - DNA, 20 bp, Artificial Sequence
  Description of Artificial Sequence: Synthetic oligonucleotide
  Target: LAMA2; (-) strand; PAM type: YTN; PAM sequence: TTC
aaattaattatcagctctaa

SEQ ID NO: 222869 - DNA, 20 bp, Artificial Sequence
  Description of Artificial Sequence: Synthetic oligonucleotide
  Target: LAMA2; (-) strand; PAM type: YTN; PAM sequence: TTT
caaattaattatcagctcta

SEQ ID NO: 222870 - DNA, 20 bp, Artificial Sequence
  Description of Artificial Sequence: Synthetic oligonucleotide
  Target: LAMA2; (-) strand; PAM type: YTN; PAM sequence: CTT
tcaaattaattatcagctct

SEQ ID NO: 222871 - DNA, 20 bp, Artificial Sequence
  Description of Artificial Sequence: Synthetic oligonucleotide
  Target: LAMA2; (-) strand; PAM type: YTN; PAM sequence: TTC
tttcaaattaattatcagct

SEQ ID NO: 222872 - DNA, 20 bp, Artificial Sequence
  Description of Artificial Sequence: Synthetic oligonucleotide
  Target: LAMA2; (-) strand; PAM type: YTN; PAM sequence: TTA
ataattctttcaaattaatt

SEQ ID NO: 222873 - DNA, 20 bp, Artificial Sequence
  Description of Artificial Sequence: Synthetic oligonucleotide
  Target: LAMA2; (-) strand; PAM type: YTN; PAM sequence: TTT
aataattctttcaaattaat

SEQ ID NO: 222874 - DNA, 20 bp, Artificial Sequence
  Description of Artificial Sequence: Synthetic oligonucleotide
  Target: LAMA2; (-) strand; PAM type: YTN; PAM sequence: CTT
taataattctttcaaattaa

SEQ ID NO: 222875 - DNA, 20 bp, Artificial Sequence
  Description of Artificial Sequence: Synthetic oligonucleotide
  Target: LAMA2; (-) strand; PAM type: YTN; PAM sequence: CTC
aagaaatatgctttaataat

SEQ ID NO: 222876 - DNA, 20 bp, Artificial Sequence
  Description of Artificial Sequence: Synthetic oligonucleotide
  Target: LAMA2; (-) strand; PAM type: YTN; PAM sequence: TTA
gctcaagaaatatgctttaa

SEQ ID NO: 222877 - DNA, 20 bp, Artificial Sequence
  Description of Artificial Sequence: Synthetic oligonucleotide
  Target: LAMA2; (-) strand; PAM type: YTN; PAM sequence: CTT
agctcaagaaatatgcttta

SEQ ID NO: 222878 - DNA, 20 bp, Artificial Sequence
  Description of Artificial Sequence: Synthetic oligonucleotide
  Target: LAMA2; (-) strand; PAM type: YTN; PAM sequence: TTC
ttagctcaagaaatatgctt

SEQ ID NO: 222879 - DNA, 20 bp, Artificial Sequence
  Description of Artificial Sequence: Synthetic oligonucleotide
  Target: LAMA2; (-) strand; PAM type: YTN; PAM sequence: CTG
cattcttagctcaagaaata

SEQ ID NO: 222880 - DNA, 20 bp, Artificial Sequence
  Description of Artificial Sequence: Synthetic oligonucleotide
  Target: LAMA2; (-) strand; PAM type: YTN; PAM sequence: CTG
tgaatacactgcattcttag

SEQ ID NO: 222881 - DNA, 20 bp, Artificial Sequence
  Description of Artificial Sequence: Synthetic oligonucleotide
  Target: LAMA2; (-) strand; PAM type: YTN; PAM sequence: TTA
ctgtgaatacactgcattct

SEQ ID NO: 222882 - DNA, 20 bp, Artificial Sequence
  Description of Artificial Sequence: Synthetic oligonucleotide
  Target: LAMA2; (-) strand; PAM type: YTN; PAM sequence: CTT
actgtgaatacactgcattc

SEQ ID NO: 222883 - DNA, 20 bp, Artificial Sequence
  Description of Artificial Sequence: Synthetic oligonucleotide
  Target: LAMA2; (-) strand; PAM type: YTN; PAM sequence: CTC
ttactgtgaatacactgcat

SEQ ID NO: 222884 - DNA, 20 bp, Artificial Sequence
  Description of Artificial Sequence: Synthetic oligonucleotide
  Target: LAMA2; (-) strand; PAM type: YTN; PAM sequence: CTG
cctcttactgtgaatacact

SEQ ID NO: 222885 - DNA, 20 bp, Artificial Sequence
  Description of Artificial Sequence: Synthetic oligonucleotide
  Target: LAMA2; (-) strand; PAM type: YTN; PAM sequence: CTC
tgcctcttactgtgaataca

SEQ ID NO: 222886 - DNA, 20 bp, Artificial Sequence
  Description of Artificial Sequence: Synthetic oligonucleotide
  Target: LAMA2; (-) strand; PAM type: YTN; PAM sequence: TTA
actctgcctcttactgtgaa

SEQ ID NO: 222887 - DNA, 20 bp, Artificial Sequence
  Description of Artificial Sequence: Synthetic oligonucleotide
  Target: LAMA2; (-) strand; PAM type: YTN; PAM sequence: TTG
ataaatggttaactctgcct

SEQ ID NO: 222888 - DNA, 20 bp, Artificial Sequence
  Description of Artificial Sequence: Synthetic oligonucleotide
  Target: LAMA2; (-) strand; PAM type: YTN; PAM sequence: CTT
gataaatggttaactctgcc

SEQ ID NO: 222889 - DNA, 20 bp, Artificial Sequence
  Description of Artificial Sequence: Synthetic oligonucleotide
  Target: LAMA2; (-) strand; PAM type: YTN; PAM sequence: TTA
tcttgataaatggttaactc

SEQ ID NO: 222890 - DNA, 20 bp, Artificial Sequence
  Description of Artificial Sequence: Synthetic oligonucleotide
  Target: LAMA2; (-) strand; PAM type: YTN; PAM sequence: TTA
attatcttgataaatggtta

SEQ ID NO: 222891 - DNA, 20 bp, Artificial Sequence
  Description of Artificial Sequence: Synthetic oligonucleotide
  Target: LAMA2; (-) strand; PAM type: YTN; PAM sequence: CTT
aattatcttgataaatggtt

SEQ ID NO: 222892 - DNA, 20 bp, Artificial Sequence
  Description of Artificial Sequence: Synthetic oligonucleotide
  Target: LAMA2; (-) strand; PAM type: YTN; PAM sequence: TTC
ttaattatcttgataaatgg

SEQ ID NO: 222893 - DNA, 20 bp, Artificial Sequence
  Description of Artificial Sequence: Synthetic oligonucleotide
  Target: LAMA2; (-) strand; PAM type: YTN; PAM sequence: TTT
cttaattatcttgataaatg

SEQ ID NO: 222894 - DNA, 20 bp, Artificial Sequence
  Description of Artificial Sequence: Synthetic oligonucleotide
  Target: LAMA2; (-) strand; PAM type: YTN; PAM sequence: TTT
tcttaattatcttgataaat

SEQ ID NO: 222895 - DNA, 20 bp, Artificial Sequence
  Description of Artificial Sequence: Synthetic oligonucleotide
  Target: LAMA2; (-) strand; PAM type: YTN; PAM sequence: TTA
atgcattttcttaattatct

SEQ ID NO: 222896 - DNA, 20 bp, Artificial Sequence
  Description of Artificial Sequence: Synthetic oligonucleotide
  Target: LAMA2; (-) strand; PAM type: YTN; PAM sequence: TTT
aatgcattttcttaattatc

SEQ ID NO: 222897 - DNA, 20 bp, Artificial Sequence
  Description of Artificial Sequence: Synthetic oligonucleotide
  Target: LAMA2; (-) strand; PAM type: YTN; PAM sequence: TTA
cggagcaaacatttaatgca

SEQ ID NO: 222898 - DNA, 20 bp, Artificial Sequence
  Description of Artificial Sequence: Synthetic oligonucleotide
  Target: LAMA2; (-) strand; PAM type: YTN; PAM sequence: CTT
acggagcaaacatttaatgc

SEQ ID NO: 222899 - DNA, 20 bp, Artificial Sequence
  Description of Artificial Sequence: Synthetic oligonucleotide
  Target: LAMA2; (-) strand; PAM type: YTN; PAM sequence: CTC
ttacggagcaaacatttaat

SEQ ID NO: 222900 - DNA, 20 bp, Artificial Sequence
  Description of Artificial Sequence: Synthetic oligonucleotide
  Target: LAMA2; (-) strand; PAM type: YTN; PAM sequence: TTG
ctcttacggagcaaacattt

SEQ ID NO: 222901 - DNA, 20 bp, Artificial Sequence
  Description of Artificial Sequence: Synthetic oligonucleotide
  Target: LAMA2; (-) strand; PAM type: YTN; PAM sequence: CTT
gctcttacggagcaaacatt

SEQ ID NO: 222902 - DNA, 20 bp, Artificial Sequence
  Description of Artificial Sequence: Synthetic oligonucleotide
  Target: LAMA2; (-) strand; PAM type: YTN; PAM sequence: TTA
gtgcttgctcttacggagca

SEQ ID NO: 222903 - DNA, 20 bp, Artificial Sequence
  Description of Artificial Sequence: Synthetic oligonucleotide
  Target: LAMA2; (-) strand; PAM type: YTN; PAM sequence: TTT
agtgcttgctcttacggagc

SEQ ID NO: 222904 - DNA, 20 bp, Artificial Sequence
  Description of Artificial Sequence: Synthetic oligonucleotide
  Target: LAMA2; (-) strand; PAM type: YTN; PAM sequence: CTG
gtaatttagtgcttgctctt

SEQ ID NO: 222905 - DNA, 20 bp, Artificial Sequence
  Description of Artificial Sequence: Synthetic oligonucleotide
  Target: LAMA2; (-) strand; PAM type: YTN; PAM sequence: CTA
ctggtaatttagtgcttgct

SEQ ID NO: 222906 - DNA, 20 bp, Artificial Sequence
  Description of Artificial Sequence: Synthetic oligonucleotide
  Target: LAMA2; (-) strand; PAM type: YTN; PAM sequence: CTA
ctactggtaatttagtgctt

SEQ ID NO: 222907 - DNA, 20 bp, Artificial Sequence
  Description of Artificial Sequence: Synthetic oligonucleotide
  Target: LAMA2; (-) strand; PAM type: YTN; PAM sequence: TTA
ctactactggtaatttagtg

SEQ ID NO: 222908 - DNA, 20 bp, Artificial Sequence
  Description of Artificial Sequence: Synthetic oligonucleotide
  Target: LAMA2; (-) strand; PAM type: YTN; PAM sequence: TTC
acataataatattactacta

SEQ ID NO: 222909 - DNA, 20 bp, Artificial Sequence
  Description of Artificial Sequence: Synthetic oligonucleotide
  Target: LAMA2; (-) strand; PAM type: YTN; PAM sequence: TTT
cacataataatattactact

SEQ ID NO: 222910 - DNA, 20 bp, Artificial Sequence
  Description of Artificial Sequence: Synthetic oligonucleotide
  Target: LAMA2; (-) strand; PAM type: YTN; PAM sequence: CTT
tcacataataatattactac

SEQ ID NO: 222911 - DNA, 20 bp, Artificial Sequence
  Description of Artificial Sequence: Synthetic oligonucleotide
  Target: LAMA2; (-) strand; PAM type: YTN; PAM sequence: TTC
cctttcacataataatatta

SEQ ID NO: 222912 - DNA, 20 bp, Artificial Sequence
  Description of Artificial Sequence: Synthetic oligonucleotide
  Target: LAMA2; (-) strand; PAM type: YTN; PAM sequence: TTG
attccctttcacataataat

SEQ ID NO: 222913 - DNA, 20 bp, Artificial Sequence
  Description of Artificial Sequence: Synthetic oligonucleotide
  Target: LAMA2; (-) strand; PAM type: YTN; PAM sequence: CTA
ttgattccctttcacataat

SEQ ID NO: 222914 - DNA, 20 bp, Artificial Sequence
  Description of Artificial Sequence: Synthetic oligonucleotide
  Target: LAMA2; (-) strand; PAM type: YTN; PAM sequence: TTA
gtaaacaaactattgattcc

SEQ ID NO: 222915 - DNA, 20 bp, Artificial Sequence
  Description of Artificial Sequence: Synthetic oligonucleotide
  Target: LAMA2; (-) strand; PAM type: YTN; PAM sequence: TTT
agtaaacaaactattgattc

SEQ ID NO: 222916 - DNA, 20 bp, Artificial Sequence
  Description of Artificial Sequence: Synthetic oligonucleotide
  Target: LAMA2; (-) strand; PAM type: YTN; PAM sequence: TTT
tagtaaacaaactattgatt

SEQ ID NO: 222917 - DNA, 20 bp, Artificial Sequence
  Description of Artificial Sequence: Synthetic oligonucleotide
  Target: LAMA2; (-) strand; PAM type: YTN; PAM sequence: CTC
attttagtaaacaaactatt

SEQ ID NO: 222918 - DNA, 20 bp, Artificial Sequence
  Description of Artificial Sequence: Synthetic oligonucleotide
  Target: LAMA2; (-) strand; PAM type: YTN; PAM sequence: CTA
atgcatctcattttagtaaa

SEQ ID NO: 222919 - DNA, 20 bp, Artificial Sequence
  Description of Artificial Sequence: Synthetic oligonucleotide
  Target: LAMA2; (-) strand; PAM type: YTN; PAM sequence: TTG
ctaatgcatctcattttagt

SEQ ID NO: 222920 - DNA, 20 bp, Artificial Sequence
  Description of Artificial Sequence: Synthetic oligonucleotide
  Target: LAMA2; (-) strand; PAM type: YTN; PAM sequence: CTT
gctaatgcatctcattttag

SEQ ID NO: 222921 - DNA, 20 bp, Artificial Sequence
  Description of Artificial Sequence: Synthetic oligonucleotide
  Target: LAMA2; (-) strand; PAM type: YTN; PAM sequence: TTA
tatcagaataaaaaagcttg

SEQ ID NO: 222922 - DNA, 20 bp, Artificial Sequence
  Description of Artificial Sequence: Synthetic oligonucleotide
  Target: LAMA2; (-) strand; PAM type: YTN; PAM sequence: TTT
atatcagaataaaaaagctt

SEQ ID NO: 222923 - DNA, 20 bp, Artificial Sequence
  Description of Artificial Sequence: Synthetic oligonucleotide
  Target: LAMA2; (-) strand; PAM type: YTN; PAM sequence: TTT
tatatcagaataaaaaagct

SEQ ID NO: 222924 - DNA, 20 bp, Artificial Sequence
  Description of Artificial Sequence: Synthetic oligonucleotide
  Target: LAMA2; (-) strand; PAM type: YTN; PAM sequence: TTT
ttatatcagaataaaaaagc

SEQ ID NO: 222925 - DNA, 20 bp, Artificial Sequence
  Description of Artificial Sequence: Synthetic oligonucleotide
  Target: LAMA2; (-) strand; PAM type: YTN; PAM sequence: TTG
aaaatttttatatcagaata

SEQ ID NO: 222926 - DNA, 20 bp, Artificial Sequence
  Description of Artificial Sequence: Synthetic oligonucleotide
  Target: LAMA2; (-) strand; PAM type: YTN; PAM sequence: TTT
gaaaatttttatatcagaat

SEQ ID NO: 222927 - DNA, 20 bp, Artificial Sequence
  Description of Artificial Sequence: Synthetic oligonucleotide
  Target: LAMA2; (-) strand; PAM type: YTN; PAM sequence: TTG
tgtatatttgaaaattttta

SEQ ID NO: 222928 - DNA, 20 bp, Artificial Sequence
  Description of Artificial Sequence: Synthetic oligonucleotide
  Target: LAMA2; (-) strand; PAM type: YTN; PAM sequence: TTT
gtgtatatttgaaaattttt

SEQ ID NO: 222929 - DNA, 20 bp, Artificial Sequence
  Description of Artificial Sequence: Synthetic oligonucleotide
  Target: LAMA2; (-) strand; PAM type: YTN; PAM sequence: TTT
tgtgtatatttgaaaatttt

SEQ ID NO: 222930 - DNA, 20 bp, Artificial Sequence
  Description of Artificial Sequence: Synthetic oligonucleotide
  Target: LAMA2; (-) strand; PAM type: YTN; PAM sequence: CTT
ttgtgtatatttgaaaattt

SEQ ID NO: 222931 - DNA, 20 bp, Artificial Sequence
  Description of Artificial Sequence: Synthetic oligonucleotide
  Target: LAMA2; (-) strand; PAM type: YTN; PAM sequence: CTA
tacttttgtgtatatttgaa

SEQ ID NO: 222932 - DNA, 20 bp, Artificial Sequence
  Description of Artificial Sequence: Synthetic oligonucleotide
  Target: LAMA2; (-) strand; PAM type: YTN; PAM sequence: CTC
tatacttttgtgtatatttg

SEQ ID NO: 222933 - DNA, 20 bp, Artificial Sequence
  Description of Artificial Sequence: Synthetic oligonucleotide
  Target: LAMA2; (-) strand; PAM type: YTN; PAM sequence: TTC
tctatacttttgtgtatatt

SEQ ID NO: 222934 - DNA, 20 bp, Artificial Sequence
  Description of Artificial Sequence: Synthetic oligonucleotide
  Target: LAMA2; (-) strand; PAM type: YTN; PAM sequence: TTG
agtccacggtattctctata

SEQ ID NO: 222935 - DNA, 20 bp, Artificial Sequence
  Description of Artificial Sequence: Synthetic oligonucleotide
  Target: LAMA2; (-) strand; PAM type: YTN; PAM sequence: TTT
gagtccacggtattctctat

SEQ ID NO: 222936 - DNA, 20 bp, Artificial Sequence
  Description of Artificial Sequence: Synthetic oligonucleotide
  Target: LAMA2; (-) strand; PAM type: YTN; PAM sequence: TTG
ggtacatttgagtccacggt

SEQ ID NO: 222937 - DNA, 20 bp, Artificial Sequence
  Description of Artificial Sequence: Synthetic oligonucleotide
  Target: LAMA2; (-) strand; PAM type: YTN; PAM sequence: TTA
tggatgggtgttgggtacat

SEQ ID NO: 222938 - DNA, 20 bp, Artificial Sequence
  Description of Artificial Sequence: Synthetic oligonucleotide
  Target: LAMA2; (-) strand; PAM type: YTN; PAM sequence: CTT
atggatgggtgttgggtaca

SEQ ID NO: 222939 - DNA, 20 bp, Artificial Sequence
  Description of Artificial Sequence: Synthetic oligonucleotide
  Target: LAMA2; (-) strand; PAM type: YTN; PAM sequence: TTA
atacttatggatgggtgttg

SEQ ID NO: 222940 - DNA, 20 bp, Artificial Sequence
  Description of Artificial Sequence: Synthetic oligonucleotide
  Target: LAMA2; (-) strand; PAM type: YTN; PAM sequence: CTG
agttaatacttatggatggg

SEQ ID NO: 222941 - DNA, 20 bp, Artificial Sequence
  Description of Artificial Sequence: Synthetic oligonucleotide
  Target: LAMA2; (-) strand; PAM type: YTN; PAM sequence: CTG
atacaagaggggtcctgagt

SEQ ID NO: 222942 - DNA, 20 bp, Artificial Sequence
  Description of Artificial Sequence: Synthetic oligonucleotide
  Target: LAMA2; (-) strand; PAM type: YTN; PAM sequence: TTG
aaaactgatacaagaggggt

SEQ ID NO: 222943 - DNA, 20 bp, Artificial Sequence
  Description of Artificial Sequence: Synthetic oligonucleotide
  Target: LAMA2; (-) strand; PAM type: YTN; PAM sequence: CTG
gaggggtggagtaggatgtg

SEQ ID NO: 222944 - DNA, 20 bp, Artificial Sequence
  Description of Artificial Sequence: Synthetic oligonucleotide
  Target: LAMA2; (-) strand; PAM type: YTN; PAM sequence: TTC
ccaataatctggaggggtgg

SEQ ID NO: 222945 - DNA, 20 bp, Artificial Sequence
  Description of Artificial Sequence: Synthetic oligonucleotide
  Target: LAMA2; (-) strand; PAM type: YTN; PAM sequence: CTT
cccaataatctggaggggtg

SEQ ID NO: 222946 - DNA, 20 bp, Artificial Sequence
  Description of Artificial Sequence: Synthetic oligonucleotide
  Target: LAMA2; (-) strand; PAM type: YTN; PAM sequence: TTG
cttcccaataatctggaggg

SEQ ID NO: 222947 - DNA, 20 bp, Artificial Sequence
  Description of Artificial Sequence: Synthetic oligonucleotide
  Target: LAMA2; (-) strand; PAM type: YTN; PAM sequence: TTT
gcttcccaataatctggagg

SEQ ID NO: 222948 - DNA, 20 bp, Artificial Sequence
  Description of Artificial Sequence: Synthetic oligonucleotide
  Target: LAMA2; (-) strand; PAM type: YTN; PAM sequence: TTA
caaagcgagtaatacatatg

SEQ ID NO: 222949 - DNA, 20 bp, Artificial Sequence
  Description of Artificial Sequence: Synthetic oligonucleotide
  Target: LAMA2; (-) strand; PAM type: YTN; PAM sequence: TTC
agagatacataatgaagtag

SEQ ID NO: 222950 - DNA, 20 bp, Artificial Sequence
  Description of Artificial Sequence: Synthetic oligonucleotide
  Target: LAMA2; (-) strand; PAM type: YTN; PAM sequence: CTT
cagagatacataatgaagta

SEQ ID NO: 222951 - DNA, 20 bp, Artificial Sequence
  Description of Artificial Sequence: Synthetic oligonucleotide
  Target: LAMA2; (-) strand; PAM type: YTN; PAM sequence: TTA
tccttcagagatacataatg

SEQ ID NO: 222952 - DNA, 20 bp, Artificial Sequence
  Description of Artificial Sequence: Synthetic oligonucleotide
  Target: LAMA2; (-) strand; PAM type: YTN; PAM sequence: CTT
atccttcagagatacataat

SEQ ID NO: 222953 - DNA, 20 bp, Artificial Sequence
  Description of Artificial Sequence: Synthetic oligonucleotide
  Target: LAMA2; (-) strand; PAM type: YTN; PAM sequence: TTA
taaaagagtcttatccttca

SEQ ID NO: 222954 - DNA, 20 bp, Artificial Sequence
  Description of Artificial Sequence: Synthetic oligonucleotide
  Target: LAMA2; (-) strand; PAM type: YTN; PAM sequence: TTT
ataaaagagtcttatccttc

SEQ ID NO: 222955 - DNA, 20 bp, Artificial Sequence
  Description of Artificial Sequence: Synthetic oligonucleotide
  Target: LAMA2; (-) strand; PAM type: YTN; PAM sequence: CTT
tataaaagagtcttatcctt

SEQ ID NO: 222956 - DNA, 20 bp, Artificial Sequence
  Description of Artificial Sequence: Synthetic oligonucleotide
  Target: LAMA2; (-) strand; PAM type: YTN; PAM sequence: TTC
ctttataaaagagtcttatc

SEQ ID NO: 222957 - DNA, 20 bp, Artificial Sequence
  Description of Artificial Sequence: Synthetic oligonucleotide
  Target: LAMA2; (-) strand; PAM type: YTN; PAM sequence: TTT
cctttataaaagagtcttat

SEQ ID NO: 222958 - DNA, 20 bp, Artificial Sequence
  Description of Artificial Sequence: Synthetic oligonucleotide
  Target: LAMA2; (-) strand; PAM type: YTN; PAM sequence: TTA
gatgtgacaatggtttcctt

SEQ ID NO: 222959 - DNA, 20 bp, Artificial Sequence
  Description of Artificial Sequence: Synthetic oligonucleotide
  Target: LAMA2; (-) strand; PAM type: YTN; PAM sequence: TTT
agatgtgacaatggtttcct

SEQ ID NO: 222960 - DNA, 20 bp, Artificial Sequence
  Description of Artificial Sequence: Synthetic oligonucleotide
  Target: LAMA2; (-) strand; PAM type: YTN; PAM sequence: TTT
tagatgtgacaatggtttcc

SEQ ID NO: 222961 - DNA, 20 bp, Artificial Sequence
  Description of Artificial Sequence: Synthetic oligonucleotide
  Target: LAMA2; (-) strand; PAM type: YTN; PAM sequence: TTT
ttagatgtgacaatggtttc

SEQ ID NO: 222962 - DNA, 20 bp, Artificial Sequence
  Description of Artificial Sequence: Synthetic oligonucleotide
  Target: LAMA2; (-) strand; PAM type: YTN; PAM sequence: TTA
atttttagatgtgacaatgg

SEQ ID NO: 222963 - DNA, 20 bp, Artificial Sequence
  Description of Artificial Sequence: Synthetic oligonucleotide
  Target: LAMA2; (-) strand; PAM type: YTN; PAM sequence: TTA
aagaatcagtataatagtat

SEQ ID NO: 222964 - DNA, 20 bp, Artificial Sequence
  Description of Artificial Sequence: Synthetic oligonucleotide
  Target: LAMA2; (-) strand; PAM type: YTN; PAM sequence: TTA
atattaaagaatcagtataa

SEQ ID NO: 222965 - DNA, 20 bp, Artificial Sequence
  Description of Artificial Sequence: Synthetic oligonucleotide
  Target: LAMA2; (-) strand; PAM type: YTN; PAM sequence: TTG
ttaatattaaagaatcagta

SEQ ID NO: 222966 - DNA, 20 bp, Artificial Sequence
  Description of Artificial Sequence: Synthetic oligonucleotide
  Target: LAMA2; (-) strand; PAM type: YTN; PAM sequence: TTT
gttaatattaaagaatcagt

SEQ ID NO: 222967 - DNA, 20 bp, Artificial Sequence
  Description of Artificial Sequence: Synthetic oligonucleotide
  Target: LAMA2; (-) strand; PAM type: YTN; PAM sequence: CTG
agtaaatatttgttaatatt

SEQ ID NO: 222968 - DNA, 20 bp, Artificial Sequence
  Description of Artificial Sequence: Synthetic oligonucleotide
  Target: LAMA2; (-) strand; PAM type: YTN; PAM sequence: TTG
aatactgagtaaatatttgt

SEQ ID NO: 222969 - DNA, 20 bp, Artificial Sequence
  Description of Artificial Sequence: Synthetic oligonucleotide
  Target: LAMA2; (-) strand; PAM type: YTN; PAM sequence: TTT
gaatactgagtaaatatttg

SEQ ID NO: 222970 - DNA, 20 bp, Artificial Sequence
  Description of Artificial Sequence: Synthetic oligonucleotide
  Target: LAMA2; (-) strand; PAM type: YTN; PAM sequence: TTG
gaagcaggtgtgatgaattt

SEQ ID NO: 222971 - DNA, 20 bp, Artificial Sequence
  Description of Artificial Sequence: Synthetic oligonucleotide
  Target: LAMA2; (-) strand; PAM type: YTN; PAM sequence: CTT
ggaagcaggtgtgatgaatt

SEQ ID NO: 222972 - DNA, 20 bp, Artificial Sequence
  Description of Artificial Sequence: Synthetic oligonucleotide
  Target: LAMA2; (-) strand; PAM type: YTN; PAM sequence: TTA
aaaaacttggaagcaggtgt

SEQ ID NO: 222973 - DNA, 20 bp, Artificial Sequence
  Description of Artificial Sequence: Synthetic oligonucleotide
  Target: LAMA2; (-) strand; PAM type: YTN; PAM sequence: TTT
aaaaaacttggaagcaggtg

SEQ ID NO: 222974 - DNA, 20 bp, Artificial Sequence
  Description of Artificial Sequence: Synthetic oligonucleotide
  Target: LAMA2; (-) strand; PAM type: YTN; PAM sequence: TTT
taaaaaacttggaagcaggt

SEQ ID NO: 222975 - DNA, 20 bp, Artificial Sequence
  Description of Artificial Sequence: Synthetic oligonucleotide
  Target: LAMA2; (-) strand; PAM type: YTN; PAM sequence: TTT
ttaaaaaacttggaagcagg

SEQ ID NO: 222976 - DNA, 20 bp, Artificial Sequence
  Description of Artificial Sequence: Synthetic oligonucleotide
  Target: LAMA2; (-) strand; PAM type: YTN; PAM sequence: CTG
tttttaaaaaacttggaagc

SEQ ID NO: 222977 - DNA, 20 bp, Artificial Sequence
  Description of Artificial Sequence: Synthetic oligonucleotide
  Target: LAMA2; (-) strand; PAM type: YTN; PAM sequence: TTC
aactgtttttaaaaaacttg

SEQ ID NO: 222978 - DNA, 20 bp, Artificial Sequence
  Description of Artificial Sequence: Synthetic oligonucleotide
  Target: LAMA2; (-) strand; PAM type: YTN; PAM sequence: CTG
attcaactgtttttaaaaaa

SEQ ID NO: 222979 - DNA, 20 bp, Artificial Sequence
  Description of Artificial Sequence: Synthetic oligonucleotide
  Target: LAMA2; (-) strand; PAM type: YTN; PAM sequence: TTG
tgaatcctgattcaactgtt

SEQ ID NO: 222980 - DNA, 20 bp, Artificial Sequence
  Description of Artificial Sequence: Synthetic oligonucleotide
  Target: LAMA2; (-) strand; PAM type: YTN; PAM sequence: CTT
gtgaatcctgattcaactgt

SEQ ID NO: 222981 - DNA, 20 bp, Artificial Sequence
  Description of Artificial Sequence: Synthetic oligonucleotide
  Target: LAMA2; (-) strand; PAM type: YTN; PAM sequence: TTC
ttgtgaatcctgattcaact

SEQ ID NO: 222982 - DNA, 20 bp, Artificial Sequence
  Description of Artificial Sequence: Synthetic oligonucleotide
  Target: LAMA2; (-) strand; PAM type: YTN; PAM sequence: CTT
cttgtgaatcctgattcaac

SEQ ID NO: 222983 - DNA, 20 bp, Artificial Sequence
  Description of Artificial Sequence: Synthetic oligonucleotide
  Target: LAMA2; (-) strand; PAM type: YTN; PAM sequence: CTA
gatatatcgaacaaatgcag

SEQ ID NO: 222984 - DNA, 20 bp, Artificial Sequence
  Description of Artificial Sequence: Synthetic oligonucleotide
  Target: LAMA2; (-) strand; PAM type: YTN; PAM sequence: TTG
agagacctagatatatcgaa

SEQ ID NO: 222985 - DNA, 20 bp, Artificial Sequence
  Description of Artificial Sequence: Synthetic oligonucleotide
  Target: LAMA2; (-) strand; PAM type: YTN; PAM sequence: TTG
attgagagacctagatatat

SEQ ID NO: 222986 - DNA, 20 bp, Artificial Sequence
  Description of Artificial Sequence: Synthetic oligonucleotide
  Target: LAMA2; (-) strand; PAM type: YTN; PAM sequence: TTA
ttgattgagagacctagata

SEQ ID NO: 222987 - DNA, 20 bp, Artificial Sequence
  Description of Artificial Sequence: Synthetic oligonucleotide
  Target: LAMA2; (-) strand; PAM type: YTN; PAM sequence: TTA
aaatgttattgattgagaga

SEQ ID NO: 222988 - DNA, 20 bp, Artificial Sequence
  Description of Artificial Sequence: Synthetic oligonucleotide
  Target: LAMA2; (-) strand; PAM type: YTN; PAM sequence: TTG
caaggaagttaaaatgttat

SEQ ID NO: 222989 - DNA, 20 bp, Artificial Sequence
  Description of Artificial Sequence: Synthetic oligonucleotide
  Target: LAMA2; (-) strand; PAM type: YTN; PAM sequence: TTC
aaaaaaataagttgcaagga

SEQ ID NO: 222990 - DNA, 20 bp, Artificial Sequence
  Description of Artificial Sequence: Synthetic oligonucleotide
  Target: LAMA2; (-) strand; PAM type: YTN; PAM sequence: CTT
caaaaaaataagttgcaagg

SEQ ID NO: 222991 - DNA, 20 bp, Artificial Sequence
  Description of Artificial Sequence: Synthetic oligonucleotide
  Target: LAMA2; (-) strand; PAM type: YTN; PAM sequence: TTC
ttcaaaaaaataagttgcaa

SEQ ID NO: 222992 - DNA, 20 bp, Artificial Sequence
  Description of Artificial Sequence: Synthetic oligonucleotide
  Target: LAMA2; (-) strand; PAM type: YTN; PAM sequence: TTT
cttcaaaaaaataagttgca

SEQ ID NO: 222993 - DNA, 20 bp, Artificial Sequence
  Description of Artificial Sequence: Synthetic oligonucleotide
  Target: LAMA2; (-) strand; PAM type: YTN; PAM sequence: CTG
gacacacaacgtggtttctt

SEQ ID NO: 222994 - DNA, 20 bp, Artificial Sequence
  Description of Artificial Sequence: Synthetic oligonucleotide
  Target: LAMA2; (-) strand; PAM type: YTN; PAM sequence: CTA
ctggacacacaacgtggttt

SEQ ID NO: 222995 - DNA, 20 bp, Artificial Sequence
  Description of Artificial Sequence: Synthetic oligonucleotide
  Target: LAMA2; (-) strand; PAM type: YTN; PAM sequence: CTA
agtagcaaaatgcaggatgt

SEQ ID NO: 222996 - DNA, 20 bp, Artificial Sequence
  Description of Artificial Sequence: Synthetic oligonucleotide
  Target: LAMA2; (-) strand; PAM type: YTN; PAM sequence: CTA
caggaaccctaagtagcaaa

SEQ ID NO: 222997 - DNA, 20 bp, Artificial Sequence
  Description of Artificial Sequence: Synthetic oligonucleotide
  Target: LAMA2; (-) strand; PAM type: YTN; PAM sequence: TTC
aggaaatatagtagtagaga

SEQ ID NO: 222998 - DNA, 20 bp, Artificial Sequence
  Description of Artificial Sequence: Synthetic oligonucleotide
  Target: LAMA2; (-) strand; PAM type: YTN; PAM sequence: TTT
caggaaatatagtagtagag

SEQ ID NO: 222999 - DNA, 20 bp, Artificial Sequence
  Description of Artificial Sequence: Synthetic oligonucleotide
  Target: LAMA2; (-) strand; PAM type: YTN; PAM sequence: TTT
tcaggaaatatagtagtaga

SEQ ID NO: 223000 - DNA, 20 bp, Artificial Sequence
  Description of Artificial Sequence: Synthetic oligonucleotide
  Target: LAMA2; (-) strand; PAM type: YTN; PAM sequence: CTA
tcagttttcaggaaatatag

SEQ ID NO: 223001 - DNA, 20 bp, Artificial Sequence
  Description of Artificial Sequence: Synthetic oligonucleotide
  Target: LAMA2; (-) strand; PAM type: YTN; PAM sequence: TTA
tctatcagttttcaggaaat

SEQ ID NO: 223002 - DNA, 20 bp, Artificial Sequence
  Description of Artificial Sequence: Synthetic oligonucleotide
  Target: LAMA2; (-) strand; PAM type: YTN; PAM sequence: TTT
atctatcagttttcaggaaa

SEQ ID NO: 223003 - DNA, 20 bp, Artificial Sequence
  Description of Artificial Sequence: Synthetic oligonucleotide
  Target: LAMA2; (-) strand; PAM type: YTN; PAM sequence: CTA
aatttatctatcagttttca

SEQ ID NO: 223004 - DNA, 20 bp, Artificial Sequence
  Description of Artificial Sequence: Synthetic oligonucleotide
  Target: LAMA2; (-) strand; PAM type: YTN; PAM sequence: CTC
taaatttatctatcagtttt

SEQ ID NO: 223005 - DNA, 20 bp, Artificial Sequence
  Description of Artificial Sequence: Synthetic oligonucleotide
  Target: LAMA2; (-) strand; PAM type: YTN; PAM sequence: CTC
tctaaatttatctatcagtt

SEQ ID NO: 223006 - DNA, 20 bp, Artificial Sequence
  Description of Artificial Sequence: Synthetic oligonucleotide
  Target: LAMA2; (-) strand; PAM type: YTN; PAM sequence: CTG
aatcagagtaactctctaaa

SEQ ID NO: 223007 - DNA, 20 bp, Artificial Sequence
  Description of Artificial Sequence: Synthetic oligonucleotide
  Target: LAMA2; (-) strand; PAM type: YTN; PAM sequence: TTG
tgccaaaaatatgaaccctg

SEQ ID NO: 223008 - DNA, 20 bp, Artificial Sequence
  Description of Artificial Sequence: Synthetic oligonucleotide
  Target: LAMA2; (-) strand; PAM type: YTN; PAM sequence: CTA
taaagtggttgtgccaaaaa

SEQ ID NO: 223009 - DNA, 20 bp, Artificial Sequence
  Description of Artificial Sequence: Synthetic oligonucleotide
  Target: LAMA2; (-) strand; PAM type: YTN; PAM sequence: CTG
cagtgtgatggaagcacata

SEQ ID NO: 223010 - DNA, 20 bp, Artificial Sequence
  Description of Artificial Sequence: Synthetic oligonucleotide
  Target: LAMA2; (-) strand; PAM type: YTN; PAM sequence: TTC
tgcagtgtgatggaagcaca

SEQ ID NO: 223011 - DNA, 20 bp, Artificial Sequence
  Description of Artificial Sequence: Synthetic oligonucleotide
  Target: LAMA2; (-) strand; PAM type: YTN; PAM sequence: TTT
ctgcagtgtgatggaagcac

SEQ ID NO: 223012 - DNA, 20 bp, Artificial Sequence
  Description of Artificial Sequence: Synthetic oligonucleotide
  Target: LAMA2; (-) strand; PAM type: YTN; PAM sequence: TTT
tctgcagtgtgatggaagca

SEQ ID NO: 223013 - DNA, 20 bp, Artificial Sequence
  Description of Artificial Sequence: Synthetic oligonucleotide
  Target: LAMA2; (-) strand; PAM type: YTN; PAM sequence: CTG
atcaatgaccagaaacatcc

SEQ ID NO: 223014 - DNA, 20 bp, Artificial Sequence
  Description of Artificial Sequence: Synthetic oligonucleotide
  Target: LAMA2; (-) strand; PAM type: YTN; PAM sequence: TTA
atgctgatcaatgaccagaa

SEQ ID NO: 223015 - DNA, 20 bp, Artificial Sequence
  Description of Artificial Sequence: Synthetic oligonucleotide
  Target: LAMA2; (-) strand; PAM type: YTN; PAM sequence: CTG
tggccattaatgctgatcaa

SEQ ID NO: 223016 - DNA, 20 bp, Artificial Sequence
  Description of Artificial Sequence: Synthetic oligonucleotide
  Target: LAMA2; (-) strand; PAM type: YTN; PAM sequence: CTA
tgaagggagcccccataaaa

SEQ ID NO: 223017 - DNA, 20 bp, Artificial Sequence
  Description of Artificial Sequence: Synthetic oligonucleotide
  Target: LAMA2; (-) strand; PAM type: YTN; PAM sequence: TTA
ctatgaagggagcccccata

SEQ ID NO: 223018 - DNA, 20 bp, Artificial Sequence
  Description of Artificial Sequence: Synthetic oligonucleotide
  Target: LAMA2; (-) strand; PAM type: YTN; PAM sequence: TTT
actatgaagggagcccccat

SEQ ID NO: 223019 - DNA, 20 bp, Artificial Sequence
  Description of Artificial Sequence: Synthetic oligonucleotide
  Target: LAMA2; (-) strand; PAM type: YTN; PAM sequence: CTG
tgcagtttactatgaaggga

SEQ ID NO: 223020 - DNA, 20 bp, Artificial Sequence
  Description of Artificial Sequence: Synthetic oligonucleotide
  Target: LAMA2; (-) strand; PAM type: YTN; PAM sequence: TTA
ctgtgcagtttactatgaag

SEQ ID NO: 223021 - DNA, 20 bp, Artificial Sequence
  Description of Artificial Sequence: Synthetic oligonucleotide
  Target: LAMA2; (-) strand; PAM type: YTN; PAM sequence: TTT
actgtgcagtttactatgaa

SEQ ID NO: 223022 - DNA, 20 bp, Artificial Sequence
  Description of Artificial Sequence: Synthetic oligonucleotide
  Target: LAMA2; (-) strand; PAM type: YTN; PAM sequence: CTG
tgtatagtttactgtgcagt

SEQ ID NO: 223023 - DNA, 20 bp, Artificial Sequence
  Description of Artificial Sequence: Synthetic oligonucleotide
  Target: LAMA2; (-) strand; PAM type: YTN; PAM sequence: TTC
actgtgtatagtttactgtg

SEQ ID NO: 223024 - DNA, 20 bp, Artificial Sequence
  Description of Artificial Sequence: Synthetic oligonucleotide
  Target: LAMA2; (-) strand; PAM type: YTN; PAM sequence: TTA
ccacaaggttcactgtgtat

SEQ ID NO: 223025 - DNA, 20 bp, Artificial Sequence
  Description of Artificial Sequence: Synthetic oligonucleotide
  Target: LAMA2; (-) strand; PAM type: YTN; PAM sequence: TTT
accacaaggttcactgtgta

SEQ ID NO: 223026 - DNA, 20 bp, Artificial Sequence
  Description of Artificial Sequence: Synthetic oligonucleotide
  Target: LAMA2; (-) strand; PAM type: YTN; PAM sequence: CTA
cagtttaccacaaggttcac

SEQ ID NO: 223027 - DNA, 20 bp, Artificial Sequence
  Description of Artificial Sequence: Synthetic oligonucleotide
  Target: LAMA2; (-) strand; PAM type: YTN; PAM sequence: CTA
tagtacacaggatgctacag

SEQ ID NO: 223028 - DNA, 20 bp, Artificial Sequence
  Description of Artificial Sequence: Synthetic oligonucleotide
  Target: LAMA2; (-) strand; PAM type: YTN; PAM sequence: TTG
ctatagtacacaggatgcta

SEQ ID NO: 223029 - DNA, 20 bp, Artificial Sequence
  Description of Artificial Sequence: Synthetic oligonucleotide
  Target: LAMA2; (-) strand; PAM type: YTN; PAM sequence: TTA
aatgaaaaaagcaacatgga

SEQ ID NO: 223030 - DNA, 20 bp, Artificial Sequence
  Description of Artificial Sequence: Synthetic oligonucleotide
  Target: LAMA2; (-) strand; PAM type: YTN; PAM sequence: TTG
ttaaatgaaaaaagcaacat

SEQ ID NO: 223031 - DNA, 20 bp, Artificial Sequence
  Description of Artificial Sequence: Synthetic oligonucleotide
  Target: LAMA2; (-) strand; PAM type: YTN; PAM sequence: TTA
ttgttaaatgaaaaaagcaa

SEQ ID NO: 223032 - DNA, 20 bp, Artificial Sequence
  Description of Artificial Sequence: Synthetic oligonucleotide
  Target: LAMA2; (-) strand; PAM type: YTN; PAM sequence: TTT
attgttaaatgaaaaaagca

SEQ ID NO: 223033 - DNA, 20 bp, Artificial Sequence
  Description of Artificial Sequence: Synthetic oligonucleotide
  Target: LAMA2; (-) strand; PAM type: YTN; PAM sequence: CTG
agatggaagagcaatgaatg

SEQ ID NO: 223034 - DNA, 20 bp, Artificial Sequence
  Description of Artificial Sequence: Synthetic oligonucleotide
  Target: LAMA2; (-) strand; PAM type: YTN; PAM sequence: TTA
acaagcaataataagcaaga

SEQ ID NO: 223035 - DNA, 20 bp, Artificial Sequence
  Description of Artificial Sequence: Synthetic oligonucleotide
  Target: LAMA2; (-) strand; PAM type: YTN; PAM sequence: TTT
aacaagcaataataagcaag

SEQ ID NO: 223036 - DNA, 20 bp, Artificial Sequence
  Description of Artificial Sequence: Synthetic oligonucleotide
  Target: LAMA2; (-) strand; PAM type: YTN; PAM sequence: TTT
taacaagcaataataagcaa

SEQ ID NO: 223037 - DNA, 20 bp, Artificial Sequence
  Description of Artificial Sequence: Synthetic oligonucleotide
  Target: LAMA2; (-) strand; PAM type: YTN; PAM sequence: TTG
gaagaattttaacaagcaat

SEQ ID NO: 223038 - DNA, 20 bp, Artificial Sequence
  Description of Artificial Sequence: Synthetic oligonucleotide
  Target: LAMA2; (-) strand; PAM type: YTN; PAM sequence: TTT
ggaagaattttaacaagcaa

SEQ ID NO: 223039 - DNA, 20 bp, Artificial Sequence
  Description of Artificial Sequence: Synthetic oligonucleotide
  Target: LAMA2; (-) strand; PAM type: YTN; PAM sequence: TTA
taaatgtgatttggaagaat

SEQ ID NO: 223040 - DNA, 20 bp, Artificial Sequence
  Description of Artificial Sequence: Synthetic oligonucleotide
  Target: LAMA2; (-) strand; PAM type: YTN; PAM sequence: TTG
attataaatgtgatttggaa

SEQ ID NO: 223041 - DNA, 20 bp, Artificial Sequence
  Description of Artificial Sequence: Synthetic oligonucleotide
  Target: LAMA2; (-) strand; PAM type: YTN; PAM sequence: CTT
gattataaatgtgatttgga

SEQ ID NO: 223042 - DNA, 20 bp, Artificial Sequence
  Description of Artificial Sequence: Synthetic oligonucleotide
  Target: LAMA2; (-) strand; PAM type: YTN; PAM sequence: CTG
aacgacttgattataaatgt

SEQ ID NO: 223043 - DNA, 20 bp, Artificial Sequence
  Description of Artificial Sequence: Synthetic oligonucleotide
  Target: LAMA2; (-) strand; PAM type: YTN; PAM sequence: TTA
gtgctgaacgacttgattat

SEQ ID NO: 223044 - DNA, 20 bp, Artificial Sequence
  Description of Artificial Sequence: Synthetic oligonucleotide
  Target: LAMA2; (-) strand; PAM type: YTN; PAM sequence: CTT
agtgctgaacgacttgatta

SEQ ID NO: 223045 - DNA, 20 bp, Artificial Sequence
  Description of Artificial Sequence: Synthetic oligonucleotide
  Target: LAMA2; (-) strand; PAM type: YTN; PAM sequence: TTC
cttagtgctgaacgacttga

SEQ ID NO: 223046 - DNA, 20 bp, Artificial Sequence
  Description of Artificial Sequence: Synthetic oligonucleotide
  Target: LAMA2; (-) strand; PAM type: YTN; PAM sequence: TTT
ccttagtgctgaacgacttg

SEQ ID NO: 223047 - DNA, 20 bp, Artificial Sequence
  Description of Artificial Sequence: Synthetic oligonucleotide
  Target: LAMA2; (-) strand; PAM type: YTN; PAM sequence: TTT
tccttagtgctgaacgactt

SEQ ID NO: 223048 - DNA, 20 bp, Artificial Sequence
  Description of Artificial Sequence: Synthetic oligonucleotide
  Target: LAMA2; (-) strand; PAM type: YTN; PAM sequence: TTT
ttccttagtgctgaacgact

SEQ ID NO: 223049 - DNA, 20 bp, Artificial Sequence
  Description of Artificial Sequence: Synthetic oligonucleotide
  Target: LAMA2; (-) strand; PAM type: YTN; PAM sequence: TTT
tttccttagtgctgaacgac

SEQ ID NO: 223050 - DNA, 20 bp, Artificial Sequence
  Description of Artificial Sequence: Synthetic oligonucleotide
  Target: LAMA2; (-) strand; PAM type: YTN; PAM sequence: TTT
ttttccttagtgctgaacga

SEQ ID NO: 223051 - DNA, 20 bp, Artificial Sequence
  Description of Artificial Sequence: Synthetic oligonucleotide
  Target: LAMA2; (-) strand; PAM type: YTN; PAM sequence: TTT
tttttccttagtgctgaacg

SEQ ID NO: 223052 - DNA, 20 bp, Artificial Sequence
  Description of Artificial Sequence: Synthetic oligonucleotide
  Target: LAMA2; (-) strand; PAM type: YTN; PAM sequence: TTA
ttttttttccttagtgctga

SEQ ID NO: 223053 - DNA, 20 bp, Artificial Sequence
  Description of Artificial Sequence: Synthetic oligonucleotide
  Target: LAMA2; (-) strand; PAM type: YTN; PAM sequence: TTC
atgaaaatgttatttttttt

SEQ ID NO: 223054 - DNA, 20 bp, Artificial Sequence
  Description of Artificial Sequence: Synthetic oligonucleotide
  Target: LAMA2; (-) strand; PAM type: YTN; PAM sequence: TTT
catgaaaatgttattttttt

SEQ ID NO: 223055 - DNA, 20 bp, Artificial Sequence
  Description of Artificial Sequence: Synthetic oligonucleotide
  Target: LAMA2; (-) strand; PAM type: YTN; PAM sequence: TTT
tcatgaaaatgttatttttt

SEQ ID NO: 223056 - DNA, 20 bp, Artificial Sequence
  Description of Artificial Sequence: Synthetic oligonucleotide
  Target: LAMA2; (-) strand; PAM type: YTN; PAM sequence: TTT
ttcatgaaaatgttattttt

SEQ ID NO: 223057 - DNA, 20 bp, Artificial Sequence
  Description of Artificial Sequence: Synthetic oligonucleotide
  Target: LAMA2; (-) strand; PAM type: YTN; PAM sequence: TTT
tttcatgaaaatgttatttt

SEQ ID NO: 223058 - DNA, 20 bp, Artificial Sequence
  Description of Artificial Sequence: Synthetic oligonucleotide
  Target: LAMA2; (-) strand; PAM type: YTN; PAM sequence: TTC
attttttcatgaaaatgtta

SEQ ID NO: 223059 - DNA, 20 bp, Artificial Sequence
  Description of Artificial Sequence: Synthetic oligonucleotide
  Target: LAMA2; (-) strand; PAM type: YTN; PAM sequence: TTT
cattttttcatgaaaatgtt

SEQ ID NO: 223060 - DNA, 20 bp, Artificial Sequence
  Description of Artificial Sequence: Synthetic oligonucleotide
  Target: LAMA2; (-) strand; PAM type: YTN; PAM sequence: CTA
agagaatatataaatgtaat

SEQ ID NO: 223061 - DNA, 20 bp, Artificial Sequence
  Description of Artificial Sequence: Synthetic oligonucleotide
  Target: LAMA2; (-) strand; PAM type: YTN; PAM sequence: TTC
aatgtccctaagagaatata

SEQ ID NO: 223062 - DNA, 20 bp, Artificial Sequence
  Description of Artificial Sequence: Synthetic oligonucleotide
  Target: LAMA2; (-) strand; PAM type: YTN; PAM sequence: TTT
caatgtccctaagagaatat

SEQ ID NO: 223063 - DNA, 20 bp, Artificial Sequence
  Description of Artificial Sequence: Synthetic oligonucleotide
  Target: LAMA2; (-) strand; PAM type: YTN; PAM sequence: TTT
tcaatgtccctaagagaata

SEQ ID NO: 223064 - DNA, 20 bp, Artificial Sequence
  Description of Artificial Sequence: Synthetic oligonucleotide
  Target: LAMA2; (-) strand; PAM type: YTN; PAM sequence: TTA
ttttcaatgtccctaagaga

SEQ ID NO: 223065 - DNA, 20 bp, Artificial Sequence
  Description of Artificial Sequence: Synthetic oligonucleotide
  Target: LAMA2; (-) strand; PAM type: YTN; PAM sequence: CTT
attttcaatgtccctaagag

SEQ ID NO: 223066 - DNA, 20 bp, Artificial Sequence
  Description of Artificial Sequence: Synthetic oligonucleotide
  Target: LAMA2; (-) strand; PAM type: YTN; PAM sequence: CTG
aaaaatagcaagacttattt

SEQ ID NO: 223067 - DNA, 20 bp, Artificial Sequence
  Description of Artificial Sequence: Synthetic oligonucleotide
  Target: LAMA2; (-) strand; PAM type: YTN; PAM sequence: CTC
tgaaaaatagcaagacttat

SEQ ID NO: 223068 - DNA, 20 bp, Artificial Sequence
  Description of Artificial Sequence: Synthetic oligonucleotide
  Target: LAMA2; (-) strand; PAM type: YTN; PAM sequence: CTA
gctctgaaaaatagcaagac

SEQ ID NO: 223069 - DNA, 20 bp, Artificial Sequence
  Description of Artificial Sequence: Synthetic oligonucleotide
  Target: LAMA2; (-) strand; PAM type: YTN; PAM sequence: CTC
aaagtctagctctgaaaaat

SEQ ID NO: 223070 - DNA, 20 bp, Artificial Sequence
  Description of Artificial Sequence: Synthetic oligonucleotide
  Target: LAMA2; (-) strand; PAM type: YTN; PAM sequence: CTG
caaaaaagcaaatctcaaag

SEQ ID NO: 223071 - DNA, 20 bp, Artificial Sequence
  Description of Artificial Sequence: Synthetic oligonucleotide
  Target: LAMA2; (-) strand; PAM type: YTN; PAM sequence: CTC
tgcaaaaaagcaaatctcaa

SEQ ID NO: 223072 - DNA, 20 bp, Artificial Sequence
  Description of Artificial Sequence: Synthetic oligonucleotide
  Target: LAMA2; (-) strand; PAM type: YTN; PAM sequence: CTC
actctgcaaaaaagcaaatc

SEQ ID NO: 223073 - DNA, 20 bp, Artificial Sequence
  Description of Artificial Sequence: Synthetic oligonucleotide
  Target: LAMA2; (-) strand; PAM type: YTN; PAM sequence: CTA
tctcactctgcaaaaaagca

SEQ ID NO: 223074 - DNA, 20 bp, Artificial Sequence
  Description of Artificial Sequence: Synthetic oligonucleotide
  Target: LAMA2; (-) strand; PAM type: YTN; PAM sequence: CTC
tatctcactctgcaaaaaag

SEQ ID NO: 223075 - DNA, 20 bp, Artificial Sequence
  Description of Artificial Sequence: Synthetic oligonucleotide
  Target: LAMA2; (-) strand; PAM type: YTN; PAM sequence: TTC
tctatctcactctgcaaaaa

SEQ ID NO: 223076 - DNA, 20 bp, Artificial Sequence
  Description of Artificial Sequence: Synthetic oligonucleotide
  Target: LAMA2; (-) strand; PAM type: YTN; PAM sequence: CTT
ctctatctcactctgcaaaa

SEQ ID NO: 223077 - DNA, 20 bp, Artificial Sequence
  Description of Artificial Sequence: Synthetic oligonucleotide
  Target: LAMA2; (-) strand; PAM type: YTN; PAM sequence: TTG
aaggacttctctatctcact

SEQ ID NO: 223078 - DNA, 20 bp, Artificial Sequence
  Description of Artificial Sequence: Synthetic oligonucleotide
  Target: LAMA2; (-) strand; PAM type: YTN; PAM sequence: TTT
gaaggacttctctatctcac

SEQ ID NO: 223079 - DNA, 20 bp, Artificial Sequence
  Description of Artificial Sequence: Synthetic oligonucleotide
  Target: LAMA2; (-) strand; PAM type: YTN; PAM sequence: TTC
aagggacagtatttgaagga

SEQ ID NO: 223080 - DNA, 20 bp, Artificial Sequence
  Description of Artificial Sequence: Synthetic oligonucleotide
  Target: LAMA2; (-) strand; PAM type: YTN; PAM sequence: CTT
caagggacagtatttgaagg

SEQ ID NO: 223081 - DNA, 20 bp, Artificial Sequence
  Description of Artificial Sequence: Synthetic oligonucleotide
  Target: LAMA2; (-) strand; PAM type: YTN; PAM sequence: CTC
ttcaagggacagtatttgaa

SEQ ID NO: 223082 - DNA, 20 bp, Artificial Sequence
  Description of Artificial Sequence: Synthetic oligonucleotide
  Target: LAMA2; (-) strand; PAM type: YTN; PAM sequence: CTA
actcttcaagggacagtatt

SEQ ID NO: 223083 - DNA, 20 bp, Artificial Sequence
  Description of Artificial Sequence: Synthetic oligonucleotide
  Target: LAMA2; (-) strand; PAM type: YTN; PAM sequence: TTA
aatcaatgcctaactcttca

SEQ ID NO: 223084 - DNA, 20 bp, Artificial Sequence
  Description of Artificial Sequence: Synthetic oligonucleotide
  Target: LAMA2; (-) strand; PAM type: YTN; PAM sequence: TTT
aaatcaatgcctaactcttc

SEQ ID NO: 223085 - DNA, 20 bp, Artificial Sequence
  Description of Artificial Sequence: Synthetic oligonucleotide
  Target: LAMA2; (-) strand; PAM type: YTN; PAM sequence: TTC
aaaagggtttaaatcaatgc

SEQ ID NO: 223086 - DNA, 20 bp, Artificial Sequence
  Description of Artificial Sequence: Synthetic oligonucleotide
  Target: LAMA2; (-) strand; PAM type: YTN; PAM sequence: TTT
caaaagggtttaaatcaatg

SEQ ID NO: 223087 - DNA, 20 bp, Artificial Sequence
  Description of Artificial Sequence: Synthetic oligonucleotide
  Target: LAMA2; (-) strand; PAM type: YTN; PAM sequence: TTT
tcaaaagggtttaaatcaat

SEQ ID NO: 223088 - DNA, 20 bp, Artificial Sequence
  Description of Artificial Sequence: Synthetic oligonucleotide
  Target: LAMA2; (-) strand; PAM type: YTN; PAM sequence: TTT
ttcaaaagggtttaaatcaa

SEQ ID NO: 223089 - DNA, 20 bp, Artificial Sequence
  Description of Artificial Sequence: Synthetic oligonucleotide
  Target: LAMA2; (-) strand; PAM type: YTN; PAM sequence: TTG
tttttcaaaagggtttaaat

SEQ ID NO: 223090 - DNA, 20 bp, Artificial Sequence
  Description of Artificial Sequence: Synthetic oligonucleotide
  Target: LAMA2; (-) strand; PAM type: YTN; PAM sequence: TTG
aaattgtttttcaaaagggt

SEQ ID NO: 223091 - DNA, 20 bp, Artificial Sequence
  Description of Artificial Sequence: Synthetic oligonucleotide
  Target: LAMA2; (-) strand; PAM type: YTN; PAM sequence: TTG
ttgaaattgtttttcaaaag

SEQ ID NO: 223092 - DNA, 20 bp, Artificial Sequence
  Description of Artificial Sequence: Synthetic oligonucleotide
  Target: LAMA2; (-) strand; PAM type: YTN; PAM sequence: TTT
gttgaaattgtttttcaaaa

SEQ ID NO: 223093 - DNA, 20 bp, Artificial Sequence
  Description of Artificial Sequence: Synthetic oligonucleotide
  Target: LAMA2; (-) strand; PAM type: YTN; PAM sequence: TTA
tttgttgaaattgtttttca

SEQ ID NO: 223094 - DNA, 20 bp, Artificial Sequence
  Description of Artificial Sequence: Synthetic oligonucleotide
  Target: LAMA2; (-) strand; PAM type: YTN; PAM sequence: TTC
aattatttgttgaaattgtt

SEQ ID NO: 223095 - DNA, 20 bp, Artificial Sequence
  Description of Artificial Sequence: Synthetic oligonucleotide
  Target: LAMA2; (-) strand; PAM type: YTN; PAM sequence: TTT
caattatttgttgaaattgt

SEQ ID NO: 223096 - DNA, 20 bp, Artificial Sequence
  Description of Artificial Sequence: Synthetic oligonucleotide
  Target: LAMA2; (-) strand; PAM type: YTN; PAM sequence: TTT
tcaattatttgttgaaattg

SEQ ID NO: 223097 - DNA, 20 bp, Artificial Sequence
  Description of Artificial Sequence: Synthetic oligonucleotide
  Target: LAMA2; (-) strand; PAM type: YTN; PAM sequence: TTG
aagagaacattttcaattat

SEQ ID NO: 223098 - DNA, 20 bp, Artificial Sequence
  Description of Artificial Sequence: Synthetic oligonucleotide
  Target: LAMA2; (-) strand; PAM type: YTN; PAM sequence: TTT
gaagagaacattttcaatta

SEQ ID NO: 223099 - DNA, 20 bp, Artificial Sequence
  Description of Artificial Sequence: Synthetic oligonucleotide
  Target: LAMA2; (-) strand; PAM type: YTN; PAM sequence: CTT
tgaagagaacattttcaatt

SEQ ID NO: 223100 - DNA, 20 bp, Artificial Sequence
  Description of Artificial Sequence: Synthetic oligonucleotide
  Target: LAMA2; (-) strand; PAM type: YTN; PAM sequence: CTA
atgataatactttgaagaga

SEQ ID NO: 223101 - DNA, 20 bp, Artificial Sequence
  Description of Artificial Sequence: Synthetic oligonucleotide
  Target: LAMA2; (-) strand; PAM type: YTN; PAM sequence: CTG
gatgactaatgataatactt

SEQ ID NO: 223102 - DNA, 20 bp, Artificial Sequence
  Description of Artificial Sequence: Synthetic oligonucleotide
  Target: LAMA2; (-) strand; PAM type: YTN; PAM sequence: CTA
actggatgactaatgataat

SEQ ID NO: 223103 - DNA, 20 bp, Artificial Sequence
  Description of Artificial Sequence: Synthetic oligonucleotide
  Target: LAMA2; (-) strand; PAM type: YTN; PAM sequence: CTA
ataataataatctaactgga

SEQ ID NO: 223104 - DNA, 20 bp, Artificial Sequence
  Description of Artificial Sequence: Synthetic oligonucleotide
  Target: LAMA2; (-) strand; PAM type: YTN; PAM sequence: TTC
ctaataataataatctaact

SEQ ID NO: 223105 - DNA, 20 bp, Artificial Sequence
  Description of Artificial Sequence: Synthetic oligonucleotide
  Target: LAMA2; (-) strand; PAM type: YTN; PAM sequence: CTC
agaattcctaataataataa

SEQ ID NO: 223106 - DNA, 20 bp, Artificial Sequence
  Description of Artificial Sequence: Synthetic oligonucleotide
  Target: LAMA2; (-) strand; PAM type: YTN; PAM sequence: TTC
caccacctcagaattcctaa

SEQ ID NO: 223107 - DNA, 20 bp, Artificial Sequence
  Description of Artificial Sequence: Synthetic oligonucleotide
  Target: LAMA2; (-) strand; PAM type: YTN; PAM sequence: TTA
ttccaccacctcagaattcc

SEQ ID NO: 223108 - DNA, 20 bp, Artificial Sequence
  Description of Artificial Sequence: Synthetic oligonucleotide
  Target: LAMA2; (-) strand; PAM type: YTN; PAM sequence: TTG
gaaaatgaattattccacca

SEQ ID NO: 223109 - DNA, 20 bp, Artificial Sequence
  Description of Artificial Sequence: Synthetic oligonucleotide
  Target: LAMA2; (-) strand; PAM type: YTN; PAM sequence: TTA
acacattggaaaatgaatta

SEQ ID NO: 223110 - DNA, 20 bp, Artificial Sequence
  Description of Artificial Sequence: Synthetic oligonucleotide
  Target: LAMA2; (-) strand; PAM type: YTN; PAM sequence: CTC
atgagaagttaacacattgg

SEQ ID NO: 223111 - DNA, 20 bp, Artificial Sequence
  Description of Artificial Sequence: Synthetic oligonucleotide
  Target: LAMA2; (-) strand; PAM type: YTN; PAM sequence: TTA
aactcatgagaagttaacac

SEQ ID NO: 223112 - DNA, 20 bp, Artificial Sequence
  Description of Artificial Sequence: Synthetic oligonucleotide
  Target: LAMA2; (-) strand; PAM type: YTN; PAM sequence: CTC
acattaaactcatgagaagt

SEQ ID NO: 223113 - DNA, 20 bp, Artificial Sequence
  Description of Artificial Sequence: Synthetic oligonucleotide
  Target: LAMA2; (-) strand; PAM type: YTN; PAM sequence: TTA
tactcacattaaactcatga

SEQ ID NO: 223114 - DNA, 20 bp, Artificial Sequence
  Description of Artificial Sequence: Synthetic oligonucleotide
  Target: LAMA2; (-) strand; PAM type: YTN; PAM sequence: TTT
atactcacattaaactcatg

SEQ ID NO: 223115 - DNA, 20 bp, Artificial Sequence
  Description of Artificial Sequence: Synthetic oligonucleotide
  Target: LAMA2; (-) strand; PAM type: YTN; PAM sequence: TTT
tatactcacattaaactcat

SEQ ID NO: 223116 - DNA, 20 bp, Artificial Sequence
  Description of Artificial Sequence: Synthetic oligonucleotide
  Target: LAMA2; (-) strand; PAM type: YTN; PAM sequence: TTT
ttatactcacattaaactca

SEQ ID NO: 223117 - DNA, 20 bp, Artificial Sequence
  Description of Artificial Sequence: Synthetic oligonucleotide
  Target: LAMA2; (-) strand; PAM type: YTN; PAM sequence: CTT
tttatactcacattaaactc

SEQ ID NO: 223118 - DNA, 20 bp, Artificial Sequence
  Description of Artificial Sequence: Synthetic oligonucleotide
  Target: LAMA2; (-) strand; PAM type: YTN; PAM sequence: TTA
aaacagactttttatactca

SEQ ID NO: 223119 - DNA, 20 bp, Artificial Sequence
  Description of Artificial Sequence: Synthetic oligonucleotide
  Target: LAMA2; (-) strand; PAM type: YTN; PAM sequence: CTC
agttaaaacagactttttat

SEQ ID NO: 223120 - DNA, 20 bp, Artificial Sequence
  Description of Artificial Sequence: Synthetic oligonucleotide
  Target: LAMA2; (-) strand; PAM type: YTN; PAM sequence: CTG
ccctcagttaaaacagactt

SEQ ID NO: 223121 - DNA, 20 bp, Artificial Sequence
  Description of Artificial Sequence: Synthetic oligonucleotide
  Target: LAMA2; (-) strand; PAM type: YTN; PAM sequence: CTC
tgccctcagttaaaacagac

SEQ ID NO: 223122 - DNA, 20 bp, Artificial Sequence
  Description of Artificial Sequence: Synthetic oligonucleotide
  Target: LAMA2; (-) strand; PAM type: YTN; PAM sequence: TTA
taagagaaaaaggaatactc

SEQ ID NO: 223123 - DNA, 20 bp, Artificial Sequence
  Description of Artificial Sequence: Synthetic oligonucleotide
  Target: LAMA2; (-) strand; PAM type: YTN; PAM sequence: CTG
tattataagagaaaaaggaa

SEQ ID NO: 223124 - DNA, 20 bp, Artificial Sequence
  Description of Artificial Sequence: Synthetic oligonucleotide
  Target: LAMA2; (-) strand; PAM type: YTN; PAM sequence: CTC
ctgtattataagagaaaaag

SEQ ID NO: 223125 - DNA, 20 bp, Artificial Sequence
  Description of Artificial Sequence: Synthetic oligonucleotide
  Target: LAMA2; (-) strand; PAM type: YTN; PAM sequence: CTG
gctcctgtattataagagaa

SEQ ID NO: 223126 - DNA, 20 bp, Artificial Sequence
  Description of Artificial Sequence: Synthetic oligonucleotide
  Target: LAMA2; (-) strand; PAM type: YTN; PAM sequence: TTG
taactggctcctgtattata

SEQ ID NO: 223127 - DNA, 20 bp, Artificial Sequence
  Description of Artificial Sequence: Synthetic oligonucleotide
  Target: LAMA2; (-) strand; PAM type: YTN; PAM sequence: CTG
tgttgtaactggctcctgta

SEQ ID NO: 223128 - DNA, 20 bp, Artificial Sequence
  Description of Artificial Sequence: Synthetic oligonucleotide
  Target: LAMA2; (-) strand; PAM type: YTN; PAM sequence: CTC
ctgtgttgtaactggctcct

SEQ ID NO: 223129 - DNA, 20 bp, Artificial Sequence
  Description of Artificial Sequence: Synthetic oligonucleotide
  Target: LAMA2; (-) strand; PAM type: YTN; PAM sequence: TTC
acctcctgtgttgtaactgg

SEQ ID NO: 223130 - DNA, 20 bp, Artificial Sequence
  Description of Artificial Sequence: Synthetic oligonucleotide
  Target: LAMA2; (-) strand; PAM type: YTN; PAM sequence: TTT
cacctcctgtgttgtaactg

SEQ ID NO: 223131 - DNA, 20 bp, Artificial Sequence
  Description of Artificial Sequence: Synthetic oligonucleotide
  Target: LAMA2; (-) strand; PAM type: YTN; PAM sequence: TTG
caggtaagcaaacaggccat

SEQ ID NO: 223132 - DNA, 20 bp, Artificial Sequence
  Description of Artificial Sequence: Synthetic oligonucleotide
  Target: LAMA2; (-) strand; PAM type: YTN; PAM sequence: CTG
aagttgcaggtaagcaaaca

SEQ ID NO: 223133 - DNA, 20 bp, Artificial Sequence
  Description of Artificial Sequence: Synthetic oligonucleotide
  Target: LAMA2; (-) strand; PAM type: YTN; PAM sequence: TTC
ctgaagttgcaggtaagcaa

SEQ ID NO: 223134 - DNA, 20 bp, Artificial Sequence
  Description of Artificial Sequence: Synthetic oligonucleotide
  Target: LAMA2; (-) strand; PAM type: YTN; PAM sequence: CTA
agcatgaaattcctgaagtt

SEQ ID NO: 223135 - DNA, 20 bp, Artificial Sequence
  Description of Artificial Sequence: Synthetic oligonucleotide
  Target: LAMA2; (-) strand; PAM type: YTN; PAM sequence: TTG
ctaagcatgaaattcctgaa

SEQ ID NO: 223136 - DNA, 20 bp, Artificial Sequence
  Description of Artificial Sequence: Synthetic oligonucleotide
  Target: LAMA2; (-) strand; PAM type: YTN; PAM sequence: TTA
attgctaagcatgaaattcc

SEQ ID NO: 223137 - DNA, 20 bp, Artificial Sequence
  Description of Artificial Sequence: Synthetic oligonucleotide
  Target: LAMA2; (-) strand; PAM type: YTN; PAM sequence: CTG
caattaattgctaagcatga

SEQ ID NO: 223138 - DNA, 20 bp, Artificial Sequence
  Description of Artificial Sequence: Synthetic oligonucleotide
  Target: LAMA2; (-) strand; PAM type: YTN; PAM sequence: CTA
cccccacaagtgtgtactgc

SEQ ID NO: 223139 - DNA, 20 bp, Artificial Sequence
  Description of Artificial Sequence: Synthetic oligonucleotide
  Target: LAMA2; (-) strand; PAM type: YTN; PAM sequence: CTA
cccctacccccacaagtgtg

SEQ ID NO: 223140 - DNA, 20 bp, Artificial Sequence
  Description of Artificial Sequence: Synthetic oligonucleotide
  Target: LAMA2; (-) strand; PAM type: YTN; PAM sequence: CTC
ctacccctacccccacaagt

SEQ ID NO: 223141 - DNA, 20 bp, Artificial Sequence
  Description of Artificial Sequence: Synthetic oligonucleotide
  Target: LAMA2; (-) strand; PAM type: YTN; PAM sequence: TTA
tccaacctcctacccctacc

SEQ ID NO: 223142 - DNA, 20 bp, Artificial Sequence
  Description of Artificial Sequence: Synthetic oligonucleotide
  Target: LAMA2; (-) strand; PAM type: YTN; PAM sequence: CTT
atccaacctcctacccctac

SEQ ID NO: 223143 - DNA, 20 bp, Artificial Sequence
  Description of Artificial Sequence: Synthetic oligonucleotide
  Target: LAMA2; (-) strand; PAM type: YTN; PAM sequence: TTA
agtgcaacccacttatccaa

SEQ ID NO: 223144 - DNA, 20 bp, Artificial Sequence
  Description of Artificial Sequence: Synthetic oligonucleotide
  Target: LAMA2; (-) strand; PAM type: YTN; PAM sequence: TTA
ttaagtgcaacccacttatc

SEQ ID NO: 223145 - DNA, 20 bp, Artificial Sequence
  Description of Artificial Sequence: Synthetic oligonucleotide
  Target: LAMA2; (-) strand; PAM type: YTN; PAM sequence: CTG
aattattaagtgcaacccac

SEQ ID NO: 223146 - DNA, 20 bp, Artificial Sequence
  Description of Artificial Sequence: Synthetic oligonucleotide
  Target: LAMA2; (-) strand; PAM type: YTN; PAM sequence: TTG
tcactgaattattaagtgca

SEQ ID NO: 223147 - DNA, 20 bp, Artificial Sequence
  Description of Artificial Sequence: Synthetic oligonucleotide
  Target: LAMA2; (-) strand; PAM type: YTN; PAM sequence: TTG
taattgtcactgaattatta

SEQ ID NO: 223148 - DNA, 20 bp, Artificial Sequence
  Description of Artificial Sequence: Synthetic oligonucleotide
  Target: LAMA2; (-) strand; PAM type: YTN; PAM sequence: TTT
gtaattgtcactgaattatt

SEQ ID NO: 223149 - DNA, 20 bp, Artificial Sequence
  Description of Artificial Sequence: Synthetic oligonucleotide
  Target: LAMA2; (-) strand; PAM type: YTN; PAM sequence: TTC
acatatagtgaaacgatttg

SEQ ID NO: 223150 - DNA, 20 bp, Artificial Sequence
  Description of Artificial Sequence: Synthetic oligonucleotide
  Target: LAMA2; (-) strand; PAM type: YTN; PAM sequence: TTT
cacatatagtgaaacgattt

SEQ ID NO: 223151 - DNA, 20 bp, Artificial Sequence
  Description of Artificial Sequence: Synthetic oligonucleotide
  Target: LAMA2; (-) strand; PAM type: YTN; PAM sequence: CTT
tcacatatagtgaaacgatt

SEQ ID NO: 223152 - DNA, 20 bp, Artificial Sequence
  Description of Artificial Sequence: Synthetic oligonucleotide
  Target: LAMA2; (-) strand; PAM type: YTN; PAM sequence: TTC
aaatactttcacatatagtg

SEQ ID NO: 223153 - DNA, 20 bp, Artificial Sequence
  Description of Artificial Sequence: Synthetic oligonucleotide
  Target: LAMA2; (-) strand; PAM type: YTN; PAM sequence: CTT
caaatactttcacatatagt

SEQ ID NO: 223154 - DNA, 20 bp, Artificial Sequence
  Description of Artificial Sequence: Synthetic oligonucleotide
  Target: LAMA2; (-) strand; PAM type: YTN; PAM sequence: TTA
cttcaaatactttcacatat

SEQ ID NO: 223155 - DNA, 20 bp, Artificial Sequence
  Description of Artificial Sequence: Synthetic oligonucleotide
  Target: LAMA2; (-) strand; PAM type: YTN; PAM sequence: TTT
acttcaaatactttcacata

SEQ ID NO: 223156 - DNA, 20 bp, Artificial Sequence
  Description of Artificial Sequence: Synthetic oligonucleotide
  Target: LAMA2; (-) strand; PAM type: YTN; PAM sequence: TTC
aggtaaatttacttcaaata

SEQ ID NO: 223157 - DNA, 20 bp, Artificial Sequence
  Description of Artificial Sequence: Synthetic oligonucleotide
  Target: LAMA2; (-) strand; PAM type: YTN; PAM sequence: CTT
caggtaaatttacttcaaat

SEQ ID NO: 223158 - DNA, 20 bp, Artificial Sequence
  Description of Artificial Sequence: Synthetic oligonucleotide
  Target: LAMA2; (-) strand; PAM type: YTN; PAM sequence: CTA
tcttcaggtaaatttacttc

SEQ ID NO: 223159 - DNA, 20 bp, Artificial Sequence
  Description of Artificial Sequence: Synthetic oligonucleotide
  Target: LAMA2; (-) strand; PAM type: YTN; PAM sequence: TTC
tatcttcaggtaaatttact

SEQ ID NO: 223160 - DNA, 20 bp, Artificial Sequence
  Description of Artificial Sequence: Synthetic oligonucleotide
  Target: LAMA2; (-) strand; PAM type: YTN; PAM sequence: TTT
ctatcttcaggtaaatttac

SEQ ID NO: 223161 - DNA, 20 bp, Artificial Sequence
  Description of Artificial Sequence: Synthetic oligonucleotide
  Target: LAMA2; (-) strand; PAM type: YTN; PAM sequence: TTT
tctatcttcaggtaaattta

SEQ ID NO: 223162 - DNA, 20 bp, Artificial Sequence
  Description of Artificial Sequence: Synthetic oligonucleotide
  Target: LAMA2; (-) strand; PAM type: YTN; PAM sequence: TTG
cccacccatattttctatct

SEQ ID NO: 223163 - DNA, 20 bp, Artificial Sequence
  Description of Artificial Sequence: Synthetic oligonucleotide
  Target: LAMA2; (-) strand; PAM type: YTN; PAM sequence: CTT
gcccacccatattttctatc

SEQ ID NO: 223164 - DNA, 20 bp, Artificial Sequence
  Description of Artificial Sequence: Synthetic oligonucleotide
  Target: LAMA2; (-) strand; PAM type: YTN; PAM sequence: TTC
aggaggagcttgcccaccca

SEQ ID NO: 223165 - DNA, 20 bp, Artificial Sequence
  Description of Artificial Sequence: Synthetic oligonucleotide
  Target: LAMA2; (-) strand; PAM type: YTN; PAM sequence: CTA
gaataatgtggtggggagtt

SEQ ID NO: 223166 - DNA, 20 bp, Artificial Sequence
  Description of Artificial Sequence: Synthetic oligonucleotide
  Target: LAMA2; (-) strand; PAM type: YTN; PAM sequence: TTC
aataaacctagaataatgtg

SEQ ID NO: 223167 - DNA, 20 bp, Artificial Sequence
  Description of Artificial Sequence: Synthetic oligonucleotide
  Target: LAMA2; (-) strand; PAM type: YTN; PAM sequence: CTT
caataaacctagaataatgt

SEQ ID NO: 223168 - DNA, 20 bp, Artificial Sequence
  Description of Artificial Sequence: Synthetic oligonucleotide
  Target: LAMA2; (-) strand; PAM type: YTN; PAM sequence: TTA
cttcaataaacctagaataa

SEQ ID NO: 223169 - DNA, 20 bp, Artificial Sequence
  Description of Artificial Sequence: Synthetic oligonucleotide
  Target: LAMA2; (-) strand; PAM type: YTN; PAM sequence: TTT
acttcaataaacctagaata

SEQ ID NO: 223170 - DNA, 20 bp, Artificial Sequence
  Description of Artificial Sequence: Synthetic oligonucleotide
  Target: LAMA2; (-) strand; PAM type: YTN; PAM sequence: TTA
catttacttcaataaaccta

SEQ ID NO: 223171 - DNA, 20 bp, Artificial Sequence
  Description of Artificial Sequence: Synthetic oligonucleotide
  Target: LAMA2; (-) strand; PAM type: YTN; PAM sequence: TTT
acatttacttcaataaacct

SEQ ID NO: 223172 - DNA, 20 bp, Artificial Sequence
  Description of Artificial Sequence: Synthetic oligonucleotide
  Target: LAMA2; (-) strand; PAM type: YTN; PAM sequence: TTA
taagtttacatttacttcaa

SEQ ID NO: 223173 - DNA, 20 bp, Artificial Sequence
  Description of Artificial Sequence: Synthetic oligonucleotide
  Target: LAMA2; (-) strand; PAM type: YTN; PAM sequence: CTT
ataagtttacatttacttca

SEQ ID NO: 223174 - DNA, 20 bp, Artificial Sequence
  Description of Artificial Sequence: Synthetic oligonucleotide
  Target: LAMA2; (-) strand; PAM type: YTN; PAM sequence: TTA
tgtccccttataagtttaca

SEQ ID NO: 223175 - DNA, 20 bp, Artificial Sequence
  Description of Artificial Sequence: Synthetic oligonucleotide
  Target: LAMA2; (-) strand; PAM type: YTN; PAM sequence: TTT
atgtccccttataagtttac

SEQ ID NO: 223176 - DNA, 20 bp, Artificial Sequence
  Description of Artificial Sequence: Synthetic oligonucleotide
  Target: LAMA2; (-) strand; PAM type: YTN; PAM sequence: TTT
tatgtccccttataagttta

SEQ ID NO: 223177 - DNA, 20 bp, Artificial Sequence
  Description of Artificial Sequence: Synthetic oligonucleotide
  Target: LAMA2; (-) strand; PAM type: YTN; PAM sequence: CTG
tgtgagttttatgtcccctt

SEQ ID NO: 223178 - DNA, 20 bp, Artificial Sequence
  Description of Artificial Sequence: Synthetic oligonucleotide
  Target: LAMA2; (-) strand; PAM type: YTN; PAM sequence: TTC
tgtgtgagttttatgtcccc

SEQ ID NO: 223179 - DNA, 20 bp, Artificial Sequence
  Description of Artificial Sequence: Synthetic oligonucleotide
  Target: LAMA2; (-) strand; PAM type: YTN; PAM sequence: TTT
ctgtgtgagttttatgtccc

SEQ ID NO: 223180 - DNA, 20 bp, Artificial Sequence
  Description of Artificial Sequence: Synthetic oligonucleotide
  Target: LAMA2; (-) strand; PAM type: YTN; PAM sequence: TTT
tctgtgtgagttttatgtcc

SEQ ID NO: 223181 - DNA, 20 bp, Artificial Sequence
  Description of Artificial Sequence: Synthetic oligonucleotide
  Target: LAMA2; (-) strand; PAM type: YTN; PAM sequence: TTA
ttttctgtgtgagttttatg

SEQ ID NO: 223182 - DNA, 20 bp, Artificial Sequence
  Description of Artificial Sequence: Synthetic oligonucleotide
  Target: LAMA2; (-) strand; PAM type: YTN; PAM sequence: TTA
ttattttctgtgtgagtttt

SEQ ID NO: 223183 - DNA, 20 bp, Artificial Sequence
  Description of Artificial Sequence: Synthetic oligonucleotide
  Target: LAMA2; (-) strand; PAM type: YTN; PAM sequence: CTA
attattattttctgtgtgag

SEQ ID NO: 223184 - DNA, 20 bp, Artificial Sequence
  Description of Artificial Sequence: Synthetic oligonucleotide
  Target: LAMA2; (-) strand; PAM type: YTN; PAM sequence: TTA
atgtggaaatatgtctaatt

SEQ ID NO: 223185 - DNA, 20 bp, Artificial Sequence
  Description of Artificial Sequence: Synthetic oligonucleotide
  Target: LAMA2; (-) strand; PAM type: YTN; PAM sequence: TTA
aaaacattaatgtggaaata

SEQ ID NO: 223186 - DNA, 20 bp, Artificial Sequence
  Description of Artificial Sequence: Synthetic oligonucleotide
  Target: LAMA2; (-) strand; PAM type: YTN; PAM sequence: CTT
aaaaacattaatgtggaaat

SEQ ID NO: 223187 - DNA, 20 bp, Artificial Sequence
  Description of Artificial Sequence: Synthetic oligonucleotide
  Target: LAMA2; (-) strand; PAM type: YTN; PAM sequence: TTA
aacttaaaaacattaatgtg

SEQ ID NO: 223188 - DNA, 20 bp, Artificial Sequence
  Description of Artificial Sequence: Synthetic oligonucleotide
  Target: LAMA2; (-) strand; PAM type: YTN; PAM sequence: TTT
aaacttaaaaacattaatgt

SEQ ID NO: 223189 - DNA, 20 bp, Artificial Sequence
  Description of Artificial Sequence: Synthetic oligonucleotide
  Target: LAMA2; (-) strand; PAM type: YTN; PAM sequence: TTT
taaacttaaaaacattaatg

SEQ ID NO: 223190 - DNA, 20 bp, Artificial Sequence
  Description of Artificial Sequence: Synthetic oligonucleotide
  Target: LAMA2; (-) strand; PAM type: YTN; PAM sequence: TTA
aatgatgttttaaacttaaa

SEQ ID NO: 223191 - DNA, 20 bp, Artificial Sequence
  Description of Artificial Sequence: Synthetic oligonucleotide
  Target: LAMA2; (-) strand; PAM type: YTN; PAM sequence: TTT
aaatgatgttttaaacttaa

SEQ ID NO: 223192 - DNA, 20 bp, Artificial Sequence
  Description of Artificial Sequence: Synthetic oligonucleotide
  Target: LAMA2; (-) strand; PAM type: YTN; PAM sequence: TTT
taaatgatgttttaaactta

SEQ ID NO: 223193 - DNA, 20 bp, Artificial Sequence
  Description of Artificial Sequence: Synthetic oligonucleotide
  Target: LAMA2; (-) strand; PAM type: YTN; PAM sequence: TTT
ttaaatgatgttttaaactt

SEQ ID NO: 223194 - DNA, 20 bp, Artificial Sequence
  Description of Artificial Sequence: Synthetic oligonucleotide
  Target: LAMA2; (-) strand; PAM type: YTN; PAM sequence: TTA
agtcaagcatcagtgataaa

SEQ ID NO: 223195 - DNA, 20 bp, Artificial Sequence
  Description of Artificial Sequence: Synthetic oligonucleotide
  Target: LAMA2; (-) strand; PAM type: YTN; PAM sequence: TTT
aagtcaagcatcagtgataa

SEQ ID NO: 223196 - DNA, 20 bp, Artificial Sequence
  Description of Artificial Sequence: Synthetic oligonucleotide
  Target: LAMA2; (-) strand; PAM type: YTN; PAM sequence: TTG
tttaagtcaagcatcagtga

SEQ ID NO: 223197 - DNA, 20 bp, Artificial Sequence
  Description of Artificial Sequence: Synthetic oligonucleotide
  Target: LAMA2; (-) strand; PAM type: YTN; PAM sequence: CTT
gtttaagtcaagcatcagtg

SEQ ID NO: 223198 - DNA, 20 bp, Artificial Sequence
  Description of Artificial Sequence: Synthetic oligonucleotide
  Target: LAMA2; (-) strand; PAM type: YTN; PAM sequence: CTA
taagtggacttgtttaagtc

SEQ ID NO: 223199 - DNA, 20 bp, Artificial Sequence
  Description of Artificial Sequence: Synthetic oligonucleotide
  Target: LAMA2; (-) strand; PAM type: YTN; PAM sequence: CTG
acaatgctataagtggactt

SEQ ID NO: 223200 - DNA, 20 bp, Artificial Sequence
  Description of Artificial Sequence: Synthetic oligonucleotide
  Target: LAMA2; (-) strand; PAM type: YTN; PAM sequence: TTC
tgacaatgctataagtggac

SEQ ID NO: 223201 - DNA, 20 bp, Artificial Sequence
  Description of Artificial Sequence: Synthetic oligonucleotide
  Target: LAMA2; (-) strand; PAM type: YTN; PAM sequence: TTA
tacagattctgacaatgcta

SEQ ID NO: 223202 - DNA, 20 bp, Artificial Sequence
  Description of Artificial Sequence: Synthetic oligonucleotide
  Target: LAMA2; (-) strand; PAM type: YTN; PAM sequence: CTT
atacagattctgacaatgct

SEQ ID NO: 223203 - DNA, 20 bp, Artificial Sequence
  Description of Artificial Sequence: Synthetic oligonucleotide
  Target: LAMA2; (-) strand; PAM type: YTN; PAM sequence: CTG
aagagatacttatacagatt

SEQ ID NO: 223204 - DNA, 20 bp, Artificial Sequence
  Description of Artificial Sequence: Synthetic oligonucleotide
  Target: LAMA2; (-) strand; PAM type: YTN; PAM sequence: TTC
cctgaagagatacttataca

SEQ ID NO: 223205 - DNA, 20 bp, Artificial Sequence
  Description of Artificial Sequence: Synthetic oligonucleotide
  Target: LAMA2; (-) strand; PAM type: YTN; PAM sequence: TTA
aaaattccctgaagagatac

SEQ ID NO: 223206 - DNA, 20 bp, Artificial Sequence
  Description of Artificial Sequence: Synthetic oligonucleotide
  Target: LAMA2; (-) strand; PAM type: YTN; PAM sequence: CTT
aaaaattccctgaagagata

SEQ ID NO: 223207 - DNA, 20 bp, Artificial Sequence
  Description of Artificial Sequence: Synthetic oligonucleotide
  Target: LAMA2; (-) strand; PAM type: YTN; PAM sequence: CTC
atcttaaaaattccctgaag

SEQ ID NO: 223208 - DNA, 20 bp, Artificial Sequence
  Description of Artificial Sequence: Synthetic oligonucleotide
  Target: LAMA2; (-) strand; PAM type: YTN; PAM sequence: CTC
tcatcttaaaaattccctga

SEQ ID NO: 223209 - DNA, 20 bp, Artificial Sequence
  Description of Artificial Sequence: Synthetic oligonucleotide
  Target: LAMA2; (-) strand; PAM type: YTN; PAM sequence: TTC
actctcatcttaaaaattcc

SEQ ID NO: 223210 - DNA, 20 bp, Artificial Sequence
  Description of Artificial Sequence: Synthetic oligonucleotide
  Target: LAMA2; (-) strand; PAM type: YTN; PAM sequence: TTG
ttcactctcatcttaaaaat

SEQ ID NO: 223211 - DNA, 20 bp, Artificial Sequence
  Description of Artificial Sequence: Synthetic oligonucleotide
  Target: LAMA2; (-) strand; PAM type: YTN; PAM sequence: CTC
agaaaattgttcactctcat

SEQ ID NO: 223212 - DNA, 20 bp, Artificial Sequence
  Description of Artificial Sequence: Synthetic oligonucleotide
  Target: LAMA2; (-) strand; PAM type: YTN; PAM sequence: CTG
tgtaacaaaaatgtgtaggc

SEQ ID NO: 223213 - DNA, 20 bp, Artificial Sequence
  Description of Artificial Sequence: Synthetic oligonucleotide
  Target: LAMA2; (-) strand; PAM type: YTN; PAM sequence: TTA
ctgtgtaacaaaaatgtgta

SEQ ID NO: 223214 - DNA, 20 bp, Artificial Sequence
  Description of Artificial Sequence: Synthetic oligonucleotide
  Target: LAMA2; (-) strand; PAM type: YTN; PAM sequence: CTT
actgtgtaacaaaaatgtgt

SEQ ID NO: 223215 - DNA, 20 bp, Artificial Sequence
  Description of Artificial Sequence: Synthetic oligonucleotide
  Target: LAMA2; (-) strand; PAM type: YTN; PAM sequence: CTC
ttactgtgtaacaaaaatgt

SEQ ID NO: 223216 - DNA, 20 bp, Artificial Sequence
  Description of Artificial Sequence: Synthetic oligonucleotide
  Target: LAMA2; (-) strand; PAM type: YTN; PAM sequence: CTG
gctcttactgtgtaacaaaa

SEQ ID NO: 223217 - DNA, 20 bp, Artificial Sequence
  Description of Artificial Sequence: Synthetic oligonucleotide
  Target: LAMA2; (-) strand; PAM type: YTN; PAM sequence: CTA
agccacatagaacctggctc

SEQ ID NO: 223218 - DNA, 20 bp, Artificial Sequence
  Description of Artificial Sequence: Synthetic oligonucleotide
  Target: LAMA2; (-) strand; PAM type: YTN; PAM sequence: CTC
aaagccccatccccacctaa

SEQ ID NO: 223219 - DNA, 20 bp, Artificial Sequence
  Description of Artificial Sequence: Synthetic oligonucleotide
  Target: LAMA2; (-) strand; PAM type: YTN; PAM sequence: TTC
actcaaagccccatccccac

SEQ ID NO: 223220 - DNA, 20 bp, Artificial Sequence
  Description of Artificial Sequence: Synthetic oligonucleotide
  Target: LAMA2; (-) strand; PAM type: YTN; PAM sequence: CTG
tgtacaacagaggattcact

SEQ ID NO: 223221 - DNA, 20 bp, Artificial Sequence
  Description of Artificial Sequence: Synthetic oligonucleotide
  Target: LAMA2; (-) strand; PAM type: YTN; PAM sequence: TTA
agtctgtgtacaacagagga

SEQ ID NO: 223222 - DNA, 20 bp, Artificial Sequence
  Description of Artificial Sequence: Synthetic oligonucleotide
  Target: LAMA2; (-) strand; PAM type: YTN; PAM sequence: CTG
aaatggagaatgtattaagt

SEQ ID NO: 223223 - DNA, 20 bp, Artificial Sequence
  Description of Artificial Sequence: Synthetic oligonucleotide
  Target: LAMA2; (-) strand; PAM type: YTN; PAM sequence: CTG
atgaaaacagaggtgaaaag

SEQ ID NO: 223224 - DNA, 20 bp, Artificial Sequence
  Description of Artificial Sequence: Synthetic oligonucleotide
  Target: LAMA2; (-) strand; PAM type: YTN; PAM sequence: CTC
accgaggtaggtctgatgaa

SEQ ID NO: 223225 - DNA, 20 bp, Artificial Sequence
  Description of Artificial Sequence: Synthetic oligonucleotide
  Target: LAMA2; (-) strand; PAM type: YTN; PAM sequence: CTA
gaacctcaccgaggtaggtc

SEQ ID NO: 223226 - DNA, 20 bp, Artificial Sequence
  Description of Artificial Sequence: Synthetic oligonucleotide
  Target: LAMA2; (-) strand; PAM type: YTN; PAM sequence: CTG
cagcagggcagaagtctaga

SEQ ID NO: 223227 - DNA, 20 bp, Artificial Sequence
  Description of Artificial Sequence: Synthetic oligonucleotide
  Target: LAMA2; (-) strand; PAM type: YTN; PAM sequence: CTG
agtagctgcagcagggcaga

SEQ ID NO: 223228 - DNA, 20 bp, Artificial Sequence
  Description of Artificial Sequence: Synthetic oligonucleotide
  Target: LAMA2; (-) strand; PAM type: YTN; PAM sequence: CTA
aagtactgagtagctgcagc

SEQ ID NO: 223229 - DNA, 20 bp, Artificial Sequence
  Description of Artificial Sequence: Synthetic oligonucleotide
  Target: LAMA2; (-) strand; PAM type: YTN; PAM sequence: CTG
aggaaggagagcggaggtca

SEQ ID NO: 223230 - DNA, 20 bp, Artificial Sequence
  Description of Artificial Sequence: Synthetic oligonucleotide
  Target: LAMA2; (-) strand; PAM type: YTN; PAM sequence: TTG
ctgaggaaggagagcggagg

SEQ ID NO: 223231 - DNA, 20 bp, Artificial Sequence
  Description of Artificial Sequence: Synthetic oligonucleotide
  Target: LAMA2; (-) strand; PAM type: YTN; PAM sequence: CTG
tggtgagttgctgaggaagg

SEQ ID NO: 223232 - DNA, 20 bp, Artificial Sequence
  Description of Artificial Sequence: Synthetic oligonucleotide
  Target: LAMA2; (-) strand; PAM type: YTN; PAM sequence: CTG
gaaggtctgtggtgagttgc

SEQ ID NO: 223233 - DNA, 20 bp, Artificial Sequence
  Description of Artificial Sequence: Synthetic oligonucleotide
  Target: LAMA2; (-) strand; PAM type: YTN; PAM sequence: TTC
tggaaggtctgtggtgagtt

SEQ ID NO: 223234 - DNA, 20 bp, Artificial Sequence
  Description of Artificial Sequence: Synthetic oligonucleotide
  Target: LAMA2; (-) strand; PAM type: YTN; PAM sequence: TTT
ctggaaggtctgtggtgagt

SEQ ID NO: 223235 - DNA, 20 bp, Artificial Sequence
  Description of Artificial Sequence: Synthetic oligonucleotide
  Target: LAMA2; (-) strand; PAM type: YTN; PAM sequence: TTT
tctggaaggtctgtggtgag

SEQ ID NO: 223236 - DNA, 20 bp, Artificial Sequence
  Description of Artificial Sequence: Synthetic oligonucleotide
  Target: LAMA2; (-) strand; PAM type: YTN; PAM sequence: TTT
ttctggaaggtctgtggtga

SEQ ID NO: 223237 - DNA, 20 bp, Artificial Sequence
  Description of Artificial Sequence: Synthetic oligonucleotide
  Target: LAMA2; (-) strand; PAM type: YTN; PAM sequence: TTA
acatttttctggaaggtctg

SEQ ID NO: 223238 - DNA, 20 bp, Artificial Sequence
  Description of Artificial Sequence: Synthetic oligonucleotide
  Target: LAMA2; (-) strand; PAM type: YTN; PAM sequence: TTT
aacatttttctggaaggtct

SEQ ID NO: 223239 - DNA, 20 bp, Artificial Sequence
  Description of Artificial Sequence: Synthetic oligonucleotide
  Target: LAMA2; (-) strand; PAM type: YTN; PAM sequence: CTA
aagaaaaaagaaagaaagaa

SEQ ID NO: 223240 - DNA, 20 bp, Artificial Sequence
  Description of Artificial Sequence: Synthetic oligonucleotide
  Target: LAMA2; (-) strand; PAM type: YTN; PAM sequence: CTG
tgacgctaaagaaaaaagaa

SEQ ID NO: 223241 - DNA, 20 bp, Artificial Sequence
  Description of Artificial Sequence: Synthetic oligonucleotide
  Target: LAMA2; (-) strand; PAM type: YTN; PAM sequence: TTC
ccctgtgacgctaaagaaaa

SEQ ID NO: 223242 - DNA, 20 bp, Artificial Sequence
  Description of Artificial Sequence: Synthetic oligonucleotide
  Target: LAMA2; (-) strand; PAM type: YTN; PAM sequence: CTT
cccctgtgacgctaaagaaa

SEQ ID NO: 223243 - DNA, 20 bp, Artificial Sequence
  Description of Artificial Sequence: Synthetic oligonucleotide
  Target: LAMA2; (-) strand; PAM type: YTN; PAM sequence: CTC
ttcccctgtgacgctaaaga

SEQ ID NO: 223244 - DNA, 20 bp, Artificial Sequence
  Description of Artificial Sequence: Synthetic oligonucleotide
  Target: LAMA2; (-) strand; PAM type: YTN; PAM sequence: TTA
tcagctcttcccctgtgacg

SEQ ID NO: 223245 - DNA, 20 bp, Artificial Sequence
  Description of Artificial Sequence: Synthetic oligonucleotide
  Target: LAMA2; (-) strand; PAM type: YTN; PAM sequence: TTG
atacatatagccaatacaat

SEQ ID NO: 223246 - DNA, 20 bp, Artificial Sequence
  Description of Artificial Sequence: Synthetic oligonucleotide
  Target: LAMA2; (-) strand; PAM type: YTN; PAM sequence: TTG
agttgatacatatagccaat

SEQ ID NO: 223247 - DNA, 20 bp, Artificial Sequence
  Description of Artificial Sequence: Synthetic oligonucleotide
  Target: LAMA2; (-) strand; PAM type: YTN; PAM sequence: TTT
gagttgatacatatagccaa

SEQ ID NO: 223248 - DNA, 20 bp, Artificial Sequence
  Description of Artificial Sequence: Synthetic oligonucleotide
  Target: LAMA2; (-) strand; PAM type: YTN; PAM sequence: CTG
tttgagttgatacatatagc

SEQ ID NO: 223249 - DNA, 20 bp, Artificial Sequence
  Description of Artificial Sequence: Synthetic oligonucleotide
  Target: LAMA2; (-) strand; PAM type: YTN; PAM sequence: CTC
tgtttgagttgatacatata

SEQ ID NO: 223250 - DNA, 20 bp, Artificial Sequence
  Description of Artificial Sequence: Synthetic oligonucleotide
  Target: LAMA2; (-) strand; PAM type: YTN; PAM sequence: CTC
tctgtttgagttgatacata

SEQ ID NO: 223251 - DNA, 20 bp, Artificial Sequence
  Description of Artificial Sequence: Synthetic oligonucleotide
  Target: LAMA2; (-) strand; PAM type: YTN; PAM sequence: CTG
caggtaatgtctctctgttt

SEQ ID NO: 223252 - DNA, 20 bp, Artificial Sequence
  Description of Artificial Sequence: Synthetic oligonucleotide
  Target: LAMA2; (-) strand; PAM type: YTN; PAM sequence: TTA
tagaactgcaggtaatgtct

SEQ ID NO: 223253 - DNA, 20 bp, Artificial Sequence
  Description of Artificial Sequence: Synthetic oligonucleotide
  Target: LAMA2; (-) strand; PAM type: YTN; PAM sequence: TTT
atagaactgcaggtaatgtc

SEQ ID NO: 223254 - DNA, 20 bp, Artificial Sequence
  Description of Artificial Sequence: Synthetic oligonucleotide
  Target: LAMA2; (-) strand; PAM type: YTN; PAM sequence: CTT
tatagaactgcaggtaatgt

SEQ ID NO: 223255 - DNA, 20 bp, Artificial Sequence
  Description of Artificial Sequence: Synthetic oligonucleotide
  Target: LAMA2; (-) strand; PAM type: YTN; PAM sequence: CTG
ggaatctttatagaactgca

SEQ ID NO: 223256 - DNA, 20 bp, Artificial Sequence
  Description of Artificial Sequence: Synthetic oligonucleotide
  Target: LAMA2; (-) strand; PAM type: YTN; PAM sequence: TTG
gaataatctgggaatcttta

SEQ ID NO: 223257 - DNA, 20 bp, Artificial Sequence
  Description of Artificial Sequence: Synthetic oligonucleotide
  Target: LAMA2; (-) strand; PAM type: YTN; PAM sequence: TTA
atacccattggaataatctg

SEQ ID NO: 223258 - DNA, 20 bp, Artificial Sequence
  Description of Artificial Sequence: Synthetic oligonucleotide
  Target: LAMA2; (-) strand; PAM type: YTN; PAM sequence: CTT
aatacccattggaataatct

SEQ ID NO: 223259 - DNA, 20 bp, Artificial Sequence
  Description of Artificial Sequence: Synthetic oligonucleotide
  Target: LAMA2; (-) strand; PAM type: YTN; PAM sequence: TTC
aagcttaatacccattggaa

SEQ ID NO: 223260 - DNA, 20 bp, Artificial Sequence
  Description of Artificial Sequence: Synthetic oligonucleotide
  Target: LAMA2; (-) strand; PAM type: YTN; PAM sequence: TTT
caagcttaatacccattgga

SEQ ID NO: 223261 - DNA, 20 bp, Artificial Sequence
  Description of Artificial Sequence: Synthetic oligonucleotide
  Target: LAMA2; (-) strand; PAM type: YTN; PAM sequence: TTT
tcaagcttaatacccattgg

SEQ ID NO: 223262 - DNA, 20 bp, Artificial Sequence
  Description of Artificial Sequence: Synthetic oligonucleotide
  Target: LAMA2; (-) strand; PAM type: YTN; PAM sequence: TTA
tacaatatcagaaccagaaa

SEQ ID NO: 223263 - DNA, 20 bp, Artificial Sequence
  Description of Artificial Sequence: Synthetic oligonucleotide
  Target: LAMA2; (-) strand; PAM type: YTN; PAM sequence: TTA
agtgatgagagttatacaat

SEQ ID NO: 223264 - DNA, 20 bp, Artificial Sequence
  Description of Artificial Sequence: Synthetic oligonucleotide
  Target: LAMA2; (-) strand; PAM type: YTN; PAM sequence: TTC
attaagtgatgagagttata

SEQ ID NO: 223265 - DNA, 20 bp, Artificial Sequence
  Description of Artificial Sequence: Synthetic oligonucleotide
  Target: LAMA2; (-) strand; PAM type: YTN; PAM sequence: TTT
cattaagtgatgagagttat

SEQ ID NO: 223266 - DNA, 20 bp, Artificial Sequence
  Description of Artificial Sequence: Synthetic oligonucleotide
  Target: LAMA2; (-) strand; PAM type: YTN; PAM sequence: CTT
tcattaagtgatgagagtta

SEQ ID NO: 223267 - DNA, 20 bp, Artificial Sequence
  Description of Artificial Sequence: Synthetic oligonucleotide
  Target: LAMA2; (-) strand; PAM type: YTN; PAM sequence: TTA
tccaaataggaacggtggct

SEQ ID NO: 223268 - DNA, 20 bp, Artificial Sequence
  Description of Artificial Sequence: Synthetic oligonucleotide
  Target: LAMA2; (-) strand; PAM type: YTN; PAM sequence: TTT
atccaaataggaacggtggc

SEQ ID NO: 223269 - DNA, 20 bp, Artificial Sequence
  Description of Artificial Sequence: Synthetic oligonucleotide
  Target: LAMA2; (-) strand; PAM type: YTN; PAM sequence: TTA
tttatccaaataggaacggt

SEQ ID NO: 223270 - DNA, 20 bp, Artificial Sequence
  Description of Artificial Sequence: Synthetic oligonucleotide
  Target: LAMA2; (-) strand; PAM type: YTN; PAM sequence: CTT
atttatccaaataggaacgg

SEQ ID NO: 223271 - DNA, 20 bp, Artificial Sequence
  Description of Artificial Sequence: Synthetic oligonucleotide
  Target: LAMA2; (-) strand; PAM type: YTN; PAM sequence: CTC
ttatttatccaaataggaac

SEQ ID NO: 223272 - DNA, 20 bp, Artificial Sequence
  Description of Artificial Sequence: Synthetic oligonucleotide
  Target: LAMA2; (-) strand; PAM type: YTN; PAM sequence: TTC
tcttatttatccaaatagga

SEQ ID NO: 223273 - DNA, 20 bp, Artificial Sequence
  Description of Artificial Sequence: Synthetic oligonucleotide
  Target: LAMA2; (-) strand; PAM type: YTN; PAM sequence: TTC
aattctcttatttatccaaa

SEQ ID NO: 223274 - DNA, 20 bp, Artificial Sequence
  Description of Artificial Sequence: Synthetic oligonucleotide
  Target: LAMA2; (-) strand; PAM type: YTN; PAM sequence: TTT
caattctcttatttatccaa

SEQ ID NO: 223275 - DNA, 20 bp, Artificial Sequence
  Description of Artificial Sequence: Synthetic oligonucleotide
  Target: LAMA2; (-) strand; PAM type: YTN; PAM sequence: TTT
tcaattctcttatttatcca

SEQ ID NO: 223276 - DNA, 20 bp, Artificial Sequence
  Description of Artificial Sequence: Synthetic oligonucleotide
  Target: LAMA2; (-) strand; PAM type: YTN; PAM sequence: TTT
ttcaattctcttatttatcc

SEQ ID NO: 223277 - DNA, 20 bp, Artificial Sequence
  Description of Artificial Sequence: Synthetic oligonucleotide
  Target: LAMA2; (-) strand; PAM type: YTN; PAM sequence: CTA
atagtgcgtttttcaattct

SEQ ID NO: 223278 - DNA, 20 bp, Artificial Sequence
  Description of Artificial Sequence: Synthetic oligonucleotide
  Target: LAMA2; (-) strand; PAM type: YTN; PAM sequence: TTC
taatagtgcgtttttcaatt

SEQ ID NO: 223279 - DNA, 20 bp, Artificial Sequence
  Description of Artificial Sequence: Synthetic oligonucleotide
  Target: LAMA2; (-) strand; PAM type: YTN; PAM sequence: CTC
agttctaatagtgcgttttt

SEQ ID NO: 223280 - DNA, 20 bp, Artificial Sequence
  Description of Artificial Sequence: Synthetic oligonucleotide
  Target: LAMA2; (-) strand; PAM type: YTN; PAM sequence: CTC
tcagttctaatagtgcgttt

SEQ ID NO: 223281 - DNA, 20 bp, Artificial Sequence
  Description of Artificial Sequence: Synthetic oligonucleotide
  Target: LAMA2; (-) strand; PAM type: YTN; PAM sequence: CTG
tactctcagttctaatagtg

SEQ ID NO: 223282 - DNA, 20 bp, Artificial Sequence
  Description of Artificial Sequence: Synthetic oligonucleotide
  Target: LAMA2; (-) strand; PAM type: YTN; PAM sequence: CTC
atctgtactctcagttctaa

SEQ ID NO: 223283 - DNA, 20 bp, Artificial Sequence
  Description of Artificial Sequence: Synthetic oligonucleotide
  Target: LAMA2; (-) strand; PAM type: YTN; PAM sequence: TTG
gaaagctcatctgtactctc

SEQ ID NO: 223284 - DNA, 20 bp, Artificial Sequence
  Description of Artificial Sequence: Synthetic oligonucleotide
  Target: LAMA2; (-) strand; PAM type: YTN; PAM sequence: TTT
ggaaagctcatctgtactct

SEQ ID NO: 223285 - DNA, 20 bp, Artificial Sequence
  Description of Artificial Sequence: Synthetic oligonucleotide
  Target: LAMA2; (-) strand; PAM type: YTN; PAM sequence: CTA
atatatttggaaagctcatc

SEQ ID NO: 223286 - DNA, 20 bp, Artificial Sequence
  Description of Artificial Sequence: Synthetic oligonucleotide
  Target: LAMA2; (-) strand; PAM type: YTN; PAM sequence: CTC
taatatatttggaaagctca

SEQ ID NO: 223287 - DNA, 20 bp, Artificial Sequence
  Description of Artificial Sequence: Synthetic oligonucleotide
  Target: LAMA2; (-) strand; PAM type: YTN; PAM sequence: CTG
tgatgccatctctaatatat

SEQ ID NO: 223288 - DNA, 20 bp, Artificial Sequence
  Description of Artificial Sequence: Synthetic oligonucleotide
  Target: LAMA2; (-) strand; PAM type: YTN; PAM sequence: TTC
catgtactgtgatgccatct

SEQ ID NO: 223289 - DNA, 20 bp, Artificial Sequence
  Description of Artificial Sequence: Synthetic oligonucleotide
  Target: LAMA2; (-) strand; PAM type: YTN; PAM sequence: TTT
ccatgtactgtgatgccatc

SEQ ID NO: 223290 - DNA, 20 bp, Artificial Sequence
  Description of Artificial Sequence: Synthetic oligonucleotide
  Target: LAMA2; (-) strand; PAM type: YTN; PAM sequence: TTA
acatttccatgtactgtgat

SEQ ID NO: 223291 - DNA, 20 bp, Artificial Sequence
  Description of Artificial Sequence: Synthetic oligonucleotide
  Target: LAMA2; (-) strand; PAM type: YTN; PAM sequence: TTT
aacatttccatgtactgtga

SEQ ID NO: 223292 - DNA, 20 bp, Artificial Sequence
  Description of Artificial Sequence: Synthetic oligonucleotide
  Target: LAMA2; (-) strand; PAM type: YTN; PAM sequence: TTT
taacatttccatgtactgtg

SEQ ID NO: 223293 - DNA, 20 bp, Artificial Sequence
  Description of Artificial Sequence: Synthetic oligonucleotide
  Target: LAMA2; (-) strand; PAM type: YTN; PAM sequence: TTA
tggattttaacatttccatg

SEQ ID NO: 223294 - DNA, 20 bp, Artificial Sequence
  Description of Artificial Sequence: Synthetic oligonucleotide
  Target: LAMA2; (-) strand; PAM type: YTN; PAM sequence: TTG
cccatgttatggattttaac

SEQ ID NO: 223295 - DNA, 20 bp, Artificial Sequence
  Description of Artificial Sequence: Synthetic oligonucleotide
  Target: LAMA2; (-) strand; PAM type: YTN; PAM sequence: CTT
gcccatgttatggattttaa

SEQ ID NO: 223296 - DNA, 20 bp, Artificial Sequence
  Description of Artificial Sequence: Synthetic oligonucleotide
  Target: LAMA2; (-) strand; PAM type: YTN; PAM sequence: CTC
ttgcccatgttatggatttt

SEQ ID NO: 223297 - DNA, 20 bp, Artificial Sequence
  Description of Artificial Sequence: Synthetic oligonucleotide
  Target: LAMA2; (-) strand; PAM type: YTN; PAM sequence: CTA
gtatgtgctcttgcccatgt

SEQ ID NO: 223298 - DNA, 20 bp, Artificial Sequence
  Description of Artificial Sequence: Synthetic oligonucleotide
  Target: LAMA2; (-) strand; PAM type: YTN; PAM sequence: TTC
tagtatgtgctcttgcccat

SEQ ID NO: 223299 - DNA, 20 bp, Artificial Sequence
  Description of Artificial Sequence: Synthetic oligonucleotide
  Target: LAMA2; (-) strand; PAM type: YTN; PAM sequence: TTT
ctagtatgtgctcttgccca

SEQ ID NO: 223300 - DNA, 20 bp, Artificial Sequence
  Description of Artificial Sequence: Synthetic oligonucleotide
  Target: LAMA2; (-) strand; PAM type: YTN; PAM sequence: TTT
tctagtatgtgctcttgccc

SEQ ID NO: 223301 - DNA, 20 bp, Artificial Sequence
  Description of Artificial Sequence: Synthetic oligonucleotide
  Target: LAMA2; (-) strand; PAM type: YTN; PAM sequence: CTT
ttctagtatgtgctcttgcc

SEQ ID NO: 223302 - DNA, 20 bp, Artificial Sequence
  Description of Artificial Sequence: Synthetic oligonucleotide
  Target: LAMA2; (-) strand; PAM type: YTN; PAM sequence: CTG
cacttttctagtatgtgctc

SEQ ID NO: 223303 - DNA, 20 bp, Artificial Sequence
  Description of Artificial Sequence: Synthetic oligonucleotide
  Target: LAMA2; (-) strand; PAM type: YTN; PAM sequence: TTC
tgcacttttctagtatgtgc

SEQ ID NO: 223304 - DNA, 20 bp, Artificial Sequence
  Description of Artificial Sequence: Synthetic oligonucleotide
  Target: LAMA2; (-) strand; PAM type: YTN; PAM sequence: CTA
aagaggttctgcacttttct

SEQ ID NO: 223305 - DNA, 20 bp, Artificial Sequence
  Description of Artificial Sequence: Synthetic oligonucleotide
  Target: LAMA2; (-) strand; PAM type: YTN; PAM sequence: TTC
taaagaggttctgcactttt

SEQ ID NO: 223306 - DNA, 20 bp, Artificial Sequence
  Description of Artificial Sequence: Synthetic oligonucleotide
  Target: LAMA2; (-) strand; PAM type: YTN; PAM sequence: CTT
ctaaagaggttctgcacttt

SEQ ID NO: 223307 - DNA, 20 bp, Artificial Sequence
  Description of Artificial Sequence: Synthetic oligonucleotide
  Target: LAMA2; (-) strand; PAM type: YTN; PAM sequence: TTC
acttctaaagaggttctgca

SEQ ID NO: 223308 - DNA, 20 bp, Artificial Sequence
  Description of Artificial Sequence: Synthetic oligonucleotide
  Target: LAMA2; (-) strand; PAM type: YTN; PAM sequence: CTT
cacttctaaagaggttctgc

SEQ ID NO: 223309 - DNA, 20 bp, Artificial Sequence
  Description of Artificial Sequence: Synthetic oligonucleotide
  Target: LAMA2; (-) strand; PAM type: YTN; PAM sequence: TTG
atgtgcatggaacgaaaatg

SEQ ID NO: 223310 - DNA, 20 bp, Artificial Sequence
  Description of Artificial Sequence: Synthetic oligonucleotide
  Target: LAMA2; (-) strand; PAM type: YTN; PAM sequence: CTA
tagcaaattgatgtgcatgg

SEQ ID NO: 223311 - DNA, 20 bp, Artificial Sequence
  Description of Artificial Sequence: Synthetic oligonucleotide
  Target: LAMA2; (-) strand; PAM type: YTN; PAM sequence: CTC
ctatagcaaattgatgtgca

SEQ ID NO: 223312 - DNA, 20 bp, Artificial Sequence
  Description of Artificial Sequence: Synthetic oligonucleotide
  Target: LAMA2; (-) strand; PAM type: YTN; PAM sequence: CTG
aactcctatagcaaattgat

SEQ ID NO: 223313 - DNA, 20 bp, Artificial Sequence
  Description of Artificial Sequence: Synthetic oligonucleotide
  Target: LAMA2; (-) strand; PAM type: YTN; PAM sequence: TTG
tccctgaactcctatagcaa

SEQ ID NO: 223314 - DNA, 20 bp, Artificial Sequence
  Description of Artificial Sequence: Synthetic oligonucleotide
  Target: LAMA2; (-) strand; PAM type: YTN; PAM sequence: TTT
gtccctgaactcctatagca

SEQ ID NO: 223315 - DNA, 20 bp, Artificial Sequence
  Description of Artificial Sequence: Synthetic oligonucleotide
  Target: LAMA2; (-) strand; PAM type: YTN; PAM sequence: CTA
tttgtccctgaactcctata

SEQ ID NO: 223316 - DNA, 20 bp, Artificial Sequence
  Description of Artificial Sequence: Synthetic oligonucleotide
  Target: LAMA2; (-) strand; PAM type: YTN; PAM sequence: TTG
ctatttgtccctgaactcct

SEQ ID NO: 223317 - DNA, 20 bp, Artificial Sequence
  Description of Artificial Sequence: Synthetic oligonucleotide
  Target: LAMA2; (-) strand; PAM type: YTN; PAM sequence: TTC
ccatattgctatttgtccct

SEQ ID NO: 223318 - DNA, 20 bp, Artificial Sequence
  Description of Artificial Sequence: Synthetic oligonucleotide
  Target: LAMA2; (-) strand; PAM type: YTN; PAM sequence: CTT
cccatattgctatttgtccc

SEQ ID NO: 223319 - DNA, 20 bp, Artificial Sequence
  Description of Artificial Sequence: Synthetic oligonucleotide
  Target: LAMA2; (-) strand; PAM type: YTN; PAM sequence: CTC
cttcccatattgctatttgt

SEQ ID NO: 223320 - DNA, 20 bp, Artificial Sequence
  Description of Artificial Sequence: Synthetic oligonucleotide
  Target: LAMA2; (-) strand; PAM type: YTN; PAM sequence: CTC
cgcctccttcccatattgct

SEQ ID NO: 223321 - DNA, 20 bp, Artificial Sequence
  Description of Artificial Sequence: Synthetic oligonucleotide
  Target: LAMA2; (-) strand; PAM type: YTN; PAM sequence: TTG
agctccgcctccttcccata

SEQ ID NO: 223322 - DNA, 20 bp, Artificial Sequence
  Description of Artificial Sequence: Synthetic oligonucleotide
  Target: LAMA2; (-) strand; PAM type: YTN; PAM sequence: CTC
aatgttgagctccgcctcct

SEQ ID NO: 223323 - DNA, 20 bp, Artificial Sequence
  Description of Artificial Sequence: Synthetic oligonucleotide
  Target: LAMA2; (-) strand; PAM type: YTN; PAM sequence: CTG
ctcaatgttgagctccgcct

SEQ ID NO: 223324 - DNA, 20 bp, Artificial Sequence
  Description of Artificial Sequence: Synthetic oligonucleotide
  Target: LAMA2; (-) strand; PAM type: YTN; PAM sequence: TTC
tgctcaatgttgagctccgc

SEQ ID NO: 223325 - DNA, 20 bp, Artificial Sequence
  Description of Artificial Sequence: Synthetic oligonucleotide
  Target: LAMA2; (-) strand; PAM type: YTN; PAM sequence: TTT
ctgctcaatgttgagctccg

SEQ ID NO: 223326 - DNA, 20 bp, Artificial Sequence
  Description of Artificial Sequence: Synthetic oligonucleotide
  Target: LAMA2; (-) strand; PAM type: YTN; PAM sequence: CTA
atttctgctcaatgttgagc

SEQ ID NO: 223327 - DNA, 20 bp, Artificial Sequence
  Description of Artificial Sequence: Synthetic oligonucleotide
  Target: LAMA2; (-) strand; PAM type: YTN; PAM sequence: CTC
aagagaacagcatgtgtcta

SEQ ID NO: 223328 - DNA, 20 bp, Artificial Sequence
  Description of Artificial Sequence: Synthetic oligonucleotide
  Target: LAMA2; (-) strand; PAM type: YTN; PAM sequence: CTC
tcaagagaacagcatgtgtc

SEQ ID NO: 223329 - DNA, 20 bp, Artificial Sequence
  Description of Artificial Sequence: Synthetic oligonucleotide
  Target: LAMA2; (-) strand; PAM type: YTN; PAM sequence: TTA
atctctcaagagaacagcat

SEQ ID NO: 223330 - DNA, 20 bp, Artificial Sequence
  Description of Artificial Sequence: Synthetic oligonucleotide
  Target: LAMA2; (-) strand; PAM type: YTN; PAM sequence: CTT
aatctctcaagagaacagca

SEQ ID NO: 223331 - DNA, 20 bp, Artificial Sequence
  Description of Artificial Sequence: Synthetic oligonucleotide
  Target: LAMA2; (-) strand; PAM type: YTN; PAM sequence: TTC
ttaatctctcaagagaacag

SEQ ID NO: 223332 - DNA, 20 bp, Artificial Sequence
  Description of Artificial Sequence: Synthetic oligonucleotide
  Target: LAMA2; (-) strand; PAM type: YTN; PAM sequence: TTT
cttaatctctcaagagaaca

SEQ ID NO: 223333 - DNA, 20 bp, Artificial Sequence
  Description of Artificial Sequence: Synthetic oligonucleotide
  Target: LAMA2; (-) strand; PAM type: YTN; PAM sequence: CTT
tcttaatctctcaagagaac

SEQ ID NO: 223334 - DNA, 20 bp, Artificial Sequence
  Description of Artificial Sequence: Synthetic oligonucleotide
  Target: LAMA2; (-) strand; PAM type: YTN; PAM sequence: TTC
tttcttaatctctcaagaga

SEQ ID NO: 223335 - DNA, 20 bp, Artificial Sequence
  Description of Artificial Sequence: Synthetic oligonucleotide
  Target: LAMA2; (-) strand; PAM type: YTN; PAM sequence: TTA
ttctttcttaatctctcaag

SEQ ID NO: 223336 - DNA, 20 bp, Artificial Sequence
  Description of Artificial Sequence: Synthetic oligonucleotide
  Target: LAMA2; (-) strand; PAM type: YTN; PAM sequence: TTT
attctttcttaatctctcaa

SEQ ID NO: 223337 - DNA, 20 bp, Artificial Sequence
  Description of Artificial Sequence: Synthetic oligonucleotide
  Target: LAMA2; (-) strand; PAM type: YTN; PAM sequence: CTA
tttattctttcttaatctct

SEQ ID NO: 223338 - DNA, 20 bp, Artificial Sequence
  Description of Artificial Sequence: Synthetic oligonucleotide
  Target: LAMA2; (-) strand; PAM type: YTN; PAM sequence: TTC
tatttattctttcttaatct

SEQ ID NO: 223339 - DNA, 20 bp, Artificial Sequence
  Description of Artificial Sequence: Synthetic oligonucleotide
  Target: LAMA2; (-) strand; PAM type: YTN; PAM sequence: CTT
ctatttattctttcttaatc

SEQ ID NO: 223340 - DNA, 20 bp, Artificial Sequence
  Description of Artificial Sequence: Synthetic oligonucleotide
  Target: LAMA2; (-) strand; PAM type: YTN; PAM sequence: CTC
ttctatttattctttcttaa

SEQ ID NO: 223341 - DNA, 20 bp, Artificial Sequence
  Description of Artificial Sequence: Synthetic oligonucleotide
  Target: LAMA2; (-) strand; PAM type: YTN; PAM sequence: CTC
tcttctatttattctttctt

SEQ ID NO: 223342 - DNA, 20 bp, Artificial Sequence
  Description of Artificial Sequence: Synthetic oligonucleotide
  Target: LAMA2; (-) strand; PAM type: YTN; PAM sequence: TTA
ctctcttctatttattcttt

SEQ ID NO: 223343 - DNA, 20 bp, Artificial Sequence
  Description of Artificial Sequence: Synthetic oligonucleotide
  Target: LAMA2; (-) strand; PAM type: YTN; PAM sequence: CTT
actctcttctatttattctt

SEQ ID NO: 223344 - DNA, 20 bp, Artificial Sequence
  Description of Artificial Sequence: Synthetic oligonucleotide
  Target: LAMA2; (-) strand; PAM type: YTN; PAM sequence: CTG
acttactctcttctatttat

SEQ ID NO: 223345 - DNA, 20 bp, Artificial Sequence
  Description of Artificial Sequence: Synthetic oligonucleotide
  Target: LAMA2; (-) strand; PAM type: YTN; PAM sequence: CTC
ataggacctgacttactctc

SEQ ID NO: 223346 - DNA, 20 bp, Artificial Sequence
  Description of Artificial Sequence: Synthetic oligonucleotide
  Target: LAMA2; (-) strand; PAM type: YTN; PAM sequence: TTC
tcataggacctgacttactc

SEQ ID NO: 223347 - DNA, 20 bp, Artificial Sequence
  Description of Artificial Sequence: Synthetic oligonucleotide
  Target: LAMA2; (-) strand; PAM type: YTN; PAM sequence: CTT
ctcataggacctgacttact

SEQ ID NO: 223348 - DNA, 20 bp, Artificial Sequence
  Description of Artificial Sequence: Synthetic oligonucleotide
  Target: LAMA2; (-) strand; PAM type: YTN; PAM sequence: TTA
tccttctcataggacctgac

SEQ ID NO: 223349 - DNA, 20 bp, Artificial Sequence
  Description of Artificial Sequence: Synthetic oligonucleotide
  Target: LAMA2; (-) strand; PAM type: YTN; PAM sequence: TTT
atccttctcataggacctga

SEQ ID NO: 223350 - DNA, 20 bp, Artificial Sequence
  Description of Artificial Sequence: Synthetic oligonucleotide
  Target: LAMA2; (-) strand; PAM type: YTN; PAM sequence: CTT
tatccttctcataggacctg

SEQ ID NO: 223351 - DNA, 20 bp, Artificial Sequence
  Description of Artificial Sequence: Synthetic oligonucleotide
  Target: LAMA2; (-) strand; PAM type: YTN; PAM sequence: CTA
tggaagacaatgctttatcc

SEQ ID NO: 223352 - DNA, 20 bp, Artificial Sequence
  Description of Artificial Sequence: Synthetic oligonucleotide
  Target: LAMA2; (-) strand; PAM type: YTN; PAM sequence: CTC
tatggaagacaatgctttat

SEQ ID NO: 223353 - DNA, 20 bp, Artificial Sequence
  Description of Artificial Sequence: Synthetic oligonucleotide
  Target: LAMA2; (-) strand; PAM type: YTN; PAM sequence: CTC
tctatggaagacaatgcttt

SEQ ID NO: 223354 - DNA, 20 bp, Artificial Sequence
  Description of Artificial Sequence: Synthetic oligonucleotide
  Target: LAMA2; (-) strand; PAM type: YTN; PAM sequence: TTA
atgaaggtcactctctatgg

SEQ ID NO: 223355 - DNA, 20 bp, Artificial Sequence
  Description of Artificial Sequence: Synthetic oligonucleotide
  Target: LAMA2; (-) strand; PAM type: YTN; PAM sequence: CTC
cacaaaagccgtaaaaaata

SEQ ID NO: 223356 - DNA, 20 bp, Artificial Sequence
  Description of Artificial Sequence: Synthetic oligonucleotide
  Target: LAMA2; (-) strand; PAM type: YTN; PAM sequence: CTG
atctccacaaaagccgtaaa

SEQ ID NO: 223357 - DNA, 20 bp, Artificial Sequence
  Description of Artificial Sequence: Synthetic oligonucleotide
  Target: LAMA2; (-) strand; PAM type: YTN; PAM sequence: TTA
ggctgatctccacaaaagcc

SEQ ID NO: 223358 - DNA, 20 bp, Artificial Sequence
  Description of Artificial Sequence: Synthetic oligonucleotide
  Target: LAMA2; (-) strand; PAM type: YTN; PAM sequence: CTT
aggctgatctccacaaaagc

SEQ ID NO: 223359 - DNA, 20 bp, Artificial Sequence
  Description of Artificial Sequence: Synthetic oligonucleotide
  Target: LAMA2; (-) strand; PAM type: YTN; PAM sequence: TTC
cttaggctgatctccacaaa

SEQ ID NO: 223360 - DNA, 20 bp, Artificial Sequence
  Description of Artificial Sequence: Synthetic oligonucleotide
  Target: LAMA2; (-) strand; PAM type: YTN; PAM sequence: TTT
ccttaggctgatctccacaa

SEQ ID NO: 223361 - DNA, 20 bp, Artificial Sequence
  Description of Artificial Sequence: Synthetic oligonucleotide
  Target: LAMA2; (-) strand; PAM type: YTN; PAM sequence: CTG
tttccttaggctgatctcca

SEQ ID NO: 223362 - DNA, 20 bp, Artificial Sequence
  Description of Artificial Sequence: Synthetic oligonucleotide
  Target: LAMA2; (-) strand; PAM type: YTN; PAM sequence: TTC
tgtttccttaggctgatctc

SEQ ID NO: 223363 - DNA, 20 bp, Artificial Sequence
  Description of Artificial Sequence: Synthetic oligonucleotide
  Target: LAMA2; (-) strand; PAM type: YTN; PAM sequence: CTT
ctgtttccttaggctgatct

SEQ ID NO: 223364 - DNA, 20 bp, Artificial Sequence
  Description of Artificial Sequence: Synthetic oligonucleotide
  Target: LAMA2; (-) strand; PAM type: YTN; PAM sequence: CTG
taatgatgtaataaggccat

SEQ ID NO: 223365 - DNA, 20 bp, Artificial Sequence
  Description of Artificial Sequence: Synthetic oligonucleotide
  Target: LAMA2; (-) strand; PAM type: YTN; PAM sequence: TTC
tgtaatgatgtaataaggcc

SEQ ID NO: 223366 - DNA, 20 bp, Artificial Sequence
  Description of Artificial Sequence: Synthetic oligonucleotide
  Target: LAMA2; (-) strand; PAM type: YTN; PAM sequence: TTA
agagacccagccaaagtgtg

SEQ ID NO: 223367 - DNA, 20 bp, Artificial Sequence
  Description of Artificial Sequence: Synthetic oligonucleotide
  Target: LAMA2; (-) strand; PAM type: YTN; PAM sequence: TTA
cacagttaagagacccagcc

SEQ ID NO: 223368 - DNA, 20 bp, Artificial Sequence
  Description of Artificial Sequence: Synthetic oligonucleotide
  Target: LAMA2; (-) strand; PAM type: YTN; PAM sequence: CTG
ttacacagttaagagaccca

SEQ ID NO: 223369 - DNA, 20 bp, Artificial Sequence
  Description of Artificial Sequence: Synthetic oligonucleotide
  Target: LAMA2; (-) strand; PAM type: YTN; PAM sequence: TTG
agcaccactgttacacagtt

SEQ ID NO: 223370 - DNA, 20 bp, Artificial Sequence
  Description of Artificial Sequence: Synthetic oligonucleotide
  Target: LAMA2; (-) strand; PAM type: YTN; PAM sequence: TTT
gagcaccactgttacacagt

SEQ ID NO: 223371 - DNA, 20 bp, Artificial Sequence
  Description of Artificial Sequence: Synthetic oligonucleotide
  Target: LAMA2; (-) strand; PAM type: YTN; PAM sequence: TTT
tgagcaccactgttacacag

SEQ ID NO: 223372 - DNA, 20 bp, Artificial Sequence
  Description of Artificial Sequence: Synthetic oligonucleotide
  Target: LAMA2; (-) strand; PAM type: YTN; PAM sequence: CTT
ttgagcaccactgttacaca

SEQ ID NO: 223373 - DNA, 20 bp, Artificial Sequence
  Description of Artificial Sequence: Synthetic oligonucleotide
  Target: LAMA2; (-) strand; PAM type: YTN; PAM sequence: TTA
cagagacttttgagcaccac

SEQ ID NO: 223374 - DNA, 20 bp, Artificial Sequence
  Description of Artificial Sequence: Synthetic oligonucleotide
  Target: LAMA2; (-) strand; PAM type: YTN; PAM sequence: TTT
acagagacttttgagcacca

SEQ ID NO: 223375 - DNA, 20 bp, Artificial Sequence
  Description of Artificial Sequence: Synthetic oligonucleotide
  Target: LAMA2; (-) strand; PAM type: YTN; PAM sequence: TTG
gagatttacagagacttttg

SEQ ID NO: 223376 - DNA, 20 bp, Artificial Sequence
  Description of Artificial Sequence: Synthetic oligonucleotide
  Target: LAMA2; (-) strand; PAM type: YTN; PAM sequence: TTT
ggagatttacagagactttt

SEQ ID NO: 223377 - DNA, 20 bp, Artificial Sequence
  Description of Artificial Sequence: Synthetic oligonucleotide
  Target: LAMA2; (-) strand; PAM type: YTN; PAM sequence: TTT
tggagatttacagagacttt

SEQ ID NO: 223378 - DNA, 20 bp, Artificial Sequence
  Description of Artificial Sequence: Synthetic oligonucleotide
  Target: LAMA2; (-) strand; PAM type: YTN; PAM sequence: TTG
tgttttggagatttacagag

SEQ ID NO: 223379 - DNA, 20 bp, Artificial Sequence
  Description of Artificial Sequence: Synthetic oligonucleotide
  Target: LAMA2; (-) strand; PAM type: YTN; PAM sequence: CTA
aagagtattgtgttttggag

SEQ ID NO: 223380 - DNA, 20 bp, Artificial Sequence
  Description of Artificial Sequence: Synthetic oligonucleotide
  Target: LAMA2; (-) strand; PAM type: YTN; PAM sequence: CTA
ctaaagagtattgtgttttg

SEQ ID NO: 223381 - DNA, 20 bp, Artificial Sequence
  Description of Artificial Sequence: Synthetic oligonucleotide
  Target: LAMA2; (-) strand; PAM type: YTN; PAM sequence: CTA
agaaatgctactaaagagta

SEQ ID NO: 223382 - DNA, 20 bp, Artificial Sequence
  Description of Artificial Sequence: Synthetic oligonucleotide
  Target: LAMA2; (-) strand; PAM type: YTN; PAM sequence: TTG
tccccagaagaatcacaaat

SEQ ID NO: 223383 - DNA, 20 bp, Artificial Sequence
  Description of Artificial Sequence: Synthetic oligonucleotide
  Target: LAMA2; (-) strand; PAM type: YTN; PAM sequence: TTT
gtccccagaagaatcacaaa

SEQ ID NO: 223384 - DNA, 20 bp, Artificial Sequence
  Description of Artificial Sequence: Synthetic oligonucleotide
  Target: LAMA2; (-) strand; PAM type: YTN; PAM sequence: CTT
tgtccccagaagaatcacaa

SEQ ID NO: 223385 - DNA, 20 bp, Artificial Sequence
  Description of Artificial Sequence: Synthetic oligonucleotide
  Target: LAMA2; (-) strand; PAM type: YTN; PAM sequence: TTG
tatcccagatcctttgtccc

SEQ ID NO: 223386 - DNA, 20 bp, Artificial Sequence
  Description of Artificial Sequence: Synthetic oligonucleotide
  Target: LAMA2; (-) strand; PAM type: YTN; PAM sequence: CTC
gggaacccattgtatcccag

SEQ ID NO: 223387 - DNA, 20 bp, Artificial Sequence
  Description of Artificial Sequence: Synthetic oligonucleotide
  Target: LAMA2; (-) strand; PAM type: YTN; PAM sequence: CTG
cactcgggaacccattgtat

SEQ ID NO: 223388 - DNA, 20 bp, Artificial Sequence
  Description of Artificial Sequence: Synthetic oligonucleotide
  Target: LAMA2; (-) strand; PAM type: YTN; PAM sequence: TTG
cagtgagccgagatcacacc

SEQ ID NO: 223389 - DNA, 20 bp, Artificial Sequence
  Description of Artificial Sequence: Synthetic oligonucleotide
  Target: LAMA2; (-) strand; PAM type: YTN; PAM sequence: TTG
aaaatcggaaggcggaggtt

SEQ ID NO: 223390 - DNA, 20 bp, Artificial Sequence
  Description of Artificial Sequence: Synthetic oligonucleotide
  Target: LAMA2; (-) strand; PAM type: YTN; PAM sequence: CTT
gaaaatcggaaggcggaggt

SEQ ID NO: 223391 - DNA, 20 bp, Artificial Sequence
  Description of Artificial Sequence: Synthetic oligonucleotide
  Target: LAMA2; (-) strand; PAM type: YTN; PAM sequence: CTG
aggcaggagaatcgcttgaa

SEQ ID NO: 223392 - DNA, 20 bp, Artificial Sequence
  Description of Artificial Sequence: Synthetic oligonucleotide
  Target: LAMA2; (-) strand; PAM type: YTN; PAM sequence: CTC
cggaagctgaggcaggagaa

SEQ ID NO: 223393 - DNA, 20 bp, Artificial Sequence
  Description of Artificial Sequence: Synthetic oligonucleotide
  Target: LAMA2; (-) strand; PAM type: YTN; PAM sequence: CTA
ctccggaagctgaggcagga

SEQ ID NO: 223394 - DNA, 20 bp, Artificial Sequence
  Description of Artificial Sequence: Synthetic oligonucleotide
  Target: LAMA2; (-) strand; PAM type: YTN; PAM sequence: CTG
taatcccagctactccggaa

SEQ ID NO: 223395 - DNA, 20 bp, Artificial Sequence
  Description of Artificial Sequence: Synthetic oligonucleotide
  Target: LAMA2; (-) strand; PAM type: YTN; PAM sequence: TTA
gtcgggggtggtggtgggcg

SEQ ID NO: 223396 - DNA, 20 bp, Artificial Sequence
  Description of Artificial Sequence: Synthetic oligonucleotide
  Target: LAMA2; (-) strand; PAM type: YTN; PAM sequence: CTA
aaaaatacaaaaaaaaaaaa

SEQ ID NO: 223397 - DNA, 20 bp, Artificial Sequence
  Description of Artificial Sequence: Synthetic oligonucleotide
  Target: LAMA2; (-) strand; PAM type: YTN; PAM sequence: CTA
ctaaaaaatacaaaaaaaaa

SEQ ID NO: 223398 - DNA, 20 bp, Artificial Sequence
  Description of Artificial Sequence: Synthetic oligonucleotide
  Target: LAMA2; (-) strand; PAM type: YTN; PAM sequence: CTC
tactaaaaaatacaaaaaaa

SEQ ID NO: 223399 - DNA, 20 bp, Artificial Sequence
  Description of Artificial Sequence: Synthetic oligonucleotide
  Target: LAMA2; (-) strand; PAM type: YTN; PAM sequence: CTC
cgtctctactaaaaaataca

SEQ ID NO: 223400 - DNA, 20 bp, Artificial Sequence
  Description of Artificial Sequence: Synthetic oligonucleotide
  Target: LAMA2; (-) strand; PAM type: YTN; PAM sequence: CTG
gccaatatggtgaaactccg

SEQ ID NO: 223401 - DNA, 20 bp, Artificial Sequence
  Description of Artificial Sequence: Synthetic oligonucleotide
  Target: LAMA2; (-) strand; PAM type: YTN; PAM sequence: TTC
gagaccagcctggccaatat

SEQ ID NO: 223402 - DNA, 20 bp, Artificial Sequence
  Description of Artificial Sequence: Synthetic oligonucleotide
  Target: LAMA2; (-) strand; PAM type: YTN; PAM sequence: CTG
gggcaggcggatcacgatgt

SEQ ID NO: 223403 - DNA, 20 bp, Artificial Sequence
  Description of Artificial Sequence: Synthetic oligonucleotide
  Target: LAMA2; (-) strand; PAM type: YTN; PAM sequence: TTG
ggaggctggggcaggcggat

SEQ ID NO: 223404 - DNA, 20 bp, Artificial Sequence
  Description of Artificial Sequence: Synthetic oligonucleotide
  Target: LAMA2; (-) strand; PAM type: YTN; PAM sequence: TTT
gggaggctggggcaggcgga

SEQ ID NO: 223405 - DNA, 20 bp, Artificial Sequence
  Description of Artificial Sequence: Synthetic oligonucleotide
  Target: LAMA2; (-) strand; PAM type: YTN; PAM sequence: CTT
tgggaggctggggcaggcgg

SEQ ID NO: 223406 - DNA, 20 bp, Artificial Sequence
  Description of Artificial Sequence: Synthetic oligonucleotide
  Target: LAMA2; (-) strand; PAM type: YTN; PAM sequence: CTG
taatcccagcactttgggag

SEQ ID NO: 223407 - DNA, 20 bp, Artificial Sequence
  Description of Artificial Sequence: Synthetic oligonucleotide
  Target: LAMA2; (-) strand; PAM type: YTN; PAM sequence: CTC
acgcctgtaatcccagcact

SEQ ID NO: 223408 - DNA, 20 bp, Artificial Sequence
  Description of Artificial Sequence: Synthetic oligonucleotide
  Target: LAMA2; (-) strand; PAM type: YTN; PAM sequence: CTC
ggccgggcacggtggctcac

SEQ ID NO: 223409 - DNA, 20 bp, Artificial Sequence
  Description of Artificial Sequence: Synthetic oligonucleotide
  Target: LAMA2; (-) strand; PAM type: YTN; PAM sequence: TTA
aaaaaaaaaaaaaatcctcg

SEQ ID NO: 223410 - DNA, 20 bp, Artificial Sequence
  Description of Artificial Sequence: Synthetic oligonucleotide
  Target: LAMA2; (-) strand; PAM type: YTN; PAM sequence: TTT
aaaaaaaaaaaaaaatcctc

SEQ ID NO: 223411 - DNA, 20 bp, Artificial Sequence
  Description of Artificial Sequence: Synthetic oligonucleotide
  Target: LAMA2; (-) strand; PAM type: YTN; PAM sequence: TTG
atttaaaaaaaaaaaaaaat

SEQ ID NO: 223412 - DNA, 20 bp, Artificial Sequence
  Description of Artificial Sequence: Synthetic oligonucleotide
  Target: LAMA2; (-) strand; PAM type: YTN; PAM sequence: CTT
gatttaaaaaaaaaaaaaaa

SEQ ID NO: 223413 - DNA, 20 bp, Artificial Sequence
  Description of Artificial Sequence: Synthetic oligonucleotide
  Target: LAMA2; (-) strand; PAM type: YTN; PAM sequence: CTA
agtcttgatttaaaaaaaaa

SEQ ID NO: 223414 - DNA, 20 bp, Artificial Sequence
  Description of Artificial Sequence: Synthetic oligonucleotide
  Target: LAMA2; (-) strand; PAM type: YTN; PAM sequence: TTG
ctaagtcttgatttaaaaaa

SEQ ID NO: 223415 - DNA, 20 bp, Artificial Sequence
  Description of Artificial Sequence: Synthetic oligonucleotide
  Target: LAMA2; (-) strand; PAM type: YTN; PAM sequence: CTA
gaacatgcattgctaagtct

SEQ ID NO: 223416 - DNA, 20 bp, Artificial Sequence
  Description of Artificial Sequence: Synthetic oligonucleotide
  Target: LAMA2; (-) strand; PAM type: YTN; PAM sequence: TTC
tagaacatgcattgctaagt

SEQ ID NO: 223417 - DNA, 20 bp, Artificial Sequence
  Description of Artificial Sequence: Synthetic oligonucleotide
  Target: LAMA2; (-) strand; PAM type: YTN; PAM sequence: TTT
ctagaacatgcattgctaag

SEQ ID NO: 223418 - DNA, 20 bp, Artificial Sequence
  Description of Artificial Sequence: Synthetic oligonucleotide
  Target: LAMA2; (-) strand; PAM type: YTN; PAM sequence: CTG
aaaaccagaatcagtttcta

SEQ ID NO: 223419 - DNA, 20 bp, Artificial Sequence
  Description of Artificial Sequence: Synthetic oligonucleotide
  Target: LAMA2; (-) strand; PAM type: YTN; PAM sequence: TTA
agtctgaaaaccagaatcag

SEQ ID NO: 223420 - DNA, 20 bp, Artificial Sequence
  Description of Artificial Sequence: Synthetic oligonucleotide
  Target: LAMA2; (-) strand; PAM type: YTN; PAM sequence: TTA
gttaagtctgaaaaccagaa

SEQ ID NO: 223421 - DNA, 20 bp, Artificial Sequence
  Description of Artificial Sequence: Synthetic oligonucleotide
  Target: LAMA2; (-) strand; PAM type: YTN; PAM sequence: CTA
tacccatgttagttaagtct

SEQ ID NO: 223422 - DNA, 20 bp, Artificial Sequence
  Description of Artificial Sequence: Synthetic oligonucleotide
  Target: LAMA2; (-) strand; PAM type: YTN; PAM sequence: CTC
acctatacccatgttagtta

SEQ ID NO: 223423 - DNA, 20 bp, Artificial Sequence
  Description of Artificial Sequence: Synthetic oligonucleotide
  Target: LAMA2; (-) strand; PAM type: YTN; PAM sequence: TTA
gctcacctatacccatgtta

SEQ ID NO: 223424 - DNA, 20 bp, Artificial Sequence
  Description of Artificial Sequence: Synthetic oligonucleotide
  Target: LAMA2; (-) strand; PAM type: YTN; PAM sequence: CTT
agctcacctatacccatgtt

SEQ ID NO: 223425 - DNA, 20 bp, Artificial Sequence
  Description of Artificial Sequence: Synthetic oligonucleotide
  Target: LAMA2; (-) strand; PAM type: YTN; PAM sequence: TTA
atatcttagctcacctatac

SEQ ID NO: 223426 - DNA, 20 bp, Artificial Sequence
  Description of Artificial Sequence: Synthetic oligonucleotide
  Target: LAMA2; (-) strand; PAM type: YTN; PAM sequence: CTT
aatatcttagctcacctata

SEQ ID NO: 223427 - DNA, 20 bp, Artificial Sequence
  Description of Artificial Sequence: Synthetic oligonucleotide
  Target: LAMA2; (-) strand; PAM type: YTN; PAM sequence: CTG
cagcttaatatcttagctca

SEQ ID NO: 223428 - DNA, 20 bp, Artificial Sequence
  Description of Artificial Sequence: Synthetic oligonucleotide
  Target: LAMA2; (-) strand; PAM type: YTN; PAM sequence: TTC
cctgcagcttaatatcttag

SEQ ID NO: 223429 - DNA, 20 bp, Artificial Sequence
  Description of Artificial Sequence: Synthetic oligonucleotide
  Target: LAMA2; (-) strand; PAM type: YTN; PAM sequence: CTT
ccctgcagcttaatatctta

SEQ ID NO: 223430 - DNA, 20 bp, Artificial Sequence
  Description of Artificial Sequence: Synthetic oligonucleotide
  Target: LAMA2; (-) strand; PAM type: YTN; PAM sequence: CTA
gacccttccctgcagcttaa

SEQ ID NO: 223431 - DNA, 20 bp, Artificial Sequence
  Description of Artificial Sequence: Synthetic oligonucleotide
  Target: LAMA2; (-) strand; PAM type: YTN; PAM sequence: CTC
tagacccttccctgcagctt

SEQ ID NO: 223432 - DNA, 20 bp, Artificial Sequence
  Description of Artificial Sequence: Synthetic oligonucleotide
  Target: LAMA2; (-) strand; PAM type: YTN; PAM sequence: CTA
ctctagacccttccctgcag

SEQ ID NO: 223433 - DNA, 20 bp, Artificial Sequence
  Description of Artificial Sequence: Synthetic oligonucleotide
  Target: LAMA2; (-) strand; PAM type: YTN; PAM sequence: CTA
gctactctagacccttccct

SEQ ID NO: 223434 - DNA, 20 bp, Artificial Sequence
  Description of Artificial Sequence: Synthetic oligonucleotide
  Target: LAMA2; (-) strand; PAM type: YTN; PAM sequence: CTC
tagctactctagacccttcc

SEQ ID NO: 223435 - DNA, 20 bp, Artificial Sequence
  Description of Artificial Sequence: Synthetic oligonucleotide
  Target: LAMA2; (-) strand; PAM type: YTN; PAM sequence: TTG
aagtgagcagcccaggaact

SEQ ID NO: 223436 - DNA, 20 bp, Artificial Sequence
  Description of Artificial Sequence: Synthetic oligonucleotide
  Target: LAMA2; (-) strand; PAM type: YTN; PAM sequence: CTT
gaagtgagcagcccaggaac

SEQ ID NO: 223437 - DNA, 20 bp, Artificial Sequence
  Description of Artificial Sequence: Synthetic oligonucleotide
  Target: LAMA2; (-) strand; PAM type: YTN; PAM sequence: CTC
atagcttgaagtgagcagcc

SEQ ID NO: 223438 - DNA, 20 bp, Artificial Sequence
  Description of Artificial Sequence: Synthetic oligonucleotide
  Target: LAMA2; (-) strand; PAM type: YTN; PAM sequence: TTC
aggagacctcatagcttgaa

SEQ ID NO: 223439 - DNA, 20 bp, Artificial Sequence
  Description of Artificial Sequence: Synthetic oligonucleotide
  Target: LAMA2; (-) strand; PAM type: YTN; PAM sequence: TTA
ccagtgttcaggagacctca

SEQ ID NO: 223440 - DNA, 20 bp, Artificial Sequence
  Description of Artificial Sequence: Synthetic oligonucleotide
  Target: LAMA2; (-) strand; PAM type: YTN; PAM sequence: TTT
accagtgttcaggagacctc

SEQ ID NO: 223441 - DNA, 20 bp, Artificial Sequence
  Description of Artificial Sequence: Synthetic oligonucleotide
  Target: LAMA2; (-) strand; PAM type: YTN; PAM sequence: TTT
taccagtgttcaggagacct

SEQ ID NO: 223442 - DNA, 20 bp, Artificial Sequence
  Description of Artificial Sequence: Synthetic oligonucleotide
  Target: LAMA2; (-) strand; PAM type: YTN; PAM sequence: TTT
ttaccagtgttcaggagacc

SEQ ID NO: 223443 - DNA, 20 bp, Artificial Sequence
  Description of Artificial Sequence: Synthetic oligonucleotide
  Target: LAMA2; (-) strand; PAM type: YTN; PAM sequence: CTG
gggtttttaccagtgttcag

SEQ ID NO: 223444 - DNA, 20 bp, Artificial Sequence
  Description of Artificial Sequence: Synthetic oligonucleotide
  Target: LAMA2; (-) strand; PAM type: YTN; PAM sequence: TTG
tacagcactggggtttttac

SEQ ID NO: 223445 - DNA, 20 bp, Artificial Sequence
  Description of Artificial Sequence: Synthetic oligonucleotide
  Target: LAMA2; (-) strand; PAM type: YTN; PAM sequence: TTT
gtacagcactggggttttta

SEQ ID NO: 223446 - DNA, 20 bp, Artificial Sequence
  Description of Artificial Sequence: Synthetic oligonucleotide
  Target: LAMA2; (-) strand; PAM type: YTN; PAM sequence: CTA
agataaaatgatatttgtac

SEQ ID NO: 223447 - DNA, 20 bp, Artificial Sequence
  Description of Artificial Sequence: Synthetic oligonucleotide
  Target: LAMA2; (-) strand; PAM type: YTN; PAM sequence: TTG
aacatcatggctaagataaa

SEQ ID NO: 223448 - DNA, 20 bp, Artificial Sequence
  Description of Artificial Sequence: Synthetic oligonucleotide
  Target: LAMA2; (-) strand; PAM type: YTN; PAM sequence: CTT
gaacatcatggctaagataa

SEQ ID NO: 223449 - DNA, 20 bp, Artificial Sequence
  Description of Artificial Sequence: Synthetic oligonucleotide
  Target: LAMA2; (-) strand; PAM type: YTN; PAM sequence: TTC
caatcttgaacatcatggct

SEQ ID NO: 223450 - DNA, 20 bp, Artificial Sequence
  Description of Artificial Sequence: Synthetic oligonucleotide
  Target: LAMA2; (-) strand; PAM type: YTN; PAM sequence: TTT
ccaatcttgaacatcatggc

SEQ ID NO: 223451 - DNA, 20 bp, Artificial Sequence
  Description of Artificial Sequence: Synthetic oligonucleotide
  Target: LAMA2; (-) strand; PAM type: YTN; PAM sequence: CTT
tccaatcttgaacatcatgg

SEQ ID NO: 223452 - DNA, 20 bp, Artificial Sequence
  Description of Artificial Sequence: Synthetic oligonucleotide
  Target: LAMA2; (-) strand; PAM type: YTN; PAM sequence: TTA
tgctttccaatcttgaacat

SEQ ID NO: 223453 - DNA, 20 bp, Artificial Sequence
  Description of Artificial Sequence: Synthetic oligonucleotide
  Target: LAMA2; (-) strand; PAM type: YTN; PAM sequence: CTC
aaaataataagcaacggaca

SEQ ID NO: 223454 - DNA, 20 bp, Artificial Sequence
  Description of Artificial Sequence: Synthetic oligonucleotide
  Target: LAMA2; (-) strand; PAM type: YTN; PAM sequence: TTA
gtctcaaaataataagcaac

SEQ ID NO: 223455 - DNA, 20 bp, Artificial Sequence
  Description of Artificial Sequence: Synthetic oligonucleotide
  Target: LAMA2; (-) strand; PAM type: YTN; PAM sequence: TTT
agtctcaaaataataagcaa

SEQ ID NO: 223456 - DNA, 20 bp, Artificial Sequence
  Description of Artificial Sequence: Synthetic oligonucleotide
  Target: LAMA2; (-) strand; PAM type: YTN; PAM sequence: CTT
tagtctcaaaataataagca

SEQ ID NO: 223457 - DNA, 20 bp, Artificial Sequence
  Description of Artificial Sequence: Synthetic oligonucleotide
  Target: LAMA2; (-) strand; PAM type: YTN; PAM sequence: TTA
agaatcctttagtctcaaaa

SEQ ID NO: 223458 - DNA, 20 bp, Artificial Sequence
  Description of Artificial Sequence: Synthetic oligonucleotide
  Target: LAMA2; (-) strand; PAM type: YTN; PAM sequence: CTT
aagaatcctttagtctcaaa

SEQ ID NO: 223459 - DNA, 20 bp, Artificial Sequence
  Description of Artificial Sequence: Synthetic oligonucleotide
  Target: LAMA2; (-) strand; PAM type: YTN; PAM sequence: TTC
ttaagaatcctttagtctca

SEQ ID NO: 223460 - DNA, 20 bp, Artificial Sequence
  Description of Artificial Sequence: Synthetic oligonucleotide
  Target: LAMA2; (-) strand; PAM type: YTN; PAM sequence: TTT
cttaagaatcctttagtctc

SEQ ID NO: 223461 - DNA, 20 bp, Artificial Sequence
  Description of Artificial Sequence: Synthetic oligonucleotide
  Target: LAMA2; (-) strand; PAM type: YTN; PAM sequence: CTT
tcttaagaatcctttagtct

SEQ ID NO: 223462 - DNA, 20 bp, Artificial Sequence
  Description of Artificial Sequence: Synthetic oligonucleotide
  Target: LAMA2; (-) strand; PAM type: YTN; PAM sequence: TTA
gtgtggaaatggagaatagg

SEQ ID NO: 223463 - DNA, 20 bp, Artificial Sequence
  Description of Artificial Sequence: Synthetic oligonucleotide
  Target: LAMA2; (-) strand; PAM type: YTN; PAM sequence: TTT
agtgtggaaatggagaatag

SEQ ID NO: 223464 - DNA, 20 bp, Artificial Sequence
  Description of Artificial Sequence: Synthetic oligonucleotide
  Target: LAMA2; (-) strand; PAM type: YTN; PAM sequence: CTC
atttagtgtggaaatggaga

SEQ ID NO: 223465 - DNA, 20 bp, Artificial Sequence
  Description of Artificial Sequence: Synthetic oligonucleotide
  Target: LAMA2; (-) strand; PAM type: YTN; PAM sequence: TTG
atctcatttagtgtggaaat

SEQ ID NO: 223466 - DNA, 20 bp, Artificial Sequence
  Description of Artificial Sequence: Synthetic oligonucleotide
  Target: LAMA2; (-) strand; PAM type: YTN; PAM sequence: CTT
gatctcatttagtgtggaaa

SEQ ID NO: 223467 - DNA, 20 bp, Artificial Sequence
  Description of Artificial Sequence: Synthetic oligonucleotide
  Target: LAMA2; (-) strand; PAM type: YTN; PAM sequence: TTA
agaacttgatctcatttagt

SEQ ID NO: 223468 - DNA, 20 bp, Artificial Sequence
  Description of Artificial Sequence: Synthetic oligonucleotide
  Target: LAMA2; (-) strand; PAM type: YTN; PAM sequence: CTA
taataagaagagtattaaga

SEQ ID NO: 223469 - DNA, 20 bp, Artificial Sequence
  Description of Artificial Sequence: Synthetic oligonucleotide
  Target: LAMA2; (-) strand; PAM type: YTN; PAM sequence: CTC
ctataataagaagagtatta

SEQ ID NO: 223470 - DNA, 20 bp, Artificial Sequence
  Description of Artificial Sequence: Synthetic oligonucleotide
  Target: LAMA2; (-) strand; PAM type: YTN; PAM sequence: TTC
ctcctataataagaagagta

SEQ ID NO: 223471 - DNA, 20 bp, Artificial Sequence
  Description of Artificial Sequence: Synthetic oligonucleotide
  Target: LAMA2; (-) strand; PAM type: YTN; PAM sequence: TTA
gatgttcctcctataataag

SEQ ID NO: 223472 - DNA, 20 bp, Artificial Sequence
  Description of Artificial Sequence: Synthetic oligonucleotide
  Target: LAMA2; (-) strand; PAM type: YTN; PAM sequence: TTG
aattagatgttcctcctata

SEQ ID NO: 223473 - DNA, 20 bp, Artificial Sequence
  Description of Artificial Sequence: Synthetic oligonucleotide
  Target: LAMA2; (-) strand; PAM type: YTN; PAM sequence: CTG
atgtagcattgaattagatg

SEQ ID NO: 223474 - DNA, 20 bp, Artificial Sequence
  Description of Artificial Sequence: Synthetic oligonucleotide
  Target: LAMA2; (-) strand; PAM type: YTN; PAM sequence: TTA
ctgatgtagcattgaattag

SEQ ID NO: 223475 - DNA, 20 bp, Artificial Sequence
  Description of Artificial Sequence: Synthetic oligonucleotide
  Target: LAMA2; (-) strand; PAM type: YTN; PAM sequence: TTA
attactgatgtagcattgaa

SEQ ID NO: 223476 - DNA, 20 bp, Artificial Sequence
  Description of Artificial Sequence: Synthetic oligonucleotide
  Target: LAMA2; (-) strand; PAM type: YTN; PAM sequence: TTT
aattactgatgtagcattga

SEQ ID NO: 223477 - DNA, 20 bp, Artificial Sequence
  Description of Artificial Sequence: Synthetic oligonucleotide
  Target: LAMA2; (-) strand; PAM type: YTN; PAM sequence: CTA
acaaaatatcatttaattac

SEQ ID NO: 223478 - DNA, 20 bp, Artificial Sequence
  Description of Artificial Sequence: Synthetic oligonucleotide
  Target: LAMA2; (-) strand; PAM type: YTN; PAM sequence: TTG
catgtcacctaacaaaatat

SEQ ID NO: 223479 - DNA, 20 bp, Artificial Sequence
  Description of Artificial Sequence: Synthetic oligonucleotide
  Target: LAMA2; (-) strand; PAM type: YTN; PAM sequence: TTT
gcatgtcacctaacaaaata

SEQ ID NO: 223480 - DNA, 20 bp, Artificial Sequence
  Description of Artificial Sequence: Synthetic oligonucleotide
  Target: LAMA2; (-) strand; PAM type: YTN; PAM sequence: CTC
atttgcatgtcacctaacaa

SEQ ID NO: 223481 - DNA, 20 bp, Artificial Sequence
  Description of Artificial Sequence: Synthetic oligonucleotide
  Target: LAMA2; (-) strand; PAM type: YTN; PAM sequence: TTA
ctcatttgcatgtcacctaa

SEQ ID NO: 223482 - DNA, 20 bp, Artificial Sequence
  Description of Artificial Sequence: Synthetic oligonucleotide
  Target: LAMA2; (-) strand; PAM type: YTN; PAM sequence: TTG
ttactcatttgcatgtcacc

SEQ ID NO: 223483 - DNA, 20 bp, Artificial Sequence
  Description of Artificial Sequence: Synthetic oligonucleotide
  Target: LAMA2; (-) strand; PAM type: YTN; PAM sequence: TTT
gttactcatttgcatgtcac

SEQ ID NO: 223484 - DNA, 20 bp, Artificial Sequence
  Description of Artificial Sequence: Synthetic oligonucleotide
  Target: LAMA2; (-) strand; PAM type: YTN; PAM sequence: TTC
catttgttactcatttgcat

SEQ ID NO: 223485 - DNA, 20 bp, Artificial Sequence
  Description of Artificial Sequence: Synthetic oligonucleotide
  Target: LAMA2; (-) strand; PAM type: YTN; PAM sequence: TTC
atattccatttgttactcat

SEQ ID NO: 223486 - DNA, 20 bp, Artificial Sequence
  Description of Artificial Sequence: Synthetic oligonucleotide
  Target: LAMA2; (-) strand; PAM type: YTN; PAM sequence: TTT
catattccatttgttactca

SEQ ID NO: 223487 - DNA, 20 bp, Artificial Sequence
  Description of Artificial Sequence: Synthetic oligonucleotide
  Target: LAMA2; (-) strand; PAM type: YTN; PAM sequence: CTA
tttcatattccatttgttac

SEQ ID NO: 223488 - DNA, 20 bp, Artificial Sequence
  Description of Artificial Sequence: Synthetic oligonucleotide
  Target: LAMA2; (-) strand; PAM type: YTN; PAM sequence: TTC
tatttcatattccatttgtt

SEQ ID NO: 223489 - DNA, 20 bp, Artificial Sequence
  Description of Artificial Sequence: Synthetic oligonucleotide
  Target: LAMA2; (-) strand; PAM type: YTN; PAM sequence: TTT
ctatttcatattccatttgt

SEQ ID NO: 223490 - DNA, 20 bp, Artificial Sequence
  Description of Artificial Sequence: Synthetic oligonucleotide
  Target: LAMA2; (-) strand; PAM type: YTN; PAM sequence: CTT
tctatttcatattccatttg

SEQ ID NO: 223491 - DNA, 20 bp, Artificial Sequence
  Description of Artificial Sequence: Synthetic oligonucleotide
  Target: LAMA2; (-) strand; PAM type: YTN; PAM sequence: TTA
cataacaaagggaactttct

SEQ ID NO: 223492 - DNA, 20 bp, Artificial Sequence
  Description of Artificial Sequence: Synthetic oligonucleotide
  Target: LAMA2; (-) strand; PAM type: YTN; PAM sequence: TTT
acataacaaagggaactttc

SEQ ID NO: 223493 - DNA, 20 bp, Artificial Sequence
  Description of Artificial Sequence: Synthetic oligonucleotide
  Target: LAMA2; (-) strand; PAM type: YTN; PAM sequence: TTG
acaatttacataacaaaggg

SEQ ID NO: 223494 - DNA, 20 bp, Artificial Sequence
  Description of Artificial Sequence: Synthetic oligonucleotide
  Target: LAMA2; (-) strand; PAM type: YTN; PAM sequence: TTT
gacaatttacataacaaagg

SEQ ID NO: 223495 - DNA, 20 bp, Artificial Sequence
  Description of Artificial Sequence: Synthetic oligonucleotide
  Target: LAMA2; (-) strand; PAM type: YTN; PAM sequence: TTA
aaaacaatatcaagtgtttg

SEQ ID NO: 223496 - DNA, 20 bp, Artificial Sequence
  Description of Artificial Sequence: Synthetic oligonucleotide
  Target: LAMA2; (-) strand; PAM type: YTN; PAM sequence: TTT
aaaaacaatatcaagtgttt

SEQ ID NO: 223497 - DNA, 20 bp, Artificial Sequence
  Description of Artificial Sequence: Synthetic oligonucleotide
  Target: LAMA2; (-) strand; PAM type: YTN; PAM sequence: CTT
taaaaacaatatcaagtgtt

SEQ ID NO: 223498 - DNA, 20 bp, Artificial Sequence
  Description of Artificial Sequence: Synthetic oligonucleotide
  Target: LAMA2; (-) strand; PAM type: YTN; PAM sequence: TTA
aaaaaatcccaaataacttt

SEQ ID NO: 223499 - DNA, 20 bp, Artificial Sequence
  Description of Artificial Sequence: Synthetic oligonucleotide
  Target: LAMA2; (-) strand; PAM type: YTN; PAM sequence: CTT
aaaaaaatcccaaataactt

SEQ ID NO: 223500 - DNA, 20 bp, Artificial Sequence
  Description of Artificial Sequence: Synthetic oligonucleotide
  Target: LAMA2; (-) strand; PAM type: YTN; PAM sequence: TTG
gtgtcttaaaaaaatcccaa

SEQ ID NO: 223501 - DNA, 20 bp, Artificial Sequence
  Description of Artificial Sequence: Synthetic oligonucleotide
  Target: LAMA2; (-) strand; PAM type: YTN; PAM sequence: CTT
ggtgtcttaaaaaaatccca

SEQ ID NO: 223502 - DNA, 20 bp, Artificial Sequence
  Description of Artificial Sequence: Synthetic oligonucleotide
  Target: LAMA2; (-) strand; PAM type: YTN; PAM sequence: TTA
caaacttggtgtcttaaaaa

SEQ ID NO: 223503 - DNA, 20 bp, Artificial Sequence
  Description of Artificial Sequence: Synthetic oligonucleotide
  Target: LAMA2; (-) strand; PAM type: YTN; PAM sequence: TTG
ttacaaacttggtgtcttaa

SEQ ID NO: 223504 - DNA, 20 bp, Artificial Sequence
  Description of Artificial Sequence: Synthetic oligonucleotide
  Target: LAMA2; (-) strand; PAM type: YTN; PAM sequence: CTT
gttacaaacttggtgtctta

SEQ ID NO: 223505 - DNA, 20 bp, Artificial Sequence
  Description of Artificial Sequence: Synthetic oligonucleotide
  Target: LAMA2; (-) strand; PAM type: YTN; PAM sequence: TTG
aagggcacttgttacaaact

SEQ ID NO: 223506 - DNA, 20 bp, Artificial Sequence
  Description of Artificial Sequence: Synthetic oligonucleotide
  Target: LAMA2; (-) strand; PAM type: YTN; PAM sequence: CTG
ttgaagggcacttgttacaa

SEQ ID NO: 223507 - DNA, 20 bp, Artificial Sequence
  Description of Artificial Sequence: Synthetic oligonucleotide
  Target: LAMA2; (-) strand; PAM type: YTN; PAM sequence: TTC
tgttgaagggcacttgttac

SEQ ID NO: 223508 - DNA, 20 bp, Artificial Sequence
  Description of Artificial Sequence: Synthetic oligonucleotide
  Target: LAMA2; (-) strand; PAM type: YTN; PAM sequence: TTT
ctgttgaagggcacttgtta

SEQ ID NO: 223509 - DNA, 20 bp, Artificial Sequence
  Description of Artificial Sequence: Synthetic oligonucleotide
  Target: LAMA2; (-) strand; PAM type: YTN; PAM sequence: TTT
tctgttgaagggcacttgtt

SEQ ID NO: 223510 - DNA, 20 bp, Artificial Sequence
  Description of Artificial Sequence: Synthetic oligonucleotide
  Target: LAMA2; (-) strand; PAM type: YTN; PAM sequence: CTT
ttctgttgaagggcacttgt

SEQ ID NO: 223511 - DNA, 20 bp, Artificial Sequence
  Description of Artificial Sequence: Synthetic oligonucleotide
  Target: LAMA2; (-) strand; PAM type: YTN; PAM sequence: CTC
atgatatccaagtgtctttt

SEQ ID NO: 223512 - DNA, 20 bp, Artificial Sequence
  Description of Artificial Sequence: Synthetic oligonucleotide
  Target: LAMA2; (-) strand; PAM type: YTN; PAM sequence: CTA
agagaacatctcatgatatc

SEQ ID NO: 223513 - DNA, 20 bp, Artificial Sequence
  Description of Artificial Sequence: Synthetic oligonucleotide
  Target: LAMA2; (-) strand; PAM type: YTN; PAM sequence: TTG
aggaacctaagagaacatct

SEQ ID NO: 223514 - DNA, 20 bp, Artificial Sequence
  Description of Artificial Sequence: Synthetic oligonucleotide
  Target: LAMA2; (-) strand; PAM type: YTN; PAM sequence: TTT
gaggaacctaagagaacatc

SEQ ID NO: 223515 - DNA, 20 bp, Artificial Sequence
  Description of Artificial Sequence: Synthetic oligonucleotide
  Target: LAMA2; (-) strand; PAM type: YTN; PAM sequence: CTT
tgaggaacctaagagaacat

SEQ ID NO: 223516 - DNA, 20 bp, Artificial Sequence
  Description of Artificial Sequence: Synthetic oligonucleotide
  Target: LAMA2; (-) strand; PAM type: YTN; PAM sequence: CTA
ggctttgaggaacctaagag

SEQ ID NO: 223517 - DNA, 20 bp, Artificial Sequence
  Description of Artificial Sequence: Synthetic oligonucleotide
  Target: LAMA2; (-) strand; PAM type: YTN; PAM sequence: CTG
ctaggctttgaggaacctaa

SEQ ID NO: 223518 - DNA, 20 bp, Artificial Sequence
  Description of Artificial Sequence: Synthetic oligonucleotide
  Target: LAMA2; (-) strand; PAM type: YTN; PAM sequence: CTA
tgactgctaggctttgagga

SEQ ID NO: 223519 - DNA, 20 bp, Artificial Sequence
  Description of Artificial Sequence: Synthetic oligonucleotide
  Target: LAMA2; (-) strand; PAM type: YTN; PAM sequence: TTA
aaatgctatgactgctaggc

SEQ ID NO: 223520 - DNA, 20 bp, Artificial Sequence
  Description of Artificial Sequence: Synthetic oligonucleotide
  Target: LAMA2; (-) strand; PAM type: YTN; PAM sequence: CTA
gtaagtattaaaatgctatg

SEQ ID NO: 223521 - DNA, 20 bp, Artificial Sequence
  Description of Artificial Sequence: Synthetic oligonucleotide
  Target: LAMA2; (-) strand; PAM type: YTN; PAM sequence: CTC
cccactagtaagtattaaaa

SEQ ID NO: 223522 - DNA, 20 bp, Artificial Sequence
  Description of Artificial Sequence: Synthetic oligonucleotide
  Target: LAMA2; (-) strand; PAM type: YTN; PAM sequence: CTG
gtgtgcagcagggaaggcag

SEQ ID NO: 223523 - DNA, 20 bp, Artificial Sequence
  Description of Artificial Sequence: Synthetic oligonucleotide
  Target: LAMA2; (-) strand; PAM type: YTN; PAM sequence: TTC
tggtgtgcagcagggaaggc

SEQ ID NO: 223524 - DNA, 20 bp, Artificial Sequence
  Description of Artificial Sequence: Synthetic oligonucleotide
  Target: LAMA2; (-) strand; PAM type: YTN; PAM sequence: CTG
ttctggtgtgcagcagggaa

SEQ ID NO: 223525 - DNA, 20 bp, Artificial Sequence
  Description of Artificial Sequence: Synthetic oligonucleotide
  Target: LAMA2; (-) strand; PAM type: YTN; PAM sequence: TTA
acccccaccccagtctgttc

SEQ ID NO: 223526 - DNA, 20 bp, Artificial Sequence
  Description of Artificial Sequence: Synthetic oligonucleotide
  Target: LAMA2; (-) strand; PAM type: YTN; PAM sequence: TTC
cagatgattaacccccaccc

SEQ ID NO: 223527 - DNA, 20 bp, Artificial Sequence
  Description of Artificial Sequence: Synthetic oligonucleotide
  Target: LAMA2; (-) strand; PAM type: YTN; PAM sequence: TTT
ccagatgattaacccccacc

SEQ ID NO: 223528 - DNA, 20 bp, Artificial Sequence
  Description of Artificial Sequence: Synthetic oligonucleotide
  Target: LAMA2; (-) strand; PAM type: YTN; PAM sequence: CTC
atttccagatgattaacccc

SEQ ID NO: 223529 - DNA, 20 bp, Artificial Sequence
  Description of Artificial Sequence: Synthetic oligonucleotide
  Target: LAMA2; (-) strand; PAM type: YTN; PAM sequence: TTA
taatacctcatttccagatg

SEQ ID NO: 223530 - DNA, 20 bp, Artificial Sequence
  Description of Artificial Sequence: Synthetic oligonucleotide
  Target: LAMA2; (-) strand; PAM type: YTN; PAM sequence: TTC
aaaatcagtagttataatac

SEQ ID NO: 223531 - DNA, 20 bp, Artificial Sequence
  Description of Artificial Sequence: Synthetic oligonucleotide
  Target: LAMA2; (-) strand; PAM type: YTN; PAM sequence: CTT
caaaatcagtagttataata

SEQ ID NO: 223532 - DNA, 20 bp, Artificial Sequence
  Description of Artificial Sequence: Synthetic oligonucleotide
  Target: LAMA2; (-) strand; PAM type: YTN; PAM sequence: CTC
ttcaaaatcagtagttataa

SEQ ID NO: 223533 - DNA, 20 bp, Artificial Sequence
  Description of Artificial Sequence: Synthetic oligonucleotide
  Target: LAMA2; (-) strand; PAM type: YTN; PAM sequence: TTA
taaagactcttcaaaatcag

SEQ ID NO: 223534 - DNA, 20 bp, Artificial Sequence
  Description of Artificial Sequence: Synthetic oligonucleotide
  Target: LAMA2; (-) strand; PAM type: YTN; PAM sequence: TTC
attataaagactcttcaaaa

SEQ ID NO: 223535 - DNA, 20 bp, Artificial Sequence
  Description of Artificial Sequence: Synthetic oligonucleotide
  Target: LAMA2; (-) strand; PAM type: YTN; PAM sequence: TTT
cattataaagactcttcaaa

SEQ ID NO: 223536 - DNA, 20 bp, Artificial Sequence
  Description of Artificial Sequence: Synthetic oligonucleotide
  Target: LAMA2; (-) strand; PAM type: YTN; PAM sequence: TTT
tcattataaagactcttcaa

SEQ ID NO: 223537 - DNA, 20 bp, Artificial Sequence
  Description of Artificial Sequence: Synthetic oligonucleotide
  Target: LAMA2; (-) strand; PAM type: YTN; PAM sequence: TTG
ttttcattataaagactctt

SEQ ID NO: 223538 - DNA, 20 bp, Artificial Sequence
  Description of Artificial Sequence: Synthetic oligonucleotide
  Target: LAMA2; (-) strand; PAM type: YTN; PAM sequence: CTT
gttttcattataaagactct

SEQ ID NO: 223539 - DNA, 20 bp, Artificial Sequence
  Description of Artificial Sequence: Synthetic oligonucleotide
  Target: LAMA2; (-) strand; PAM type: YTN; PAM sequence: CTG
tgtcttgttttcattataaa

SEQ ID NO: 223540 - DNA, 20 bp, Artificial Sequence
  Description of Artificial Sequence: Synthetic oligonucleotide
  Target: LAMA2; (-) strand; PAM type: YTN; PAM sequence: TTA
actgtgtcttgttttcatta

SEQ ID NO: 223541 - DNA, 20 bp, Artificial Sequence
  Description of Artificial Sequence: Synthetic oligonucleotide
  Target: LAMA2; (-) strand; PAM type: YTN; PAM sequence: TTA
ttaactgtgtcttgttttca

SEQ ID NO: 223542 - DNA, 20 bp, Artificial Sequence
  Description of Artificial Sequence: Synthetic oligonucleotide
  Target: LAMA2; (-) strand; PAM type: YTN; PAM sequence: TTT
attaactgtgtcttgttttc

SEQ ID NO: 223543 - DNA, 20 bp, Artificial Sequence
  Description of Artificial Sequence: Synthetic oligonucleotide
  Target: LAMA2; (-) strand; PAM type: YTN; PAM sequence: TTT
tattaactgtgtcttgtttt

SEQ ID NO: 223544 - DNA, 20 bp, Artificial Sequence
  Description of Artificial Sequence: Synthetic oligonucleotide
  Target: LAMA2; (-) strand; PAM type: YTN; PAM sequence: CTT
ttattaactgtgtcttgttt

SEQ ID NO: 223545 - DNA, 20 bp, Artificial Sequence
  Description of Artificial Sequence: Synthetic oligonucleotide
  Target: LAMA2; (-) strand; PAM type: YTN; PAM sequence: CTA
cttttattaactgtgtcttg

SEQ ID NO: 223546 - DNA, 20 bp, Artificial Sequence
  Description of Artificial Sequence: Synthetic oligonucleotide
  Target: LAMA2; (-) strand; PAM type: YTN; PAM sequence: CTA
tgctacttttattaactgtg

SEQ ID NO: 223547 - DNA, 20 bp, Artificial Sequence
  Description of Artificial Sequence: Synthetic oligonucleotide
  Target: LAMA2; (-) strand; PAM type: YTN; PAM sequence: TTC
tatgctacttttattaactg

SEQ ID NO: 223548 - DNA, 20 bp, Artificial Sequence
  Description of Artificial Sequence: Synthetic oligonucleotide
  Target: LAMA2; (-) strand; PAM type: YTN; PAM sequence: TTT
ctatgctacttttattaact

SEQ ID NO: 223549 - DNA, 20 bp, Artificial Sequence
  Description of Artificial Sequence: Synthetic oligonucleotide
  Target: LAMA2; (-) strand; PAM type: YTN; PAM sequence: TTT
tctatgctacttttattaac

SEQ ID NO: 223550 - DNA, 20 bp, Artificial Sequence
  Description of Artificial Sequence: Synthetic oligonucleotide
  Target: LAMA2; (-) strand; PAM type: YTN; PAM sequence: CTA
atgttttctatgctactttt

SEQ ID NO: 223551 - DNA, 20 bp, Artificial Sequence
  Description of Artificial Sequence: Synthetic oligonucleotide
  Target: LAMA2; (-) strand; PAM type: YTN; PAM sequence: CTC
taatgttttctatgctactt

SEQ ID NO: 223552 - DNA, 20 bp, Artificial Sequence
  Description of Artificial Sequence: Synthetic oligonucleotide
  Target: LAMA2; (-) strand; PAM type: YTN; PAM sequence: CTC
tctaatgttttctatgctac

SEQ ID NO: 223553 - DNA, 20 bp, Artificial Sequence
  Description of Artificial Sequence: Synthetic oligonucleotide
  Target: LAMA2; (-) strand; PAM type: YTN; PAM sequence: CTA
ataaaataactctctaatgt

SEQ ID NO: 223554 - DNA, 20 bp, Artificial Sequence
  Description of Artificial Sequence: Synthetic oligonucleotide
  Target: LAMA2; (-) strand; PAM type: YTN; PAM sequence: TTA
atggccctaataaaataact

SEQ ID NO: 223555 - DNA, 20 bp, Artificial Sequence
  Description of Artificial Sequence: Synthetic oligonucleotide
  Target: LAMA2; (-) strand; PAM type: YTN; PAM sequence: TTT
aatggccctaataaaataac

SEQ ID NO: 223556 - DNA, 20 bp, Artificial Sequence
  Description of Artificial Sequence: Synthetic oligonucleotide
  Target: LAMA2; (-) strand; PAM type: YTN; PAM sequence: CTC
caaatatttaatggccctaa

SEQ ID NO: 223557 - DNA, 20 bp, Artificial Sequence
  Description of Artificial Sequence: Synthetic oligonucleotide
  Target: LAMA2; (-) strand; PAM type: YTN; PAM sequence: CTG
tactccaaatatttaatggc

SEQ ID NO: 223558 - DNA, 20 bp, Artificial Sequence
  Description of Artificial Sequence: Synthetic oligonucleotide
  Target: LAMA2; (-) strand; PAM type: YTN; PAM sequence: CTA
agtactgtactccaaatatt

SEQ ID NO: 223559 - DNA, 20 bp, Artificial Sequence
  Description of Artificial Sequence: Synthetic oligonucleotide
  Target: LAMA2; (-) strand; PAM type: YTN; PAM sequence: TTC
taagtactgtactccaaata

SEQ ID NO: 223560 - DNA, 20 bp, Artificial Sequence
  Description of Artificial Sequence: Synthetic oligonucleotide
  Target: LAMA2; (-) strand; PAM type: YTN; PAM sequence: TTT
ctaagtactgtactccaaat

SEQ ID NO: 223561 - DNA, 20 bp, Artificial Sequence
  Description of Artificial Sequence: Synthetic oligonucleotide
  Target: LAMA2; (-) strand; PAM type: YTN; PAM sequence: TTT
tctaagtactgtactccaaa

SEQ ID NO: 223562 - DNA, 20 bp, Artificial Sequence
  Description of Artificial Sequence: Synthetic oligonucleotide
  Target: LAMA2; (-) strand; PAM type: YTN; PAM sequence: TTA
acagtgattttctaagtact

SEQ ID NO: 223563 - DNA, 20 bp, Artificial Sequence
  Description of Artificial Sequence: Synthetic oligonucleotide
  Target: LAMA2; (-) strand; PAM type: YTN; PAM sequence: TTT
aacagtgattttctaagtac

SEQ ID NO: 223564 - DNA, 20 bp, Artificial Sequence
  Description of Artificial Sequence: Synthetic oligonucleotide
  Target: LAMA2; (-) strand; PAM type: YTN; PAM sequence: TTT
taacagtgattttctaagta

SEQ ID NO: 223565 - DNA, 20 bp, Artificial Sequence
  Description of Artificial Sequence: Synthetic oligonucleotide
  Target: LAMA2; (-) strand; PAM type: YTN; PAM sequence: CTG
taacaattttaacagtgatt

SEQ ID NO: 223566 - DNA, 20 bp, Artificial Sequence
  Description of Artificial Sequence: Synthetic oligonucleotide
  Target: LAMA2; (-) strand; PAM type: YTN; PAM sequence: TTC
agagagtaactgtaacaatt

SEQ ID NO: 223567 - DNA, 20 bp, Artificial Sequence
  Description of Artificial Sequence: Synthetic oligonucleotide
  Target: LAMA2; (-) strand; PAM type: YTN; PAM sequence: CTT
cagagagtaactgtaacaat

SEQ ID NO: 223568 - DNA, 20 bp, Artificial Sequence
  Description of Artificial Sequence: Synthetic oligonucleotide
  Target: LAMA2; (-) strand; PAM type: YTN; PAM sequence: TTA
gcaggcttcagagagtaact

SEQ ID NO: 223569 - DNA, 20 bp, Artificial Sequence
  Description of Artificial Sequence: Synthetic oligonucleotide
  Target: LAMA2; (-) strand; PAM type: YTN; PAM sequence: CTT
agcaggcttcagagagtaac

SEQ ID NO: 223570 - DNA, 20 bp, Artificial Sequence
  Description of Artificial Sequence: Synthetic oligonucleotide
  Target: LAMA2; (-) strand; PAM type: YTN; PAM sequence: TTC
ttagcaggcttcagagagta

SEQ ID NO: 223571 - DNA, 20 bp, Artificial Sequence
  Description of Artificial Sequence: Synthetic oligonucleotide
  Target: LAMA2; (-) strand; PAM type: YTN; PAM sequence: TTA
aaaatgtaataaatagcagt

SEQ ID NO: 223572 - DNA, 20 bp, Artificial Sequence
  Description of Artificial Sequence: Synthetic oligonucleotide
  Target: LAMA2; (-) strand; PAM type: YTN; PAM sequence: TTA
ttaaaaatgtaataaatagc

SEQ ID NO: 223573 - DNA, 20 bp, Artificial Sequence
  Description of Artificial Sequence: Synthetic oligonucleotide
  Target: LAMA2; (-) strand; PAM type: YTN; PAM sequence: TTA
aaatgtagtgaatagcatta

SEQ ID NO: 223574 - DNA, 20 bp, Artificial Sequence
  Description of Artificial Sequence: Synthetic oligonucleotide
  Target: LAMA2; (-) strand; PAM type: YTN; PAM sequence: TTT
aaaatgtagtgaatagcatt

SEQ ID NO: 223575 - DNA, 20 bp, Artificial Sequence
  Description of Artificial Sequence: Synthetic oligonucleotide
  Target: LAMA2; (-) strand; PAM type: YTN; PAM sequence: TTT
taaaatgtagtgaatagcat

SEQ ID NO: 223576 - DNA, 20 bp, Artificial Sequence
  Description of Artificial Sequence: Synthetic oligonucleotide
  Target: LAMA2; (-) strand; PAM type: YTN; PAM sequence: CTT
ttaaaatgtagtgaatagca

SEQ ID NO: 223577 - DNA, 20 bp, Artificial Sequence
  Description of Artificial Sequence: Synthetic oligonucleotide
  Target: LAMA2; (-) strand; PAM type: YTN; PAM sequence: TTG
agtaaacttttaaaatgtag

SEQ ID NO: 223578 - DNA, 20 bp, Artificial Sequence
  Description of Artificial Sequence: Synthetic oligonucleotide
  Target: LAMA2; (-) strand; PAM type: YTN; PAM sequence: TTT
gagtaaacttttaaaatgta

SEQ ID NO: 223579 - DNA, 20 bp, Artificial Sequence
  Description of Artificial Sequence: Synthetic oligonucleotide
  Target: LAMA2; (-) strand; PAM type: YTN; PAM sequence: TTT
tgagtaaacttttaaaatgt

SEQ ID NO: 223580 - DNA, 20 bp, Artificial Sequence
  Description of Artificial Sequence: Synthetic oligonucleotide
  Target: LAMA2; (-) strand; PAM type: YTN; PAM sequence: TTT
ttgagtaaacttttaaaatg

SEQ ID NO: 223581 - DNA, 20 bp, Artificial Sequence
  Description of Artificial Sequence: Synthetic oligonucleotide
  Target: LAMA2; (-) strand; PAM type: YTN; PAM sequence: TTG
aaagtcatgtagtttttgag

SEQ ID NO: 223582 - DNA, 20 bp, Artificial Sequence
  Description of Artificial Sequence: Synthetic oligonucleotide
  Target: LAMA2; (-) strand; PAM type: YTN; PAM sequence: CTT
gaaagtcatgtagtttttga

SEQ ID NO: 223583 - DNA, 20 bp, Artificial Sequence
  Description of Artificial Sequence: Synthetic oligonucleotide
  Target: LAMA2; (-) strand; PAM type: YTN; PAM sequence: TTA
aatgacttgaaagtcatgta

SEQ ID NO: 223584 - DNA, 20 bp, Artificial Sequence
  Description of Artificial Sequence: Synthetic oligonucleotide
  Target: LAMA2; (-) strand; PAM type: YTN; PAM sequence: CTT
aaatgacttgaaagtcatgt

SEQ ID NO: 223585 - DNA, 20 bp, Artificial Sequence
  Description of Artificial Sequence: Synthetic oligonucleotide
  Target: LAMA2; (-) strand; PAM type: YTN; PAM sequence: TTC
ttaaatgacttgaaagtcat

SEQ ID NO: 223586 - DNA, 20 bp, Artificial Sequence
  Description of Artificial Sequence: Synthetic oligonucleotide
  Target: LAMA2; (-) strand; PAM type: YTN; PAM sequence: CTT
cttaaatgacttgaaagtca

SEQ ID NO: 223587 - DNA, 20 bp, Artificial Sequence
  Description of Artificial Sequence: Synthetic oligonucleotide
  Target: LAMA2; (-) strand; PAM type: YTN; PAM sequence: TTG
gacttcttaaatgacttgaa

SEQ ID NO: 223588 - DNA, 20 bp, Artificial Sequence
  Description of Artificial Sequence: Synthetic oligonucleotide
  Target: LAMA2; (-) strand; PAM type: YTN; PAM sequence: TTT
ggacttcttaaatgacttga

SEQ ID NO: 223589 - DNA, 20 bp, Artificial Sequence
  Description of Artificial Sequence: Synthetic oligonucleotide
  Target: LAMA2; (-) strand; PAM type: YTN; PAM sequence: TTT
tggacttcttaaatgacttg

SEQ ID NO: 223590 - DNA, 20 bp, Artificial Sequence
  Description of Artificial Sequence: Synthetic oligonucleotide
  Target: LAMA2; (-) strand; PAM type: YTN; PAM sequence: CTT
ttggacttcttaaatgactt

SEQ ID NO: 223591 - DNA, 20 bp, Artificial Sequence
  Description of Artificial Sequence: Synthetic oligonucleotide
  Target: LAMA2; (-) strand; PAM type: YTN; PAM sequence: TTC
ttttggacttcttaaatgac

SEQ ID NO: 223592 - DNA, 20 bp, Artificial Sequence
  Description of Artificial Sequence: Synthetic oligonucleotide
  Target: LAMA2; (-) strand; PAM type: YTN; PAM sequence: TTT
cttttggacttcttaaatga

SEQ ID NO: 223593 - DNA, 20 bp, Artificial Sequence
  Description of Artificial Sequence: Synthetic oligonucleotide
  Target: LAMA2; (-) strand; PAM type: YTN; PAM sequence: TTG
gcatggaatttcttttggac

SEQ ID NO: 223594 - DNA, 20 bp, Artificial Sequence
  Description of Artificial Sequence: Synthetic oligonucleotide
  Target: LAMA2; (-) strand; PAM type: YTN; PAM sequence: TTG
ttggcatggaatttcttttg

SEQ ID NO: 223595 - DNA, 20 bp, Artificial Sequence
  Description of Artificial Sequence: Synthetic oligonucleotide
  Target: LAMA2; (-) strand; PAM type: YTN; PAM sequence: TTT
gttggcatggaatttctttt

SEQ ID NO: 223596 - DNA, 20 bp, Artificial Sequence
  Description of Artificial Sequence: Synthetic oligonucleotide
  Target: LAMA2; (-) strand; PAM type: YTN; PAM sequence: TTA
aatttgttggcatggaattt

SEQ ID NO: 223597 - DNA, 20 bp, Artificial Sequence
  Description of Artificial Sequence: Synthetic oligonucleotide
  Target: LAMA2; (-) strand; PAM type: YTN; PAM sequence: TTA
attaaatttgttggcatgga

SEQ ID NO: 223598 - DNA, 20 bp, Artificial Sequence
  Description of Artificial Sequence: Synthetic oligonucleotide
  Target: LAMA2; (-) strand; PAM type: YTN; PAM sequence: TTC
catgcaaaattaattaaatt

SEQ ID NO: 223599 - DNA, 20 bp, Artificial Sequence
  Description of Artificial Sequence: Synthetic oligonucleotide
  Target: LAMA2; (-) strand; PAM type: YTN; PAM sequence: TTC
acattccatgcaaaattaat

SEQ ID NO: 223600 - DNA, 20 bp, Artificial Sequence
  Description of Artificial Sequence: Synthetic oligonucleotide
  Target: LAMA2; (-) strand; PAM type: YTN; PAM sequence: TTT
cacattccatgcaaaattaa

SEQ ID NO: 223601 - DNA, 20 bp, Artificial Sequence
  Description of Artificial Sequence: Synthetic oligonucleotide
  Target: LAMA2; (-) strand; PAM type: YTN; PAM sequence: CTT
tcacattccatgcaaaatta

SEQ ID NO: 223602 - DNA, 20 bp, Artificial Sequence
  Description of Artificial Sequence: Synthetic oligonucleotide
  Target: LAMA2; (-) strand; PAM type: YTN; PAM sequence: TTC
tttcacattccatgcaaaat

SEQ ID NO: 223603 - DNA, 20 bp, Artificial Sequence
  Description of Artificial Sequence: Synthetic oligonucleotide
  Target: LAMA2; (-) strand; PAM type: YTN; PAM sequence: CTA
tgggttctttcacattccat

SEQ ID NO: 223604 - DNA, 20 bp, Artificial Sequence
  Description of Artificial Sequence: Synthetic oligonucleotide
  Target: LAMA2; (-) strand; PAM type: YTN; PAM sequence: TTC
tatgggttctttcacattcc

SEQ ID NO: 223605 - DNA, 20 bp, Artificial Sequence
  Description of Artificial Sequence: Synthetic oligonucleotide
  Target: LAMA2; (-) strand; PAM type: YTN; PAM sequence: TTT
ctatgggttctttcacattc

SEQ ID NO: 223606 - DNA, 20 bp, Artificial Sequence
  Description of Artificial Sequence: Synthetic oligonucleotide
  Target: LAMA2; (-) strand; PAM type: YTN; PAM sequence: TTT
tctatgggttctttcacatt

SEQ ID NO: 223607 - DNA, 20 bp, Artificial Sequence
  Description of Artificial Sequence: Synthetic oligonucleotide
  Target: LAMA2; (-) strand; PAM type: YTN; PAM sequence: TTA
ttttctatgggttctttcac

SEQ ID NO: 223608 - DNA, 20 bp, Artificial Sequence
  Description of Artificial Sequence: Synthetic oligonucleotide
  Target: LAMA2; (-) strand; PAM type: YTN; PAM sequence: TTT
attttctatgggttctttca

SEQ ID NO: 223609 - DNA, 20 bp, Artificial Sequence
  Description of Artificial Sequence: Synthetic oligonucleotide
  Target: LAMA2; (-) strand; PAM type: YTN; PAM sequence: TTC
atttattttctatgggttct

SEQ ID NO: 223610 - DNA, 20 bp, Artificial Sequence
  Description of Artificial Sequence: Synthetic oligonucleotide
  Target: LAMA2; (-) strand; PAM type: YTN; PAM sequence: TTT
catttattttctatgggttc

SEQ ID NO: 223611 - DNA, 20 bp, Artificial Sequence
  Description of Artificial Sequence: Synthetic oligonucleotide
  Target: LAMA2; (-) strand; PAM type: YTN; PAM sequence: CTT
tcatttattttctatgggtt

SEQ ID NO: 223612 - DNA, 20 bp, Artificial Sequence
  Description of Artificial Sequence: Synthetic oligonucleotide
  Target: LAMA2; (-) strand; PAM type: YTN; PAM sequence: CTC
tttcatttattttctatggg

SEQ ID NO: 223613 - DNA, 20 bp, Artificial Sequence
  Description of Artificial Sequence: Synthetic oligonucleotide
  Target: LAMA2; (-) strand; PAM type: YTN; PAM sequence: TTC
aaaacaatatccctctttca

SEQ ID NO: 223614 - DNA, 20 bp, Artificial Sequence
  Description of Artificial Sequence: Synthetic oligonucleotide
  Target: LAMA2; (-) strand; PAM type: YTN; PAM sequence: TTT
caaaacaatatccctctttc

SEQ ID NO: 223615 - DNA, 20 bp, Artificial Sequence
  Description of Artificial Sequence: Synthetic oligonucleotide
  Target: LAMA2; (-) strand; PAM type: YTN; PAM sequence: CTG
aatgagtcccatttcaaaac

SEQ ID NO: 223616 - DNA, 20 bp, Artificial Sequence
  Description of Artificial Sequence: Synthetic oligonucleotide
  Target: LAMA2; (-) strand; PAM type: YTN; PAM sequence: TTA
cagaagactgaatgagtccc

SEQ ID NO: 223617 - DNA, 20 bp, Artificial Sequence
  Description of Artificial Sequence: Synthetic oligonucleotide
  Target: LAMA2; (-) strand; PAM type: YTN; PAM sequence: CTT
acagaagactgaatgagtcc

SEQ ID NO: 223618 - DNA, 20 bp, Artificial Sequence
  Description of Artificial Sequence: Synthetic oligonucleotide
  Target: LAMA2; (-) strand; PAM type: YTN; PAM sequence: CTG
ccagcagtgacacggaaaag

SEQ ID NO: 223619 - DNA, 20 bp, Artificial Sequence
  Description of Artificial Sequence: Synthetic oligonucleotide
  Target: LAMA2; (-) strand; PAM type: YTN; PAM sequence: TTC
aacataactgccagcagtga

SEQ ID NO: 223620 - DNA, 20 bp, Artificial Sequence
  Description of Artificial Sequence: Synthetic oligonucleotide
  Target: LAMA2; (-) strand; PAM type: YTN; PAM sequence: CTA
taattcaacataactgccag

SEQ ID NO: 223621 - DNA, 20 bp, Artificial Sequence
  Description of Artificial Sequence: Synthetic oligonucleotide
  Target: LAMA2; (-) strand; PAM type: YTN; PAM sequence: TTC
tataattcaacataactgcc

SEQ ID NO: 223622 - DNA, 20 bp, Artificial Sequence
  Description of Artificial Sequence: Synthetic oligonucleotide
  Target: LAMA2; (-) strand; PAM type: YTN; PAM sequence: TTT
ctataattcaacataactgc

SEQ ID NO: 223623 - DNA, 20 bp, Artificial Sequence
  Description of Artificial Sequence: Synthetic oligonucleotide
  Target: LAMA2; (-) strand; PAM type: YTN; PAM sequence: CTT
tctataattcaacataactg

SEQ ID NO: 223624 - DNA, 20 bp, Artificial Sequence
  Description of Artificial Sequence: Synthetic oligonucleotide
  Target: LAMA2; (-) strand; PAM type: YTN; PAM sequence: CTC
tttctataattcaacataac

SEQ ID NO: 223625 - DNA, 20 bp, Artificial Sequence
  Description of Artificial Sequence: Synthetic oligonucleotide
  Target: LAMA2; (-) strand; PAM type: YTN; PAM sequence: CTA
gagaccccacagactctttc

SEQ ID NO: 223626 - DNA, 20 bp, Artificial Sequence
  Description of Artificial Sequence: Synthetic oligonucleotide
  Target: LAMA2; (-) strand; PAM type: YTN; PAM sequence: CTA
ctagagaccccacagactct

SEQ ID NO: 223627 - DNA, 20 bp, Artificial Sequence
  Description of Artificial Sequence: Synthetic oligonucleotide
  Target: LAMA2; (-) strand; PAM type: YTN; PAM sequence: TTC
tactagagaccccacagact

SEQ ID NO: 223628 - DNA, 20 bp, Artificial Sequence
  Description of Artificial Sequence: Synthetic oligonucleotide
  Target: LAMA2; (-) strand; PAM type: YTN; PAM sequence: CTG
gaataatagataaaaataat

SEQ ID NO: 223629 - DNA, 20 bp, Artificial Sequence
  Description of Artificial Sequence: Synthetic oligonucleotide
  Target: LAMA2; (-) strand; PAM type: YTN; PAM sequence: CTC
tggaataatagataaaaata

SEQ ID NO: 223630 - DNA, 20 bp, Artificial Sequence
  Description of Artificial Sequence: Synthetic oligonucleotide
  Target: LAMA2; (-) strand; PAM type: YTN; PAM sequence: TTG
gctctggaataatagataaa

SEQ ID NO: 223631 - DNA, 20 bp, Artificial Sequence
  Description of Artificial Sequence: Synthetic oligonucleotide
  Target: LAMA2; (-) strand; PAM type: YTN; PAM sequence: CTG
tgttggctctggaataatag

SEQ ID NO: 223632 - DNA, 20 bp, Artificial Sequence
  Description of Artificial Sequence: Synthetic oligonucleotide
  Target: LAMA2; (-) strand; PAM type: YTN; PAM sequence: CTC
ctgtgttggctctggaataa

SEQ ID NO: 223633 - DNA, 20 bp, Artificial Sequence
  Description of Artificial Sequence: Synthetic oligonucleotide
  Target: LAMA2; (-) strand; PAM type: YTN; PAM sequence: TTC
atagctcctgtgttggctct

SEQ ID NO: 223634 - DNA, 20 bp, Artificial Sequence
  Description of Artificial Sequence: Synthetic oligonucleotide
  Target: LAMA2; (-) strand; PAM type: YTN; PAM sequence: CTT
catagctcctgtgttggctc

SEQ ID NO: 223635 - DNA, 20 bp, Artificial Sequence
  Description of Artificial Sequence: Synthetic oligonucleotide
  Target: LAMA2; (-) strand; PAM type: YTN; PAM sequence: TTA
tgacttcatagctcctgtgt

SEQ ID NO: 223636 - DNA, 20 bp, Artificial Sequence
  Description of Artificial Sequence: Synthetic oligonucleotide
  Target: LAMA2; (-) strand; PAM type: YTN; PAM sequence: TTT
atgacttcatagctcctgtg

SEQ ID NO: 223637 - DNA, 20 bp, Artificial Sequence
  Description of Artificial Sequence: Synthetic oligonucleotide
  Target: LAMA2; (-) strand; PAM type: YTN; PAM sequence: CTA
caatgtggatttatgacttc

SEQ ID NO: 223638 - DNA, 20 bp, Artificial Sequence
  Description of Artificial Sequence: Synthetic oligonucleotide
  Target: LAMA2; (-) strand; PAM type: YTN; PAM sequence: CTC
atgcagctacaatgtggatt

SEQ ID NO: 223639 - DNA, 20 bp, Artificial Sequence
  Description of Artificial Sequence: Synthetic oligonucleotide
  Target: LAMA2; (-) strand; PAM type: YTN; PAM sequence: TTC
tcatgcagctacaatgtgga

SEQ ID NO: 223640 - DNA, 20 bp, Artificial Sequence
  Description of Artificial Sequence: Synthetic oligonucleotide
  Target: LAMA2; (-) strand; PAM type: YTN; PAM sequence: CTG
agtatgcaaatatgtgataa

SEQ ID NO: 223641 - DNA, 20 bp, Artificial Sequence
  Description of Artificial Sequence: Synthetic oligonucleotide
  Target: LAMA2; (-) strand; PAM type: YTN; PAM sequence: TTA
gaaagcactgagtatgcaaa

SEQ ID NO: 223642 - DNA, 20 bp, Artificial Sequence
  Description of Artificial Sequence: Synthetic oligonucleotide
  Target: LAMA2; (-) strand; PAM type: YTN; PAM sequence: CTT
agaaagcactgagtatgcaa

SEQ ID NO: 223643 - DNA, 20 bp, Artificial Sequence
  Description of Artificial Sequence: Synthetic oligonucleotide
  Target: LAMA2; (-) strand; PAM type: YTN; PAM sequence: TTG
cttagaaagcactgagtatg

SEQ ID NO: 223644 - DNA, 20 bp, Artificial Sequence
  Description of Artificial Sequence: Synthetic oligonucleotide
  Target: LAMA2; (-) strand; PAM type: YTN; PAM sequence: TTT
gcttagaaagcactgagtat

SEQ ID NO: 223645 - DNA, 20 bp, Artificial Sequence
  Description of Artificial Sequence: Synthetic oligonucleotide
  Target: LAMA2; (-) strand; PAM type: YTN; PAM sequence: CTT
tgcttagaaagcactgagta

SEQ ID NO: 223646 - DNA, 20 bp, Artificial Sequence
  Description of Artificial Sequence: Synthetic oligonucleotide
  Target: LAMA2; (-) strand; PAM type: YTN; PAM sequence: TTA
tggataaagaactttgctta

SEQ ID NO: 223647 - DNA, 20 bp, Artificial Sequence
  Description of Artificial Sequence: Synthetic oligonucleotide
  Target: LAMA2; (-) strand; PAM type: YTN; PAM sequence: CTA
aggttatggataaagaactt

SEQ ID NO: 223648 - DNA, 20 bp, Artificial Sequence
  Description of Artificial Sequence: Synthetic oligonucleotide
  Target: LAMA2; (-) strand; PAM type: YTN; PAM sequence: CTA
cactaaggttatggataaag

SEQ ID NO: 223649 - DNA, 20 bp, Artificial Sequence
  Description of Artificial Sequence: Synthetic oligonucleotide
  Target: LAMA2; (-) strand; PAM type: YTN; PAM sequence: CTA
agaaaaataagactacacta

SEQ ID NO: 223650 - DNA, 20 bp, Artificial Sequence
  Description of Artificial Sequence: Synthetic oligonucleotide
  Target: LAMA2; (-) strand; PAM type: YTN; PAM sequence: TTA
gagatcacaggtacccacta

SEQ ID NO: 223651 - DNA, 20 bp, Artificial Sequence
  Description of Artificial Sequence: Synthetic oligonucleotide
  Target: LAMA2; (-) strand; PAM type: YTN; PAM sequence: TTA
aagatataaaacaaaaagag

SEQ ID NO: 223652 - DNA, 20 bp, Artificial Sequence
  Description of Artificial Sequence: Synthetic oligonucleotide
  Target: LAMA2; (-) strand; PAM type: YTN; PAM sequence: TTT
aaagatataaaacaaaaaga

SEQ ID NO: 223653 - DNA, 20 bp, Artificial Sequence
  Description of Artificial Sequence: Synthetic oligonucleotide
  Target: LAMA2; (-) strand; PAM type: YTN; PAM sequence: TTT
taaagatataaaacaaaaag

SEQ ID NO: 223654 - DNA, 20 bp, Artificial Sequence
  Description of Artificial Sequence: Synthetic oligonucleotide
  Target: LAMA2; (-) strand; PAM type: YTN; PAM sequence: TTT
ttaaagatataaaacaaaaa

SEQ ID NO: 223655 - DNA, 20 bp, Artificial Sequence
  Description of Artificial Sequence: Synthetic oligonucleotide
  Target: LAMA2; (-) strand; PAM type: YTN; PAM sequence: TTT
tttaaagatataaaacaaaa

SEQ ID NO: 223656 - DNA, 20 bp, Artificial Sequence
  Description of Artificial Sequence: Synthetic oligonucleotide
  Target: LAMA2; (-) strand; PAM type: YTN; PAM sequence: TTT
ttttaaagatataaaacaaa

SEQ ID NO: 223657 - DNA, 20 bp, Artificial Sequence
  Description of Artificial Sequence: Synthetic oligonucleotide
  Target: LAMA2; (-) strand; PAM type: YTN; PAM sequence: TTC
cagaaaaaataaaaacatag

SEQ ID NO: 223658 - DNA, 20 bp, Artificial Sequence
  Description of Artificial Sequence: Synthetic oligonucleotide
  Target: LAMA2; (-) strand; PAM type: YTN; PAM sequence: CTT
ccagaaaaaataaaaacata

SEQ ID NO: 223659 - DNA, 20 bp, Artificial Sequence
  Description of Artificial Sequence: Synthetic oligonucleotide
  Target: LAMA2; (-) strand; PAM type: YTN; PAM sequence: TTC
cttccagaaaaaataaaaac

SEQ ID NO: 223660 - DNA, 20 bp, Artificial Sequence
  Description of Artificial Sequence: Synthetic oligonucleotide
  Target: LAMA2; (-) strand; PAM type: YTN; PAM sequence: TTT
ccttccagaaaaaataaaaa

SEQ ID NO: 223661 - DNA, 20 bp, Artificial Sequence
  Description of Artificial Sequence: Synthetic oligonucleotide
  Target: LAMA2; (-) strand; PAM type: YTN; PAM sequence: CTG
tttccttccagaaaaaataa

SEQ ID NO: 223662 - DNA, 20 bp, Artificial Sequence
  Description of Artificial Sequence: Synthetic oligonucleotide
  Target: LAMA2; (-) strand; PAM type: YTN; PAM sequence: TTC
caagtgagcctgtttccttc

SEQ ID NO: 223663 - DNA, 20 bp, Artificial Sequence
  Description of Artificial Sequence: Synthetic oligonucleotide
  Target: LAMA2; (-) strand; PAM type: YTN; PAM sequence: CTA
ggtaaatattccaagtgagc

SEQ ID NO: 223664 - DNA, 20 bp, Artificial Sequence
  Description of Artificial Sequence: Synthetic oligonucleotide
  Target: LAMA2; (-) strand; PAM type: YTN; PAM sequence: TTG
tgaaagagagaatctaggta

SEQ ID NO: 223665 - DNA, 20 bp, Artificial Sequence
  Description of Artificial Sequence: Synthetic oligonucleotide
  Target: LAMA2; (-) strand; PAM type: YTN; PAM sequence: CTT
gtgaaagagagaatctaggt

SEQ ID NO: 223666 - DNA, 20 bp, Artificial Sequence
  Description of Artificial Sequence: Synthetic oligonucleotide
  Target: LAMA2; (-) strand; PAM type: YTN; PAM sequence: TTC
ttgtgaaagagagaatctag

SEQ ID NO: 223667 - DNA, 20 bp, Artificial Sequence
  Description of Artificial Sequence: Synthetic oligonucleotide
  Target: LAMA2; (-) strand; PAM type: YTN; PAM sequence: CTG
cgtgttcttgtgaaagagag

SEQ ID NO: 223668 - DNA, 20 bp, Artificial Sequence
  Description of Artificial Sequence: Synthetic oligonucleotide
  Target: LAMA2; (-) strand; PAM type: YTN; PAM sequence: CTA
aagacacaaccagggaagag

SEQ ID NO: 223669 - DNA, 20 bp, Artificial Sequence
  Description of Artificial Sequence: Synthetic oligonucleotide
  Target: LAMA2; (-) strand; PAM type: YTN; PAM sequence: TTC
taaagacacaaccagggaag

SEQ ID NO: 223670 - DNA, 20 bp, Artificial Sequence
  Description of Artificial Sequence: Synthetic oligonucleotide
  Target: LAMA2; (-) strand; PAM type: YTN; PAM sequence: TTT
ctaaagacacaaccagggaa

SEQ ID NO: 223671 - DNA, 20 bp, Artificial Sequence
  Description of Artificial Sequence: Synthetic oligonucleotide
  Target: LAMA2; (-) strand; PAM type: YTN; PAM sequence: TTT
tctaaagacacaaccaggga

SEQ ID NO: 223672 - DNA, 20 bp, Artificial Sequence
  Description of Artificial Sequence: Synthetic oligonucleotide
  Target: LAMA2; (-) strand; PAM type: YTN; PAM sequence: CTT
ttctaaagacacaaccaggg

SEQ ID NO: 223673 - DNA, 20 bp, Artificial Sequence
  Description of Artificial Sequence: Synthetic oligonucleotide
  Target: LAMA2; (-) strand; PAM type: YTN; PAM sequence: TTC
ttttctaaagacacaaccag

SEQ ID NO: 223674 - DNA, 20 bp, Artificial Sequence
  Description of Artificial Sequence: Synthetic oligonucleotide
  Target: LAMA2; (-) strand; PAM type: YTN; PAM sequence: TTT
cttttctaaagacacaacca

SEQ ID NO: 223675 - DNA, 20 bp, Artificial Sequence
  Description of Artificial Sequence: Synthetic oligonucleotide
  Target: LAMA2; (-) strand; PAM type: YTN; PAM sequence: TTG
tttcttttctaaagacacaa

SEQ ID NO: 223676 - DNA, 20 bp, Artificial Sequence
  Description of Artificial Sequence: Synthetic oligonucleotide
  Target: LAMA2; (-) strand; PAM type: YTN; PAM sequence: TTA
tccattgtttcttttctaaa

SEQ ID NO: 223677 - DNA, 20 bp, Artificial Sequence
  Description of Artificial Sequence: Synthetic oligonucleotide
  Target: LAMA2; (-) strand; PAM type: YTN; PAM sequence: CTG
ttatccattgtttcttttct

SEQ ID NO: 223678 - DNA, 20 bp, Artificial Sequence
  Description of Artificial Sequence: Synthetic oligonucleotide
  Target: LAMA2; (-) strand; PAM type: YTN; PAM sequence: CTC
tgttatccattgtttctttt

SEQ ID NO: 223679 - DNA, 20 bp, Artificial Sequence
  Description of Artificial Sequence: Synthetic oligonucleotide
  Target: LAMA2; (-) strand; PAM type: YTN; PAM sequence: TTA
ccctctgttatccattgttt

SEQ ID NO: 223680 - DNA, 20 bp, Artificial Sequence
  Description of Artificial Sequence: Synthetic oligonucleotide
  Target: LAMA2; (-) strand; PAM type: YTN; PAM sequence: TTT
accctctgttatccattgtt

SEQ ID NO: 223681 - DNA, 20 bp, Artificial Sequence
  Description of Artificial Sequence: Synthetic oligonucleotide
  Target: LAMA2; (-) strand; PAM type: YTN; PAM sequence: TTT
taccctctgttatccattgt

SEQ ID NO: 223682 - DNA, 20 bp, Artificial Sequence
  Description of Artificial Sequence: Synthetic oligonucleotide
  Target: LAMA2; (-) strand; PAM type: YTN; PAM sequence: CTT
ttaccctctgttatccattg

SEQ ID NO: 223683 - DNA, 20 bp, Artificial Sequence
  Description of Artificial Sequence: Synthetic oligonucleotide
  Target: LAMA2; (-) strand; PAM type: YTN; PAM sequence: CTC
ttttaccctctgttatccat

SEQ ID NO: 223684 - DNA, 20 bp, Artificial Sequence
  Description of Artificial Sequence: Synthetic oligonucleotide
  Target: LAMA2; (-) strand; PAM type: YTN; PAM sequence: CTG
aaactcttttaccctctgtt

SEQ ID NO: 223685 - DNA, 20 bp, Artificial Sequence
  Description of Artificial Sequence: Synthetic oligonucleotide
  Target: LAMA2; (-) strand; PAM type: YTN; PAM sequence: TTA
ctgaaactcttttaccctct

SEQ ID NO: 223686 - DNA, 20 bp, Artificial Sequence
  Description of Artificial Sequence: Synthetic oligonucleotide
  Target: LAMA2; (-) strand; PAM type: YTN; PAM sequence: CTG
agaaaattactgaaactctt

SEQ ID NO: 223687 - DNA, 20 bp, Artificial Sequence
  Description of Artificial Sequence: Synthetic oligonucleotide
  Target: LAMA2; (-) strand; PAM type: YTN; PAM sequence: CTG
tgagctgagaaaattactga

SEQ ID NO: 223688 - DNA, 20 bp, Artificial Sequence
  Description of Artificial Sequence: Synthetic oligonucleotide
  Target: LAMA2; (-) strand; PAM type: YTN; PAM sequence: CTC
tgtgagctgagaaaattact

SEQ ID NO: 223689 - DNA, 20 bp, Artificial Sequence
  Description of Artificial Sequence: Synthetic oligonucleotide
  Target: LAMA2; (-) strand; PAM type: YTN; PAM sequence: TTA
ggtctctgtgagctgagaaa

SEQ ID NO: 223690 - DNA, 20 bp, Artificial Sequence
  Description of Artificial Sequence: Synthetic oligonucleotide
  Target: LAMA2; (-) strand; PAM type: YTN; PAM sequence: CTA
ttaggtctctgtgagctgag

SEQ ID NO: 223691 - DNA, 20 bp, Artificial Sequence
  Description of Artificial Sequence: Synthetic oligonucleotide
  Target: LAMA2; (-) strand; PAM type: YTN; PAM sequence: TTG
tcctattaggtctctgtgag

SEQ ID NO: 223692 - DNA, 20 bp, Artificial Sequence
  Description of Artificial Sequence: Synthetic oligonucleotide
  Target: LAMA2; (-) strand; PAM type: YTN; PAM sequence: TTT
gtcctattaggtctctgtga

SEQ ID NO: 223693 - DNA, 20 bp, Artificial Sequence
  Description of Artificial Sequence: Synthetic oligonucleotide
  Target: LAMA2; (-) strand; PAM type: YTN; PAM sequence: CTG
gagtatttgtcctattaggt

SEQ ID NO: 223694 - DNA, 20 bp, Artificial Sequence
  Description of Artificial Sequence: Synthetic oligonucleotide
  Target: LAMA2; (-) strand; PAM type: YTN; PAM sequence: TTC
ctggagtatttgtcctatta

SEQ ID NO: 223695 - DNA, 20 bp, Artificial Sequence
  Description of Artificial Sequence: Synthetic oligonucleotide
  Target: LAMA2; (-) strand; PAM type: YTN; PAM sequence: CTA
aggcatacgttcctggagta

SEQ ID NO: 223696 - DNA, 20 bp, Artificial Sequence
  Description of Artificial Sequence: Synthetic oligonucleotide
  Target: LAMA2; (-) strand; PAM type: YTN; PAM sequence: CTG
caggaactaaggcatacgtt

SEQ ID NO: 223697 - DNA, 20 bp, Artificial Sequence
  Description of Artificial Sequence: Synthetic oligonucleotide
  Target: LAMA2; (-) strand; PAM type: YTN; PAM sequence: TTG
tcatctgcaggaactaaggc

SEQ ID NO: 223698 - DNA, 20 bp, Artificial Sequence
  Description of Artificial Sequence: Synthetic oligonucleotide
  Target: LAMA2; (-) strand; PAM type: YTN; PAM sequence: TTA
gcatatattgtcatctgcag

SEQ ID NO: 223699 - DNA, 20 bp, Artificial Sequence
  Description of Artificial Sequence: Synthetic oligonucleotide
  Target: LAMA2; (-) strand; PAM type: YTN; PAM sequence: TTG
aatcccagttagcatatatt

SEQ ID NO: 223700 - DNA, 20 bp, Artificial Sequence
  Description of Artificial Sequence: Synthetic oligonucleotide
  Target: LAMA2; (-) strand; PAM type: YTN; PAM sequence: CTT
gaatcccagttagcatatat

SEQ ID NO: 223701 - DNA, 20 bp, Artificial Sequence
  Description of Artificial Sequence: Synthetic oligonucleotide
  Target: LAMA2; (-) strand; PAM type: YTN; PAM sequence: TTA
gagcttgaatcccagttagc

SEQ ID NO: 223702 - DNA, 20 bp, Artificial Sequence
  Description of Artificial Sequence: Synthetic oligonucleotide
  Target: LAMA2; (-) strand; PAM type: YTN; PAM sequence: TTG
ttagagcttgaatcccagtt

SEQ ID NO: 223703 - DNA, 20 bp, Artificial Sequence
  Description of Artificial Sequence: Synthetic oligonucleotide
  Target: LAMA2; (-) strand; PAM type: YTN; PAM sequence: TTT
gttagagcttgaatcccagt

SEQ ID NO: 223704 - DNA, 20 bp, Artificial Sequence
  Description of Artificial Sequence: Synthetic oligonucleotide
  Target: LAMA2; (-) strand; PAM type: YTN; PAM sequence: CTG
tttgttagagcttgaatccc

SEQ ID NO: 223705 - DNA, 20 bp, Artificial Sequence
  Description of Artificial Sequence: Synthetic oligonucleotide
  Target: LAMA2; (-) strand; PAM type: YTN; PAM sequence: TTG
cctgtttgttagagcttgaa

SEQ ID NO: 223706 - DNA, 20 bp, Artificial Sequence
  Description of Artificial Sequence: Synthetic oligonucleotide
  Target: LAMA2; (-) strand; PAM type: YTN; PAM sequence: CTT
gcctgtttgttagagcttga

SEQ ID NO: 223707 - DNA, 20 bp, Artificial Sequence
  Description of Artificial Sequence: Synthetic oligonucleotide
  Target: LAMA2; (-) strand; PAM type: YTN; PAM sequence: TTG
gtcttgcctgtttgttagag

SEQ ID NO: 223708 - DNA, 20 bp, Artificial Sequence
  Description of Artificial Sequence: Synthetic oligonucleotide
  Target: LAMA2; (-) strand; PAM type: YTN; PAM sequence: TTG
acattggtcttgcctgtttg

SEQ ID NO: 223709 - DNA, 20 bp, Artificial Sequence
  Description of Artificial Sequence: Synthetic oligonucleotide
  Target: LAMA2; (-) strand; PAM type: YTN; PAM sequence: TTT
gacattggtcttgcctgttt

SEQ ID NO: 223710 - DNA, 20 bp, Artificial Sequence
  Description of Artificial Sequence: Synthetic oligonucleotide
  Target: LAMA2; (-) strand; PAM type: YTN; PAM sequence: TTA
gtttgacattggtcttgcct

SEQ ID NO: 223711 - DNA, 20 bp, Artificial Sequence
  Description of Artificial Sequence: Synthetic oligonucleotide
  Target: LAMA2; (-) strand; PAM type: YTN; PAM sequence: TTA
ttagtttgacattggtcttg

SEQ ID NO: 223712 - DNA, 20 bp, Artificial Sequence
  Description of Artificial Sequence: Synthetic oligonucleotide
  Target: LAMA2; (-) strand; PAM type: YTN; PAM sequence: TTA
tggttattagtttgacattg

SEQ ID NO: 223713 - DNA, 20 bp, Artificial Sequence
  Description of Artificial Sequence: Synthetic oligonucleotide
  Target: LAMA2; (-) strand; PAM type: YTN; PAM sequence: TTC
cacgttatggttattagttt

SEQ ID NO: 223714 - DNA, 20 bp, Artificial Sequence
  Description of Artificial Sequence: Synthetic oligonucleotide
  Target: LAMA2; (-) strand; PAM type: YTN; PAM sequence: CTT
ccacgttatggttattagtt

SEQ ID NO: 223715 - DNA, 20 bp, Artificial Sequence
  Description of Artificial Sequence: Synthetic oligonucleotide
  Target: LAMA2; (-) strand; PAM type: YTN; PAM sequence: CTG
taatgtgcttccacgttatg

SEQ ID NO: 223716 - DNA, 20 bp, Artificial Sequence
  Description of Artificial Sequence: Synthetic oligonucleotide
  Target: LAMA2; (-) strand; PAM type: YTN; PAM sequence: TTG
gatagccaaaatcactgtaa

SEQ ID NO: 223717 - DNA, 20 bp, Artificial Sequence
  Description of Artificial Sequence: Synthetic oligonucleotide
  Target: LAMA2; (-) strand; PAM type: YTN; PAM sequence: TTA
gttggatagccaaaatcact

SEQ ID NO: 223718 - DNA, 20 bp, Artificial Sequence
  Description of Artificial Sequence: Synthetic oligonucleotide
  Target: LAMA2; (-) strand; PAM type: YTN; PAM sequence: TTT
agttggatagccaaaatcac

SEQ ID NO: 223719 - DNA, 20 bp, Artificial Sequence
  Description of Artificial Sequence: Synthetic oligonucleotide
  Target: LAMA2; (-) strand; PAM type: YTN; PAM sequence: TTA
catttagttggatagccaaa

SEQ ID NO: 223720 - DNA, 20 bp, Artificial Sequence
  Description of Artificial Sequence: Synthetic oligonucleotide
  Target: LAMA2; (-) strand; PAM type: YTN; PAM sequence: TTA
ttacatttagttggatagcc

SEQ ID NO: 223721 - DNA, 20 bp, Artificial Sequence
  Description of Artificial Sequence: Synthetic oligonucleotide
  Target: LAMA2; (-) strand; PAM type: YTN; PAM sequence: TTT
attacatttagttggatagc

SEQ ID NO: 223722 - DNA, 20 bp, Artificial Sequence
  Description of Artificial Sequence: Synthetic oligonucleotide
  Target: LAMA2; (-) strand; PAM type: YTN; PAM sequence: TTG
atatttattacatttagttg

SEQ ID NO: 223723 - DNA, 20 bp, Artificial Sequence
  Description of Artificial Sequence: Synthetic oligonucleotide
  Target: LAMA2; (-) strand; PAM type: YTN; PAM sequence: TTT
gatatttattacatttagtt

SEQ ID NO: 223724 - DNA, 20 bp, Artificial Sequence
  Description of Artificial Sequence: Synthetic oligonucleotide
  Target: LAMA2; (-) strand; PAM type: YTN; PAM sequence: CTG
aaatggtgggcatttgatat

SEQ ID NO: 223725 - DNA, 20 bp, Artificial Sequence
  Description of Artificial Sequence: Synthetic oligonucleotide
  Target: LAMA2; (-) strand; PAM type: YTN; PAM sequence: TTC
tgaaatggtgggcatttgat

SEQ ID NO: 223726 - DNA, 20 bp, Artificial Sequence
  Description of Artificial Sequence: Synthetic oligonucleotide
  Target: LAMA2; (-) strand; PAM type: YTN; PAM sequence: CTT
ctgaaatggtgggcatttga

SEQ ID NO: 223727 - DNA, 20 bp, Artificial Sequence
  Description of Artificial Sequence: Synthetic oligonucleotide
  Target: LAMA2; (-) strand; PAM type: YTN; PAM sequence: TTC
ttctgaaatggtgggcattt

SEQ ID NO: 223728 - DNA, 20 bp, Artificial Sequence
  Description of Artificial Sequence: Synthetic oligonucleotide
  Target: LAMA2; (-) strand; PAM type: YTN; PAM sequence: TTA
taattcttctgaaatggtgg

SEQ ID NO: 223729 - DNA, 20 bp, Artificial Sequence
  Description of Artificial Sequence: Synthetic oligonucleotide
  Target: LAMA2; (-) strand; PAM type: YTN; PAM sequence: TTA
ttataattcttctgaaatgg

SEQ ID NO: 223730 - DNA, 20 bp, Artificial Sequence
  Description of Artificial Sequence: Synthetic oligonucleotide
  Target: LAMA2; (-) strand; PAM type: YTN; PAM sequence: CTT
attataattcttctgaaatg

SEQ ID NO: 223731 - DNA, 20 bp, Artificial Sequence
  Description of Artificial Sequence: Synthetic oligonucleotide
  Target: LAMA2; (-) strand; PAM type: YTN; PAM sequence: TTC
cttattataattcttctgaa

SEQ ID NO: 223732 - DNA, 20 bp, Artificial Sequence
  Description of Artificial Sequence: Synthetic oligonucleotide
  Target: LAMA2; (-) strand; PAM type: YTN; PAM sequence: CTA
tattccttattataattctt

SEQ ID NO: 223733 - DNA, 20 bp, Artificial Sequence
  Description of Artificial Sequence: Synthetic oligonucleotide
  Target: LAMA2; (-) strand; PAM type: YTN; PAM sequence: TTA
aagatgctatattccttatt

SEQ ID NO: 223734 - DNA, 20 bp, Artificial Sequence
  Description of Artificial Sequence: Synthetic oligonucleotide
  Target: LAMA2; (-) strand; PAM type: YTN; PAM sequence: TTC
aggcaaatgagaaatgggtt

SEQ ID NO: 223735 - DNA, 20 bp, Artificial Sequence
  Description of Artificial Sequence: Synthetic oligonucleotide
  Target: LAMA2; (-) strand; PAM type: YTN; PAM sequence: CTT
caggcaaatgagaaatgggt

SEQ ID NO: 223736 - DNA, 20 bp, Artificial Sequence
  Description of Artificial Sequence: Synthetic oligonucleotide
  Target: LAMA2; (-) strand; PAM type: YTN; PAM sequence: TTC
ttcaggcaaatgagaaatgg

SEQ ID NO: 223737 - DNA, 20 bp, Artificial Sequence
  Description of Artificial Sequence: Synthetic oligonucleotide
  Target: LAMA2; (-) strand; PAM type: YTN; PAM sequence: CTG
caagtattcttcaggcaaat

SEQ ID NO: 223738 - DNA, 20 bp, Artificial Sequence
  Description of Artificial Sequence: Synthetic oligonucleotide
  Target: LAMA2; (-) strand; PAM type: YTN; PAM sequence: CTG
tctgcaagtattcttcaggc

SEQ ID NO: 223739 - DNA, 20 bp, Artificial Sequence
  Description of Artificial Sequence: Synthetic oligonucleotide
  Target: LAMA2; (-) strand; PAM type: YTN; PAM sequence: TTA
agccacaaatgctgtctgca

SEQ ID NO: 223740 - DNA, 20 bp, Artificial Sequence
  Description of Artificial Sequence: Synthetic oligonucleotide
  Target: LAMA2; (-) strand; PAM type: YTN; PAM sequence: CTC
agggtaaacattaagccaca

SEQ ID NO: 223741 - DNA, 20 bp, Artificial Sequence
  Description of Artificial Sequence: Synthetic oligonucleotide
  Target: LAMA2; (-) strand; PAM type: YTN; PAM sequence: TTA
tctcagggtaaacattaagc

SEQ ID NO: 223742 - DNA, 20 bp, Artificial Sequence
  Description of Artificial Sequence: Synthetic oligonucleotide
  Target: LAMA2; (-) strand; PAM type: YTN; PAM sequence: TTA
ggacagtaagccacaagtta

SEQ ID NO: 223743 - DNA, 20 bp, Artificial Sequence
  Description of Artificial Sequence: Synthetic oligonucleotide
  Target: LAMA2; (-) strand; PAM type: YTN; PAM sequence: TTG
gggataaggttaggacagta

SEQ ID NO: 223744 - DNA, 20 bp, Artificial Sequence
  Description of Artificial Sequence: Synthetic oligonucleotide
  Target: LAMA2; (-) strand; PAM type: YTN; PAM sequence: TTT
ggggataaggttaggacagt

SEQ ID NO: 223745 - DNA, 20 bp, Artificial Sequence
  Description of Artificial Sequence: Synthetic oligonucleotide
  Target: LAMA2; (-) strand; PAM type: YTN; PAM sequence: CTT
tggggataaggttaggacag

SEQ ID NO: 223746 - DNA, 20 bp, Artificial Sequence
  Description of Artificial Sequence: Synthetic oligonucleotide
  Target: LAMA2; (-) strand; PAM type: YTN; PAM sequence: TTC
atggcaaactttggggataa

SEQ ID NO: 223747 - DNA, 20 bp, Artificial Sequence
  Description of Artificial Sequence: Synthetic oligonucleotide
  Target: LAMA2; (-) strand; PAM type: YTN; PAM sequence: TTT
catggcaaactttggggata

SEQ ID NO: 223748 - DNA, 20 bp, Artificial Sequence
  Description of Artificial Sequence: Synthetic oligonucleotide
  Target: LAMA2; (-) strand; PAM type: YTN; PAM sequence: CTA
tgcaaaaataataataaaag

SEQ ID NO: 223749 - DNA, 20 bp, Artificial Sequence
  Description of Artificial Sequence: Synthetic oligonucleotide
  Target: LAMA2; (-) strand; PAM type: YTN; PAM sequence: CTA
gacctatgcaaaaataataa

SEQ ID NO: 223750 - DNA, 20 bp, Artificial Sequence
  Description of Artificial Sequence: Synthetic oligonucleotide
  Target: LAMA2; (-) strand; PAM type: YTN; PAM sequence: TTC
caaagtcaatatgctagacc

SEQ ID NO: 223751 - DNA, 20 bp, Artificial Sequence
  Description of Artificial Sequence: Synthetic oligonucleotide
  Target: LAMA2; (-) strand; PAM type: YTN; PAM sequence: TTT
ccaaagtcaatatgctagac

SEQ ID NO: 223752 - DNA, 20 bp, Artificial Sequence
  Description of Artificial Sequence: Synthetic oligonucleotide
  Target: LAMA2; (-) strand; PAM type: YTN; PAM sequence: TTG
tttccaaagtcaatatgcta

SEQ ID NO: 223753 - DNA, 20 bp, Artificial Sequence
  Description of Artificial Sequence: Synthetic oligonucleotide
  Target: LAMA2; (-) strand; PAM type: YTN; PAM sequence: TTT
gtttccaaagtcaatatgct

SEQ ID NO: 223754 - DNA, 20 bp, Artificial Sequence
  Description of Artificial Sequence: Synthetic oligonucleotide
  Target: LAMA2; (-) strand; PAM type: YTN; PAM sequence: TTT
tgtttccaaagtcaatatgc

SEQ ID NO: 223755 - DNA, 20 bp, Artificial Sequence
  Description of Artificial Sequence: Synthetic oligonucleotide
  Target: LAMA2; (-) strand; PAM type: YTN; PAM sequence: CTT
ttgtttccaaagtcaatatg

SEQ ID NO: 223756 - DNA, 20 bp, Artificial Sequence
  Description of Artificial Sequence: Synthetic oligonucleotide
  Target: LAMA2; (-) strand; PAM type: YTN; PAM sequence: CTA
caaatagaatgatgtctttt

SEQ ID NO: 223757 - DNA, 20 bp, Artificial Sequence
  Description of Artificial Sequence: Synthetic oligonucleotide
  Target: LAMA2; (-) strand; PAM type: YTN; PAM sequence: CTA
tcaaacacagaatgctacaa

SEQ ID NO: 223758 - DNA, 20 bp, Artificial Sequence
  Description of Artificial Sequence: Synthetic oligonucleotide
  Target: LAMA2; (-) strand; PAM type: YTN; PAM sequence: CTA
ctatcaaacacagaatgcta

SEQ ID NO: 223759 - DNA, 20 bp, Artificial Sequence
  Description of Artificial Sequence: Synthetic oligonucleotide
  Target: LAMA2; (-) strand; PAM type: YTN; PAM sequence: TTG
tatatggaaatactactatc

SEQ ID NO: 223760 - DNA, 20 bp, Artificial Sequence
  Description of Artificial Sequence: Synthetic oligonucleotide
  Target: LAMA2; (-) strand; PAM type: YTN; PAM sequence: TTT
gtatatggaaatactactat

SEQ ID NO: 223761 - DNA, 20 bp, Artificial Sequence
  Description of Artificial Sequence: Synthetic oligonucleotide
  Target: LAMA2; (-) strand; PAM type: YTN; PAM sequence: TTT
tgtatatggaaatactacta

SEQ ID NO: 223762 - DNA, 20 bp, Artificial Sequence
  Description of Artificial Sequence: Synthetic oligonucleotide
  Target: LAMA2; (-) strand; PAM type: YTN; PAM sequence: CTA
tattttgtatatggaaatac

SEQ ID NO: 223763 - DNA, 20 bp, Artificial Sequence
  Description of Artificial Sequence: Synthetic oligonucleotide
  Target: LAMA2; (-) strand; PAM type: YTN; PAM sequence: TTA
ctatattttgtatatggaaa

SEQ ID NO: 223764 - DNA, 20 bp, Artificial Sequence
  Description of Artificial Sequence: Synthetic oligonucleotide
  Target: LAMA2; (-) strand; PAM type: YTN; PAM sequence: TTC
agcaatcaataattactata

SEQ ID NO: 223765 - DNA, 20 bp, Artificial Sequence
  Description of Artificial Sequence: Synthetic oligonucleotide
  Target: LAMA2; (-) strand; PAM type: YTN; PAM sequence: TTT
cagcaatcaataattactat

SEQ ID NO: 223766 - DNA, 20 bp, Artificial Sequence
  Description of Artificial Sequence: Synthetic oligonucleotide
  Target: LAMA2; (-) strand; PAM type: YTN; PAM sequence: TTG
atttcagcaatcaataatta

SEQ ID NO: 223767 - DNA, 20 bp, Artificial Sequence
  Description of Artificial Sequence: Synthetic oligonucleotide
  Target: LAMA2; (-) strand; PAM type: YTN; PAM sequence: TTT
gatttcagcaatcaataatt

SEQ ID NO: 223768 - DNA, 20 bp, Artificial Sequence
  Description of Artificial Sequence: Synthetic oligonucleotide
  Target: LAMA2; (-) strand; PAM type: YTN; PAM sequence: CTA
ggatttgatttcagcaatca

SEQ ID NO: 223769 - DNA, 20 bp, Artificial Sequence
  Description of Artificial Sequence: Synthetic oligonucleotide
  Target: LAMA2; (-) strand; PAM type: YTN; PAM sequence: TTC
taggatttgatttcagcaat

SEQ ID NO: 223770 - DNA, 20 bp, Artificial Sequence
  Description of Artificial Sequence: Synthetic oligonucleotide
  Target: LAMA2; (-) strand; PAM type: YTN; PAM sequence: TTT
ctaggatttgatttcagcaa

SEQ ID NO: 223771 - DNA, 20 bp, Artificial Sequence
  Description of Artificial Sequence: Synthetic oligonucleotide
  Target: LAMA2; (-) strand; PAM type: YTN; PAM sequence: TTT
tctaggatttgatttcagca

SEQ ID NO: 223772 - DNA, 20 bp, Artificial Sequence
  Description of Artificial Sequence: Synthetic oligonucleotide
  Target: LAMA2; (-) strand; PAM type: YTN; PAM sequence: CTG
tattttctaggatttgattt

SEQ ID NO: 223773 - DNA, 20 bp, Artificial Sequence
  Description of Artificial Sequence: Synthetic oligonucleotide
  Target: LAMA2; (-) strand; PAM type: YTN; PAM sequence: TTA
tataggaatgctgtattttc

SEQ ID NO: 223774 - DNA, 20 bp, Artificial Sequence
  Description of Artificial Sequence: Synthetic oligonucleotide
  Target: LAMA2; (-) strand; PAM type: YTN; PAM sequence: TTT
atataggaatgctgtatttt

SEQ ID NO: 223775 - DNA, 20 bp, Artificial Sequence
  Description of Artificial Sequence: Synthetic oligonucleotide
  Target: LAMA2; (-) strand; PAM type: YTN; PAM sequence: TTT
tatataggaatgctgtattt

SEQ ID NO: 223776 - DNA, 20 bp, Artificial Sequence
  Description of Artificial Sequence: Synthetic oligonucleotide
  Target: LAMA2; (-) strand; PAM type: YTN; PAM sequence: TTT
ttatataggaatgctgtatt

SEQ ID NO: 223777 - DNA, 20 bp, Artificial Sequence
  Description of Artificial Sequence: Synthetic oligonucleotide
  Target: LAMA2; (-) strand; PAM type: YTN; PAM sequence: TTT
tttatataggaatgctgtat

SEQ ID NO: 223778 - DNA, 20 bp, Artificial Sequence
  Description of Artificial Sequence: Synthetic oligonucleotide
  Target: LAMA2; (-) strand; PAM type: YTN; PAM sequence: TTA
ataattttttatataggaat

SEQ ID NO: 223779 - DNA, 20 bp, Artificial Sequence
  Description of Artificial Sequence: Synthetic oligonucleotide
  Target: LAMA2; (-) strand; PAM type: YTN; PAM sequence: TTT
aataattttttatataggaa

SEQ ID NO: 223780 - DNA, 20 bp, Artificial Sequence
  Description of Artificial Sequence: Synthetic oligonucleotide
  Target: LAMA2; (-) strand; PAM type: YTN; PAM sequence: CTA
atgtaacagaaatgtatatg

SEQ ID NO: 223781 - DNA, 20 bp, Artificial Sequence
  Description of Artificial Sequence: Synthetic oligonucleotide
  Target: LAMA2; (-) strand; PAM type: YTN; PAM sequence: CTA
atcctaatgtaacagaaatg

SEQ ID NO: 223782 - DNA, 20 bp, Artificial Sequence
  Description of Artificial Sequence: Synthetic oligonucleotide
  Target: LAMA2; (-) strand; PAM type: YTN; PAM sequence: CTC
taatcctaatgtaacagaaa

SEQ ID NO: 223783 - DNA, 20 bp, Artificial Sequence
  Description of Artificial Sequence: Synthetic oligonucleotide
  Target: LAMA2; (-) strand; PAM type: YTN; PAM sequence: TTA
tctctaatcctaatgtaaca

SEQ ID NO: 223784 - DNA, 20 bp, Artificial Sequence
  Description of Artificial Sequence: Synthetic oligonucleotide
  Target: LAMA2; (-) strand; PAM type: YTN; PAM sequence: CTT
atctctaatcctaatgtaac

SEQ ID NO: 223785 - DNA, 20 bp, Artificial Sequence
  Description of Artificial Sequence: Synthetic oligonucleotide
  Target: LAMA2; (-) strand; PAM type: YTN; PAM sequence: CTA
aataaaacttatctctaatc

SEQ ID NO: 223786 - DNA, 20 bp, Artificial Sequence
  Description of Artificial Sequence: Synthetic oligonucleotide
  Target: LAMA2; (-) strand; PAM type: YTN; PAM sequence: TTC
taaataaaacttatctctaa

SEQ ID NO: 223787 - DNA, 20 bp, Artificial Sequence
  Description of Artificial Sequence: Synthetic oligonucleotide
  Target: LAMA2; (-) strand; PAM type: YTN; PAM sequence: TTT
ctaaataaaacttatctcta

SEQ ID NO: 223788 - DNA, 20 bp, Artificial Sequence
  Description of Artificial Sequence: Synthetic oligonucleotide
  Target: LAMA2; (-) strand; PAM type: YTN; PAM sequence: TTA
tttctaaataaaacttatct

SEQ ID NO: 223789 - DNA, 20 bp, Artificial Sequence
  Description of Artificial Sequence: Synthetic oligonucleotide
  Target: LAMA2; (-) strand; PAM type: YTN; PAM sequence: TTA
gagttatttctaaataaaac

SEQ ID NO: 223790 - DNA, 20 bp, Artificial Sequence
  Description of Artificial Sequence: Synthetic oligonucleotide
  Target: LAMA2; (-) strand; PAM type: YTN; PAM sequence: CTT
agagttatttctaaataaaa

SEQ ID NO: 223791 - DNA, 20 bp, Artificial Sequence
  Description of Artificial Sequence: Synthetic oligonucleotide
  Target: LAMA2; (-) strand; PAM type: YTN; PAM sequence: TTC
ttagagttatttctaaataa

SEQ ID NO: 223792 - DNA, 20 bp, Artificial Sequence
  Description of Artificial Sequence: Synthetic oligonucleotide
  Target: LAMA2; (-) strand; PAM type: YTN; PAM sequence: TTT
cttagagttatttctaaata

SEQ ID NO: 223793 - DNA, 20 bp, Artificial Sequence
  Description of Artificial Sequence: Synthetic oligonucleotide
  Target: LAMA2; (-) strand; PAM type: YTN; PAM sequence: TTC
aatgtgaaaataaaatataa

SEQ ID NO: 223794 - DNA, 20 bp, Artificial Sequence
  Description of Artificial Sequence: Synthetic oligonucleotide
  Target: LAMA2; (-) strand; PAM type: YTN; PAM sequence: TTT
caatgtgaaaataaaatata

SEQ ID NO: 223795 - DNA, 20 bp, Artificial Sequence
  Description of Artificial Sequence: Synthetic oligonucleotide
  Target: LAMA2; (-) strand; PAM type: YTN; PAM sequence: TTT
tcaatgtgaaaataaaatat

SEQ ID NO: 223796 - DNA, 20 bp, Artificial Sequence
  Description of Artificial Sequence: Synthetic oligonucleotide
  Target: LAMA2; (-) strand; PAM type: YTN; PAM sequence: TTA
ttttcaatgtgaaaataaaa

SEQ ID NO: 223797 - DNA, 20 bp, Artificial Sequence
  Description of Artificial Sequence: Synthetic oligonucleotide
  Target: LAMA2; (-) strand; PAM type: YTN; PAM sequence: CTT
attttcaatgtgaaaataaa

SEQ ID NO: 223798 - DNA, 20 bp, Artificial Sequence
  Description of Artificial Sequence: Synthetic oligonucleotide
  Target: LAMA2; (-) strand; PAM type: YTN; PAM sequence: CTG
acttattttcaatgtgaaaa

SEQ ID NO: 223799 - DNA, 20 bp, Artificial Sequence
  Description of Artificial Sequence: Synthetic oligonucleotide
  Target: LAMA2; (-) strand; PAM type: YTN; PAM sequence: CTG
aagcaaatctgacttatttt

SEQ ID NO: 223800 - DNA, 20 bp, Artificial Sequence
  Description of Artificial Sequence: Synthetic oligonucleotide
  Target: LAMA2; (-) strand; PAM type: YTN; PAM sequence: TTG
aggctgaagcaaatctgact

SEQ ID NO: 223801 - DNA, 20 bp, Artificial Sequence
  Description of Artificial Sequence: Synthetic oligonucleotide
  Target: LAMA2; (-) strand; PAM type: YTN; PAM sequence: TTT
gaggctgaagcaaatctgac

SEQ ID NO: 223802 - DNA, 20 bp, Artificial Sequence
  Description of Artificial Sequence: Synthetic oligonucleotide
  Target: LAMA2; (-) strand; PAM type: YTN; PAM sequence: TTT
tgaggctgaagcaaatctga

SEQ ID NO: 223803 - DNA, 20 bp, Artificial Sequence
  Description of Artificial Sequence: Synthetic oligonucleotide
  Target: LAMA2; (-) strand; PAM type: YTN; PAM sequence: TTT
ttgaggctgaagcaaatctg

SEQ ID NO: 223804 - DNA, 20 bp, Artificial Sequence
  Description of Artificial Sequence: Synthetic oligonucleotide
  Target: LAMA2; (-) strand; PAM type: YTN; PAM sequence: TTT
tttgaggctgaagcaaatct

SEQ ID NO: 223805 - DNA, 20 bp, Artificial Sequence
  Description of Artificial Sequence: Synthetic oligonucleotide
  Target: LAMA2; (-) strand; PAM type: YTN; PAM sequence: TTA
cataaacacattttttgagg

SEQ ID NO: 223806 - DNA, 20 bp, Artificial Sequence
  Description of Artificial Sequence: Synthetic oligonucleotide
  Target: LAMA2; (-) strand; PAM type: YTN; PAM sequence: TTT
acataaacacattttttgag

SEQ ID NO: 223807 - DNA, 20 bp, Artificial Sequence
  Description of Artificial Sequence: Synthetic oligonucleotide
  Target: LAMA2; (-) strand; PAM type: YTN; PAM sequence: TTT
tacataaacacattttttga

SEQ ID NO: 223808 - DNA, 20 bp, Artificial Sequence
  Description of Artificial Sequence: Synthetic oligonucleotide
  Target: LAMA2; (-) strand; PAM type: YTN; PAM sequence: TTA
attttacataaacacatttt

SEQ ID NO: 223809 - DNA, 20 bp, Artificial Sequence
  Description of Artificial Sequence: Synthetic oligonucleotide
  Target: LAMA2; (-) strand; PAM type: YTN; PAM sequence: TTT
aattttacataaacacattt

SEQ ID NO: 223810 - DNA, 20 bp, Artificial Sequence
  Description of Artificial Sequence: Synthetic oligonucleotide
  Target: LAMA2; (-) strand; PAM type: YTN; PAM sequence: CTC
atttaattttacataaacac

SEQ ID NO: 223811 - DNA, 20 bp, Artificial Sequence
  Description of Artificial Sequence: Synthetic oligonucleotide
  Target: LAMA2; (-) strand; PAM type: YTN; PAM sequence: CTC
tcatttaattttacataaac

SEQ ID NO: 223812 - DNA, 20 bp, Artificial Sequence
  Description of Artificial Sequence: Synthetic oligonucleotide
  Target: LAMA2; (-) strand; PAM type: YTN; PAM sequence: CTG
ccagctctcatttaatttta

SEQ ID NO: 223813 - DNA, 20 bp, Artificial Sequence
  Description of Artificial Sequence: Synthetic oligonucleotide
  Target: LAMA2; (-) strand; PAM type: YTN; PAM sequence: CTC
actgccagctctcatttaat

SEQ ID NO: 223814 - DNA, 20 bp, Artificial Sequence
  Description of Artificial Sequence: Synthetic oligonucleotide
  Target: LAMA2; (-) strand; PAM type: YTN; PAM sequence: TTA
ggaaaaaaaatgtacagctc

SEQ ID NO: 223815 - DNA, 20 bp, Artificial Sequence
  Description of Artificial Sequence: Synthetic oligonucleotide
  Target: LAMA2; (-) strand; PAM type: YTN; PAM sequence: TTA
acccataacccatgtcccat

SEQ ID NO: 223816 - DNA, 20 bp, Artificial Sequence
  Description of Artificial Sequence: Synthetic oligonucleotide
  Target: LAMA2; (-) strand; PAM type: YTN; PAM sequence: TTT
aacccataacccatgtccca

SEQ ID NO: 223817 - DNA, 20 bp, Artificial Sequence
  Description of Artificial Sequence: Synthetic oligonucleotide
  Target: LAMA2; (-) strand; PAM type: YTN; PAM sequence: CTT
taacccataacccatgtccc

SEQ ID NO: 223818 - DNA, 20 bp, Artificial Sequence
  Description of Artificial Sequence: Synthetic oligonucleotide
  Target: LAMA2; (-) strand; PAM type: YTN; PAM sequence: TTG
tacatctttaacccataacc

SEQ ID NO: 223819 - DNA, 20 bp, Artificial Sequence
  Description of Artificial Sequence: Synthetic oligonucleotide
  Target: LAMA2; (-) strand; PAM type: YTN; PAM sequence: CTT
gtacatctttaacccataac

SEQ ID NO: 223820 - DNA, 20 bp, Artificial Sequence
  Description of Artificial Sequence: Synthetic oligonucleotide
  Target: LAMA2; (-) strand; PAM type: YTN; PAM sequence: TTA
caggcatgagccaccgtgcc

SEQ ID NO: 223821 - DNA, 20 bp, Artificial Sequence
  Description of Artificial Sequence: Synthetic oligonucleotide
  Target: LAMA2; (-) strand; PAM type: YTN; PAM sequence: TTG
ggattacaggcatgagccac

SEQ ID NO: 223822 - DNA, 20 bp, Artificial Sequence
  Description of Artificial Sequence: Synthetic oligonucleotide
  Target: LAMA2; (-) strand; PAM type: YTN; PAM sequence: CTC
acaaagtgttgggattacag

SEQ ID NO: 223823 - DNA, 20 bp, Artificial Sequence
  Description of Artificial Sequence: Synthetic oligonucleotide
  Target: LAMA2; (-) strand; PAM type: YTN; PAM sequence: CTC
agcctcacaaagtgttggga

SEQ ID NO: 223824 - DNA, 20 bp, Artificial Sequence
  Description of Artificial Sequence: Synthetic oligonucleotide
  Target: LAMA2; (-) strand; PAM type: YTN; PAM sequence: TTG
cctcagcctcacaaagtgtt

SEQ ID NO: 223825 - DNA, 20 bp, Artificial Sequence
  Description of Artificial Sequence: Synthetic oligonucleotide
  Target: LAMA2; (-) strand; PAM type: YTN; PAM sequence: CTT
gcctcagcctcacaaagtgt

SEQ ID NO: 223826 - DNA, 20 bp, Artificial Sequence
  Description of Artificial Sequence: Synthetic oligonucleotide
  Target: LAMA2; (-) strand; PAM type: YTN; PAM sequence: CTC
aggtgatccacttgcctcag

SEQ ID NO: 223827 - DNA, 20 bp, Artificial Sequence
  Description of Artificial Sequence: Synthetic oligonucleotide
  Target: LAMA2; (-) strand; PAM type: YTN; PAM sequence: CTA
acctcaggtgatccacttgc

SEQ ID NO: 223828 - DNA, 20 bp, Artificial Sequence
  Description of Artificial Sequence: Synthetic oligonucleotide
  Target: LAMA2; (-) strand; PAM type: YTN; PAM sequence: CTC
ctaacctcaggtgatccact

SEQ ID NO: 223829 - DNA, 20 bp, Artificial Sequence
  Description of Artificial Sequence: Synthetic oligonucleotide
  Target: LAMA2; (-) strand; PAM type: YTN; PAM sequence: CTC
aaactcctaacctcaggtga

SEQ ID NO: 223830 - DNA, 20 bp, Artificial Sequence
  Description of Artificial Sequence: Synthetic oligonucleotide
  Target: LAMA2; (-) strand; PAM type: YTN; PAM sequence: CTG
gtctcaaactcctaacctca

SEQ ID NO: 223831 - DNA, 20 bp, Artificial Sequence
  Description of Artificial Sequence: Synthetic oligonucleotide
  Target: LAMA2; (-) strand; PAM type: YTN; PAM sequence: TTG
gtaaggctggtctcaaactc

SEQ ID NO: 223832 - DNA, 20 bp, Artificial Sequence
  Description of Artificial Sequence: Synthetic oligonucleotide
  Target: LAMA2; (-) strand; PAM type: YTN; PAM sequence: TTC
accatattggtaaggctggt

SEQ ID NO: 223833 - DNA, 20 bp, Artificial Sequence
  Description of Artificial Sequence: Synthetic oligonucleotide
  Target: LAMA2; (-) strand; PAM type: YTN; PAM sequence: TTT
caccatattggtaaggctgg

SEQ ID NO: 223834 - DNA, 20 bp, Artificial Sequence
  Description of Artificial Sequence: Synthetic oligonucleotide
  Target: LAMA2; (-) strand; PAM type: YTN; PAM sequence: TTA
gtagagatggagtttcacca

SEQ ID NO: 223835 - DNA, 20 bp, Artificial Sequence
  Description of Artificial Sequence: Synthetic oligonucleotide
  Target: LAMA2; (-) strand; PAM type: YTN; PAM sequence: TTT
agtagagatggagtttcacc

SEQ ID NO: 223836 - DNA, 20 bp, Artificial Sequence
  Description of Artificial Sequence: Synthetic oligonucleotide
  Target: LAMA2; (-) strand; PAM type: YTN; PAM sequence: TTG
tatttagtagagatggagtt

SEQ ID NO: 223837 - DNA, 20 bp, Artificial Sequence
  Description of Artificial Sequence: Synthetic oligonucleotide
  Target: LAMA2; (-) strand; PAM type: YTN; PAM sequence: TTT
gtatttagtagagatggagt

SEQ ID NO: 223838 - DNA, 20 bp, Artificial Sequence
  Description of Artificial Sequence: Synthetic oligonucleotide
  Target: LAMA2; (-) strand; PAM type: YTN; PAM sequence: TTT
tgtatttagtagagatggag

SEQ ID NO: 223839 - DNA, 20 bp, Artificial Sequence
  Description of Artificial Sequence: Synthetic oligonucleotide
  Target: LAMA2; (-) strand; PAM type: YTN; PAM sequence: TTT
ttgtatttagtagagatgga

SEQ ID NO: 223840 - DNA, 20 bp, Artificial Sequence
  Description of Artificial Sequence: Synthetic oligonucleotide
  Target: LAMA2; (-) strand; PAM type: YTN; PAM sequence: TTT
tttgtatttagtagagatgg

SEQ ID NO: 223841 - DNA, 20 bp, Artificial Sequence
  Description of Artificial Sequence: Synthetic oligonucleotide
  Target: LAMA2; (-) strand; PAM type: YTN; PAM sequence: TTT
ttttgtatttagtagagatg

SEQ ID NO: 223842 - DNA, 20 bp, Artificial Sequence
  Description of Artificial Sequence: Synthetic oligonucleotide
  Target: LAMA2; (-) strand; PAM type: YTN; PAM sequence: TTT
tttttgtatttagtagagat

SEQ ID NO: 223843 - DNA, 20 bp, Artificial Sequence
  Description of Artificial Sequence: Synthetic oligonucleotide
  Target: LAMA2; (-) strand; PAM type: YTN; PAM sequence: TTT
ttttttgtatttagtagaga

SEQ ID NO: 223844 - DNA, 20 bp, Artificial Sequence
  Description of Artificial Sequence: Synthetic oligonucleotide
  Target: LAMA2; (-) strand; PAM type: YTN; PAM sequence: TTT
tttttttgtatttagtagag

SEQ ID NO: 223845 - DNA, 20 bp, Artificial Sequence
  Description of Artificial Sequence: Synthetic oligonucleotide
  Target: LAMA2; (-) strand; PAM type: YTN; PAM sequence: TTT
ttttttttgtatttagtaga

SEQ ID NO: 223846 - DNA, 20 bp, Artificial Sequence
  Description of Artificial Sequence: Synthetic oligonucleotide
  Target: LAMA2; (-) strand; PAM type: YTN; PAM sequence: TTT
tttttttttgtatttagtag

SEQ ID NO: 223847 - DNA, 20 bp, Artificial Sequence
  Description of Artificial Sequence: Synthetic oligonucleotide
  Target: LAMA2; (-) strand; PAM type: YTN; PAM sequence: TTT
ttttttttttgtatttagta

SEQ ID NO: 223848 - DNA, 20 bp, Artificial Sequence
  Description of Artificial Sequence: Synthetic oligonucleotide
  Target: LAMA2; (-) strand; PAM type: YTN; PAM sequence: TTT
tttttttttttgtatttagt

SEQ ID NO: 223849 - DNA, 20 bp, Artificial Sequence
  Description of Artificial Sequence: Synthetic oligonucleotide
  Target: LAMA2; (-) strand; PAM type: YTN; PAM sequence: TTT
ttttttttttttgtatttag

SEQ ID NO: 223850 - DNA, 20 bp, Artificial Sequence
  Description of Artificial Sequence: Synthetic oligonucleotide
  Target: LAMA2; (-) strand; PAM type: YTN; PAM sequence: TTT
tttttttttttttgtattta

SEQ ID NO: 223851 - DNA, 20 bp, Artificial Sequence
  Description of Artificial Sequence: Synthetic oligonucleotide
  Target: LAMA2; (-) strand; PAM type: YTN; PAM sequence: TTT
ttttttttttttttgtattt

SEQ ID NO: 223852 - DNA, 20 bp, Artificial Sequence
  Description of Artificial Sequence: Synthetic oligonucleotide
  Target: LAMA2; (-) strand; PAM type: YTN; PAM sequence: TTT
tttttttttttttttgtatt

SEQ ID NO: 223853 - DNA, 20 bp, Artificial Sequence
  Description of Artificial Sequence: Synthetic oligonucleotide
  Target: LAMA2; (-) strand; PAM type: YTN; PAM sequence: TTT
ttttttttttttttttgtat

SEQ ID NO: 223854 - DNA, 20 bp, Artificial Sequence
  Description of Artificial Sequence: Synthetic oligonucleotide
  Target: LAMA2; (-) strand; PAM type: YTN; PAM sequence: TTT
tttttttttttttttttgta

SEQ ID NO: 223855 - DNA, 20 bp, Artificial Sequence
  Description of Artificial Sequence: Synthetic oligonucleotide
  Target: LAMA2; (-) strand; PAM type: YTN; PAM sequence: CTA
attttttttttttttttttt

SEQ ID NO: 223856 - DNA, 20 bp, Artificial Sequence
  Description of Artificial Sequence: Synthetic oligonucleotide
  Target: LAMA2; (-) strand; PAM type: YTN; PAM sequence: CTG
gctaattttttttttttttt

SEQ ID NO: 223857 - DNA, 20 bp, Artificial Sequence
  Description of Artificial Sequence: Synthetic oligonucleotide
  Target: LAMA2; (-) strand; PAM type: YTN; PAM sequence: CTG
cgcctggctaattttttttt

SEQ ID NO: 223858 - DNA, 20 bp, Artificial Sequence
  Description of Artificial Sequence: Synthetic oligonucleotide
  Target: LAMA2; (-) strand; PAM type: YTN; PAM sequence: TTA
caggcaggtgccactgcgcc

SEQ ID NO: 223859 - DNA, 20 bp, Artificial Sequence
  Description of Artificial Sequence: Synthetic oligonucleotide
  Target: LAMA2; (-) strand; PAM type: YTN; PAM sequence: CTG
gattacaggcaggtgccact

SEQ ID NO: 223860 - DNA, 20 bp, Artificial Sequence
  Description of Artificial Sequence: Synthetic oligonucleotide
  Target: LAMA2; (-) strand; PAM type: YTN; PAM sequence: CTC
ccaagtagctggattacagg

SEQ ID NO: 223861 - DNA, 20 bp, Artificial Sequence
  Description of Artificial Sequence: Synthetic oligonucleotide
  Target: LAMA2; (-) strand; PAM type: YTN; PAM sequence: CTC
agcctcccaagtagctggat

SEQ ID NO: 223862 - DNA, 20 bp, Artificial Sequence
  Description of Artificial Sequence: Synthetic oligonucleotide
  Target: LAMA2; (-) strand; PAM type: YTN; PAM sequence: CTG
cctcagcctcccaagtagct

SEQ ID NO: 223863 - DNA, 20 bp, Artificial Sequence
  Description of Artificial Sequence: Synthetic oligonucleotide
  Target: LAMA2; (-) strand; PAM type: YTN; PAM sequence: CTC
ctgcctcagcctcccaagta

SEQ ID NO: 223864 - DNA, 20 bp, Artificial Sequence
  Description of Artificial Sequence: Synthetic oligonucleotide
  Target: LAMA2; (-) strand; PAM type: YTN; PAM sequence: TTC
tcctgcctcagcctcccaag

SEQ ID NO: 223865 - DNA, 20 bp, Artificial Sequence
  Description of Artificial Sequence: Synthetic oligonucleotide
  Target: LAMA2; (-) strand; PAM type: YTN; PAM sequence: TTC
aagcaattctcctgcctcag

SEQ ID NO: 223866 - DNA, 20 bp, Artificial Sequence
  Description of Artificial Sequence: Synthetic oligonucleotide
  Target: LAMA2; (-) strand; PAM type: YTN; PAM sequence: CTC
ccaggttcaagcaattctcc

SEQ ID NO: 223867 - DNA, 20 bp, Artificial Sequence
  Description of Artificial Sequence: Synthetic oligonucleotide
  Target: LAMA2; (-) strand; PAM type: YTN; PAM sequence: CTG
cctcccaggttcaagcaatt

SEQ ID NO: 223868 - DNA, 20 bp, Artificial Sequence
  Description of Artificial Sequence: Synthetic oligonucleotide
  Target: LAMA2; (-) strand; PAM type: YTN; PAM sequence: CTC
tgcctcccaggttcaagcaa

SEQ ID NO: 223869 - DNA, 20 bp, Artificial Sequence
  Description of Artificial Sequence: Synthetic oligonucleotide
  Target: LAMA2; (-) strand; PAM type: YTN; PAM sequence: CTG
caacctctgcctcccaggtt

SEQ ID NO: 223870 - DNA, 20 bp, Artificial Sequence
  Description of Artificial Sequence: Synthetic oligonucleotide
  Target: LAMA2; (-) strand; PAM type: YTN; PAM sequence: CTC
actgcaacctctgcctccca

SEQ ID NO: 223871 - DNA, 20 bp, Artificial Sequence
  Description of Artificial Sequence: Synthetic oligonucleotide
  Target: LAMA2; (-) strand; PAM type: YTN; PAM sequence: TTG
gctcactgcaacctctgcct

SEQ ID NO: 223872 - DNA, 20 bp, Artificial Sequence
  Description of Artificial Sequence: Synthetic oligonucleotide
  Target: LAMA2; (-) strand; PAM type: YTN; PAM sequence: CTT
ggctcactgcaacctctgcc

SEQ ID NO: 223873 - DNA, 20 bp, Artificial Sequence
  Description of Artificial Sequence: Synthetic oligonucleotide
  Target: LAMA2; (-) strand; PAM type: YTN; PAM sequence: TTG
tccaggatggagtgcaatgg

SEQ ID NO: 223874 - DNA, 20 bp, Artificial Sequence
  Description of Artificial Sequence: Synthetic oligonucleotide
  Target: LAMA2; (-) strand; PAM type: YTN; PAM sequence: CTG
ttgtccaggatggagtgcaa

SEQ ID NO: 223875 - DNA, 20 bp, Artificial Sequence
  Description of Artificial Sequence: Synthetic oligonucleotide
  Target: LAMA2; (-) strand; PAM type: YTN; PAM sequence: CTC
tgttgtccaggatggagtgc

SEQ ID NO: 223876 - DNA, 20 bp, Artificial Sequence
  Description of Artificial Sequence: Synthetic oligonucleotide
  Target: LAMA2; (-) strand; PAM type: YTN; PAM sequence: CTG
ctctgttgtccaggatggag

SEQ ID NO: 223877 - DNA, 20 bp, Artificial Sequence
  Description of Artificial Sequence: Synthetic oligonucleotide
  Target: LAMA2; (-) strand; PAM type: YTN; PAM sequence: CTG
cgtcctgctctgttgtccag

SEQ ID NO: 223878 - DNA, 20 bp, Artificial Sequence
  Description of Artificial Sequence: Synthetic oligonucleotide
  Target: LAMA2; (-) strand; PAM type: YTN; PAM sequence: TTC
cagactgcgtcctgctctgt

SEQ ID NO: 223879 - DNA, 20 bp, Artificial Sequence
  Description of Artificial Sequence: Synthetic oligonucleotide
  Target: LAMA2; (-) strand; PAM type: YTN; PAM sequence: TTT
ccagactgcgtcctgctctg

SEQ ID NO: 223880 - DNA, 20 bp, Artificial Sequence
  Description of Artificial Sequence: Synthetic oligonucleotide
  Target: LAMA2; (-) strand; PAM type: YTN; PAM sequence: TTT
tccagactgcgtcctgctct

SEQ ID NO: 223881 - DNA, 20 bp, Artificial Sequence
  Description of Artificial Sequence: Synthetic oligonucleotide
  Target: LAMA2; (-) strand; PAM type: YTN; PAM sequence: TTT
ttccagactgcgtcctgctc

SEQ ID NO: 223882 - DNA, 20 bp, Artificial Sequence
  Description of Artificial Sequence: Synthetic oligonucleotide
  Target: LAMA2; (-) strand; PAM type: YTN; PAM sequence: TTT
tttccagactgcgtcctgct

SEQ ID NO: 223883 - DNA, 20 bp, Artificial Sequence
  Description of Artificial Sequence: Synthetic oligonucleotide
  Target: LAMA2; (-) strand; PAM type: YTN; PAM sequence: TTT
ttttccagactgcgtcctgc

SEQ ID NO: 223884 - DNA, 20 bp, Artificial Sequence
  Description of Artificial Sequence: Synthetic oligonucleotide
  Target: LAMA2; (-) strand; PAM type: YTN; PAM sequence: TTT
tttttccagactgcgtcctg

SEQ ID NO: 223885 - DNA, 20 bp, Artificial Sequence
  Description of Artificial Sequence: Synthetic oligonucleotide
  Target: LAMA2; (-) strand; PAM type: YTN; PAM sequence: TTT
ttttttccagactgcgtcct

SEQ ID NO: 223886 - DNA, 20 bp, Artificial Sequence
  Description of Artificial Sequence: Synthetic oligonucleotide
  Target: LAMA2; (-) strand; PAM type: YTN; PAM sequence: TTT
tttttttccagactgcgtcc

SEQ ID NO: 223887 - DNA, 20 bp, Artificial Sequence
  Description of Artificial Sequence: Synthetic oligonucleotide
  Target: LAMA2; (-) strand; PAM type: YTN; PAM sequence: TTT
ttttttttccagactgcgtc

SEQ ID NO: 223888 - DNA, 20 bp, Artificial Sequence
  Description of Artificial Sequence: Synthetic oligonucleotide
  Target: LAMA2; (-) strand; PAM type: YTN; PAM sequence: TTT
tttttttttccagactgcgt

SEQ ID NO: 223889 - DNA, 20 bp, Artificial Sequence
  Description of Artificial Sequence: Synthetic oligonucleotide
  Target: LAMA2; (-) strand; PAM type: YTN; PAM sequence: TTT
ttttttttttccagactgcg

SEQ ID NO: 223890 - DNA, 20 bp, Artificial Sequence
  Description of Artificial Sequence: Synthetic oligonucleotide
  Target: LAMA2; (-) strand; PAM type: YTN; PAM sequence: CTT
tttttttttttccagactgc

SEQ ID NO: 223891 - DNA, 20 bp, Artificial Sequence
  Description of Artificial Sequence: Synthetic oligonucleotide
  Target: LAMA2; (-) strand; PAM type: YTN; PAM sequence: TTA
cactttttttttttttccag

SEQ ID NO: 223892 - DNA, 20 bp, Artificial Sequence
  Description of Artificial Sequence: Synthetic oligonucleotide
  Target: LAMA2; (-) strand; PAM type: YTN; PAM sequence: TTT
acactttttttttttttcca

SEQ ID NO: 223893 - DNA, 20 bp, Artificial Sequence
  Description of Artificial Sequence: Synthetic oligonucleotide
  Target: LAMA2; (-) strand; PAM type: YTN; PAM sequence: TTT
tacactttttttttttttcc

SEQ ID NO: 223894 - DNA, 20 bp, Artificial Sequence
  Description of Artificial Sequence: Synthetic oligonucleotide
  Target: LAMA2; (-) strand; PAM type: YTN; PAM sequence: CTT
ttacactttttttttttttc

SEQ ID NO: 223895 - DNA, 20 bp, Artificial Sequence
  Description of Artificial Sequence: Synthetic oligonucleotide
  Target: LAMA2; (-) strand; PAM type: YTN; PAM sequence: CTA
gcttttacactttttttttt

SEQ ID NO: 223896 - DNA, 20 bp, Artificial Sequence
  Description of Artificial Sequence: Synthetic oligonucleotide
  Target: LAMA2; (-) strand; PAM type: YTN; PAM sequence: CTC
tagcttttacactttttttt

SEQ ID NO: 223897 - DNA, 20 bp, Artificial Sequence
  Description of Artificial Sequence: Synthetic oligonucleotide
  Target: LAMA2; (-) strand; PAM type: YTN; PAM sequence: TTG
tggaggccagggcctctagc

SEQ ID NO: 223898 - DNA, 20 bp, Artificial Sequence
  Description of Artificial Sequence: Synthetic oligonucleotide
  Target: LAMA2; (-) strand; PAM type: YTN; PAM sequence: CTT
gtggaggccagggcctctag

SEQ ID NO: 223899 - DNA, 20 bp, Artificial Sequence
  Description of Artificial Sequence: Synthetic oligonucleotide
  Target: LAMA2; (-) strand; PAM type: YTN; PAM sequence: TTG
tgggcttgtggaggccaggg

SEQ ID NO: 223900 - DNA, 20 bp, Artificial Sequence
  Description of Artificial Sequence: Synthetic oligonucleotide
  Target: LAMA2; (-) strand; PAM type: YTN; PAM sequence: CTA
aattgtgggcttgtggaggc

SEQ ID NO: 223901 - DNA, 20 bp, Artificial Sequence
  Description of Artificial Sequence: Synthetic oligonucleotide
  Target: LAMA2; (-) strand; PAM type: YTN; PAM sequence: TTA
aaatcataaagaagaagaat

SEQ ID NO: 223902 - DNA, 20 bp, Artificial Sequence
  Description of Artificial Sequence: Synthetic oligonucleotide
  Target: LAMA2; (-) strand; PAM type: YTN; PAM sequence: CTT
aaaatcataaagaagaagaa

SEQ ID NO: 223903 - DNA, 20 bp, Artificial Sequence
  Description of Artificial Sequence: Synthetic oligonucleotide
  Target: LAMA2; (-) strand; PAM type: YTN; PAM sequence: CTG
acaaggtcttaaaatcataa

SEQ ID NO: 223904 - DNA, 20 bp, Artificial Sequence
  Description of Artificial Sequence: Synthetic oligonucleotide
  Target: LAMA2; (-) strand; PAM type: YTN; PAM sequence: TTC
ctgacaaggtcttaaaatca

SEQ ID NO: 223905 - DNA, 20 bp, Artificial Sequence
  Description of Artificial Sequence: Synthetic oligonucleotide
  Target: LAMA2; (-) strand; PAM type: YTN; PAM sequence: CTG
ataatcccaaagtattcctg

SEQ ID NO: 223906 - DNA, 20 bp, Artificial Sequence
  Description of Artificial Sequence: Synthetic oligonucleotide
  Target: LAMA2; (-) strand; PAM type: YTN; PAM sequence: CTA
ctgataatcccaaagtattc

SEQ ID NO: 223907 - DNA, 20 bp, Artificial Sequence
  Description of Artificial Sequence: Synthetic oligonucleotide
  Target: LAMA2; (-) strand; PAM type: YTN; PAM sequence: CTA
actactgataatcccaaagt

SEQ ID NO: 223908 - DNA, 20 bp, Artificial Sequence
  Description of Artificial Sequence: Synthetic oligonucleotide
  Target: LAMA2; (-) strand; PAM type: YTN; PAM sequence: TTG
gtcctaactactgataatcc

SEQ ID NO: 223909 - DNA, 20 bp, Artificial Sequence
  Description of Artificial Sequence: Synthetic oligonucleotide
  Target: LAMA2; (-) strand; PAM type: YTN; PAM sequence: CTT
ggtcctaactactgataatc

SEQ ID NO: 223910 - DNA, 20 bp, Artificial Sequence
  Description of Artificial Sequence: Synthetic oligonucleotide
  Target: LAMA2; (-) strand; PAM type: YTN; PAM sequence: CTA
taaaatatgaaatatcttgg

SEQ ID NO: 223911 - DNA, 20 bp, Artificial Sequence
  Description of Artificial Sequence: Synthetic oligonucleotide
  Target: LAMA2; (-) strand; PAM type: YTN; PAM sequence: CTG
ctataaaatatgaaatatct

SEQ ID NO: 223912 - DNA, 20 bp, Artificial Sequence
  Description of Artificial Sequence: Synthetic oligonucleotide
  Target: LAMA2; (-) strand; PAM type: YTN; PAM sequence: CTC
tgctataaaatatgaaatat

SEQ ID NO: 223913 - DNA, 20 bp, Artificial Sequence
  Description of Artificial Sequence: Synthetic oligonucleotide
  Target: LAMA2; (-) strand; PAM type: YTN; PAM sequence: TTG
tctctgctataaaatatgaa

SEQ ID NO: 223914 - DNA, 20 bp, Artificial Sequence
  Description of Artificial Sequence: Synthetic oligonucleotide
  Target: LAMA2; (-) strand; PAM type: YTN; PAM sequence: TTA
taaaatgcacagatagagtt

SEQ ID NO: 223915 - DNA, 20 bp, Artificial Sequence
  Description of Artificial Sequence: Synthetic oligonucleotide
  Target: LAMA2; (-) strand; PAM type: YTN; PAM sequence: CTT
ataaaatgcacagatagagt

SEQ ID NO: 223916 - DNA, 20 bp, Artificial Sequence
  Description of Artificial Sequence: Synthetic oligonucleotide
  Target: LAMA2; (-) strand; PAM type: YTN; PAM sequence: TTA
atcttataaaatgcacagat

SEQ ID NO: 223917 - DNA, 20 bp, Artificial Sequence
  Description of Artificial Sequence: Synthetic oligonucleotide
  Target: LAMA2; (-) strand; PAM type: YTN; PAM sequence: TTC
aacaagaaacataccaatgg

SEQ ID NO: 223918 - DNA, 20 bp, Artificial Sequence
  Description of Artificial Sequence: Synthetic oligonucleotide
  Target: LAMA2; (-) strand; PAM type: YTN; PAM sequence: TTA
tatagaaattcaacaagaaa

SEQ ID NO: 223919 - DNA, 20 bp, Artificial Sequence
  Description of Artificial Sequence: Synthetic oligonucleotide
  Target: LAMA2; (-) strand; PAM type: YTN; PAM sequence: TTT
atatagaaattcaacaagaa

SEQ ID NO: 223920 - DNA, 20 bp, Artificial Sequence
  Description of Artificial Sequence: Synthetic oligonucleotide
  Target: LAMA2; (-) strand; PAM type: YTN; PAM sequence: CTT
tatatagaaattcaacaaga

SEQ ID NO: 223921 - DNA, 20 bp, Artificial Sequence
  Description of Artificial Sequence: Synthetic oligonucleotide
  Target: LAMA2; (-) strand; PAM type: YTN; PAM sequence: CTC
atcacgtagaatgtctttat

SEQ ID NO: 223922 - DNA, 20 bp, Artificial Sequence
  Description of Artificial Sequence: Synthetic oligonucleotide
  Target: LAMA2; (-) strand; PAM type: YTN; PAM sequence: TTG
aacaactcatcacgtagaat

SEQ ID NO: 223923 - DNA, 20 bp, Artificial Sequence
  Description of Artificial Sequence: Synthetic oligonucleotide
  Target: LAMA2; (-) strand; PAM type: YTN; PAM sequence: TTC
atattgaacaactcatcacg

SEQ ID NO: 223924 - DNA, 20 bp, Artificial Sequence
  Description of Artificial Sequence: Synthetic oligonucleotide
  Target: LAMA2; (-) strand; PAM type: YTN; PAM sequence: TTA
gacagttcatattgaacaac

SEQ ID NO: 223925 - DNA, 20 bp, Artificial Sequence
  Description of Artificial Sequence: Synthetic oligonucleotide
  Target: LAMA2; (-) strand; PAM type: YTN; PAM sequence: TTT
agacagttcatattgaacaa

SEQ ID NO: 223926 - DNA, 20 bp, Artificial Sequence
  Description of Artificial Sequence: Synthetic oligonucleotide
  Target: LAMA2; (-) strand; PAM type: YTN; PAM sequence: TTT
tagacagttcatattgaaca

SEQ ID NO: 223927 - DNA, 20 bp, Artificial Sequence
  Description of Artificial Sequence: Synthetic oligonucleotide
  Target: LAMA2; (-) strand; PAM type: YTN; PAM sequence: TTT
ttagacagttcatattgaac

SEQ ID NO: 223928 - DNA, 20 bp, Artificial Sequence
  Description of Artificial Sequence: Synthetic oligonucleotide
  Target: LAMA2; (-) strand; PAM type: YTN; PAM sequence: TTT
tttagacagttcatattgaa

SEQ ID NO: 223929 - DNA, 20 bp, Artificial Sequence
  Description of Artificial Sequence: Synthetic oligonucleotide
  Target: LAMA2; (-) strand; PAM type: YTN; PAM sequence: TTG
ttttttagacagttcatatt

SEQ ID NO: 223930 - DNA, 20 bp, Artificial Sequence
  Description of Artificial Sequence: Synthetic oligonucleotide
  Target: LAMA2; (-) strand; PAM type: YTN; PAM sequence: TTC
ataaggaattgttttttaga

SEQ ID NO: 223931 - DNA, 20 bp, Artificial Sequence
  Description of Artificial Sequence: Synthetic oligonucleotide
  Target: LAMA2; (-) strand; PAM type: YTN; PAM sequence: TTA
ttcataaggaattgtttttt

SEQ ID NO: 223932 - DNA, 20 bp, Artificial Sequence
  Description of Artificial Sequence: Synthetic oligonucleotide
  Target: LAMA2; (-) strand; PAM type: YTN; PAM sequence: TTA
ggtattattcataaggaatt

SEQ ID NO: 223933 - DNA, 20 bp, Artificial Sequence
  Description of Artificial Sequence: Synthetic oligonucleotide
  Target: LAMA2; (-) strand; PAM type: YTN; PAM sequence: TTT
aggtattattcataaggaat

SEQ ID NO: 223934 - DNA, 20 bp, Artificial Sequence
  Description of Artificial Sequence: Synthetic oligonucleotide
  Target: LAMA2; (-) strand; PAM type: YTN; PAM sequence: TTT
taggtattattcataaggaa

SEQ ID NO: 223935 - DNA, 20 bp, Artificial Sequence
  Description of Artificial Sequence: Synthetic oligonucleotide
  Target: LAMA2; (-) strand; PAM type: YTN; PAM sequence: TTT
ttaggtattattcataagga

SEQ ID NO: 223936 - DNA, 20 bp, Artificial Sequence
  Description of Artificial Sequence: Synthetic oligonucleotide
  Target: LAMA2; (-) strand; PAM type: YTN; PAM sequence: TTA
tgcatttttaggtattattc

SEQ ID NO: 223937 - DNA, 20 bp, Artificial Sequence
  Description of Artificial Sequence: Synthetic oligonucleotide
  Target: LAMA2; (-) strand; PAM type: YTN; PAM sequence: CTT
atgcatttttaggtattatt

SEQ ID NO: 223938 - DNA, 20 bp, Artificial Sequence
  Description of Artificial Sequence: Synthetic oligonucleotide
  Target: LAMA2; (-) strand; PAM type: YTN; PAM sequence: CTA
cttatgcatttttaggtatt

SEQ ID NO: 223939 - DNA, 20 bp, Artificial Sequence
  Description of Artificial Sequence: Synthetic oligonucleotide
  Target: LAMA2; (-) strand; PAM type: YTN; PAM sequence: TTG
ctacttatgcatttttaggt

SEQ ID NO: 223940 - DNA, 20 bp, Artificial Sequence
  Description of Artificial Sequence: Synthetic oligonucleotide
  Target: LAMA2; (-) strand; PAM type: YTN; PAM sequence: TTT
gctacttatgcatttttagg

SEQ ID NO: 223941 - DNA, 20 bp, Artificial Sequence
  Description of Artificial Sequence: Synthetic oligonucleotide
  Target: LAMA2; (-) strand; PAM type: YTN; PAM sequence: CTA
taaaagatatttgctactta

SEQ ID NO: 223942 - DNA, 20 bp, Artificial Sequence
  Description of Artificial Sequence: Synthetic oligonucleotide
  Target: LAMA2; (-) strand; PAM type: YTN; PAM sequence: TTA
catcaaccactataaaagat

SEQ ID NO: 223943 - DNA, 20 bp, Artificial Sequence
  Description of Artificial Sequence: Synthetic oligonucleotide
  Target: LAMA2; (-) strand; PAM type: YTN; PAM sequence: TTA
aaataaagacaaagtaaaat

SEQ ID NO: 223944 - DNA, 20 bp, Artificial Sequence
  Description of Artificial Sequence: Synthetic oligonucleotide
  Target: LAMA2; (-) strand; PAM type: YTN; PAM sequence: TTT
aaaataaagacaaagtaaaa

SEQ ID NO: 223945 - DNA, 20 bp, Artificial Sequence
  Description of Artificial Sequence: Synthetic oligonucleotide
  Target: LAMA2; (-) strand; PAM type: YTN; PAM sequence: CTT
taaaataaagacaaagtaaa

SEQ ID NO: 223946 - DNA, 20 bp, Artificial Sequence
  Description of Artificial Sequence: Synthetic oligonucleotide
  Target: LAMA2; (-) strand; PAM type: YTN; PAM sequence: TTA
tctttaaaataaagacaaag

SEQ ID NO: 223947 - DNA, 20 bp, Artificial Sequence
  Description of Artificial Sequence: Synthetic oligonucleotide
  Target: LAMA2; (-) strand; PAM type: YTN; PAM sequence: TTA
aataaaattatctttaaaat

SEQ ID NO: 223948 - DNA, 20 bp, Artificial Sequence
  Description of Artificial Sequence: Synthetic oligonucleotide
  Target: LAMA2; (-) strand; PAM type: YTN; PAM sequence: TTT
aaataaaattatctttaaaa

SEQ ID NO: 223949 - DNA, 20 bp, Artificial Sequence
  Description of Artificial Sequence: Synthetic oligonucleotide
  Target: LAMA2; (-) strand; PAM type: YTN; PAM sequence: TTT
taaataaaattatctttaaa

SEQ ID NO: 223950 - DNA, 20 bp, Artificial Sequence
  Description of Artificial Sequence: Synthetic oligonucleotide
  Target: LAMA2; (-) strand; PAM type: YTN; PAM sequence: CTT
ttaaataaaattatctttaa

SEQ ID NO: 223951 - DNA, 20 bp, Artificial Sequence
  Description of Artificial Sequence: Synthetic oligonucleotide
  Target: LAMA2; (-) strand; PAM type: YTN; PAM sequence: TTA
cttttaaataaaattatctt

SEQ ID NO: 223952 - DNA, 20 bp, Artificial Sequence
  Description of Artificial Sequence: Synthetic oligonucleotide
  Target: LAMA2; (-) strand; PAM type: YTN; PAM sequence: TTT
acttttaaataaaattatct

SEQ ID NO: 223953 - DNA, 20 bp, Artificial Sequence
  Description of Artificial Sequence: Synthetic oligonucleotide
  Target: LAMA2; (-) strand; PAM type: YTN; PAM sequence: TTT
tacttttaaataaaattatc

SEQ ID NO: 223954 - DNA, 20 bp, Artificial Sequence
  Description of Artificial Sequence: Synthetic oligonucleotide
  Target: LAMA2; (-) strand; PAM type: YTN; PAM sequence: TTG
tatgaacataaatgttttac

SEQ ID NO: 223955 - DNA, 20 bp, Artificial Sequence
  Description of Artificial Sequence: Synthetic oligonucleotide
  Target: LAMA2; (-) strand; PAM type: YTN; PAM sequence: TTT
gtatgaacataaatgtttta

SEQ ID NO: 223956 - DNA, 20 bp, Artificial Sequence
  Description of Artificial Sequence: Synthetic oligonucleotide
  Target: LAMA2; (-) strand; PAM type: YTN; PAM sequence: TTT
tgtatgaacataaatgtttt

SEQ ID NO: 223957 - DNA, 20 bp, Artificial Sequence
  Description of Artificial Sequence: Synthetic oligonucleotide
  Target: LAMA2; (-) strand; PAM type: YTN; PAM sequence: TTT
ttgtatgaacataaatgttt

SEQ ID NO: 223958 - DNA, 20 bp, Artificial Sequence
  Description of Artificial Sequence: Synthetic oligonucleotide
  Target: LAMA2; (-) strand; PAM type: YTN; PAM sequence: TTT
tttgtatgaacataaatgtt

SEQ ID NO: 223959 - DNA, 20 bp, Artificial Sequence
  Description of Artificial Sequence: Synthetic oligonucleotide
  Target: LAMA2; (-) strand; PAM type: YTN; PAM sequence: CTA
tattttttgtatgaacataa

SEQ ID NO: 223960 - DNA, 20 bp, Artificial Sequence
  Description of Artificial Sequence: Synthetic oligonucleotide
  Target: LAMA2; (-) strand; PAM type: YTN; PAM sequence: CTG
ctatattttttgtatgaaca

SEQ ID NO: 223961 - DNA, 20 bp, Artificial Sequence
  Description of Artificial Sequence: Synthetic oligonucleotide
  Target: LAMA2; (-) strand; PAM type: YTN; PAM sequence: TTC
tgctatattttttgtatgaa

SEQ ID NO: 223962 - DNA, 20 bp, Artificial Sequence
  Description of Artificial Sequence: Synthetic oligonucleotide
  Target: LAMA2; (-) strand; PAM type: YTN; PAM sequence: TTC
catcccgtattctgctatat

SEQ ID NO: 223963 - DNA, 20 bp, Artificial Sequence
  Description of Artificial Sequence: Synthetic oligonucleotide
  Target: LAMA2; (-) strand; PAM type: YTN; PAM sequence: TTT
ccatcccgtattctgctata

SEQ ID NO: 223964 - DNA, 20 bp, Artificial Sequence
  Description of Artificial Sequence: Synthetic oligonucleotide
  Target: LAMA2; (-) strand; PAM type: YTN; PAM sequence: TTT
tccatcccgtattctgctat

SEQ ID NO: 223965 - DNA, 20 bp, Artificial Sequence
  Description of Artificial Sequence: Synthetic oligonucleotide
  Target: LAMA2; (-) strand; PAM type: YTN; PAM sequence: TTA
ttttccatcccgtattctgc

SEQ ID NO: 223966 - DNA, 20 bp, Artificial Sequence
  Description of Artificial Sequence: Synthetic oligonucleotide
  Target: LAMA2; (-) strand; PAM type: YTN; PAM sequence: TTT
attttccatcccgtattctg

SEQ ID NO: 223967 - DNA, 20 bp, Artificial Sequence
  Description of Artificial Sequence: Synthetic oligonucleotide
  Target: LAMA2; (-) strand; PAM type: YTN; PAM sequence: TTT
tattttccatcccgtattct

SEQ ID NO: 223968 - DNA, 20 bp, Artificial Sequence
  Description of Artificial Sequence: Synthetic oligonucleotide
  Target: LAMA2; (-) strand; PAM type: YTN; PAM sequence: CTT
ttattttccatcccgtattc

SEQ ID NO: 223969 - DNA, 20 bp, Artificial Sequence
  Description of Artificial Sequence: Synthetic oligonucleotide
  Target: LAMA2; (-) strand; PAM type: YTN; PAM sequence: TTA
ggagtcaagaaaagaggagg

SEQ ID NO: 223970 - DNA, 20 bp, Artificial Sequence
  Description of Artificial Sequence: Synthetic oligonucleotide
  Target: LAMA2; (-) strand; PAM type: YTN; PAM sequence: TTT
aggagtcaagaaaagaggag

SEQ ID NO: 223971 - DNA, 20 bp, Artificial Sequence
  Description of Artificial Sequence: Synthetic oligonucleotide
  Target: LAMA2; (-) strand; PAM type: YTN; PAM sequence: CTT
taggagtcaagaaaagagga

SEQ ID NO: 223972 - DNA, 20 bp, Artificial Sequence
  Description of Artificial Sequence: Synthetic oligonucleotide
  Target: LAMA2; (-) strand; PAM type: YTN; PAM sequence: CTG
ccacctttaggagtcaagaa

SEQ ID NO: 223973 - DNA, 20 bp, Artificial Sequence
  Description of Artificial Sequence: Synthetic oligonucleotide
  Target: LAMA2; (-) strand; PAM type: YTN; PAM sequence: TTA
aagctgccacctttaggagt

SEQ ID NO: 223974 - DNA, 20 bp, Artificial Sequence
  Description of Artificial Sequence: Synthetic oligonucleotide
  Target: LAMA2; (-) strand; PAM type: YTN; PAM sequence: TTA
tgtgaacatattaaagctgc

SEQ ID NO: 223975 - DNA, 20 bp, Artificial Sequence
  Description of Artificial Sequence: Synthetic oligonucleotide
  Target: LAMA2; (-) strand; PAM type: YTN; PAM sequence: TTG
ggagaggaattatgtgaaca

SEQ ID NO: 223976 - DNA, 20 bp, Artificial Sequence
  Description of Artificial Sequence: Synthetic oligonucleotide
  Target: LAMA2; (-) strand; PAM type: YTN; PAM sequence: TTT
gggagaggaattatgtgaac

SEQ ID NO: 223977 - DNA, 20 bp, Artificial Sequence
  Description of Artificial Sequence: Synthetic oligonucleotide
  Target: LAMA2; (-) strand; PAM type: YTN; PAM sequence: TTT
tgggagaggaattatgtgaa

SEQ ID NO: 223978 - DNA, 20 bp, Artificial Sequence
  Description of Artificial Sequence: Synthetic oligonucleotide
  Target: LAMA2; (-) strand; PAM type: YTN; PAM sequence: TTG
aatatgccaagacattttgg

SEQ ID NO: 223979 - DNA, 20 bp, Artificial Sequence
  Description of Artificial Sequence: Synthetic oligonucleotide
  Target: LAMA2; (-) strand; PAM type: YTN; PAM sequence: CTT
gaatatgccaagacattttg

SEQ ID NO: 223980 - DNA, 20 bp, Artificial Sequence
  Description of Artificial Sequence: Synthetic oligonucleotide
  Target: LAMA2; (-) strand; PAM type: YTN; PAM sequence: CTG
cttgaatatgccaagacatt

SEQ ID NO: 223981 - DNA, 20 bp, Artificial Sequence
  Description of Artificial Sequence: Synthetic oligonucleotide
  Target: LAMA2; (-) strand; PAM type: YTN; PAM sequence: CTG
taactgcttgaatatgccaa

SEQ ID NO: 223982 - DNA, 20 bp, Artificial Sequence
  Description of Artificial Sequence: Synthetic oligonucleotide
  Target: LAMA2; (-) strand; PAM type: YTN; PAM sequence: CTA
tgtatgtgcctgtaactgct

SEQ ID NO: 223983 - DNA, 20 bp, Artificial Sequence
  Description of Artificial Sequence: Synthetic oligonucleotide
  Target: LAMA2; (-) strand; PAM type: YTN; PAM sequence: CTG
cagatagacacacatatcta

SEQ ID NO: 223984 - DNA, 20 bp, Artificial Sequence
  Description of Artificial Sequence: Synthetic oligonucleotide
  Target: LAMA2; (-) strand; PAM type: YTN; PAM sequence: TTA
caaaggcatatagataggta

SEQ ID NO: 223985 - DNA, 20 bp, Artificial Sequence
  Description of Artificial Sequence: Synthetic oligonucleotide
  Target: LAMA2; (-) strand; PAM type: YTN; PAM sequence: TTT
acaaaggcatatagataggt

SEQ ID NO: 223986 - DNA, 20 bp, Artificial Sequence
  Description of Artificial Sequence: Synthetic oligonucleotide
  Target: LAMA2; (-) strand; PAM type: YTN; PAM sequence: TTA
tatttacaaaggcatataga

SEQ ID NO: 223987 - DNA, 20 bp, Artificial Sequence
  Description of Artificial Sequence: Synthetic oligonucleotide
  Target: LAMA2; (-) strand; PAM type: YTN; PAM sequence: TTT
atatttacaaaggcatatag

SEQ ID NO: 223988 - DNA, 20 bp, Artificial Sequence
  Description of Artificial Sequence: Synthetic oligonucleotide
  Target: LAMA2; (-) strand; PAM type: YTN; PAM sequence: CTG
atgaatttatatttacaaag

SEQ ID NO: 223989 - DNA, 20 bp, Artificial Sequence
  Description of Artificial Sequence: Synthetic oligonucleotide
  Target: LAMA2; (-) strand; PAM type: YTN; PAM sequence: CTG
caggtgagaaatactgatga

SEQ ID NO: 223990 - DNA, 20 bp, Artificial Sequence
  Description of Artificial Sequence: Synthetic oligonucleotide
  Target: LAMA2; (-) strand; PAM type: YTN; PAM sequence: TTG
agtatcactgcaggtgagaa

SEQ ID NO: 223991 - DNA, 20 bp, Artificial Sequence
  Description of Artificial Sequence: Synthetic oligonucleotide
  Target: LAMA2; (-) strand; PAM type: YTN; PAM sequence: TTA
ttgagtatcactgcaggtga

SEQ ID NO: 223992 - DNA, 20 bp, Artificial Sequence
  Description of Artificial Sequence: Synthetic oligonucleotide
  Target: LAMA2; (-) strand; PAM type: YTN; PAM sequence: TTT
attgagtatcactgcaggtg

SEQ ID NO: 223993 - DNA, 20 bp, Artificial Sequence
  Description of Artificial Sequence: Synthetic oligonucleotide
  Target: LAMA2; (-) strand; PAM type: YTN; PAM sequence: TTT
tattgagtatcactgcaggt

SEQ ID NO: 223994 - DNA, 20 bp, Artificial Sequence
  Description of Artificial Sequence: Synthetic oligonucleotide
  Target: LAMA2; (-) strand; PAM type: YTN; PAM sequence: CTG
ttttattgagtatcactgca

SEQ ID NO: 223995 - DNA, 20 bp, Artificial Sequence
  Description of Artificial Sequence: Synthetic oligonucleotide
  Target: LAMA2; (-) strand; PAM type: YTN; PAM sequence: TTC
tgttttattgagtatcactg

SEQ ID NO: 223996 - DNA, 20 bp, Artificial Sequence
  Description of Artificial Sequence: Synthetic oligonucleotide
  Target: LAMA2; (-) strand; PAM type: YTN; PAM sequence: TTG
agcattctgttttattgagt

SEQ ID NO: 223997 - DNA, 20 bp, Artificial Sequence
  Description of Artificial Sequence: Synthetic oligonucleotide
  Target: LAMA2; (-) strand; PAM type: YTN; PAM sequence: TTT
gagcattctgttttattgag

SEQ ID NO: 223998 - DNA, 20 bp, Artificial Sequence
  Description of Artificial Sequence: Synthetic oligonucleotide
  Target: LAMA2; (-) strand; PAM type: YTN; PAM sequence: CTT
tgagcattctgttttattga

SEQ ID NO: 223999 - DNA, 20 bp, Artificial Sequence
  Description of Artificial Sequence: Synthetic oligonucleotide
  Target: LAMA2; (-) strand; PAM type: YTN; PAM sequence: CTG
ggctttgagcattctgtttt

SEQ ID NO: 224000 - DNA, 20 bp, Artificial Sequence
  Description of Artificial Sequence: Synthetic oligonucleotide
  Target: LAMA2; (-) strand; PAM type: YTN; PAM sequence: CTG
aggggtctgggctttgagca

SEQ ID NO: 224001 - DNA, 20 bp, Artificial Sequence
  Description of Artificial Sequence: Synthetic oligonucleotide
  Target: LAMA2; (-) strand; PAM type: YTN; PAM sequence: TTG
tcctgaggggtctgggcttt

SEQ ID NO: 224002 - DNA, 20 bp, Artificial Sequence
  Description of Artificial Sequence: Synthetic oligonucleotide
  Target: LAMA2; (-) strand; PAM type: YTN; PAM sequence: TTT
gtcctgaggggtctgggctt

SEQ ID NO: 224003 - DNA, 20 bp, Artificial Sequence
  Description of Artificial Sequence: Synthetic oligonucleotide
  Target: LAMA2; (-) strand; PAM type: YTN; PAM sequence: TTG
accccagcatagcaaggaca

SEQ ID NO: 224004 - DNA, 20 bp, Artificial Sequence
  Description of Artificial Sequence: Synthetic oligonucleotide
  Target: LAMA2; (-) strand; PAM type: YTN; PAM sequence: CTG
attgaccccagcatagcaag

SEQ ID NO: 224005 - DNA, 20 bp, Artificial Sequence
  Description of Artificial Sequence: Synthetic oligonucleotide
  Target: LAMA2; (-) strand; PAM type: YTN; PAM sequence: CTG
agaccatctgattgacccca

SEQ ID NO: 224006 - DNA, 20 bp, Artificial Sequence
  Description of Artificial Sequence: Synthetic oligonucleotide
  Target: LAMA2; (-) strand; PAM type: YTN; PAM sequence: CTC
ccctgagaccatctgattga

SEQ ID NO: 224007 - DNA, 20 bp, Artificial Sequence
  Description of Artificial Sequence: Synthetic oligonucleotide
  Target: LAMA2; (-) strand; PAM type: YTN; PAM sequence: CTC
tcccctgagaccatctgatt

SEQ ID NO: 224008 - DNA, 20 bp, Artificial Sequence
  Description of Artificial Sequence: Synthetic oligonucleotide
  Target: LAMA2; (-) strand; PAM type: YTN; PAM sequence: CTC
ctctcccctgagaccatctg

SEQ ID NO: 224009 - DNA, 20 bp, Artificial Sequence
  Description of Artificial Sequence: Synthetic oligonucleotide
  Target: LAMA2; (-) strand; PAM type: YTN; PAM sequence: CTC
ccaaatgcctcctctcccct

SEQ ID NO: 224010 - DNA, 20 bp, Artificial Sequence
  Description of Artificial Sequence: Synthetic oligonucleotide
  Target: LAMA2; (-) strand; PAM type: YTN; PAM sequence: CTG
cccaacctcccaaatgcctc

SEQ ID NO: 224011 - DNA, 20 bp, Artificial Sequence
  Description of Artificial Sequence: Synthetic oligonucleotide
  Target: LAMA2; (-) strand; PAM type: YTN; PAM sequence: CTG
ctgcccaacctcccaaatgc

SEQ ID NO: 224012 - DNA, 20 bp, Artificial Sequence
  Description of Artificial Sequence: Synthetic oligonucleotide
  Target: LAMA2; (-) strand; PAM type: YTN; PAM sequence: TTG
acaaatcactgctgcccaac

SEQ ID NO: 224013 - DNA, 20 bp, Artificial Sequence
  Description of Artificial Sequence: Synthetic oligonucleotide
  Target: LAMA2; (-) strand; PAM type: YTN; PAM sequence: TTG
ttgacaaatcactgctgccc

SEQ ID NO: 224014 - DNA, 20 bp, Artificial Sequence
  Description of Artificial Sequence: Synthetic oligonucleotide
  Target: LAMA2; (-) strand; PAM type: YTN; PAM sequence: CTT
gttgacaaatcactgctgcc

SEQ ID NO: 224015 - DNA, 20 bp, Artificial Sequence
  Description of Artificial Sequence: Synthetic oligonucleotide
  Target: LAMA2; (-) strand; PAM type: YTN; PAM sequence: CTG
tacttgttgacaaatcactg

SEQ ID NO: 224016 - DNA, 20 bp, Artificial Sequence
  Description of Artificial Sequence: Synthetic oligonucleotide
  Target: LAMA2; (-) strand; PAM type: YTN; PAM sequence: TTC
tgtacttgttgacaaatcac

SEQ ID NO: 224017 - DNA, 20 bp, Artificial Sequence
  Description of Artificial Sequence: Synthetic oligonucleotide
  Target: LAMA2; (-) strand; PAM type: YTN; PAM sequence: CTT
ctgtacttgttgacaaatca

SEQ ID NO: 224018 - DNA, 20 bp, Artificial Sequence
  Description of Artificial Sequence: Synthetic oligonucleotide
  Target: LAMA2; (-) strand; PAM type: YTN; PAM sequence: CTG
aaatgcttctgtacttgttg

SEQ ID NO: 224019 - DNA, 20 bp, Artificial Sequence
  Description of Artificial Sequence: Synthetic oligonucleotide
  Target: LAMA2; (-) strand; PAM type: YTN; PAM sequence: CTA
gtggataaaatactgaaatg

SEQ ID NO: 224020 - DNA, 20 bp, Artificial Sequence
  Description of Artificial Sequence: Synthetic oligonucleotide
  Target: LAMA2; (-) strand; PAM type: YTN; PAM sequence: TTG
tggaacaactagtggataaa

SEQ ID NO: 224021 - DNA, 20 bp, Artificial Sequence
  Description of Artificial Sequence: Synthetic oligonucleotide
  Target: LAMA2; (-) strand; PAM type: YTN; PAM sequence: TTA
ggcacagttgtggaacaact

SEQ ID NO: 224022 - DNA, 20 bp, Artificial Sequence
  Description of Artificial Sequence: Synthetic oligonucleotide
  Target: LAMA2; (-) strand; PAM type: YTN; PAM sequence: TTT
aggcacagttgtggaacaac

SEQ ID NO: 224023 - DNA, 20 bp, Artificial Sequence
  Description of Artificial Sequence: Synthetic oligonucleotide
  Target: LAMA2; (-) strand; PAM type: YTN; PAM sequence: TTT
taggcacagttgtggaacaa

SEQ ID NO: 224024 - DNA, 20 bp, Artificial Sequence
  Description of Artificial Sequence: Synthetic oligonucleotide
  Target: LAMA2; (-) strand; PAM type: YTN; PAM sequence: CTT
ttaggcacagttgtggaaca

SEQ ID NO: 224025 - DNA, 20 bp, Artificial Sequence
  Description of Artificial Sequence: Synthetic oligonucleotide
  Target: LAMA2; (-) strand; PAM type: YTN; PAM sequence: TTA
gccttttaggcacagttgtg

SEQ ID NO: 224026 - DNA, 20 bp, Artificial Sequence
  Description of Artificial Sequence: Synthetic oligonucleotide
  Target: LAMA2; (-) strand; PAM type: YTN; PAM sequence: TTA
gtattagccttttaggcaca

SEQ ID NO: 224027 - DNA, 20 bp, Artificial Sequence
  Description of Artificial Sequence: Synthetic oligonucleotide
  Target: LAMA2; (-) strand; PAM type: YTN; PAM sequence: TTG
agagccatggaggggaaatc

SEQ ID NO: 224028 - DNA, 20 bp, Artificial Sequence
  Description of Artificial Sequence: Synthetic oligonucleotide
  Target: LAMA2; (-) strand; PAM type: YTN; PAM sequence: CTT
gagagccatggaggggaaat

SEQ ID NO: 224029 - DNA, 20 bp, Artificial Sequence
  Description of Artificial Sequence: Synthetic oligonucleotide
  Target: LAMA2; (-) strand; PAM type: YTN; PAM sequence: TTG
aatgcatgcatgcttgagag

SEQ ID NO: 224030 - DNA, 20 bp, Artificial Sequence
  Description of Artificial Sequence: Synthetic oligonucleotide
  Target: LAMA2; (-) strand; PAM type: YTN; PAM sequence: CTT
gaatgcatgcatgcttgaga

SEQ ID NO: 224031 - DNA, 20 bp, Artificial Sequence
  Description of Artificial Sequence: Synthetic oligonucleotide
  Target: LAMA2; (-) strand; PAM type: YTN; PAM sequence: TTA
cttgaatgcatgcatgcttg

SEQ ID NO: 224032 - DNA, 20 bp, Artificial Sequence
  Description of Artificial Sequence: Synthetic oligonucleotide
  Target: LAMA2; (-) strand; PAM type: YTN; PAM sequence: TTT
acttgaatgcatgcatgctt

SEQ ID NO: 224033 - DNA, 20 bp, Artificial Sequence
  Description of Artificial Sequence: Synthetic oligonucleotide
  Target: LAMA2; (-) strand; PAM type: YTN; PAM sequence: TTC
aagatgtttacttgaatgca

SEQ ID NO: 224034 - DNA, 20 bp, Artificial Sequence
  Description of Artificial Sequence: Synthetic oligonucleotide
  Target: LAMA2; (-) strand; PAM type: YTN; PAM sequence: CTT
caagatgtttacttgaatgc

SEQ ID NO: 224035 - DNA, 20 bp, Artificial Sequence
  Description of Artificial Sequence: Synthetic oligonucleotide
  Target: LAMA2; (-) strand; PAM type: YTN; PAM sequence: TTC
cttcaagatgtttacttgaa

SEQ ID NO: 224036 - DNA, 20 bp, Artificial Sequence
  Description of Artificial Sequence: Synthetic oligonucleotide
  Target: LAMA2; (-) strand; PAM type: YTN; PAM sequence: CTA
ttccttcaagatgtttactt

SEQ ID NO: 224037 - DNA, 20 bp, Artificial Sequence
  Description of Artificial Sequence: Synthetic oligonucleotide
  Target: LAMA2; (-) strand; PAM type: YTN; PAM sequence: CTG
atgctattccttcaagatgt

SEQ ID NO: 224038 - DNA, 20 bp, Artificial Sequence
  Description of Artificial Sequence: Synthetic oligonucleotide
  Target: LAMA2; (-) strand; PAM type: YTN; PAM sequence: CTC
tgatgctattccttcaagat

SEQ ID NO: 224039 - DNA, 20 bp, Artificial Sequence
  Description of Artificial Sequence: Synthetic oligonucleotide
  Target: LAMA2; (-) strand; PAM type: YTN; PAM sequence: TTG
gtatggaatgcggtaataca

SEQ ID NO: 224040 - DNA, 20 bp, Artificial Sequence
  Description of Artificial Sequence: Synthetic oligonucleotide
  Target: LAMA2; (-) strand; PAM type: YTN; PAM sequence: TTT
ggtatggaatgcggtaatac

SEQ ID NO: 224041 - DNA, 20 bp, Artificial Sequence
  Description of Artificial Sequence: Synthetic oligonucleotide
  Target: LAMA2; (-) strand; PAM type: YTN; PAM sequence: TTA
aaaatataaaaatttggtat

SEQ ID NO: 224042 - DNA, 20 bp, Artificial Sequence
  Description of Artificial Sequence: Synthetic oligonucleotide
  Target: LAMA2; (-) strand; PAM type: YTN; PAM sequence: TTT
aaaaatataaaaatttggta

SEQ ID NO: 224043 - DNA, 20 bp, Artificial Sequence
  Description of Artificial Sequence: Synthetic oligonucleotide
  Target: LAMA2; (-) strand; PAM type: YTN; PAM sequence: CTA
gatttaaaaatataaaaatt

SEQ ID NO: 224044 - DNA, 20 bp, Artificial Sequence
  Description of Artificial Sequence: Synthetic oligonucleotide
  Target: LAMA2; (-) strand; PAM type: YTN; PAM sequence: CTA
agggactagatttaaaaata

SEQ ID NO: 224045 - DNA, 20 bp, Artificial Sequence
  Description of Artificial Sequence: Synthetic oligonucleotide
  Target: LAMA2; (-) strand; PAM type: YTN; PAM sequence: CTA
tggtataccctaagggacta

SEQ ID NO: 224046 - DNA, 20 bp, Artificial Sequence
  Description of Artificial Sequence: Synthetic oligonucleotide
  Target: LAMA2; (-) strand; PAM type: YTN; PAM sequence: CTC
atgcatacgtgtataggatc

SEQ ID NO: 224047 - DNA, 20 bp, Artificial Sequence
  Description of Artificial Sequence: Synthetic oligonucleotide
  Target: LAMA2; (-) strand; PAM type: YTN; PAM sequence: TTG
acatggtaactcatgcatac

SEQ ID NO: 224048 - DNA, 20 bp, Artificial Sequence
  Description of Artificial Sequence: Synthetic oligonucleotide
  Target: LAMA2; (-) strand; PAM type: YTN; PAM sequence: TTT
gacatggtaactcatgcata

SEQ ID NO: 224049 - DNA, 20 bp, Artificial Sequence
  Description of Artificial Sequence: Synthetic oligonucleotide
  Target: LAMA2; (-) strand; PAM type: YTN; PAM sequence: TTT
tgacatggtaactcatgcat

SEQ ID NO: 224050 - DNA, 20 bp, Artificial Sequence
  Description of Artificial Sequence: Synthetic oligonucleotide
  Target: LAMA2; (-) strand; PAM type: YTN; PAM sequence: TTC
atagttttgacatggtaact

SEQ ID NO: 224051 - DNA, 20 bp, Artificial Sequence
  Description of Artificial Sequence: Synthetic oligonucleotide
  Target: LAMA2; (-) strand; PAM type: YTN; PAM sequence: CTT
catagttttgacatggtaac

SEQ ID NO: 224052 - DNA, 20 bp, Artificial Sequence
  Description of Artificial Sequence: Synthetic oligonucleotide
  Target: LAMA2; (-) strand; PAM type: YTN; PAM sequence: CTG
cttcatagttttgacatggt

SEQ ID NO: 224053 - DNA, 20 bp, Artificial Sequence
  Description of Artificial Sequence: Synthetic oligonucleotide
  Target: LAMA2; (-) strand; PAM type: YTN; PAM sequence: TTA
tctgcttcatagttttgaca

SEQ ID NO: 224054 - DNA, 20 bp, Artificial Sequence
  Description of Artificial Sequence: Synthetic oligonucleotide
  Target: LAMA2; (-) strand; PAM type: YTN; PAM sequence: TTT
atctgcttcatagttttgac

SEQ ID NO: 224055 - DNA, 20 bp, Artificial Sequence
  Description of Artificial Sequence: Synthetic oligonucleotide
  Target: LAMA2; (-) strand; PAM type: YTN; PAM sequence: TTT
tatctgcttcatagttttga

SEQ ID NO: 224056 - DNA, 20 bp, Artificial Sequence
  Description of Artificial Sequence: Synthetic oligonucleotide
  Target: LAMA2; (-) strand; PAM type: YTN; PAM sequence: CTA
gaaacaaattttatctgctt

SEQ ID NO: 224057 - DNA, 20 bp, Artificial Sequence
  Description of Artificial Sequence: Synthetic oligonucleotide
  Target: LAMA2; (-) strand; PAM type: YTN; PAM sequence: CTC
tagaaacaaattttatctgc

SEQ ID NO: 224058 - DNA, 20 bp, Artificial Sequence
  Description of Artificial Sequence: Synthetic oligonucleotide
  Target: LAMA2; (-) strand; PAM type: YTN; PAM sequence: CTG
aaagggatgctctagaaaca

SEQ ID NO: 224059 - DNA, 20 bp, Artificial Sequence
  Description of Artificial Sequence: Synthetic oligonucleotide
  Target: LAMA2; (-) strand; PAM type: YTN; PAM sequence: CTA
cagagggaatcctgaaaggg

SEQ ID NO: 224060 - DNA, 20 bp, Artificial Sequence
  Description of Artificial Sequence: Synthetic oligonucleotide
  Target: LAMA2; (-) strand; PAM type: YTN; PAM sequence: CTG
agctacagagggaatcctga

SEQ ID NO: 224061 - DNA, 20 bp, Artificial Sequence
  Description of Artificial Sequence: Synthetic oligonucleotide
  Target: LAMA2; (-) strand; PAM type: YTN; PAM sequence: CTG
ctgagctacagagggaatcc

SEQ ID NO: 224062 - DNA, 20 bp, Artificial Sequence
  Description of Artificial Sequence: Synthetic oligonucleotide
  Target: LAMA2; (-) strand; PAM type: YTN; PAM sequence: TTA
acaggactgctgagctacag

SEQ ID NO: 224063 - DNA, 20 bp, Artificial Sequence
  Description of Artificial Sequence: Synthetic oligonucleotide
  Target: LAMA2; (-) strand; PAM type: YTN; PAM sequence: CTA
caatgtgattaacaggactg

SEQ ID NO: 224064 - DNA, 20 bp, Artificial Sequence
  Description of Artificial Sequence: Synthetic oligonucleotide
  Target: LAMA2; (-) strand; PAM type: YTN; PAM sequence: CTC
actacaatgtgattaacagg

SEQ ID NO: 224065 - DNA, 20 bp, Artificial Sequence
  Description of Artificial Sequence: Synthetic oligonucleotide
  Target: LAMA2; (-) strand; PAM type: YTN; PAM sequence: TTG
ggaggacaggctcactacaa

SEQ ID NO: 224066 - DNA, 20 bp, Artificial Sequence
  Description of Artificial Sequence: Synthetic oligonucleotide
  Target: LAMA2; (-) strand; PAM type: YTN; PAM sequence: CTG
gtggggcacaattgggagga

SEQ ID NO: 224067 - DNA, 20 bp, Artificial Sequence
  Description of Artificial Sequence: Synthetic oligonucleotide
  Target: LAMA2; (-) strand; PAM type: YTN; PAM sequence: CTA
agtggatgaggtcactggtg

SEQ ID NO: 224068 - DNA, 20 bp, Artificial Sequence
  Description of Artificial Sequence: Synthetic oligonucleotide
  Target: LAMA2; (-) strand; PAM type: YTN; PAM sequence: CTC
taagtggatgaggtcactgg

SEQ ID NO: 224069 - DNA, 20 bp, Artificial Sequence
  Description of Artificial Sequence: Synthetic oligonucleotide
  Target: LAMA2; (-) strand; PAM type: YTN; PAM sequence: CTA
agctctaagtggatgaggtc

SEQ ID NO: 224070 - DNA, 20 bp, Artificial Sequence
  Description of Artificial Sequence: Synthetic oligonucleotide
  Target: LAMA2; (-) strand; PAM type: YTN; PAM sequence: CTC
taagctctaagtggatgagg

SEQ ID NO: 224071 - DNA, 20 bp, Artificial Sequence
  Description of Artificial Sequence: Synthetic oligonucleotide
  Target: LAMA2; (-) strand; PAM type: YTN; PAM sequence: TTG
gcagctctaagctctaagtg

SEQ ID NO: 224072 - DNA, 20 bp, Artificial Sequence
  Description of Artificial Sequence: Synthetic oligonucleotide
  Target: LAMA2; (-) strand; PAM type: YTN; PAM sequence: CTT
ggcagctctaagctctaagt

SEQ ID NO: 224073 - DNA, 20 bp, Artificial Sequence
  Description of Artificial Sequence: Synthetic oligonucleotide
  Target: LAMA2; (-) strand; PAM type: YTN; PAM sequence: CTA
tgaggtatgagagcttggca

SEQ ID NO: 224074 - DNA, 20 bp, Artificial Sequence
  Description of Artificial Sequence: Synthetic oligonucleotide
  Target: LAMA2; (-) strand; PAM type: YTN; PAM sequence: CTA
gtaaatgctatgaggtatga

SEQ ID NO: 224075 - DNA, 20 bp, Artificial Sequence
  Description of Artificial Sequence: Synthetic oligonucleotide
  Target: LAMA2; (-) strand; PAM type: YTN; PAM sequence: TTG
actagtaaatgctatgaggt

SEQ ID NO: 224076 - DNA, 20 bp, Artificial Sequence
  Description of Artificial Sequence: Synthetic oligonucleotide
  Target: LAMA2; (-) strand; PAM type: YTN; PAM sequence: CTT
gactagtaaatgctatgagg

SEQ ID NO: 224077 - DNA, 20 bp, Artificial Sequence
  Description of Artificial Sequence: Synthetic oligonucleotide
  Target: LAMA2; (-) strand; PAM type: YTN; PAM sequence: TTC
ttgactagtaaatgctatga

SEQ ID NO: 224078 - DNA, 20 bp, Artificial Sequence
  Description of Artificial Sequence: Synthetic oligonucleotide
  Target: LAMA2; (-) strand; PAM type: YTN; PAM sequence: CTA
taataataaaacagtatgat

SEQ ID NO: 224079 - DNA, 20 bp, Artificial Sequence
  Description of Artificial Sequence: Synthetic oligonucleotide
  Target: LAMA2; (-) strand; PAM type: YTN; PAM sequence: TTG
taataatgagacaaatgaaa

SEQ ID NO: 224080 - DNA, 20 bp, Artificial Sequence
  Description of Artificial Sequence: Synthetic oligonucleotide
  Target: LAMA2; (-) strand; PAM type: YTN; PAM sequence: TTA
atatattgtaataatgagac

SEQ ID NO: 224081 - DNA, 20 bp, Artificial Sequence
  Description of Artificial Sequence: Synthetic oligonucleotide
  Target: LAMA2; (-) strand; PAM type: YTN; PAM sequence: TTG
ttaatatattgtaataatga

SEQ ID NO: 224082 - DNA, 20 bp, Artificial Sequence
  Description of Artificial Sequence: Synthetic oligonucleotide
  Target: LAMA2; (-) strand; PAM type: YTN; PAM sequence: TTC
caccatcaatgtgttgttaa

SEQ ID NO: 224083 - DNA, 20 bp, Artificial Sequence
  Description of Artificial Sequence: Synthetic oligonucleotide
  Target: LAMA2; (-) strand; PAM type: YTN; PAM sequence: CTA
ttccaccatcaatgtgttgt

SEQ ID NO: 224084 - DNA, 20 bp, Artificial Sequence
  Description of Artificial Sequence: Synthetic oligonucleotide
  Target: LAMA2; (-) strand; PAM type: YTN; PAM sequence: TTA
ctattccaccatcaatgtgt

SEQ ID NO: 224085 - DNA, 20 bp, Artificial Sequence
  Description of Artificial Sequence: Synthetic oligonucleotide
  Target: LAMA2; (-) strand; PAM type: YTN; PAM sequence: TTA
aattactattccaccatcaa

SEQ ID NO: 224086 - DNA, 20 bp, Artificial Sequence
  Description of Artificial Sequence: Synthetic oligonucleotide
  Target: LAMA2; (-) strand; PAM type: YTN; PAM sequence: TTT
aaattactattccaccatca

SEQ ID NO: 224087 - DNA, 20 bp, Artificial Sequence
  Description of Artificial Sequence: Synthetic oligonucleotide
  Target: LAMA2; (-) strand; PAM type: YTN; PAM sequence: TTA
gtttaaattactattccacc

SEQ ID NO: 224088 - DNA, 20 bp, Artificial Sequence
  Description of Artificial Sequence: Synthetic oligonucleotide
  Target: LAMA2; (-) strand; PAM type: YTN; PAM sequence: CTA
ggtagaaagacagatatgaa

SEQ ID NO: 224089 - DNA, 20 bp, Artificial Sequence
  Description of Artificial Sequence: Synthetic oligonucleotide
  Target: LAMA2; (-) strand; PAM type: YTN; PAM sequence: TTC
taggtagaaagacagatatg

SEQ ID NO: 224090 - DNA, 20 bp, Artificial Sequence
  Description of Artificial Sequence: Synthetic oligonucleotide
  Target: LAMA2; (-) strand; PAM type: YTN; PAM sequence: TTA
tgtacaatgttctaggtaga

SEQ ID NO: 224091 - DNA, 20 bp, Artificial Sequence
  Description of Artificial Sequence: Synthetic oligonucleotide
  Target: LAMA2; (-) strand; PAM type: YTN; PAM sequence: TTT
atgtacaatgttctaggtag

SEQ ID NO: 224092 - DNA, 20 bp, Artificial Sequence
  Description of Artificial Sequence: Synthetic oligonucleotide
  Target: LAMA2; (-) strand; PAM type: YTN; PAM sequence: TTA
tggaatgacatttatgtaca

SEQ ID NO: 224093 - DNA, 20 bp, Artificial Sequence
  Description of Artificial Sequence: Synthetic oligonucleotide
  Target: LAMA2; (-) strand; PAM type: YTN; PAM sequence: TTA
ccaatgtagtccaaaagaat

SEQ ID NO: 224094 - DNA, 20 bp, Artificial Sequence
  Description of Artificial Sequence: Synthetic oligonucleotide
  Target: LAMA2; (-) strand; PAM type: YTN; PAM sequence: TTT
accaatgtagtccaaaagaa

SEQ ID NO: 224095 - DNA, 20 bp, Artificial Sequence
  Description of Artificial Sequence: Synthetic oligonucleotide
  Target: LAMA2; (-) strand; PAM type: YTN; PAM sequence: CTT
taccaatgtagtccaaaaga

SEQ ID NO: 224096 - DNA, 20 bp, Artificial Sequence
  Description of Artificial Sequence: Synthetic oligonucleotide
  Target: LAMA2; (-) strand; PAM type: YTN; PAM sequence: CTG
tgtctttaccaatgtagtcc

SEQ ID NO: 224097 - DNA, 20 bp, Artificial Sequence
  Description of Artificial Sequence: Synthetic oligonucleotide
  Target: LAMA2; (-) strand; PAM type: YTN; PAM sequence: TTG
tggtagtgcatatctgtgtc

SEQ ID NO: 224098 - DNA, 20 bp, Artificial Sequence
  Description of Artificial Sequence: Synthetic oligonucleotide
  Target: LAMA2; (-) strand; PAM type: YTN; PAM sequence: TTT
gtggtagtgcatatctgtgt

SEQ ID NO: 224099 - DNA, 20 bp, Artificial Sequence
  Description of Artificial Sequence: Synthetic oligonucleotide
  Target: LAMA2; (-) strand; PAM type: YTN; PAM sequence: TTT
tgtggtagtgcatatctgtg

SEQ ID NO: 224100 - DNA, 20 bp, Artificial Sequence
  Description of Artificial Sequence: Synthetic oligonucleotide
  Target: LAMA2; (-) strand; PAM type: YTN; PAM sequence: CTA
gatgttttgtggtagtgcat

SEQ ID NO: 224101 - DNA, 20 bp, Artificial Sequence
  Description of Artificial Sequence: Synthetic oligonucleotide
  Target: LAMA2; (-) strand; PAM type: YTN; PAM sequence: TTC
tagatgttttgtggtagtgc

SEQ ID NO: 224102 - DNA, 20 bp, Artificial Sequence
  Description of Artificial Sequence: Synthetic oligonucleotide
  Target: LAMA2; (-) strand; PAM type: YTN; PAM sequence: TTG
aagacgtaaaaaaagaaata

SEQ ID NO: 224103 - DNA, 20 bp, Artificial Sequence
  Description of Artificial Sequence: Synthetic oligonucleotide
  Target: LAMA2; (-) strand; PAM type: YTN; PAM sequence: TTT
gaagacgtaaaaaaagaaat

SEQ ID NO: 224104 - DNA, 20 bp, Artificial Sequence
  Description of Artificial Sequence: Synthetic oligonucleotide
  Target: LAMA2; (-) strand; PAM type: YTN; PAM sequence: TTA
tatagaatttgaagacgtaa

SEQ ID NO: 224105 - DNA, 20 bp, Artificial Sequence
  Description of Artificial Sequence: Synthetic oligonucleotide
  Target: LAMA2; (-) strand; PAM type: YTN; PAM sequence: TTT
atatagaatttgaagacgta

SEQ ID NO: 224106 - DNA, 20 bp, Artificial Sequence
  Description of Artificial Sequence: Synthetic oligonucleotide
  Target: LAMA2; (-) strand; PAM type: YTN; PAM sequence: TTA
caaatttatatagaatttga

SEQ ID NO: 224107 - DNA, 20 bp, Artificial Sequence
  Description of Artificial Sequence: Synthetic oligonucleotide
  Target: LAMA2; (-) strand; PAM type: YTN; PAM sequence: TTT
acaaatttatatagaatttg

SEQ ID NO: 224108 - DNA, 20 bp, Artificial Sequence
  Description of Artificial Sequence: Synthetic oligonucleotide
  Target: LAMA2; (-) strand; PAM type: YTN; PAM sequence: CTA
tttacaaatttatatagaat

SEQ ID NO: 224109 - DNA, 20 bp, Artificial Sequence
  Description of Artificial Sequence: Synthetic oligonucleotide
  Target: LAMA2; (-) strand; PAM type: YTN; PAM sequence: CTC
tatttacaaatttatataga

SEQ ID NO: 224110 - DNA, 20 bp, Artificial Sequence
  Description of Artificial Sequence: Synthetic oligonucleotide
  Target: LAMA2; (-) strand; PAM type: YTN; PAM sequence: TTA
acagagtgacaatggagagg

SEQ ID NO: 224111 - DNA, 20 bp, Artificial Sequence
  Description of Artificial Sequence: Synthetic oligonucleotide
  Target: LAMA2; (-) strand; PAM type: YTN; PAM sequence: CTG
ttaacagagtgacaatggag

SEQ ID NO: 224112 - DNA, 20 bp, Artificial Sequence
  Description of Artificial Sequence: Synthetic oligonucleotide
  Target: LAMA2; (-) strand; PAM type: YTN; PAM sequence: TTA
ctgttaacagagtgacaatg

SEQ ID NO: 224113 - DNA, 20 bp, Artificial Sequence
  Description of Artificial Sequence: Synthetic oligonucleotide
  Target: LAMA2; (-) strand; PAM type: YTN; PAM sequence: TTG
ttactgttaacagagtgaca

SEQ ID NO: 224114 - DNA, 20 bp, Artificial Sequence
  Description of Artificial Sequence: Synthetic oligonucleotide
  Target: LAMA2; (-) strand; PAM type: YTN; PAM sequence: TTA
caaaaggtaaacatgcaaga

SEQ ID NO: 224115 - DNA, 20 bp, Artificial Sequence
  Description of Artificial Sequence: Synthetic oligonucleotide
  Target: LAMA2; (-) strand; PAM type: YTN; PAM sequence: TTT
acaaaaggtaaacatgcaag

SEQ ID NO: 224116 - DNA, 20 bp, Artificial Sequence
  Description of Artificial Sequence: Synthetic oligonucleotide
  Target: LAMA2; (-) strand; PAM type: YTN; PAM sequence: CTT
tacaaaaggtaaacatgcaa

SEQ ID NO: 224117 - DNA, 20 bp, Artificial Sequence
  Description of Artificial Sequence: Synthetic oligonucleotide
  Target: LAMA2; (-) strand; PAM type: YTN; PAM sequence: CTC
tttacaaaaggtaaacatgc

SEQ ID NO: 224118 - DNA, 20 bp, Artificial Sequence
  Description of Artificial Sequence: Synthetic oligonucleotide
  Target: LAMA2; (-) strand; PAM type: YTN; PAM sequence: TTC
tctttacaaaaggtaaacat

SEQ ID NO: 224119 - DNA, 20 bp, Artificial Sequence
  Description of Artificial Sequence: Synthetic oligonucleotide
  Target: LAMA2; (-) strand; PAM type: YTN; PAM sequence: CTT
ctctttacaaaaggtaaaca

SEQ ID NO: 224120 - DNA, 20 bp, Artificial Sequence
  Description of Artificial Sequence: Synthetic oligonucleotide
  Target: LAMA2; (-) strand; PAM type: YTN; PAM sequence: CTG
taccttctctttacaaaagg

SEQ ID NO: 224121 - DNA, 20 bp, Artificial Sequence
  Description of Artificial Sequence: Synthetic oligonucleotide
  Target: LAMA2; (-) strand; PAM type: YTN; PAM sequence: TTC
tgtaccttctctttacaaaa

SEQ ID NO: 224122 - DNA, 20 bp, Artificial Sequence
  Description of Artificial Sequence: Synthetic oligonucleotide
  Target: LAMA2; (-) strand; PAM type: YTN; PAM sequence: TTT
ctgtaccttctctttacaaa

SEQ ID NO: 224123 - DNA, 20 bp, Artificial Sequence
  Description of Artificial Sequence: Synthetic oligonucleotide
  Target: LAMA2; (-) strand; PAM type: YTN; PAM sequence: TTA
aatgaagggtttctgtacct

SEQ ID NO: 224124 - DNA, 20 bp, Artificial Sequence
  Description of Artificial Sequence: Synthetic oligonucleotide
  Target: LAMA2; (-) strand; PAM type: YTN; PAM sequence: CTG
aaacacattaaatgaagggt

SEQ ID NO: 224125 - DNA, 20 bp, Artificial Sequence
  Description of Artificial Sequence: Synthetic oligonucleotide
  Target: LAMA2; (-) strand; PAM type: YTN; PAM sequence: TTG
aacctgaaacacattaaatg

SEQ ID NO: 224126 - DNA, 20 bp, Artificial Sequence
  Description of Artificial Sequence: Synthetic oligonucleotide
  Target: LAMA2; (-) strand; PAM type: YTN; PAM sequence: TTA
tgaagacaacggattgaacc

SEQ ID NO: 224127 - DNA, 20 bp, Artificial Sequence
  Description of Artificial Sequence: Synthetic oligonucleotide
  Target: LAMA2; (-) strand; PAM type: YTN; PAM sequence: TTC
cagtgttatgaagacaacgg

SEQ ID NO: 224128 - DNA, 20 bp, Artificial Sequence
  Description of Artificial Sequence: Synthetic oligonucleotide
  Target: LAMA2; (-) strand; PAM type: YTN; PAM sequence: TTA
catccccaaatagaaaataa

SEQ ID NO: 224129 - DNA, 20 bp, Artificial Sequence
  Description of Artificial Sequence: Synthetic oligonucleotide
  Target: LAMA2; (-) strand; PAM type: YTN; PAM sequence: TTT
acatccccaaatagaaaata

SEQ ID NO: 224130 - DNA, 20 bp, Artificial Sequence
  Description of Artificial Sequence: Synthetic oligonucleotide
  Target: LAMA2; (-) strand; PAM type: YTN; PAM sequence: CTT
tacatccccaaatagaaaat

SEQ ID NO: 224131 - DNA, 20 bp, Artificial Sequence
  Description of Artificial Sequence: Synthetic oligonucleotide
  Target: LAMA2; (-) strand; PAM type: YTN; PAM sequence: TTC
ctttacatccccaaatagaa

SEQ ID NO: 224132 - DNA, 20 bp, Artificial Sequence
  Description of Artificial Sequence: Synthetic oligonucleotide
  Target: LAMA2; (-) strand; PAM type: YTN; PAM sequence: CTC
aataaatgtccattccttta

SEQ ID NO: 224133 - DNA, 20 bp, Artificial Sequence
  Description of Artificial Sequence: Synthetic oligonucleotide
  Target: LAMA2; (-) strand; PAM type: YTN; PAM sequence: TTG
tggcagtaaatcctcaataa

SEQ ID NO: 224134 - DNA, 20 bp, Artificial Sequence
  Description of Artificial Sequence: Synthetic oligonucleotide
  Target: LAMA2; (-) strand; PAM type: YTN; PAM sequence: CTA
gcattgtggcagtaaatcct

SEQ ID NO: 224135 - DNA, 20 bp, Artificial Sequence
  Description of Artificial Sequence: Synthetic oligonucleotide
  Target: LAMA2; (-) strand; PAM type: YTN; PAM sequence: TTC
tagcattgtggcagtaaatc

SEQ ID NO: 224136 - DNA, 20 bp, Artificial Sequence
  Description of Artificial Sequence: Synthetic oligonucleotide
  Target: LAMA2; (-) strand; PAM type: YTN; PAM sequence: TTG
tggttctagcattgtggcag

SEQ ID NO: 224137 - DNA, 20 bp, Artificial Sequence
  Description of Artificial Sequence: Synthetic oligonucleotide
  Target: LAMA2; (-) strand; PAM type: YTN; PAM sequence: TTC
agattgtggttctagcattg

SEQ ID NO: 224138 - DNA, 20 bp, Artificial Sequence
  Description of Artificial Sequence: Synthetic oligonucleotide
  Target: LAMA2; (-) strand; PAM type: YTN; PAM sequence: CTA
tgttcagattgtggttctag

SEQ ID NO: 224139 - DNA, 20 bp, Artificial Sequence
  Description of Artificial Sequence: Synthetic oligonucleotide
  Target: LAMA2; (-) strand; PAM type: YTN; PAM sequence: TTC
ctatgttcagattgtggttc

SEQ ID NO: 224140 - DNA, 20 bp, Artificial Sequence
  Description of Artificial Sequence: Synthetic oligonucleotide
  Target: LAMA2; (-) strand; PAM type: YTN; PAM sequence: TTA
gtatggtacagcaaaaacaa

SEQ ID NO: 224141 - DNA, 20 bp, Artificial Sequence
  Description of Artificial Sequence: Synthetic oligonucleotide
  Target: LAMA2; (-) strand; PAM type: YTN; PAM sequence: TTA
gaggcagttagtatggtaca

SEQ ID NO: 224142 - DNA, 20 bp, Artificial Sequence
  Description of Artificial Sequence: Synthetic oligonucleotide
  Target: LAMA2; (-) strand; PAM type: YTN; PAM sequence: TTT
agaggcagttagtatggtac

SEQ ID NO: 224143 - DNA, 20 bp, Artificial Sequence
  Description of Artificial Sequence: Synthetic oligonucleotide
  Target: LAMA2; (-) strand; PAM type: YTN; PAM sequence: CTC
aaaaaagtgccatttagagg

SEQ ID NO: 224144 - DNA, 20 bp, Artificial Sequence
  Description of Artificial Sequence: Synthetic oligonucleotide
  Target: LAMA2; (-) strand; PAM type: YTN; PAM sequence: TTA
tatcacataatcctcaaaaa

SEQ ID NO: 224145 - DNA, 20 bp, Artificial Sequence
  Description of Artificial Sequence: Synthetic oligonucleotide
  Target: LAMA2; (-) strand; PAM type: YTN; PAM sequence: CTT
atatcacataatcctcaaaa

SEQ ID NO: 224146 - DNA, 20 bp, Artificial Sequence
  Description of Artificial Sequence: Synthetic oligonucleotide
  Target: LAMA2; (-) strand; PAM type: YTN; PAM sequence: TTA
cttatatcacataatcctca

SEQ ID NO: 224147 - DNA, 20 bp, Artificial Sequence
  Description of Artificial Sequence: Synthetic oligonucleotide
  Target: LAMA2; (-) strand; PAM type: YTN; PAM sequence: TTT
acttatatcacataatcctc

SEQ ID NO: 224148 - DNA, 20 bp, Artificial Sequence
  Description of Artificial Sequence: Synthetic oligonucleotide
  Target: LAMA2; (-) strand; PAM type: YTN; PAM sequence: TTG
tttacttatatcacataatc

SEQ ID NO: 224149 - DNA, 20 bp, Artificial Sequence
  Description of Artificial Sequence: Synthetic oligonucleotide
  Target: LAMA2; (-) strand; PAM type: YTN; PAM sequence: CTT
gtttacttatatcacataat

SEQ ID NO: 224150 - DNA, 20 bp, Artificial Sequence
  Description of Artificial Sequence: Synthetic oligonucleotide
  Target: LAMA2; (-) strand; PAM type: YTN; PAM sequence: TTA
gaaaacttgtttacttatat

SEQ ID NO: 224151 - DNA, 20 bp, Artificial Sequence
  Description of Artificial Sequence: Synthetic oligonucleotide
  Target: LAMA2; (-) strand; PAM type: YTN; PAM sequence: TTT
agaaaacttgtttacttata

SEQ ID NO: 224152 - DNA, 20 bp, Artificial Sequence
  Description of Artificial Sequence: Synthetic oligonucleotide
  Target: LAMA2; (-) strand; PAM type: YTN; PAM sequence: TTG
atagtttagaaaacttgttt

SEQ ID NO: 224153 - DNA, 20 bp, Artificial Sequence
  Description of Artificial Sequence: Synthetic oligonucleotide
  Target: LAMA2; (-) strand; PAM type: YTN; PAM sequence: CTT
gatagtttagaaaacttgtt

SEQ ID NO: 224154 - DNA, 20 bp, Artificial Sequence
  Description of Artificial Sequence: Synthetic oligonucleotide
  Target: LAMA2; (-) strand; PAM type: YTN; PAM sequence: TTC
ccagtgtgaatagtgcttga

SEQ ID NO: 224155 - DNA, 20 bp, Artificial Sequence
  Description of Artificial Sequence: Synthetic oligonucleotide
  Target: LAMA2; (-) strand; PAM type: YTN; PAM sequence: CTA
gaaattcccagtgtgaatag

SEQ ID NO: 224156 - DNA, 20 bp, Artificial Sequence
  Description of Artificial Sequence: Synthetic oligonucleotide
  Target: LAMA2; (-) strand; PAM type: YTN; PAM sequence: CTG
taaaatacaagctagaaatt

SEQ ID NO: 224157 - DNA, 20 bp, Artificial Sequence
  Description of Artificial Sequence: Synthetic oligonucleotide
  Target: LAMA2; (-) strand; PAM type: YTN; PAM sequence: TTA
aagactgtaaaatacaagct

SEQ ID NO: 224158 - DNA, 20 bp, Artificial Sequence
  Description of Artificial Sequence: Synthetic oligonucleotide
  Target: LAMA2; (-) strand; PAM type: YTN; PAM sequence: CTG
tgttaaagactgtaaaatac

SEQ ID NO: 224159 - DNA, 20 bp, Artificial Sequence
  Description of Artificial Sequence: Synthetic oligonucleotide
  Target: LAMA2; (-) strand; PAM type: YTN; PAM sequence: TTA
ctgtgttaaagactgtaaaa

SEQ ID NO: 224160 - DNA, 20 bp, Artificial Sequence
  Description of Artificial Sequence: Synthetic oligonucleotide
  Target: LAMA2; (-) strand; PAM type: YTN; PAM sequence: CTT
actgtgttaaagactgtaaa

SEQ ID NO: 224161 - DNA, 20 bp, Artificial Sequence
  Description of Artificial Sequence: Synthetic oligonucleotide
  Target: LAMA2; (-) strand; PAM type: YTN; PAM sequence: CTC
accttactgtgttaaagact

SEQ ID NO: 224162 - DNA, 20 bp, Artificial Sequence
  Description of Artificial Sequence: Synthetic oligonucleotide
  Target: LAMA2; (-) strand; PAM type: YTN; PAM sequence: TTA
ctcaccttactgtgttaaag

SEQ ID NO: 224163 - DNA, 20 bp, Artificial Sequence
  Description of Artificial Sequence: Synthetic oligonucleotide
  Target: LAMA2; (-) strand; PAM type: YTN; PAM sequence: TTT
actcaccttactgtgttaaa

SEQ ID NO: 224164 - DNA, 20 bp, Artificial Sequence
  Description of Artificial Sequence: Synthetic oligonucleotide
  Target: LAMA2; (-) strand; PAM type: YTN; PAM sequence: TTA
atagtacataccaatttact

SEQ ID NO: 224165 - DNA, 20 bp, Artificial Sequence
  Description of Artificial Sequence: Synthetic oligonucleotide
  Target: LAMA2; (-) strand; PAM type: YTN; PAM sequence: TTA
ttaatagtacataccaattt

SEQ ID NO: 224166 - DNA, 20 bp, Artificial Sequence
  Description of Artificial Sequence: Synthetic oligonucleotide
  Target: LAMA2; (-) strand; PAM type: YTN; PAM sequence: TTT
attaatagtacataccaatt

SEQ ID NO: 224167 - DNA, 20 bp, Artificial Sequence
  Description of Artificial Sequence: Synthetic oligonucleotide
  Target: LAMA2; (-) strand; PAM type: YTN; PAM sequence: CTA
aaacatttattaatagtaca

SEQ ID NO: 224168 - DNA, 20 bp, Artificial Sequence
  Description of Artificial Sequence: Synthetic oligonucleotide
  Target: LAMA2; (-) strand; PAM type: YTN; PAM sequence: TTA
ccacctaaaacatttattaa

SEQ ID NO: 224169 - DNA, 20 bp, Artificial Sequence
  Description of Artificial Sequence: Synthetic oligonucleotide
  Target: LAMA2; (-) strand; PAM type: YTN; PAM sequence: TTA
ttaccacctaaaacatttat

SEQ ID NO: 224170 - DNA, 20 bp, Artificial Sequence
  Description of Artificial Sequence: Synthetic oligonucleotide
  Target: LAMA2; (-) strand; PAM type: YTN; PAM sequence: TTA
taattattaccacctaaaac

SEQ ID NO: 224171 - DNA, 20 bp, Artificial Sequence
  Description of Artificial Sequence: Synthetic oligonucleotide
  Target: LAMA2; (-) strand; PAM type: YTN; PAM sequence: TTC
cattataattattaccacct

SEQ ID NO: 224172 - DNA, 20 bp, Artificial Sequence
  Description of Artificial Sequence: Synthetic oligonucleotide
  Target: LAMA2; (-) strand; PAM type: YTN; PAM sequence: TTA
aagttccattataattatta

SEQ ID NO: 224173 - DNA, 20 bp, Artificial Sequence
  Description of Artificial Sequence: Synthetic oligonucleotide
  Target: LAMA2; (-) strand; PAM type: YTN; PAM sequence: TTT
aaagttccattataattatt

SEQ ID NO: 224174 - DNA, 20 bp, Artificial Sequence
  Description of Artificial Sequence: Synthetic oligonucleotide
  Target: LAMA2; (-) strand; PAM type: YTN; PAM sequence: CTG
atgtttaaagttccattata

SEQ ID NO: 224175 - DNA, 20 bp, Artificial Sequence
  Description of Artificial Sequence: Synthetic oligonucleotide
  Target: LAMA2; (-) strand; PAM type: YTN; PAM sequence: TTC
acctgatgtttaaagttcca

SEQ ID NO: 224176 - DNA, 20 bp, Artificial Sequence
  Description of Artificial Sequence: Synthetic oligonucleotide
  Target: LAMA2; (-) strand; PAM type: YTN; PAM sequence: TTT
cacctgatgtttaaagttcc

SEQ ID NO: 224177 - DNA, 20 bp, Artificial Sequence
  Description of Artificial Sequence: Synthetic oligonucleotide
  Target: LAMA2; (-) strand; PAM type: YTN; PAM sequence: TTG
gcaacatttcacctgatgtt

SEQ ID NO: 224178 - DNA, 20 bp, Artificial Sequence
  Description of Artificial Sequence: Synthetic oligonucleotide
  Target: LAMA2; (-) strand; PAM type: YTN; PAM sequence: CTC
attggcaacatttcacctga

SEQ ID NO: 224179 - DNA, 20 bp, Artificial Sequence
  Description of Artificial Sequence: Synthetic oligonucleotide
  Target: LAMA2; (-) strand; PAM type: YTN; PAM sequence: TTA
gtaacaactcattggcaaca

SEQ ID NO: 224180 - DNA, 20 bp, Artificial Sequence
  Description of Artificial Sequence: Synthetic oligonucleotide
  Target: LAMA2; (-) strand; PAM type: YTN; PAM sequence: TTT
agtaacaactcattggcaac

SEQ ID NO: 224181 - DNA, 20 bp, Artificial Sequence
  Description of Artificial Sequence: Synthetic oligonucleotide
  Target: LAMA2; (-) strand; PAM type: YTN; PAM sequence: TTT
tagtaacaactcattggcaa

SEQ ID NO: 224182 - DNA, 20 bp, Artificial Sequence
  Description of Artificial Sequence: Synthetic oligonucleotide
  Target: LAMA2; (-) strand; PAM type: YTN; PAM sequence: CTG
gattttagtaacaactcatt

SEQ ID NO: 224183 - DNA, 20 bp, Artificial Sequence
  Description of Artificial Sequence: Synthetic oligonucleotide
  Target: LAMA2; (-) strand; PAM type: YTN; PAM sequence: TTA
agactggattttagtaacaa

SEQ ID NO: 224184 - DNA, 20 bp, Artificial Sequence
  Description of Artificial Sequence: Synthetic oligonucleotide
  Target: LAMA2; (-) strand; PAM type: YTN; PAM sequence: TTA
aaagaaatggattaagactg

SEQ ID NO: 224185 - DNA, 20 bp, Artificial Sequence
  Description of Artificial Sequence: Synthetic oligonucleotide
  Target: LAMA2; (-) strand; PAM type: YTN; PAM sequence: TTT
aaaagaaatggattaagact

SEQ ID NO: 224186 - DNA, 20 bp, Artificial Sequence
  Description of Artificial Sequence: Synthetic oligonucleotide
  Target: LAMA2; (-) strand; PAM type: YTN; PAM sequence: CTT
taaaagaaatggattaagac

SEQ ID NO: 224187 - DNA, 20 bp, Artificial Sequence
  Description of Artificial Sequence: Synthetic oligonucleotide
  Target: LAMA2; (-) strand; PAM type: YTN; PAM sequence: TTG
acaaccatggctttaaaaga

SEQ ID NO: 224188 - DNA, 20 bp, Artificial Sequence
  Description of Artificial Sequence: Synthetic oligonucleotide
  Target: LAMA2; (-) strand; PAM type: YTN; PAM sequence: TTT
gacaaccatggctttaaaag

SEQ ID NO: 224189 - DNA, 20 bp, Artificial Sequence
  Description of Artificial Sequence: Synthetic oligonucleotide
  Target: LAMA2; (-) strand; PAM type: YTN; PAM sequence: TTT
tgacaaccatggctttaaaa

SEQ ID NO: 224190 - DNA, 20 bp, Artificial Sequence
  Description of Artificial Sequence: Synthetic oligonucleotide
  Target: LAMA2; (-) strand; PAM type: YTN; PAM sequence: TTG
ttttgacaaccatggcttta

SEQ ID NO: 224191 - DNA, 20 bp, Artificial Sequence
  Description of Artificial Sequence: Synthetic oligonucleotide
  Target: LAMA2; (-) strand; PAM type: YTN; PAM sequence: TTT
gttttgacaaccatggcttt

SEQ ID NO: 224192 - DNA, 20 bp, Artificial Sequence
  Description of Artificial Sequence: Synthetic oligonucleotide
  Target: LAMA2; (-) strand; PAM type: YTN; PAM sequence: TTT
tgttttgacaaccatggctt

SEQ ID NO: 224193 - DNA, 20 bp, Artificial Sequence
  Description of Artificial Sequence: Synthetic oligonucleotide
  Target: LAMA2; (-) strand; PAM type: YTN; PAM sequence: CTA
agaagtgatgttttgttttg

SEQ ID NO: 224194 - DNA, 20 bp, Artificial Sequence
  Description of Artificial Sequence: Synthetic oligonucleotide
  Target: LAMA2; (-) strand; PAM type: YTN; PAM sequence: TTG
ctaagaagtgatgttttgtt

SEQ ID NO: 224195 - DNA, 20 bp, Artificial Sequence
  Description of Artificial Sequence: Synthetic oligonucleotide
  Target: LAMA2; (-) strand; PAM type: YTN; PAM sequence: TTT
gctaagaagtgatgttttgt

SEQ ID NO: 224196 - DNA, 20 bp, Artificial Sequence
  Description of Artificial Sequence: Synthetic oligonucleotide
  Target: LAMA2; (-) strand; PAM type: YTN; PAM sequence: TTT
tgctaagaagtgatgttttg

SEQ ID NO: 224197 - DNA, 20 bp, Artificial Sequence
  Description of Artificial Sequence: Synthetic oligonucleotide
  Target: LAMA2; (-) strand; PAM type: YTN; PAM sequence: TTT
ttgctaagaagtgatgtttt

SEQ ID NO: 224198 - DNA, 20 bp, Artificial Sequence
  Description of Artificial Sequence: Synthetic oligonucleotide
  Target: LAMA2; (-) strand; PAM type: YTN; PAM sequence: TTT
tttgctaagaagtgatgttt

SEQ ID NO: 224199 - DNA, 20 bp, Artificial Sequence
  Description of Artificial Sequence: Synthetic oligonucleotide
  Target: LAMA2; (-) strand; PAM type: YTN; PAM sequence: CTA
ataattttttgctaagaagt

SEQ ID NO: 224200 - DNA, 20 bp, Artificial Sequence
  Description of Artificial Sequence: Synthetic oligonucleotide
  Target: LAMA2; (-) strand; PAM type: YTN; PAM sequence: TTC
atatctaataattttttgct

SEQ ID NO: 224201 - DNA, 20 bp, Artificial Sequence
  Description of Artificial Sequence: Synthetic oligonucleotide
  Target: LAMA2; (-) strand; PAM type: YTN; PAM sequence: TTA
caggttcatatctaataatt

SEQ ID NO: 224202 - DNA, 20 bp, Artificial Sequence
  Description of Artificial Sequence: Synthetic oligonucleotide
  Target: LAMA2; (-) strand; PAM type: YTN; PAM sequence: CTA
ttacaggttcatatctaata

SEQ ID NO: 224203 - DNA, 20 bp, Artificial Sequence
  Description of Artificial Sequence: Synthetic oligonucleotide
  Target: LAMA2; (-) strand; PAM type: YTN; PAM sequence: TTA
ctattacaggttcatatcta

SEQ ID NO: 224204 - DNA, 20 bp, Artificial Sequence
  Description of Artificial Sequence: Synthetic oligonucleotide
  Target: LAMA2; (-) strand; PAM type: YTN; PAM sequence: TTT
actattacaggttcatatct

SEQ ID NO: 224205 - DNA, 20 bp, Artificial Sequence
  Description of Artificial Sequence: Synthetic oligonucleotide
  Target: LAMA2; (-) strand; PAM type: YTN; PAM sequence: TTT
tactattacaggttcatatc

SEQ ID NO: 224206 - DNA, 20 bp, Artificial Sequence
  Description of Artificial Sequence: Synthetic oligonucleotide
  Target: LAMA2; (-) strand; PAM type: YTN; PAM sequence: CTG
aaatgattttactattacag

SEQ ID NO: 224207 - DNA, 20 bp, Artificial Sequence
  Description of Artificial Sequence: Synthetic oligonucleotide
  Target: LAMA2; (-) strand; PAM type: YTN; PAM sequence: CTC
tgaaatgattttactattac

SEQ ID NO: 224208 - DNA, 20 bp, Artificial Sequence
  Description of Artificial Sequence: Synthetic oligonucleotide
  Target: LAMA2; (-) strand; PAM type: YTN; PAM sequence: TTC
tctgaaatgattttactatt

SEQ ID NO: 224209 - DNA, 20 bp, Artificial Sequence
  Description of Artificial Sequence: Synthetic oligonucleotide
  Target: LAMA2; (-) strand; PAM type: YTN; PAM sequence: TTA
taatgttctctgaaatgatt

SEQ ID NO: 224210 - DNA, 20 bp, Artificial Sequence
  Description of Artificial Sequence: Synthetic oligonucleotide
  Target: LAMA2; (-) strand; PAM type: YTN; PAM sequence: CTT
ataatgttctctgaaatgat

SEQ ID NO: 224211 - DNA, 20 bp, Artificial Sequence
  Description of Artificial Sequence: Synthetic oligonucleotide
  Target: LAMA2; (-) strand; PAM type: YTN; PAM sequence: CTA
taatcttataatgttctctg

SEQ ID NO: 224212 - DNA, 20 bp, Artificial Sequence
  Description of Artificial Sequence: Synthetic oligonucleotide
  Target: LAMA2; (-) strand; PAM type: YTN; PAM sequence: TTC
tataatcttataatgttctc

SEQ ID NO: 224213 - DNA, 20 bp, Artificial Sequence
  Description of Artificial Sequence: Synthetic oligonucleotide
  Target: LAMA2; (-) strand; PAM type: YTN; PAM sequence: TTA
ttctataatcttataatgtt

SEQ ID NO: 224214 - DNA, 20 bp, Artificial Sequence
  Description of Artificial Sequence: Synthetic oligonucleotide
  Target: LAMA2; (-) strand; PAM type: YTN; PAM sequence: TTT
attctataatcttataatgt

SEQ ID NO: 224215 - DNA, 20 bp, Artificial Sequence
  Description of Artificial Sequence: Synthetic oligonucleotide
  Target: LAMA2; (-) strand; PAM type: YTN; PAM sequence: TTT
tattctataatcttataatg

SEQ ID NO: 224216 - DNA, 20 bp, Artificial Sequence
  Description of Artificial Sequence: Synthetic oligonucleotide
  Target: LAMA2; (-) strand; PAM type: YTN; PAM sequence: TTC
agattttattctataatctt

SEQ ID NO: 224217 - DNA, 20 bp, Artificial Sequence
  Description of Artificial Sequence: Synthetic oligonucleotide
  Target: LAMA2; (-) strand; PAM type: YTN; PAM sequence: TTT
cagattttattctataatct

SEQ ID NO: 224218 - DNA, 20 bp, Artificial Sequence
  Description of Artificial Sequence: Synthetic oligonucleotide
  Target: LAMA2; (-) strand; PAM type: YTN; PAM sequence: TTA
tttcagattttattctataa

SEQ ID NO: 224219 - DNA, 20 bp, Artificial Sequence
  Description of Artificial Sequence: Synthetic oligonucleotide
  Target: LAMA2; (-) strand; PAM type: YTN; PAM sequence: TTT
atttcagattttattctata

SEQ ID NO: 224220 - DNA, 20 bp, Artificial Sequence
  Description of Artificial Sequence: Synthetic oligonucleotide
  Target: LAMA2; (-) strand; PAM type: YTN; PAM sequence: TTT
tatttcagattttattctat

SEQ ID NO: 224221 - DNA, 20 bp, Artificial Sequence
  Description of Artificial Sequence: Synthetic oligonucleotide
  Target: LAMA2; (-) strand; PAM type: YTN; PAM sequence: CTA
cagtagattttatttcagat

SEQ ID NO: 224222 - DNA, 20 bp, Artificial Sequence
  Description of Artificial Sequence: Synthetic oligonucleotide
  Target: LAMA2; (-) strand; PAM type: YTN; PAM sequence: CTA
aatgctacagtagattttat

SEQ ID NO: 224223 - DNA, 20 bp, Artificial Sequence
  Description of Artificial Sequence: Synthetic oligonucleotide
  Target: LAMA2; (-) strand; PAM type: YTN; PAM sequence: TTA
tgtcaaatataagtctaaat

SEQ ID NO: 224224 - DNA, 20 bp, Artificial Sequence
  Description of Artificial Sequence: Synthetic oligonucleotide
  Target: LAMA2; (-) strand; PAM type: YTN; PAM sequence: TTT
atgtcaaatataagtctaaa

SEQ ID NO: 224225 - DNA, 20 bp, Artificial Sequence
  Description of Artificial Sequence: Synthetic oligonucleotide
  Target: LAMA2; (-) strand; PAM type: YTN; PAM sequence: TTT
tatgtcaaatataagtctaa

SEQ ID NO: 224226 - DNA, 20 bp, Artificial Sequence
  Description of Artificial Sequence: Synthetic oligonucleotide
  Target: LAMA2; (-) strand; PAM type: YTN; PAM sequence: CTC
atcattttatgtcaaatata

SEQ ID NO: 224227 - DNA, 20 bp, Artificial Sequence
  Description of Artificial Sequence: Synthetic oligonucleotide
  Target: LAMA2; (-) strand; PAM type: YTN; PAM sequence: TTC
tcatcattttatgtcaaata

SEQ ID NO: 224228 - DNA, 20 bp, Artificial Sequence
  Description of Artificial Sequence: Synthetic oligonucleotide
  Target: LAMA2; (-) strand; PAM type: YTN; PAM sequence: TTC
ccaaatattctcatcatttt

SEQ ID NO: 224229 - DNA, 20 bp, Artificial Sequence
  Description of Artificial Sequence: Synthetic oligonucleotide
  Target: LAMA2; (-) strand; PAM type: YTN; PAM sequence: TTG
aattcccaaatattctcatc

SEQ ID NO: 224230 - DNA, 20 bp, Artificial Sequence
  Description of Artificial Sequence: Synthetic oligonucleotide
  Target: LAMA2; (-) strand; PAM type: YTN; PAM sequence: CTA
gggaagtataacaacaacaa

SEQ ID NO: 224231 - DNA, 20 bp, Artificial Sequence
  Description of Artificial Sequence: Synthetic oligonucleotide
  Target: LAMA2; (-) strand; PAM type: YTN; PAM sequence: CTG
gaacacctagggaagtataa

SEQ ID NO: 224232 - DNA, 20 bp, Artificial Sequence
  Description of Artificial Sequence: Synthetic oligonucleotide
  Target: LAMA2; (-) strand; PAM type: YTN; PAM sequence: TTC
acaatcacatacgcgatctg

SEQ ID NO: 224233 - DNA, 20 bp, Artificial Sequence
  Description of Artificial Sequence: Synthetic oligonucleotide
  Target: LAMA2; (-) strand; PAM type: YTN; PAM sequence: CTT
cacaatcacatacgcgatct

SEQ ID NO: 224234 - DNA, 20 bp, Artificial Sequence
  Description of Artificial Sequence: Synthetic oligonucleotide
  Target: LAMA2; (-) strand; PAM type: YTN; PAM sequence: CTG
ccttcacaatcacatacgcg

SEQ ID NO: 224235 - DNA, 20 bp, Artificial Sequence
  Description of Artificial Sequence: Synthetic oligonucleotide
  Target: LAMA2; (-) strand; PAM type: YTN; PAM sequence: TTA
gctgccttcacaatcacata

SEQ ID NO: 224236 - DNA, 20 bp, Artificial Sequence
  Description of Artificial Sequence: Synthetic oligonucleotide
  Target: LAMA2; (-) strand; PAM type: YTN; PAM sequence: TTC
caggccggggggagttagct

SEQ ID NO: 224237 - DNA, 20 bp, Artificial Sequence
  Description of Artificial Sequence: Synthetic oligonucleotide
  Target: LAMA2; (-) strand; PAM type: YTN; PAM sequence: TTT
ccaggccggggggagttagc

SEQ ID NO: 224238 - DNA, 20 bp, Artificial Sequence
  Description of Artificial Sequence: Synthetic oligonucleotide
  Target: LAMA2; (-) strand; PAM type: YTN; PAM sequence: TTC
caaaatccagtttccaggcc

SEQ ID NO: 224239 - DNA, 20 bp, Artificial Sequence
  Description of Artificial Sequence: Synthetic oligonucleotide
  Target: LAMA2; (-) strand; PAM type: YTN; PAM sequence: TTC
aacatcatcaagagagcgtt

SEQ ID NO: 224240 - DNA, 20 bp, Artificial Sequence
  Description of Artificial Sequence: Synthetic oligonucleotide
  Target: LAMA2; (-) strand; PAM type: YTN; PAM sequence: TTG
tattcaacatcatcaagaga

SEQ ID NO: 224241 - DNA, 20 bp, Artificial Sequence
  Description of Artificial Sequence: Synthetic oligonucleotide
  Target: LAMA2; (-) strand; PAM type: YTN; PAM sequence: CTT
gtattcaacatcatcaagag

SEQ ID NO: 224242 - DNA, 20 bp, Artificial Sequence
  Description of Artificial Sequence: Synthetic oligonucleotide
  Target: LAMA2; (-) strand; PAM type: YTN; PAM sequence: CTG
ccagggcttgtattcaacat

SEQ ID NO: 224243 - DNA, 20 bp, Artificial Sequence
  Description of Artificial Sequence: Synthetic oligonucleotide
  Target: LAMA2; (-) strand; PAM type: YTN; PAM sequence: CTG
tcacagcatgatactgccag

SEQ ID NO: 224244 - DNA, 20 bp, Artificial Sequence
  Description of Artificial Sequence: Synthetic oligonucleotide
  Target: LAMA2; (-) strand; PAM type: YTN; PAM sequence: CTC
cgtgtctgtcacagcatgat

SEQ ID NO: 224245 - DNA, 20 bp, Artificial Sequence
  Description of Artificial Sequence: Synthetic oligonucleotide
  Target: LAMA2; (-) strand; PAM type: YTN; PAM sequence: TTA
ggcactccgtgtctgtcaca

SEQ ID NO: 224246 - DNA, 20 bp, Artificial Sequence
  Description of Artificial Sequence: Synthetic oligonucleotide
  Target: LAMA2; (-) strand; PAM type: YTN; PAM sequence: TTG
taaagcgttaggcactccgt

SEQ ID NO: 224247 - DNA, 20 bp, Artificial Sequence
  Description of Artificial Sequence: Synthetic oligonucleotide
  Target: LAMA2; (-) strand; PAM type: YTN; PAM sequence: TTG
gcatatgacggtggcccagt

SEQ ID NO: 224248 - DNA, 20 bp, Artificial Sequence
  Description of Artificial Sequence: Synthetic oligonucleotide
  Target: LAMA2; (-) strand; PAM type: YTN; PAM sequence: TTT
ggcatatgacggtggcccag

SEQ ID NO: 224249 - DNA, 20 bp, Artificial Sequence
  Description of Artificial Sequence: Synthetic oligonucleotide
  Target: LAMA2; (-) strand; PAM type: YTN; PAM sequence: CTT
tggcatatgacggtggccca

SEQ ID NO: 224250 - DNA, 20 bp, Artificial Sequence
  Description of Artificial Sequence: Synthetic oligonucleotide
  Target: LAMA2; (-) strand; PAM type: YTN; PAM sequence: CTC
atcatctttggcatatgacg

SEQ ID NO: 224251 - DNA, 20 bp, Artificial Sequence
  Description of Artificial Sequence: Synthetic oligonucleotide
  Target: LAMA2; (-) strand; PAM type: YTN; PAM sequence: TTG
gagtaaaatgaagtgcagat

SEQ ID NO: 224252 - DNA, 20 bp, Artificial Sequence
  Description of Artificial Sequence: Synthetic oligonucleotide
  Target: LAMA2; (-) strand; PAM type: YTN; PAM sequence: CTT
ggagtaaaatgaagtgcaga

SEQ ID NO: 224253 - DNA, 20 bp, Artificial Sequence
  Description of Artificial Sequence: Synthetic oligonucleotide
  Target: LAMA2; (-) strand; PAM type: YTN; PAM sequence: CTA
aggggtgtatcttggagtaa

SEQ ID NO: 224254 - DNA, 20 bp, Artificial Sequence
  Description of Artificial Sequence: Synthetic oligonucleotide
  Target: LAMA2; (-) strand; PAM type: YTN; PAM sequence: TTC
taaggggtgtatcttggagt

SEQ ID NO: 224255 - DNA, 20 bp, Artificial Sequence
  Description of Artificial Sequence: Synthetic oligonucleotide
  Target: LAMA2; (-) strand; PAM type: YTN; PAM sequence: TTT
ctaaggggtgtatcttggag

SEQ ID NO: 224256 - DNA, 20 bp, Artificial Sequence
  Description of Artificial Sequence: Synthetic oligonucleotide
  Target: LAMA2; (-) strand; PAM type: YTN; PAM sequence: TTT
tctaaggggtgtatcttgga

SEQ ID NO: 224257 - DNA, 20 bp, Artificial Sequence
  Description of Artificial Sequence: Synthetic oligonucleotide
  Target: LAMA2; (-) strand; PAM type: YTN; PAM sequence: CTC
cattttctaaggggtgtatc

SEQ ID NO: 224258 - DNA, 20 bp, Artificial Sequence
  Description of Artificial Sequence: Synthetic oligonucleotide
  Target: LAMA2; (-) strand; PAM type: YTN; PAM sequence: CTC
tccattttctaaggggtgta

SEQ ID NO: 224259 - DNA, 20 bp, Artificial Sequence
  Description of Artificial Sequence: Synthetic oligonucleotide
  Target: LAMA2; (-) strand; PAM type: YTN; PAM sequence: TTA
cctctccattttctaagggg

SEQ ID NO: 224260 - DNA, 20 bp, Artificial Sequence
  Description of Artificial Sequence: Synthetic oligonucleotide
  Target: LAMA2; (-) strand; PAM type: YTN; PAM sequence: CTT
acctctccattttctaaggg

SEQ ID NO: 224261 - DNA, 20 bp, Artificial Sequence
  Description of Artificial Sequence: Synthetic oligonucleotide
  Target: LAMA2; (-) strand; PAM type: YTN; PAM sequence: CTC
atcttacctctccattttct

SEQ ID NO: 224262 - DNA, 20 bp, Artificial Sequence
  Description of Artificial Sequence: Synthetic oligonucleotide
  Target: LAMA2; (-) strand; PAM type: YTN; PAM sequence: TTC
tcatcttacctctccatttt

SEQ ID NO: 224263 - DNA, 20 bp, Artificial Sequence
  Description of Artificial Sequence: Synthetic oligonucleotide
  Target: LAMA2; (-) strand; PAM type: YTN; PAM sequence: TTT
ctcatcttacctctccattt

SEQ ID NO: 224264 - DNA, 20 bp, Artificial Sequence
  Description of Artificial Sequence: Synthetic oligonucleotide
  Target: LAMA2; (-) strand; PAM type: YTN; PAM sequence: TTT
tctcatcttacctctccatt

SEQ ID NO: 224265 - DNA, 20 bp, Artificial Sequence
  Description of Artificial Sequence: Synthetic oligonucleotide
  Target: LAMA2; (-) strand; PAM type: YTN; PAM sequence: TTA
aatggtgagttttctcatct

SEQ ID NO: 224266 - DNA, 20 bp, Artificial Sequence
  Description of Artificial Sequence: Synthetic oligonucleotide
  Target: LAMA2; (-) strand; PAM type: YTN; PAM sequence: CTT
aaatggtgagttttctcatc

SEQ ID NO: 224267 - DNA, 20 bp, Artificial Sequence
  Description of Artificial Sequence: Synthetic oligonucleotide
  Target: LAMA2; (-) strand; PAM type: YTN; PAM sequence: TTC
accgtatcaaatgtgcttaa

SEQ ID NO: 224268 - DNA, 20 bp, Artificial Sequence
  Description of Artificial Sequence: Synthetic oligonucleotide
  Target: LAMA2; (-) strand; PAM type: YTN; PAM sequence: TTT
caccgtatcaaatgtgctta

SEQ ID NO: 224269 - DNA, 20 bp, Artificial Sequence
  Description of Artificial Sequence: Synthetic oligonucleotide
  Target: LAMA2; (-) strand; PAM type: YTN; PAM sequence: CTA
tttcaccgtatcaaatgtgc

SEQ ID NO: 224270 - DNA, 20 bp, Artificial Sequence
  Description of Artificial Sequence: Synthetic oligonucleotide
  Target: LAMA2; (-) strand; PAM type: YTN; PAM sequence: CTG
acaggcctatttcaccgtat

SEQ ID NO: 224271 - DNA, 20 bp, Artificial Sequence
  Description of Artificial Sequence: Synthetic oligonucleotide
  Target: LAMA2; (-) strand; PAM type: YTN; PAM sequence: TTC
tgacaggcctatttcaccgt

SEQ ID NO: 224272 - DNA, 20 bp, Artificial Sequence
  Description of Artificial Sequence: Synthetic oligonucleotide
  Target: LAMA2; (-) strand; PAM type: YTN; PAM sequence: TTT
ctgacaggcctatttcaccg

SEQ ID NO: 224273 - DNA, 20 bp, Artificial Sequence
  Description of Artificial Sequence: Synthetic oligonucleotide
  Target: LAMA2; (-) strand; PAM type: YTN; PAM sequence: CTT
tctgacaggcctatttcacc

SEQ ID NO: 224274 - DNA, 20 bp, Artificial Sequence
  Description of Artificial Sequence: Synthetic oligonucleotide
  Target: LAMA2; (-) strand; PAM type: YTN; PAM sequence: TTC
aggtctttctgacaggccta

SEQ ID NO: 224275 - DNA, 20 bp, Artificial Sequence
  Description of Artificial Sequence: Synthetic oligonucleotide
  Target: LAMA2; (-) strand; PAM type: YTN; PAM sequence: CTG
atatattcaggtctttctga

SEQ ID NO: 224276 - DNA, 20 bp, Artificial Sequence
  Description of Artificial Sequence: Synthetic oligonucleotide
  Target: LAMA2; (-) strand; PAM type: YTN; PAM sequence: TTA
ctgatatattcaggtctttc

SEQ ID NO: 224277 - DNA, 20 bp, Artificial Sequence
  Description of Artificial Sequence: Synthetic oligonucleotide
  Target: LAMA2; (-) strand; PAM type: YTN; PAM sequence: TTA
attactgatatattcaggtc

SEQ ID NO: 224278 - DNA, 20 bp, Artificial Sequence
  Description of Artificial Sequence: Synthetic oligonucleotide
  Target: LAMA2; (-) strand; PAM type: YTN; PAM sequence: CTG
acattaattactgatatatt

SEQ ID NO: 224279 - DNA, 20 bp, Artificial Sequence
  Description of Artificial Sequence: Synthetic oligonucleotide
  Target: LAMA2; (-) strand; PAM type: YTN; PAM sequence: CTC
cctgacattaattactgata

SEQ ID NO: 224280 - DNA, 20 bp, Artificial Sequence
  Description of Artificial Sequence: Synthetic oligonucleotide
  Target: LAMA2; (-) strand; PAM type: YTN; PAM sequence: TTA
aaatctccctgacattaatt

SEQ ID NO: 224281 - DNA, 20 bp, Artificial Sequence
  Description of Artificial Sequence: Synthetic oligonucleotide
  Target: LAMA2; (-) strand; PAM type: YTN; PAM sequence: TTT
aaaatctccctgacattaat

SEQ ID NO: 224282 - DNA, 20 bp, Artificial Sequence
  Description of Artificial Sequence: Synthetic oligonucleotide
  Target: LAMA2; (-) strand; PAM type: YTN; PAM sequence: TTT
taaaatctccctgacattaa

SEQ ID NO: 224283 - DNA, 20 bp, Artificial Sequence
  Description of Artificial Sequence: Synthetic oligonucleotide
  Target: LAMA2; (-) strand; PAM type: YTN; PAM sequence: CTA
ttttaaaatctccctgacat

SEQ ID NO: 224284 - DNA, 20 bp, Artificial Sequence
  Description of Artificial Sequence: Synthetic oligonucleotide
  Target: LAMA2; (-) strand; PAM type: YTN; PAM sequence: CTA
aatcctattttaaaatctcc

SEQ ID NO: 224285 - DNA, 20 bp, Artificial Sequence
  Description of Artificial Sequence: Synthetic oligonucleotide
  Target: LAMA2; (-) strand; PAM type: YTN; PAM sequence: TTG
ctaaatcctattttaaaatc

SEQ ID NO: 224286 - DNA, 20 bp, Artificial Sequence
  Description of Artificial Sequence: Synthetic oligonucleotide
  Target: LAMA2; (-) strand; PAM type: YTN; PAM sequence: TTT
gctaaatcctattttaaaat

SEQ ID NO: 224287 - DNA, 20 bp, Artificial Sequence
  Description of Artificial Sequence: Synthetic oligonucleotide
  Target: LAMA2; (-) strand; PAM type: YTN; PAM sequence: TTT
tgctaaatcctattttaaaa

SEQ ID NO: 224288 - DNA, 20 bp, Artificial Sequence
  Description of Artificial Sequence: Synthetic oligonucleotide
  Target: LAMA2; (-) strand; PAM type: YTN; PAM sequence: CTT
ttgctaaatcctattttaaa

SEQ ID NO: 224289 - DNA, 20 bp, Artificial Sequence
  Description of Artificial Sequence: Synthetic oligonucleotide
  Target: LAMA2; (-) strand; PAM type: YTN; PAM sequence: TTA
aatgtacttttgctaaatcc

SEQ ID NO: 224290 - DNA, 20 bp, Artificial Sequence
  Description of Artificial Sequence: Synthetic oligonucleotide
  Target: LAMA2; (-) strand; PAM type: YTN; PAM sequence: TTT
aaatgtacttttgctaaatc

SEQ ID NO: 224291 - DNA, 20 bp, Artificial Sequence
  Description of Artificial Sequence: Synthetic oligonucleotide
  Target: LAMA2; (-) strand; PAM type: YTN; PAM sequence: CTC
atttaaatgtacttttgcta

SEQ ID NO: 224292 - DNA, 20 bp, Artificial Sequence
  Description of Artificial Sequence: Synthetic oligonucleotide
  Target: LAMA2; (-) strand; PAM type: YTN; PAM sequence: TTA
ataactcatttaaatgtact

SEQ ID NO: 224293 - DNA, 20 bp, Artificial Sequence
  Description of Artificial Sequence: Synthetic oligonucleotide
  Target: LAMA2; (-) strand; PAM type: YTN; PAM sequence: TTT
aataactcatttaaatgtac

SEQ ID NO: 224294 - DNA, 20 bp, Artificial Sequence
  Description of Artificial Sequence: Synthetic oligonucleotide
  Target: LAMA2; (-) strand; PAM type: YTN; PAM sequence: TTA
tttaataactcatttaaatg

SEQ ID NO: 224295 - DNA, 20 bp, Artificial Sequence
  Description of Artificial Sequence: Synthetic oligonucleotide
  Target: LAMA2; (-) strand; PAM type: YTN; PAM sequence: TTT
atttaataactcatttaaat

SEQ ID NO: 224296 - DNA, 20 bp, Artificial Sequence
  Description of Artificial Sequence: Synthetic oligonucleotide
  Target: LAMA2; (-) strand; PAM type: YTN; PAM sequence: TTT
tatttaataactcatttaaa

SEQ ID NO: 224297 - DNA, 20 bp, Artificial Sequence
  Description of Artificial Sequence: Synthetic oligonucleotide
  Target: LAMA2; (-) strand; PAM type: YTN; PAM sequence: TTT
ttatttaataactcatttaa

SEQ ID NO: 224298 - DNA, 20 bp, Artificial Sequence
  Description of Artificial Sequence: Synthetic oligonucleotide
  Target: LAMA2; (-) strand; PAM type: YTN; PAM sequence: TTT
tttatttaataactcattta

SEQ ID NO: 224299 - DNA, 20 bp, Artificial Sequence
  Description of Artificial Sequence: Synthetic oligonucleotide
  Target: LAMA2; (-) strand; PAM type: YTN; PAM sequence: CTT
ttttatttaataactcattt

SEQ ID NO: 224300 - DNA, 20 bp, Artificial Sequence
  Description of Artificial Sequence: Synthetic oligonucleotide
  Target: LAMA2; (-) strand; PAM type: YTN; PAM sequence: TTC
ttttttatttaataactcat

SEQ ID NO: 224301 - DNA, 20 bp, Artificial Sequence
  Description of Artificial Sequence: Synthetic oligonucleotide
  Target: LAMA2; (-) strand; PAM type: YTN; PAM sequence: TTT
cttttttatttaataactca

SEQ ID NO: 224302 - DNA, 20 bp, Artificial Sequence
  Description of Artificial Sequence: Synthetic oligonucleotide
  Target: LAMA2; (-) strand; PAM type: YTN; PAM sequence: TTT
tcttttttatttaataactc

SEQ ID NO: 224303 - DNA, 20 bp, Artificial Sequence
  Description of Artificial Sequence: Synthetic oligonucleotide
  Target: LAMA2; (-) strand; PAM type: YTN; PAM sequence: TTT
ttcttttttatttaataact

SEQ ID NO: 224304 - DNA, 20 bp, Artificial Sequence
  Description of Artificial Sequence: Synthetic oligonucleotide
  Target: LAMA2; (-) strand; PAM type: YTN; PAM sequence: CTC
aggtttttcttttttattta

SEQ ID NO: 224305 - DNA, 20 bp, Artificial Sequence
  Description of Artificial Sequence: Synthetic oligonucleotide
  Target: LAMA2; (-) strand; PAM type: YTN; PAM sequence: CTA
atcacctcaggtttttcttt

SEQ ID NO: 224306 - DNA, 20 bp, Artificial Sequence
  Description of Artificial Sequence: Synthetic oligonucleotide
  Target: LAMA2; (-) strand; PAM type: YTN; PAM sequence: TTC
taatcacctcaggtttttct

SEQ ID NO: 224307 - DNA, 20 bp, Artificial Sequence
  Description of Artificial Sequence: Synthetic oligonucleotide
  Target: LAMA2; (-) strand; PAM type: YTN; PAM sequence: TTA
aaattctaatcacctcaggt

SEQ ID NO: 224308 - DNA, 20 bp, Artificial Sequence
  Description of Artificial Sequence: Synthetic oligonucleotide
  Target: LAMA2; (-) strand; PAM type: YTN; PAM sequence: CTG
gagatgggagacacatgaag

SEQ ID NO: 224309 - DNA, 20 bp, Artificial Sequence
  Description of Artificial Sequence: Synthetic oligonucleotide
  Target: LAMA2; (-) strand; PAM type: YTN; PAM sequence: TTA
ctggagatgggagacacatg

SEQ ID NO: 224310 - DNA, 20 bp, Artificial Sequence
  Description of Artificial Sequence: Synthetic oligonucleotide
  Target: LAMA2; (-) strand; PAM type: YTN; PAM sequence: TTT
actggagatgggagacacat

SEQ ID NO: 224311 - DNA, 20 bp, Artificial Sequence
  Description of Artificial Sequence: Synthetic oligonucleotide
  Target: LAMA2; (-) strand; PAM type: YTN; PAM sequence: CTT
tactggagatgggagacaca

SEQ ID NO: 224312 - DNA, 20 bp, Artificial Sequence
  Description of Artificial Sequence: Synthetic oligonucleotide
  Target: LAMA2; (-) strand; PAM type: YTN; PAM sequence: CTG
atctttactggagatgggag

SEQ ID NO: 224313 - DNA, 20 bp, Artificial Sequence
  Description of Artificial Sequence: Synthetic oligonucleotide
  Target: LAMA2; (-) strand; PAM type: YTN; PAM sequence: CTC
tgatctttactggagatggg

SEQ ID NO: 224314 - DNA, 20 bp, Artificial Sequence
  Description of Artificial Sequence: Synthetic oligonucleotide
  Target: LAMA2; (-) strand; PAM type: YTN; PAM sequence: TTC
tctgatctttactggagatg

SEQ ID NO: 224315 - DNA, 20 bp, Artificial Sequence
  Description of Artificial Sequence: Synthetic oligonucleotide
  Target: LAMA2; (-) strand; PAM type: YTN; PAM sequence: CTT
ctctgatctttactggagat

SEQ ID NO: 224316 - DNA, 20 bp, Artificial Sequence
  Description of Artificial Sequence: Synthetic oligonucleotide
  Target: LAMA2; (-) strand; PAM type: YTN; PAM sequence: CTC
ttctctgatctttactggag

SEQ ID NO: 224317 - DNA, 20 bp, Artificial Sequence
  Description of Artificial Sequence: Synthetic oligonucleotide
  Target: LAMA2; (-) strand; PAM type: YTN; PAM sequence: TTC
ctcttctctgatctttactg

SEQ ID NO: 224318 - DNA, 20 bp, Artificial Sequence
  Description of Artificial Sequence: Synthetic oligonucleotide
  Target: LAMA2; (-) strand; PAM type: YTN; PAM sequence: TTT
cctcttctctgatctttact

SEQ ID NO: 224319 - DNA, 20 bp, Artificial Sequence
  Description of Artificial Sequence: Synthetic oligonucleotide
  Target: LAMA2; (-) strand; PAM type: YTN; PAM sequence: CTA
tttcctcttctctgatcttt

SEQ ID NO: 224320 - DNA, 20 bp, Artificial Sequence
  Description of Artificial Sequence: Synthetic oligonucleotide
  Target: LAMA2; (-) strand; PAM type: YTN; PAM sequence: TTA
aacctatttcctcttctctg

SEQ ID NO: 224321 - DNA, 20 bp, Artificial Sequence
  Description of Artificial Sequence: Synthetic oligonucleotide
  Target: LAMA2; (-) strand; PAM type: YTN; PAM sequence: TTC
cagattaaacctatttcctc

SEQ ID NO: 224322 - DNA, 20 bp, Artificial Sequence
  Description of Artificial Sequence: Synthetic oligonucleotide
  Target: LAMA2; (-) strand; PAM type: YTN; PAM sequence: TTT
ccagattaaacctatttcct

SEQ ID NO: 224323 - DNA, 20 bp, Artificial Sequence
  Description of Artificial Sequence: Synthetic oligonucleotide
  Target: LAMA2; (-) strand; PAM type: YTN; PAM sequence: CTT
tccagattaaacctatttcc

SEQ ID NO: 224324 - DNA, 20 bp, Artificial Sequence
  Description of Artificial Sequence: Synthetic oligonucleotide
  Target: LAMA2; (-) strand; PAM type: YTN; PAM sequence: TTG
actttccagattaaacctat

SEQ ID NO: 224325 - DNA, 20 bp, Artificial Sequence
  Description of Artificial Sequence: Synthetic oligonucleotide
  Target: LAMA2; (-) strand; PAM type: YTN; PAM sequence: TTA
atcattgactttccagatta

SEQ ID NO: 224326 - DNA, 20 bp, Artificial Sequence
  Description of Artificial Sequence: Synthetic oligonucleotide
  Target: LAMA2; (-) strand; PAM type: YTN; PAM sequence: TTA
tatgtaaaattaatcattga

SEQ ID NO: 224327 - DNA, 20 bp, Artificial Sequence
  Description of Artificial Sequence: Synthetic oligonucleotide
  Target: LAMA2; (-) strand; PAM type: YTN; PAM sequence: TTT
atatgtaaaattaatcattg

SEQ ID NO: 224328 - DNA, 20 bp, Artificial Sequence
  Description of Artificial Sequence: Synthetic oligonucleotide
  Target: LAMA2; (-) strand; PAM type: YTN; PAM sequence: CTT
tatatgtaaaattaatcatt

SEQ ID NO: 224329 - DNA, 20 bp, Artificial Sequence
  Description of Artificial Sequence: Synthetic oligonucleotide
  Target: LAMA2; (-) strand; PAM type: YTN; PAM sequence: CTC
tttatatgtaaaattaatca

SEQ ID NO: 224330 - DNA, 20 bp, Artificial Sequence
  Description of Artificial Sequence: Synthetic oligonucleotide
  Target: LAMA2; (-) strand; PAM type: YTN; PAM sequence: TTG
agaaagtctctttatatgta

SEQ ID NO: 224331 - DNA, 20 bp, Artificial Sequence
  Description of Artificial Sequence: Synthetic oligonucleotide
  Target: LAMA2; (-) strand; PAM type: YTN; PAM sequence: TTG
ttgagaaagtctctttatat

SEQ ID NO: 224332 - DNA, 20 bp, Artificial Sequence
  Description of Artificial Sequence: Synthetic oligonucleotide
  Target: LAMA2; (-) strand; PAM type: YTN; PAM sequence: CTC
attgttgagaaagtctcttt

SEQ ID NO: 224333 - DNA, 20 bp, Artificial Sequence
  Description of Artificial Sequence: Synthetic oligonucleotide
  Target: LAMA2; (-) strand; PAM type: YTN; PAM sequence: TTA
gcaatcctcattgttgagaa

SEQ ID NO: 224334 - DNA, 20 bp, Artificial Sequence
  Description of Artificial Sequence: Synthetic oligonucleotide
  Target: LAMA2; (-) strand; PAM type: YTN; PAM sequence: CTA
atcattagcaatcctcattg

SEQ ID NO: 224335 - DNA, 20 bp, Artificial Sequence
  Description of Artificial Sequence: Synthetic oligonucleotide
  Target: LAMA2; (-) strand; PAM type: YTN; PAM sequence: CTC
taatcattagcaatcctcat

SEQ ID NO: 224336 - DNA, 20 bp, Artificial Sequence
  Description of Artificial Sequence: Synthetic oligonucleotide
  Target: LAMA2; (-) strand; PAM type: YTN; PAM sequence: TTC
tctaatcattagcaatcctc

SEQ ID NO: 224337 - DNA, 20 bp, Artificial Sequence
  Description of Artificial Sequence: Synthetic oligonucleotide
  Target: LAMA2; (-) strand; PAM type: YTN; PAM sequence: CTT
ctctaatcattagcaatcct

SEQ ID NO: 224338 - DNA, 20 bp, Artificial Sequence
  Description of Artificial Sequence: Synthetic oligonucleotide
  Target: LAMA2; (-) strand; PAM type: YTN; PAM sequence: CTC
caatccttctctaatcatta

SEQ ID NO: 224339 - DNA, 20 bp, Artificial Sequence
  Description of Artificial Sequence: Synthetic oligonucleotide
  Target: LAMA2; (-) strand; PAM type: YTN; PAM sequence: TTA
aggtctccaatccttctcta

SEQ ID NO: 224340 - DNA, 20 bp, Artificial Sequence
  Description of Artificial Sequence: Synthetic oligonucleotide
  Target: LAMA2; (-) strand; PAM type: YTN; PAM sequence: TTT
aaggtctccaatccttctct

SEQ ID NO: 224341 - DNA, 20 bp, Artificial Sequence
  Description of Artificial Sequence: Synthetic oligonucleotide
  Target: LAMA2; (-) strand; PAM type: YTN; PAM sequence: CTT
taaggtctccaatccttctc

SEQ ID NO: 224342 - DNA, 20 bp, Artificial Sequence
  Description of Artificial Sequence: Synthetic oligonucleotide
  Target: LAMA2; (-) strand; PAM type: YTN; PAM sequence: CTC
aaatgtaaggccacctttaa

SEQ ID NO: 224343 - DNA, 20 bp, Artificial Sequence
  Description of Artificial Sequence: Synthetic oligonucleotide
  Target: LAMA2; (-) strand; PAM type: YTN; PAM sequence: TTC
agaccaaagtacactcaaat

SEQ ID NO: 224344 - DNA, 20 bp, Artificial Sequence
  Description of Artificial Sequence: Synthetic oligonucleotide
  Target: LAMA2; (-) strand; PAM type: YTN; PAM sequence: CTT
cagaccaaagtacactcaaa

SEQ ID NO: 224345 - DNA, 20 bp, Artificial Sequence
  Description of Artificial Sequence: Synthetic oligonucleotide
  Target: LAMA2; (-) strand; PAM type: YTN; PAM sequence: CTC
catcttcagaccaaagtaca

SEQ ID NO: 224346 - DNA, 20 bp, Artificial Sequence
  Description of Artificial Sequence: Synthetic oligonucleotide
  Target: LAMA2; (-) strand; PAM type: YTN; PAM sequence: TTG
tctccatcttcagaccaaag

SEQ ID NO: 224347 - DNA, 20 bp, Artificial Sequence
  Description of Artificial Sequence: Synthetic oligonucleotide
  Target: LAMA2; (-) strand; PAM type: YTN; PAM sequence: TTT
gtctccatcttcagaccaaa

SEQ ID NO: 224348 - DNA, 20 bp, Artificial Sequence
  Description of Artificial Sequence: Synthetic oligonucleotide
  Target: LAMA2; (-) strand; PAM type: YTN; PAM sequence: TTT
tgtctccatcttcagaccaa

SEQ ID NO: 224349 - DNA, 20 bp, Artificial Sequence
  Description of Artificial Sequence: Synthetic oligonucleotide
  Target: LAMA2; (-) strand; PAM type: YTN; PAM sequence: CTT
ttgtctccatcttcagacca

SEQ ID NO: 224350 - DNA, 20 bp, Artificial Sequence
  Description of Artificial Sequence: Synthetic oligonucleotide
  Target: LAMA2; (-) strand; PAM type: YTN; PAM sequence: TTC
ttttgtctccatcttcagac

SEQ ID NO: 224351 - DNA, 20 bp, Artificial Sequence
  Description of Artificial Sequence: Synthetic oligonucleotide
  Target: LAMA2; (-) strand; PAM type: YTN; PAM sequence: TTT
cttttgtctccatcttcaga

SEQ ID NO: 224352 - DNA, 20 bp, Artificial Sequence
  Description of Artificial Sequence: Synthetic oligonucleotide
  Target: LAMA2; (-) strand; PAM type: YTN; PAM sequence: TTC
atttcttttgtctccatctt

SEQ ID NO: 224353 - DNA, 20 bp, Artificial Sequence
  Description of Artificial Sequence: Synthetic oligonucleotide
  Target: LAMA2; (-) strand; PAM type: YTN; PAM sequence: TTC
acaaattcatttcttttgtc

SEQ ID NO: 224354 - DNA, 20 bp, Artificial Sequence
  Description of Artificial Sequence: Synthetic oligonucleotide
  Target: LAMA2; (-) strand; PAM type: YTN; PAM sequence: CTT
cacaaattcatttcttttgt

SEQ ID NO: 224355 - DNA, 20 bp, Artificial Sequence
  Description of Artificial Sequence: Synthetic oligonucleotide
  Target: LAMA2; (-) strand; PAM type: YTN; PAM sequence: TTC
ttcacaaattcatttctttt

SEQ ID NO: 224356 - DNA, 20 bp, Artificial Sequence
  Description of Artificial Sequence: Synthetic oligonucleotide
  Target: LAMA2; (-) strand; PAM type: YTN; PAM sequence: TTT
cttcacaaattcatttcttt

SEQ ID NO: 224357 - DNA, 20 bp, Artificial Sequence
  Description of Artificial Sequence: Synthetic oligonucleotide
  Target: LAMA2; (-) strand; PAM type: YTN; PAM sequence: TTA
catttcttcacaaattcatt

SEQ ID NO: 224358 - DNA, 20 bp, Artificial Sequence
  Description of Artificial Sequence: Synthetic oligonucleotide
  Target: LAMA2; (-) strand; PAM type: YTN; PAM sequence: TTC
atgtggattacatttcttca

SEQ ID NO: 224359 - DNA, 20 bp, Artificial Sequence
  Description of Artificial Sequence: Synthetic oligonucleotide
  Target: LAMA2; (-) strand; PAM type: YTN; PAM sequence: TTT
catgtggattacatttcttc

SEQ ID NO: 224360 - DNA, 20 bp, Artificial Sequence
  Description of Artificial Sequence: Synthetic oligonucleotide
  Target: LAMA2; (-) strand; PAM type: YTN; PAM sequence: CTT
tcatgtggattacatttctt

SEQ ID NO: 224361 - DNA, 20 bp, Artificial Sequence
  Description of Artificial Sequence: Synthetic oligonucleotide
  Target: LAMA2; (-) strand; PAM type: YTN; PAM sequence: TTG
ggtctttcatgtggattaca

SEQ ID NO: 224362 - DNA, 20 bp, Artificial Sequence
  Description of Artificial Sequence: Synthetic oligonucleotide
  Target: LAMA2; (-) strand; PAM type: YTN; PAM sequence: TTT
gggtctttcatgtggattac

SEQ ID NO: 224363 - DNA, 20 bp, Artificial Sequence
  Description of Artificial Sequence: Synthetic oligonucleotide
  Target: LAMA2; (-) strand; PAM type: YTN; PAM sequence: TTC
atttgggtctttcatgtgga

SEQ ID NO: 224364 - DNA, 20 bp, Artificial Sequence
  Description of Artificial Sequence: Synthetic oligonucleotide
  Target: LAMA2; (-) strand; PAM type: YTN; PAM sequence: TTT
catttgggtctttcatgtgg

SEQ ID NO: 224365 - DNA, 20 bp, Artificial Sequence
  Description of Artificial Sequence: Synthetic oligonucleotide
  Target: LAMA2; (-) strand; PAM type: YTN; PAM sequence: TTT
tcatttgggtctttcatgtg

SEQ ID NO: 224366 - DNA, 20 bp, Artificial Sequence
  Description of Artificial Sequence: Synthetic oligonucleotide
  Target: LAMA2; (-) strand; PAM type: YTN; PAM sequence: CTT
ttcatttgggtctttcatgt

SEQ ID NO: 224367 - DNA, 20 bp, Artificial Sequence
  Description of Artificial Sequence: Synthetic oligonucleotide
  Target: LAMA2; (-) strand; PAM type: YTN; PAM sequence: TTA
cttttcatttgggtctttca

SEQ ID NO: 224368 - DNA, 20 bp, Artificial Sequence
  Description of Artificial Sequence: Synthetic oligonucleotide
  Target: LAMA2; (-) strand; PAM type: YTN; PAM sequence: TTG
aaagaattacttttcatttg

SEQ ID NO: 224369 - DNA, 20 bp, Artificial Sequence
  Description of Artificial Sequence: Synthetic oligonucleotide
  Target: LAMA2; (-) strand; PAM type: YTN; PAM sequence: CTA
tgtggtgacagcagaaaaac

SEQ ID NO: 224370 - DNA, 20 bp, Artificial Sequence
  Description of Artificial Sequence: Synthetic oligonucleotide
  Target: LAMA2; (-) strand; PAM type: YTN; PAM sequence: CTG
tagccctatgtggtgacagc

SEQ ID NO: 224371 - DNA, 20 bp, Artificial Sequence
  Description of Artificial Sequence: Synthetic oligonucleotide
  Target: LAMA2; (-) strand; PAM type: YTN; PAM sequence: CTG
acccagggaagaaaccccac

SEQ ID NO: 224372 - DNA, 20 bp, Artificial Sequence
  Description of Artificial Sequence: Synthetic oligonucleotide
  Target: LAMA2; (-) strand; PAM type: YTN; PAM sequence: TTC
cacaaagcctgacccaggga

SEQ ID NO: 224373 - DNA, 20 bp, Artificial Sequence
  Description of Artificial Sequence: Synthetic oligonucleotide
  Target: LAMA2; (-) strand; PAM type: YTN; PAM sequence: CTG
ttccacaaagcctgacccag

SEQ ID NO: 224374 - DNA, 20 bp, Artificial Sequence
  Description of Artificial Sequence: Synthetic oligonucleotide
  Target: LAMA2; (-) strand; PAM type: YTN; PAM sequence: TTA
ctgttccacaaagcctgacc

SEQ ID NO: 224375 - DNA, 20 bp, Artificial Sequence
  Description of Artificial Sequence: Synthetic oligonucleotide
  Target: LAMA2; (-) strand; PAM type: YTN; PAM sequence: CTG
cacattactgttccacaaag

SEQ ID NO: 224376 - DNA, 20 bp, Artificial Sequence
  Description of Artificial Sequence: Synthetic oligonucleotide
  Target: LAMA2; (-) strand; PAM type: YTN; PAM sequence: TTC
ctgcacattactgttccaca

SEQ ID NO: 224377 - DNA, 20 bp, Artificial Sequence
  Description of Artificial Sequence: Synthetic oligonucleotide
  Target: LAMA2; (-) strand; PAM type: YTN; PAM sequence: CTT
cctgcacattactgttccac

SEQ ID NO: 224378 - DNA, 20 bp, Artificial Sequence
  Description of Artificial Sequence: Synthetic oligonucleotide
  Target: LAMA2; (-) strand; PAM type: YTN; PAM sequence: CTA
agacttcctgcacattactg

SEQ ID NO: 224379 - DNA, 20 bp, Artificial Sequence
  Description of Artificial Sequence: Synthetic oligonucleotide
  Target: LAMA2; (-) strand; PAM type: YTN; PAM sequence: CTG
agaacctaagacttcctgca

SEQ ID NO: 224380 - DNA, 20 bp, Artificial Sequence
  Description of Artificial Sequence: Synthetic oligonucleotide
  Target: LAMA2; (-) strand; PAM type: YTN; PAM sequence: TTG
cacatcactgagaacctaag

SEQ ID NO: 224381 - DNA, 20 bp, Artificial Sequence
  Description of Artificial Sequence: Synthetic oligonucleotide
  Target: LAMA2; (-) strand; PAM type: YTN; PAM sequence: CTT
gcacatcactgagaacctaa

SEQ ID NO: 224382 - DNA, 20 bp, Artificial Sequence
  Description of Artificial Sequence: Synthetic oligonucleotide
  Target: LAMA2; (-) strand; PAM type: YTN; PAM sequence: CTA
gcttgcacatcactgagaac

SEQ ID NO: 224383 - DNA, 20 bp, Artificial Sequence
  Description of Artificial Sequence: Synthetic oligonucleotide
  Target: LAMA2; (-) strand; PAM type: YTN; PAM sequence: CTA
agcacgtaacctagcttgca

SEQ ID NO: 224384 - DNA, 20 bp, Artificial Sequence
  Description of Artificial Sequence: Synthetic oligonucleotide
  Target: LAMA2; (-) strand; PAM type: YTN; PAM sequence: TTG
aactaagcacgtaacctagc

SEQ ID NO: 224385 - DNA, 20 bp, Artificial Sequence
  Description of Artificial Sequence: Synthetic oligonucleotide
  Target: LAMA2; (-) strand; PAM type: YTN; PAM sequence: TTT
gaactaagcacgtaacctag

SEQ ID NO: 224386 - DNA, 20 bp, Artificial Sequence
  Description of Artificial Sequence: Synthetic oligonucleotide
  Target: LAMA2; (-) strand; PAM type: YTN; PAM sequence: CTG
gagaagaacatatttgaact

SEQ ID NO: 224387 - DNA, 20 bp, Artificial Sequence
  Description of Artificial Sequence: Synthetic oligonucleotide
  Target: LAMA2; (-) strand; PAM type: YTN; PAM sequence: TTA
accacaggatgacagacact

SEQ ID NO: 224388 - DNA, 20 bp, Artificial Sequence
  Description of Artificial Sequence: Synthetic oligonucleotide
  Target: LAMA2; (-) strand; PAM type: YTN; PAM sequence: CTT
aaccacaggatgacagacac

SEQ ID NO: 224389 - DNA, 20 bp, Artificial Sequence
  Description of Artificial Sequence: Synthetic oligonucleotide
  Target: LAMA2; (-) strand; PAM type: YTN; PAM sequence: CTA
aaatcttaaccacaggatga

SEQ ID NO: 224390 - DNA, 20 bp, Artificial Sequence
  Description of Artificial Sequence: Synthetic oligonucleotide
  Target: LAMA2; (-) strand; PAM type: YTN; PAM sequence: TTA
aaatcaatgaatgaatctaa

SEQ ID NO: 224391 - DNA, 20 bp, Artificial Sequence
  Description of Artificial Sequence: Synthetic oligonucleotide
  Target: LAMA2; (-) strand; PAM type: YTN; PAM sequence: CTT
aaaatcaatgaatgaatcta

SEQ ID NO: 224392 - DNA, 20 bp, Artificial Sequence
  Description of Artificial Sequence: Synthetic oligonucleotide
  Target: LAMA2; (-) strand; PAM type: YTN; PAM sequence: TTA
gaatatgtggcttaaaatca

SEQ ID NO: 224393 - DNA, 20 bp, Artificial Sequence
  Description of Artificial Sequence: Synthetic oligonucleotide
  Target: LAMA2; (-) strand; PAM type: YTN; PAM sequence: CTG
aagccatggttagaatatgt

SEQ ID NO: 224394 - DNA, 20 bp, Artificial Sequence
  Description of Artificial Sequence: Synthetic oligonucleotide
  Target: LAMA2; (-) strand; PAM type: YTN; PAM sequence: CTA
ataacaactgaagccatggt

SEQ ID NO: 224395 - DNA, 20 bp, Artificial Sequence
  Description of Artificial Sequence: Synthetic oligonucleotide
  Target: LAMA2; (-) strand; PAM type: YTN; PAM sequence: CTA
ataaactaataacaactgaa

SEQ ID NO: 224396 - DNA, 20 bp, Artificial Sequence
  Description of Artificial Sequence: Synthetic oligonucleotide
  Target: LAMA2; (-) strand; PAM type: YTN; PAM sequence: CTC
cccgcccccacatacaacta

SEQ ID NO: 224397 - DNA, 20 bp, Artificial Sequence
  Description of Artificial Sequence: Synthetic oligonucleotide
  Target: LAMA2; (-) strand; PAM type: YTN; PAM sequence: CTA
agccagaaaacaaaaaaaaa

SEQ ID NO: 224398 - DNA, 20 bp, Artificial Sequence
  Description of Artificial Sequence: Synthetic oligonucleotide
  Target: LAMA2; (-) strand; PAM type: YTN; PAM sequence: CTG
gatcaagaacacacaactaa

SEQ ID NO: 224399 - DNA, 20 bp, Artificial Sequence
  Description of Artificial Sequence: Synthetic oligonucleotide
  Target: LAMA2; (-) strand; PAM type: YTN; PAM sequence: TTA
agtaactggatcaagaacac

SEQ ID NO: 224400 - DNA, 20 bp, Artificial Sequence
  Description of Artificial Sequence: Synthetic oligonucleotide
  Target: LAMA2; (-) strand; PAM type: YTN; PAM sequence: TTT
aagtaactggatcaagaaca

SEQ ID NO: 224401 - DNA, 20 bp, Artificial Sequence
  Description of Artificial Sequence: Synthetic oligonucleotide
  Target: LAMA2; (-) strand; PAM type: YTN; PAM sequence: CTG
aggtgcagagaatttaagta

SEQ ID NO: 224402 - DNA, 20 bp, Artificial Sequence
  Description of Artificial Sequence: Synthetic oligonucleotide
  Target: LAMA2; (-) strand; PAM type: YTN; PAM sequence: TTA
tgggcgatgaaactgaggtg

SEQ ID NO: 224403 - DNA, 20 bp, Artificial Sequence
  Description of Artificial Sequence: Synthetic oligonucleotide
  Target: LAMA2; (-) strand; PAM type: YTN; PAM sequence: TTT
atgggcgatgaaactgaggt

SEQ ID NO: 224404 - DNA, 20 bp, Artificial Sequence
  Description of Artificial Sequence: Synthetic oligonucleotide
  Target: LAMA2; (-) strand; PAM type: YTN; PAM sequence: CTG
atttatgggcgatgaaactg

SEQ ID NO: 224405 - DNA, 20 bp, Artificial Sequence
  Description of Artificial Sequence: Synthetic oligonucleotide
  Target: LAMA2; (-) strand; PAM type: YTN; PAM sequence: TTC
ctgatttatgggcgatgaaa

SEQ ID NO: 224406 - DNA, 20 bp, Artificial Sequence
  Description of Artificial Sequence: Synthetic oligonucleotide
  Target: LAMA2; (-) strand; PAM type: YTN; PAM sequence: TTA
ttcctgatttatgggcgatg

SEQ ID NO: 224407 - DNA, 20 bp, Artificial Sequence
  Description of Artificial Sequence: Synthetic oligonucleotide
  Target: LAMA2; (-) strand; PAM type: YTN; PAM sequence: TTA
ttattcctgatttatgggcg

SEQ ID NO: 224408 - DNA, 20 bp, Artificial Sequence
  Description of Artificial Sequence: Synthetic oligonucleotide
  Target: LAMA2; (-) strand; PAM type: YTN; PAM sequence: CTA
ttattattcctgatttatgg

SEQ ID NO: 224409 - DNA, 20 bp, Artificial Sequence
  Description of Artificial Sequence: Synthetic oligonucleotide
  Target: LAMA2; (-) strand; PAM type: YTN; PAM sequence: TTA
tatgaggtaagaactattat

SEQ ID NO: 224410 - DNA, 20 bp, Artificial Sequence
  Description of Artificial Sequence: Synthetic oligonucleotide
  Target: LAMA2; (-) strand; PAM type: YTN; PAM sequence: TTG
acaattatatgaggtaagaa

SEQ ID NO: 224411 - DNA, 20 bp, Artificial Sequence
  Description of Artificial Sequence: Synthetic oligonucleotide
  Target: LAMA2; (-) strand; PAM type: YTN; PAM sequence: CTT
gacaattatatgaggtaaga

SEQ ID NO: 224412 - DNA, 20 bp, Artificial Sequence
  Description of Artificial Sequence: Synthetic oligonucleotide
  Target: LAMA2; (-) strand; PAM type: YTN; PAM sequence: CTC
ttgacaattatatgaggtaa

SEQ ID NO: 224413 - DNA, 20 bp, Artificial Sequence
  Description of Artificial Sequence: Synthetic oligonucleotide
  Target: LAMA2; (-) strand; PAM type: YTN; PAM sequence: TTA
atcctcttgacaattatatg

SEQ ID NO: 224414 - DNA, 20 bp, Artificial Sequence
  Description of Artificial Sequence: Synthetic oligonucleotide
  Target: LAMA2; (-) strand; PAM type: YTN; PAM sequence: TTT
aatcctcttgacaattatat

SEQ ID NO: 224415 - DNA, 20 bp, Artificial Sequence
  Description of Artificial Sequence: Synthetic oligonucleotide
  Target: LAMA2; (-) strand; PAM type: YTN; PAM sequence: TTA
aatacaataatgcatttaat

SEQ ID NO: 224416 - DNA, 20 bp, Artificial Sequence
  Description of Artificial Sequence: Synthetic oligonucleotide
  Target: LAMA2; (-) strand; PAM type: YTN; PAM sequence: TTT
aaatacaataatgcatttaa

SEQ ID NO: 224417 - DNA, 20 bp, Artificial Sequence
  Description of Artificial Sequence: Synthetic oligonucleotide
  Target: LAMA2; (-) strand; PAM type: YTN; PAM sequence: CTT
taaatacaataatgcattta

SEQ ID NO: 224418 - DNA, 20 bp, Artificial Sequence
  Description of Artificial Sequence: Synthetic oligonucleotide
  Target: LAMA2; (-) strand; PAM type: YTN; PAM sequence: CTA
atgctttaaatacaataatg

SEQ ID NO: 224419 - DNA, 20 bp, Artificial Sequence
  Description of Artificial Sequence: Synthetic oligonucleotide
  Target: LAMA2; (-) strand; PAM type: YTN; PAM sequence: TTC
taatgctttaaatacaataa

SEQ ID NO: 224420 - DNA, 20 bp, Artificial Sequence
  Description of Artificial Sequence: Synthetic oligonucleotide
  Target: LAMA2; (-) strand; PAM type: YTN; PAM sequence: TTG
ttctaatgctttaaatacaa

SEQ ID NO: 224421 - DNA, 20 bp, Artificial Sequence
  Description of Artificial Sequence: Synthetic oligonucleotide
  Target: LAMA2; (-) strand; PAM type: YTN; PAM sequence: TTC
agcattgttctaatgcttta

SEQ ID NO: 224422 - DNA, 20 bp, Artificial Sequence
  Description of Artificial Sequence: Synthetic oligonucleotide
  Target: LAMA2; (-) strand; PAM type: YTN; PAM sequence: TTT
cagcattgttctaatgcttt

SEQ ID NO: 224423 - DNA, 20 bp, Artificial Sequence
  Description of Artificial Sequence: Synthetic oligonucleotide
  Target: LAMA2; (-) strand; PAM type: YTN; PAM sequence: TTA
gtgtgcatttcagcattgtt

SEQ ID NO: 224424 - DNA, 20 bp, Artificial Sequence
  Description of Artificial Sequence: Synthetic oligonucleotide
  Target: LAMA2; (-) strand; PAM type: YTN; PAM sequence: CTT
agtgtgcatttcagcattgt

SEQ ID NO: 224425 - DNA, 20 bp, Artificial Sequence
  Description of Artificial Sequence: Synthetic oligonucleotide
  Target: LAMA2; (-) strand; PAM type: YTN; PAM sequence: TTA
atggcaacaaaacaataaaa

SEQ ID NO: 224426 - DNA, 20 bp, Artificial Sequence
  Description of Artificial Sequence: Synthetic oligonucleotide
  Target: LAMA2; (-) strand; PAM type: YTN; PAM sequence: CTT
aatggcaacaaaacaataaa

SEQ ID NO: 224427 - DNA, 20 bp, Artificial Sequence
  Description of Artificial Sequence: Synthetic oligonucleotide
  Target: LAMA2; (-) strand; PAM type: YTN; PAM sequence: TTC
cttaatggcaacaaaacaat

SEQ ID NO: 224428 - DNA, 20 bp, Artificial Sequence
  Description of Artificial Sequence: Synthetic oligonucleotide
  Target: LAMA2; (-) strand; PAM type: YTN; PAM sequence: TTT
ccttaatggcaacaaaacaa

SEQ ID NO: 224429 - DNA, 20 bp, Artificial Sequence
  Description of Artificial Sequence: Synthetic oligonucleotide
  Target: LAMA2; (-) strand; PAM type: YTN; PAM sequence: TTA
tttccttaatggcaacaaaa

SEQ ID NO: 224430 - DNA, 20 bp, Artificial Sequence
  Description of Artificial Sequence: Synthetic oligonucleotide
  Target: LAMA2; (-) strand; PAM type: YTN; PAM sequence: TTA
ttatttccttaatggcaaca

SEQ ID NO: 224431 - DNA, 20 bp, Artificial Sequence
  Description of Artificial Sequence: Synthetic oligonucleotide
  Target: LAMA2; (-) strand; PAM type: YTN; PAM sequence: CTA
aggataataataaaaataat

SEQ ID NO: 224432 - DNA, 20 bp, Artificial Sequence
  Description of Artificial Sequence: Synthetic oligonucleotide
  Target: LAMA2; (-) strand; PAM type: YTN; PAM sequence: TTG
agagaagactaaggataata

SEQ ID NO: 224433 - DNA, 20 bp, Artificial Sequence
  Description of Artificial Sequence: Synthetic oligonucleotide
  Target: LAMA2; (-) strand; PAM type: YTN; PAM sequence: TTT
gagagaagactaaggataat

SEQ ID NO: 224434 - DNA, 20 bp, Artificial Sequence
  Description of Artificial Sequence: Synthetic oligonucleotide
  Target: LAMA2; (-) strand; PAM type: YTN; PAM sequence: TTG
ggtatttgagagaagactaa

SEQ ID NO: 224435 - DNA, 20 bp, Artificial Sequence
  Description of Artificial Sequence: Synthetic oligonucleotide
  Target: LAMA2; (-) strand; PAM type: YTN; PAM sequence: TTT
gggtatttgagagaagacta

SEQ ID NO: 224436 - DNA, 20 bp, Artificial Sequence
  Description of Artificial Sequence: Synthetic oligonucleotide
  Target: LAMA2; (-) strand; PAM type: YTN; PAM sequence: CTA
agtcaaagtttgggtatttg

SEQ ID NO: 224437 - DNA, 20 bp, Artificial Sequence
  Description of Artificial Sequence: Synthetic oligonucleotide
  Target: LAMA2; (-) strand; PAM type: YTN; PAM sequence: TTC
aagagagtcactaagtcaaa

SEQ ID NO: 224438 - DNA, 20 bp, Artificial Sequence
  Description of Artificial Sequence: Synthetic oligonucleotide
  Target: LAMA2; (-) strand; PAM type: YTN; PAM sequence: TTG
aataattcaagagagtcact

SEQ ID NO: 224439 - DNA, 20 bp, Artificial Sequence
  Description of Artificial Sequence: Synthetic oligonucleotide
  Target: LAMA2; (-) strand; PAM type: YTN; PAM sequence: CTA
aagaaatattgaataattca

SEQ ID NO: 224440 - DNA, 20 bp, Artificial Sequence
  Description of Artificial Sequence: Synthetic oligonucleotide
  Target: LAMA2; (-) strand; PAM type: YTN; PAM sequence: CTA
aagggagacaagtcagggaa

SEQ ID NO: 224441 - DNA, 20 bp, Artificial Sequence
  Description of Artificial Sequence: Synthetic oligonucleotide
  Target: LAMA2; (-) strand; PAM type: YTN; PAM sequence: TTA
ggtagcatgaaaggaggtgg

SEQ ID NO: 224442 - DNA, 20 bp, Artificial Sequence
  Description of Artificial Sequence: Synthetic oligonucleotide
  Target: LAMA2; (-) strand; PAM type: YTN; PAM sequence: CTA
tgtgggagagaatatcagac

SEQ ID NO: 224443 - DNA, 20 bp, Artificial Sequence
  Description of Artificial Sequence: Synthetic oligonucleotide
  Target: LAMA2; (-) strand; PAM type: YTN; PAM sequence: TTG
gactatgtgggagagaatat

SEQ ID NO: 224444 - DNA, 20 bp, Artificial Sequence
  Description of Artificial Sequence: Synthetic oligonucleotide
  Target: LAMA2; (-) strand; PAM type: YTN; PAM sequence: TTT
ggactatgtgggagagaata

SEQ ID NO: 224445 - DNA, 20 bp, Artificial Sequence
  Description of Artificial Sequence: Synthetic oligonucleotide
  Target: LAMA2; (-) strand; PAM type: YTN; PAM sequence: TTC
agatgtttggactatgtggg

SEQ ID NO: 224446 - DNA, 20 bp, Artificial Sequence
  Description of Artificial Sequence: Synthetic oligonucleotide
  Target: LAMA2; (-) strand; PAM type: YTN; PAM sequence: CTT
cagatgtttggactatgtgg

SEQ ID NO: 224447 - DNA, 20 bp, Artificial Sequence
  Description of Artificial Sequence: Synthetic oligonucleotide
  Target: LAMA2; (-) strand; PAM type: YTN; PAM sequence: CTA
gcttcagatgtttggactat

SEQ ID NO: 224448 - DNA, 20 bp, Artificial Sequence
  Description of Artificial Sequence: Synthetic oligonucleotide
  Target: LAMA2; (-) strand; PAM type: YTN; PAM sequence: CTG
aaaatgtaaatataaatgat

SEQ ID NO: 224449 - DNA, 20 bp, Artificial Sequence
  Description of Artificial Sequence: Synthetic oligonucleotide
  Target: LAMA2; (-) strand; PAM type: YTN; PAM sequence: TTC
tgaaaatgtaaatataaatg

SEQ ID NO: 224450 - DNA, 20 bp, Artificial Sequence
  Description of Artificial Sequence: Synthetic oligonucleotide
  Target: LAMA2; (-) strand; PAM type: YTN; PAM sequence: TTT
ctgaaaatgtaaatataaat

SEQ ID NO: 224451 - DNA, 20 bp, Artificial Sequence
  Description of Artificial Sequence: Synthetic oligonucleotide
  Target: LAMA2; (-) strand; PAM type: YTN; PAM sequence: TTT
tctgaaaatgtaaatataaa

SEQ ID NO: 224452 - DNA, 20 bp, Artificial Sequence
  Description of Artificial Sequence: Synthetic oligonucleotide
  Target: LAMA2; (-) strand; PAM type: YTN; PAM sequence: CTG
gggtgggcatgatagaatgt

SEQ ID NO: 224453 - DNA, 20 bp, Artificial Sequence
  Description of Artificial Sequence: Synthetic oligonucleotide
  Target: LAMA2; (-) strand; PAM type: YTN; PAM sequence: TTG
gctggggtgggcatgataga

SEQ ID NO: 224454 - DNA, 20 bp, Artificial Sequence
  Description of Artificial Sequence: Synthetic oligonucleotide
  Target: LAMA2; (-) strand; PAM type: YTN; PAM sequence: CTA
gattggctggggtgggcatg

SEQ ID NO: 224455 - DNA, 20 bp, Artificial Sequence
  Description of Artificial Sequence: Synthetic oligonucleotide
  Target: LAMA2; (-) strand; PAM type: YTN; PAM sequence: TTG
agagataaccctagattggc

SEQ ID NO: 224456 - DNA, 20 bp, Artificial Sequence
  Description of Artificial Sequence: Synthetic oligonucleotide
  Target: LAMA2; (-) strand; PAM type: YTN; PAM sequence: CTA
gaagtgttgagagataaccc

SEQ ID NO: 224457 - DNA, 20 bp, Artificial Sequence
  Description of Artificial Sequence: Synthetic oligonucleotide
  Target: LAMA2; (-) strand; PAM type: YTN; PAM sequence: TTC
cctagaagtgttgagagata

SEQ ID NO: 224458 - DNA, 20 bp, Artificial Sequence
  Description of Artificial Sequence: Synthetic oligonucleotide
  Target: LAMA2; (-) strand; PAM type: YTN; PAM sequence: TTT
ccctagaagtgttgagagat

SEQ ID NO: 224459 - DNA, 20 bp, Artificial Sequence
  Description of Artificial Sequence: Synthetic oligonucleotide
  Target: LAMA2; (-) strand; PAM type: YTN; PAM sequence: TTT
tccctagaagtgttgagaga

SEQ ID NO: 224460 - DNA, 20 bp, Artificial Sequence
  Description of Artificial Sequence: Synthetic oligonucleotide
  Target: LAMA2; (-) strand; PAM type: YTN; PAM sequence: CTA
attttccctagaagtgttga

SEQ ID NO: 224461 - DNA, 20 bp, Artificial Sequence
  Description of Artificial Sequence: Synthetic oligonucleotide
  Target: LAMA2; (-) strand; PAM type: YTN; PAM sequence: TTA
tgccaaaaccctaattttcc

SEQ ID NO: 224462 - DNA, 20 bp, Artificial Sequence
  Description of Artificial Sequence: Synthetic oligonucleotide
  Target: LAMA2; (-) strand; PAM type: YTN; PAM sequence: TTT
atgccaaaaccctaattttc

SEQ ID NO: 224463 - DNA, 20 bp, Artificial Sequence
  Description of Artificial Sequence: Synthetic oligonucleotide
  Target: LAMA2; (-) strand; PAM type: YTN; PAM sequence: CTG
acagatttatgccaaaaccc

SEQ ID NO: 224464 - DNA, 20 bp, Artificial Sequence
  Description of Artificial Sequence: Synthetic oligonucleotide
  Target: LAMA2; (-) strand; PAM type: YTN; PAM sequence: CTA
atgagggtctgacagattta

SEQ ID NO: 224465 - DNA, 20 bp, Artificial Sequence
  Description of Artificial Sequence: Synthetic oligonucleotide
  Target: LAMA2; (-) strand; PAM type: YTN; PAM sequence: TTA
atataaaaatagtgcctaat

SEQ ID NO: 224466 - DNA, 20 bp, Artificial Sequence
  Description of Artificial Sequence: Synthetic oligonucleotide
  Target: LAMA2; (-) strand; PAM type: YTN; PAM sequence: CTG
gtatacattaatataaaaat

SEQ ID NO: 224467 - DNA, 20 bp, Artificial Sequence
  Description of Artificial Sequence: Synthetic oligonucleotide
  Target: LAMA2; (-) strand; PAM type: YTN; PAM sequence: TTA
aaatatagtgaagcactggt

SEQ ID NO: 224468 - DNA, 20 bp, Artificial Sequence
  Description of Artificial Sequence: Synthetic oligonucleotide
  Target: LAMA2; (-) strand; PAM type: YTN; PAM sequence: TTT
aaaatatagtgaagcactgg

SEQ ID NO: 224469 - DNA, 20 bp, Artificial Sequence
  Description of Artificial Sequence: Synthetic oligonucleotide
  Target: LAMA2; (-) strand; PAM type: YTN; PAM sequence: TTG
aacatggaatttaaaatata

SEQ ID NO: 224470 - DNA, 20 bp, Artificial Sequence
  Description of Artificial Sequence: Synthetic oligonucleotide
  Target: LAMA2; (-) strand; PAM type: YTN; PAM sequence: TTT
gaacatggaatttaaaatat

SEQ ID NO: 224471 - DNA, 20 bp, Artificial Sequence
  Description of Artificial Sequence: Synthetic oligonucleotide
  Target: LAMA2; (-) strand; PAM type: YTN; PAM sequence: TTT
tgaacatggaatttaaaata

SEQ ID NO: 224472 - DNA, 20 bp, Artificial Sequence
  Description of Artificial Sequence: Synthetic oligonucleotide
  Target: LAMA2; (-) strand; PAM type: YTN; PAM sequence: TTT
ttgaacatggaatttaaaat

SEQ ID NO: 224473 - DNA, 20 bp, Artificial Sequence
  Description of Artificial Sequence: Synthetic oligonucleotide
  Target: LAMA2; (-) strand; PAM type: YTN; PAM sequence: CTG
gtatttttgaacatggaatt

SEQ ID NO: 224474 - DNA, 20 bp, Artificial Sequence
  Description of Artificial Sequence: Synthetic oligonucleotide
  Target: LAMA2; (-) strand; PAM type: YTN; PAM sequence: TTC
cccaaaactggtatttttga

SEQ ID NO: 224475 - DNA, 20 bp, Artificial Sequence
  Description of Artificial Sequence: Synthetic oligonucleotide
  Target: LAMA2; (-) strand; PAM type: YTN; PAM sequence: TTT
ccccaaaactggtatttttg

SEQ ID NO: 224476 - DNA, 20 bp, Artificial Sequence
  Description of Artificial Sequence: Synthetic oligonucleotide
  Target: LAMA2; (-) strand; PAM type: YTN; PAM sequence: TTT
tccccaaaactggtattttt

SEQ ID NO: 224477 - DNA, 20 bp, Artificial Sequence
  Description of Artificial Sequence: Synthetic oligonucleotide
  Target: LAMA2; (-) strand; PAM type: YTN; PAM sequence: TTT
ttccccaaaactggtatttt

SEQ ID NO: 224478 - DNA, 20 bp, Artificial Sequence
  Description of Artificial Sequence: Synthetic oligonucleotide
  Target: LAMA2; (-) strand; PAM type: YTN; PAM sequence: TTG
gaatgtttttccccaaaact

SEQ ID NO: 224479 - DNA, 20 bp, Artificial Sequence
  Description of Artificial Sequence: Synthetic oligonucleotide
  Target: LAMA2; (-) strand; PAM type: YTN; PAM sequence: TTT
ggaatgtttttccccaaaac

SEQ ID NO: 224480 - DNA, 20 bp, Artificial Sequence
  Description of Artificial Sequence: Synthetic oligonucleotide
  Target: LAMA2; (-) strand; PAM type: YTN; PAM sequence: CTG
agagtaccatttggaatgtt

SEQ ID NO: 224481 - DNA, 20 bp, Artificial Sequence
  Description of Artificial Sequence: Synthetic oligonucleotide
  Target: LAMA2; (-) strand; PAM type: YTN; PAM sequence: CTG
ctgagagtaccatttggaat

SEQ ID NO: 224482 - DNA, 20 bp, Artificial Sequence
  Description of Artificial Sequence: Synthetic oligonucleotide
  Target: LAMA2; (-) strand; PAM type: YTN; PAM sequence: TTC
tgctgagagtaccatttgga

SEQ ID NO: 224483 - DNA, 20 bp, Artificial Sequence
  Description of Artificial Sequence: Synthetic oligonucleotide
  Target: LAMA2; (-) strand; PAM type: YTN; PAM sequence: TTT
ctgctgagagtaccatttgg

SEQ ID NO: 224484 - DNA, 20 bp, Artificial Sequence
  Description of Artificial Sequence: Synthetic oligonucleotide
  Target: LAMA2; (-) strand; PAM type: YTN; PAM sequence: TTG
agatttctgctgagagtacc

SEQ ID NO: 224485 - DNA, 20 bp, Artificial Sequence
  Description of Artificial Sequence: Synthetic oligonucleotide
  Target: LAMA2; (-) strand; PAM type: YTN; PAM sequence: TTG
gcagattgagatttctgctg

SEQ ID NO: 224486 - DNA, 20 bp, Artificial Sequence
  Description of Artificial Sequence: Synthetic oligonucleotide
  Target: LAMA2; (-) strand; PAM type: YTN; PAM sequence: TTT
ggcagattgagatttctgct

SEQ ID NO: 224487 - DNA, 20 bp, Artificial Sequence
  Description of Artificial Sequence: Synthetic oligonucleotide
  Target: LAMA2; (-) strand; PAM type: YTN; PAM sequence: TTG
tcatttggcagattgagatt

SEQ ID NO: 224488 - DNA, 20 bp, Artificial Sequence
  Description of Artificial Sequence: Synthetic oligonucleotide
  Target: LAMA2; (-) strand; PAM type: YTN; PAM sequence: CTT
gtcatttggcagattgagat

SEQ ID NO: 224489 - DNA, 20 bp, Artificial Sequence
  Description of Artificial Sequence: Synthetic oligonucleotide
  Target: LAMA2; (-) strand; PAM type: YTN; PAM sequence: TTG
agtccttgtcatttggcaga

SEQ ID NO: 224490 - DNA, 20 bp, Artificial Sequence
  Description of Artificial Sequence: Synthetic oligonucleotide
  Target: LAMA2; (-) strand; PAM type: YTN; PAM sequence: TTT
gagtccttgtcatttggcag

SEQ ID NO: 224491 - DNA, 20 bp, Artificial Sequence
  Description of Artificial Sequence: Synthetic oligonucleotide
  Target: LAMA2; (-) strand; PAM type: YTN; PAM sequence: CTG
catttgagtccttgtcattt

SEQ ID NO: 224492 - DNA, 20 bp, Artificial Sequence
  Description of Artificial Sequence: Synthetic oligonucleotide
  Target: LAMA2; (-) strand; PAM type: YTN; PAM sequence: CTC
actgcatttgagtccttgtc

SEQ ID NO: 224493 - DNA, 20 bp, Artificial Sequence
  Description of Artificial Sequence: Synthetic oligonucleotide
  Target: LAMA2; (-) strand; PAM type: YTN; PAM sequence: TTG
actcactgcatttgagtcct

SEQ ID NO: 224494 - DNA, 20 bp, Artificial Sequence
  Description of Artificial Sequence: Synthetic oligonucleotide
  Target: LAMA2; (-) strand; PAM type: YTN; PAM sequence: TTT
gactcactgcatttgagtcc

SEQ ID NO: 224495 - DNA, 20 bp, Artificial Sequence
  Description of Artificial Sequence: Synthetic oligonucleotide
  Target: LAMA2; (-) strand; PAM type: YTN; PAM sequence: CTG
tttgactcactgcatttgag

SEQ ID NO: 224496 - DNA, 20 bp, Artificial Sequence
  Description of Artificial Sequence: Synthetic oligonucleotide
  Target: LAMA2; (-) strand; PAM type: YTN; PAM sequence: TTG
aacagctgtttgactcactg

SEQ ID NO: 224497 - DNA, 20 bp, Artificial Sequence
  Description of Artificial Sequence: Synthetic oligonucleotide
  Target: LAMA2; (-) strand; PAM type: YTN; PAM sequence: CTA
ggcacaaagcaggttgaaca

SEQ ID NO: 224498 - DNA, 20 bp, Artificial Sequence
  Description of Artificial Sequence: Synthetic oligonucleotide
  Target: LAMA2; (-) strand; PAM type: YTN; PAM sequence: CTC
taggcacaaagcaggttgaa

SEQ ID NO: 224499 - DNA, 20 bp, Artificial Sequence
  Description of Artificial Sequence: Synthetic oligonucleotide
  Target: LAMA2; (-) strand; PAM type: YTN; PAM sequence: TTG
gatgcctctaggcacaaagc

SEQ ID NO: 224500 - DNA, 20 bp, Artificial Sequence
  Description of Artificial Sequence: Synthetic oligonucleotide
  Target: LAMA2; (-) strand; PAM type: YTN; PAM sequence: CTG
gccaggaattggatgcctct

SEQ ID NO: 224501 - DNA, 20 bp, Artificial Sequence
  Description of Artificial Sequence: Synthetic oligonucleotide
  Target: LAMA2; (-) strand; PAM type: YTN; PAM sequence: CTC
aggccaaactggccaggaat

SEQ ID NO: 224502 - DNA, 20 bp, Artificial Sequence
  Description of Artificial Sequence: Synthetic oligonucleotide
  Target: LAMA2; (-) strand; PAM type: YTN; PAM sequence: CTC
ccatatcctcaggccaaact

SEQ ID NO: 224503 - DNA, 20 bp, Artificial Sequence
  Description of Artificial Sequence: Synthetic oligonucleotide
  Target: LAMA2; (-) strand; PAM type: YTN; PAM sequence: CTA
ctcccatatcctcaggccaa

SEQ ID NO: 224504 - DNA, 20 bp, Artificial Sequence
  Description of Artificial Sequence: Synthetic oligonucleotide
  Target: LAMA2; (-) strand; PAM type: YTN; PAM sequence: CTC
cctactcccatatcctcagg

SEQ ID NO: 224505 - DNA, 20 bp, Artificial Sequence
  Description of Artificial Sequence: Synthetic oligonucleotide
  Target: LAMA2; (-) strand; PAM type: YTN; PAM sequence: CTG
cactccctactcccatatcc

SEQ ID NO: 224506 - DNA, 20 bp, Artificial Sequence
  Description of Artificial Sequence: Synthetic oligonucleotide
  Target: LAMA2; (-) strand; PAM type: YTN; PAM sequence: TTC
tgcactccctactcccatat

SEQ ID NO: 224507 - DNA, 20 bp, Artificial Sequence
  Description of Artificial Sequence: Synthetic oligonucleotide
  Target: LAMA2; (-) strand; PAM type: YTN; PAM sequence: TTT
ctgcactccctactcccata

SEQ ID NO: 224508 - DNA, 20 bp, Artificial Sequence
  Description of Artificial Sequence: Synthetic oligonucleotide
  Target: LAMA2; (-) strand; PAM type: YTN; PAM sequence: CTT
tctgcactccctactcccat

SEQ ID NO: 224509 - DNA, 20 bp, Artificial Sequence
  Description of Artificial Sequence: Synthetic oligonucleotide
  Target: LAMA2; (-) strand; PAM type: YTN; PAM sequence: CTC
tttctgcactccctactccc

SEQ ID NO: 224510 - DNA, 20 bp, Artificial Sequence
  Description of Artificial Sequence: Synthetic oligonucleotide
  Target: LAMA2; (-) strand; PAM type: YTN; PAM sequence: CTC
aaaactctttctgcactccc

SEQ ID NO: 224511 - DNA, 20 bp, Artificial Sequence
  Description of Artificial Sequence: Synthetic oligonucleotide
  Target: LAMA2; (-) strand; PAM type: YTN; PAM sequence: TTC
aactcaaaactctttctgca

SEQ ID NO: 224512 - DNA, 20 bp, Artificial Sequence
  Description of Artificial Sequence: Synthetic oligonucleotide
  Target: LAMA2; (-) strand; PAM type: YTN; PAM sequence: CTA
ggataaaaaataataaaaat

SEQ ID NO: 224513 - DNA, 20 bp, Artificial Sequence
  Description of Artificial Sequence: Synthetic oligonucleotide
  Target: LAMA2; (-) strand; PAM type: YTN; PAM sequence: CTG
aatctaggataaaaaataat

SEQ ID NO: 224514 - DNA, 20 bp, Artificial Sequence
  Description of Artificial Sequence: Synthetic oligonucleotide
  Target: LAMA2; (-) strand; PAM type: YTN; PAM sequence: TTA
tgtaaactgaatctaggata

SEQ ID NO: 224515 - DNA, 20 bp, Artificial Sequence
  Description of Artificial Sequence: Synthetic oligonucleotide
  Target: LAMA2; (-) strand; PAM type: YTN; PAM sequence: CTT
atgtaaactgaatctaggat

SEQ ID NO: 224516 - DNA, 20 bp, Artificial Sequence
  Description of Artificial Sequence: Synthetic oligonucleotide
  Target: LAMA2; (-) strand; PAM type: YTN; PAM sequence: TTA
gtcttatgtaaactgaatct

SEQ ID NO: 224517 - DNA, 20 bp, Artificial Sequence
  Description of Artificial Sequence: Synthetic oligonucleotide
  Target: LAMA2; (-) strand; PAM type: YTN; PAM sequence: TTA
ttagtcttatgtaaactgaa

SEQ ID NO: 224518 - DNA, 20 bp, Artificial Sequence
  Description of Artificial Sequence: Synthetic oligonucleotide
  Target: LAMA2; (-) strand; PAM type: YTN; PAM sequence: TTG
agaattattagtcttatgta

SEQ ID NO: 224519 - DNA, 20 bp, Artificial Sequence
  Description of Artificial Sequence: Synthetic oligonucleotide
  Target: LAMA2; (-) strand; PAM type: YTN; PAM sequence: TTT
gagaattattagtcttatgt

SEQ ID NO: 224520 - DNA, 20 bp, Artificial Sequence
  Description of Artificial Sequence: Synthetic oligonucleotide
  Target: LAMA2; (-) strand; PAM type: YTN; PAM sequence: TTG
tttgagaattattagtctta

SEQ ID NO: 224521 - DNA, 20 bp, Artificial Sequence
  Description of Artificial Sequence: Synthetic oligonucleotide
  Target: LAMA2; (-) strand; PAM type: YTN; PAM sequence: TTA
aattgtttgagaattattag

SEQ ID NO: 224522 - DNA, 20 bp, Artificial Sequence
  Description of Artificial Sequence: Synthetic oligonucleotide
  Target: LAMA2; (-) strand; PAM type: YTN; PAM sequence: CTT
aaattgtttgagaattatta

SEQ ID NO: 224523 - DNA, 20 bp, Artificial Sequence
  Description of Artificial Sequence: Synthetic oligonucleotide
  Target: LAMA2; (-) strand; PAM type: YTN; PAM sequence: TTA
aaggtatagaatagtcttaa

SEQ ID NO: 224524 - DNA, 20 bp, Artificial Sequence
  Description of Artificial Sequence: Synthetic oligonucleotide
  Target: LAMA2; (-) strand; PAM type: YTN; PAM sequence: TTT
aaaggtatagaatagtctta

SEQ ID NO: 224525 - DNA, 20 bp, Artificial Sequence
  Description of Artificial Sequence: Synthetic oligonucleotide
  Target: LAMA2; (-) strand; PAM type: YTN; PAM sequence: TTT
taaaggtatagaatagtctt

SEQ ID NO: 224526 - DNA, 20 bp, Artificial Sequence
  Description of Artificial Sequence: Synthetic oligonucleotide
  Target: LAMA2; (-) strand; PAM type: YTN; PAM sequence: TTT
ttaaaggtatagaatagtct

SEQ ID NO: 224527 - DNA, 20 bp, Artificial Sequence
  Description of Artificial Sequence: Synthetic oligonucleotide
  Target: LAMA2; (-) strand; PAM type: YTN; PAM sequence: TTG
aatcatttttaaaggtatag

SEQ ID NO: 224528 - DNA, 20 bp, Artificial Sequence
  Description of Artificial Sequence: Synthetic oligonucleotide
  Target: LAMA2; (-) strand; PAM type: YTN; PAM sequence: CTG
aattgaatcatttttaaagg

SEQ ID NO: 224529 - DNA, 20 bp, Artificial Sequence
  Description of Artificial Sequence: Synthetic oligonucleotide
  Target: LAMA2; (-) strand; PAM type: YTN; PAM sequence: TTC
tgaattgaatcatttttaaa

SEQ ID NO: 224530 - DNA, 20 bp, Artificial Sequence
  Description of Artificial Sequence: Synthetic oligonucleotide
  Target: LAMA2; (-) strand; PAM type: YTN; PAM sequence: TTT
ctgaattgaatcatttttaa

SEQ ID NO: 224531 - DNA, 20 bp, Artificial Sequence
  Description of Artificial Sequence: Synthetic oligonucleotide
  Target: LAMA2; (-) strand; PAM type: YTN; PAM sequence: TTA
ataaatttctgaattgaatc

SEQ ID NO: 224532 - DNA, 20 bp, Artificial Sequence
  Description of Artificial Sequence: Synthetic oligonucleotide
  Target: LAMA2; (-) strand; PAM type: YTN; PAM sequence: CTT
aataaatttctgaattgaat

SEQ ID NO: 224533 - DNA, 20 bp, Artificial Sequence
  Description of Artificial Sequence: Synthetic oligonucleotide
  Target: LAMA2; (-) strand; PAM type: YTN; PAM sequence: TTG
cttaataaatttctgaattg

SEQ ID NO: 224534 - DNA, 20 bp, Artificial Sequence
  Description of Artificial Sequence: Synthetic oligonucleotide
  Target: LAMA2; (-) strand; PAM type: YTN; PAM sequence: TTA
tattgcttaataaatttctg

SEQ ID NO: 224535 - DNA, 20 bp, Artificial Sequence
  Description of Artificial Sequence: Synthetic oligonucleotide
  Target: LAMA2; (-) strand; PAM type: YTN; PAM sequence: TTT
atattgcttaataaatttct

SEQ ID NO: 224536 - DNA, 20 bp, Artificial Sequence
  Description of Artificial Sequence: Synthetic oligonucleotide
  Target: LAMA2; (-) strand; PAM type: YTN; PAM sequence: TTT
tatattgcttaataaatttc

SEQ ID NO: 224537 - DNA, 20 bp, Artificial Sequence
  Description of Artificial Sequence: Synthetic oligonucleotide
  Target: LAMA2; (-) strand; PAM type: YTN; PAM sequence: CTG
ccgaagtgtattttatattg

SEQ ID NO: 224538 - DNA, 20 bp, Artificial Sequence
  Description of Artificial Sequence: Synthetic oligonucleotide
  Target: LAMA2; (-) strand; PAM type: YTN; PAM sequence: TTA
catacctgccgaagtgtatt

SEQ ID NO: 224539 - DNA, 20 bp, Artificial Sequence
  Description of Artificial Sequence: Synthetic oligonucleotide
  Target: LAMA2; (-) strand; PAM type: YTN; PAM sequence: TTG
tgacacgcatgttacatacc

SEQ ID NO: 224540 - DNA, 20 bp, Artificial Sequence
  Description of Artificial Sequence: Synthetic oligonucleotide
  Target: LAMA2; (-) strand; PAM type: YTN; PAM sequence: CTT
gtgacacgcatgttacatac

SEQ ID NO: 224541 - DNA, 20 bp, Artificial Sequence
  Description of Artificial Sequence: Synthetic oligonucleotide
  Target: LAMA2; (-) strand; PAM type: YTN; PAM sequence: TTA
atgaagggagagaatgggta

SEQ ID NO: 224542 - DNA, 20 bp, Artificial Sequence
  Description of Artificial Sequence: Synthetic oligonucleotide
  Target: LAMA2; (-) strand; PAM type: YTN; PAM sequence: TTA
ttaatgaagggagagaatgg

SEQ ID NO: 224543 - DNA, 20 bp, Artificial Sequence
  Description of Artificial Sequence: Synthetic oligonucleotide
  Target: LAMA2; (-) strand; PAM type: YTN; PAM sequence: TTA
aggaatggagaaccattatt

SEQ ID NO: 224544 - DNA, 20 bp, Artificial Sequence
  Description of Artificial Sequence: Synthetic oligonucleotide
  Target: LAMA2; (-) strand; PAM type: YTN; PAM sequence: TTT
aaggaatggagaaccattat

SEQ ID NO: 224545 - DNA, 20 bp, Artificial Sequence
  Description of Artificial Sequence: Synthetic oligonucleotide
  Target: LAMA2; (-) strand; PAM type: YTN; PAM sequence: TTG
gtttaaggaatggagaacca

SEQ ID NO: 224546 - DNA, 20 bp, Artificial Sequence
  Description of Artificial Sequence: Synthetic oligonucleotide
  Target: LAMA2; (-) strand; PAM type: YTN; PAM sequence: CTT
ggtttaaggaatggagaacc

SEQ ID NO: 224547 - DNA, 20 bp, Artificial Sequence
  Description of Artificial Sequence: Synthetic oligonucleotide
  Target: LAMA2; (-) strand; PAM type: YTN; PAM sequence: CTG
acttggtttaaggaatggag

SEQ ID NO: 224548 - DNA, 20 bp, Artificial Sequence
  Description of Artificial Sequence: Synthetic oligonucleotide
  Target: LAMA2; (-) strand; PAM type: YTN; PAM sequence: TTG
gcaggctgacttggtttaag

SEQ ID NO: 224549 - DNA, 20 bp, Artificial Sequence
  Description of Artificial Sequence: Synthetic oligonucleotide
  Target: LAMA2; (-) strand; PAM type: YTN; PAM sequence: TTC
atattggcaggctgacttgg

SEQ ID NO: 224550 - DNA, 20 bp, Artificial Sequence
  Description of Artificial Sequence: Synthetic oligonucleotide
  Target: LAMA2; (-) strand; PAM type: YTN; PAM sequence: TTT
catattggcaggctgacttg

SEQ ID NO: 224551 - DNA, 20 bp, Artificial Sequence
  Description of Artificial Sequence: Synthetic oligonucleotide
  Target: LAMA2; (-) strand; PAM type: YTN; PAM sequence: TTG
tttcatattggcaggctgac

SEQ ID NO: 224552 - DNA, 20 bp, Artificial Sequence
  Description of Artificial Sequence: Synthetic oligonucleotide
  Target: LAMA2; (-) strand; PAM type: YTN; PAM sequence: TTT
gtttcatattggcaggctga

SEQ ID NO: 224553 - DNA, 20 bp, Artificial Sequence
  Description of Artificial Sequence: Synthetic oligonucleotide
  Target: LAMA2; (-) strand; PAM type: YTN; PAM sequence: TTT
tgtttcatattggcaggctg

SEQ ID NO: 224554 - DNA, 20 bp, Artificial Sequence
  Description of Artificial Sequence: Synthetic oligonucleotide
  Target: LAMA2; (-) strand; PAM type: YTN; PAM sequence: CTT
ttgtttcatattggcaggct

SEQ ID NO: 224555 - DNA, 20 bp, Artificial Sequence
  Description of Artificial Sequence: Synthetic oligonucleotide
  Target: LAMA2; (-) strand; PAM type: YTN; PAM sequence: CTA
ataaacatgtcttttgtttc

SEQ ID NO: 224556 - DNA, 20 bp, Artificial Sequence
  Description of Artificial Sequence: Synthetic oligonucleotide
  Target: LAMA2; (-) strand; PAM type: YTN; PAM sequence: TTA
actaataaacatgtcttttg

SEQ ID NO: 224557 - DNA, 20 bp, Artificial Sequence
  Description of Artificial Sequence: Synthetic oligonucleotide
  Target: LAMA2; (-) strand; PAM type: YTN; PAM sequence: CTA
attaactaataaacatgtct

SEQ ID NO: 224558 - DNA, 20 bp, Artificial Sequence
  Description of Artificial Sequence: Synthetic oligonucleotide
  Target: LAMA2; (-) strand; PAM type: YTN; PAM sequence: CTA
actaattaactaataaacat

SEQ ID NO: 224559 - DNA, 20 bp, Artificial Sequence
  Description of Artificial Sequence: Synthetic oligonucleotide
  Target: LAMA2; (-) strand; PAM type: YTN; PAM sequence: TTA
aagaaactaactaattaact

SEQ ID NO: 224560 - DNA, 20 bp, Artificial Sequence
  Description of Artificial Sequence: Synthetic oligonucleotide
  Target: LAMA2; (-) strand; PAM type: YTN; PAM sequence: TTA
ggagtgaaaacaatatagcc

SEQ ID NO: 224561 - DNA, 20 bp, Artificial Sequence
  Description of Artificial Sequence: Synthetic oligonucleotide
  Target: LAMA2; (-) strand; PAM type: YTN; PAM sequence: TTT
aggagtgaaaacaatatagc

SEQ ID NO: 224562 - DNA, 20 bp, Artificial Sequence
  Description of Artificial Sequence: Synthetic oligonucleotide
  Target: LAMA2; (-) strand; PAM type: YTN; PAM sequence: TTG
tttaggagtgaaaacaatat

SEQ ID NO: 224563 - DNA, 20 bp, Artificial Sequence
  Description of Artificial Sequence: Synthetic oligonucleotide
  Target: LAMA2; (-) strand; PAM type: YTN; PAM sequence: TTA
gtaagtgttgtttaggagtg

SEQ ID NO: 224564 - DNA, 20 bp, Artificial Sequence
  Description of Artificial Sequence: Synthetic oligonucleotide
  Target: LAMA2; (-) strand; PAM type: YTN; PAM sequence: TTT
agtaagtgttgtttaggagt

SEQ ID NO: 224565 - DNA, 20 bp, Artificial Sequence
  Description of Artificial Sequence: Synthetic oligonucleotide
  Target: LAMA2; (-) strand; PAM type: YTN; PAM sequence: TTT
tagtaagtgttgtttaggag

SEQ ID NO: 224566 - DNA, 20 bp, Artificial Sequence
  Description of Artificial Sequence: Synthetic oligonucleotide
  Target: LAMA2; (-) strand; PAM type: YTN; PAM sequence: TTT
ttagtaagtgttgtttagga

SEQ ID NO: 224567 - DNA, 20 bp, Artificial Sequence
  Description of Artificial Sequence: Synthetic oligonucleotide
  Target: LAMA2; (-) strand; PAM type: YTN; PAM sequence: TTA
ccatcaataagcagttttta

SEQ ID NO: 224568 - DNA, 20 bp, Artificial Sequence
  Description of Artificial Sequence: Synthetic oligonucleotide
  Target: LAMA2; (-) strand; PAM type: YTN; PAM sequence: CTA
atagttaccatcaataagca

SEQ ID NO: 224569 - DNA, 20 bp, Artificial Sequence
  Description of Artificial Sequence: Synthetic oligonucleotide
  Target: LAMA2; (-) strand; PAM type: YTN; PAM sequence: CTC
ctaatagttaccatcaataa

SEQ ID NO: 224570 - DNA, 20 bp, Artificial Sequence
  Description of Artificial Sequence: Synthetic oligonucleotide
  Target: LAMA2; (-) strand; PAM type: YTN; PAM sequence: TTG
ctcctaatagttaccatcaa

SEQ ID NO: 224571 - DNA, 20 bp, Artificial Sequence
  Description of Artificial Sequence: Synthetic oligonucleotide
  Target: LAMA2; (-) strand; PAM type: YTN; PAM sequence: TTC
agtcagttgctcctaatagt

SEQ ID NO: 224572 - DNA, 20 bp, Artificial Sequence
  Description of Artificial Sequence: Synthetic oligonucleotide
  Target: LAMA2; (-) strand; PAM type: YTN; PAM sequence: TTC
cccatgagtgacaaatagac

SEQ ID NO: 224573 - DNA, 20 bp, Artificial Sequence
  Description of Artificial Sequence: Synthetic oligonucleotide
  Target: LAMA2; (-) strand; PAM type: YTN; PAM sequence: CTT
ccccatgagtgacaaataga

SEQ ID NO: 224574 - DNA, 20 bp, Artificial Sequence
  Description of Artificial Sequence: Synthetic oligonucleotide
  Target: LAMA2; (-) strand; PAM type: YTN; PAM sequence: TTC
acttccccatgagtgacaaa

SEQ ID NO: 224575 - DNA, 20 bp, Artificial Sequence
  Description of Artificial Sequence: Synthetic oligonucleotide
  Target: LAMA2; (-) strand; PAM type: YTN; PAM sequence: TTC
attcacttccccatgagtga

SEQ ID NO: 224576 - DNA, 20 bp, Artificial Sequence
  Description of Artificial Sequence: Synthetic oligonucleotide
  Target: LAMA2; (-) strand; PAM type: YTN; PAM sequence: TTT
cattcacttccccatgagtg

SEQ ID NO: 224577 - DNA, 20 bp, Artificial Sequence
  Description of Artificial Sequence: Synthetic oligonucleotide
  Target: LAMA2; (-) strand; PAM type: YTN; PAM sequence: TTA
tttcattcacttccccatga

SEQ ID NO: 224578 - DNA, 20 bp, Artificial Sequence
  Description of Artificial Sequence: Synthetic oligonucleotide
  Target: LAMA2; (-) strand; PAM type: YTN; PAM sequence: CTT
atttcattcacttccccatg

SEQ ID NO: 224579 - DNA, 20 bp, Artificial Sequence
  Description of Artificial Sequence: Synthetic oligonucleotide
  Target: LAMA2; (-) strand; PAM type: YTN; PAM sequence: TTC
cttatttcattcacttcccc

SEQ ID NO: 224580 - DNA, 20 bp, Artificial Sequence
  Description of Artificial Sequence: Synthetic oligonucleotide
  Target: LAMA2; (-) strand; PAM type: YTN; PAM sequence: CTG
ttccttatttcattcacttc

SEQ ID NO: 224581 - DNA, 20 bp, Artificial Sequence
  Description of Artificial Sequence: Synthetic oligonucleotide
  Target: LAMA2; (-) strand; PAM type: YTN; PAM sequence: TTC
tgttccttatttcattcact

SEQ ID NO: 224582 - DNA, 20 bp, Artificial Sequence
  Description of Artificial Sequence: Synthetic oligonucleotide
  Target: LAMA2; (-) strand; PAM type: YTN; PAM sequence: TTT
ctgttccttatttcattcac

SEQ ID NO: 224583 - DNA, 20 bp, Artificial Sequence
  Description of Artificial Sequence: Synthetic oligonucleotide
  Target: LAMA2; (-) strand; PAM type: YTN; PAM sequence: CTT
tctgttccttatttcattca

SEQ ID NO: 224584 - DNA, 20 bp, Artificial Sequence
  Description of Artificial Sequence: Synthetic oligonucleotide
  Target: LAMA2; (-) strand; PAM type: YTN; PAM sequence: TTA
ctttctgttccttatttcat

SEQ ID NO: 224585 - DNA, 20 bp, Artificial Sequence
  Description of Artificial Sequence: Synthetic oligonucleotide
  Target: LAMA2; (-) strand; PAM type: YTN; PAM sequence: TTG
aattactttctgttccttat

SEQ ID NO: 224586 - DNA, 20 bp, Artificial Sequence
  Description of Artificial Sequence: Synthetic oligonucleotide
  Target: LAMA2; (-) strand; PAM type: YTN; PAM sequence: TTT
gaattactttctgttcctta

SEQ ID NO: 224587 - DNA, 20 bp, Artificial Sequence
  Description of Artificial Sequence: Synthetic oligonucleotide
  Target: LAMA2; (-) strand; PAM type: YTN; PAM sequence: TTT
tgaattactttctgttcctt

SEQ ID NO: 224588 - DNA, 20 bp, Artificial Sequence
  Description of Artificial Sequence: Synthetic oligonucleotide
  Target: LAMA2; (-) strand; PAM type: YTN; PAM sequence: CTA
tggcaaatattttgaattac

SEQ ID NO: 224589 - DNA, 20 bp, Artificial Sequence
  Description of Artificial Sequence: Synthetic oligonucleotide
  Target: LAMA2; (-) strand; PAM type: YTN; PAM sequence: TTC
tatggcaaatattttgaatt

SEQ ID NO: 224590 - DNA, 20 bp, Artificial Sequence
  Description of Artificial Sequence: Synthetic oligonucleotide
  Target: LAMA2; (-) strand; PAM type: YTN; PAM sequence: TTA
tcattctatggcaaatattt

SEQ ID NO: 224591 - DNA, 20 bp, Artificial Sequence
  Description of Artificial Sequence: Synthetic oligonucleotide
  Target: LAMA2; (-) strand; PAM type: YTN; PAM sequence: CTT
atcattctatggcaaatatt

SEQ ID NO: 224592 - DNA, 20 bp, Artificial Sequence
  Description of Artificial Sequence: Synthetic oligonucleotide
  Target: LAMA2; (-) strand; PAM type: YTN; PAM sequence: TTC
agtcttatcattctatggca

SEQ ID NO: 224593 - DNA, 20 bp, Artificial Sequence
  Description of Artificial Sequence: Synthetic oligonucleotide
  Target: LAMA2; (-) strand; PAM type: YTN; PAM sequence: CTT
cagtcttatcattctatggc

SEQ ID NO: 224594 - DNA, 20 bp, Artificial Sequence
  Description of Artificial Sequence: Synthetic oligonucleotide
  Target: LAMA2; (-) strand; PAM type: YTN; PAM sequence: TTC
ttcagtcttatcattctatg

SEQ ID NO: 224595 - DNA, 20 bp, Artificial Sequence
  Description of Artificial Sequence: Synthetic oligonucleotide
  Target: LAMA2; (-) strand; PAM type: YTN; PAM sequence: TTA
ttcttcagtcttatcattct

SEQ ID NO: 224596 - DNA, 20 bp, Artificial Sequence
  Description of Artificial Sequence: Synthetic oligonucleotide
  Target: LAMA2; (-) strand; PAM type: YTN; PAM sequence: CTT
attcttcagtcttatcattc

SEQ ID NO: 224597 - DNA, 20 bp, Artificial Sequence
  Description of Artificial Sequence: Synthetic oligonucleotide
  Target: LAMA2; (-) strand; PAM type: YTN; PAM sequence: TTC
ttattcttcagtcttatcat

SEQ ID NO: 224598 - DNA, 20 bp, Artificial Sequence
  Description of Artificial Sequence: Synthetic oligonucleotide
  Target: LAMA2; (-) strand; PAM type: YTN; PAM sequence: TTA
attcttattcttcagtctta

SEQ ID NO: 224599 - DNA, 20 bp, Artificial Sequence
  Description of Artificial Sequence: Synthetic oligonucleotide
  Target: LAMA2; (-) strand; PAM type: YTN; PAM sequence: TTT
aattcttattcttcagtctt

SEQ ID NO: 224600 - DNA, 20 bp, Artificial Sequence
  Description of Artificial Sequence: Synthetic oligonucleotide
  Target: LAMA2; (-) strand; PAM type: YTN; PAM sequence: CTG
aatttaattcttattcttca

SEQ ID NO: 224601 - DNA, 20 bp, Artificial Sequence
  Description of Artificial Sequence: Synthetic oligonucleotide
  Target: LAMA2; (-) strand; PAM type: YTN; PAM sequence: CTA
ggagaggtctgaatttaatt

SEQ ID NO: 224602 - DNA, 20 bp, Artificial Sequence
  Description of Artificial Sequence: Synthetic oligonucleotide
  Target: LAMA2; (-) strand; PAM type: YTN; PAM sequence: CTA
tataaaatgaatagatagcc

SEQ ID NO: 224603 - DNA, 20 bp, Artificial Sequence
  Description of Artificial Sequence: Synthetic oligonucleotide
  Target: LAMA2; (-) strand; PAM type: YTN; PAM sequence: TTC
cacaaagtaagctatataaa

SEQ ID NO: 224604 - DNA, 20 bp, Artificial Sequence
  Description of Artificial Sequence: Synthetic oligonucleotide
  Target: LAMA2; (-) strand; PAM type: YTN; PAM sequence: TTC
aaaaaagtaacatattccac

SEQ ID NO: 224605 - DNA, 20 bp, Artificial Sequence
  Description of Artificial Sequence: Synthetic oligonucleotide
  Target: LAMA2; (-) strand; PAM type: YTN; PAM sequence: CTA
ttcaaaaaagtaacatattc

SEQ ID NO: 224606 - DNA, 20 bp, Artificial Sequence
  Description of Artificial Sequence: Synthetic oligonucleotide
  Target: LAMA2; (-) strand; PAM type: YTN; PAM sequence: CTG
tctattcaaaaaagtaacat

SEQ ID NO: 224607 - DNA, 20 bp, Artificial Sequence
  Description of Artificial Sequence: Synthetic oligonucleotide
  Target: LAMA2; (-) strand; PAM type: YTN; PAM sequence: TTG
gaggatatcacctgtctatt

SEQ ID NO: 224608 - DNA, 20 bp, Artificial Sequence
  Description of Artificial Sequence: Synthetic oligonucleotide
  Target: LAMA2; (-) strand; PAM type: YTN; PAM sequence: CTT
ggaggatatcacctgtctat

SEQ ID NO: 224609 - DNA, 20 bp, Artificial Sequence
  Description of Artificial Sequence: Synthetic oligonucleotide
  Target: LAMA2; (-) strand; PAM type: YTN; PAM sequence: CTG
agagtcttggaggatatcac

SEQ ID NO: 224610 - DNA, 20 bp, Artificial Sequence
  Description of Artificial Sequence: Synthetic oligonucleotide
  Target: LAMA2; (-) strand; PAM type: YTN; PAM sequence: TTG
agctgagagtcttggaggat

SEQ ID NO: 224611 - DNA, 20 bp, Artificial Sequence
  Description of Artificial Sequence: Synthetic oligonucleotide
  Target: LAMA2; (-) strand; PAM type: YTN; PAM sequence: TTA
tcattgagctgagagtcttg

SEQ ID NO: 224612 - DNA, 20 bp, Artificial Sequence
  Description of Artificial Sequence: Synthetic oligonucleotide
  Target: LAMA2; (-) strand; PAM type: YTN; PAM sequence: TTA
tattatcattgagctgagag

SEQ ID NO: 224613 - DNA, 20 bp, Artificial Sequence
  Description of Artificial Sequence: Synthetic oligonucleotide
  Target: LAMA2; (-) strand; PAM type: YTN; PAM sequence: TTC
agttatattatcattgagct

SEQ ID NO: 224614 - DNA, 20 bp, Artificial Sequence
  Description of Artificial Sequence: Synthetic oligonucleotide
  Target: LAMA2; (-) strand; PAM type: YTN; PAM sequence: TTT
cagttatattatcattgagc

SEQ ID NO: 224615 - DNA, 20 bp, Artificial Sequence
  Description of Artificial Sequence: Synthetic oligonucleotide
  Target: LAMA2; (-) strand; PAM type: YTN; PAM sequence: TTA
tttcagttatattatcattg

SEQ ID NO: 224616 - DNA, 20 bp, Artificial Sequence
  Description of Artificial Sequence: Synthetic oligonucleotide
  Target: LAMA2; (-) strand; PAM type: YTN; PAM sequence: TTA
ttatttcagttatattatca

SEQ ID NO: 224617 - DNA, 20 bp, Artificial Sequence
  Description of Artificial Sequence: Synthetic oligonucleotide
  Target: LAMA2; (-) strand; PAM type: YTN; PAM sequence: CTC
aattattatttcagttatat

SEQ ID NO: 224618 - DNA, 20 bp, Artificial Sequence
  Description of Artificial Sequence: Synthetic oligonucleotide
  Target: LAMA2; (-) strand; PAM type: YTN; PAM sequence: CTG
agaatcagagacctcaatta

SEQ ID NO: 224619 - DNA, 20 bp, Artificial Sequence
  Description of Artificial Sequence: Synthetic oligonucleotide
  Target: LAMA2; (-) strand; PAM type: YTN; PAM sequence: TTA
cctgagaatcagagacctca

SEQ ID NO: 224620 - DNA, 20 bp, Artificial Sequence
  Description of Artificial Sequence: Synthetic oligonucleotide
  Target: LAMA2; (-) strand; PAM type: YTN; PAM sequence: TTT
acctgagaatcagagacctc

SEQ ID NO: 224621 - DNA, 20 bp, Artificial Sequence
  Description of Artificial Sequence: Synthetic oligonucleotide
  Target: LAMA2; (-) strand; PAM type: YTN; PAM sequence: TTA
tggatgaaatatttacctga

SEQ ID NO: 224622 - DNA, 20 bp, Artificial Sequence
  Description of Artificial Sequence: Synthetic oligonucleotide
  Target: LAMA2; (-) strand; PAM type: YTN; PAM sequence: TTA
ccagattatggatgaaatat

SEQ ID NO: 224623 - DNA, 20 bp, Artificial Sequence
  Description of Artificial Sequence: Synthetic oligonucleotide
  Target: LAMA2; (-) strand; PAM type: YTN; PAM sequence: CTT
accagattatggatgaaata

SEQ ID NO: 224624 - DNA, 20 bp, Artificial Sequence
  Description of Artificial Sequence: Synthetic oligonucleotide
  Target: LAMA2; (-) strand; PAM type: YTN; PAM sequence: TTA
atccttaccagattatggat

SEQ ID NO: 224625 - DNA, 20 bp, Artificial Sequence
  Description of Artificial Sequence: Synthetic oligonucleotide
  Target: LAMA2; (-) strand; PAM type: YTN; PAM sequence: TTT
aatccttaccagattatgga

SEQ ID NO: 224626 - DNA, 20 bp, Artificial Sequence
  Description of Artificial Sequence: Synthetic oligonucleotide
  Target: LAMA2; (-) strand; PAM type: YTN; PAM sequence: TTT
taatccttaccagattatgg

SEQ ID NO: 224627 - DNA, 20 bp, Artificial Sequence
  Description of Artificial Sequence: Synthetic oligonucleotide
  Target: LAMA2; (-) strand; PAM type: YTN; PAM sequence: CTT
ttaatccttaccagattatg

SEQ ID NO: 224628 - DNA, 20 bp, Artificial Sequence
  Description of Artificial Sequence: Synthetic oligonucleotide
  Target: LAMA2; (-) strand; PAM type: YTN; PAM sequence: TTA
aaagtcaacttttaatcctt

SEQ ID NO: 224629 - DNA, 20 bp, Artificial Sequence
  Description of Artificial Sequence: Synthetic oligonucleotide
  Target: LAMA2; (-) strand; PAM type: YTN; PAM sequence: TTT
aaaagtcaacttttaatcct

SEQ ID NO: 224630 - DNA, 20 bp, Artificial Sequence
  Description of Artificial Sequence: Synthetic oligonucleotide
  Target: LAMA2; (-) strand; PAM type: YTN; PAM sequence: TTT
taaaagtcaacttttaatcc

SEQ ID NO: 224631 - DNA, 20 bp, Artificial Sequence
  Description of Artificial Sequence: Synthetic oligonucleotide
  Target: LAMA2; (-) strand; PAM type: YTN; PAM sequence: CTT
ttaaaagtcaacttttaatc

SEQ ID NO: 224632 - DNA, 20 bp, Artificial Sequence
  Description of Artificial Sequence: Synthetic oligonucleotide
  Target: LAMA2; (-) strand; PAM type: YTN; PAM sequence: TTG
tcaacttttaaaagtcaact

SEQ ID NO: 224633 - DNA, 20 bp, Artificial Sequence
  Description of Artificial Sequence: Synthetic oligonucleotide
  Target: LAMA2; (-) strand; PAM type: YTN; PAM sequence: TTA
gcgattgtcaacttttaaaa

SEQ ID NO: 224634 - DNA, 20 bp, Artificial Sequence
  Description of Artificial Sequence: Synthetic oligonucleotide
  Target: LAMA2; (-) strand; PAM type: YTN; PAM sequence: TTT
agcgattgtcaacttttaaa

SEQ ID NO: 224635 - DNA, 20 bp, Artificial Sequence
  Description of Artificial Sequence: Synthetic oligonucleotide
  Target: LAMA2; (-) strand; PAM type: YTN; PAM sequence: TTA
agtttagcgattgtcaactt

SEQ ID NO: 224636 - DNA, 20 bp, Artificial Sequence
  Description of Artificial Sequence: Synthetic oligonucleotide
  Target: LAMA2; (-) strand; PAM type: YTN; PAM sequence: TTT
aagtttagcgattgtcaact

SEQ ID NO: 224637 - DNA, 20 bp, Artificial Sequence
  Description of Artificial Sequence: Synthetic oligonucleotide
  Target: LAMA2; (-) strand; PAM type: YTN; PAM sequence: TTT
taagtttagcgattgtcaac

SEQ ID NO: 224638 - DNA, 20 bp, Artificial Sequence
  Description of Artificial Sequence: Synthetic oligonucleotide
  Target: LAMA2; (-) strand; PAM type: YTN; PAM sequence: TTT
ttaagtttagcgattgtcaa

SEQ ID NO: 224639 - DNA, 20 bp, Artificial Sequence
  Description of Artificial Sequence: Synthetic oligonucleotide
  Target: LAMA2; (-) strand; PAM type: YTN; PAM sequence: CTG
aaccatttttaagtttagcg

SEQ ID NO: 224640 - DNA, 20 bp, Artificial Sequence
  Description of Artificial Sequence: Synthetic oligonucleotide
  Target: LAMA2; (-) strand; PAM type: YTN; PAM sequence: CTC
tgaaccatttttaagtttag

SEQ ID NO: 224641 - DNA, 20 bp, Artificial Sequence
  Description of Artificial Sequence: Synthetic oligonucleotide
  Target: LAMA2; (-) strand; PAM type: YTN; PAM sequence: CTC
ctctgaaccatttttaagtt

SEQ ID NO: 224642 - DNA, 20 bp, Artificial Sequence
  Description of Artificial Sequence: Synthetic oligonucleotide
  Target: LAMA2; (-) strand; PAM type: YTN; PAM sequence: TTG
tatctcctctgaaccatttt

SEQ ID NO: 224643 - DNA, 20 bp, Artificial Sequence
  Description of Artificial Sequence: Synthetic oligonucleotide
  Target: LAMA2; (-) strand; PAM type: YTN; PAM sequence: TTA
gatccagcaatattgtatct

SEQ ID NO: 224644 - DNA, 20 bp, Artificial Sequence
  Description of Artificial Sequence: Synthetic oligonucleotide
  Target: LAMA2; (-) strand; PAM type: YTN; PAM sequence: TTA
cattagatccagcaatattg

SEQ ID NO: 224645 - DNA, 20 bp, Artificial Sequence
  Description of Artificial Sequence: Synthetic oligonucleotide
  Target: LAMA2; (-) strand; PAM type: YTN; PAM sequence: CTT
acattagatccagcaatatt

SEQ ID NO: 224646 - DNA, 20 bp, Artificial Sequence
  Description of Artificial Sequence: Synthetic oligonucleotide
  Target: LAMA2; (-) strand; PAM type: YTN; PAM sequence: CTA
cttacattagatccagcaat

SEQ ID NO: 224647 - DNA, 20 bp, Artificial Sequence
  Description of Artificial Sequence: Synthetic oligonucleotide
  Target: LAMA2; (-) strand; PAM type: YTN; PAM sequence: TTC
tacttacattagatccagca

SEQ ID NO: 224648 - DNA, 20 bp, Artificial Sequence
  Description of Artificial Sequence: Synthetic oligonucleotide
  Target: LAMA2; (-) strand; PAM type: YTN; PAM sequence: TTT
ctacttacattagatccagc

SEQ ID NO: 224649 - DNA, 20 bp, Artificial Sequence
  Description of Artificial Sequence: Synthetic oligonucleotide
  Target: LAMA2; (-) strand; PAM type: YTN; PAM sequence: CTT
tctacttacattagatccag

SEQ ID NO: 224650 - DNA, 20 bp, Artificial Sequence
  Description of Artificial Sequence: Synthetic oligonucleotide
  Target: LAMA2; (-) strand; PAM type: YTN; PAM sequence: TTC
tttctacttacattagatcc

SEQ ID NO: 224651 - DNA, 20 bp, Artificial Sequence
  Description of Artificial Sequence: Synthetic oligonucleotide
  Target: LAMA2; (-) strand; PAM type: YTN; PAM sequence: TTA
ggattctttctacttacatt

SEQ ID NO: 224652 - DNA, 20 bp, Artificial Sequence
  Description of Artificial Sequence: Synthetic oligonucleotide
  Target: LAMA2; (-) strand; PAM type: YTN; PAM sequence: CTA
tgccatgatatatcagaatt

SEQ ID NO: 224653 - DNA, 20 bp, Artificial Sequence
  Description of Artificial Sequence: Synthetic oligonucleotide
  Target: LAMA2; (-) strand; PAM type: YTN; PAM sequence: TTC
tatgccatgatatatcagaa

SEQ ID NO: 224654 - DNA, 20 bp, Artificial Sequence
  Description of Artificial Sequence: Synthetic oligonucleotide
  Target: LAMA2; (-) strand; PAM type: YTN; PAM sequence: TTT
ctatgccatgatatatcaga

SEQ ID NO: 224655 - DNA, 20 bp, Artificial Sequence
  Description of Artificial Sequence: Synthetic oligonucleotide
  Target: LAMA2; (-) strand; PAM type: YTN; PAM sequence: TTT
tctatgccatgatatatcag

SEQ ID NO: 224656 - DNA, 20 bp, Artificial Sequence
  Description of Artificial Sequence: Synthetic oligonucleotide
  Target: LAMA2; (-) strand; PAM type: YTN; PAM sequence: TTT
ttctatgccatgatatatca

SEQ ID NO: 224657 - DNA, 20 bp, Artificial Sequence
  Description of Artificial Sequence: Synthetic oligonucleotide
  Target: LAMA2; (-) strand; PAM type: YTN; PAM sequence: CTT
tttctatgccatgatatatc

SEQ ID NO: 224658 - DNA, 20 bp, Artificial Sequence
  Description of Artificial Sequence: Synthetic oligonucleotide
  Target: LAMA2; (-) strand; PAM type: YTN; PAM sequence: TTG
tgtctttttctatgccatga

SEQ ID NO: 224659 - DNA, 20 bp, Artificial Sequence
  Description of Artificial Sequence: Synthetic oligonucleotide
  Target: LAMA2; (-) strand; PAM type: YTN; PAM sequence: CTT
gtgtctttttctatgccatg

SEQ ID NO: 224660 - DNA, 20 bp, Artificial Sequence
  Description of Artificial Sequence: Synthetic oligonucleotide
  Target: LAMA2; (-) strand; PAM type: YTN; PAM sequence: TTC
cttgtgtctttttctatgcc

SEQ ID NO: 224661 - DNA, 20 bp, Artificial Sequence
  Description of Artificial Sequence: Synthetic oligonucleotide
  Target: LAMA2; (-) strand; PAM type: YTN; PAM sequence: CTA
attccttgtgtctttttcta

SEQ ID NO: 224662 - DNA, 20 bp, Artificial Sequence
  Description of Artificial Sequence: Synthetic oligonucleotide
  Target: LAMA2; (-) strand; PAM type: YTN; PAM sequence: TTC
taattccttgtgtctttttc

SEQ ID NO: 224663 - DNA, 20 bp, Artificial Sequence
  Description of Artificial Sequence: Synthetic oligonucleotide
  Target: LAMA2; (-) strand; PAM type: YTN; PAM sequence: CTT
ctaattccttgtgtcttttt

SEQ ID NO: 224664 - DNA, 20 bp, Artificial Sequence
  Description of Artificial Sequence: Synthetic oligonucleotide
  Target: LAMA2; (-) strand; PAM type: YTN; PAM sequence: CTG
gaaccagtaccagaatccag

SEQ ID NO: 224665 - DNA, 20 bp, Artificial Sequence
  Description of Artificial Sequence: Synthetic oligonucleotide
  Target: LAMA2; (-) strand; PAM type: YTN; PAM sequence: TTG
accaaggtcccacaaataac

SEQ ID NO: 224666 - DNA, 20 bp, Artificial Sequence
  Description of Artificial Sequence: Synthetic oligonucleotide
  Target: LAMA2; (-) strand; PAM type: YTN; PAM sequence: TTT
gaccaaggtcccacaaataa

SEQ ID NO: 224667 - DNA, 20 bp, Artificial Sequence
  Description of Artificial Sequence: Synthetic oligonucleotide
  Target: LAMA2; (-) strand; PAM type: YTN; PAM sequence: TTA
aatcatttgaccaaggtccc

SEQ ID NO: 224668 - DNA, 20 bp, Artificial Sequence
  Description of Artificial Sequence: Synthetic oligonucleotide
  Target: LAMA2; (-) strand; PAM type: YTN; PAM sequence: TTA
atcccagagagattaaatca

SEQ ID NO: 224669 - DNA, 20 bp, Artificial Sequence
  Description of Artificial Sequence: Synthetic oligonucleotide
  Target: LAMA2; (-) strand; PAM type: YTN; PAM sequence: TTT
aatcccagagagattaaatc

SEQ ID NO: 224670 - DNA, 20 bp, Artificial Sequence
  Description of Artificial Sequence: Synthetic oligonucleotide
  Target: LAMA2; (-) strand; PAM type: YTN; PAM sequence: TTA
aagaaatttaatcccagaga

SEQ ID NO: 224671 - DNA, 20 bp, Artificial Sequence
  Description of Artificial Sequence: Synthetic oligonucleotide
  Target: LAMA2; (-) strand; PAM type: YTN; PAM sequence: CTA
ttaaagaaatttaatcccag

SEQ ID NO: 224672 - DNA, 20 bp, Artificial Sequence
  Description of Artificial Sequence: Synthetic oligonucleotide
  Target: LAMA2; (-) strand; PAM type: YTN; PAM sequence: TTC
atctattaaagaaatttaat

SEQ ID NO: 224673 - DNA, 20 bp, Artificial Sequence
  Description of Artificial Sequence: Synthetic oligonucleotide
  Target: LAMA2; (-) strand; PAM type: YTN; PAM sequence: CTA
attcatctattaaagaaatt

SEQ ID NO: 224674 - DNA, 20 bp, Artificial Sequence
  Description of Artificial Sequence: Synthetic oligonucleotide
  Target: LAMA2; (-) strand; PAM type: YTN; PAM sequence: TTG
aactaattcatctattaaag

SEQ ID NO: 224675 - DNA, 20 bp, Artificial Sequence
  Description of Artificial Sequence: Synthetic oligonucleotide
  Target: LAMA2; (-) strand; PAM type: YTN; PAM sequence: CTG
ggcattgaactaattcatct

SEQ ID NO: 224676 - DNA, 20 bp, Artificial Sequence
  Description of Artificial Sequence: Synthetic oligonucleotide
  Target: LAMA2; (-) strand; PAM type: YTN; PAM sequence: TTA
gaacaatctgggcattgaac

SEQ ID NO: 224677 - DNA, 20 bp, Artificial Sequence
  Description of Artificial Sequence: Synthetic oligonucleotide
  Target: LAMA2; (-) strand; PAM type: YTN; PAM sequence: CTT
agaacaatctgggcattgaa

SEQ ID NO: 224678 - DNA, 20 bp, Artificial Sequence
  Description of Artificial Sequence: Synthetic oligonucleotide
  Target: LAMA2; (-) strand; PAM type: YTN; PAM sequence: CTG
ccttagaacaatctgggcat

SEQ ID NO: 224679 - DNA, 20 bp, Artificial Sequence
  Description of Artificial Sequence: Synthetic oligonucleotide
  Target: LAMA2; (-) strand; PAM type: YTN; PAM sequence: TTA
gaaaataccatgctgcctta

SEQ ID NO: 224680 - DNA, 20 bp, Artificial Sequence
  Description of Artificial Sequence: Synthetic oligonucleotide
  Target: LAMA2; (-) strand; PAM type: YTN; PAM sequence: TTT
agaaaataccatgctgcctt

SEQ ID NO: 224681 - DNA, 20 bp, Artificial Sequence
  Description of Artificial Sequence: Synthetic oligonucleotide
  Target: LAMA2; (-) strand; PAM type: YTN; PAM sequence: TTT
tagaaaataccatgctgcct

SEQ ID NO: 224682 - DNA, 20 bp, Artificial Sequence
  Description of Artificial Sequence: Synthetic oligonucleotide
  Target: LAMA2; (-) strand; PAM type: YTN; PAM sequence: TTA
ttttagaaaataccatgctg

SEQ ID NO: 224683 - DNA, 20 bp, Artificial Sequence
  Description of Artificial Sequence: Synthetic oligonucleotide
  Target: LAMA2; (-) strand; PAM type: YTN; PAM sequence: CTA
tattattttagaaaatacca

SEQ ID NO: 224684 - DNA, 20 bp, Artificial Sequence
  Description of Artificial Sequence: Synthetic oligonucleotide
  Target: LAMA2; (-) strand; PAM type: YTN; PAM sequence: TTG
tatgatagccaaagctatat

SEQ ID NO: 224685 - DNA, 20 bp, Artificial Sequence
  Description of Artificial Sequence: Synthetic oligonucleotide
  Target: LAMA2; (-) strand; PAM type: YTN; PAM sequence: CTC
aaatgttgtatgatagccaa

SEQ ID NO: 224686 - DNA, 20 bp, Artificial Sequence
  Description of Artificial Sequence: Synthetic oligonucleotide
  Target: LAMA2; (-) strand; PAM type: YTN; PAM sequence: TTA
gaatatcctcaaatgttgta

SEQ ID NO: 224687 - DNA, 20 bp, Artificial Sequence
  Description of Artificial Sequence: Synthetic oligonucleotide
  Target: LAMA2; (-) strand; PAM type: YTN; PAM sequence: TTT
agaatatcctcaaatgttgt

SEQ ID NO: 224688 - DNA, 20 bp, Artificial Sequence
  Description of Artificial Sequence: Synthetic oligonucleotide
  Target: LAMA2; (-) strand; PAM type: YTN; PAM sequence: TTT
tagaatatcctcaaatgttg

SEQ ID NO: 224689 - DNA, 20 bp, Artificial Sequence
  Description of Artificial Sequence: Synthetic oligonucleotide
  Target: LAMA2; (-) strand; PAM type: YTN; PAM sequence: CTT
ttagaatatcctcaaatgtt

SEQ ID NO: 224690 - DNA, 20 bp, Artificial Sequence
  Description of Artificial Sequence: Synthetic oligonucleotide
  Target: LAMA2; (-) strand; PAM type: YTN; PAM sequence: TTA
gagaaaagtatccaaaactt

SEQ ID NO: 224691 - DNA, 20 bp, Artificial Sequence
  Description of Artificial Sequence: Synthetic oligonucleotide
  Target: LAMA2; (-) strand; PAM type: YTN; PAM sequence: CTG
gataatgttagagaaaagta

SEQ ID NO: 224692 - DNA, 20 bp, Artificial Sequence
  Description of Artificial Sequence: Synthetic oligonucleotide
  Target: LAMA2; (-) strand; PAM type: YTN; PAM sequence: TTG
tctggataatgttagagaaa

SEQ ID NO: 224693 - DNA, 20 bp, Artificial Sequence
  Description of Artificial Sequence: Synthetic oligonucleotide
  Target: LAMA2; (-) strand; PAM type: YTN; PAM sequence: TTT
gtctggataatgttagagaa

SEQ ID NO: 224694 - DNA, 20 bp, Artificial Sequence
  Description of Artificial Sequence: Synthetic oligonucleotide
  Target: LAMA2; (-) strand; PAM type: YTN; PAM sequence: CTT
tgtctggataatgttagaga

SEQ ID NO: 224695 - DNA, 20 bp, Artificial Sequence
  Description of Artificial Sequence: Synthetic oligonucleotide
  Target: LAMA2; (-) strand; PAM type: YTN; PAM sequence: CTA
ctttgtctggataatgttag

SEQ ID NO: 224696 - DNA, 20 bp, Artificial Sequence
  Description of Artificial Sequence: Synthetic oligonucleotide
  Target: LAMA2; (-) strand; PAM type: YTN; PAM sequence: TTC
cacagctactttgtctggat

SEQ ID NO: 224697 - DNA, 20 bp, Artificial Sequence
  Description of Artificial Sequence: Synthetic oligonucleotide
  Target: LAMA2; (-) strand; PAM type: YTN; PAM sequence: TTA
ttccacagctactttgtctg

SEQ ID NO: 224698 - DNA, 20 bp, Artificial Sequence
  Description of Artificial Sequence: Synthetic oligonucleotide
  Target: LAMA2; (-) strand; PAM type: YTN; PAM sequence: TTT
attccacagctactttgtct

SEQ ID NO: 224699 - DNA, 20 bp, Artificial Sequence
  Description of Artificial Sequence: Synthetic oligonucleotide
  Target: LAMA2; (-) strand; PAM type: YTN; PAM sequence: CTG
acgagtgagatttattccac

SEQ ID NO: 224700 - DNA, 20 bp, Artificial Sequence
  Description of Artificial Sequence: Synthetic oligonucleotide
  Target: LAMA2; (-) strand; PAM type: YTN; PAM sequence: CTA
aagctgacgagtgagattta

SEQ ID NO: 224701 - DNA, 20 bp, Artificial Sequence
  Description of Artificial Sequence: Synthetic oligonucleotide
  Target: LAMA2; (-) strand; PAM type: YTN; PAM sequence: TTA
aaactaaagctgacgagtga

SEQ ID NO: 224702 - DNA, 20 bp, Artificial Sequence
  Description of Artificial Sequence: Synthetic oligonucleotide
  Target: LAMA2; (-) strand; PAM type: YTN; PAM sequence: TTT
aaaactaaagctgacgagtg

SEQ ID NO: 224703 - DNA, 20 bp, Artificial Sequence
  Description of Artificial Sequence: Synthetic oligonucleotide
  Target: LAMA2; (-) strand; PAM type: YTN; PAM sequence: TTT
taaaactaaagctgacgagt

SEQ ID NO: 224704 - DNA, 20 bp, Artificial Sequence
  Description of Artificial Sequence: Synthetic oligonucleotide
  Target: LAMA2; (-) strand; PAM type: YTN; PAM sequence: TTA
tgtgaaagtacataatttta

SEQ ID NO: 224705 - DNA, 20 bp, Artificial Sequence
  Description of Artificial Sequence: Synthetic oligonucleotide
  Target: LAMA2; (-) strand; PAM type: YTN; PAM sequence: TTC
cagggattatgtgaaagtac

SEQ ID NO: 224706 - DNA, 20 bp, Artificial Sequence
  Description of Artificial Sequence: Synthetic oligonucleotide
  Target: LAMA2; (-) strand; PAM type: YTN; PAM sequence: TTG
tattccagggattatgtgaa

SEQ ID NO: 224707 - DNA, 20 bp, Artificial Sequence
  Description of Artificial Sequence: Synthetic oligonucleotide
  Target: LAMA2; (-) strand; PAM type: YTN; PAM sequence: TTA
ataattgtattccagggatt

SEQ ID NO: 224708 - DNA, 20 bp, Artificial Sequence
  Description of Artificial Sequence: Synthetic oligonucleotide
  Target: LAMA2; (-) strand; PAM type: YTN; PAM sequence: TTG
aacataaacaattaataatt

SEQ ID NO: 224709 - DNA, 20 bp, Artificial Sequence
  Description of Artificial Sequence: Synthetic oligonucleotide
  Target: LAMA2; (-) strand; PAM type: YTN; PAM sequence: TTT
gaacataaacaattaataat

SEQ ID NO: 224710 - DNA, 20 bp, Artificial Sequence
  Description of Artificial Sequence: Synthetic oligonucleotide
  Target: LAMA2; (-) strand; PAM type: YTN; PAM sequence: TTT
tgaacataaacaattaataa

SEQ ID NO: 224711 - DNA, 20 bp, Artificial Sequence
  Description of Artificial Sequence: Synthetic oligonucleotide
  Target: LAMA2; (-) strand; PAM type: YTN; PAM sequence: CTG
taaagttttgaacataaaca

SEQ ID NO: 224712 - DNA, 20 bp, Artificial Sequence
  Description of Artificial Sequence: Synthetic oligonucleotide
  Target: LAMA2; (-) strand; PAM type: YTN; PAM sequence: CTC
tgtaaagttttgaacataaa

SEQ ID NO: 224713 - DNA, 20 bp, Artificial Sequence
  Description of Artificial Sequence: Synthetic oligonucleotide
  Target: LAMA2; (-) strand; PAM type: YTN; PAM sequence: TTC
tctgtaaagttttgaacata

SEQ ID NO: 224714 - DNA, 20 bp, Artificial Sequence
  Description of Artificial Sequence: Synthetic oligonucleotide
  Target: LAMA2; (-) strand; PAM type: YTN; PAM sequence: CTT
ctctgtaaagttttgaacat

SEQ ID NO: 224715 - DNA, 20 bp, Artificial Sequence
  Description of Artificial Sequence: Synthetic oligonucleotide
  Target: LAMA2; (-) strand; PAM type: YTN; PAM sequence: CTG
tcacttctctgtaaagtttt

SEQ ID NO: 224716 - DNA, 20 bp, Artificial Sequence
  Description of Artificial Sequence: Synthetic oligonucleotide
  Target: LAMA2; (-) strand; PAM type: YTN; PAM sequence: TTG
actgtcacttctctgtaaag

SEQ ID NO: 224717 - DNA, 20 bp, Artificial Sequence
  Description of Artificial Sequence: Synthetic oligonucleotide
  Target: LAMA2; (-) strand; PAM type: YTN; PAM sequence: TTT
gactgtcacttctctgtaaa

SEQ ID NO: 224718 - DNA, 20 bp, Artificial Sequence
  Description of Artificial Sequence: Synthetic oligonucleotide
  Target: LAMA2; (-) strand; PAM type: YTN; PAM sequence: TTA
tttgactgtcacttctctgt

SEQ ID NO: 224719 - DNA, 20 bp, Artificial Sequence
  Description of Artificial Sequence: Synthetic oligonucleotide
  Target: LAMA2; (-) strand; PAM type: YTN; PAM sequence: CTT
atttgactgtcacttctctg

SEQ ID NO: 224720 - DNA, 20 bp, Artificial Sequence
  Description of Artificial Sequence: Synthetic oligonucleotide
  Target: LAMA2; (-) strand; PAM type: YTN; PAM sequence: CTC
ttatttgactgtcacttctc

SEQ ID NO: 224721 - DNA, 20 bp, Artificial Sequence
  Description of Artificial Sequence: Synthetic oligonucleotide
  Target: LAMA2; (-) strand; PAM type: YTN; PAM sequence: TTC
tcttatttgactgtcacttc

SEQ ID NO: 224722 - DNA, 20 bp, Artificial Sequence
  Description of Artificial Sequence: Synthetic oligonucleotide
  Target: LAMA2; (-) strand; PAM type: YTN; PAM sequence: TTT
ctcttatttgactgtcactt

SEQ ID NO: 224723 - DNA, 20 bp, Artificial Sequence
  Description of Artificial Sequence: Synthetic oligonucleotide
  Target: LAMA2; (-) strand; PAM type: YTN; PAM sequence: TTG
tttctcttatttgactgtca

SEQ ID NO: 224724 - DNA, 20 bp, Artificial Sequence
  Description of Artificial Sequence: Synthetic oligonucleotide
  Target: LAMA2; (-) strand; PAM type: YTN; PAM sequence: TTT
gtttctcttatttgactgtc

SEQ ID NO: 224725 - DNA, 20 bp, Artificial Sequence
  Description of Artificial Sequence: Synthetic oligonucleotide
  Target: LAMA2; (-) strand; PAM type: YTN; PAM sequence: TTA
tatgtttgtttctcttattt

SEQ ID NO: 224726 - DNA, 20 bp, Artificial Sequence
  Description of Artificial Sequence: Synthetic oligonucleotide
  Target: LAMA2; (-) strand; PAM type: YTN; PAM sequence: TTT
atatgtttgtttctcttatt

SEQ ID NO: 224727 - DNA, 20 bp, Artificial Sequence
  Description of Artificial Sequence: Synthetic oligonucleotide
  Target: LAMA2; (-) strand; PAM type: YTN; PAM sequence: CTG
gtttatatgtttgtttctct

SEQ ID NO: 224728 - DNA, 20 bp, Artificial Sequence
  Description of Artificial Sequence: Synthetic oligonucleotide
  Target: LAMA2; (-) strand; PAM type: YTN; PAM sequence: TTA
ctggtttatatgtttgtttc

SEQ ID NO: 224729 - DNA, 20 bp, Artificial Sequence
  Description of Artificial Sequence: Synthetic oligonucleotide
  Target: LAMA2; (-) strand; PAM type: YTN; PAM sequence: TTT
actggtttatatgtttgttt

SEQ ID NO: 224730 - DNA, 20 bp, Artificial Sequence
  Description of Artificial Sequence: Synthetic oligonucleotide
  Target: LAMA2; (-) strand; PAM type: YTN; PAM sequence: TTA
tttactggtttatatgtttg

SEQ ID NO: 224731 - DNA, 20 bp, Artificial Sequence
  Description of Artificial Sequence: Synthetic oligonucleotide
  Target: LAMA2; (-) strand; PAM type: YTN; PAM sequence: TTT
atttactggtttatatgttt

SEQ ID NO: 224732 - DNA, 20 bp, Artificial Sequence
  Description of Artificial Sequence: Synthetic oligonucleotide
  Target: LAMA2; (-) strand; PAM type: YTN; PAM sequence: TTT
tatttactggtttatatgtt

SEQ ID NO: 224733 - DNA, 20 bp, Artificial Sequence
  Description of Artificial Sequence: Synthetic oligonucleotide
  Target: LAMA2; (-) strand; PAM type: YTN; PAM sequence: TTA
tgcaatcatgttttatttac

SEQ ID NO: 224734 - DNA, 20 bp, Artificial Sequence
  Description of Artificial Sequence: Synthetic oligonucleotide
  Target: LAMA2; (-) strand; PAM type: YTN; PAM sequence: CTT
atgcaatcatgttttattta

SEQ ID NO: 224735 - DNA, 20 bp, Artificial Sequence
  Description of Artificial Sequence: Synthetic oligonucleotide
  Target: LAMA2; (-) strand; PAM type: YTN; PAM sequence: TTA
cagtacttatgcaatcatgt

SEQ ID NO: 224736 - DNA, 20 bp, Artificial Sequence
  Description of Artificial Sequence: Synthetic oligonucleotide
  Target: LAMA2; (-) strand; PAM type: YTN; PAM sequence: CTG
ttacagtacttatgcaatca

SEQ ID NO: 224737 - DNA, 20 bp, Artificial Sequence
  Description of Artificial Sequence: Synthetic oligonucleotide
  Target: LAMA2; (-) strand; PAM type: YTN; PAM sequence: CTA
ctgttacagtacttatgcaa

SEQ ID NO: 224738 - DNA, 20 bp, Artificial Sequence
  Description of Artificial Sequence: Synthetic oligonucleotide
  Target: LAMA2; (-) strand; PAM type: YTN; PAM sequence: CTG
tatacactactgttacagta

SEQ ID NO: 224739 - DNA, 20 bp, Artificial Sequence
  Description of Artificial Sequence: Synthetic oligonucleotide
  Target: LAMA2; (-) strand; PAM type: YTN; PAM sequence: CTC
tgtatacactactgttacag

SEQ ID NO: 224740 - DNA, 20 bp, Artificial Sequence
  Description of Artificial Sequence: Synthetic oligonucleotide
  Target: LAMA2; (-) strand; PAM type: YTN; PAM sequence: CTC
tctgtatacactactgttac

SEQ ID NO: 224741 - DNA, 20 bp, Artificial Sequence
  Description of Artificial Sequence: Synthetic oligonucleotide
  Target: LAMA2; (-) strand; PAM type: YTN; PAM sequence: TTG
ctctctgtatacactactgt

SEQ ID NO: 224742 - DNA, 20 bp, Artificial Sequence
  Description of Artificial Sequence: Synthetic oligonucleotide
  Target: LAMA2; (-) strand; PAM type: YTN; PAM sequence: TTA
ttgctctctgtatacactac

SEQ ID NO: 224743 - DNA, 20 bp, Artificial Sequence
  Description of Artificial Sequence: Synthetic oligonucleotide
  Target: LAMA2; (-) strand; PAM type: YTN; PAM sequence: TTT
attgctctctgtatacacta

SEQ ID NO: 224744 - DNA, 20 bp, Artificial Sequence
  Description of Artificial Sequence: Synthetic oligonucleotide
  Target: LAMA2; (-) strand; PAM type: YTN; PAM sequence: CTC
aagcagggggagatttattg

SEQ ID NO: 224745 - DNA, 20 bp, Artificial Sequence
  Description of Artificial Sequence: Synthetic oligonucleotide
  Target: LAMA2; (-) strand; PAM type: YTN; PAM sequence: TTC
cactcaagcagggggagatt

SEQ ID NO: 224746 - DNA, 20 bp, Artificial Sequence
  Description of Artificial Sequence: Synthetic oligonucleotide
  Target: LAMA2; (-) strand; PAM type: YTN; PAM sequence: CTT
ccactcaagcagggggagat

SEQ ID NO: 224747 - DNA, 20 bp, Artificial Sequence
  Description of Artificial Sequence: Synthetic oligonucleotide
  Target: LAMA2; (-) strand; PAM type: YTN; PAM sequence: CTC
cttccactcaagcaggggga

SEQ ID NO: 224748 - DNA, 20 bp, Artificial Sequence
  Description of Artificial Sequence: Synthetic oligonucleotide
  Target: LAMA2; (-) strand; PAM type: YTN; PAM sequence: CTC
aatgtgcctccttccactca

SEQ ID NO: 224749 - DNA, 20 bp, Artificial Sequence
  Description of Artificial Sequence: Synthetic oligonucleotide
  Target: LAMA2; (-) strand; PAM type: YTN; PAM sequence: TTC
tcaatgtgcctccttccact

SEQ ID NO: 224750 - DNA, 20 bp, Artificial Sequence
  Description of Artificial Sequence: Synthetic oligonucleotide
  Target: LAMA2; (-) strand; PAM type: YTN; PAM sequence: CTT
ctcaatgtgcctccttccac

SEQ ID NO: 224751 - DNA, 20 bp, Artificial Sequence
  Description of Artificial Sequence: Synthetic oligonucleotide
  Target: LAMA2; (-) strand; PAM type: YTN; PAM sequence: TTA
tcttctcaatgtgcctcctt

SEQ ID NO: 224752 - DNA, 20 bp, Artificial Sequence
  Description of Artificial Sequence: Synthetic oligonucleotide
  Target: LAMA2; (-) strand; PAM type: YTN; PAM sequence: CTG
agaagttatcttctcaatgt

SEQ ID NO: 224753 - DNA, 20 bp, Artificial Sequence
  Description of Artificial Sequence: Synthetic oligonucleotide
  Target: LAMA2; (-) strand; PAM type: YTN; PAM sequence: TTC
tgagaagttatcttctcaat

SEQ ID NO: 224754 - DNA, 20 bp, Artificial Sequence
  Description of Artificial Sequence: Synthetic oligonucleotide
  Target: LAMA2; (-) strand; PAM type: YTN; PAM sequence: TTC
ccatattctgagaagttatc

SEQ ID NO: 224755 - DNA, 20 bp, Artificial Sequence
  Description of Artificial Sequence: Synthetic oligonucleotide
  Target: LAMA2; (-) strand; PAM type: YTN; PAM sequence: TTT
cccatattctgagaagttat

SEQ ID NO: 224756 - DNA, 20 bp, Artificial Sequence
  Description of Artificial Sequence: Synthetic oligonucleotide
  Target: LAMA2; (-) strand; PAM type: YTN; PAM sequence: TTT
tcccatattctgagaagtta

SEQ ID NO: 224757 - DNA, 20 bp, Artificial Sequence
  Description of Artificial Sequence: Synthetic oligonucleotide
  Target: LAMA2; (-) strand; PAM type: YTN; PAM sequence: CTG
gttttcccatattctgagaa

SEQ ID NO: 224758 - DNA, 20 bp, Artificial Sequence
  Description of Artificial Sequence: Synthetic oligonucleotide
  Target: LAMA2; (-) strand; PAM type: YTN; PAM sequence: TTG
ctggttttcccatattctga

SEQ ID NO: 224759 - DNA, 20 bp, Artificial Sequence
  Description of Artificial Sequence: Synthetic oligonucleotide
  Target: LAMA2; (-) strand; PAM type: YTN; PAM sequence: TTG
ttgctggttttcccatattc

SEQ ID NO: 224760 - DNA, 20 bp, Artificial Sequence
  Description of Artificial Sequence: Synthetic oligonucleotide
  Target: LAMA2; (-) strand; PAM type: YTN; PAM sequence: TTG
agataagagttgttgctggt

SEQ ID NO: 224761 - DNA, 20 bp, Artificial Sequence
  Description of Artificial Sequence: Synthetic oligonucleotide
  Target: LAMA2; (-) strand; PAM type: YTN; PAM sequence: TTT
gagataagagttgttgctgg

SEQ ID NO: 224762 - DNA, 20 bp, Artificial Sequence
  Description of Artificial Sequence: Synthetic oligonucleotide
  Target: LAMA2; (-) strand; PAM type: YTN; PAM sequence: TTT
tgagataagagttgttgctg

SEQ ID NO: 224763 - DNA, 20 bp, Artificial Sequence
  Description of Artificial Sequence: Synthetic oligonucleotide
  Target: LAMA2; (-) strand; PAM type: YTN; PAM sequence: CTT
ttgagataagagttgttgct

SEQ ID NO: 224764 - DNA, 20 bp, Artificial Sequence
  Description of Artificial Sequence: Synthetic oligonucleotide
  Target: LAMA2; (-) strand; PAM type: YTN; PAM sequence: TTG
agacttttgagataagagtt

SEQ ID NO: 224765 - DNA, 20 bp, Artificial Sequence
  Description of Artificial Sequence: Synthetic oligonucleotide
  Target: LAMA2; (-) strand; PAM type: YTN; PAM sequence: TTT
gagacttttgagataagagt

SEQ ID NO: 224766 - DNA, 20 bp, Artificial Sequence
  Description of Artificial Sequence: Synthetic oligonucleotide
  Target: LAMA2; (-) strand; PAM type: YTN; PAM sequence: CTT
tgagacttttgagataagag

SEQ ID NO: 224767 - DNA, 20 bp, Artificial Sequence
  Description of Artificial Sequence: Synthetic oligonucleotide
  Target: LAMA2; (-) strand; PAM type: YTN; PAM sequence: TTG
gctttgagacttttgagata

SEQ ID NO: 224768 - DNA, 20 bp, Artificial Sequence
  Description of Artificial Sequence: Synthetic oligonucleotide
  Target: LAMA2; (-) strand; PAM type: YTN; PAM sequence: TTG
catattggctttgagacttt

SEQ ID NO: 224769 - DNA, 20 bp, Artificial Sequence
  Description of Artificial Sequence: Synthetic oligonucleotide
  Target: LAMA2; (-) strand; PAM type: YTN; PAM sequence: TTT
gcatattggctttgagactt

SEQ ID NO: 224770 - DNA, 20 bp, Artificial Sequence
  Description of Artificial Sequence: Synthetic oligonucleotide
  Target: LAMA2; (-) strand; PAM type: YTN; PAM sequence: TTG
gagatgaatttgcatattgg

SEQ ID NO: 224771 - DNA, 20 bp, Artificial Sequence
  Description of Artificial Sequence: Synthetic oligonucleotide
  Target: LAMA2; (-) strand; PAM type: YTN; PAM sequence: TTA
ttggagatgaatttgcatat

SEQ ID NO: 224772 - DNA, 20 bp, Artificial Sequence
  Description of Artificial Sequence: Synthetic oligonucleotide
  Target: LAMA2; (-) strand; PAM type: YTN; PAM sequence: TTA
acacataggcattattggag

SEQ ID NO: 224773 - DNA, 20 bp, Artificial Sequence
  Description of Artificial Sequence: Synthetic oligonucleotide
  Target: LAMA2; (-) strand; PAM type: YTN; PAM sequence: TTT
aacacataggcattattgga

SEQ ID NO: 224774 - DNA, 20 bp, Artificial Sequence
  Description of Artificial Sequence: Synthetic oligonucleotide
  Target: LAMA2; (-) strand; PAM type: YTN; PAM sequence: CTG
tatgtaccgagtttaacaca

SEQ ID NO: 224775 - DNA, 20 bp, Artificial Sequence
  Description of Artificial Sequence: Synthetic oligonucleotide
  Target: LAMA2; (-) strand; PAM type: YTN; PAM sequence: TTC
tgtatgtaccgagtttaaca

SEQ ID NO: 224776 - DNA, 20 bp, Artificial Sequence
  Description of Artificial Sequence: Synthetic oligonucleotide
  Target: LAMA2; (-) strand; PAM type: YTN; PAM sequence: CTC
aacaatggaggtaaattctg

SEQ ID NO: 224777 - DNA, 20 bp, Artificial Sequence
  Description of Artificial Sequence: Synthetic oligonucleotide
  Target: LAMA2; (-) strand; PAM type: YTN; PAM sequence: CTG
ataacaatatccctcaacaa

SEQ ID NO: 224778 - DNA, 20 bp, Artificial Sequence
  Description of Artificial Sequence: Synthetic oligonucleotide
  Target: LAMA2; (-) strand; PAM type: YTN; PAM sequence: CTA
catctgataacaatatccct

SEQ ID NO: 224779 - DNA, 20 bp, Artificial Sequence
  Description of Artificial Sequence: Synthetic oligonucleotide
  Target: LAMA2; (-) strand; PAM type: YTN; PAM sequence: TTC
tacatctgataacaatatcc

SEQ ID NO: 224780 - DNA, 20 bp, Artificial Sequence
  Description of Artificial Sequence: Synthetic oligonucleotide
  Target: LAMA2; (-) strand; PAM type: YTN; PAM sequence: CTA
gaattctacatctgataaca

SEQ ID NO: 224781 - DNA, 20 bp, Artificial Sequence
  Description of Artificial Sequence: Synthetic oligonucleotide
  Target: LAMA2; (-) strand; PAM type: YTN; PAM sequence: CTG
caaacctagaattctacatc

SEQ ID NO: 224782 - DNA, 20 bp, Artificial Sequence
  Description of Artificial Sequence: Synthetic oligonucleotide
  Target: LAMA2; (-) strand; PAM type: YTN; PAM sequence: CTA
cataagcaatggaaatcaga

SEQ ID NO: 224783 - DNA, 20 bp, Artificial Sequence
  Description of Artificial Sequence: Synthetic oligonucleotide
  Target: LAMA2; (-) strand; PAM type: YTN; PAM sequence: CTC
tacataagcaatggaaatca

SEQ ID NO: 224784 - DNA, 20 bp, Artificial Sequence
  Description of Artificial Sequence: Synthetic oligonucleotide
  Target: LAMA2; (-) strand; PAM type: YTN; PAM sequence: TTC
tctacataagcaatggaaat

SEQ ID NO: 224785 - DNA, 20 bp, Artificial Sequence
  Description of Artificial Sequence: Synthetic oligonucleotide
  Target: LAMA2; (-) strand; PAM type: YTN; PAM sequence: CTG
cattctctacataagcaatg

SEQ ID NO: 224786 - DNA, 20 bp, Artificial Sequence
  Description of Artificial Sequence: Synthetic oligonucleotide
  Target: LAMA2; (-) strand; PAM type: YTN; PAM sequence: CTC
caaaagatagtaatcggata

SEQ ID NO: 224787 - DNA, 20 bp, Artificial Sequence
  Description of Artificial Sequence: Synthetic oligonucleotide
  Target: LAMA2; (-) strand; PAM type: YTN; PAM sequence: TTA
aataaatcagagaaaagtca

SEQ ID NO: 224788 - DNA, 20 bp, Artificial Sequence
  Description of Artificial Sequence: Synthetic oligonucleotide
  Target: LAMA2; (-) strand; PAM type: YTN; PAM sequence: TTT
aaataaatcagagaaaagtc

SEQ ID NO: 224789 - DNA, 20 bp, Artificial Sequence
  Description of Artificial Sequence: Synthetic oligonucleotide
  Target: LAMA2; (-) strand; PAM type: YTN; PAM sequence: CTG
aagaacaaagaaaaaaatat

SEQ ID NO: 224790 - DNA, 20 bp, Artificial Sequence
  Description of Artificial Sequence: Synthetic oligonucleotide
  Target: LAMA2; (-) strand; PAM type: YTN; PAM sequence: CTA
ctgaagaacaaagaaaaaaa

SEQ ID NO: 224791 - DNA, 20 bp, Artificial Sequence
  Description of Artificial Sequence: Synthetic oligonucleotide
  Target: LAMA2; (-) strand; PAM type: YTN; PAM sequence: CTG
aagcatcatagtaaaactac

SEQ ID NO: 224792 - DNA, 20 bp, Artificial Sequence
  Description of Artificial Sequence: Synthetic oligonucleotide
  Target: LAMA2; (-) strand; PAM type: YTN; PAM sequence: TTG
tagtgggcagtgaagatctg

SEQ ID NO: 224793 - DNA, 20 bp, Artificial Sequence
  Description of Artificial Sequence: Synthetic oligonucleotide
  Target: LAMA2; (-) strand; PAM type: YTN; PAM sequence: CTA
ttgtagtgggcagtgaagat

SEQ ID NO: 224794 - DNA, 20 bp, Artificial Sequence
  Description of Artificial Sequence: Synthetic oligonucleotide
  Target: LAMA2; (-) strand; PAM type: YTN; PAM sequence: CTA
gtggctattgtagtgggcag

SEQ ID NO: 224795 - DNA, 20 bp, Artificial Sequence
  Description of Artificial Sequence: Synthetic oligonucleotide
  Target: LAMA2; (-) strand; PAM type: YTN; PAM sequence: TTA
ccacatatggctagtggcta

SEQ ID NO: 224796 - DNA, 20 bp, Artificial Sequence
  Description of Artificial Sequence: Synthetic oligonucleotide
  Target: LAMA2; (-) strand; PAM type: YTN; PAM sequence: TTG
aattaccacatatggctagt

SEQ ID NO: 224797 - DNA, 20 bp, Artificial Sequence
  Description of Artificial Sequence: Synthetic oligonucleotide
  Target: LAMA2; (-) strand; PAM type: YTN; PAM sequence: TTT
gaattaccacatatggctag

SEQ ID NO: 224798 - DNA, 20 bp, Artificial Sequence
  Description of Artificial Sequence: Synthetic oligonucleotide
  Target: LAMA2; (-) strand; PAM type: YTN; PAM sequence: TTA
aatttgaattaccacatatg

SEQ ID NO: 224799 - DNA, 20 bp, Artificial Sequence
  Description of Artificial Sequence: Synthetic oligonucleotide
  Target: LAMA2; (-) strand; PAM type: YTN; PAM sequence: TTT
aaatttgaattaccacatat

SEQ ID NO: 224800 - DNA, 20 bp, Artificial Sequence
  Description of Artificial Sequence: Synthetic oligonucleotide
  Target: LAMA2; (-) strand; PAM type: YTN; PAM sequence: CTG
aaatttaaatttgaattacc

SEQ ID NO: 224801 - DNA, 20 bp, Artificial Sequence
  Description of Artificial Sequence: Synthetic oligonucleotide
  Target: LAMA2; (-) strand; PAM type: YTN; PAM sequence: TTA
actgaaatttaaatttgaat

SEQ ID NO: 224802 - DNA, 20 bp, Artificial Sequence
  Description of Artificial Sequence: Synthetic oligonucleotide
  Target: LAMA2; (-) strand; PAM type: YTN; PAM sequence: TTG
attaactgaaatttaaattt

SEQ ID NO: 224803 - DNA, 20 bp, Artificial Sequence
  Description of Artificial Sequence: Synthetic oligonucleotide
  Target: LAMA2; (-) strand; PAM type: YTN; PAM sequence: TTT
gattaactgaaatttaaatt

SEQ ID NO: 224804 - DNA, 20 bp, Artificial Sequence
  Description of Artificial Sequence: Synthetic oligonucleotide
  Target: LAMA2; (-) strand; PAM type: YTN; PAM sequence: TTT
tgattaactgaaatttaaat

SEQ ID NO: 224805 - DNA, 20 bp, Artificial Sequence
  Description of Artificial Sequence: Synthetic oligonucleotide
  Target: LAMA2; (-) strand; PAM type: YTN; PAM sequence: TTA
attttgattaactgaaattt

SEQ ID NO: 224806 - DNA, 20 bp, Artificial Sequence
  Description of Artificial Sequence: Synthetic oligonucleotide
  Target: LAMA2; (-) strand; PAM type: YTN; PAM sequence: TTT
aattttgattaactgaaatt

SEQ ID NO: 224807 - DNA, 20 bp, Artificial Sequence
  Description of Artificial Sequence: Synthetic oligonucleotide
  Target: LAMA2; (-) strand; PAM type: YTN; PAM sequence: TTA
atttaattttgattaactga

SEQ ID NO: 224808 - DNA, 20 bp, Artificial Sequence
  Description of Artificial Sequence: Synthetic oligonucleotide
  Target: LAMA2; (-) strand; PAM type: YTN; PAM sequence: TTT
aatttaattttgattaactg

SEQ ID NO: 224809 - DNA, 20 bp, Artificial Sequence
  Description of Artificial Sequence: Synthetic oligonucleotide
  Target: LAMA2; (-) strand; PAM type: YTN; PAM sequence: TTT
taatttaattttgattaact

SEQ ID NO: 224810 - DNA, 20 bp, Artificial Sequence
  Description of Artificial Sequence: Synthetic oligonucleotide
  Target: LAMA2; (-) strand; PAM type: YTN; PAM sequence: CTA
gtgtaatggggaaatggaat

SEQ ID NO: 224811 - DNA, 20 bp, Artificial Sequence
  Description of Artificial Sequence: Synthetic oligonucleotide
  Target: LAMA2; (-) strand; PAM type: YTN; PAM sequence: TTG
aaatgtggctagtgtaatgg

SEQ ID NO: 224812 - DNA, 20 bp, Artificial Sequence
  Description of Artificial Sequence: Synthetic oligonucleotide
  Target: LAMA2; (-) strand; PAM type: YTN; PAM sequence: CTT
gaaatgtggctagtgtaatg

SEQ ID NO: 224813 - DNA, 20 bp, Artificial Sequence
  Description of Artificial Sequence: Synthetic oligonucleotide
  Target: LAMA2; (-) strand; PAM type: YTN; PAM sequence: CTG
agtacttgaaatgtggctag

SEQ ID NO: 224814 - DNA, 20 bp, Artificial Sequence
  Description of Artificial Sequence: Synthetic oligonucleotide
  Target: LAMA2; (-) strand; PAM type: YTN; PAM sequence: CTA
ctgagtacttgaaatgtggc

SEQ ID NO: 224815 - DNA, 20 bp, Artificial Sequence
  Description of Artificial Sequence: Synthetic oligonucleotide
  Target: LAMA2; (-) strand; PAM type: YTN; PAM sequence: CTA
gtcccatgtggctactgagt

SEQ ID NO: 224816 - DNA, 20 bp, Artificial Sequence
  Description of Artificial Sequence: Synthetic oligonucleotide
  Target: LAMA2; (-) strand; PAM type: YTN; PAM sequence: CTG
ctagtcccatgtggctactg

SEQ ID NO: 224817 - DNA, 20 bp, Artificial Sequence
  Description of Artificial Sequence: Synthetic oligonucleotide
  Target: LAMA2; (-) strand; PAM type: YTN; PAM sequence: CTG
cccaatccagtgtggtggct

SEQ ID NO: 224818 - DNA, 20 bp, Artificial Sequence
  Description of Artificial Sequence: Synthetic oligonucleotide
  Target: LAMA2; (-) strand; PAM type: YTN; PAM sequence: TTC
tgcccaatccagtgtggtgg

SEQ ID NO: 224819 - DNA, 20 bp, Artificial Sequence
  Description of Artificial Sequence: Synthetic oligonucleotide
  Target: LAMA2; (-) strand; PAM type: YTN; PAM sequence: TTT
ctgcccaatccagtgtggtg

SEQ ID NO: 224820 - DNA, 20 bp, Artificial Sequence
  Description of Artificial Sequence: Synthetic oligonucleotide
  Target: LAMA2; (-) strand; PAM type: YTN; PAM sequence: CTT
tctgcccaatccagtgtggt

SEQ ID NO: 224821 - DNA, 20 bp, Artificial Sequence
  Description of Artificial Sequence: Synthetic oligonucleotide
  Target: LAMA2; (-) strand; PAM type: YTN; PAM sequence: TTG
ctttctgcccaatccagtgt

SEQ ID NO: 224822 - DNA, 20 bp, Artificial Sequence
  Description of Artificial Sequence: Synthetic oligonucleotide
  Target: LAMA2; (-) strand; PAM type: YTN; PAM sequence: TTG
tgcaataatggcagtgttgc

SEQ ID NO: 224823 - DNA, 20 bp, Artificial Sequence
  Description of Artificial Sequence: Synthetic oligonucleotide
  Target: LAMA2; (-) strand; PAM type: YTN; PAM sequence: TTT
gtgcaataatggcagtgttg

SEQ ID NO: 224824 - DNA, 20 bp, Artificial Sequence
  Description of Artificial Sequence: Synthetic oligonucleotide
  Target: LAMA2; (-) strand; PAM type: YTN; PAM sequence: CTT
tgtgcaataatggcagtgtt

SEQ ID NO: 224825 - DNA, 20 bp, Artificial Sequence
  Description of Artificial Sequence: Synthetic oligonucleotide
  Target: LAMA2; (-) strand; PAM type: YTN; PAM sequence: TTG
cccaacagaactttgtgcaa

SEQ ID NO: 224826 - DNA, 20 bp, Artificial Sequence
  Description of Artificial Sequence: Synthetic oligonucleotide
  Target: LAMA2; (-) strand; PAM type: YTN; PAM sequence: CTA
aagtagcattgcccaacaga

SEQ ID NO: 224827 - DNA, 20 bp, Artificial Sequence
  Description of Artificial Sequence: Synthetic oligonucleotide
  Target: LAMA2; (-) strand; PAM type: YTN; PAM sequence: TTG
cagatatgtagaaaataaaa

SEQ ID NO: 224828 - DNA, 20 bp, Artificial Sequence
  Description of Artificial Sequence: Synthetic oligonucleotide
  Target: LAMA2; (-) strand; PAM type: YTN; PAM sequence: TTT
gcagatatgtagaaaataaa

SEQ ID NO: 224829 - DNA, 20 bp, Artificial Sequence
  Description of Artificial Sequence: Synthetic oligonucleotide
  Target: LAMA2; (-) strand; PAM type: YTN; PAM sequence: CTT
tgcagatatgtagaaaataa

SEQ ID NO: 224830 - DNA, 20 bp, Artificial Sequence
  Description of Artificial Sequence: Synthetic oligonucleotide
  Target: LAMA2; (-) strand; PAM type: YTN; PAM sequence: CTG
atgaaagacatcactttgca

SEQ ID NO: 224831 - DNA, 20 bp, Artificial Sequence
  Description of Artificial Sequence: Synthetic oligonucleotide
  Target: LAMA2; (-) strand; PAM type: YTN; PAM sequence: CTG
aactgatgaaagacatcact

SEQ ID NO: 224832 - DNA, 20 bp, Artificial Sequence
  Description of Artificial Sequence: Synthetic oligonucleotide
  Target: LAMA2; (-) strand; PAM type: YTN; PAM sequence: TTC
tgaactgatgaaagacatca

SEQ ID NO: 224833 - DNA, 20 bp, Artificial Sequence
  Description of Artificial Sequence: Synthetic oligonucleotide
  Target: LAMA2; (-) strand; PAM type: YTN; PAM sequence: TTT
ctgaactgatgaaagacatc

SEQ ID NO: 224834 - DNA, 20 bp, Artificial Sequence
  Description of Artificial Sequence: Synthetic oligonucleotide
  Target: LAMA2; (-) strand; PAM type: YTN; PAM sequence: TTT
tctgaactgatgaaagacat

SEQ ID NO: 224835 - DNA, 20 bp, Artificial Sequence
  Description of Artificial Sequence: Synthetic oligonucleotide
  Target: LAMA2; (-) strand; PAM type: YTN; PAM sequence: CTG
aacagttttctgaactgatg

SEQ ID NO: 224836 - DNA, 20 bp, Artificial Sequence
  Description of Artificial Sequence: Synthetic oligonucleotide
  Target: LAMA2; (-) strand; PAM type: YTN; PAM sequence: TTA
gagaggtaatgactgaacag

SEQ ID NO: 224837 - DNA, 20 bp, Artificial Sequence
  Description of Artificial Sequence: Synthetic oligonucleotide
  Target: LAMA2; (-) strand; PAM type: YTN; PAM sequence: TTT
agagaggtaatgactgaaca

SEQ ID NO: 224838 - DNA, 20 bp, Artificial Sequence
  Description of Artificial Sequence: Synthetic oligonucleotide
  Target: LAMA2; (-) strand; PAM type: YTN; PAM sequence: TTA
gaatcatagagcagagggaa

SEQ ID NO: 224839 - DNA, 20 bp, Artificial Sequence
  Description of Artificial Sequence: Synthetic oligonucleotide
  Target: LAMA2; (-) strand; PAM type: YTN; PAM sequence: TTA
attagaatcatagagcagag

SEQ ID NO: 224840 - DNA, 20 bp, Artificial Sequence
  Description of Artificial Sequence: Synthetic oligonucleotide
  Target: LAMA2; (-) strand; PAM type: YTN; PAM sequence: TTT
aattagaatcatagagcaga

SEQ ID NO: 224841 - DNA, 20 bp, Artificial Sequence
  Description of Artificial Sequence: Synthetic oligonucleotide
  Target: LAMA2; (-) strand; PAM type: YTN; PAM sequence: TTT
taattagaatcatagagcag

SEQ ID NO: 224842 - DNA, 20 bp, Artificial Sequence
  Description of Artificial Sequence: Synthetic oligonucleotide
  Target: LAMA2; (-) strand; PAM type: YTN; PAM sequence: TTT
ttaattagaatcatagagca

SEQ ID NO: 224843 - DNA, 20 bp, Artificial Sequence
  Description of Artificial Sequence: Synthetic oligonucleotide
  Target: LAMA2; (-) strand; PAM type: YTN; PAM sequence: TTC
caagtcatttttaattagaa

SEQ ID NO: 224844 - DNA, 20 bp, Artificial Sequence
  Description of Artificial Sequence: Synthetic oligonucleotide
  Target: LAMA2; (-) strand; PAM type: YTN; PAM sequence: TTA
aaatacatagtgtatacagt

SEQ ID NO: 224845 - DNA, 20 bp, Artificial Sequence
  Description of Artificial Sequence: Synthetic oligonucleotide
  Target: LAMA2; (-) strand; PAM type: YTN; PAM sequence: TTT
aaaatacatagtgtatacag

SEQ ID NO: 224846 - DNA, 20 bp, Artificial Sequence
  Description of Artificial Sequence: Synthetic oligonucleotide
  Target: LAMA2; (-) strand; PAM type: YTN; PAM sequence: CTA
aagaagagagtttaaaatac

SEQ ID NO: 224847 - DNA, 20 bp, Artificial Sequence
  Description of Artificial Sequence: Synthetic oligonucleotide
  Target: LAMA2; (-) strand; PAM type: YTN; PAM sequence: CTA
gaatgaagatacagaaagac

SEQ ID NO: 224848 - DNA, 20 bp, Artificial Sequence
  Description of Artificial Sequence: Synthetic oligonucleotide
  Target: LAMA2; (-) strand; PAM type: YTN; PAM sequence: CTA
gaagtaatccagaagaaaat

SEQ ID NO: 224849 - DNA, 20 bp, Artificial Sequence
  Description of Artificial Sequence: Synthetic oligonucleotide
  Target: LAMA2; (-) strand; PAM type: YTN; PAM sequence: TTA
atgaactagaagtaatccag

SEQ ID NO: 224850 - DNA, 20 bp, Artificial Sequence
  Description of Artificial Sequence: Synthetic oligonucleotide
  Target: LAMA2; (-) strand; PAM type: YTN; PAM sequence: CTG
agaagagaattaatgaacta

SEQ ID NO: 224851 - DNA, 20 bp, Artificial Sequence
  Description of Artificial Sequence: Synthetic oligonucleotide
  Target: LAMA2; (-) strand; PAM type: YTN; PAM sequence: TTA
catagctgagaagagaatta

SEQ ID NO: 224852 - DNA, 20 bp, Artificial Sequence
  Description of Artificial Sequence: Synthetic oligonucleotide
  Target: LAMA2; (-) strand; PAM type: YTN; PAM sequence: TTT
acatagctgagaagagaatt

SEQ ID NO: 224853 - DNA, 20 bp, Artificial Sequence
  Description of Artificial Sequence: Synthetic oligonucleotide
  Target: LAMA2; (-) strand; PAM type: YTN; PAM sequence: TTA
atagcaatatttacatagct

SEQ ID NO: 224854 - DNA, 20 bp, Artificial Sequence
  Description of Artificial Sequence: Synthetic oligonucleotide
  Target: LAMA2; (-) strand; PAM type: YTN; PAM sequence: TTT
aatagcaatatttacatagc

SEQ ID NO: 224855 - DNA, 20 bp, Artificial Sequence
  Description of Artificial Sequence: Synthetic oligonucleotide
  Target: LAMA2; (-) strand; PAM type: YTN; PAM sequence: CTT
taatagcaatatttacatag

SEQ ID NO: 224856 - DNA, 20 bp, Artificial Sequence
  Description of Artificial Sequence: Synthetic oligonucleotide
  Target: LAMA2; (-) strand; PAM type: YTN; PAM sequence: CTA
tgaataactttaatagcaat

SEQ ID NO: 224857 - DNA, 20 bp, Artificial Sequence
  Description of Artificial Sequence: Synthetic oligonucleotide
  Target: LAMA2; (-) strand; PAM type: YTN; PAM sequence: TTA
agaatcctatgaataacttt

SEQ ID NO: 224858 - DNA, 20 bp, Artificial Sequence
  Description of Artificial Sequence: Synthetic oligonucleotide
  Target: LAMA2; (-) strand; PAM type: YTN; PAM sequence: CTG
aaaaatatatgaaattaaga

SEQ ID NO: 224859 - DNA, 20 bp, Artificial Sequence
  Description of Artificial Sequence: Synthetic oligonucleotide
  Target: LAMA2; (-) strand; PAM type: YTN; PAM sequence: TTA
gaaactgaaaaatatatgaa

SEQ ID NO: 224860 - DNA, 20 bp, Artificial Sequence
  Description of Artificial Sequence: Synthetic oligonucleotide
  Target: LAMA2; (-) strand; PAM type: YTN; PAM sequence: TTT
agaaactgaaaaatatatga

SEQ ID NO: 224861 - DNA, 20 bp, Artificial Sequence
  Description of Artificial Sequence: Synthetic oligonucleotide
  Target: LAMA2; (-) strand; PAM type: YTN; PAM sequence: CTC
aaaaaaaaaaaaaaaagaaa

SEQ ID NO: 224862 - DNA, 20 bp, Artificial Sequence
  Description of Artificial Sequence: Synthetic oligonucleotide
  Target: LAMA2; (-) strand; PAM type: YTN; PAM sequence: CTC
ggtctcaaaaaaaaaaaaaa

SEQ ID NO: 224863 - DNA, 20 bp, Artificial Sequence
  Description of Artificial Sequence: Synthetic oligonucleotide
  Target: LAMA2; (-) strand; PAM type: YTN; PAM sequence: CTG
ggtgacagagcgagactcgg

SEQ ID NO: 224864 - DNA, 20 bp, Artificial Sequence
  Description of Artificial Sequence: Synthetic oligonucleotide
  Target: LAMA2; (-) strand; PAM type: YTN; PAM sequence: CTC
cagcctgggtgacagagcga

SEQ ID NO: 224865 - DNA, 20 bp, Artificial Sequence
  Description of Artificial Sequence: Synthetic oligonucleotide
  Target: LAMA2; (-) strand; PAM type: YTN; PAM sequence: CTG
cactccagcctgggtgacag

SEQ ID NO: 224866 - DNA, 20 bp, Artificial Sequence
  Description of Artificial Sequence: Synthetic oligonucleotide
  Target: LAMA2; (-) strand; PAM type: YTN; PAM sequence: CTG
agatggcgccactgcactcc

SEQ ID NO: 224867 - DNA, 20 bp, Artificial Sequence
  Description of Artificial Sequence: Synthetic oligonucleotide
  Target: LAMA2; (-) strand; PAM type: YTN; PAM sequence: TTA
cagtgagctgagatggcgcc

SEQ ID NO: 224868 - DNA, 20 bp, Artificial Sequence
  Description of Artificial Sequence: Synthetic oligonucleotide
  Target: LAMA2; (-) strand; PAM type: YTN; PAM sequence: TTG
aacccgggaacccgggaggc

SEQ ID NO: 224869 - DNA, 20 bp, Artificial Sequence
  Description of Artificial Sequence: Synthetic oligonucleotide
  Target: LAMA2; (-) strand; PAM type: YTN; PAM sequence: CTT
gaacccgggaacccgggagg

SEQ ID NO: 224870 - DNA, 20 bp, Artificial Sequence
  Description of Artificial Sequence: Synthetic oligonucleotide
  Target: LAMA2; (-) strand; PAM type: YTN; PAM sequence: CTG
aggcaggagaaccacttgaa

SEQ ID NO: 224871 - DNA, 20 bp, Artificial Sequence
  Description of Artificial Sequence: Synthetic oligonucleotide
  Target: LAMA2; (-) strand; PAM type: YTN; PAM sequence: CTC
aggaggctgaggcaggagaa

SEQ ID NO: 224872 - DNA, 20 bp, Artificial Sequence
  Description of Artificial Sequence: Synthetic oligonucleotide
  Target: LAMA2; (-) strand; PAM type: YTN; PAM sequence: CTA
ctcaggaggctgaggcagga

SEQ ID NO: 224873 - DNA, 20 bp, Artificial Sequence
  Description of Artificial Sequence: Synthetic oligonucleotide
  Target: LAMA2; (-) strand; PAM type: YTN; PAM sequence: CTG
taatcccagctactcaggag

SEQ ID NO: 224874 - DNA, 20 bp, Artificial Sequence
  Description of Artificial Sequence: Synthetic oligonucleotide
  Target: LAMA2; (-) strand; PAM type: YTN; PAM sequence: CTG
aaaacacaaaaatcaagtgg

SEQ ID NO: 224875 - DNA, 20 bp, Artificial Sequence
  Description of Artificial Sequence: Synthetic oligonucleotide
  Target: LAMA2; (-) strand; PAM type: YTN; PAM sequence: CTG
tactgaaaacacaaaaatca

SEQ ID NO: 224876 - DNA, 20 bp, Artificial Sequence
  Description of Artificial Sequence: Synthetic oligonucleotide
  Target: LAMA2; (-) strand; PAM type: YTN; PAM sequence: CTG
tctgtactgaaaacacaaaa

SEQ ID NO: 224877 - DNA, 20 bp, Artificial Sequence
  Description of Artificial Sequence: Synthetic oligonucleotide
  Target: LAMA2; (-) strand; PAM type: YTN; PAM sequence: CTG
accaacatggtgaaaccctg

SEQ ID NO: 224878 - DNA, 20 bp, Artificial Sequence
  Description of Artificial Sequence: Synthetic oligonucleotide
  Target: LAMA2; (-) strand; PAM type: YTN; PAM sequence: TTG
ggaggccaaggtgggcagat

SEQ ID NO: 224879 - DNA, 20 bp, Artificial Sequence
  Description of Artificial Sequence: Synthetic oligonucleotide
  Target: LAMA2; (-) strand; PAM type: YTN; PAM sequence: TTT
gggaggccaaggtgggcaga

SEQ ID NO: 224880 - DNA, 20 bp, Artificial Sequence
  Description of Artificial Sequence: Synthetic oligonucleotide
  Target: LAMA2; (-) strand; PAM type: YTN; PAM sequence: CTT
tgggaggccaaggtgggcag

SEQ ID NO: 224881 - DNA, 20 bp, Artificial Sequence
  Description of Artificial Sequence: Synthetic oligonucleotide
  Target: LAMA2; (-) strand; PAM type: YTN; PAM sequence: CTA
gcactttgggaggccaaggt

SEQ ID NO: 224882 - DNA, 20 bp, Artificial Sequence
  Description of Artificial Sequence: Synthetic oligonucleotide
  Target: LAMA2; (-) strand; PAM type: YTN; PAM sequence: CTG
taatcctagcactttgggag

SEQ ID NO: 224883 - DNA, 20 bp, Artificial Sequence
  Description of Artificial Sequence: Synthetic oligonucleotide
  Target: LAMA2; (-) strand; PAM type: YTN; PAM sequence: CTC
atgcctgtaatcctagcact

SEQ ID NO: 224884 - DNA, 20 bp, Artificial Sequence
  Description of Artificial Sequence: Synthetic oligonucleotide
  Target: LAMA2; (-) strand; PAM type: YTN; PAM sequence: CTG
ggcacagtggctcatgcctg

SEQ ID NO: 224885 - DNA, 20 bp, Artificial Sequence
  Description of Artificial Sequence: Synthetic oligonucleotide
  Target: LAMA2; (-) strand; PAM type: YTN; PAM sequence: TTG
aaaatgaaccaggctgggca

SEQ ID NO: 224886 - DNA, 20 bp, Artificial Sequence
  Description of Artificial Sequence: Synthetic oligonucleotide
  Target: LAMA2; (-) strand; PAM type: YTN; PAM sequence: TTT
gaaaatgaaccaggctgggc

SEQ ID NO: 224887 - DNA, 20 bp, Artificial Sequence
  Description of Artificial Sequence: Synthetic oligonucleotide
  Target: LAMA2; (-) strand; PAM type: YTN; PAM sequence: CTA
tttgaaaatgaaccaggctg

SEQ ID NO: 224888 - DNA, 20 bp, Artificial Sequence
  Description of Artificial Sequence: Synthetic oligonucleotide
  Target: LAMA2; (-) strand; PAM type: YTN; PAM sequence: TTC
tatttgaaaatgaaccaggc

SEQ ID NO: 224889 - DNA, 20 bp, Artificial Sequence
  Description of Artificial Sequence: Synthetic oligonucleotide
  Target: LAMA2; (-) strand; PAM type: YTN; PAM sequence: CTT
ctatttgaaaatgaaccagg

SEQ ID NO: 224890 - DNA, 20 bp, Artificial Sequence
  Description of Artificial Sequence: Synthetic oligonucleotide
  Target: LAMA2; (-) strand; PAM type: YTN; PAM sequence: TTC
aatgtaaaatgagaaacaac

SEQ ID NO: 224891 - DNA, 20 bp, Artificial Sequence
  Description of Artificial Sequence: Synthetic oligonucleotide
  Target: LAMA2; (-) strand; PAM type: YTN; PAM sequence: TTT
caatgtaaaatgagaaacaa

SEQ ID NO: 224892 - DNA, 20 bp, Artificial Sequence
  Description of Artificial Sequence: Synthetic oligonucleotide
  Target: LAMA2; (-) strand; PAM type: YTN; PAM sequence: CTA
taaatataaaatttcaatgt

SEQ ID NO: 224893 - DNA, 20 bp, Artificial Sequence
  Description of Artificial Sequence: Synthetic oligonucleotide
  Target: LAMA2; (-) strand; PAM type: YTN; PAM sequence: TTA
ctataaatataaaatttcaa

SEQ ID NO: 224894 - DNA, 20 bp, Artificial Sequence
  Description of Artificial Sequence: Synthetic oligonucleotide
  Target: LAMA2; (-) strand; PAM type: YTN; PAM sequence: TTT
actataaatataaaatttca

SEQ ID NO: 224895 - DNA, 20 bp, Artificial Sequence
  Description of Artificial Sequence: Synthetic oligonucleotide
  Target: LAMA2; (-) strand; PAM type: YTN; PAM sequence: TTT
tactataaatataaaatttc

SEQ ID NO: 224896 - DNA, 20 bp, Artificial Sequence
  Description of Artificial Sequence: Synthetic oligonucleotide
  Target: LAMA2; (-) strand; PAM type: YTN; PAM sequence: TTA
aaattttactataaatataa

SEQ ID NO: 224897 - DNA, 20 bp, Artificial Sequence
  Description of Artificial Sequence: Synthetic oligonucleotide
  Target: LAMA2; (-) strand; PAM type: YTN; PAM sequence: TTA
aattaaaattttactataaa

SEQ ID NO: 224898 - DNA, 20 bp, Artificial Sequence
  Description of Artificial Sequence: Synthetic oligonucleotide
  Target: LAMA2; (-) strand; PAM type: YTN; PAM sequence: TTA
ttaaattaaaattttactat

SEQ ID NO: 224899 - DNA, 20 bp, Artificial Sequence
  Description of Artificial Sequence: Synthetic oligonucleotide
  Target: LAMA2; (-) strand; PAM type: YTN; PAM sequence: TTA
gaataaatcatattattaaa

SEQ ID NO: 224900 - DNA, 20 bp, Artificial Sequence
  Description of Artificial Sequence: Synthetic oligonucleotide
  Target: LAMA2; (-) strand; PAM type: YTN; PAM sequence: TTT
agaataaatcatattattaa

SEQ ID NO: 224901 - DNA, 20 bp, Artificial Sequence
  Description of Artificial Sequence: Synthetic oligonucleotide
  Target: LAMA2; (-) strand; PAM type: YTN; PAM sequence: TTT
tagaataaatcatattatta

SEQ ID NO: 224902 - DNA, 20 bp, Artificial Sequence
  Description of Artificial Sequence: Synthetic oligonucleotide
  Target: LAMA2; (-) strand; PAM type: YTN; PAM sequence: TTG
aaaattttagaataaatcat

SEQ ID NO: 224903 - DNA, 20 bp, Artificial Sequence
  Description of Artificial Sequence: Synthetic oligonucleotide
  Target: LAMA2; (-) strand; PAM type: YTN; PAM sequence: TTA
aaaatagaatattgaaaatt

SEQ ID NO: 224904 - DNA, 20 bp, Artificial Sequence
  Description of Artificial Sequence: Synthetic oligonucleotide
  Target: LAMA2; (-) strand; PAM type: YTN; PAM sequence: CTC
aaggagattaaaaatagaat

SEQ ID NO: 224905 - DNA, 20 bp, Artificial Sequence
  Description of Artificial Sequence: Synthetic oligonucleotide
  Target: LAMA2; (-) strand; PAM type: YTN; PAM sequence: TTA
tgctcaaggagattaaaaat

SEQ ID NO: 224906 - DNA, 20 bp, Artificial Sequence
  Description of Artificial Sequence: Synthetic oligonucleotide
  Target: LAMA2; (-) strand; PAM type: YTN; PAM sequence: TTT
atgctcaaggagattaaaaa

SEQ ID NO: 224907 - DNA, 20 bp, Artificial Sequence
  Description of Artificial Sequence: Synthetic oligonucleotide
  Target: LAMA2; (-) strand; PAM type: YTN; PAM sequence: CTT
tatgctcaaggagattaaaa

SEQ ID NO: 224908 - DNA, 20 bp, Artificial Sequence
  Description of Artificial Sequence: Synthetic oligonucleotide
  Target: LAMA2; (-) strand; PAM type: YTN; PAM sequence: TTA
ctttatgctcaaggagatta

SEQ ID NO: 224909 - DNA, 20 bp, Artificial Sequence
  Description of Artificial Sequence: Synthetic oligonucleotide
  Target: LAMA2; (-) strand; PAM type: YTN; PAM sequence: TTT
actttatgctcaaggagatt

SEQ ID NO: 224910 - DNA, 20 bp, Artificial Sequence
  Description of Artificial Sequence: Synthetic oligonucleotide
  Target: LAMA2; (-) strand; PAM type: YTN; PAM sequence: TTT
tactttatgctcaaggagat

SEQ ID NO: 224911 - DNA, 20 bp, Artificial Sequence
  Description of Artificial Sequence: Synthetic oligonucleotide
  Target: LAMA2; (-) strand; PAM type: YTN; PAM sequence: TTT
ttactttatgctcaaggaga

SEQ ID NO: 224912 - DNA, 20 bp, Artificial Sequence
  Description of Artificial Sequence: Synthetic oligonucleotide
  Target: LAMA2; (-) strand; PAM type: YTN; PAM sequence: TTA
aagataatttttactttatg

SEQ ID NO: 224913 - DNA, 20 bp, Artificial Sequence
  Description of Artificial Sequence: Synthetic oligonucleotide
  Target: LAMA2; (-) strand; PAM type: YTN; PAM sequence: TTT
aaagataatttttactttat

SEQ ID NO: 224914 - DNA, 20 bp, Artificial Sequence
  Description of Artificial Sequence: Synthetic oligonucleotide
  Target: LAMA2; (-) strand; PAM type: YTN; PAM sequence: TTT
taaagataatttttacttta

SEQ ID NO: 224915 - DNA, 20 bp, Artificial Sequence
  Description of Artificial Sequence: Synthetic oligonucleotide
  Target: LAMA2; (-) strand; PAM type: YTN; PAM sequence: CTT
ttaaagataatttttacttt

SEQ ID NO: 224916 - DNA, 20 bp, Artificial Sequence
  Description of Artificial Sequence: Synthetic oligonucleotide
  Target: LAMA2; (-) strand; PAM type: YTN; PAM sequence: TTA
tcagacaaaaacttttaaag

SEQ ID NO: 224917 - DNA, 20 bp, Artificial Sequence
  Description of Artificial Sequence: Synthetic oligonucleotide
  Target: LAMA2; (-) strand; PAM type: YTN; PAM sequence: TTA
gaattatcagacaaaaactt

SEQ ID NO: 224918 - DNA, 20 bp, Artificial Sequence
  Description of Artificial Sequence: Synthetic oligonucleotide
  Target: LAMA2; (-) strand; PAM type: YTN; PAM sequence: TTA
tacaaagataatcaggcaca

SEQ ID NO: 224919 - DNA, 20 bp, Artificial Sequence
  Description of Artificial Sequence: Synthetic oligonucleotide
  Target: LAMA2; (-) strand; PAM type: YTN; PAM sequence: CTG
ttatacaaagataatcaggc

SEQ ID NO: 224920 - DNA, 20 bp, Artificial Sequence
  Description of Artificial Sequence: Synthetic oligonucleotide
  Target: LAMA2; (-) strand; PAM type: YTN; PAM sequence: TTC
tgttatacaaagataatcag

SEQ ID NO: 224921 - DNA, 20 bp, Artificial Sequence
  Description of Artificial Sequence: Synthetic oligonucleotide
  Target: LAMA2; (-) strand; PAM type: YTN; PAM sequence: CTT
ctgttatacaaagataatca

SEQ ID NO: 224922 - DNA, 20 bp, Artificial Sequence
  Description of Artificial Sequence: Synthetic oligonucleotide
  Target: LAMA2; (-) strand; PAM type: YTN; PAM sequence: TTC
aaatacaacttctgttatac

SEQ ID NO: 224923 - DNA, 20 bp, Artificial Sequence
  Description of Artificial Sequence: Synthetic oligonucleotide
  Target: LAMA2; (-) strand; PAM type: YTN; PAM sequence: TTT
caaatacaacttctgttata

SEQ ID NO: 224924 - DNA, 20 bp, Artificial Sequence
  Description of Artificial Sequence: Synthetic oligonucleotide
  Target: LAMA2; (-) strand; PAM type: YTN; PAM sequence: CTT
tcaaatacaacttctgttat

SEQ ID NO: 224925 - DNA, 20 bp, Artificial Sequence
  Description of Artificial Sequence: Synthetic oligonucleotide
  Target: LAMA2; (-) strand; PAM type: YTN; PAM sequence: CTC
tttcaaatacaacttctgtt

SEQ ID NO: 224926 - DNA, 20 bp, Artificial Sequence
  Description of Artificial Sequence: Synthetic oligonucleotide
  Target: LAMA2; (-) strand; PAM type: YTN; PAM sequence: TTC
tctttcaaatacaacttctg

SEQ ID NO: 224927 - DNA, 20 bp, Artificial Sequence
  Description of Artificial Sequence: Synthetic oligonucleotide
  Target: LAMA2; (-) strand; PAM type: YTN; PAM sequence: CTA
cacattctctttcaaataca

SEQ ID NO: 224928 - DNA, 20 bp, Artificial Sequence
  Description of Artificial Sequence: Synthetic oligonucleotide
  Target: LAMA2; (-) strand; PAM type: YTN; PAM sequence: TTC
tacacattctctttcaaata

SEQ ID NO: 224929 - DNA, 20 bp, Artificial Sequence
  Description of Artificial Sequence: Synthetic oligonucleotide
  Target: LAMA2; (-) strand; PAM type: YTN; PAM sequence: TTT
ctacacattctctttcaaat

SEQ ID NO: 224930 - DNA, 20 bp, Artificial Sequence
  Description of Artificial Sequence: Synthetic oligonucleotide
  Target: LAMA2; (-) strand; PAM type: YTN; PAM sequence: TTA
tttctacacattctctttca

SEQ ID NO: 224931 - DNA, 20 bp, Artificial Sequence
  Description of Artificial Sequence: Synthetic oligonucleotide
  Target: LAMA2; (-) strand; PAM type: YTN; PAM sequence: CTC
aaattatttctacacattct

SEQ ID NO: 224932 - DNA, 20 bp, Artificial Sequence
  Description of Artificial Sequence: Synthetic oligonucleotide
  Target: LAMA2; (-) strand; PAM type: YTN; PAM sequence: CTC
tcaaattatttctacacatt

SEQ ID NO: 224933 - DNA, 20 bp, Artificial Sequence
  Description of Artificial Sequence: Synthetic oligonucleotide
  Target: LAMA2; (-) strand; PAM type: YTN; PAM sequence: CTA
gctctcaaattatttctaca

SEQ ID NO: 224934 - DNA, 20 bp, Artificial Sequence
  Description of Artificial Sequence: Synthetic oligonucleotide
  Target: LAMA2; (-) strand; PAM type: YTN; PAM sequence: TTC
acacaggatgaagacaatat

SEQ ID NO: 224935 - DNA, 20 bp, Artificial Sequence
  Description of Artificial Sequence: Synthetic oligonucleotide
  Target: LAMA2; (-) strand; PAM type: YTN; PAM sequence: CTG
gcagtagcatcagaaagttc

SEQ ID NO: 224936 - DNA, 20 bp, Artificial Sequence
  Description of Artificial Sequence: Synthetic oligonucleotide
  Target: LAMA2; (-) strand; PAM type: YTN; PAM sequence: TTG
cctggcagtagcatcagaaa

SEQ ID NO: 224937 - DNA, 20 bp, Artificial Sequence
  Description of Artificial Sequence: Synthetic oligonucleotide
  Target: LAMA2; (-) strand; PAM type: YTN; PAM sequence: TTC
cattgcctggcagtagcatc

SEQ ID NO: 224938 - DNA, 20 bp, Artificial Sequence
  Description of Artificial Sequence: Synthetic oligonucleotide
  Target: LAMA2; (-) strand; PAM type: YTN; PAM sequence: TTT
ccattgcctggcagtagcat

SEQ ID NO: 224939 - DNA, 20 bp, Artificial Sequence
  Description of Artificial Sequence: Synthetic oligonucleotide
  Target: LAMA2; (-) strand; PAM type: YTN; PAM sequence: TTA
agatgatccagatttccatt

SEQ ID NO: 224940 - DNA, 20 bp, Artificial Sequence
  Description of Artificial Sequence: Synthetic oligonucleotide
  Target: LAMA2; (-) strand; PAM type: YTN; PAM sequence: TTG
aattaagatgatccagattt

SEQ ID NO: 224941 - DNA, 20 bp, Artificial Sequence
  Description of Artificial Sequence: Synthetic oligonucleotide
  Target: LAMA2; (-) strand; PAM type: YTN; PAM sequence: CTA
aaattgaattaagatgatcc

SEQ ID NO: 224942 - DNA, 20 bp, Artificial Sequence
  Description of Artificial Sequence: Synthetic oligonucleotide
  Target: LAMA2; (-) strand; PAM type: YTN; PAM sequence: TTG
aatccctaaaattgaattaa

SEQ ID NO: 224943 - DNA, 20 bp, Artificial Sequence
  Description of Artificial Sequence: Synthetic oligonucleotide
  Target: LAMA2; (-) strand; PAM type: YTN; PAM sequence: TTT
gaatccctaaaattgaatta

SEQ ID NO: 224944 - DNA, 20 bp, Artificial Sequence
  Description of Artificial Sequence: Synthetic oligonucleotide
  Target: LAMA2; (-) strand; PAM type: YTN; PAM sequence: CTG
aatgtcccagaaatttgaat

SEQ ID NO: 224945 - DNA, 20 bp, Artificial Sequence
  Description of Artificial Sequence: Synthetic oligonucleotide
  Target: LAMA2; (-) strand; PAM type: YTN; PAM sequence: TTG
aatcatctgaatgtcccaga

SEQ ID NO: 224946 - DNA, 20 bp, Artificial Sequence
  Description of Artificial Sequence: Synthetic oligonucleotide
  Target: LAMA2; (-) strand; PAM type: YTN; PAM sequence: TTT
gaatcatctgaatgtcccag

SEQ ID NO: 224947 - DNA, 20 bp, Artificial Sequence
  Description of Artificial Sequence: Synthetic oligonucleotide
  Target: LAMA2; (-) strand; PAM type: YTN; PAM sequence: CTT
tgaatcatctgaatgtccca

SEQ ID NO: 224948 - DNA, 20 bp, Artificial Sequence
  Description of Artificial Sequence: Synthetic oligonucleotide
  Target: LAMA2; (-) strand; PAM type: YTN; PAM sequence: TTA
tagcaatgctttgaatcatc

SEQ ID NO: 224949 - DNA, 20 bp, Artificial Sequence
  Description of Artificial Sequence: Synthetic oligonucleotide
  Target: LAMA2; (-) strand; PAM type: YTN; PAM sequence: CTG
ggttatagcaatgctttgaa

SEQ ID NO: 224950 - DNA, 20 bp, Artificial Sequence
  Description of Artificial Sequence: Synthetic oligonucleotide
  Target: LAMA2; (-) strand; PAM type: YTN; PAM sequence: CTG
tcactgggttatagcaatgc

SEQ ID NO: 224951 - DNA, 20 bp, Artificial Sequence
  Description of Artificial Sequence: Synthetic oligonucleotide
  Target: LAMA2; (-) strand; PAM type: YTN; PAM sequence: TTA
aagcagctgtcactgggtta

SEQ ID NO: 224952 - DNA, 20 bp, Artificial Sequence
  Description of Artificial Sequence: Synthetic oligonucleotide
  Target: LAMA2; (-) strand; PAM type: YTN; PAM sequence: CTG
gaattaaagcagctgtcact

SEQ ID NO: 224953 - DNA, 20 bp, Artificial Sequence
  Description of Artificial Sequence: Synthetic oligonucleotide
  Target: LAMA2; (-) strand; PAM type: YTN; PAM sequence: CTC
caaagataagcagcatggga

SEQ ID NO: 224954 - DNA, 20 bp, Artificial Sequence
  Description of Artificial Sequence: Synthetic oligonucleotide
  Target: LAMA2; (-) strand; PAM type: YTN; PAM sequence: TTG
gactccaaagataagcagca

SEQ ID NO: 224955 - DNA, 20 bp, Artificial Sequence
  Description of Artificial Sequence: Synthetic oligonucleotide
  Target: LAMA2; (-) strand; PAM type: YTN; PAM sequence: CTT
ggactccaaagataagcagc

SEQ ID NO: 224956 - DNA, 20 bp, Artificial Sequence
  Description of Artificial Sequence: Synthetic oligonucleotide
  Target: LAMA2; (-) strand; PAM type: YTN; PAM sequence: CTG
gcttggactccaaagataag

SEQ ID NO: 224957 - DNA, 20 bp, Artificial Sequence
  Description of Artificial Sequence: Synthetic oligonucleotide
  Target: LAMA2; (-) strand; PAM type: YTN; PAM sequence: TTC
ccacacacgctggcttggac

SEQ ID NO: 224958 - DNA, 20 bp, Artificial Sequence
  Description of Artificial Sequence: Synthetic oligonucleotide
  Target: LAMA2; (-) strand; PAM type: YTN; PAM sequence: TTC
gtaattcccacacacgctgg

SEQ ID NO: 224959 - DNA, 20 bp, Artificial Sequence
  Description of Artificial Sequence: Synthetic oligonucleotide
  Target: LAMA2; (-) strand; PAM type: YTN; PAM sequence: TTT
cgtaattcccacacacgctg

SEQ ID NO: 224960 - DNA, 20 bp, Artificial Sequence
  Description of Artificial Sequence: Synthetic oligonucleotide
  Target: LAMA2; (-) strand; PAM type: YTN; PAM sequence: CTT
tcgtaattcccacacacgct

SEQ ID NO: 224961 - DNA, 20 bp, Artificial Sequence
  Description of Artificial Sequence: Synthetic oligonucleotide
  Target: LAMA2; (-) strand; PAM type: YTN; PAM sequence: CTG
catgggtgggactttcgtaa

SEQ ID NO: 224962 - DNA, 20 bp, Artificial Sequence
  Description of Artificial Sequence: Synthetic oligonucleotide
  Target: LAMA2; (-) strand; PAM type: YTN; PAM sequence: TTC
caggactgcatgggtgggac

SEQ ID NO: 224963 - DNA, 20 bp, Artificial Sequence
  Description of Artificial Sequence: Synthetic oligonucleotide
  Target: LAMA2; (-) strand; PAM type: YTN; PAM sequence: TTG
gattccaggactgcatgggt

SEQ ID NO: 224964 - DNA, 20 bp, Artificial Sequence
  Description of Artificial Sequence: Synthetic oligonucleotide
  Target: LAMA2; (-) strand; PAM type: YTN; PAM sequence: TTA
ggaggacaaaagttggattc

SEQ ID NO: 224965 - DNA, 20 bp, Artificial Sequence
  Description of Artificial Sequence: Synthetic oligonucleotide
  Target: LAMA2; (-) strand; PAM type: YTN; PAM sequence: CTG
tattaggaggacaaaagttg

SEQ ID NO: 224966 - DNA, 20 bp, Artificial Sequence
  Description of Artificial Sequence: Synthetic oligonucleotide
  Target: LAMA2; (-) strand; PAM type: YTN; PAM sequence: CTG
ctgtattaggaggacaaaag

SEQ ID NO: 224967 - DNA, 20 bp, Artificial Sequence
  Description of Artificial Sequence: Synthetic oligonucleotide
  Target: LAMA2; (-) strand; PAM type: YTN; PAM sequence: TTG
acagccctgctgtattagga

SEQ ID NO: 224968 - DNA, 20 bp, Artificial Sequence
  Description of Artificial Sequence: Synthetic oligonucleotide
  Target: LAMA2; (-) strand; PAM type: YTN; PAM sequence: TTT
gacagccctgctgtattagg

SEQ ID NO: 224969 - DNA, 20 bp, Artificial Sequence
  Description of Artificial Sequence: Synthetic oligonucleotide
  Target: LAMA2; (-) strand; PAM type: YTN; PAM sequence: TTT
tgacagccctgctgtattag

SEQ ID NO: 224970 - DNA, 20 bp, Artificial Sequence
  Description of Artificial Sequence: Synthetic oligonucleotide
  Target: LAMA2; (-) strand; PAM type: YTN; PAM sequence: CTT
ttgacagccctgctgtatta

SEQ ID NO: 224971 - DNA, 20 bp, Artificial Sequence
  Description of Artificial Sequence: Synthetic oligonucleotide
  Target: LAMA2; (-) strand; PAM type: YTN; PAM sequence: CTC
ttttgacagccctgctgtat

SEQ ID NO: 224972 - DNA, 20 bp, Artificial Sequence
  Description of Artificial Sequence: Synthetic oligonucleotide
  Target: LAMA2; (-) strand; PAM type: YTN; PAM sequence: CTG
agcagctcttttgacagccc

SEQ ID NO: 224973 - DNA, 20 bp, Artificial Sequence
  Description of Artificial Sequence: Synthetic oligonucleotide
  Target: LAMA2; (-) strand; PAM type: YTN; PAM sequence: CTG
agagactgagcagctctttt

SEQ ID NO: 224974 - DNA, 20 bp, Artificial Sequence
  Description of Artificial Sequence: Synthetic oligonucleotide
  Target: LAMA2; (-) strand; PAM type: YTN; PAM sequence: CTG
tccagacacatggctgagag

SEQ ID NO: 224975 - DNA, 20 bp, Artificial Sequence
  Description of Artificial Sequence: Synthetic oligonucleotide
  Target: LAMA2; (-) strand; PAM type: YTN; PAM sequence: TTC
ctgtccagacacatggctga

SEQ ID NO: 224976 - DNA, 20 bp, Artificial Sequence
  Description of Artificial Sequence: Synthetic oligonucleotide
  Target: LAMA2; (-) strand; PAM type: YTN; PAM sequence: TTT
cctgtccagacacatggctg

SEQ ID NO: 224977 - DNA, 20 bp, Artificial Sequence
  Description of Artificial Sequence: Synthetic oligonucleotide
  Target: LAMA2; (-) strand; PAM type: YTN; PAM sequence: TTT
tcctgtccagacacatggct

SEQ ID NO: 224978 - DNA, 20 bp, Artificial Sequence
  Description of Artificial Sequence: Synthetic oligonucleotide
  Target: LAMA2; (-) strand; PAM type: YTN; PAM sequence: CTG
tgagcattttcctgtccaga

SEQ ID NO: 224979 - DNA, 20 bp, Artificial Sequence
  Description of Artificial Sequence: Synthetic oligonucleotide
  Target: LAMA2; (-) strand; PAM type: YTN; PAM sequence: TTG
tcctgtgagcattttcctgt

SEQ ID NO: 224980 - DNA, 20 bp, Artificial Sequence
  Description of Artificial Sequence: Synthetic oligonucleotide
  Target: LAMA2; (-) strand; PAM type: YTN; PAM sequence: TTT
gtcctgtgagcattttcctg

SEQ ID NO: 224981 - DNA, 20 bp, Artificial Sequence
  Description of Artificial Sequence: Synthetic oligonucleotide
  Target: LAMA2; (-) strand; PAM type: YTN; PAM sequence: TTT
tgtcctgtgagcattttcct

SEQ ID NO: 224982 - DNA, 20 bp, Artificial Sequence
  Description of Artificial Sequence: Synthetic oligonucleotide
  Target: LAMA2; (-) strand; PAM type: YTN; PAM sequence: CTT
ttgtcctgtgagcattttcc

SEQ ID NO: 224983 - DNA, 20 bp, Artificial Sequence
  Description of Artificial Sequence: Synthetic oligonucleotide
  Target: LAMA2; (-) strand; PAM type: YTN; PAM sequence: TTG
tgacagcttttgtcctgtga

SEQ ID NO: 224984 - DNA, 20 bp, Artificial Sequence
  Description of Artificial Sequence: Synthetic oligonucleotide
  Target: LAMA2; (-) strand; PAM type: YTN; PAM sequence: TTG
gtacgttgtgacagcttttg

SEQ ID NO: 224985 - DNA, 20 bp, Artificial Sequence
  Description of Artificial Sequence: Synthetic oligonucleotide
  Target: LAMA2; (-) strand; PAM type: YTN; PAM sequence: CTA
gacaggtgattggtacgttg

SEQ ID NO: 224986 - DNA, 20 bp, Artificial Sequence
  Description of Artificial Sequence: Synthetic oligonucleotide
  Target: LAMA2; (-) strand; PAM type: YTN; PAM sequence: CTC
aacatcaaggacaaaagaga

SEQ ID NO: 224987 - DNA, 20 bp, Artificial Sequence
  Description of Artificial Sequence: Synthetic oligonucleotide
  Target: LAMA2; (-) strand; PAM type: YTN; PAM sequence: TTC
tcaacatcaaggacaaaaga

SEQ ID NO: 224988 - DNA, 20 bp, Artificial Sequence
  Description of Artificial Sequence: Synthetic oligonucleotide
  Target: LAMA2; (-) strand; PAM type: YTN; PAM sequence: CTT
ctcaacatcaaggacaaaag

SEQ ID NO: 224989 - DNA, 20 bp, Artificial Sequence
  Description of Artificial Sequence: Synthetic oligonucleotide
  Target: LAMA2; (-) strand; PAM type: YTN; PAM sequence: CTA
tcaagagagtgaagataacc

SEQ ID NO: 224990 - DNA, 20 bp, Artificial Sequence
  Description of Artificial Sequence: Synthetic oligonucleotide
  Target: LAMA2; (-) strand; PAM type: YTN; PAM sequence: TTA
aagccatgtgagagctatca

SEQ ID NO: 224991 - DNA, 20 bp, Artificial Sequence
  Description of Artificial Sequence: Synthetic oligonucleotide
  Target: LAMA2; (-) strand; PAM type: YTN; PAM sequence: TTT
aaagccatgtgagagctatc

SEQ ID NO: 224992 - DNA, 20 bp, Artificial Sequence
  Description of Artificial Sequence: Synthetic oligonucleotide
  Target: LAMA2; (-) strand; PAM type: YTN; PAM sequence: CTG
gataaatatacaaaaacata

SEQ ID NO: 224993 - DNA, 20 bp, Artificial Sequence
  Description of Artificial Sequence: Synthetic oligonucleotide
  Target: LAMA2; (-) strand; PAM type: YTN; PAM sequence: CTA
gacaaactggataaatatac

SEQ ID NO: 224994 - DNA, 20 bp, Artificial Sequence
  Description of Artificial Sequence: Synthetic oligonucleotide
  Target: LAMA2; (-) strand; PAM type: YTN; PAM sequence: CTC
aatgacaacaactagacaaa

SEQ ID NO: 224995 - DNA, 20 bp, Artificial Sequence
  Description of Artificial Sequence: Synthetic oligonucleotide
  Target: LAMA2; (-) strand; PAM type: YTN; PAM sequence: CTC
tcaatgacaacaactagaca

SEQ ID NO: 224996 - DNA, 20 bp, Artificial Sequence
  Description of Artificial Sequence: Synthetic oligonucleotide
  Target: LAMA2; (-) strand; PAM type: YTN; PAM sequence: TTA
tacagtaagagtcaacactc

SEQ ID NO: 224997 - DNA, 20 bp, Artificial Sequence
  Description of Artificial Sequence: Synthetic oligonucleotide
  Target: LAMA2; (-) strand; PAM type: YTN; PAM sequence: TTA
tggtagattatacagtaaga

SEQ ID NO: 224998 - DNA, 20 bp, Artificial Sequence
  Description of Artificial Sequence: Synthetic oligonucleotide
  Target: LAMA2; (-) strand; PAM type: YTN; PAM sequence: TTT
atggtagattatacagtaag

SEQ ID NO: 224999 - DNA, 20 bp, Artificial Sequence
  Description of Artificial Sequence: Synthetic oligonucleotide
  Target: LAMA2; (-) strand; PAM type: YTN; PAM sequence: CTA
tttatggtagattatacagt

SEQ ID NO: 225000 - DNA, 20 bp, Artificial Sequence
  Description of Artificial Sequence: Synthetic oligonucleotide
  Target: LAMA2; (-) strand; PAM type: YTN; PAM sequence: TTC
tatttatggtagattataca

SEQ ID NO: 225001 - DNA, 20 bp, Artificial Sequence
  Description of Artificial Sequence: Synthetic oligonucleotide
  Target: LAMA2; (-) strand; PAM type: YTN; PAM sequence: CTT
ctatttatggtagattatac

SEQ ID NO: 225002 - DNA, 20 bp, Artificial Sequence
  Description of Artificial Sequence: Synthetic oligonucleotide
  Target: LAMA2; (-) strand; PAM type: YTN; PAM sequence: TTC
gcttctatttatggtagatt

SEQ ID NO: 225003 - DNA, 20 bp, Artificial Sequence
  Description of Artificial Sequence: Synthetic oligonucleotide
  Target: LAMA2; (-) strand; PAM type: YTN; PAM sequence: CTT
cgcttctatttatggtagat

SEQ ID NO: 225004 - DNA, 20 bp, Artificial Sequence
  Description of Artificial Sequence: Synthetic oligonucleotide
  Target: LAMA2; (-) strand; PAM type: YTN; PAM sequence: TTA
aatgcatgtgcaacttcgct

SEQ ID NO: 225005 - DNA, 20 bp, Artificial Sequence
  Description of Artificial Sequence: Synthetic oligonucleotide
  Target: LAMA2; (-) strand; PAM type: YTN; PAM sequence: TTC
caaaataaaaaaaattaaat

SEQ ID NO: 225006 - DNA, 20 bp, Artificial Sequence
  Description of Artificial Sequence: Synthetic oligonucleotide
  Target: LAMA2; (-) strand; PAM type: YTN; PAM sequence: TTA
acataattccaaaataaaaa

SEQ ID NO: 225007 - DNA, 20 bp, Artificial Sequence
  Description of Artificial Sequence: Synthetic oligonucleotide
  Target: LAMA2; (-) strand; PAM type: YTN; PAM sequence: CTT
aacataattccaaaataaaa

SEQ ID NO: 225008 - DNA, 20 bp, Artificial Sequence
  Description of Artificial Sequence: Synthetic oligonucleotide
  Target: LAMA2; (-) strand; PAM type: YTN; PAM sequence: TTC
atacatgtgtgtaaacttaa

SEQ ID NO: 225009 - DNA, 20 bp, Artificial Sequence
  Description of Artificial Sequence: Synthetic oligonucleotide
  Target: LAMA2; (-) strand; PAM type: YTN; PAM sequence: CTT
catacatgtgtgtaaactta

SEQ ID NO: 225010 - DNA, 20 bp, Artificial Sequence
  Description of Artificial Sequence: Synthetic oligonucleotide
  Target: LAMA2; (-) strand; PAM type: YTN; PAM sequence: CTA
taatcttcatacatgtgtgt

SEQ ID NO: 225011 - DNA, 20 bp, Artificial Sequence
  Description of Artificial Sequence: Synthetic oligonucleotide
  Target: LAMA2; (-) strand; PAM type: YTN; PAM sequence: CTC
tataatcttcatacatgtgt

SEQ ID NO: 225012 - DNA, 20 bp, Artificial Sequence
  Description of Artificial Sequence: Synthetic oligonucleotide
  Target: LAMA2; (-) strand; PAM type: YTN; PAM sequence: TTC
tctataatcttcatacatgt

SEQ ID NO: 225013 - DNA, 20 bp, Artificial Sequence
  Description of Artificial Sequence: Synthetic oligonucleotide
  Target: LAMA2; (-) strand; PAM type: YTN; PAM sequence: CTG
gatgagggaatgtgaggatt

SEQ ID NO: 225014 - DNA, 20 bp, Artificial Sequence
  Description of Artificial Sequence: Synthetic oligonucleotide
  Target: LAMA2; (-) strand; PAM type: YTN; PAM sequence: CTA
gggatagctggatgagggaa

SEQ ID NO: 225015 - DNA, 20 bp, Artificial Sequence
  Description of Artificial Sequence: Synthetic oligonucleotide
  Target: LAMA2; (-) strand; PAM type: YTN; PAM sequence: TTC
ctagggatagctggatgagg

SEQ ID NO: 225016 - DNA, 20 bp, Artificial Sequence
  Description of Artificial Sequence: Synthetic oligonucleotide
  Target: LAMA2; (-) strand; PAM type: YTN; PAM sequence: TTA
ttcctagggatagctggatg

SEQ ID NO: 225017 - DNA, 20 bp, Artificial Sequence
  Description of Artificial Sequence: Synthetic oligonucleotide
  Target: LAMA2; (-) strand; PAM type: YTN; PAM sequence: TTA
agatattattcctagggata

SEQ ID NO: 225018 - DNA, 20 bp, Artificial Sequence
  Description of Artificial Sequence: Synthetic oligonucleotide
  Target: LAMA2; (-) strand; PAM type: YTN; PAM sequence: TTT
aagatattattcctagggat

SEQ ID NO: 225019 - DNA, 20 bp, Artificial Sequence
  Description of Artificial Sequence: Synthetic oligonucleotide
  Target: LAMA2; (-) strand; PAM type: YTN; PAM sequence: TTA
tttaagatattattcctagg

SEQ ID NO: 225020 - DNA, 20 bp, Artificial Sequence
  Description of Artificial Sequence: Synthetic oligonucleotide
  Target: LAMA2; (-) strand; PAM type: YTN; PAM sequence: TTG
tcattatttaagatattatt

SEQ ID NO: 225021 - DNA, 20 bp, Artificial Sequence
  Description of Artificial Sequence: Synthetic oligonucleotide
  Target: LAMA2; (-) strand; PAM type: YTN; PAM sequence: TTA
acatgtgcattgtcattatt

SEQ ID NO: 225022 - DNA, 20 bp, Artificial Sequence
  Description of Artificial Sequence: Synthetic oligonucleotide
  Target: LAMA2; (-) strand; PAM type: YTN; PAM sequence: TTT
aacatgtgcattgtcattat

SEQ ID NO: 225023 - DNA, 20 bp, Artificial Sequence
  Description of Artificial Sequence: Synthetic oligonucleotide
  Target: LAMA2; (-) strand; PAM type: YTN; PAM sequence: TTT
taacatgtgcattgtcatta

SEQ ID NO: 225024 - DNA, 20 bp, Artificial Sequence
  Description of Artificial Sequence: Synthetic oligonucleotide
  Target: LAMA2; (-) strand; PAM type: YTN; PAM sequence: TTA
gttttaacatgtgcattgtc

SEQ ID NO: 225025 - DNA, 20 bp, Artificial Sequence
  Description of Artificial Sequence: Synthetic oligonucleotide
  Target: LAMA2; (-) strand; PAM type: YTN; PAM sequence: CTT
agttttaacatgtgcattgt

SEQ ID NO: 225026 - DNA, 20 bp, Artificial Sequence
  Description of Artificial Sequence: Synthetic oligonucleotide
  Target: LAMA2; (-) strand; PAM type: YTN; PAM sequence: TTC
ttagttttaacatgtgcatt

SEQ ID NO: 225027 - DNA, 20 bp, Artificial Sequence
  Description of Artificial Sequence: Synthetic oligonucleotide
  Target: LAMA2; (-) strand; PAM type: YTN; PAM sequence: CTT
cttagttttaacatgtgcat

SEQ ID NO: 225028 - DNA, 20 bp, Artificial Sequence
  Description of Artificial Sequence: Synthetic oligonucleotide
  Target: LAMA2; (-) strand; PAM type: YTN; PAM sequence: CTA
acttcttagttttaacatgt

SEQ ID NO: 225029 - DNA, 20 bp, Artificial Sequence
  Description of Artificial Sequence: Synthetic oligonucleotide
  Target: LAMA2; (-) strand; PAM type: YTN; PAM sequence: TTA
gataacaataatgtatcaat

SEQ ID NO: 225030 - DNA, 20 bp, Artificial Sequence
  Description of Artificial Sequence: Synthetic oligonucleotide
  Target: LAMA2; (-) strand; PAM type: YTN; PAM sequence: TTT
agataacaataatgtatcaa

SEQ ID NO: 225031 - DNA, 20 bp, Artificial Sequence
  Description of Artificial Sequence: Synthetic oligonucleotide
  Target: LAMA2; (-) strand; PAM type: YTN; PAM sequence: CTG
tggtttagataacaataatg

SEQ ID NO: 225032 - DNA, 20 bp, Artificial Sequence
  Description of Artificial Sequence: Synthetic oligonucleotide
  Target: LAMA2; (-) strand; PAM type: YTN; PAM sequence: CTG
aataaggtctgtggtttaga

SEQ ID NO: 225033 - DNA, 20 bp, Artificial Sequence
  Description of Artificial Sequence: Synthetic oligonucleotide
  Target: LAMA2; (-) strand; PAM type: YTN; PAM sequence: TTG
gtaaaatgaatgaaacctga

SEQ ID NO: 225034 - DNA, 20 bp, Artificial Sequence
  Description of Artificial Sequence: Synthetic oligonucleotide
  Target: LAMA2; (-) strand; PAM type: YTN; PAM sequence: TTG
gatcccagaagagaaaaaat

SEQ ID NO: 225035 - DNA, 20 bp, Artificial Sequence
  Description of Artificial Sequence: Synthetic oligonucleotide
  Target: LAMA2; (-) strand; PAM type: YTN; PAM sequence: CTG
aattggatcccagaagagaa

SEQ ID NO: 225036 - DNA, 20 bp, Artificial Sequence
  Description of Artificial Sequence: Synthetic oligonucleotide
  Target: LAMA2; (-) strand; PAM type: YTN; PAM sequence: CTA
aatgcaaaatagtacctgaa

SEQ ID NO: 225037 - DNA, 20 bp, Artificial Sequence
  Description of Artificial Sequence: Synthetic oligonucleotide
  Target: LAMA2; (-) strand; PAM type: YTN; PAM sequence: CTG
tcacagatcagtgactaaat

SEQ ID NO: 225038 - DNA, 20 bp, Artificial Sequence
  Description of Artificial Sequence: Synthetic oligonucleotide
  Target: LAMA2; (-) strand; PAM type: YTN; PAM sequence: TTA
aaactgtcacagatcagtga

SEQ ID NO: 225039 - DNA, 20 bp, Artificial Sequence
  Description of Artificial Sequence: Synthetic oligonucleotide
  Target: LAMA2; (-) strand; PAM type: YTN; PAM sequence: CTT
aaaactgtcacagatcagtg

SEQ ID NO: 225040 - DNA, 20 bp, Artificial Sequence
  Description of Artificial Sequence: Synthetic oligonucleotide
  Target: LAMA2; (-) strand; PAM type: YTN; PAM sequence: CTC
ttaaaactgtcacagatcag

SEQ ID NO: 225041 - DNA, 20 bp, Artificial Sequence
  Description of Artificial Sequence: Synthetic oligonucleotide
  Target: LAMA2; (-) strand; PAM type: YTN; PAM sequence: TTA
aaatatctcttaaaactgtc

SEQ ID NO: 225042 - DNA, 20 bp, Artificial Sequence
  Description of Artificial Sequence: Synthetic oligonucleotide
  Target: LAMA2; (-) strand; PAM type: YTN; PAM sequence: CTT
aaaatatctcttaaaactgt

SEQ ID NO: 225043 - DNA, 20 bp, Artificial Sequence
  Description of Artificial Sequence: Synthetic oligonucleotide
  Target: LAMA2; (-) strand; PAM type: YTN; PAM sequence: TTC
ttaaaatatctcttaaaact

SEQ ID NO: 225044 - DNA, 20 bp, Artificial Sequence
  Description of Artificial Sequence: Synthetic oligonucleotide
  Target: LAMA2; (-) strand; PAM type: YTN; PAM sequence: TTT
cttaaaatatctcttaaaac

SEQ ID NO: 225045 - DNA, 20 bp, Artificial Sequence
  Description of Artificial Sequence: Synthetic oligonucleotide
  Target: LAMA2; (-) strand; PAM type: YTN; PAM sequence: TTA
aaatatttcttaaaatatct

SEQ ID NO: 225046 - DNA, 20 bp, Artificial Sequence
  Description of Artificial Sequence: Synthetic oligonucleotide
  Target: LAMA2; (-) strand; PAM type: YTN; PAM sequence: CTT
aaaatatttcttaaaatatc

SEQ ID NO: 225047 - DNA, 20 bp, Artificial Sequence
  Description of Artificial Sequence: Synthetic oligonucleotide
  Target: LAMA2; (-) strand; PAM type: YTN; PAM sequence: CTC
ttaaaatatttcttaaaata

SEQ ID NO: 225048 - DNA, 20 bp, Artificial Sequence
  Description of Artificial Sequence: Synthetic oligonucleotide
  Target: LAMA2; (-) strand; PAM type: YTN; PAM sequence: CTA
aatatctcttaaaatatttc

SEQ ID NO: 225049 - DNA, 20 bp, Artificial Sequence
  Description of Artificial Sequence: Synthetic oligonucleotide
  Target: LAMA2; (-) strand; PAM type: YTN; PAM sequence: CTC
taaatatctcttaaaatatt

SEQ ID NO: 225050 - DNA, 20 bp, Artificial Sequence
  Description of Artificial Sequence: Synthetic oligonucleotide
  Target: LAMA2; (-) strand; PAM type: YTN; PAM sequence: CTA
taaaatatctctaaatatct

SEQ ID NO: 225051 - DNA, 20 bp, Artificial Sequence
  Description of Artificial Sequence: Synthetic oligonucleotide
  Target: LAMA2; (-) strand; PAM type: YTN; PAM sequence: CTG
aataatagtctataaaatat

SEQ ID NO: 225052 - DNA, 20 bp, Artificial Sequence
  Description of Artificial Sequence: Synthetic oligonucleotide
  Target: LAMA2; (-) strand; PAM type: YTN; PAM sequence: TTA
accatgaaaaaacatcaggc

SEQ ID NO: 225053 - DNA, 20 bp, Artificial Sequence
  Description of Artificial Sequence: Synthetic oligonucleotide
  Target: LAMA2; (-) strand; PAM type: YTN; PAM sequence: TTT
aaccatgaaaaaacatcagg

SEQ ID NO: 225054 - DNA, 20 bp, Artificial Sequence
  Description of Artificial Sequence: Synthetic oligonucleotide
  Target: LAMA2; (-) strand; PAM type: YTN; PAM sequence: TTC
ccaaaatccagaagcccagt

SEQ ID NO: 225055 - DNA, 20 bp, Artificial Sequence
  Description of Artificial Sequence: Synthetic oligonucleotide
  Target: LAMA2; (-) strand; PAM type: YTN; PAM sequence: TTG
gttcccaaaatccagaagcc

SEQ ID NO: 225056 - DNA, 20 bp, Artificial Sequence
  Description of Artificial Sequence: Synthetic oligonucleotide
  Target: LAMA2; (-) strand; PAM type: YTN; PAM sequence: CTG
tagtattggttcccaaaatc

SEQ ID NO: 225057 - DNA, 20 bp, Artificial Sequence
  Description of Artificial Sequence: Synthetic oligonucleotide
  Target: LAMA2; (-) strand; PAM type: YTN; PAM sequence: CTC
tgtagtattggttcccaaaa

SEQ ID NO: 225058 - DNA, 20 bp, Artificial Sequence
  Description of Artificial Sequence: Synthetic oligonucleotide
  Target: LAMA2; (-) strand; PAM type: YTN; PAM sequence: TTC
ctctgtagtattggttccca

SEQ ID NO: 225059 - DNA, 20 bp, Artificial Sequence
  Description of Artificial Sequence: Synthetic oligonucleotide
  Target: LAMA2; (-) strand; PAM type: YTN; PAM sequence: TTT
cctctgtagtattggttccc

SEQ ID NO: 225060 - DNA, 20 bp, Artificial Sequence
  Description of Artificial Sequence: Synthetic oligonucleotide
  Target: LAMA2; (-) strand; PAM type: YTN; PAM sequence: CTG
tttcctctgtagtattggtt

SEQ ID NO: 225061 - DNA, 20 bp, Artificial Sequence
  Description of Artificial Sequence: Synthetic oligonucleotide
  Target: LAMA2; (-) strand; PAM type: YTN; PAM sequence: TTG
atgcaatgagaaactgtttc

SEQ ID NO: 225062 - DNA, 20 bp, Artificial Sequence
  Description of Artificial Sequence: Synthetic oligonucleotide
  Target: LAMA2; (-) strand; PAM type: YTN; PAM sequence: TTA
ataaaaaatgattgatgcaa

SEQ ID NO: 225063 - DNA, 20 bp, Artificial Sequence
  Description of Artificial Sequence: Synthetic oligonucleotide
  Target: LAMA2; (-) strand; PAM type: YTN; PAM sequence: TTA
atagaagcacaagccccata

SEQ ID NO: 225064 - DNA, 20 bp, Artificial Sequence
  Description of Artificial Sequence: Synthetic oligonucleotide
  Target: LAMA2; (-) strand; PAM type: YTN; PAM sequence: CTA
ttaatagaagcacaagcccc

SEQ ID NO: 225065 - DNA, 20 bp, Artificial Sequence
  Description of Artificial Sequence: Synthetic oligonucleotide
  Target: LAMA2; (-) strand; PAM type: YTN; PAM sequence: CTA
cctattaatagaagcacaag

SEQ ID NO: 225066 - DNA, 20 bp, Artificial Sequence
  Description of Artificial Sequence: Synthetic oligonucleotide
  Target: LAMA2; (-) strand; PAM type: YTN; PAM sequence: TTA
aaaatctacctattaataga

SEQ ID NO: 225067 - DNA, 20 bp, Artificial Sequence
  Description of Artificial Sequence: Synthetic oligonucleotide
  Target: LAMA2; (-) strand; PAM type: YTN; PAM sequence: TTT
aaaaatctacctattaatag

SEQ ID NO: 225068 - DNA, 20 bp, Artificial Sequence
  Description of Artificial Sequence: Synthetic oligonucleotide
  Target: LAMA2; (-) strand; PAM type: YTN; PAM sequence: TTT
taaaaatctacctattaata

SEQ ID NO: 225069 - DNA, 20 bp, Artificial Sequence
  Description of Artificial Sequence: Synthetic oligonucleotide
  Target: LAMA2; (-) strand; PAM type: YTN; PAM sequence: TTA
aaaacattttaaaaatctac

SEQ ID NO: 225070 - DNA, 20 bp, Artificial Sequence
  Description of Artificial Sequence: Synthetic oligonucleotide
  Target: LAMA2; (-) strand; PAM type: YTN; PAM sequence: CTA
tgtaaccataaaaattaaaa

SEQ ID NO: 225071 - DNA, 20 bp, Artificial Sequence
  Description of Artificial Sequence: Synthetic oligonucleotide
  Target: LAMA2; (-) strand; PAM type: YTN; PAM sequence: CTA
ctatgtaaccataaaaatta

SEQ ID NO: 225072 - DNA, 20 bp, Artificial Sequence
  Description of Artificial Sequence: Synthetic oligonucleotide
  Target: LAMA2; (-) strand; PAM type: YTN; PAM sequence: CTA
aaatatatacacctactatg

SEQ ID NO: 225073 - DNA, 20 bp, Artificial Sequence
  Description of Artificial Sequence: Synthetic oligonucleotide
  Target: LAMA2; (-) strand; PAM type: YTN; PAM sequence: CTA
tctaaaatatatacacctac

SEQ ID NO: 225074 - DNA, 20 bp, Artificial Sequence
  Description of Artificial Sequence: Synthetic oligonucleotide
  Target: LAMA2; (-) strand; PAM type: YTN; PAM sequence: TTA
aaaatctatctaaaatatat

SEQ ID NO: 225075 - DNA, 20 bp, Artificial Sequence
  Description of Artificial Sequence: Synthetic oligonucleotide
  Target: LAMA2; (-) strand; PAM type: YTN; PAM sequence: CTG
tccacgttaaaaatctatct

SEQ ID NO: 225076 - DNA, 20 bp, Artificial Sequence
  Description of Artificial Sequence: Synthetic oligonucleotide
  Target: LAMA2; (-) strand; PAM type: YTN; PAM sequence: CTG
ctgtccacgttaaaaatcta

SEQ ID NO: 225077 - DNA, 20 bp, Artificial Sequence
  Description of Artificial Sequence: Synthetic oligonucleotide
  Target: LAMA2; (-) strand; PAM type: YTN; PAM sequence: TTA
gatactgctgtccacgttaa

SEQ ID NO: 225078 - DNA, 20 bp, Artificial Sequence
  Description of Artificial Sequence: Synthetic oligonucleotide
  Target: LAMA2; (-) strand; PAM type: YTN; PAM sequence: TTT
agatactgctgtccacgtta

SEQ ID NO: 225079 - DNA, 20 bp, Artificial Sequence
  Description of Artificial Sequence: Synthetic oligonucleotide
  Target: LAMA2; (-) strand; PAM type: YTN; PAM sequence: TTA
caaatcacagtaaatattta

SEQ ID NO: 225080 - DNA, 20 bp, Artificial Sequence
  Description of Artificial Sequence: Synthetic oligonucleotide
  Target: LAMA2; (-) strand; PAM type: YTN; PAM sequence: TTA
gtgaaaaatatacattacaa

SEQ ID NO: 225081 - DNA, 20 bp, Artificial Sequence
  Description of Artificial Sequence: Synthetic oligonucleotide
  Target: LAMA2; (-) strand; PAM type: YTN; PAM sequence: CTT
agtgaaaaatatacattaca

SEQ ID NO: 225082 - DNA, 20 bp, Artificial Sequence
  Description of Artificial Sequence: Synthetic oligonucleotide
  Target: LAMA2; (-) strand; PAM type: YTN; PAM sequence: TTC
aatgcttagtgaaaaatata

SEQ ID NO: 225083 - DNA, 20 bp, Artificial Sequence
  Description of Artificial Sequence: Synthetic oligonucleotide
  Target: LAMA2; (-) strand; PAM type: YTN; PAM sequence: CTG
gaagaaaatgaccattcaat

SEQ ID NO: 225084 - DNA, 20 bp, Artificial Sequence
  Description of Artificial Sequence: Synthetic oligonucleotide
  Target: LAMA2; (-) strand; PAM type: YTN; PAM sequence: TTG
aaggtctggaagaaaatgac

SEQ ID NO: 225085 - DNA, 20 bp, Artificial Sequence
  Description of Artificial Sequence: Synthetic oligonucleotide
  Target: LAMA2; (-) strand; PAM type: YTN; PAM sequence: TTT
gaaggtctggaagaaaatga

SEQ ID NO: 225086 - DNA, 20 bp, Artificial Sequence
  Description of Artificial Sequence: Synthetic oligonucleotide
  Target: LAMA2; (-) strand; PAM type: YTN; PAM sequence: TTT
tgaaggtctggaagaaaatg

SEQ ID NO: 225087 - DNA, 20 bp, Artificial Sequence
  Description of Artificial Sequence: Synthetic oligonucleotide
  Target: LAMA2; (-) strand; PAM type: YTN; PAM sequence: TTA
aggaatattttgaaggtctg

SEQ ID NO: 225088 - DNA, 20 bp, Artificial Sequence
  Description of Artificial Sequence: Synthetic oligonucleotide
  Target: LAMA2; (-) strand; PAM type: YTN; PAM sequence: TTT
aaggaatattttgaaggtct

SEQ ID NO: 225089 - DNA, 20 bp, Artificial Sequence
  Description of Artificial Sequence: Synthetic oligonucleotide
  Target: LAMA2; (-) strand; PAM type: YTN; PAM sequence: CTG
acatatttaaggaatatttt

SEQ ID NO: 225090 - DNA, 20 bp, Artificial Sequence
  Description of Artificial Sequence: Synthetic oligonucleotide
  Target: LAMA2; (-) strand; PAM type: YTN; PAM sequence: TTC
tgacatatttaaggaatatt

SEQ ID NO: 225091 - DNA, 20 bp, Artificial Sequence
  Description of Artificial Sequence: Synthetic oligonucleotide
  Target: LAMA2; (-) strand; PAM type: YTN; PAM sequence: TTT
ctgacatatttaaggaatat

SEQ ID NO: 225092 - DNA, 20 bp, Artificial Sequence
  Description of Artificial Sequence: Synthetic oligonucleotide
  Target: LAMA2; (-) strand; PAM type: YTN; PAM sequence: TTA
tttctgacatatttaaggaa

SEQ ID NO: 225093 - DNA, 20 bp, Artificial Sequence
  Description of Artificial Sequence: Synthetic oligonucleotide
  Target: LAMA2; (-) strand; PAM type: YTN; PAM sequence: CTT
atttctgacatatttaagga

SEQ ID NO: 225094 - DNA, 20 bp, Artificial Sequence
  Description of Artificial Sequence: Synthetic oligonucleotide
  Target: LAMA2; (-) strand; PAM type: YTN; PAM sequence: TTC
ttatttctgacatatttaag

SEQ ID NO: 225095 - DNA, 20 bp, Artificial Sequence
  Description of Artificial Sequence: Synthetic oligonucleotide
  Target: LAMA2; (-) strand; PAM type: YTN; PAM sequence: TTT
cttatttctgacatatttaa

SEQ ID NO: 225096 - DNA, 20 bp, Artificial Sequence
  Description of Artificial Sequence: Synthetic oligonucleotide
  Target: LAMA2; (-) strand; PAM type: YTN; PAM sequence: TTT
tcttatttctgacatattta

SEQ ID NO: 225097 - DNA, 20 bp, Artificial Sequence
  Description of Artificial Sequence: Synthetic oligonucleotide
  Target: LAMA2; (-) strand; PAM type: YTN; PAM sequence: TTT
ttcttatttctgacatattt

SEQ ID NO: 225098 - DNA, 20 bp, Artificial Sequence
  Description of Artificial Sequence: Synthetic oligonucleotide
  Target: LAMA2; (-) strand; PAM type: YTN; PAM sequence: TTG
tttttcttatttctgacata

SEQ ID NO: 225099 - DNA, 20 bp, Artificial Sequence
  Description of Artificial Sequence: Synthetic oligonucleotide
  Target: LAMA2; (-) strand; PAM type: YTN; PAM sequence: CTT
gtttttcttatttctgacat

SEQ ID NO: 225100 - DNA, 20 bp, Artificial Sequence
  Description of Artificial Sequence: Synthetic oligonucleotide
  Target: LAMA2; (-) strand; PAM type: YTN; PAM sequence: TTG
taaagaagaaagaaaaaaaa

SEQ ID NO: 225101 - DNA, 20 bp, Artificial Sequence
  Description of Artificial Sequence: Synthetic oligonucleotide
  Target: LAMA2; (-) strand; PAM type: YTN; PAM sequence: TTT
gtaaagaagaaagaaaaaaa

SEQ ID NO: 225102 - DNA, 20 bp, Artificial Sequence
  Description of Artificial Sequence: Synthetic oligonucleotide
  Target: LAMA2; (-) strand; PAM type: YTN; PAM sequence: CTG
tttgtaaagaagaaagaaaa

SEQ ID NO: 225103 - DNA, 20 bp, Artificial Sequence
  Description of Artificial Sequence: Synthetic oligonucleotide
  Target: LAMA2; (-) strand; PAM type: YTN; PAM sequence: CTG
atcaacacaatgagaacctg

SEQ ID NO: 225104 - DNA, 20 bp, Artificial Sequence
  Description of Artificial Sequence: Synthetic oligonucleotide
  Target: LAMA2; (-) strand; PAM type: YTN; PAM sequence: CTA
gcctgatcaacacaatgaga

SEQ ID NO: 225105 - DNA, 20 bp, Artificial Sequence
  Description of Artificial Sequence: Synthetic oligonucleotide
  Target: LAMA2; (-) strand; PAM type: YTN; PAM sequence: CTC
tagcctgatcaacacaatga

SEQ ID NO: 225106 - DNA, 20 bp, Artificial Sequence
  Description of Artificial Sequence: Synthetic oligonucleotide
  Target: LAMA2; (-) strand; PAM type: YTN; PAM sequence: CTG
gactctagcctgatcaacac

SEQ ID NO: 225107 - DNA, 20 bp, Artificial Sequence
  Description of Artificial Sequence: Synthetic oligonucleotide
  Target: LAMA2; (-) strand; PAM type: YTN; PAM sequence: CTA
taatcatgccactggactct

SEQ ID NO: 225108 - DNA, 20 bp, Artificial Sequence
  Description of Artificial Sequence: Synthetic oligonucleotide
  Target: LAMA2; (-) strand; PAM type: YTN; PAM sequence: CTG
cagtgagctataatcatgcc

SEQ ID NO: 225109 - DNA, 20 bp, Artificial Sequence
  Description of Artificial Sequence: Synthetic oligonucleotide
  Target: LAMA2; (-) strand; PAM type: YTN; PAM sequence: TTG
agcctgcagtgagctataat

SEQ ID NO: 225110 - DNA, 20 bp, Artificial Sequence
  Description of Artificial Sequence: Synthetic oligonucleotide
  Target: LAMA2; (-) strand; PAM type: YTN; PAM sequence: TTT
gagcctgcagtgagctataa

SEQ ID NO: 225111 - DNA, 20 bp, Artificial Sequence
  Description of Artificial Sequence: Synthetic oligonucleotide
  Target: LAMA2; (-) strand; PAM type: YTN; PAM sequence: CTA
ggagtttgagcctgcagtga

SEQ ID NO: 225112 - DNA, 20 bp, Artificial Sequence
  Description of Artificial Sequence: Synthetic oligonucleotide
  Target: LAMA2; (-) strand; PAM type: YTN; PAM sequence: TTG
agcctaggagtttgagcctg

SEQ ID NO: 225113 - DNA, 20 bp, Artificial Sequence
  Description of Artificial Sequence: Synthetic oligonucleotide
  Target: LAMA2; (-) strand; PAM type: YTN; PAM sequence: CTT
gagcctaggagtttgagcct

SEQ ID NO: 225114 - DNA, 20 bp, Artificial Sequence
  Description of Artificial Sequence: Synthetic oligonucleotide
  Target: LAMA2; (-) strand; PAM type: YTN; PAM sequence: TTC
ttgagcctaggagtttgagc

SEQ ID NO: 225115 - DNA, 20 bp, Artificial Sequence
  Description of Artificial Sequence: Synthetic oligonucleotide
  Target: LAMA2; (-) strand; PAM type: YTN; PAM sequence: TTT
cttgagcctaggagtttgag

SEQ ID NO: 225116 - DNA, 20 bp, Artificial Sequence
  Description of Artificial Sequence: Synthetic oligonucleotide
  Target: LAMA2; (-) strand; PAM type: YTN; PAM sequence: TTA
ggtaggaagatttcttgagc

SEQ ID NO: 225117 - DNA, 20 bp, Artificial Sequence
  Description of Artificial Sequence: Synthetic oligonucleotide
  Target: LAMA2; (-) strand; PAM type: YTN; PAM sequence: TTT
aggtaggaagatttcttgag

SEQ ID NO: 225118 - DNA, 20 bp, Artificial Sequence
  Description of Artificial Sequence: Synthetic oligonucleotide
  Target: LAMA2; (-) strand; PAM type: YTN; PAM sequence: TTT
taggtaggaagatttcttga

SEQ ID NO: 225119 - DNA, 20 bp, Artificial Sequence
  Description of Artificial Sequence: Synthetic oligonucleotide
  Target: LAMA2; (-) strand; PAM type: YTN; PAM sequence: TTT
ttaggtaggaagatttcttg

SEQ ID NO: 225120 - DNA, 20 bp, Artificial Sequence
  Description of Artificial Sequence: Synthetic oligonucleotide
  Target: LAMA2; (-) strand; PAM type: YTN; PAM sequence: TTT
tttaggtaggaagatttctt

SEQ ID NO: 225121 - DNA, 20 bp, Artificial Sequence
  Description of Artificial Sequence: Synthetic oligonucleotide
  Target: LAMA2; (-) strand; PAM type: YTN; PAM sequence: CTG
attttttaggtaggaagatt

SEQ ID NO: 225122 - DNA, 20 bp, Artificial Sequence
  Description of Artificial Sequence: Synthetic oligonucleotide
  Target: LAMA2; (-) strand; PAM type: YTN; PAM sequence: CTG
gaggctgattttttaggtag

SEQ ID NO: 225123 - DNA, 20 bp, Artificial Sequence
  Description of Artificial Sequence: Synthetic oligonucleotide
  Target: LAMA2; (-) strand; PAM type: YTN; PAM sequence: TTA
gctggaggctgattttttag

SEQ ID NO: 225124 - DNA, 20 bp, Artificial Sequence
  Description of Artificial Sequence: Synthetic oligonucleotide
  Target: LAMA2; (-) strand; PAM type: YTN; PAM sequence: TTA
aaaaattagctggaggctga

SEQ ID NO: 225125 - DNA, 20 bp, Artificial Sequence
  Description of Artificial Sequence: Synthetic oligonucleotide
  Target: LAMA2; (-) strand; PAM type: YTN; PAM sequence: TTT
aaaaaattagctggaggctg

SEQ ID NO: 225126 - DNA, 20 bp, Artificial Sequence
  Description of Artificial Sequence: Synthetic oligonucleotide
  Target: LAMA2; (-) strand; PAM type: YTN; PAM sequence: TTT
taaaaaattagctggaggct

SEQ ID NO: 225127 - DNA, 20 bp, Artificial Sequence
  Description of Artificial Sequence: Synthetic oligonucleotide
  Target: LAMA2; (-) strand; PAM type: YTN; PAM sequence: CTA
caaaaaaattttaaaaaatt

SEQ ID NO: 225128 - DNA, 20 bp, Artificial Sequence
  Description of Artificial Sequence: Synthetic oligonucleotide
  Target: LAMA2; (-) strand; PAM type: YTN; PAM sequence: CTC
tacaaaaaaattttaaaaaa

SEQ ID NO: 225129 - DNA, 20 bp, Artificial Sequence
  Description of Artificial Sequence: Synthetic oligonucleotide
  Target: LAMA2; (-) strand; PAM type: YTN; PAM sequence: CTG
tctctacaaaaaaattttaa

SEQ ID NO: 225130 - DNA, 20 bp, Artificial Sequence
  Description of Artificial Sequence: Synthetic oligonucleotide
  Target: LAMA2; (-) strand; PAM type: YTN; PAM sequence: CTG
ggcaacatagcaagaccctg

SEQ ID NO: 225131 - DNA, 20 bp, Artificial Sequence
  Description of Artificial Sequence: Synthetic oligonucleotide
  Target: LAMA2; (-) strand; PAM type: YTN; PAM sequence: TTG
agaacggcctgggcaacata

SEQ ID NO: 225132 - DNA, 20 bp, Artificial Sequence
  Description of Artificial Sequence: Synthetic oligonucleotide
  Target: LAMA2; (-) strand; PAM type: YTN; PAM sequence: TTT
gagaacggcctgggcaacat

SEQ ID NO: 225133 - DNA, 20 bp, Artificial Sequence
  Description of Artificial Sequence: Synthetic oligonucleotide
  Target: LAMA2; (-) strand; PAM type: YTN; PAM sequence: TTG
aggccaggagtttgagaacg

SEQ ID NO: 225134 - DNA, 20 bp, Artificial Sequence
  Description of Artificial Sequence: Synthetic oligonucleotide
  Target: LAMA2; (-) strand; PAM type: YTN; PAM sequence: CTT
gaggccaggagtttgagaac

SEQ ID NO: 225135 - DNA, 20 bp, Artificial Sequence
  Description of Artificial Sequence: Synthetic oligonucleotide
  Target: LAMA2; (-) strand; PAM type: YTN; PAM sequence: CTA
aggtggaaagatcacttgag

SEQ ID NO: 225136 - DNA, 20 bp, Artificial Sequence
  Description of Artificial Sequence: Synthetic oligonucleotide
  Target: LAMA2; (-) strand; PAM type: YTN; PAM sequence: TTA
gaagactaaggtggaaagat

SEQ ID NO: 225137 - DNA, 20 bp, Artificial Sequence
  Description of Artificial Sequence: Synthetic oligonucleotide
  Target: LAMA2; (-) strand; PAM type: YTN; PAM sequence: TTT
agaagactaaggtggaaaga

SEQ ID NO: 225138 - DNA, 20 bp, Artificial Sequence
  Description of Artificial Sequence: Synthetic oligonucleotide
  Target: LAMA2; (-) strand; PAM type: YTN; PAM sequence: CTT
tagaagactaaggtggaaag

SEQ ID NO: 225139 - DNA, 20 bp, Artificial Sequence
  Description of Artificial Sequence: Synthetic oligonucleotide
  Target: LAMA2; (-) strand; PAM type: YTN; PAM sequence: CTG
taactttagaagactaaggt

SEQ ID NO: 225140 - DNA, 20 bp, Artificial Sequence
  Description of Artificial Sequence: Synthetic oligonucleotide
  Target: LAMA2; (-) strand; PAM type: YTN; PAM sequence: CTC
agaagactgtaactttagaa

SEQ ID NO: 225141 - DNA, 20 bp, Artificial Sequence
  Description of Artificial Sequence: Synthetic oligonucleotide
  Target: LAMA2; (-) strand; PAM type: YTN; PAM sequence: CTG
taatctcagaagactgtaac

SEQ ID NO: 225142 - DNA, 20 bp, Artificial Sequence
  Description of Artificial Sequence: Synthetic oligonucleotide
  Target: LAMA2; (-) strand; PAM type: YTN; PAM sequence: TTC
atgtctgtaatctcagaaga

SEQ ID NO: 225143 - DNA, 20 bp, Artificial Sequence
  Description of Artificial Sequence: Synthetic oligonucleotide
  Target: LAMA2; (-) strand; PAM type: YTN; PAM sequence: CTG
ggccaggcatggtggttcat

SEQ ID NO: 225144 - DNA, 20 bp, Artificial Sequence
  Description of Artificial Sequence: Synthetic oligonucleotide
  Target: LAMA2; (-) strand; PAM type: YTN; PAM sequence: CTC
tgggccaggcatggtggttc

SEQ ID NO: 225145 - DNA, 20 bp, Artificial Sequence
  Description of Artificial Sequence: Synthetic oligonucleotide
  Target: LAMA2; (-) strand; PAM type: YTN; PAM sequence: TTC
ctctgggccaggcatggtgg

SEQ ID NO: 225146 - DNA, 20 bp, Artificial Sequence
  Description of Artificial Sequence: Synthetic oligonucleotide
  Target: LAMA2; (-) strand; PAM type: YTN; PAM sequence: TTA
aaaattcctctgggccaggc

SEQ ID NO: 225147 - DNA, 20 bp, Artificial Sequence
  Description of Artificial Sequence: Synthetic oligonucleotide
  Target: LAMA2; (-) strand; PAM type: YTN; PAM sequence: CTT
aaaaattcctctgggccagg

SEQ ID NO: 225148 - DNA, 20 bp, Artificial Sequence
  Description of Artificial Sequence: Synthetic oligonucleotide
  Target: LAMA2; (-) strand; PAM type: YTN; PAM sequence: TTA
catgggtgggccttaaaaat

SEQ ID NO: 225149 - DNA, 20 bp, Artificial Sequence
  Description of Artificial Sequence: Synthetic oligonucleotide
  Target: LAMA2; (-) strand; PAM type: YTN; PAM sequence: TTG
ttacatgggtgggccttaaa

SEQ ID NO: 225150 - DNA, 20 bp, Artificial Sequence
  Description of Artificial Sequence: Synthetic oligonucleotide
  Target: LAMA2; (-) strand; PAM type: YTN; PAM sequence: CTT
gttacatgggtgggccttaa

SEQ ID NO: 225151 - DNA, 20 bp, Artificial Sequence
  Description of Artificial Sequence: Synthetic oligonucleotide
  Target: LAMA2; (-) strand; PAM type: YTN; PAM sequence: TTC
ataatgccttgttacatggg

SEQ ID NO: 225152 - DNA, 20 bp, Artificial Sequence
  Description of Artificial Sequence: Synthetic oligonucleotide
  Target: LAMA2; (-) strand; PAM type: YTN; PAM sequence: TTT
cataatgccttgttacatgg

SEQ ID NO: 225153 - DNA, 20 bp, Artificial Sequence
  Description of Artificial Sequence: Synthetic oligonucleotide
  Target: LAMA2; (-) strand; PAM type: YTN; PAM sequence: TTA
tttcataatgccttgttaca

SEQ ID NO: 225154 - DNA, 20 bp, Artificial Sequence
  Description of Artificial Sequence: Synthetic oligonucleotide
  Target: LAMA2; (-) strand; PAM type: YTN; PAM sequence: TTT
atttcataatgccttgttac

SEQ ID NO: 225155 - DNA, 20 bp, Artificial Sequence
  Description of Artificial Sequence: Synthetic oligonucleotide
  Target: LAMA2; (-) strand; PAM type: YTN; PAM sequence: TTG
agacatgtttatttcataat

SEQ ID NO: 225156 - DNA, 20 bp, Artificial Sequence
  Description of Artificial Sequence: Synthetic oligonucleotide
  Target: LAMA2; (-) strand; PAM type: YTN; PAM sequence: CTA
gtgtgtaacaattgagacat

SEQ ID NO: 225157 - DNA, 20 bp, Artificial Sequence
  Description of Artificial Sequence: Synthetic oligonucleotide
  Target: LAMA2; (-) strand; PAM type: YTN; PAM sequence: CTA
actagtgtgtaacaattgag

SEQ ID NO: 225158 - DNA, 20 bp, Artificial Sequence
  Description of Artificial Sequence: Synthetic oligonucleotide
  Target: LAMA2; (-) strand; PAM type: YTN; PAM sequence: TTG
tctaactagtgtgtaacaat

SEQ ID NO: 225159 - DNA, 20 bp, Artificial Sequence
  Description of Artificial Sequence: Synthetic oligonucleotide
  Target: LAMA2; (-) strand; PAM type: YTN; PAM sequence: TTG
ttgtctaactagtgtgtaac

SEQ ID NO: 225160 - DNA, 20 bp, Artificial Sequence
  Description of Artificial Sequence: Synthetic oligonucleotide
  Target: LAMA2; (-) strand; PAM type: YTN; PAM sequence: CTA
aaacatgaacattgttgtct

SEQ ID NO: 225161 - DNA, 20 bp, Artificial Sequence
  Description of Artificial Sequence: Synthetic oligonucleotide
  Target: LAMA2; (-) strand; PAM type: YTN; PAM sequence: CTA
agcctaaaacatgaacattg

SEQ ID NO: 225162 - DNA, 20 bp, Artificial Sequence
  Description of Artificial Sequence: Synthetic oligonucleotide
  Target: LAMA2; (-) strand; PAM type: YTN; PAM sequence: TTC
taagcctaaaacatgaacat

SEQ ID NO: 225163 - DNA, 20 bp, Artificial Sequence
  Description of Artificial Sequence: Synthetic oligonucleotide
  Target: LAMA2; (-) strand; PAM type: YTN; PAM sequence: TTA
atgttctaagcctaaaacat

SEQ ID NO: 225164 - DNA, 20 bp, Artificial Sequence
  Description of Artificial Sequence: Synthetic oligonucleotide
  Target: LAMA2; (-) strand; PAM type: YTN; PAM sequence: CTA
ttaatgttctaagcctaaaa

SEQ ID NO: 225165 - DNA, 20 bp, Artificial Sequence
  Description of Artificial Sequence: Synthetic oligonucleotide
  Target: LAMA2; (-) strand; PAM type: YTN; PAM sequence: TTC
ctattaatgttctaagccta

SEQ ID NO: 225166 - DNA, 20 bp, Artificial Sequence
  Description of Artificial Sequence: Synthetic oligonucleotide
  Target: LAMA2; (-) strand; PAM type: YTN; PAM sequence: TTT
cctattaatgttctaagcct

SEQ ID NO: 225167 - DNA, 20 bp, Artificial Sequence
  Description of Artificial Sequence: Synthetic oligonucleotide
  Target: LAMA2; (-) strand; PAM type: YTN; PAM sequence: CTA
tttcctattaatgttctaag

SEQ ID NO: 225168 - DNA, 20 bp, Artificial Sequence
  Description of Artificial Sequence: Synthetic oligonucleotide
  Target: LAMA2; (-) strand; PAM type: YTN; PAM sequence: TTA
gtcacaagaaaactatttcc

SEQ ID NO: 225169 - DNA, 20 bp, Artificial Sequence
  Description of Artificial Sequence: Synthetic oligonucleotide
  Target: LAMA2; (-) strand; PAM type: YTN; PAM sequence: TTG
gcattagtcacaagaaaact

SEQ ID NO: 225170 - DNA, 20 bp, Artificial Sequence
  Description of Artificial Sequence: Synthetic oligonucleotide
  Target: LAMA2; (-) strand; PAM type: YTN; PAM sequence: TTT
ggcattagtcacaagaaaac

SEQ ID NO: 225171 - DNA, 20 bp, Artificial Sequence
  Description of Artificial Sequence: Synthetic oligonucleotide
  Target: LAMA2; (-) strand; PAM type: YTN; PAM sequence: CTC
agtggatttggcattagtca

SEQ ID NO: 225172 - DNA, 20 bp, Artificial Sequence
  Description of Artificial Sequence: Synthetic oligonucleotide
  Target: LAMA2; (-) strand; PAM type: YTN; PAM sequence: TTA
gactcagtggatttggcatt

SEQ ID NO: 225173 - DNA, 20 bp, Artificial Sequence
  Description of Artificial Sequence: Synthetic oligonucleotide
  Target: LAMA2; (-) strand; PAM type: YTN; PAM sequence: TTT
agactcagtggatttggcat

SEQ ID NO: 225174 - DNA, 20 bp, Artificial Sequence
  Description of Artificial Sequence: Synthetic oligonucleotide
  Target: LAMA2; (-) strand; PAM type: YTN; PAM sequence: CTT
tagactcagtggatttggca

SEQ ID NO: 225175 - DNA, 20 bp, Artificial Sequence
  Description of Artificial Sequence: Synthetic oligonucleotide
  Target: LAMA2; (-) strand; PAM type: YTN; PAM sequence: TTA
gacaagtggaaatgtaataa

SEQ ID NO: 225176 - DNA, 20 bp, Artificial Sequence
  Description of Artificial Sequence: Synthetic oligonucleotide
  Target: LAMA2; (-) strand; PAM type: YTN; PAM sequence: TTT
agacaagtggaaatgtaata

SEQ ID NO: 225177 - DNA, 20 bp, Artificial Sequence
  Description of Artificial Sequence: Synthetic oligonucleotide
  Target: LAMA2; (-) strand; PAM type: YTN; PAM sequence: CTT
tagacaagtggaaatgtaat

SEQ ID NO: 225178 - DNA, 20 bp, Artificial Sequence
  Description of Artificial Sequence: Synthetic oligonucleotide
  Target: LAMA2; (-) strand; PAM type: YTN; PAM sequence: TTC
tttagacaagtggaaatgta

SEQ ID NO: 225179 - DNA, 20 bp, Artificial Sequence
  Description of Artificial Sequence: Synthetic oligonucleotide
  Target: LAMA2; (-) strand; PAM type: YTN; PAM sequence: CTC
aaaaattctttagacaagtg

SEQ ID NO: 225180 - DNA, 20 bp, Artificial Sequence
  Description of Artificial Sequence: Synthetic oligonucleotide
  Target: LAMA2; (-) strand; PAM type: YTN; PAM sequence: TTG
gcacatgtctcaaaaattct

SEQ ID NO: 225181 - DNA, 20 bp, Artificial Sequence
  Description of Artificial Sequence: Synthetic oligonucleotide
  Target: LAMA2; (-) strand; PAM type: YTN; PAM sequence: TTT
ggcacatgtctcaaaaattc

SEQ ID NO: 225182 - DNA, 20 bp, Artificial Sequence
  Description of Artificial Sequence: Synthetic oligonucleotide
  Target: LAMA2; (-) strand; PAM type: YTN; PAM sequence: TTT
tggcacatgtctcaaaaatt

SEQ ID NO: 225183 - DNA, 20 bp, Artificial Sequence
  Description of Artificial Sequence: Synthetic oligonucleotide
  Target: LAMA2; (-) strand; PAM type: YTN; PAM sequence: CTA
aagattttggcacatgtctc

SEQ ID NO: 225184 - DNA, 20 bp, Artificial Sequence
  Description of Artificial Sequence: Synthetic oligonucleotide
  Target: LAMA2; (-) strand; PAM type: YTN; PAM sequence: TTC
taaagattttggcacatgtc

SEQ ID NO: 225185 - DNA, 20 bp, Artificial Sequence
  Description of Artificial Sequence: Synthetic oligonucleotide
  Target: LAMA2; (-) strand; PAM type: YTN; PAM sequence: CTA
atgttctaaagattttggca

SEQ ID NO: 225186 - DNA, 20 bp, Artificial Sequence
  Description of Artificial Sequence: Synthetic oligonucleotide
  Target: LAMA2; (-) strand; PAM type: YTN; PAM sequence: CTC
taatgttctaaagattttgg

SEQ ID NO: 225187 - DNA, 20 bp, Artificial Sequence
  Description of Artificial Sequence: Synthetic oligonucleotide
  Target: LAMA2; (-) strand; PAM type: YTN; PAM sequence: TTC
agctctaatgttctaaagat

SEQ ID NO: 225188 - DNA, 20 bp, Artificial Sequence
  Description of Artificial Sequence: Synthetic oligonucleotide
  Target: LAMA2; (-) strand; PAM type: YTN; PAM sequence: TTT
cagctctaatgttctaaaga

SEQ ID NO: 225189 - DNA, 20 bp, Artificial Sequence
  Description of Artificial Sequence: Synthetic oligonucleotide
  Target: LAMA2; (-) strand; PAM type: YTN; PAM sequence: CTT
tcagctctaatgttctaaag

SEQ ID NO: 225190 - DNA, 20 bp, Artificial Sequence
  Description of Artificial Sequence: Synthetic oligonucleotide
  Target: LAMA2; (-) strand; PAM type: YTN; PAM sequence: CTA
aggtatctttcagctctaat

SEQ ID NO: 225191 - DNA, 20 bp, Artificial Sequence
  Description of Artificial Sequence: Synthetic oligonucleotide
  Target: LAMA2; (-) strand; PAM type: YTN; PAM sequence: TTA
cctaaggtatctttcagctc

SEQ ID NO: 225192 - DNA, 20 bp, Artificial Sequence
  Description of Artificial Sequence: Synthetic oligonucleotide
  Target: LAMA2; (-) strand; PAM type: YTN; PAM sequence: TTT
acctaaggtatctttcagct

SEQ ID NO: 225193 - DNA, 20 bp, Artificial Sequence
  Description of Artificial Sequence: Synthetic oligonucleotide
  Target: LAMA2; (-) strand; PAM type: YTN; PAM sequence: TTG
atgagaaatttacctaaggt

SEQ ID NO: 225194 - DNA, 20 bp, Artificial Sequence
  Description of Artificial Sequence: Synthetic oligonucleotide
  Target: LAMA2; (-) strand; PAM type: YTN; PAM sequence: TTA
atagattgatgagaaattta

SEQ ID NO: 225195 - DNA, 20 bp, Artificial Sequence
  Description of Artificial Sequence: Synthetic oligonucleotide
  Target: LAMA2; (-) strand; PAM type: YTN; PAM sequence: TTT
aatagattgatgagaaattt

SEQ ID NO: 225196 - DNA, 20 bp, Artificial Sequence
  Description of Artificial Sequence: Synthetic oligonucleotide
  Target: LAMA2; (-) strand; PAM type: YTN; PAM sequence: CTT
taatagattgatgagaaatt

SEQ ID NO: 225197 - DNA, 20 bp, Artificial Sequence
  Description of Artificial Sequence: Synthetic oligonucleotide
  Target: LAMA2; (-) strand; PAM type: YTN; PAM sequence: TTG
aatatcctttaatagattga

SEQ ID NO: 225198 - DNA, 20 bp, Artificial Sequence
  Description of Artificial Sequence: Synthetic oligonucleotide
  Target: LAMA2; (-) strand; PAM type: YTN; PAM sequence: CTT
gaatatcctttaatagattg

SEQ ID NO: 225199 - DNA, 20 bp, Artificial Sequence
  Description of Artificial Sequence: Synthetic oligonucleotide
  Target: LAMA2; (-) strand; PAM type: YTN; PAM sequence: TTG
ggggcttgaatatcctttaa

SEQ ID NO: 225200 - DNA, 20 bp, Artificial Sequence
  Description of Artificial Sequence: Synthetic oligonucleotide
  Target: LAMA2; (-) strand; PAM type: YTN; PAM sequence: CTG
aaattgggggcttgaatatc

SEQ ID NO: 225201 - DNA, 20 bp, Artificial Sequence
  Description of Artificial Sequence: Synthetic oligonucleotide
  Target: LAMA2; (-) strand; PAM type: YTN; PAM sequence: TTG
gatacagaggctgaaattgg

SEQ ID NO: 225202 - DNA, 20 bp, Artificial Sequence
  Description of Artificial Sequence: Synthetic oligonucleotide
  Target: LAMA2; (-) strand; PAM type: YTN; PAM sequence: TTT
ggatacagaggctgaaattg

SEQ ID NO: 225203 - DNA, 20 bp, Artificial Sequence
  Description of Artificial Sequence: Synthetic oligonucleotide
  Target: LAMA2; (-) strand; PAM type: YTN; PAM sequence: TTG
aagtttggatacagaggctg

SEQ ID NO: 225204 - DNA, 20 bp, Artificial Sequence
  Description of Artificial Sequence: Synthetic oligonucleotide
  Target: LAMA2; (-) strand; PAM type: YTN; PAM sequence: CTC
cagtgatgatatgaacatag

SEQ ID NO: 225205 - DNA, 20 bp, Artificial Sequence
  Description of Artificial Sequence: Synthetic oligonucleotide
  Target: LAMA2; (-) strand; PAM type: YTN; PAM sequence: CTC
tccagtgatgatatgaacat

SEQ ID NO: 225206 - DNA, 20 bp, Artificial Sequence
  Description of Artificial Sequence: Synthetic oligonucleotide
  Target: LAMA2; (-) strand; PAM type: YTN; PAM sequence: TTA
aagaggccataaggaaaggc

SEQ ID NO: 225207 - DNA, 20 bp, Artificial Sequence
  Description of Artificial Sequence: Synthetic oligonucleotide
  Target: LAMA2; (-) strand; PAM type: YTN; PAM sequence: TTA
agattaaagaggccataagg

SEQ ID NO: 225208 - DNA, 20 bp, Artificial Sequence
  Description of Artificial Sequence: Synthetic oligonucleotide
  Target: LAMA2; (-) strand; PAM type: YTN; PAM sequence: CTG
gagtaacaaacaaagccaaa

SEQ ID NO: 225209 - DNA, 20 bp, Artificial Sequence
  Description of Artificial Sequence: Synthetic oligonucleotide
  Target: LAMA2; (-) strand; PAM type: YTN; PAM sequence: TTG
aaatcaatgtggagtggagg

SEQ ID NO: 225210 - DNA, 20 bp, Artificial Sequence
  Description of Artificial Sequence: Synthetic oligonucleotide
  Target: LAMA2; (-) strand; PAM type: YTN; PAM sequence: CTT
gaaatcaatgtggagtggag

SEQ ID NO: 225211 - DNA, 20 bp, Artificial Sequence
  Description of Artificial Sequence: Synthetic oligonucleotide
  Target: LAMA2; (-) strand; PAM type: YTN; PAM sequence: CTC
ttgaaatcaatgtggagtgg

SEQ ID NO: 225212 - DNA, 20 bp, Artificial Sequence
  Description of Artificial Sequence: Synthetic oligonucleotide
  Target: LAMA2; (-) strand; PAM type: YTN; PAM sequence: TTG
atctcttgaaatcaatgtgg

SEQ ID NO: 225213 - DNA, 20 bp, Artificial Sequence
  Description of Artificial Sequence: Synthetic oligonucleotide
  Target: LAMA2; (-) strand; PAM type: YTN; PAM sequence: TTG
ttgatctcttgaaatcaatg

SEQ ID NO: 225214 - DNA, 20 bp, Artificial Sequence
  Description of Artificial Sequence: Synthetic oligonucleotide
  Target: LAMA2; (-) strand; PAM type: YTN; PAM sequence: TTT
gttgatctcttgaaatcaat

SEQ ID NO: 225215 - DNA, 20 bp, Artificial Sequence
  Description of Artificial Sequence: Synthetic oligonucleotide
  Target: LAMA2; (-) strand; PAM type: YTN; PAM sequence: CTA
acatttgttgatctcttgaa

SEQ ID NO: 225216 - DNA, 20 bp, Artificial Sequence
  Description of Artificial Sequence: Synthetic oligonucleotide
  Target: LAMA2; (-) strand; PAM type: YTN; PAM sequence: CTC
taacatttgttgatctcttg

SEQ ID NO: 225217 - DNA, 20 bp, Artificial Sequence
  Description of Artificial Sequence: Synthetic oligonucleotide
  Target: LAMA2; (-) strand; PAM type: YTN; PAM sequence: TTC
tctaacatttgttgatctct

SEQ ID NO: 225218 - DNA, 20 bp, Artificial Sequence
  Description of Artificial Sequence: Synthetic oligonucleotide
  Target: LAMA2; (-) strand; PAM type: YTN; PAM sequence: TTG
aacccagttctctaacattt

SEQ ID NO: 225219 - DNA, 20 bp, Artificial Sequence
  Description of Artificial Sequence: Synthetic oligonucleotide
  Target: LAMA2; (-) strand; PAM type: YTN; PAM sequence: TTG
gtagtagttgaacccagttc

SEQ ID NO: 225220 - DNA, 20 bp, Artificial Sequence
  Description of Artificial Sequence: Synthetic oligonucleotide
  Target: LAMA2; (-) strand; PAM type: YTN; PAM sequence: CTT
ggtagtagttgaacccagtt

SEQ ID NO: 225221 - DNA, 20 bp, Artificial Sequence
  Description of Artificial Sequence: Synthetic oligonucleotide
  Target: LAMA2; (-) strand; PAM type: YTN; PAM sequence: TTC
ttggtagtagttgaacccag

SEQ ID NO: 225222 - DNA, 20 bp, Artificial Sequence
  Description of Artificial Sequence: Synthetic oligonucleotide
  Target: LAMA2; (-) strand; PAM type: YTN; PAM sequence: TTT
cttggtagtagttgaaccca

SEQ ID NO: 225223 - DNA, 20 bp, Artificial Sequence
  Description of Artificial Sequence: Synthetic oligonucleotide
  Target: LAMA2; (-) strand; PAM type: YTN; PAM sequence: CTT
tcttggtagtagttgaaccc

SEQ ID NO: 225224 - DNA, 20 bp, Artificial Sequence
  Description of Artificial Sequence: Synthetic oligonucleotide
  Target: LAMA2; (-) strand; PAM type: YTN; PAM sequence: CTC
tttcttggtagtagttgaac

SEQ ID NO: 225225 - DNA, 20 bp, Artificial Sequence
  Description of Artificial Sequence: Synthetic oligonucleotide
  Target: LAMA2; (-) strand; PAM type: YTN; PAM sequence: TTA
agctctttcttggtagtagt

SEQ ID NO: 225226 - DNA, 20 bp, Artificial Sequence
  Description of Artificial Sequence: Synthetic oligonucleotide
  Target: LAMA2; (-) strand; PAM type: YTN; PAM sequence: TTC
agggttaagctctttcttgg

SEQ ID NO: 225227 - DNA, 20 bp, Artificial Sequence
  Description of Artificial Sequence: Synthetic oligonucleotide
  Target: LAMA2; (-) strand; PAM type: YTN; PAM sequence: TTT
cagggttaagctctttcttg

SEQ ID NO: 225228 - DNA, 20 bp, Artificial Sequence
  Description of Artificial Sequence: Synthetic oligonucleotide
  Target: LAMA2; (-) strand; PAM type: YTN; PAM sequence: CTA
ggtttcagggttaagctctt

SEQ ID NO: 225229 - DNA, 20 bp, Artificial Sequence
  Description of Artificial Sequence: Synthetic oligonucleotide
  Target: LAMA2; (-) strand; PAM type: YTN; PAM sequence: CTA
ggatgctaggtttcagggtt

SEQ ID NO: 225230 - DNA, 20 bp, Artificial Sequence
  Description of Artificial Sequence: Synthetic oligonucleotide
  Target: LAMA2; (-) strand; PAM type: YTN; PAM sequence: TTG
ggtgcaggcctaggatgcta

SEQ ID NO: 225231 - DNA, 20 bp, Artificial Sequence
  Description of Artificial Sequence: Synthetic oligonucleotide
  Target: LAMA2; (-) strand; PAM type: YTN; PAM sequence: TTT
gggtgcaggcctaggatgct

SEQ ID NO: 225232 - DNA, 20 bp, Artificial Sequence
  Description of Artificial Sequence: Synthetic oligonucleotide
  Target: LAMA2; (-) strand; PAM type: YTN; PAM sequence: CTT
tgggtgcaggcctaggatgc

SEQ ID NO: 225233 - DNA, 20 bp, Artificial Sequence
  Description of Artificial Sequence: Synthetic oligonucleotide
  Target: LAMA2; (-) strand; PAM type: YTN; PAM sequence: CTC
cctttgggtgcaggcctagg

SEQ ID NO: 225234 - DNA, 20 bp, Artificial Sequence
  Description of Artificial Sequence: Synthetic oligonucleotide
  Target: LAMA2; (-) strand; PAM type: YTN; PAM sequence: TTC
tccctttgggtgcaggccta

SEQ ID NO: 225235 - DNA, 20 bp, Artificial Sequence
  Description of Artificial Sequence: Synthetic oligonucleotide
  Target: LAMA2; (-) strand; PAM type: YTN; PAM sequence: CTT
ctccctttgggtgcaggcct

SEQ ID NO: 225236 - DNA, 20 bp, Artificial Sequence
  Description of Artificial Sequence: Synthetic oligonucleotide
  Target: LAMA2; (-) strand; PAM type: YTN; PAM sequence: CTC
ttctccctttgggtgcaggc

SEQ ID NO: 225237 - DNA, 20 bp, Artificial Sequence
  Description of Artificial Sequence: Synthetic oligonucleotide
  Target: LAMA2; (-) strand; PAM type: YTN; PAM sequence: TTC
tcttctccctttgggtgcag

SEQ ID NO: 225238 - DNA, 20 bp, Artificial Sequence
  Description of Artificial Sequence: Synthetic oligonucleotide
  Target: LAMA2; (-) strand; PAM type: YTN; PAM sequence: CTT
ctcttctccctttgggtgca

SEQ ID NO: 225239 - DNA, 20 bp, Artificial Sequence
  Description of Artificial Sequence: Synthetic oligonucleotide
  Target: LAMA2; (-) strand; PAM type: YTN; PAM sequence: CTC
agaataagcttctcttctcc

SEQ ID NO: 225240 - DNA, 20 bp, Artificial Sequence
  Description of Artificial Sequence: Synthetic oligonucleotide
  Target: LAMA2; (-) strand; PAM type: YTN; PAM sequence: CTC
atagctcagaataagcttct

SEQ ID NO: 225241 - DNA, 20 bp, Artificial Sequence
  Description of Artificial Sequence: Synthetic oligonucleotide
  Target: LAMA2; (-) strand; PAM type: YTN; PAM sequence: TTA
tctcatagctcagaataagc

SEQ ID NO: 225242 - DNA, 20 bp, Artificial Sequence
  Description of Artificial Sequence: Synthetic oligonucleotide
  Target: LAMA2; (-) strand; PAM type: YTN; PAM sequence: TTA
cgattatctcatagctcaga

SEQ ID NO: 225243 - DNA, 20 bp, Artificial Sequence
  Description of Artificial Sequence: Synthetic oligonucleotide
  Target: LAMA2; (-) strand; PAM type: YTN; PAM sequence: CTT
acgattatctcatagctcag

SEQ ID NO: 225244 - DNA, 20 bp, Artificial Sequence
  Description of Artificial Sequence: Synthetic oligonucleotide
  Target: LAMA2; (-) strand; PAM type: YTN; PAM sequence: TTG
ataccttacgattatctcat

SEQ ID NO: 225245 - DNA, 20 bp, Artificial Sequence
  Description of Artificial Sequence: Synthetic oligonucleotide
  Target: LAMA2; (-) strand; PAM type: YTN; PAM sequence: CTT
gataccttacgattatctca

SEQ ID NO: 225246 - DNA, 20 bp, Artificial Sequence
  Description of Artificial Sequence: Synthetic oligonucleotide
  Target: LAMA2; (-) strand; PAM type: YTN; PAM sequence: CTG
agacttgataccttacgatt

SEQ ID NO: 225247 - DNA, 20 bp, Artificial Sequence
  Description of Artificial Sequence: Synthetic oligonucleotide
  Target: LAMA2; (-) strand; PAM type: YTN; PAM sequence: TTG
ccaggccctgagacttgata

SEQ ID NO: 225248 - DNA, 20 bp, Artificial Sequence
  Description of Artificial Sequence: Synthetic oligonucleotide
  Target: LAMA2; (-) strand; PAM type: YTN; PAM sequence: TTT
gccaggccctgagacttgat

SEQ ID NO: 225249 - DNA, 20 bp, Artificial Sequence
  Description of Artificial Sequence: Synthetic oligonucleotide
  Target: LAMA2; (-) strand; PAM type: YTN; PAM sequence: CTT
tgccaggccctgagacttga

SEQ ID NO: 225250 - DNA, 20 bp, Artificial Sequence
  Description of Artificial Sequence: Synthetic oligonucleotide
  Target: LAMA2; (-) strand; PAM type: YTN; PAM sequence: CTC
ctttgccaggccctgagact

SEQ ID NO: 225251 - DNA, 20 bp, Artificial Sequence
  Description of Artificial Sequence: Synthetic oligonucleotide
  Target: LAMA2; (-) strand; PAM type: YTN; PAM sequence: TTA
tccctcctttgccaggccct

SEQ ID NO: 225252 - DNA, 20 bp, Artificial Sequence
  Description of Artificial Sequence: Synthetic oligonucleotide
  Target: LAMA2; (-) strand; PAM type: YTN; PAM sequence: CTC
cattatccctcctttgccag

SEQ ID NO: 225253 - DNA, 20 bp, Artificial Sequence
  Description of Artificial Sequence: Synthetic oligonucleotide
  Target: LAMA2; (-) strand; PAM type: YTN; PAM sequence: CTA
tatcctccattatccctcct

SEQ ID NO: 225254 - DNA, 20 bp, Artificial Sequence
  Description of Artificial Sequence: Synthetic oligonucleotide
  Target: LAMA2; (-) strand; PAM type: YTN; PAM sequence: TTG
cctatatcctccattatccc

SEQ ID NO: 225255 - DNA, 20 bp, Artificial Sequence
  Description of Artificial Sequence: Synthetic oligonucleotide
  Target: LAMA2; (-) strand; PAM type: YTN; PAM sequence: CTT
gcctatatcctccattatcc

SEQ ID NO: 225256 - DNA, 20 bp, Artificial Sequence
  Description of Artificial Sequence: Synthetic oligonucleotide
  Target: LAMA2; (-) strand; PAM type: YTN; PAM sequence: TTA
tcttgcctatatcctccatt

SEQ ID NO: 225257 - DNA, 20 bp, Artificial Sequence
  Description of Artificial Sequence: Synthetic oligonucleotide
  Target: LAMA2; (-) strand; PAM type: YTN; PAM sequence: TTA
ttatcttgcctatatcctcc

SEQ ID NO: 225258 - DNA, 20 bp, Artificial Sequence
  Description of Artificial Sequence: Synthetic oligonucleotide
  Target: LAMA2; (-) strand; PAM type: YTN; PAM sequence: CTG
gataacgacatacccagtca

SEQ ID NO: 225259 - DNA, 20 bp, Artificial Sequence
  Description of Artificial Sequence: Synthetic oligonucleotide
  Target: LAMA2; (-) strand; PAM type: YTN; PAM sequence: TTG
cagcctggataacgacatac

SEQ ID NO: 225260 - DNA, 20 bp, Artificial Sequence
  Description of Artificial Sequence: Synthetic oligonucleotide
  Target: LAMA2; (-) strand; PAM type: YTN; PAM sequence: TTT
gcagcctggataacgacata

SEQ ID NO: 225261 - DNA, 20 bp, Artificial Sequence
  Description of Artificial Sequence: Synthetic oligonucleotide
  Target: LAMA2; (-) strand; PAM type: YTN; PAM sequence: CTA
tttgcagcctggataacgac

SEQ ID NO: 225262 - DNA, 20 bp, Artificial Sequence
  Description of Artificial Sequence: Synthetic oligonucleotide
  Target: LAMA2; (-) strand; PAM type: YTN; PAM sequence: TTC
tatttgcagcctggataacg

SEQ ID NO: 225263 - DNA, 20 bp, Artificial Sequence
  Description of Artificial Sequence: Synthetic oligonucleotide
  Target: LAMA2; (-) strand; PAM type: YTN; PAM sequence: CTT
ctatttgcagcctggataac

SEQ ID NO: 225264 - DNA, 20 bp, Artificial Sequence
  Description of Artificial Sequence: Synthetic oligonucleotide
  Target: LAMA2; (-) strand; PAM type: YTN; PAM sequence: CTC
cttctatttgcagcctggat

SEQ ID NO: 225265 - DNA, 20 bp, Artificial Sequence
  Description of Artificial Sequence: Synthetic oligonucleotide
  Target: LAMA2; (-) strand; PAM type: YTN; PAM sequence: CTC
aaagcctccttctatttgca

SEQ ID NO: 225266 - DNA, 20 bp, Artificial Sequence
  Description of Artificial Sequence: Synthetic oligonucleotide
  Target: LAMA2; (-) strand; PAM type: YTN; PAM sequence: TTG
ctcaaagcctccttctattt

SEQ ID NO: 225267 - DNA, 20 bp, Artificial Sequence
  Description of Artificial Sequence: Synthetic oligonucleotide
  Target: LAMA2; (-) strand; PAM type: YTN; PAM sequence: TTT
gctcaaagcctccttctatt

SEQ ID NO: 225268 - DNA, 20 bp, Artificial Sequence
  Description of Artificial Sequence: Synthetic oligonucleotide
  Target: LAMA2; (-) strand; PAM type: YTN; PAM sequence: TTT
tgctcaaagcctccttctat

SEQ ID NO: 225269 - DNA, 20 bp, Artificial Sequence
  Description of Artificial Sequence: Synthetic oligonucleotide
  Target: LAMA2; (-) strand; PAM type: YTN; PAM sequence: CTT
ttgctcaaagcctccttcta

SEQ ID NO: 225270 - DNA, 20 bp, Artificial Sequence
  Description of Artificial Sequence: Synthetic oligonucleotide
  Target: LAMA2; (-) strand; PAM type: YTN; PAM sequence: TTA
aggcttttgctcaaagcctc

SEQ ID NO: 225271 - DNA, 20 bp, Artificial Sequence
  Description of Artificial Sequence: Synthetic oligonucleotide
  Target: LAMA2; (-) strand; PAM type: YTN; PAM sequence: TTT
aaggcttttgctcaaagcct

SEQ ID NO: 225272 - DNA, 20 bp, Artificial Sequence
  Description of Artificial Sequence: Synthetic oligonucleotide
  Target: LAMA2; (-) strand; PAM type: YTN; PAM sequence: TTT
taaggcttttgctcaaagcc

SEQ ID NO: 225273 - DNA, 20 bp, Artificial Sequence
  Description of Artificial Sequence: Synthetic oligonucleotide
  Target: LAMA2; (-) strand; PAM type: YTN; PAM sequence: CTG
ttttaaggcttttgctcaaa

SEQ ID NO: 225274 - DNA, 20 bp, Artificial Sequence
  Description of Artificial Sequence: Synthetic oligonucleotide
  Target: LAMA2; (-) strand; PAM type: YTN; PAM sequence: CTA
aaataaaactgttttaaggc

SEQ ID NO: 225275 - DNA, 20 bp, Artificial Sequence
  Description of Artificial Sequence: Synthetic oligonucleotide
  Target: LAMA2; (-) strand; PAM type: YTN; PAM sequence: TTC
taaaataaaactgttttaag

SEQ ID NO: 225276 - DNA, 20 bp, Artificial Sequence
  Description of Artificial Sequence: Synthetic oligonucleotide
  Target: LAMA2; (-) strand; PAM type: YTN; PAM sequence: CTT
ctaaaataaaactgttttaa

SEQ ID NO: 225277 - DNA, 20 bp, Artificial Sequence
  Description of Artificial Sequence: Synthetic oligonucleotide
  Target: LAMA2; (-) strand; PAM type: YTN; PAM sequence: TTG
cccttctaaaataaaactgt

SEQ ID NO: 225278 - DNA, 20 bp, Artificial Sequence
  Description of Artificial Sequence: Synthetic oligonucleotide
  Target: LAMA2; (-) strand; PAM type: YTN; PAM sequence: TTG
atgatagaaaattgcccttc

SEQ ID NO: 225279 - DNA, 20 bp, Artificial Sequence
  Description of Artificial Sequence: Synthetic oligonucleotide
  Target: LAMA2; (-) strand; PAM type: YTN; PAM sequence: TTG
gcattgatgatagaaaattg

SEQ ID NO: 225280 - DNA, 20 bp, Artificial Sequence
  Description of Artificial Sequence: Synthetic oligonucleotide
  Target: LAMA2; (-) strand; PAM type: YTN; PAM sequence: CTT
ggcattgatgatagaaaatt

SEQ ID NO: 225281 - DNA, 20 bp, Artificial Sequence
  Description of Artificial Sequence: Synthetic oligonucleotide
  Target: LAMA2; (-) strand; PAM type: YTN; PAM sequence: CTC
ttggcattgatgatagaaaa

SEQ ID NO: 225282 - DNA, 20 bp, Artificial Sequence
  Description of Artificial Sequence: Synthetic oligonucleotide
  Target: LAMA2; (-) strand; PAM type: YTN; PAM sequence: TTC
tcttggcattgatgatagaa

SEQ ID NO: 225283 - DNA, 20 bp, Artificial Sequence
  Description of Artificial Sequence: Synthetic oligonucleotide
  Target: LAMA2; (-) strand; PAM type: YTN; PAM sequence: CTT
ctcttggcattgatgataga

SEQ ID NO: 225284 - DNA, 20 bp, Artificial Sequence
  Description of Artificial Sequence: Synthetic oligonucleotide
  Target: LAMA2; (-) strand; PAM type: YTN; PAM sequence: CTG
agccttctcttggcattgat

SEQ ID NO: 225285 - DNA, 20 bp, Artificial Sequence
  Description of Artificial Sequence: Synthetic oligonucleotide
  Target: LAMA2; (-) strand; PAM type: YTN; PAM sequence: CTG
ctgagccttctcttggcatt

SEQ ID NO: 225286 - DNA, 20 bp, Artificial Sequence
  Description of Artificial Sequence: Synthetic oligonucleotide
  Target: LAMA2; (-) strand; PAM type: YTN; PAM sequence: CTC
aaagcaggacaaagtagggt

SEQ ID NO: 225287 - DNA, 20 bp, Artificial Sequence
  Description of Artificial Sequence: Synthetic oligonucleotide
  Target: LAMA2; (-) strand; PAM type: YTN; PAM sequence: TTG
ctcaaagcaggacaaagtag

SEQ ID NO: 225288 - DNA, 20 bp, Artificial Sequence
  Description of Artificial Sequence: Synthetic oligonucleotide
  Target: LAMA2; (-) strand; PAM type: YTN; PAM sequence: TTT
gctcaaagcaggacaaagta

SEQ ID NO: 225289 - DNA, 20 bp, Artificial Sequence
  Description of Artificial Sequence: Synthetic oligonucleotide
  Target: LAMA2; (-) strand; PAM type: YTN; PAM sequence: CTC
agtatcatttgctcaaagca

SEQ ID NO: 225290 - DNA, 20 bp, Artificial Sequence
  Description of Artificial Sequence: Synthetic oligonucleotide
  Target: LAMA2; (-) strand; PAM type: YTN; PAM sequence: TTA
gggagctcagtatcatttgc

SEQ ID NO: 225291 - DNA, 20 bp, Artificial Sequence
  Description of Artificial Sequence: Synthetic oligonucleotide
  Target: LAMA2; (-) strand; PAM type: YTN; PAM sequence: CTA
ttagggagctcagtatcatt

SEQ ID NO: 225292 - DNA, 20 bp, Artificial Sequence
  Description of Artificial Sequence: Synthetic oligonucleotide
  Target: LAMA2; (-) strand; PAM type: YTN; PAM sequence: CTC
ctattagggagctcagtatc

SEQ ID NO: 225293 - DNA, 20 bp, Artificial Sequence
  Description of Artificial Sequence: Synthetic oligonucleotide
  Target: LAMA2; (-) strand; PAM type: YTN; PAM sequence: CTG
caactcctattagggagctc

SEQ ID NO: 225294 - DNA, 20 bp, Artificial Sequence
  Description of Artificial Sequence: Synthetic oligonucleotide
  Target: LAMA2; (-) strand; PAM type: YTN; PAM sequence: TTC
ataccctgcaactcctatta

SEQ ID NO: 225295 - DNA, 20 bp, Artificial Sequence
  Description of Artificial Sequence: Synthetic oligonucleotide
  Target: LAMA2; (-) strand; PAM type: YTN; PAM sequence: CTT
cataccctgcaactcctatt

SEQ ID NO: 225296 - DNA, 20 bp, Artificial Sequence
  Description of Artificial Sequence: Synthetic oligonucleotide
  Target: LAMA2; (-) strand; PAM type: YTN; PAM sequence: TTG
cttcataccctgcaactcct

SEQ ID NO: 225297 - DNA, 20 bp, Artificial Sequence
  Description of Artificial Sequence: Synthetic oligonucleotide
  Target: LAMA2; (-) strand; PAM type: YTN; PAM sequence: CTG
ttgcttcataccctgcaact

SEQ ID NO: 225298 - DNA, 20 bp, Artificial Sequence
  Description of Artificial Sequence: Synthetic oligonucleotide
  Target: LAMA2; (-) strand; PAM type: YTN; PAM sequence: CTG
cagtctgttgcttcataccc

SEQ ID NO: 225299 - DNA, 20 bp, Artificial Sequence
  Description of Artificial Sequence: Synthetic oligonucleotide
  Target: LAMA2; (-) strand; PAM type: YTN; PAM sequence: CTC
aaagtaatggaggcccctgc

SEQ ID NO: 225300 - DNA, 20 bp, Artificial Sequence
  Description of Artificial Sequence: Synthetic oligonucleotide
  Target: LAMA2; (-) strand; PAM type: YTN; PAM sequence: TTG
gcctcaaagtaatggaggcc

SEQ ID NO: 225301 - DNA, 20 bp, Artificial Sequence
  Description of Artificial Sequence: Synthetic oligonucleotide
  Target: LAMA2; (-) strand; PAM type: YTN; PAM sequence: CTG
tggttggcctcaaagtaatg

SEQ ID NO: 225302 - DNA, 20 bp, Artificial Sequence
  Description of Artificial Sequence: Synthetic oligonucleotide
  Target: LAMA2; (-) strand; PAM type: YTN; PAM sequence: CTA
ccctgtggttggcctcaaag

SEQ ID NO: 225303 - DNA, 20 bp, Artificial Sequence
  Description of Artificial Sequence: Synthetic oligonucleotide
  Target: LAMA2; (-) strand; PAM type: YTN; PAM sequence: CTC
taccctgtggttggcctcaa

SEQ ID NO: 225304 - DNA, 20 bp, Artificial Sequence
  Description of Artificial Sequence: Synthetic oligonucleotide
  Target: LAMA2; (-) strand; PAM type: YTN; PAM sequence: TTC
ccacaagagctctaccctgt

SEQ ID NO: 225305 - DNA, 20 bp, Artificial Sequence
  Description of Artificial Sequence: Synthetic oligonucleotide
  Target: LAMA2; (-) strand; PAM type: YTN; PAM sequence: CTG
ttcccacaagagctctaccc

SEQ ID NO: 225306 - DNA, 20 bp, Artificial Sequence
  Description of Artificial Sequence: Synthetic oligonucleotide
  Target: LAMA2; (-) strand; PAM type: YTN; PAM sequence: TTA
tgtagctgttcccacaagag

SEQ ID NO: 225307 - DNA, 20 bp, Artificial Sequence
  Description of Artificial Sequence: Synthetic oligonucleotide
  Target: LAMA2; (-) strand; PAM type: YTN; PAM sequence: CTG
gacatgcatgttatgtagct

SEQ ID NO: 225308 - DNA, 20 bp, Artificial Sequence
  Description of Artificial Sequence: Synthetic oligonucleotide
  Target: LAMA2; (-) strand; PAM type: YTN; PAM sequence: CTG
ctggacatgcatgttatgta

SEQ ID NO: 225309 - DNA, 20 bp, Artificial Sequence
  Description of Artificial Sequence: Synthetic oligonucleotide
  Target: LAMA2; (-) strand; PAM type: YTN; PAM sequence: CTG
gggcactgctggacatgcat

SEQ ID NO: 225310 - DNA, 20 bp, Artificial Sequence
  Description of Artificial Sequence: Synthetic oligonucleotide
  Target: LAMA2; (-) strand; PAM type: YTN; PAM sequence: TTC
cctggggcactgctggacat

SEQ ID NO: 225311 - DNA, 20 bp, Artificial Sequence
  Description of Artificial Sequence: Synthetic oligonucleotide
  Target: LAMA2; (-) strand; PAM type: YTN; PAM sequence: TTG
gttccctggggcactgctgg

SEQ ID NO: 225312 - DNA, 20 bp, Artificial Sequence
  Description of Artificial Sequence: Synthetic oligonucleotide
  Target: LAMA2; (-) strand; PAM type: YTN; PAM sequence: CTT
ggttccctggggcactgctg

SEQ ID NO: 225313 - DNA, 20 bp, Artificial Sequence
  Description of Artificial Sequence: Synthetic oligonucleotide
  Target: LAMA2; (-) strand; PAM type: YTN; PAM sequence: CTC
gatggcttggttccctgggg

SEQ ID NO: 225314 - DNA, 20 bp, Artificial Sequence
  Description of Artificial Sequence: Synthetic oligonucleotide
  Target: LAMA2; (-) strand; PAM type: YTN; PAM sequence: CTC
tcgatggcttggttccctgg
